United States Patent Application Publication US 2013/0129668 A1 - sequence listing, part 8

SEQ ID NO: 119440 - DNA, 122 bp, Homo sapiens
cagctctttcccatcccacaaggccatatttcaggctatcacatggggagaaaccttggacgatacccggctttccggggcagaggtccctgaggctttccgcagtgcattgtgcccctggt

SEQ ID NO: 119441 - DNA, 122 bp, Homo sapiens
ttgtcctccaccttgccctgcctcagggactccgggatggtgatgtgggtccaggcaatgcggtcgtccatggagaaggctctctgcgggagacaagagggagaggccccaggcatcaggga

SEQ ID NO: 119442 - DNA, 122 bp, Homo sapiens
aagaaaagaacatggtctagactgaagtaccaactaaatcatctcctttcaaattatcaccgacaccatcatggattcaagcaccgcacacagtccggtgtttctggtatttcctccagaaa

SEQ ID NO: 119443 - DNA, 122 bp, Homo sapiens
tgtctgtgtgtggagaggagggtcccccccacccgcccgggggtcaggaggctcgaggtccgcctttgtcagtcccaccgggagcagccagaaagggctgttactactgaggggaagccccg

SEQ ID NO: 119444 - DNA, 122 bp, Homo sapiens
tcccccatcttcggaggcggctgcggctgcagctgcttcatcgggagcggctggagacggcgacgcgagccccctccccgcagcagggcgacgcgggggaggggaggggaggaggccgcagg

SEQ ID NO: 119445 - DNA, 122 bp, Homo sapiens
tttttaaaaaataacatttcaaggtaacttacgggcgcactttaagaagcgaggactcagcgtgtccctggcggcttcctccttgaagctctggtcttcagggctgtgggaggcatccaatc

SEQ ID NO: 119446 - DNA, 122 bp, Homo sapiens
ctggcatttcaaatccaaccccatttttcccttaatctttcccctctgagcaaatggtatcgacatgaacaagccatgttgatttgatcaagacactcaaccatggttaaaagagtctttac

SEQ ID NO: 119447 - DNA, 122 bp, Homo sapiens
gcaatagcaccaggaagccttctcccctggtgccctgggtcggagccctgccttcacgcacggttactttctgtgaagcaggcagagtgaaaggcaggtctgatggacacttggaagctaga

SEQ ID NO: 119448 - DNA, 122 bp, Homo sapiens
gaagtacagagatgagaagcagttatttcttgcccaggaggccgtggctgggcggttggccgtggccccaggctcttcctgggggtgcctgctaacaaggcactgccctggatggactcaaa

SEQ ID NO: 119449 - DNA, 122 bp, Homo sapiens
ggtccgcattgcctgtggctgcctgtgcagaagtggtatcatccgaaatggccacggtggcgtctgcatgttggctgtggatggggcttctgtgtggttctgggagacagagctgggtggaa

SEQ ID NO: 119450 - DNA, 122 bp, Homo sapiens
ttggggaggcctaattacccccagttgagagttgctagtctaaaatagtgtctgacacaccgtgggtcctcactcagcaaatacttgttgaaagaaggcagggatggaggggagagggatca

SEQ ID NO: 119451 - DNA, 122 bp, Homo sapiens
tgacattcctgagcccaaagagtaaacaaaggataggggtatagttgatgggcatttaaacggcaagcctgagaaaggaggccgattctttaataggattctgatctttatagtagaatcct

SEQ ID NO: 119452 - DNA, 122 bp, Homo sapiens
cggcccgtgtagctgaagtccagcagcagctgcagcatgtcgggaggcactccgtgcaggcgcacccgctcggcgcggctctcgcgcagctgccccgcgaacatggcgcggaagtaggggct

SEQ ID NO: 119453 - DNA, 122 bp, Homo sapiens
tcatgactggcttagcgccatctccttggtgatgagtgtgttcactcagatctggttgttcgcaagtgtgtggcccctcctcaccccttgctcccactctcacgatgtggtgagcctgctcc

SEQ ID NO: 119454 - DNA, 122 bp, Homo sapiens
cgcccttacagtgcctcctcctcgaggccaaatgcccggccgctcagcgctcgtggcagccgcgtagttgcagagacacggtctgctttccaggcttgggaagtcccagcacttaactctgc

SEQ ID NO: 119455 - DNA, 122 bp, Homo sapiens
ataaaatgcaaatagaaaagaaatccacagacgggtgtcagcgcccaagaacaatccagtcggagcttcgaggacgagagactggagtcgcttctttcgcaccaagacgaagacaagattca

SEQ ID NO: 119456 - DNA, 122 bp, Homo sapiens
tgctggtccacaccatactgtcccaagcttctcaggctgcggtgcagacgaagaaatcatcgctatgcatgctggccttgggatgggggcgcaaagcccctggacgcgccccgcctagtggg

SEQ ID NO: 119457 - DNA, 122 bp, Homo sapiens
tctcagagcgctgccgccccctcatgccggtcgcgcaaagaacacagcttttaaaaaacacgtgccttctgcccatataggtctgaaagtgatgaggaaagtaatgcttcgcctattagcga

SEQ ID NO: 119458 - DNA, 122 bp, Homo sapiens
ctcctcagcccttggacggtcgatgggactgggtgccgtggagcagggaggctcgggccacgcaggagcccacagcgggtcgggggagggtcaggcatggcgggctgcaggtcccaagccct

SEQ ID NO: 119459 - DNA, 122 bp, Homo sapiens
caaggcctgacccttttctctgggcctccaggagaggctgaggagggggctggagtccggcgctcactagggctgctaagggccaggagttcgggaacaggaggcccctggcctggtggtct

SEQ ID NO: 119460 - DNA, 122 bp, Homo sapiens
gggccggcgctgtaggtggtcagggacgtccctctcctttctaccacctcttttcaggtacgcaaaaaacactccagggaggagggaggcatgaagcggggcctggtgatgtaacccagacc

SEQ ID NO: 119461 - DNA, 122 bp, Homo sapiens
agcaggggccagtgtgacgtctatctcatgtaaaagctgatttttttcctgcaaagaagtcgcaggcatatatgaagatccctttggggacccaaatagtgaaccgagagagaatgaaacac

SEQ ID NO: 119462 - DNA, 122 bp, Homo sapiens
cccaaagccggcagggagggtggtccggggcgccggggacacagccgggctggggcgccgcgtcagagccaagtaggcgtctcctgtcaggtccagaggtctgagcagtggagggagactcc

SEQ ID NO: 119463 - DNA, 122 bp, Homo sapiens
gcgaaaaaccagcaccgcccaacgaacgaccaaaccgctctgcgctccaagcccccgcgtcgcctccgtttttataggcacgcttcacgctgcgtctctgcgtcatagaacccttatttgca

SEQ ID NO: 119464 - DNA, 122 bp, Homo sapiens
gattatcatctgcttctcctatttcaaaccttggctcttgtaccttgttcataactgtctcgagggtgtcatagttttcctgaaaaaaaaggtatgagctcaagacaatactgtgtgtcatt

SEQ ID NO: 119465 - DNA, 122 bp, Homo sapiens
gacgtgaagaaggggtggttgtagaggcgaagacccccctccccagggttctgcagccagcgggtggtgctgctgcggtgatctgaaccccagctgctccagtccccaagccgcatgctctc

SEQ ID NO: 119466 - DNA, 122 bp, Homo sapiens
ccttacttttccaccgaagtactttaattcactaacacgtttcacgctgtcatgctgacccgaagccgggacgcaggagggccaaagaatccaagcaattttagaaaccccgttactgccca

SEQ ID NO: 119467 - DNA, 122 bp, Homo sapiens
agtaggagcaagacagagaggaggaggtgccatgctcctttaaaacaactacctctcagacgaactaatagagcgagagctcacttgtcaccaaggggatggtgctaagctattcatgaggg

SEQ ID NO: 119468 - DNA, 122 bp, Homo sapiens
gcttgggtagtcattttgccctccacgcttacttatgtcctgtggcgtcttggctggaatcggggctctacccacgactccccagcctcgatgcctgggcccccctcttgcaggctcgatga

SEQ ID NO: 119469 - DNA, 122 bp, Homo sapiens
tctaaaagaaatagcttcatggtgggaaaatggtccttagtacacagacccaaaccctgacgaggctttctcagcctcgtcaggatatgtgcttttgcctccataaatgggttaaggattgt

SEQ ID NO: 119470 - DNA, 122 bp, Homo sapiens
ggaaggctgcccaaaggcagtgacactgggctgagtcctcagaggatgcaagtggccaggcggcaggcattctggagagaacagggtacgctctggaaggagtggctgctctgtgccaggca

SEQ ID NO: 119471 - DNA, 122 bp, Homo sapiens
aatctttatcattattgcccttcaacagagtctagaagtgaagtctgaactgactcaaaccggttgagtcttccccactattcaaatggggccgcgtcccgattatcagtgcaatgtgatca

SEQ ID NO: 119472 - DNA, 122 bp, Homo sapiens
attacaggcgtgagtcactgcatgaccagctgctataaatataattaaatggactgggcacggtggctcatgcctataatcccagcgctttgggaggctgaggcaggcagatcctctgaggt

SEQ ID NO: 119473 - DNA, 122 bp, Homo sapiens
gtatattttcctggagtacgcgtcccctgcccacgctgtggatgctgtgaagaacgccgacggctacaagcttgacaagcagcacacattccgggtcaacctctttacggattttgacaagt

SEQ ID NO: 119474 - DNA, 122 bp, Homo sapiens
tggtggagcaagaggtatcccccacagataatgtggccccccccagaaaatgcagctcatcgcggtgagctggggtgtcagatgaacgcccaacttgaccgacaaagtgcttgctcgactct

SEQ ID NO: 119475 - DNA, 122 bp, Homo sapiens
ccaaactctcggggaaccagcaagaacagcctgatgtgcatcctacaaaatactccactgcgcggacgggcttttgactgacagcctctttacagggcgcacagctgtgtggggaggacagc

SEQ ID NO: 119476 - DNA, 122 bp, Homo sapiens
ttttttaaaatagaggattggaatataatctgatctatacttttctggggggataaaaagcgaacacatactttcatgtaacatagtccttgagcctaaggcatgaactgaggctgcactgg

SEQ ID NO: 119477 - DNA, 122 bp, Homo sapiens
gctccatcagtaagctttaactgctggcttttggcttagagacatttaactaacccctcacgtactgcaatttcctgggagcaagcttccaccccaatggctctgaaaacgtagtggccaga

SEQ ID NO: 119478 - DNA, 122 bp, Homo sapiens
ttctctcttccaataaagctctttctggatgagcccccagatccagctgtcctaggtaaacgtgctgaactggctggagatcctgcagtaatgcttggcacagaaccaaggctgggtatcaa

SEQ ID NO: 119479 - DNA, 122 bp, Homo sapiens
tgcgttcagccatgatgacatggtcccagagcctcttcaggagttgttgctgtagagtatcgttgctcagagcatggattctggggctggctcatcccgctttaaatcccagctctgcatga

SEQ ID NO: 119480 - DNA, 122 bp, Homo sapiens
ggaaagtgcttttggccgggagtgccgcagaaccccagcgtcacgaggtgaggggtgtcgcggtgtgtcgcctgccgctggagaccggaggatgtgttcttctcatctttatttttctgtta

SEQ ID NO: 119481 - DNA, 122 bp, Homo sapiens
gacctaattaactgacagttggtctgattgccaagctgaggggcggggcggggaggggggcggtcagttgctgcttggctcacgtagcaaggagggcaacttttcatttctcacaaggactg

SEQ ID NO: 119482 - DNA, 122 bp, Homo sapiens
gccgcgccaggcaagggacaagccgcgtgccctacactgagaggacggactctgctctcacgccacagctgctgtttttctacagtggctaaacacgcactggccccgcgatgaggatgagc

SEQ ID NO: 119483 - DNA, 122 bp, Homo sapiens
accatggtagtggaaagaggccacacgtgataaaattgtatagaacacacacataccagacgtgcacgcgcgtacacacacacacagtagaagtaaaactgaagaaatcaaaataagattgg

SEQ ID NO: 119484 - DNA, 122 bp, Homo sapiens
gaaaacactgggtcaccctctcccattgaaagatggcctgggggagctgggtcctgtctacgtgagtttgccggggccgcctcgcacacaccgtggccaggtgctcccacagcagatgtggg

SEQ ID NO: 119485 - DNA, 122 bp, Homo sapiens
gagtatggattgatgtattaaaatttattgaatcacatgctgagattttcaccagctgcccgtggggatctgggcatttattcccatattgcactggctggctggaagccagcagcataaac

SEQ ID NO: 119486 - DNA, 122 bp, Homo sapiens
ctgccatgagcttcccagagacagaagagactggagcaaagtcggaaacacagagaagcacggcttcccctcagcacagaccctccagactgggtctcagagccgtgccacccaccctccca

SEQ ID NO: 119487 - DNA, 122 bp, Homo sapiens
ataccttttcgagtcctatggcctgggccaaaatgcccagctgtctcttttccggctggtcgagtggagcccccgtgacgtggtcgtgtccctgacggacggggcccgtcttgcatctgcca

SEQ ID NO: 119488 - DNA, 122 bp, Homo sapiens
gctccatatttcccttattgccatcctgaggtttactgaatatgacatcaaagagttcctcgaatttccatacatctaagaacttatctcatttttagaaaatatcctggcacagaaagcag

SEQ ID NO: 119489 - DNA, 122 bp, Homo sapiens
ggagtcaggtgatgactttgaatcccaggtttgtaaggagtgtgattcaccttattaactcgttagaggattaactgagtccccagagacctccaggaggctaaacagatggaggtcgagaa

SEQ ID NO: 119490 - DNA, 122 bp, Homo sapiens
cccgggcccgcgccacctcagccttggagttgacggcctttatcgcagccatagcctaaccgttcagagggagaaaaaaaaaaagccttagtcgcgattctgagcaaaaacggcaatgcgac

SEQ ID NO: 119491 - DNA, 122 bp, Homo sapiens
agtggagtcagctgtggaatggaacatcaattcccaccccataggcatgttgtgaggtttcgctaagaaacagccataaaagggccttaagagttatgatgattgttttaaccatttagtag

SEQ ID NO: 119492 - DNA, 122 bp, Homo sapiens
cactgaagacgtgcctgagctaagccacactgccaaactgccctccatagagatcgtgggcggggatgcaaataggtggaggttggagtacgctcttttggtatgacttcgctgagttttgt

SEQ ID NO: 119493 - DNA, 122 bp, Homo sapiens
ccgtggaagaactgtggctccaccagatcccaaaaagcaaggcccgtttcctacaacccccgaaggagggtcgtcctcactccgccgccaacctactagcaccatcaccagaccctcgaggg

SEQ ID NO: 119494 - DNA, 122 bp, Homo sapiens
acacagtagttatttgatttatgctcattaaaatgaactgtggcagggtgtggtggctcacgcctgagttcccaacactttgggaggccaaggtggaaggactgcttgagttcaggagtttg

SEQ ID NO: 119495 - DNA, 122 bp, Homo sapiens
tgcagacgtgggccctgcagcgagctctgaatgatgctccttcacagctgcttctgtggccgttgttgatcccttcattccatcccttcattccatcccttcattccatccctctctgcttc

SEQ ID NO: 119496 - DNA, 122 bp, Homo sapiens
atgcacacacacacccacagcatccccgggagaagccacagcccaatgcacgcgtgcaaacgcacacacacccacacacccacagcatccctgggagaagccacagcccaatgcacgcgtgc

SEQ ID NO: 119497 - DNA, 122 bp, Homo sapiens
cccggacgcagaggagggagggctggatgcccgcttcccggaaggcctcgctcatgttgccgcacttgtgctgctctgggtccgaggtggcgcaccaccgcacctccatgccaccgagcact

SEQ ID NO: 119498 - DNA, 122 bp, Homo sapiens
tgatgtttagcatttaacacacttttccccagactggaagaagaggccgagatcccaattcggtgacccagcccttgctggagtactaggtggtatctaatgccatccacccttccgggatc

SEQ ID NO: 119499 - DNA, 122 bp, Homo sapiens
tgagtacataaaatgtaggcctcatacgtgggtgacaaaatagtttgtacaacaaacccccgtgacacaagtttacctaggtaacaaatgttaccctggtaacaataccgcaaatgttaccc

SEQ ID NO: 119500 - DNA, 122 bp, Homo sapiens
ggggatgtggagctgggcttggggcatcccaaggagggaaaagatatccagatatcgggacgaaatggtgctttctaggccttaggtcaggtcctggatctgttccaggtggggagtaaaga

SEQ ID NO: 119501 - DNA, 122 bp, Homo sapiens
attccctaaatggggtcttcgcatcagctgcgttaaaatcaccccagcaggcaggttatccggccgccactccagggtcattaaatcagactctccagtgggacctcggaattcgtagctta

SEQ ID NO: 119502 - DNA, 122 bp, Homo sapiens
cggcttgcgtctcgttctgcctgggccgagctacagagggattgggccgccgggacgtcacgtggactggggccggataatggcgggcgctgcagaagatgcgcgagctcttttccgggctg

SEQ ID NO: 119503 - DNA, 122 bp, Homo sapiens
gaaggttgcactggattcacccagatcaacaccaagattagtattgagatcttggccaagcgctgtggctcaagcctgtaatcccagcactttgggaggccgaggcaggcagatcacctgag

SEQ ID NO: 119504 - DNA, 122 bp, Homo sapiens
gaggaggaggaggacacggatgaggatgaccacctcatctacctggaggagatcctggtccgtgtacacactgactactatgccaagtatgaccgctacctcaacaaggagatcgaggaggc

SEQ ID NO: 119505 - DNA, 122 bp, Homo sapiens
agctccatgttgcaaactaaagcccagggtgtgcatcatgaagacgccatccctgtgtcccgggttcagaggcttgtacccgggactcgggcatgagaccccattacgggcctgagcacagc

SEQ ID NO: 119506 - DNA, 122 bp, Homo sapiens
cactggcctctcagctattccttgaaccttaaacatttgcactacttttcttccaccaaacgtccaagaaacttgctcccttaatacctttacggcttttctcaaacgttaccttcctagtg

SEQ ID NO: 119507 - DNA, 122 bp, Homo sapiens
tccccgccacaagtcacacccacccgcaggcctgctggccaaagaaacaaaggagtcgggcgtggatccaggagaaacaggttttcgctctcggatctccctgggcaaatcagggatcctga

SEQ ID NO: 119508 - DNA, 122 bp, Homo sapiens
cagtgagttcatcgtcctcaccttcaccactgttgctatttccttccactgttccggacgcgggtccactcccgtgggattgtgggcgcaggcatgcagaagaagaacactctgctctggta

SEQ ID NO: 119509 - DNA, 122 bp, Homo sapiens
gggtctctggccaaagtcaagaaagaaaacatcttctcacataaagcatgtatttggcagcgttaattaagaaatacagtaaatcactttcagagaataaggtaccaggtcaccttaaagtt

SEQ ID NO: 119510 - DNA, 122 bp, Homo sapiens
tgggtatccgcaggcggccatggacggtgatcacagtgaccagagggacagcgcaccctccggtcgaagcggggtaggcgttggcaggggaggggcgacgaagactggcgaggttcaggcgc

SEQ ID NO: 119511 - DNA, 122 bp, Homo sapiens
cgtggcactctgacactgggtgctgcacttttagggcagtgctgcttaggcccagccacccgctgtgtacccagaagcattggtaggagctgcccagctagagccgtgagggtgggaggcct

SEQ ID NO: 119512 - DNA, 122 bp, Homo sapiens
aataaacaacctaaagacctgcgcccccacccccaccgcccccttttcttcagaagagaccggcacatggcaggaactgtacgttccttttgctgagacttgaggggctgcccagatacatt

SEQ ID NO: 119513 - DNA, 122 bp, Homo sapiens
catatgtaactccaattttaatgagctatgtgaatcgctacatcaagaacttaaagccgtcggatctacagctttcactatggggtggagacgtggtactcagcaagctcgagttaaagttg

SEQ ID NO: 119514 - DNA, 122 bp, Homo sapiens
ttggtgacccggccctaggtcttctggctcaaattcctgtcccctttccaaatcagcctacgtgctgtagaacatgcaagacagcaccctgatgtgggtgaatctcatttttaagttccttc

SEQ ID NO: 119515 - DNA, 122 bp, Homo sapiens
ggcgggtgacacgtaactgttacaaatgggtgcctgtccctgtcacgtcaccggagtgtgcgtcttgatgccctggctccctgaggcagctcgtgttttcgagtgtttccattttagagacc

SEQ ID NO: 119516 - DNA, 122 bp, Homo sapiens
ctggggcgggaggagacagagtcgcgaggggcggggcctggactgccgctgttgccagagcgggtcaggggaggcactcccaggttcagccgatccaggctcaggtggggaaactgaggtcc

SEQ ID NO: 119517 - DNA, 122 bp, Homo sapiens
ccatttcagagcaagggggacgagcgactaacccagccccaggtcagcgcgtcagcggcccgtgctattggattcaggctgtggcaccacatccaggggacaaagagcgcgtcggttgtccc

SEQ ID NO: 119518 - DNA, 122 bp, Homo sapiens
cagcaccgaggacagtggccctactacgcacctttcaaaattcagagccctggatatcgacggtttttaaatttttatttttcccaccagagaggacttatgcgctctccaggaggcctcct

SEQ ID NO: 119519 - DNA, 122 bp, Homo sapiens
ctgtgatcacatgctctggtctggaggcacggccgcgggccccgggtcagtgtgaatccgcggggttactcctcagtcggatctgagctctgaaacccagacccgaggaagacaagcggcca

SEQ ID NO: 119520 - DNA, 122 bp, Homo sapiens
cacgtaagcgtgtggcagaacgtctgcaatcgcatctttgtaataatctcctttctgagacggttcagtggactcaatgttccgccaaagggccaaggcagccctggtgagtgttttcagct

SEQ ID NO: 119521 - DNA, 122 bp, Homo sapiens
ctactgccacccgcattgggcaacaggcccctcacctgtccaacctcttgtgttgcagatcgccctgtgccactttttcttcaacatctccggcatcttgctgtggtacccgatcccgttca

SEQ ID NO: 119522 - DNA, 122 bp, Homo sapiens
cagaaacaaggcagttgcctaagctgtataagtgaggggactggatgggaagcaagggctcgggaaaatgggagtcctaaaaaactatgagatgggtctagtttgacatcctgccactagat

SEQ ID NO: 119523 - DNA, 122 bp, Homo sapiens
tgaaggctttaaagccacggtctctattcctacacccagctttccgtcctcggttactatcgcccaagatcaaagccaccctggttttctgattgccgcaactgcggctccaggtgctgagt

SEQ ID NO: 119524 - DNA, 122 bp, Homo sapiens
cggtggttgataatcaccaataaactagatgagggcttaaaggcacttagaaaagttgcacgcacaaatggaataaagaatgctgaagaaaccctgaacatagaggtgagtaggaaagggaa

SEQ ID NO: 119525 - DNA, 122 bp, Homo sapiens
gcgggccagcgggagttccgggtgggcgtggccttggcgagctctgcactctgagcagcccgccggccctgccggccccaggcaatgaggggcttagcacccgggccagcggctgtggaggg

SEQ ID NO: 119526 - DNA, 122 bp, Homo sapiens
gttaggggtggggagagagctgatggtgggggatcccgctccctcccgcgtcagtctggccggctccgtcctcccgtaggctccgctgtagctagcaatgtgacaccaggacgcactcgctc

SEQ ID NO: 119527 - DNA, 122 bp, Homo sapiens
aacccaccctccaccccgtcccccacggtgggcactgcccagcaccgcatgccacgtgtccggaataaattctttttgattgttggaagtgggagccggcacctgcctgggtgagaccttgg

SEQ ID NO: 119528 - DNA, 122 bp, Homo sapiens
acccccgccaaggatccaactgtgtgtcctctctcccagtctctcccagtgtacagtgtccgggcttatggacagatttcactagctcagcctaaggtatagccctaccccctccaacacca

SEQ ID NO: 119529 - DNA, 122 bp, Homo sapiens
ttcagacgcttccccatgcagatgtttccattttcttcagtcctaaaatgattgtgtgcccgcttcaaacgaattagtagcaacagagcagatggagacgaaaggtagccgaatggccgagt

SEQ ID NO: 119530 - DNA, 122 bp, Homo sapiens
cgctgccccgccacggcccctcagaacgcgccctcaccgtccgagtcatccagctcggcgcgctccccgtagtccacccaactgagcccctcgaggttgtcatagtcgccgcgcctcggccc

SEQ ID NO: 119531 - DNA, 122 bp, Homo sapiens
cagcaccaccggcctcttatccaggcagtccacgccggcccaggaacgttcccagaactacggctcccagcaggacaagcgccagacaagcctggactcaagaggatagactgggcaaaagc

SEQ ID NO: 119532 - DNA, 122 bp, Homo sapiens
acagtggatggccctgcgtggctgggacacagacagggagcaggcatggcacctgcgccacgcagagcagcaaggctgagcatgaccactggaaataaataaacatggtgccgacagcatct

SEQ ID NO: 119533 - DNA, 122 bp, Homo sapiens
ttcgtgttagaacgcacaggttcaccttactctatacattatggtgtagattcggattttcgcccttggcaccactgacattctgggccagataatcctatgttttggggggtcatcctgtg

SEQ ID NO: 119534 - DNA, 122 bp, Homo sapiens
gtggcacagcacagcgcggtcctgggcggagcactcgcagcggggcgggcagcccgtggccgagcctgacagcactgagcccagcaccagcaggaggatgggctgccagcaggccaggaggg

SEQ ID NO: 119535 - DNA, 122 bp, Homo sapiens
ccgcaggctggaggttacgcttcgagtcgcttaccgaatttgtgtgcattcacgtggacacggcctgtggggccttttgcccctgtagggtctttactgagcacgtgtctactccaggctgg

SEQ ID NO: 119536 - DNA, 122 bp, Homo sapiens
gttaattgacaaactacacaacccagcataatcctacctgatacccccaaagcagaatcacgtttgctactgtaaacagataaaggtttaggagatgggcaggtatgtccaatgtctcactt

SEQ ID NO: 119537 - DNA, 122 bp, Homo sapiens
ttcctggcagcgtgggggtctcctgtctccacacggcatccccatcagggacggccaggccgggacacacactcacttgtactgagactggtcgttgccgccgacatctggggatgttaact

SEQ ID NO: 119538 - DNA, 122 bp, Homo sapiens
tcctatcggtggctggaggctgacgctggcctctgctccttctggcctgacagcagtggccgggatcctggagcgtccacgcaggttagggcgtgctctacaccccgcgtaggctagggcgt

SEQ ID NO: 119539 - DNA, 122 bp, Homo sapiens
cagccctggaaggaggagaggcgcgcttctgccacttaaccgagagcccaaatcccagaccggtccttgcttctctgaaacccacaaaagcaaaccttggggagcttgctgggcctgtcact

SEQ ID NO: 119540 - DNA, 122 bp, Homo sapiens
gtgctgctcggaccccacggttcggcggtcccaatcccacgccctccgcgcggtcggccgcgtccaggactgaggggcacaatagctctgaagctgcagtgacccctggtgggtcccgatgt

SEQ ID NO: 119541 - DNA, 122 bp, Homo sapiens
tctagaggtcatcaaatcatattgtggtttacagacaggaccttagttcctctaaaattacgtgatagagatgaatgatctttaagatttcttctagactaaaaatttctgctatttgaagt

SEQ ID NO: 119542 - DNA, 122 bp, Homo sapiens
ggaaattctctctaggctagataaacggaggagtttatttagtgttttagcaagctttatcgcctccataggtacaaattatttgcattttctagagcaagggataagacgcgccctggaat

SEQ ID NO: 119543 - DNA, 122 bp, Homo sapiens
gcagatgacgttgtgaccggtgttatggtgatagtgctcgtcactttgcttgcaccaggccgtgaggagaggtgattcctgggagagcgaaggacagtgccggtggaaacctccttttcggc

SEQ ID NO: 119544 - DNA, 122 bp, Homo sapiens
cagggcgccagggaggccgcgccgggctaatccgaaggggctgcgaggtcaggctgtaaccgggtcaatgtgtggaatattggggggctcggctgcagacttggccaaatggacgggactat

SEQ ID NO: 119545 - DNA, 122 bp, Homo sapiens
ggccagtgcagccacaggccctcacatacggtcctgtctgtgtgtcccgtggaagcgctacgtggatggtggcatttcagacaacctgccactctatgagcttaagaacaccatcacagtgt

SEQ ID NO: 119546 - DNA, 122 bp, Homo sapiens
ctgcagcccgccatgcctgagcgccccccctccatgggctcctgtgcggccccagcctcccggacgagcgccgccccctgctccaccggtgccctgtcccatcgaccacccaagggctgagg

SEQ ID NO: 119547 - DNA, 122 bp, Homo sapiens
cgcgccgtacggaagcgtgctcagcgctgggcttgtgctccgtacggaagtgtgctttggcgcaccggaagccgactcaacagagctatggcgggtttgactgtgagagacccagcggtgga

SEQ ID NO: 119548 - DNA, 122 bp, Homo sapiens
gggacataagtctggggacactgaattggtctctctgccccaagtattttcagccccagccggccacacagctcggatctcctcctgtggatccccccagctctgcgatgatggcagaagag

SEQ ID NO: 119549 - DNA, 122 bp, Homo sapiens
ctcttacagatgggggaagctttttgaaaagaggcagggaggccatgaagggatgtgaagcggaagatgttctcagaggaaaagagggcagagtgtgtacctgcaagaacaccctcaactcc

SEQ ID NO: 119550 - DNA, 122 bp, Homo sapiens
taaaacaacatgtcagcatcactattcttgtactttggagccatgatttagtacaataagcgttacttggacacaagctctgcaatattacaacagtatctctcatctccaagatgactact

SEQ ID NO: 119551 - DNA, 122 bp, Homo sapiens
agaccctaagatgaagggaccagtgggggaggtggccccggcaggtgtcccagcagctttcgccttggcaggtgggagcatgacctatcgtgtgcagttcctggcgggctatacatagccag

SEQ ID NO: 119552 - DNA, 122 bp, Homo sapiens
tggacacctgtcctgggtgggaagggagtgaaagggttgatgtgatgtcccctgtatgtccgcctgtgctaggcccaataaggccaggccgggtaaccgccacaatcctcactggcttcatt

SEQ ID NO: 119553 - DNA, 122 bp, Homo sapiens
accccaccctcgtccgtcacacctggtgccatcactcccacagctccttggggtgggaagcgatgggtcgagttcctgctggacacgggcctcaggccccccgggtgtccccaaggtgcagg

SEQ ID NO: 119554 - DNA, 122 bp, Homo sapiens
tcctgccttttcctccagccaagccttggcttctgctgcgtcaccccggcgtctaatcaacgatgcttgctttccgtgcaattatttgaacttgcttttcaaaagacccagtttgaatccag

SEQ ID NO: 119555 - DNA, 122 bp, Homo sapiens
gggacgtggagccagttggaagtggaagccacagtggctgaaagcctgaccttcagatgtcgctgggtgcaattggatgagtcacaggaagaagactgactcttggccgcattagtcatggc

SEQ ID NO: 119556 - DNA, 122 bp, Homo sapiens
catgaataattatattaatgaatggctttggagattcttcttccgtcctttgcatttttccgagatatgtttctggttttggtatctattagaagggtattttggtttctgttttgtgacaa

SEQ ID NO: 119557 - DNA, 122 bp, Homo sapiens
ggcacgcggggaaagttggcgcgcgcctgaccgcgcctggaagccgcgcggtgccagggccgagttgtcccccaagtttctgcggcgatttgtcactccctggggatctggcggtctgaatc

SEQ ID NO: 119558 - DNA, 122 bp, Homo sapiens
ctggcctctttgccagtcccggtggcggtgggccaaagctgtttggcctcattatcctcccggtctctgtccttgccttcacgcccatggccagagcactggagtttttttttaatcagtaa

SEQ ID NO: 119559 - DNA, 122 bp, Homo sapiens
gggcctaagaaagatcagtttacaggttccagcatggggtgggacccttcctccttcccccgtcttggcactggcacttggtctggtgaccaccactagcccacagttgggtcagaaaacgt

SEQ ID NO: 119560 - DNA, 122 bp, Homo sapiens
ctcgtggtgcgccgttttttaagcccgtcggaaaagtgccgtatttgggtgggagtgacccgattctccaggtgctgtccgtcacccctttctttgattaggaaagggaactccctgacccg

SEQ ID NO: 119561 - DNA, 122 bp, Homo sapiens
cgagggcctggagctggtgcctggtccccggtgctagagcctggtccctggcactggagccgaggcagctggagagttccctgaggacagcttatttcaccctggatggctctggcgggagc

SEQ ID NO: 119562 - DNA, 122 bp, Homo sapiens
cagctatagtttcctacctctatgaccagagagtgaagcgtttcactgaagaactgtggccggcgtctccaggaaaggaaggagcctcgctttctccagggcaggggcagcgtggggcgggg

SEQ ID NO: 119563 - DNA, 122 bp, Homo sapiens
ttcggctgggaccgcaggttgcagaaagatgctatctcttccgagagagtcttcaaatgacgagctctctggccgcatcagcccttatataactcacccccaccaaccgcgaacaccccacc

SEQ ID NO: 119564 - DNA, 122 bp, Homo sapiens
ggtacctctgcctcctcctacacctcgggctcgagcatttgaaaccctgggggttgccttcggtgacatctcccgcccccacctccagtcctcagtctccaaaatcctcagctctgctcaaa

SEQ ID NO: 119565 - DNA, 122 bp, Homo sapiens
cactgcctgtccagattactagacaactctgccctgaagcagcaggagttacccatccaccggctatatttcacggccaggagagtcctctttgtctttttcgcaacaggaatattctgcct

SEQ ID NO: 119566 - DNA, 122 bp, Homo sapiens
gacagagaacagctgcggtctccgtgcaaccgaacttgctgcagtcccggccccgccttacggacttcctattggcccagacagcccaacccctcccgttattgggcagtgttctccgtcac

SEQ ID NO: 119567 - DNA, 122 bp, Homo sapiens
ggatctcgcagctacggcgttcttttaggggtggagccggcaggaaatttaaactgaagccgcggccgaaaacgccaagagattgatgctgtagctgccctgagataaccaggactgtggaa

SEQ ID NO: 119568 - DNA, 122 bp, Homo sapiens
aaagaagaatttatttttccttttcaggtcatgaggctagttaatgattagtgaaatccacgtgggtgttttctgagaggctgggttatatgatctctttggctttagggaattactccata

SEQ ID NO: 119569 - DNA, 122 bp, Homo sapiens
tcacggaaggtgggagaaggtcggggctggcggggtggtccggactagtgggactcggggcgctttccccgcccggcccagcgccaagcggtgtcggcagcggttgttttattacctttcgg

SEQ ID NO: 119570 - DNA, 122 bp, Homo sapiens
ggacgaaggcttcgtgaccgtgggccgggccacgcttccctgggtgcgtcctcaaaagaccgctctgtaacagggtaaagcaatgtgtggacttcatcaaaatgaacacttctgctttttca

SEQ ID NO: 119571 - DNA, 122 bp, Homo sapiens
cttgaggtaggtggatgctcccaggaaactcagacgtccgaagttcacgaggagttgggtcgtgagaggggccagacctcgatccgcggggcgacagctgcagtgtcgcgtcgcgagcagga

SEQ ID NO: 119572 - DNA, 122 bp, Homo sapiens
agcaaacgtcactgatttgatgcagtctcacctggaagcgtaagcatccggcgtcccgggcgcctgctgcctaggtgttggggctgcccggggaagagctgggagccatgtcccagccgtga

SEQ ID NO: 119573 - DNA, 122 bp, Homo sapiens
aataggcaggaaacaagagaattccagagggctaggcagctggaactacactacaggtcacggagcaagaacagttaggtgcatgtggcactgctgctgagaggaaaatgacctctaattac

SEQ ID NO: 119574 - DNA, 122 bp, Homo sapiens
tcactggggattgtcggacagtgggtgcaggacagtgggtccagcgcaccgagcgtgagccgaagcagggcgaggcattgcctcacccaggaagtgcaaggggttggggagttccctttcct

SEQ ID NO: 119575 - DNA, 122 bp, Homo sapiens
cttctctgtcttgcattctcattaggcctaagttggtacgcttaatggtctcacaagtctcgcaggctctgtctgggagaaaatattatcttttcattttctttatagtgtcttttgatgca

SEQ ID NO: 119576 - DNA, 122 bp, Homo sapiens
ttacagacaccaaggagggtgctgtagagttgcagcctcggccctgactcctggccctgccggcatttattcagcacacattaaatgacaaaggctttgagtcaacaccattagagggtaat

SEQ ID NO: 119577 - DNA, 122 bp, Homo sapiens
tccaaactattgactcttcaaagctgagctgacatggttttggtaactttcagactgtaccggtaaactgagtcaggattcccataactctatagctgaaaagcggtttcacacaactgcta

SEQ ID NO: 119578 - DNA, 122 bp, Homo sapiens
aagttttcaacttctttacctttggtttgcgtgtcctctcgtagctcagagtaatttgatcgtctgaagccttcttctctcagctcgtcaaagtcattctccgtccagctttgttccgttgc

SEQ ID NO: 119579 - DNA, 122 bp, Homo sapiens
tctgggtctaggacacgccttctagctgcgatccacgttgaccccgcacaagccgaggtgcgaaggaggatcgcagaccttcgcccgggttaaactcctttaccgagagaccgtgtaacctg

SEQ ID NO: 119580 - DNA, 122 bp, Homo sapiens
tgggggagccgggcttgggggagcgggtcgccccggctcggaggtggggtcggcgggggccgggcgggccggccgcggcggcgggaaggggacgctgcccctttaaggtgccaccgccgcgt

SEQ ID NO: 119581 - DNA, 122 bp, Homo sapiens
gactatctactgggcacctgcctggttctagtcacccagctcctgcaaggcggcagtaagcgagacagcctccctcctccactaaaatgatgaaatggcaaagctgctcaagcgcctcgcac

SEQ ID NO: 119582 - DNA, 122 bp, Homo sapiens
aataaataagaatatctgggagctactttagataaaaatgaattggagtctctgggactgcgttgttccatacaggagccactagcccaggaccactgctgagcaggtgaaggtgagaagcc

SEQ ID NO: 119583 - DNA, 122 bp, Homo sapiens
gccaggtaaggatgagtattacagtccgagaagcgaacttccaagtcacctccgcccagtcgcacccaaggtacgcccctcccgccttctgggggaaccaagatggctcccggggagccgtg

SEQ ID NO: 119584 - DNA, 122 bp, Homo sapiens
ctggccactggttgaggggctgggcgtgttctggtgtccagtgcatcttcaacagagctgcgggcaagagacaggaggtctggtgaggtctagccaccgaggacccagtgggccactgctag

SEQ ID NO: 119585 - DNA, 122 bp, Homo sapiens
ctcatcgctgccccagactcacagagtcttgggcatctcgtcctccatggctgctgctgtcgcggcggcgcctccaggtccagctccctgcccttcactacctcccaaatcgtttaagcggt

SEQ ID NO: 119586 - DNA, 122 bp, Homo sapiens
tttcccctacgccacccccggtggccacccggaatttcgcccagagccccccacccgggccgtgacctggtctgtggcctccgctccggagcccaagttccgcgtcttccctgctttcggct

SEQ ID NO: 119587 - DNA, 122 bp, Homo sapiens
gcgagtgctgaggaggaaccctggacgccaccatttcacatggaagaggcaggcgacatgcgagtgctggagaggaaccctggacgcaaccatttcacatggaagaggcaggcgacatacga

SEQ ID NO: 119588 - DNA, 122 bp, Homo sapiens
ggaaagcacgcttttggcagagctcctggacagcagtcgcggccccatgaaggctacctccggaaggcactcgcacggctgccgagaaggctcgtaggcatccacggggctggcattgaaga

SEQ ID NO: 119589 - DNA, 122 bp, Homo sapiens
ccgggcaaacgcaggaagctctgccttacaccacagctggagggaaggttccagagcacacgcctcatgcgtttcctcgctgctccagttttgcgacggtctgtctcaggctctttgccact

SEQ ID NO: 119590 - DNA, 122 bp, Homo sapiens
ttctgtgggggatgggcaggagtcaggggcggacgcctgaatcttgtttctcagaagagccgagaggcctaggctcaagcttggggcgatccggtacttggaggttcgaagctcctagtttc

SEQ ID NO: 119591 - DNA, 122 bp, Homo sapiens
ggccgcgttcgccgccgcttcctgctgcgccaagcgcgggacacgtcacaccagtggccccggaaatcggctcaaccgtacttccgctcagaacgccgggtgccctccccatctccgcccgg

SEQ ID NO: 119592 - DNA, 122 bp, Homo sapiens
gcagggtcagttttatttatgggctctgggccgagtggtcctgggtgcagcagccagtgtcgccgatggtccctgagcatttccaggaggttgctccagagtgaattttcctttttctgcac

SEQ ID NO: 119593 - DNA, 122 bp, Homo sapiens
ctaaattatcccagactggcccctggccccgttatccttggggaaccttgtctgtggccacgggggctggacgagggcggaatcactgacaccagccatgtgaggggggcctaccctcctgg

SEQ ID NO: 119594 - DNA, 122 bp, Homo sapiens
tttgtttttatagcagaaactcaacctgtattcgccgaaatgatcctgagccttactattcgttggggtttagggaacttgccaacacatggagcaactgaaaacaatggcatgttcatggt

SEQ ID NO: 119595 - DNA, 122 bp, Homo sapiens
cgccccgcagcccttctaccctgcttttgccaggacaccaaccgcagaccccattttgtccggaggcccaggggcgagtaggaaccctgtggcccagtaaagcctccaactctccttaactc

SEQ ID NO: 119596 - DNA, 122 bp, Homo sapiens
aaagttccaaggggctataccattggaaactaacaccagctaatagaattgtctgctctgcgtcacaactcatggaagttgctgcttctgatccagagctgggaaaggttaacaggtgatta

SEQ ID NO: 119597 - DNA, 122 bp, Homo sapiens
gaggtgcagggagggcgcgtggggcggcaggcagcggggcgggggagcgtttctgctcgccgtgtgtgcacgccggccatggggagggtatgataggcaccaaagagcaacacgcctctcat

SEQ ID NO: 119598 - DNA, 122 bp, Homo sapiens
tgaggctgggctgagcctcccgctgcgtggcccccgggcgcggcgctcggcttccccacacgatgtggacctgtgcctggtgtcaccctgtgaatttgagcatcgcaaggcggtgccaatgg

SEQ ID NO: 119599 - DNA, 122 bp, Homo sapiens
ctcttccgcagccgtgacccctctcctatccagcagcctcccagcagctccgctccaccccgcctgccagcaacaggaagccctggtgagaccaaaggctcagcggtgccaccagctcatcc

SEQ ID NO: 119600 - DNA, 122 bp, Homo sapiens
tatctgacatccaccctccaccctcctttaaccttgagttaacgcatccaacaacgtgtgcggggaaattccccgctcactgcagatctcagacccctcctagtgccaggagaaatggcaca

SEQ ID NO: 119601 - DNA, 122 bp, Homo sapiens
ggctgccggtgctgctgctgctgctggtggaggtgcttcagggcactaacagcctcctcccgctgtacccggtggccctgctgctcctaacctctcagctgcctcccaccctgcactctctc

SEQ ID NO: 119602 - DNA, 122 bp, Homo sapiens
atcgcttccgggttcacaccctttgcagcctcgcggttggcggtgaaagagcttccgggtcggcggccgggctgctgccgttcctgctccttttcactggacctgcagtctctcaggggctg

SEQ ID NO: 119603 - DNA, 122 bp, Homo sapiens
ctgtgggagagcggcggctgctcctggaagttgtggtgtcgggagcccagccggtgccgccgcagccgccgcctagggcggtggggaggaggagggagccgcggggcttggcggggtcggga

SEQ ID NO: 119604 - DNA, 122 bp, Homo sapiens
ccaaagtccaaacggctgataaaagcactgagcaggacgcgaaggagcctggagcctggacggcctgataactggcttcactttgatgttctccaagttcagagcgggccaggcctcctctg

SEQ ID NO: 119605 - DNA, 122 bp, Homo sapiens
gaatcgtaagccctaaagcacaaacacaccaagccatacaaacccttgattcacgacgcccgggcacacagatgcaactcaactcaagcaacaccccagctcaccatggacgttccctctca

SEQ ID NO: 119606 - DNA, 122 bp, Homo sapiens
cccctcagcaagcgccgcaccagggattcccccccgccgctctcggacgaagcaggtcgacgtggagcctggcagaatctccccaccttaatacaagcccgcagcctgcaagaatgaacttt

SEQ ID NO: 119607 - DNA, 122 bp, Homo sapiens
gaggccttttcagctaccaggttctgtcaacctagttaacgctgtgagaaacaggaaaaacgacctgcacgggacactgctttgctaacttcattgggggaacctcagatgcgcctcgcgaa

SEQ ID NO: 119608 - DNA, 122 bp, Homo sapiens
tacacaaaaatattcatgtcactagagagtaaagtgtcatttattgaagccttaccttggcggacttgccctaactggtggaaaggaacttaatttataagaagcaaagagaggggactttc

SEQ ID NO: 119609 - DNA, 122 bp, Homo sapiens
gaagcttggcagggaggggacctggcagctgctcctgggcaggaaccagagggcaaagtccgtggcgaccctcgggcctggcggggaccttacgcttcccggcgtctttccctctgccccgc

SEQ ID NO: 119610 - DNA, 122 bp, Homo sapiens
tgcggaggggaaacagggctgcagcttcaagcccaggcaggacgcccttagtcaccttatcggaaagtgggcagcgccgcgtctccggttagtcagagccccaggtaaataaagagctcggt

SEQ ID NO: 119611 - DNA, 122 bp, Homo sapiens
gccaatgggcgcccggaacggtctgggcccgccaatgacagcatggtgggtggagcaggccgtccgggcgggaggggctgggcgcatccctgtagccggcgggcgcgcgatccgggacggac

SEQ ID NO: 119612 - DNA, 122 bp, Homo sapiens
actccaccctccggggctcggggcctgaggagcagaaggtggccctgggcagatgctctgcgtgcgggaggctgcgctttcagtcattatttggatttcgttttccacatgaaaatatttag

SEQ ID NO: 119613 - DNA, 122 bp, Homo sapiens
gttttcttcattgaacacatttcctcatagcccatttgtggttctgctctctttgctatccgctttccaatgccagaaaaacattcattcacggggccaaagccagtcatggcaaaaaccag

SEQ ID NO: 119614 - DNA, 122 bp, Homo sapiens
ggctggaaggagctgggagcatacatgcccaccccatctccgccttctcggcaccctccgcggaggccaaggggccagacagatgccatccattgagatcagcctccccggcacccagcgga

SEQ ID NO: 119615 - DNA, 122 bp, Homo sapiens
tgaatcaattacatccttccacgtaggagattttatttaatattcacaataaccttgtgacgttagcaaaggaacactagtagatccatgtcacaggatgaagcaattgaagctcagagaaa

SEQ ID NO: 119616 - DNA, 122 bp, Homo sapiens
tttagagcaatccctggaattccaaatgcagcctcaacagatagccatttatttgtagcccgaatgtgctgcatttgtgcactgcttgaaaccttctctctccagcctccagaaccactctg

SEQ ID NO: 119617 - DNA, 122 bp, Homo sapiens
cacatggtagaggggcaggaggaaggtgggccaggcgaggcctcccctccactcccctcgcgtccgcacctgcccaggctctcctggagttttaagccctcccctgaggccagctgctccca

SEQ ID NO: 119618 - DNA, 122 bp, Homo sapiens
aaagggaaatccaattgaaggattaaattcctgtcaaaaccagtcactcatgtgtctgcacgtatatcgcaaagtgtttgtgaatttgatgcatattccaggtataaatcccctttccagag

SEQ ID NO: 119619 - DNA, 122 bp, Homo sapiens
ggaaggggaagaagggacagtggctggggtcctccctccttccctctccgggagcagtcccgcagcgtgcccgcgactcgcccttacctcctccaccccgcggcgaggccaggcccagcggc

SEQ ID NO: 119620 - DNA, 122 bp, Homo sapiens
tgagggagatgccatgagccgcccaaggccttcccctggcactggcaaacagggcctctgcggagcacactggctcacccagtcctgcccgccaccgttatcggtgtcattcacctttcgtg

SEQ ID NO: 119621 - DNA, 122 bp, Homo sapiens
ttgagattagtttaaaaaacacctctctgatgaccacagcatgtaggaagaagctgggtccgaaagagagaatgcaattgccaaagagaacacagaaacaggtgcagcaggcttgggctggc

SEQ ID NO: 119622 - DNA, 122 bp, Homo sapiens
ctgcctcctgggctcaagtgattctcctgcttcagccacccaagtagctgggaaaacaggcgcccaacacaatgcccggctaggttttatattttgagtagagacaggtcctcctgtgggga

SEQ ID NO: 119623 - DNA, 122 bp, Homo sapiens
gcatcccgcgtggaatcctgcttcctggagttccaggaaacaggatgtttcttggtgctccgtggcttcccggcacctgctgttgctgcttcggcacaggggactccggctcccgagcgttt

SEQ ID NO: 119624 - DNA, 122 bp, Homo sapiens
cagcccgtggcagcgacaagaagccaccacggccagagactgcagtctgggagcctgggccggagggagaccctcagctcggggagctcttctccccaccctgaggaagggcagagacaagg

SEQ ID NO: 119625 - DNA, 122 bp, Homo sapiens
ccgatccctggtggaggtccccgcgcctctctggagaccagtggtctggccccagaggtgcggccgcgggaagtggacattctttgtcaggaccctagcggaggtcgcgctgggtgtcgcct

SEQ ID NO: 119626 - DNA, 122 bp, Homo sapiens
gtgctccgccgcgtctcccgcgtctggggcgcggcttccgcgtgatggacgcccggaagccggcacaacaaatgcccaagcgccagggcttcgctgtctgcaggtccttccgctgcccgcgg

SEQ ID NO: 119627 - DNA, 122 bp, Homo sapiens
cacgcccgacctttgggatttgggggtcatgcccggcctctgggatttggaggtcatgcccggcctctgggatttggaggtcatgcccgacctctgggatttgggggtcacgcccggcctct

SEQ ID NO: 119628 - DNA, 122 bp, Homo sapiens
tcttctccacccaggagcggtgcgcagagaggctgatgtagaccccgggcctgttgcgctcggcacagccctcgccccagctgatgatgccggccagcagccaggcgccgtccacctggcac

SEQ ID NO: 119629 - DNA, 122 bp, Homo sapiens
tcacacatccctgtcgcgtcctctgctctctgctgccctgagcgcccgtgtgcccttcagcgtgagctgaatgatctgctctgtggccttcacatgcggcggggtgaaaatcacatcatcag

SEQ ID NO: 119630 - DNA, 122 bp, Homo sapiens
ggtattactcaacctaaccaagggaatggtttgctgaatatgtcgtactcaactgataggcgctttgcaggcatttaagaattctgtagtaacagatggagtgtgatcatatatttaaatag

SEQ ID NO: 119631 - DNA, 122 bp, Homo sapiens
aagagatggagactggcctgtcttcttggcagagctcaggttacagttgaaataaatagacgctcctgtttctttctcttttccagttggttatatctcattgccgtttgttcattcacatg

SEQ ID NO: 119632 - DNA, 122 bp, Homo sapiens
ggagcgagccagggagcggctaaccggggacccaccgcgcggagccagcctagctgccagcgagcccaacccgcgacgacccacgcccctgagccccgcagccgacccctgccggccggtgt

SEQ ID NO: 119633 - DNA, 122 bp, Homo sapiens
tatttttaaaaaagactatggcaaggacaatagtctatagttcaagtttaattttcatcccgtagggagcctgaggtaaataaaatagtccttagtgttctggtcttattatggtgtaaagt

SEQ ID NO: 119634 - DNA, 122 bp, Homo sapiens
gggatctgccaggagacagtgaggcgggcctcggaggcgccatgcactgacgcctggcaccgtgcctcccgcaccttgcctggatataggccgactgtccacttctgcttccgtggtcctgg

SEQ ID NO: 119635 - DNA, 122 bp, Homo sapiens
tcaggagcaccggctggccctctagtagctcctcggatggcttggattcgatggtgaagccgtcggggatggctgtggagggaggaagaagccctgtggcactgccctgggagtttgctccc

SEQ ID NO: 119636 - DNA, 122 bp, Homo sapiens
tcttttttaaaagggcgttgacggccgttcccggacaggcaaggcgtgtatgcccacgcccggagtgtagtgtctgggcatcaggctgtgaatttctctaaattaacatgaaaactctggtt

SEQ ID NO: 119637 - DNA, 122 bp, Homo sapiens
agacgggtgttttatttccctccttgccttgcccagggactgcggagttagttttggaatcgctctgttgaggctgagagacgctacggtgcgtgagcgccagtgttttcctgcagtataat

SEQ ID NO: 119638 - DNA, 122 bp, Homo sapiens
cggggacaagctgggctgcgagggcggcagggtcaaggcgggcgcggagcagagcgcgagcgagctgcgctgcaggcgcgtcggggtcgtcgtccaggcccagagccggatcagagttgcgg

SEQ ID NO: 119639 - DNA, 122 bp, Homo sapiens
tattagttttgccatatctgactaccacccatactattgtttacctagtattttttattacgttgacacacttgaactttttttattctaagaaatatttttgaaattatgggtctgtgtca

SEQ ID NO: 119640 - DNA, 122 bp, Homo sapiens
tggggagcgttaggagctcaggggggacacttttcctggggagggctgctaagagggtgccggggaggcgcctccatccctgattttgtggggaggagggggcgagggccccggagaagcag

SEQ ID NO: 119641 - DNA, 122 bp, Homo sapiens
tgggctcaaggtgtctcctgcctgagcctcaaatacctaggactacaggtgtgcgcactgcgcctggctagcttttgtttttatgctgttgggacacctggccatggtgaagtttggccgcc

SEQ ID NO: 119642 - DNA, 122 bp, Homo sapiens
gccgtctatcagtctgaccgtggccgccttttttccctttctctgaactggaggtccgaacgcaaggctcattgatggcaatacgcccaaggtgttggaaacctgtgggaagccgaacctca

SEQ ID NO: 119643 - DNA, 122 bp, Homo sapiens
tatctgaaagctgcgggcttcaggtgtttctatctattgggagatgccgttccctggcgccggctgcaaacaattattattttagagagacagctaaccaaccgcctgaccaccacctgatg

SEQ ID NO: 119644 - DNA, 122 bp, Homo sapiens
gggcagctgtgtctgccacgtgtgggcccagcgcagtggcgaggaagcttccttctcactcgcgggctcgctgcaggacagccaggaaggcagcccaggagggggtgcctatgacatatttg

SEQ ID NO: 119645 - DNA, 122 bp, Homo sapiens
agagcctgtcccattgcagcttcagaggctgccaaggttaggcttggggaggagagggttcggctcctggagagtctgccttcccggcctggggactgtgcagagaaactccaccagagagc

SEQ ID NO: 119646 - DNA, 122 bp, Homo sapiens
tcagagggctccttggtctagcggtagtgttagcgtcaaggaaaaacacccgctacttagcggaccgggaaagggagtctccctttccctgggggagtttagagaagactgtactcctccac

SEQ ID NO: 119647 - DNA, 122 bp, Homo sapiens
ggctggggaagggtgagtcaggggcccctgtgggactgcacggggtggggggcacgggcccggacctctctcacaaatgcccacgtggtccccaaggctaacgccggctgcgtgggccgcaa

SEQ ID NO: 119648 - DNA, 122 bp, Homo sapiens
tcttagaagcccagatttctaaattgatggtttatgacagggcatctcttttccatagtacgctgaataattagtgtttgatatagaagaaaaacacagagaattgacctaaaacaagatgc

SEQ ID NO: 119649 - DNA, 122 bp, Homo sapiens
actcccggcaggcccacttcagggctcctttctgacaccgcccagctcaacctctcaaaacgattcacaaaatgctgtaatagccacgatgcaccctcactgcactgtcccatccgcccctt

SEQ ID NO: 119650 - DNA, 122 bp, Homo sapiens
cggccagcccggggccgccttgccggtgccgggactacgaatcccaataagcccgcgcggcgcaagtcttccggtctggcgtctgacgtcttaccctccacagaatcggaagttctggactg

SEQ ID NO: 119651 - DNA, 122 bp, Homo sapiens
aatgctcaatttgtgagttttgagtctttcttttctgattcagattctgctactaactagcggtacctctggcaagtcactttaccttagtagatttcatgtcagagattaaagtggggaat

SEQ ID NO: 119652 - DNA, 122 bp, Homo sapiens
acgggctgctcaaaccacgcagcacccttaatcttgtgacacggagggttctccgaataccgtagctcatctgaacacacacccttgtgaaggatccacatagaaaatgatggtgagattcc

SEQ ID NO: 119653 - DNA, 122 bp, Homo sapiens
cgcccccgcccctccgccctgggacccccgcgctcaccctcctggagctgcctgccctgccgagcctgcccaggagctctcagtttcgattctggcccgggcactgacgctgatcgcggaaa

SEQ ID NO: 119654 - DNA, 122 bp, Homo sapiens
gaagagtgcagaaccacagcattttcaaatgaaatgaaaaatgaaagatcttaccttgttcgtgtcaaaggtattataaacttgatcaatatgtttattggccttctgattcagaccttgca

SEQ ID NO: 119655 - DNA, 122 bp, Homo sapiens
agctgatggacagcaagtcctcaatcttggtccctattacgggaaaacgagcctccggggcggcctggtagtctccctgtgacccacagttccctggggcccccacagaaagcagctcccag

SEQ ID NO: 119656 - DNA, 122 bp, Homo sapiens
tcctgctctgaaggctgcctgtgctgagcgggtccctgcagggcgactggagcttagcggcgcagcacctgcttgaggcgtgggggccccgccccgcccgggagggcggtcctgctgcctcc

SEQ ID NO: 119657 - DNA, 122 bp, Homo sapiens
tagaaactttgagccgtctgtctccttccctgagccggtcgggcacacgagggtccataacgtgcggcgcagcgccatctgctggcaggccactcctggccgccccaacagccggcagccgc

SEQ ID NO: 119658 - DNA, 122 bp, Homo sapiens
caagctgggcccagtccgcaggcgcgttacgtcacatcgcgaacagagaaaggccgcttgcgcaggcgcagttctgacgactgccgttcagcacctgcgtaagcacctctcggccagggtga

SEQ ID NO: 119659 - DNA, 122 bp, Homo sapiens
ttccggtcaaagcaccgcttgggggcggggcctgcgacacgcggtgggcgggtcctgagtcgcgaccctggtccggacctgacctgaattgcgaccccaacctggactgctcccctgaccgc

SEQ ID NO: 119660 - DNA, 122 bp, Homo sapiens
cagaaagcaattcaggcctcgtttctccaggaagccttctctggcctccacctttgatttcgatggtctccttcatgttccccagcccccgtctatgcctccaccttggtatatcatgctct

SEQ ID NO: 119661 - DNA, 122 bp, Homo sapiens
cgccgttcccggggcccgccctctcgccggagcccccgccccgcccgccggcctggatcgcgcatttcctggaattctggacccggcgtcctcgcccgccgacccgaaaactacggccccgc

SEQ ID NO: 119662 - DNA, 122 bp, Homo sapiens
ttgggtcctcacctctgcatggttactaacgggttatccgagcctaagcctctcacgaagcggaaagtcaagttaacagactgccataggcctgccaagtcagaatagggcttccgaagcag

SEQ ID NO: 119663 - DNA, 122 bp, Homo sapiens
cgaggacacacctggtcccggccagcgcggcggagggcatcgtgactccaggctgtaccgcggcccccaacgaagcacgtgaccctcgtgtggtcataaagggagagcacagttttacgggg

SEQ ID NO: 119664 - DNA, 122 bp, Homo sapiens
ttccagaaggcctctaccagctggccaatcatgatccacgtgtaaacacttcccagaccccgtttccccttttctggttcctataatcacaggccttgggagcaagctttcagaatgcacct

SEQ ID NO: 119665 - DNA, 122 bp, Homo sapiens
cagcctcatcgagttcagcaccatcctggagggccgcctgggcagcaagtggcctgtcttcgagctcaaggccatcagctgcctcaactgcatggcccagctctcacccaccaggcggcacg

SEQ ID NO: 119666 - DNA, 122 bp, Homo sapiens
ttttttaaagctgcttaatgacttaaaagtgctttgaggttctgtgaaactcatcatgatcgtactgacttctctcctgtgatttttgttgttgttgttattaagtagctcatggtgacaag

SEQ ID NO: 119667 - DNA, 122 bp, Homo sapiens
cccaaccttatccatgtaacagtatgaatttcctggcccagagacctaaacaagaagtcacgaatatacctacttttggttgcacttgccatttcaatgcttaggaaaacagagtggtcagc

SEQ ID NO: 119668 - DNA, 122 bp, Homo sapiens
gattcaggttagacattttttgcaagaagaccatataggcgaagtttttcctttttcatacgcattacatcaggaggcatatgagatcagatggccatttattggtaatgctacttctggtt

SEQ ID NO: 119669 - DNA, 122 bp, Homo sapiens
agaaaagcctggaaatggtgtgggctattgttgggagaacccgcctcgcaacagagctgacgttgaccacagcagagaagcagcttaacctatctactgcgataactctcatgcctgttggg

SEQ ID NO: 119670 - DNA, 122 bp, Homo sapiens
cagcagctttaccagcttccttctactgctagttcaagaacatcaacaagggccggaagacgaacatcattgactcgatgcttcggatgctggagcagtactctagtaacctggaggatctg

SEQ ID NO: 119671 - DNA, 122 bp, Homo sapiens
agcgcggcgcggcgcggcacgtcagtggccttccggccggaagtccgcagcctcccgagccgctgattggctttcaggctggcgcctgtctcggcccccgcgccagttttgggctggttggc

SEQ ID NO: 119672 - DNA, 122 bp, Homo sapiens
taactaatctctgctctttctggagggcaataactgagactcagtttcaccaacaaagttcgccagatgttcaaagaggaaaggggctaggctacataagttgggacctggtacttatcttc

SEQ ID NO: 119673 - DNA, 122 bp, Homo sapiens
gcaattcactgcatgttaattaagagaaaatacctttcctgcgtaagcaagagcagcaggcgtagcagattctggaacagtgctaaccaaatctgcatccacaggtgcttcaatcgctagct

SEQ ID NO: 119674 - DNA, 122 bp, Homo sapiens
agccggcgagggacattggaccagggtcgggggtcgcggccgctccagcgaggtaagagccgggaagaccgggagagaccacctcttccatcctgggggggtccctgggggacggtctccca

SEQ ID NO: 119675 - DNA, 122 bp, Homo sapiens
tcacttagtaaaagggatgcattgactcagatgttctgtcctatttaaatgagaggggcgcgggaggtgatggaacacaaaaccatgagccatggctttgctggggaatgctgtggatctgg

SEQ ID NO: 119676 - DNA, 122 bp, Homo sapiens
tttaaacaattgcccccaggacaggcaggcatgggtatgtgagtaccctcctcacctaaccgaattcccatactcatgtctctctagacctgataaattttgtagaccttacttacctcaga

SEQ ID NO: 119677 - DNA, 122 bp, Homo sapiens
catccatcttcaccctcaggacagagacaagccacagatcctcagaaaggcctcaggaggcgggaataaaacagcctgccctaggattccagtcttaaaggatggtgtcataaggatctaca

SEQ ID NO: 119678 - DNA, 122 bp, Homo sapiens
gtcaagttcaaaacatgatgtgtgtatgaagcggcaccaatataaacacggctctccacccgcggcagctcgcagaatcctcttcgtgcctgcatttgttccgaggagcgcagggaggctgc

SEQ ID NO: 119679 - DNA, 122 bp, Homo sapiens
cgcccagggtccgagtgctctgcgcccagcgcaccgagggagccaaggccgtcgggccggcgctttcagctgtctctcgcagcagctcagggccgcgccccctgggctggcgtcgtgcccta

SEQ ID NO: 119680 - DNA, 122 bp, Homo sapiens
acctgaatatgaactcgctcctattagaaatggaagcacacccagagtgctccggacagacgcccagcctgctgtaggagctcctgtgggctcatctgccttcggagcatgcacctgcatca

SEQ ID NO: 119681 - DNA, 122 bp, Homo sapiens
gccagggagcgccccaacgcggactcccagcctacgcgcgttcaccctggaccttcctcgcgaccgcgcctgagtcgcaccagcggcagagagcgatttcaccaagcatctaagagttcttt

SEQ ID NO: 119682 - DNA, 122 bp, Homo sapiens
gcgcccgctggatggggggtgcgcgcgacgcctgcccttcggggagggcggggcttggagcgggctgcgctcccgcccgcgctcggcctctgccccgcccccggacgcgcggccctcagccg

SEQ ID NO: 119683 - DNA, 122 bp, Homo sapiens
acttcctctcctgtcaggaaccagcccgaggccaccagggtgctcctgagtgctgggtgccgggcggacgccatcaacagcacccagagcacagcactgcacgtggccgtgcagaggggctt

SEQ ID NO: 119684 - DNA, 122 bp, Homo sapiens
gcggccccaggtgtcccaagccccggcccctcctgggtgggtgctgaggagaggaagctccgtcctcacggtggaccccccgtcctcacagtggaccccccgtcctcacagtggacccccca

SEQ ID NO: 119685 - DNA, 122 bp, Homo sapiens
ctggaggctcctgcagctgcgatgcctgcccggtgagggggctgccaagccggggagaggcggggagcgcggagggggcgcgaggccggcttcagctgggttcgacggtggggggaagaggc

SEQ ID NO: 119686 - DNA, 122 bp, Homo sapiens
acgttcccagacggttgtcctcatcccaagagcggggcctggtcgcagtcactgggcactcgctgtttgttgagcagagagccagggacaccttgtgccaccggttctctggcccctgccca

SEQ ID NO: 119687 - DNA, 122 bp, Homo sapiens
tcttgccgcgtcctcacatggcagaaagggaaagggcacacaggcaccgagctcattcctcgcccttttctaaagcactgatcccacccaggagggcggagcccccacggcctcatcgcctt

SEQ ID NO: 119688 - DNA, 122 bp, Homo sapiens
ggaaataaaatctagggaggatagtttcctggggtcacacagtagtaagtgccagagctacggttaaaaaaaaaaaaaaaaaaaaaaaaaaaacatagacaatctaatgccagaacccatgc

SEQ ID NO: 119689 - DNA, 122 bp, Homo sapiens
ctcccggaggcggagtggggggcggcagcagcagcagacacttttagcctgactttcctgcgttcgcttgcgagcgtgtgagcgtgtgcgcgcccaggaggagctgtaacctgctatttata

SEQ ID NO: 119690 - DNA, 122 bp, Homo sapiens
ttttaccaaggacccgccaacatgtgccgcgtttgcaccaaaaccgtgaagaaggcggcccgggtcatcatagaaaagtactacacacgcctgggcaacgacttccacacgaacaagcgcgt

SEQ ID NO: 119691 - DNA, 122 bp, Homo sapiens
gccccaggcctgggcggagcagaccaccttggggagactggctggggcacggtgccccagcgctcaggtccggcccttaggcctctggccgagttagggtcggggccgcgctggtataggcg

SEQ ID NO: 119692 - DNA, 122 bp, Homo sapiens
agcgcggttcttcctgggcggtggctttgggcttttcgtacccacagtcaagtcagttcacgtcgcctcccgcacacacgcgttcataaaacgaaactggagtttcacgaagcaattcttag

SEQ ID NO: 119693 - DNA, 122 bp, Homo sapiens
gtccccaatcggccagtggcagcagcagaaccggggtccacttggcacctcaggggctctcgcccgtccgctctgggcgtcgggctgtccagtttccctgggaatctgggagaggaaggagg

SEQ ID NO: 119694 - DNA, 122 bp, Homo sapiens
agtcaaaataaagcaacagtttcttaataagtatgtttggagttacactctggactaagacgagccgaatcgggcgaggggatgcggacttaaaggttccagtgttcttctccatacggcaa

SEQ ID NO: 119695 - DNA, 122 bp, Homo sapiens
cccaaacctctttgtccagctcgaacccacagaacagggacaaaagtcgacaaaacccagcggtgcctcacccagaaacctggcaacgcgggcggaacagagccggttggttgctcagtgcg

SEQ ID NO: 119696 - DNA, 122 bp, Homo sapiens
gattctcataaggagtgcacaacctcaattccttgcatgcgcagctcacaataggggtcacgctcctatgagaatctaatgccagccgctgatcagacaggaggaggagctcaggaggtaat

SEQ ID NO: 119697 - DNA, 122 bp, Homo sapiens
tacagaggaggaacccaaggctcggaaacagtagctgctgctgtcacagctcccgggtcccggcccgctgctgtcgggtcagaggcccccgggtcccagcccactgctctcgggtcagaggc

SEQ ID NO: 119698 - DNA, 122 bp, Homo sapiens
gccccctttctccggggatgccccttcctcccccagcacccccttaggggacggtggcgacggggtctgaactctgctcccccacccgcaggcgcggatcaagaagatcatgcagacggacg

SEQ ID NO: 119699 - DNA, 122 bp, Homo sapiens
aataatgctgcaaagaacatctgtgcacaagtttttgtgtagacatttgtttttatatcacgtgggtatccaccaacagtgcatgagggttccaatttctctgcatcctcaccaacacttga

SEQ ID NO: 119700 - DNA, 122 bp, Homo sapiens
cccgcccccacccgccggccccgggggtcgggaccccagcgccgcgcgcccagcgccccgcgcccccgccccacccacctgtgcagaagtggccgccgcccatggccgcgctggccctcggc

SEQ ID NO: 119701 - DNA, 122 bp, Homo sapiens
ggtgggtggggggaattggaagcaaatgacatcacagcaggtcagagaaaaagggttgagcggcaggcacccagagtagtaggtctttggcattaggagcttgagcccagacggccctagca

SEQ ID NO: 119702 - DNA, 122 bp, Homo sapiens
caggcttagtagagatagaagctgctccggagaaagcgccattatcatgcagcagttgtccggatgaaatggacatttatgaatcactgccaaggaaactatattatgggttgtaaattaaa

SEQ ID NO: 119703 - DNA, 122 bp, Homo sapiens
ctttggaaagaatgcacaccatccactctctctagctggtaggagacaatcctagcataccgccctctttttcttgcagtcataatagcaaatagtttgagtatattgattctcgagtcaca

SEQ ID NO: 119704 - DNA, 122 bp, Homo sapiens
atccgcgctcgggcggggcggcccgcaggccgggcggggcatcccggggccgggccgggccgcgaggctcagtggagcctccttgcatagatatttgtgtctttgattattggtagtagtgg

SEQ ID NO: 119705 - DNA, 122 bp, Homo sapiens
aggaggcttcgggagaggctgggcctgtgctcagggctgagtgagactagtggacgtggccggccccatgcctctctgtgcacggctggatcttgcaaacagtcgagtcctggctgctgcgc

SEQ ID NO: 119706 - DNA, 122 bp, Homo sapiens
cggccggaggcggggcgcggaggggacgtcggcgtggggcggggccagtagcagttcccacgccggcgctccaggcgcggcaggctgccgcccccggaagtagtgggtaccgggacgccgtg

SEQ ID NO: 119707 - DNA, 122 bp, Homo sapiens
ctctgaagagaggagcatctacatacaaagaggcttaaactgcccagaacctccgaatgacgaagaatcaccgccagtctcaactcgtaagctgggaggcaaaaccccaaagcttccctacc

SEQ ID NO: 119708 - DNA, 122 bp, Homo sapiens
cgtccgatgggggcggggctggggaccccgggagtcaccagcatccctcagcctcgagcacgagccctcagccaccaccggaaggaagacagggttcccggaactctattcggaggctctgc

SEQ ID NO: 119709 - DNA, 122 bp, Homo sapiens
gaggaagcgccggctttgcctgtgaaagattctttcattcgctccattcttgttcttgcgcgctggatttaccaggctaacaaacaacagctgatcacggcaggctgggctcctctgggact

SEQ ID NO: 119710 - DNA, 122 bp, Homo sapiens
ggcaaccaaccctaaaattcttaagagacgattatttgcaaaggcagaaagttcatcccccgggagggatccattcctaggctgaacaactcagttaccagcaagttctcacacaaatgtga

SEQ ID NO: 119711 - DNA, 122 bp, Homo sapiens
ccagcagtgggtggggtgggtagcccatgactcctcatcctccctgcaggcgagcccatccggcccattgaccctgcggcctgggtctcccacactgcagccatgaccggcaccttccctgc

SEQ ID NO: 119712 - DNA, 122 bp, Homo sapiens
cctggccgcacacctgagaacatgctggcaaaagcgtttgcttaattaattgactttgagcgagggagcccgtccccgtgtaaacctagcagcaggctcggtgcttgccgccgggatgctgc

SEQ ID NO: 119713 - DNA, 122 bp, Homo sapiens
actttctcgggtttccgttaccaaaagcgtttccgtgaatagcgtgattggaaacttgtgcgggccggagaccgcggcgcggctgctctttcaacaggcgatttgttctcctgtccgaggct

SEQ ID NO: 119714 - DNA, 122 bp, Homo sapiens
gccacatggggggcagatgtccccatggcaggccacgcctaccaacaccctagctcttagcgtactgccttgaaactgcctgacttcttgtctgtttcgtgtactggactctaagaagaagg

SEQ ID NO: 119715 - DNA, 122 bp, Homo sapiens
gattagattgacaaaaattaaaagggaaaaacaggaactcctccggttcactggatctcgcgaggtggccaaacaactatgaaaacaaaacgttagcgtttgcagtattacatccctcacag

SEQ ID NO: 119716 - DNA, 122 bp, Homo sapiens
ggagcccccagagaccccgctgattggcctggggacattccggtgctgcagattagtgaccgatggccgtgtcctggctgggacagtgtcctccgagcccactgatggcttccgctccccag

SEQ ID NO: 119717 - DNA, 122 bp, Homo sapiens
aaagtcttgttcataaggaagctggagaactcaatgtaaaatcaaacccatctgtaatttcgagtgggtggagctcttgcttttggtacatgccctgaatccctcactccctcaagaatccg

SEQ ID NO: 119718 - DNA, 122 bp, Homo sapiens
cctgcatgtaattttctgcttcgctaaaggcctctccccaactatataagcttcagcccccgcctcacaaatctagatctacccttgacctctctcacaaaaccatagctattgagaaatct

SEQ ID NO: 119719 - DNA, 122 bp, Homo sapiens
ttatggaaatcattgaaggtctggatccctttctctgaatggagagattgagagggatgtcgggcagttcccattagatttagtggccttcatgttattcagaattgttttggtgatacctc

SEQ ID NO: 119720 - DNA, 122 bp, Homo sapiens
aggtcccggtgaacaacacagcctgttggattcctggccagtgtgttctctcctacctctcgggatccaccttcctgtgtatgctgcggggagaggaggccctgtgctgagcgcttggggag

SEQ ID NO: 119721 - DNA, 122 bp, Homo sapiens
ccagcgtactcaccattaaggcagttcataaaattatttcctccttattctaaccagcatcgacatagaatctgccagcagcaaaactgtgaccaggcagagaaacgggtgggggacagttc

SEQ ID NO: 119722 - DNA, 122 bp, Homo sapiens
acaccttagcaggctgaaggggggttgtagtggagggaggcttttgtgcggaagggtgaccgtctagcaccaagctcagtcccagatggagcaatggcgataaggcttgtttgggcgccacc

SEQ ID NO: 119723 - DNA, 122 bp, Homo sapiens
caggcaaactttgaaaacaaagttcactaaaaacttgccattctcctttctattcaaaagcgaaatatttccttaggtcttctaatttttccagatttgattttctctaaagttttgaattt

SEQ ID NO: 119724 - DNA, 122 bp, Homo sapiens
tttatttatttatttattgagacggagtctccctccggcgcccaagctggactgccgtggcgcgatctcagttcattacaacccccgcctccggagttcaagagattctcgtgcctcagcct

SEQ ID NO: 119725 - DNA, 122 bp, Homo sapiens
ttctttgactcggaaagggaactccctgaccccttgcgcttccaaagtgaggcaatgcctcgccctgcttcggctcgctcacggtgcgcgcacccactgacctgcacccactgtctggcact

SEQ ID NO: 119726 - DNA, 122 bp, Homo sapiens
agaaaaaaagaaagcagcagattgcagtttatttctctttgtatctttactccccatcttcgtgtgtgtgtgtgtgtgtgtgtgtgtgttcggaggctagactgccttacccagttgtggct

SEQ ID NO: 119727 - DNA, 122 bp, Homo sapiens
ctctcttctggaccctcccgcggggccctctgcccgcctgttcgcacctgccccagcacccgcctctcgaggggctctggccccgaccctgcgccttccggccacttctcggacccctcctt

SEQ ID NO: 119728 - DNA, 122 bp, Homo sapiens
aagccccggggggggctcacagggacatgcacgttcctgctgcccagggggtcactgcgccgctgacaagtttcgaaaatacagcgtatccttgtgcacatttgaggtgggtggctaaaaat

SEQ ID NO: 119729 - DNA, 122 bp, Homo sapiens
tacttggtctgctcgaaggttttctccagcgcgaagatctgctggcccgagaaggtcgggcgcgagtgcttcttcttcccgtccttgtccaggacgccgccggccggggctgcaagggaggg

SEQ ID NO: 119730 - DNA, 122 bp, Homo sapiens
cacctcccagagggcctccaccagcccactcaccttcgcccagggtctgcttgagtaaatcgtgcttggcctgcagcttggtgatgaggttactgccattcacatactctttaaatttctgt

SEQ ID NO: 119731 - DNA, 122 bp, Homo sapiens
actggaatgatctttcactgtgaataatagtcgtggcatggtagcgaatattcccatgttcgggactgggtgtttagcacactgagaagcgttgggagaataacaacagaagagactcactt

SEQ ID NO: 119732 - DNA, 122 bp, Homo sapiens
agggatactcagaaggacttcttgatgtgtaaggttaaaagagagactacaaagcagcagcgtggaagaagttacagtgtgagggactgcagttagatactcaggagaacttctagggaggg

SEQ ID NO: 119733 - DNA, 122 bp, Homo sapiens
gtccccacgccccgggctccgcatgcccgcaggaggggtgggtacggaaggggaggatggcgcagcctcgcccggcccgcgatgccccctaggcctccccggcaacctccccttggcgccct

SEQ ID NO: 119734 - DNA, 122 bp, Homo sapiens
aaagaaaaggctagacgacacaggaatgattgtggagggggctgtggaaccacaaggcgtcgcaccgggggcttcagggggtgctggccactgggagattccgactgcagcccatccacaaa

SEQ ID NO: 119735 - DNA, 122 bp, Homo sapiens
tggcccagggcccagctcagccgactgggcagtcgatgtaggtcctgagaagagcggcggcggcggcggcggcggcggcgaaggaaaagcgacactgaagcgaaggctcgcggtttcggcct

SEQ ID NO: 119736 - DNA, 122 bp, Homo sapiens
tctgccagtgggggggacacacgacctgggacccccaggccacttgagactctctgggctcgttgggctgggcccaagctcccaggccccctcctctccatttctcaacctgctgccaccta

SEQ ID NO: 119737 - DNA, 122 bp, Homo sapiens
caaactcctgagctcaagtgatccacccgcctttgcctcccaaagtgctgagatcacaggcgtgatggtgggagaagtccagatgtgatgtattgaattacattaaaaaccacaagttagta

SEQ ID NO: 119738 - DNA, 122 bp, Homo sapiens
acccagatggggctttccctttgtagccatccaatgggcattgtgtgggtgcttggaacccgggatgactgagggggacactggagtgggtgcttgtgtctgctgtctcagaggccttggtc

SEQ ID NO: 119739 - DNA, 122 bp, Homo sapiens
ctcctggcagcggcggcggctgccaggggccgggcggggtgggggctggaagccgcagtgcggccccaggccggtgcgcggggggaggcctggcgcggcgcccgccacctgcccgggcccca

SEQ ID NO: 119740 - DNA, 122 bp, Homo sapiens
actttcttaatgtgacctagcaataggcatagctacgtggcactatattctggccagactcgatgtgtactctaacttaagaaataaatcagtaaggcagaacaagagacatgctttgcttc

SEQ ID NO: 119741 - DNA, 122 bp, Homo sapiens
ctaaatgggagggagattccagcataactctgcaaggaaacttacctccactaaggagtacggggcacagttttgggagctctatgcaccatcgaggctaagcttctcctggttctacaagg

SEQ ID NO: 119742 - DNA, 122 bp, Homo sapiens
ctatcttgtttgacccccacagcaacctggagaatgggcagggcagtcttccccactgtacgtttgaactgttctggcagttgactttcctgacccactcctgaaatctgaaacaaacctgt

SEQ ID NO: 119743 - DNA, 122 bp, Homo sapiens
tgtaatttccatgagctgaatatgtagaagataaactggtaccaaatactgaccgaaagccgcttaaggagagctgtctggttacctttgtatacaacatcataacattcattgtaggtaat

SEQ ID NO: 119744 - DNA, 122 bp, Homo sapiens
cggacgccacctaccacactatgaataccatcccgtgcacgtcggccgcctcttcttcatcggtgcccatctcgcacccttccgcgttggcgggcacgcaccaccaccaccaccatcaccac

SEQ ID NO: 119745 - DNA, 122 bp, Homo sapiens
tccaatgaaacactgccctgctggggtataatattatggtaggcaggaattaatagatgacggaacttctaaagaaaattcctaaaggaacactgctttgaatgtgagcctcttccattaat

SEQ ID NO: 119746 - DNA, 122 bp, Homo sapiens
ctgcaacagtaagattctggggcattaagacttagttccaggattctgtcattctgccaacgttctgtggctggggttctaaaggagcttgcctggcttagaactgcaagtgactctagtgt

SEQ ID NO: 119747 - DNA, 122 bp, Homo sapiens
gaaagcactttggaaaatttacaattaatatctccgctttgaaaacacattaggagtatgcggggggagaaaatcatgcattcttagcctgatttactaagcatctatcagcctccttgact

SEQ ID NO: 119748 - DNA, 122 bp, Homo sapiens
gggtcgaatgtggggtctttgcgggaaaatcgctctcggaatttctctaaccttcagactcgaattagaaaagtaagggagctccagtagtaaacgtctttattcttccgtgacgtcgcaca

SEQ ID NO: 119749 - DNA, 122 bp, Homo sapiens
ctgctgcggccactgagccgggtggaaatcctacctatgccctatgtcactgaggccacccgagtgcagctggtgctgccactcctggtggctgaagctgctgcagccccggctttcctcga

SEQ ID NO: 119750 - DNA, 122 bp, Homo sapiens
gatgcacctgaccttccctttcagcaaggcgtgacagtgcctctctgggagcttctgcaccggatgcacctgaccttccctttcagcaaggcgtgaccgtgcctttctgggagcttctgcaa

SEQ ID NO: 119751 - DNA, 122 bp, Homo sapiens
aacttatgaataggactaataattgcatttctgaatcatctttgtcttttcccaagaaatcgtctttcaaggacagttcagaacacagtcttgaaaagaattacccaagatggctcactagc

SEQ ID NO: 119752 - DNA, 122 bp, Homo sapiens
tccctttcttgtccatgggcagaagtggccattcaagaggtactgacacaggggtccaggcggggggcagagggctgagtctctggaggagggaggtcagatgacttgctgcaaagagagta

SEQ ID NO: 119753 - DNA, 122 bp, Homo sapiens
cggttcgcagggggtggccgggcgggggcagggatcagcgggcccggcggggggcggcgacggctttacccccagctcgggacgtgagcctcgtagtcccagtactcgcggctcctcagact

SEQ ID NO: 119754 - DNA, 122 bp, Homo sapiens
aagcctggggcaaggaggggctggtgcctgagtgagaccccgagcttcgctcgccaggcccgtcgctcagctcccggtctgggtccccagtcagcagttgctggggaaggcgcaggagctgg

SEQ ID NO: 119755 - DNA, 122 bp, Homo sapiens
cccagcacagtcttggggccctgtccacatgggacagatcatccaaggtgacaggttttccgactcccgcgtgggctctccaggatgtgtgggtgggcacacgcggcccgctcaggtccggg

SEQ ID NO: 119756 - DNA, 122 bp, Homo sapiens
gctctattgagctgcctttgttgaaggactgagttgaacagcagatcttgccgaggctgccgcttcctgccattcacactgtcccagagaaaccttccctgagcatcatgcagttttccttt

SEQ ID NO: 119757 - DNA, 122 bp, Homo sapiens
ccagaaatctcaaattctacctactgtgtggaaagctggagatagctaagggtgtgtgtgcgttgcctttggtacagcaattattcctcacacagcagagagtgttctggataggtaaaacg

SEQ ID NO: 119758 - DNA, 122 bp, Homo sapiens
cgacgtaaacctgagggaagcgtgttctcatgctcactgtcgacgtaaacctgagggaagcgtgttctcgcgctcactgtcgacgtaaacctgagggaagcgtgttctcacgctcactgtcg

SEQ ID NO: 119759 - DNA, 122 bp, Homo sapiens
taggattacaggcgtgagccaccgtgcccggcctctcactataggactttcttaagccttcgatatattagtgtgcattgagaccttcagcagaggcacttggtatgcagcttttcccaaat

SEQ ID NO: 119760 - DNA, 122 bp, Homo sapiens
ttttaactgtcatcactcctaacctagacctagagtggctttttccggtcctagctctgccggacacacgctctgcccagagacccgatccacccaaggccaggcggtctggggtcacgtct

SEQ ID NO: 119761 - DNA, 122 bp, Homo sapiens
gtgcccggcttttaaatttttggtcgagacggggtctcgtcatgttgtccaggctggtctcgaactcctgggctcaagccatcctcctgcctcagcctcccaaaatgctgggattacaggcg

SEQ ID NO: 119762 - DNA, 122 bp, Homo sapiens
gaagccggagaacgaccccgagtggtggaaatgcaaaaatgcccggggccaggtgggcctcgtccccaaaaactacgtggtggtcctcagtgacgggcctgccctgcaccctgcgcacgccc

SEQ ID NO: 119763 - DNA, 122 bp, Homo sapiens
tgctgagcttggcctgcacagatacattcctagtggtcattgtggatgccatccatgcagcggaaattgtagcctccttcctggtcattgctctatcctacatccggattattatagtgatt

SEQ ID NO: 119764 - DNA, 122 bp, Homo sapiens
gtcattgctgacagtcctggcattccggtggctgcttcttggcagtgagcacttgtctatcgtaagcacttgtctgcatggtacttttacaggcaccaccttgctacttgtgtagtaggtta

SEQ ID NO: 119765 - DNA, 122 bp, Homo sapiens
tcaggaagcctatggtgaagtgtagggagggctcctgcctccatttcccacttccaaggccgcggcacgctggggccaccggcctctcacacaggcggccttcgcccaggtgcagccgtagg

SEQ ID NO: 119766 - DNA, 122 bp, Homo sapiens
cccaagtgatgtgcccgcctccacctgccaaagtgttgggattacaggcttgagccactgcgcccggcccagagacactaaatgccttacacaacatcaggagtgtccagatatattcagaa

SEQ ID NO: 119767 - DNA, 122 bp, Homo sapiens
gtctaagtccgggcagccgaagagtgtggtaggtaacggtcctcagcgcaagggtcatttcgtcgctgggaagggacggccctcgcccgcggtgatggtggtgagctatgcccgtggtcctc

SEQ ID NO: 119768 - DNA, 122 bp, Homo sapiens
attggttgccatagagatcgtcgagcgctgggcctgtgatcgctgaggggcgagcagttgcgaccctgggctcctggggacctgagcgttatgtctttccgcgacctccgcagtaaggcagc

SEQ ID NO: 119769 - DNA, 122 bp, Homo sapiens
ctcttcagctcgcggcccaggggagtggcgaggggcgccccaaccccctgcccgcctctccgcacaatacttgaacattcatctgtactgaagtgttacttgaaccgggggaatctcggacc

SEQ ID NO: 119770 - DNA, 122 bp, Homo sapiens
cactgagcattcctattaaataagcctccaagtccccacctggtacgctttgcggtggggcgtggggaagagttgggctgcggccagggtagcgagagggggtgggatggaggatgcagcgc

SEQ ID NO: 119771 - DNA, 122 bp, Homo sapiens
aaactcaagcaaaggacgaatctcacggacactcagagtgaaagaggctggctctaaaggcgtaaacacagtgcatgatctcacctacttgaaggtcaaaaacagccagaaaaactaatcta

SEQ ID NO: 119772 - DNA, 122 bp, Homo sapiens
cagagtttgaaacagcctgactctcctcttctggcaacattcttttccttggtttggggacgctgtactgttctggttttgcccctccctccgagcattccttgtgtttgtcctggcccatt

SEQ ID NO: 119773 - DNA, 122 bp, Homo sapiens
gggactggtattttcgcttcttttctggagaatacaaaactgaaaaggccacactctctgcgggtcggcaaaagaaaggctaagactggaggatccctagattgggacaggagtagaggatt

SEQ ID NO: 119774 - DNA, 122 bp, Homo sapiens
agctgctgtgctgcccaggagaggcctggcctcaggctgccagcctcagggaggtagatgcggctgtgacagcagcaaagaatgacggccaagggcgacagcaggggctggccatgctgtaa

SEQ ID NO: 119775 - DNA, 122 bp, Homo sapiens
cctcctccacagcctcccactgtccccagcatagagtctacactctgcatagagtctacacgatgctctgtgacccctcccctccctcttctcctcgtcctggattctccagcagctttcac

SEQ ID NO: 119776 - DNA, 122 bp, Homo sapiens
tggaagatggagaatgaagcatcagaaataaaccaggaccctaatttgcatggatttcctcgttggaacaacgtgtgactactacttatcttcgggaaattacttatcttgatgcgttaagg

SEQ ID NO: 119777 - DNA, 122 bp, Homo sapiens
ttcgacaaaaccgaaaggaggcagatgacgtgtggaaaggcctggcccacagtcacaggccgcgcacgcggaaactcatcctcacatccaccctctgcgttacccaaaaccgacccggggcg

SEQ ID NO: 119778 - DNA, 122 bp, Homo sapiens
agtttccagccacgccccaatgtccggcggaagggagggagggtctccggccgccacggccggtggtagttgtacaaacagctgtgtgcttattcatcagcggtgctgtgcgagatccggtg

SEQ ID NO: 119779 - DNA, 122 bp, Homo sapiens
gcctggctccctttcccaacaccatcccttaaacactggtgttcttcaggcttctgaactcgacctagtctacctgtagactgtgtctcctcattctatgtcctcacagggaggtgagtctc

SEQ ID NO: 119780 - DNA, 122 bp, Homo sapiens
ctgaatgcctgctttgtgctagacattgtgtatggactgtaatacacaagcaatagggttcggtgcaataacacctatgtgcaaaatacctggaagtatttattgagcacacactcttcgaa

SEQ ID NO: 119781 - DNA, 122 bp, Homo sapiens
tccgcatcgagcagcaaatcgagaacctgcaggtgctgcacaaggcgcagaagctggaggcgcgcctcgagcaactggagctggagctggagcagctgctgcccatctcggccgccctgtcg

SEQ ID NO: 119782 - DNA, 122 bp, Homo sapiens
aagagcgaaactctgtctcaaaaaaaaaaaaaaaaaaaaaagaacgtgcaggaacaaggtcgctgcttagggcggtgggatcctcaggccatgttgtggctttctccacaacatttccttgt

SEQ ID NO: 119783 - DNA, 122 bp, Homo sapiens
gggctttgtcctgaacatgatctctaccagaactgggcctcggggcgcgggcagaacggccggcagacatgttttgtttggctgagaacagggtttcggaagaatttaaattggttgccaac

SEQ ID NO: 119784 - DNA, 122 bp, Homo sapiens
acgcaacctatgctggactctcccggcagagtgagtgtggccctgacagcggggagggggcgggcaggccggccccaccctcctgacggtcaccctggtccctgaagctgcctggatatggt

SEQ ID NO: 119785 - DNA, 122 bp, Homo sapiens
catgagccaccctcctcagcctcccaaagtgctgggatttcaggtgtgagccaccgcgtccggcctcataaagagttcattttaaaagtccttattggccgggcgcggtggctcacgcctgt

SEQ ID NO: 119786 - DNA, 122 bp, Homo sapiens
tacctttccgggcctgctggatgtatcttgccagcagggcgcccaggtgcgctcgggactcgccatccgttctctgcgataccctcagctgcctacggggcgcctcctctgcccgctgcagc

SEQ ID NO: 119787 - DNA, 122 bp, Homo sapiens
cgtgcctgacaaatatgaggatgtagtataattattgaatcgtggactgccaagcggacacgttgattcctttctccccgaaggggttaaatgtccttccagcgctgctgctgtcctttcac

SEQ ID NO: 119788 - DNA, 122 bp, Homo sapiens
cagggggcttggccagaggagctgtgtgtgtggaaactcgcaggccacacgggaaattagcgactgcgtggtgctgatgcagaaagaaaaatggccgagacgcgcggagagcgggacccgca

SEQ ID NO: 119789 - DNA, 122 bp, Homo sapiens
ggagatcccactgggcctcacgtatcacccccgtccggtcttctccacccgaccccgctccgcccgggcccactcccagcccctggccctccgtgtacctcttttgcatggccgagcggccg

SEQ ID NO: 119790 - DNA, 122 bp, Homo sapiens
gcttctgtacctaatgtctgtgatttcgggtccttgcttcttcaattgatcaatgacaaccgcagtctccggcttgaggagaagggaggctcacacccagcactcctggaccatttccctag

SEQ ID NO: 119791 - DNA, 122 bp, Homo sapiens
ccctcattgcccttttacggccttgcatttccgatattgtctgcctgctttgctcctatccggatttgtttctcagtggatcaccactgcctttgggctggatgttgttttgaccggaacga

SEQ ID NO: 119792 - DNA, 122 bp, Homo sapiens
tccgcctgcctcggcctcctaaagtgctgggattataggtgtgagccacagcgcctggcccgagagttgtcgatatgctcgcaggaagtatttctgtgttaaaaagttgagaagatggaaac

SEQ ID NO: 119793 - DNA, 122 bp, Homo sapiens
acaacactaagagatatttataactctgaccacattaaaaaaactatcaaacatgatcagcgtataacctgaacaatacccaaggaactgaccaaacaccaagtcctaccagaagctacatt

SEQ ID NO: 119794 - DNA, 122 bp, Homo sapiens
tcagaagagctgaggacccttagttcccatggtctctctgctagcttttctagtcctttccgtgtaatgcacacccccactcccaggcaaggggctgctttctgtgaacttccctgagcaag

SEQ ID NO: 119795 - DNA, 122 bp, Homo sapiens
agagggcgcggagtcgccgtgttggcctgcacctcccttgtcacgtcagccgaacggctacggcaatggaggattttgccgtatgcgacgacaggatgactgcttcccctgaagcttcacca

SEQ ID NO: 119796 - DNA, 122 bp, Homo sapiens
caaggcgctggagcacccacgctgcagatattgtagaaatttacagtaaatgtaggtacacgattgcagcacgctgccctattgattatgcagattgtgatcaatcttctcccctcgcccac

SEQ ID NO: 119797 - DNA, 122 bp, Homo sapiens
aaaactgagcctgccagataccaccacgtaactggaagttttcaagtgctctcctgggggcgtctcagcatggtcagtgtaaacattcacttacattgagattattgtaaaccaccctgtgc

SEQ ID NO: 119798 - DNA, 122 bp, Homo sapiens
gcctgagggcagatggccccagacccgtatcctgcgttcccatcatcgtcaccatgcggccgccattagctgggtgcacacgcaggcccgaggaagcctaggctcccttttctaacaggctc

SEQ ID NO: 119799 - DNA, 122 bp, Homo sapiens
aaggcgccagtcgccttcggattgtgcgggaacacgcctcggttttgttcctacccggcccgccatcatttattctgctgcctcatttgaatatgatgaatactgtagtcctttatttgttc

SEQ ID NO: 119800 - DNA, 122 bp, Homo sapiens
tgaagcgtagagctgcaggtggaccagacaggggcatttcctcccagctgatgtagagcccgtgtcttgaatcagccccatctggccctctggtctcagagtctcccccagtttgggcagca

SEQ ID NO: 119801 - DNA, 122 bp, Homo sapiens
actccatcttcctctcttatgctgtaatattttgttctgttaagcatttcaggacaccagcggcctggtaagtaataatgagctggatgtaaaccaaaggcctcaaggagagatgactgctc

SEQ ID NO: 119802 - DNA, 122 bp, Homo sapiens
ggccaggggtcagggtcacagacagacgcccggcgacccggcccctgtggcccccggccccgggccgatgaacccactggtgtttggccacggctgacttctggccaaagcggcggccgcac

SEQ ID NO: 119803 - DNA, 122 bp, Homo sapiens
ccgcggtgagggttgtcctccaaggagccatccagcttatcttccgccgtccagatgggccgcgtctgctgctctcgaatgatagccttgaactcctggtaccaggtgtcactcgtgccatt

SEQ ID NO: 119804 - DNA, 122 bp, Homo sapiens
ctcagcctcccaaagccctgggatcataggcgtgagccaccacgtctttttaatgctgtacggttttactagcagtgacagtcaggtggggcatggcagactgatggctgcccaggggcagc

SEQ ID NO: 119805 - DNA, 122 bp, Homo sapiens
aaaccggccggatccagggtaactgcggcccactttgttttcagccggcccccgctgctgcggacaaatctttcattcatgaacaggagcttgttaggccaactccggactctaaagccact

SEQ ID NO: 119806 - DNA, 122 bp, Homo sapiens
ccaggaggccctgggcatgcacgagagcaagtacctcatcctgccaggtgagagccccggcggagggaccagggacctttggaaaccagcctgacctctgtcctagggactgacccaactgg

SEQ ID NO: 119807 - DNA, 122 bp, Homo sapiens
ggccagagcctgaagtccgctgcctcctccatccctaagccctgggaccgggagacccagcgccagaagaggccactggcggtaatggctcccccaggctccttcctgggctccctcctccc

SEQ ID NO: 119808 - DNA, 122 bp, Homo sapiens
ccaccctagtcagttgctaaatctttattagcacatcactggacttgagcagatatcagtcgggttcagttgccttcagaactcctgttagaatcctgaattctgcctctatagaggttgac

SEQ ID NO: 119809 - DNA, 122 bp, Homo sapiens
gtcagtcttcagataaatcacatcagaaacttttaatataagataatcttcatccagccccgagctcagagcatacggggttcagaattggtgaatcccgatgtcacaggatagaggatgag

SEQ ID NO: 119810 - DNA, 122 bp, Homo sapiens
tctgtttttcccaaggcctccagtatctcccgccacccgctgggattttgccgttccggccgattacttgtcaaagaaagaaaatagggtatttagctcagcttttgttctccacctacttg

SEQ ID NO: 119811 - DNA, 122 bp, Homo sapiens
tgtttcttacggctcgaggtgagctttcgcttgccatccaccactgccgtttgccaccgtcgcagacccgcggctgacttccatccctcggatctggcagggtgtccgctgtgcttctgaac

SEQ ID NO: 119812 - DNA, 122 bp, Homo sapiens
cgaatcccgcccgtggacctctaaacaccgggcggggccgggtgtggcggcgcgctcggacgttcgtcattcctccgcgccctccgcctgccagctgattggcccctgggccaggggcgggg

SEQ ID NO: 119813 - DNA, 122 bp, Homo sapiens
aatgctcctgtcctgcagaacactgtcagctatgagggcaaaaatcgtgtctgtttaactcgcttgcacaatgcctggcttaatattatgctgttacctgtacttaataattattttcagag

SEQ ID NO: 119814 - DNA, 122 bp, Homo sapiens
gctaagcggcctcaccaactcggttgcgcaaaccgcgctcctggctgagcggccgctgtgcgcgccccgcctgctggaccacttcatctgtgagctgccggcgttgctcaagctggcctgcg

SEQ ID NO: 119815 - DNA, 122 bp, Homo sapiens
ccctcagctggactggcagagcagaatatctgtgtcagtgtatgtttattcatccatcgccgaatcacgggcttgcaggaacagaccccccacagctagtgcccccgcgaaaggggcactgc

SEQ ID NO: 119816 - DNA, 122 bp, Homo sapiens
cttcgccggcccgccgagtgtgaattcgaattcggcggtttcactaggcgcagctggagacgcagcggtccggggcttggatctggttggggaggggaggggcgcttcctaggctcattgcc

SEQ ID NO: 119817 - DNA, 122 bp, Homo sapiens
gaaacagggacagagaaagtagccagagagcaggaaccttccacgcttgcccaaagaccacggacaccaggaggacaggcatctaggggtgatgcttcctctttccctcattcagagagtgc

SEQ ID NO: 119818 - DNA, 122 bp, Homo sapiens
gggcaagagggagggagagagagaaatgggggtcaatggctgggaattacctcctgtccccgaccaaccagtccagggaatcgcaaacagctttccgcccccaacctgcaggtgtttggagc

SEQ ID NO: 119819 - DNA, 122 bp, Homo sapiens
cctgagcaagaattttgctaaagaagggaaaatcattcaaaaatgactagtcctgactctcggtgtaggaccatctgtacagcctctcacattgtgtgttattaatttcaggggcttactat

SEQ ID NO: 119820 - DNA, 122 bp, Homo sapiens
tgtgtgtgcgtgaatgatcacaaacaaccctatttgcagtgttgttcgtgtggacagtgacgagtcctactgctcgacggagtgagtgggtcctctctgcagttctgtagctacctcttaca

SEQ ID NO: 119821 - DNA, 122 bp, Homo sapiens
ctgacgatgcccctgttcccctttgctctgctctctgtgctgcctccggaagtctcgagccggatgaggaccccctctgcatgctgctgctcatcgaccacctggccttgcgggcccggaac

SEQ ID NO: 119822 - DNA, 122 bp, Homo sapiens
cgctaggccgcgacacgcgcggtcctcccacttcttgggtccgggtcgcccgtcccaccccgtcccctcgccagcacaaacctagcgagcccagcgcgccagaccaccggagcgctcctccc

SEQ ID NO: 119823 - DNA, 122 bp, Homo sapiens
cccggggggatacccgccgggtggagacagatgggcagggctgatggggagggctccacccgggagctcagctccaggagggccagggggggcctgagtcccaggtgctggggcagccggat

SEQ ID NO: 119824 - DNA, 122 bp, Homo sapiens
aattggagagttgttcccccatccaattaggagagttaagtgaaaatagctgtcttgcaacgaaaaggtagattattcatcacaaattatatcctcaataggagagttggagcgatagatga

SEQ ID NO: 119825 - DNA, 122 bp, Homo sapiens
ctctccacgtggccgagagtgtacaccaggggagcctggtggtttgggttgaaatcccagcgacatttgtgggccttgtgactttgtccaagctctttacctcaatgtgcctctatttcccc

SEQ ID NO: 119826 - DNA, 122 bp, Homo sapiens
cggaaacgacccgaatcccaaaatccgtggaagaaaattgcgctgaaagaacagagccaacgcccccgtcctgccaagtttggcgagacggcaagttggcttcaggagcacaatgccgctaa

SEQ ID NO: 119827 - DNA, 122 bp, Homo sapiens
gcaggttccgcggagtgcccggctgccctcggcaggggctttgtgttggctgccctgccccgggctgaccccagacgctcgccttttgtgctacgctgctctcgcccctcgggaacctttgt

SEQ ID NO: 119828 - DNA, 122 bp, Homo sapiens
tggccttactagacacgtacgaacacacacgggcgagaagccatacacgtgtaaggactgcgggaaagccttctgtacatcctcgggccttactgagcatgtaaggactcacactggagaga

SEQ ID NO: 119829 - DNA, 122 bp, Homo sapiens
gcagctttgagtctctccccctggaatcttctatctggggtatgataatgttattacatacgttggttatttacagcacaacatgaaaaggcaatttgtaaggactggtccgtctaatcggg

SEQ ID NO: 119830 - DNA, 122 bp, Homo sapiens
ggacgcggcccggctggctggctctggcggcggctgggctggggccgcggtggcggcagccgcggcggcgggcggcggttgctcgtgcgcggcggcggcggcgggtcccgcgggcggcgggg

SEQ ID NO: 119831 - DNA, 122 bp, Homo sapiens
agccttaggtatttcttaacagcaatgcaaaagcctaacacatagacatgttcattatctcgactgtggtaatggtttcccaggtatatactgtgtcaaaaataatctatatactgtaaata

SEQ ID NO: 119832 - DNA, 122 bp, Homo sapiens
ggattggagtgccccttgcggctgtgggaggggcagtcgggggctggggggacgcaggtacgcctgtcgccaggacgcctctaccctggacggtaggaggttgccgtgggaacggctggggc

SEQ ID NO: 119833 - DNA, 122 bp, Homo sapiens
cgcgcctgcgcagtgcggcctgggccccgcccctggaggtggctcgcgcctaaatccgggcgggtctctagcccgcctcgcctacgcgactgccaatcgccatagtatttggattcccagcg

SEQ ID NO: 119834 - DNA, 122 bp, Homo sapiens
atgccgctcctggggagcaaagatgacccggaggaccgggggagtaccttcccacgcgcacgactcgcgatcttcccagcctaccccagcccgcggcacctaacctgttcacaactgcgact

SEQ ID NO: 119835 - DNA, 122 bp, Homo sapiens
ctccctgattactgttttaaagaacaagctgttcctacccacatcccctgctggtactctcgtagccaacctggcattattttctccacctctgattatcactgaatgtagtattcatatct

SEQ ID NO: 119836 - DNA, 122 bp, Homo sapiens
gaggggcgggttcagggctgtgggccccgcccggggcaccgcctggatcaggcctgaggccggctgcagagaacttgggcaccgcggaccagattgctggtcaccaggatgaaaaataaaaa

SEQ ID NO: 119837 - DNA, 122 bp, Homo sapiens
ctgacacagtgccctgccccattttattgaatgatatatccaatgtcgagagagagagatcgaatgaatgggtgcatgaagaggtatagtctcatgcttccactaggcaaatagatacagca

SEQ ID NO: 119838 - DNA, 122 bp, Homo sapiens
cttgctgccctgcaggatgttaagatgttcccataatgaggcggttctggcccttgttcccgcagaatgtggtggtagttttttttgttttgttttgtttttgagacggagtcttgctctgt

SEQ ID NO: 119839 - DNA, 122 bp, Homo sapiens
ccccgggatgtgtggggtccttgtggggctggaagcctgtgtcccccaaggagaggggaccgagaacaggtctagtccttatctccagcctagccgcctcttccagaggtccaagtgccccc

SEQ ID NO: 119840 - DNA, 122 bp, Homo sapiens
ctcagggccatccgagggtgaatgttctgctccctcagctatccttgcccttggcacacccgggctgcagacggccggcagggaaaccatggaggaggccacgcggcagtgccggtatctga

SEQ ID NO: 119841 - DNA, 122 bp, Homo sapiens
tgtgataacgccatggaagagaatctaaagagtgctacataaatgtaaattaggcagactcgaccttgtttgaagagacctttgagctggaattaatgaaggtgagaggtgaagaagcaata

SEQ ID NO: 119842 - DNA, 122 bp, Homo sapiens
gcaatggaagttctacagcaacttttccccttcgggcataaacacaacatatgtaagcaacgctactggttcaccccaaccttccatatttatctgttcaaaggagcaagaactttcatata

SEQ ID NO: 119843 - DNA, 122 bp, Homo sapiens
tccggtcccaatgaattgtgataaaaatgtcaaacaattagattatcttggccactagcacggtgatgagtagccaggcgtgtccctcgagtcaccctaacagcgggagctgctccgcgcca

SEQ ID NO: 119844 - DNA, 122 bp, Homo sapiens
ggggtgaggtggaggtgcccaggcggggataatgtcatttggcctggttggaccagccagcgagggctttttaggcccagggcctagccgggagtgtgtgcggagcagaaaagaggccagcc

SEQ ID NO: 119845 - DNA, 122 bp, Homo sapiens
ctgggtaagccacgacagcaccgtctgcctggctgatgccgacaagaagatggcgtgagtcgaggccatccccaggggaggaggtgagtgcagaggagtgggacaccgtgactcacagctct

SEQ ID NO: 119846 - DNA, 122 bp, Homo sapiens
ccaccccccaaaatcaaccggacaaacaaacctcacagcgaatgcggggtgccacagaagcgacttggggagggctgaggaggactggttttatttctttttcttactttctttgtttagtt

SEQ ID NO: 119847 - DNA, 122 bp, Homo sapiens
cgcgacagcatctccgacttggagcgcggctggctgcgggcagagaaggagggggtcagacggccggtccctccctggagctccaggtagggctcccaagagcacccatcgtgtcctggggc

SEQ ID NO: 119848 - DNA, 122 bp, Homo sapiens
tttcttcttgaaccgtgaattctcggccatcctttctaacctgggtgtgaccatctcactcggaccactgctcctcggggtctccacggagactgagtccgtggggcggcctcatctactac

SEQ ID NO: 119849 - DNA, 122 bp, Homo sapiens
tgtgaggtcacactccagcctccctggaggccttccccaggacccacagaggatggacagcgatgctgtgcctggccctgtgctaactggggcatttcatgctgctgacctgcattccttgc

SEQ ID NO: 119850 - DNA, 122 bp, Homo sapiens
ttattgattttattgtggttttttgtttatttggggcaagaacggagatgtgaaccaggacgagccagcagacccccgagccagtatctcctccctgggcagggaacaccgcctgcaccggt

SEQ ID NO: 119851 - DNA, 122 bp, Homo sapiens
acagccaatagtgtgtaaccacaagttttagcaacaaaaaccaagggctccccagagaaccggaagcacgtgtttcagtataatgctttccagctattcctggaaagttggcaccctgggcc

SEQ ID NO: 119852 - DNA, 122 bp, Homo sapiens
ctgggggactgttgggtcagaaagtgttcagggagcagctgttgcgccctccctcggccccgccgctcggagacgccccgccccctgccttcaccggccgccccgccccctgccttcaccgg

SEQ ID NO: 119853 - DNA, 122 bp, Homo sapiens
cgcagaaactccgggcagcaattccttttccccgctgctagggagcctgaaggccaaagccgggtccctagccccgcggccggtccgcgcggagcccgcttggtctttgcgtagttggcgca

SEQ ID NO: 119854 - DNA, 122 bp, Homo sapiens
ttgtggaatatatgttctcagagcacacagctggaagaagagggtgtttaccttgatttccgcttagagagaagaaacactgacagaaacttgtacagtctccatttacttcagctggtcac

SEQ ID NO: 119855 - DNA, 122 bp, Homo sapiens
tagaaatatttgaatatttgttagaagaggtacccaaaacaactcaggcagcctggtgcccgcatgttttgggtagtggccagagtcccctctcaagcctgctagtccattccccaccccct

SEQ ID NO: 119856 - DNA, 122 bp, Homo sapiens
cgcctgggccttgggccacgtgggcgctggagccgccctgcctggggattcgggatgacccgggccaagggggtgtgggaggacacccagagctcccgtaccaactcctgtgtgaccttggg

SEQ ID NO: 119857 - DNA, 122 bp, Homo sapiens
ccagactcttcgggcttgggggcggagtctggcgaggggtggagcttactgacggccgggcggggcccccagatagctgaggcttttcaagcagggctgctttcagaagttagctcgctttt

SEQ ID NO: 119858 - DNA, 122 bp, Homo sapiens
ttgcccataatgaatgctttttttttctcaagcttctttgcacctgtcgctcttggaaagcgagtaaaatgtggctgcttgtttggttcaagttgctttctcaacagattgttaagcagtgc

SEQ ID NO: 119859 - DNA, 122 bp, Homo sapiens
cgccggggaggctgtggccgccagtggctgcggagctgctcagaggcttttgttgctcctcggccggctgaatggggattttgtaaagcgggacagataaaaatgagcagcatcatattgtt

SEQ ID NO: 119860 - DNA, 122 bp, Homo sapiens
cagcggcatctcccgtccgcccgcgggctcgcctggaccctcggccgcccgcgccggccccgcttccctatcaaaattggagggaaaggaaagccggtaaggtggggagccctcggcggcag

SEQ ID NO: 119861 - DNA, 122 bp, Homo sapiens
gctgggactacaggcgcccgctacaacgcccggctaattttttgtattttttggtagagacggcatttcaccgtgttagccggaatggtctcgatctcctgacctcgtgatcgcccgccttg

SEQ ID NO: 119862 - DNA, 122 bp, Homo sapiens
tgactcgaccgcgtcgctccggaggcgtttacaagcgagcacaagagcctccgccggctccgcactgcgcttccgcttcacccggagtacagcggtcctggcggcctccatagtggctgccg

SEQ ID NO: 119863 - DNA, 122 bp, Homo sapiens
tccagcggggagagacgggactgggatgcaggcacctttccgggcctggcacctggagcccgcgggggcggctcctggaccgcccgcagcgtggacccgggaccagttcccgcttgcgggcg

SEQ ID NO: 119864 - DNA, 122 bp, Homo sapiens
catcgccgtaaggctccgggatggagacagcatggacagggacctcgcacaaaggcatgtcgggagggcctcctttccaaggcacagccccacctgctccttctcagcccacgacgggagca

SEQ ID NO: 119865 - DNA, 122 bp, Homo sapiens
gggacggtgccgccagaggtggaggagccgccgcccctctgtcacctggagcaactgtggcgctgctcctccccgctggcccagagtttctgtggctctggttcgggctggccaaggccggc

SEQ ID NO: 119866 - DNA, 122 bp, Homo sapiens
caaagatggagtatggaaaaagaatgtagaagatgtcagttattttatatattgataacacgttgaaatactatttggatatgttgggttaagtaaaatacattattaaaattagtttcact

SEQ ID NO: 119867 - DNA, 122 bp, Homo sapiens
cctgagcttttgccctgcacacgggtgagcaagccagcattgaaggaaatgccgtctaggcgtgagccgggagcagagacgccctctgtgcccagaaagcctgacaaccgcggctgattcct

SEQ ID NO: 119868 - DNA, 122 bp, Homo sapiens
aggcctattggccaatcaggaagagtacagtactgagtgacaaacgacccaactaaccagcgccaaagcagcatgtcgtgttgaagctcacccagcgtgacgcaaaaagtggccaacccctg

SEQ ID NO: 119869 - DNA, 122 bp, Homo sapiens
actcgctaagccttcgggaacaacaagcacagaacttttagggtgctgtctcactgatgtcggcgttagctctggtagtccaggtcaagattataccaaagattcaggacttaaattcctgc

SEQ ID NO: 119870 - DNA, 122 bp, Homo sapiens
ttaagacatcatgttggcagtgttggcaatggtcctaactgtagtgcatggtcctaattgcgatgactagaaaataatcgcttcttggccttgatgtctcatcttgtgtaataaaatgctca

SEQ ID NO: 119871 - DNA, 122 bp, Homo sapiens
gcggaagcgcgtgtggagcgtcggactacaaatcccagcatgcaacgctctgggctgcggcggtgtattctggggccactgtgtctgccatctgcaggtttgtctggatttgtctttattaa

SEQ ID NO: 119872 - DNA, 122 bp, Homo sapiens
ggtagggacaccagctgtgaagtcctcataacagccaacttcttgcaactttcaagctgacggcctcaggaatgggaggaaggactcctccactggagaactgatagcagtattctggtaga

SEQ ID NO: 119873 - DNA, 122 bp, Homo sapiens
ccccgggcaactgtgctgcctgcgggaggatggtgagcggtgcggccgggcggcaggcaacgccagcttcagcaagaggatccagaagagcatctcccagaagaaggtgaagatcgagctgg

SEQ ID NO: 119874 - DNA, 122 bp, Homo sapiens
cctaagtgctttttaaacaacagaactggactccctccctcctccattcccagtcgaatacgtcccacccagatccagctcaagggtgcagcacttgttccggccagctcacaatcgccctt

SEQ ID NO: 119875 - DNA, 122 bp, Homo sapiens
ctttgaggcctattttgggctcagtgaactggctgagggcattctggcatttctccaccacgtgctccatctgcaggtaggaggtggctgtaagatagttgacgatgtccctaacagcgaat

SEQ ID NO: 119876 - DNA, 122 bp, Homo sapiens
gcgtccgtgaagatggtggtcttgtggcgccggatcatgaggaacacgtcctgggggcggcgggccggcgtgagcacgaagcccgggccccccgcgcggcccagccgccccccgccgccccc

SEQ ID NO: 119877 - DNA, 122 bp, Homo sapiens
gtccccgctccagggccgctcggcgcgacgaagacgccggggacagcgccgcggggagggcgctccgggtcgtgcgtgctgcacccacaaagagcagcagtcccgccactccgcgcctccgc

SEQ ID NO: 119878 - DNA, 122 bp, Homo sapiens
tggctctctttcccagtcgcaaatgcctcacacttgaggtatttaggtgtatttaagtcacgtctgcagcccagactgctacagtgagctctgtacaacaatatatccaattgtctacttaa

SEQ ID NO: 119879 - DNA, 122 bp, Homo sapiens
ttatcttttgacttaactttctctagaacgtgccccgggcgggtggatctccctccttcccgcgaatcccttatggagcatggaaggataaaatataaagagtagataacaaataggcagat

SEQ ID NO: 119880 - DNA, 122 bp, Homo sapiens
acgcagtggtgaggacaggaagtgcggctcacaccggaagtgcggctcacaccggaagtgcggctcacaccggaagtgcggctcacacaggctgtggagaaccggcccagctccgcgctgag

SEQ ID NO: 119881 - DNA, 122 bp, Homo sapiens
gccccaagatctgaggacagggagccaggttgcacacaggagccgtgcaggccaggacggcggccccatggacctgcccccgcagctctccttcggcctctatgtggccgcctttgcgctgg

SEQ ID NO: 119882 - DNA, 122 bp, Homo sapiens
tagagacctcgtgtttctgttacaccaaggtgtgtggctggccaagacttcttcaatacccgtgtgtaggtggactggtttggcttcaggtttcatcagatggaaggagagtaggactcggg

SEQ ID NO: 119883 - DNA, 122 bp, Homo sapiens
tcttctgaaagtttcacatcttaggccagcaacatcctagtttcatctgacagaacttcacgctgaccttgagactgccgtggtctttggggactgcctgcttcctagggttccagttgccc

SEQ ID NO: 119884 - DNA, 122 bp, Homo sapiens
gcaactgcaggtttggggctctgcgacccgggggcaggaacagagccttgcaggcggcagcgcgtcacaaaggcggccggagcttggcatttagcttgggccagagcaaggcgcagacccgg

SEQ ID NO: 119885 - DNA, 122 bp, Homo sapiens
gctgtgagcgctaaccccggccgcttccacacctcggagcggatgccagagggtcctgagcgtcatgactgaggagctcccacaggtgcctctgtactacaccctggaccagctgagcagca

SEQ ID NO: 119886 - DNA, 122 bp, Homo sapiens
tatttcagaaagcagttacactgtatcaaggggcaaaagattacctttaccagctgggcgcggtggctcacgcctgtaatcccagcactttgggaggccgaggcaggtggatcatgaggtca

SEQ ID NO: 119887 - DNA, 122 bp, Homo sapiens
ctttaaagtcagagagagcaagactcagagaggtagagtaatttgcccaaggtcacatagcgaatgaaagctagagccaaggctgaaacccaggcaggctggctccagcatgctcatctcta

SEQ ID NO: 119888 - DNA, 122 bp, Homo sapiens
cccgggagggcaaatgcgcaggctctaagcttggactagctaggagttgaccgccgaccacgcacacagggaactcacctttgattctcacacactcctccccgcagtcctattccttatct

SEQ ID NO: 119889 - DNA, 122 bp, Homo sapiens
ggaccgggaggcgagtcggccagaaagaggtgcagtggctgctggtggtaactacgccgacgtgcgagctctgctactaatttatgtatttttagtagagatgggatttcaccatgttggct

SEQ ID NO: 119890 - DNA, 122 bp, Homo sapiens
aacatgcatcaccaaatacaggcactgcatacaggaatcctcaggactgatggggtctgacgatgggatgctaagttccctataccaatgggttcttcttttgtgggcataagaaacacatg

SEQ ID NO: 119891 - DNA, 122 bp, Homo sapiens
ctgatccaaatatgaagcaggtaagcttaggtcatccactcaaaccagactacgtctctgcgaagatctgctaagcttctgaaggttggagagacagacatggatgaaaagataaggccgcg

SEQ ID NO: 119892 - DNA, 122 bp, Homo sapiens
gctcggaaggtctctgcgaggctcctgggccttaaggcccgaaggaagtttacggggactcgagagagcgggcaggaggcgggttgggagggcgcggagccccgggttcgggggagactgga

SEQ ID NO: 119893 - DNA, 122 bp, Homo sapiens
agtgagaagccggcgggccggggtggggtggggagggaagggtttctcacggatctgcggcgtccacattcacctgtgagaccgtggacactggtgaggggagctgggatcgccgggccggg

SEQ ID NO: 119894 - DNA, 122 bp, Homo sapiens
tcccacttctttgagcataaacgctcaaggcttgtggctgtgggagcgtcccattgtggtcgtggtagtgatggtcacggttgaggtagaaccgcagaagaaacaaacttcacttaccttcc

SEQ ID NO: 119895 - DNA, 122 bp, Homo sapiens
tatccatcccgtttcgccattctgtgggtggagggtgtcccctgagagtgccaaggtaggcgtctggattgtgccatccacacaccctcttctacagctccaatggagtatggtgggagtgg

SEQ ID NO: 119896 - DNA, 122 bp, Homo sapiens
tccaaaccggacggttttctcctggaggactgtgttcagacagatactggtttccttatccgcaggtgtgcgcggcgctcgcaagtggtcagcataacgccgggcgaattcggaaagcccgt

SEQ ID NO: 119897 - DNA, 122 bp, Homo sapiens
tgagcaaaaaattttcctggttttcttgctctgttgttgctatgtcacatgggacctgcccgttagagctaaacagtcagttttgctgtttctaggcaggaaaacgctcacatcacaagtaa

SEQ ID NO: 119898 - DNA, 122 bp, Homo sapiens
gggcggaggggagcggggcagagggccgccggggcgagggccgaggaggggtccgagacgcgccaaggggctggtagctaggcgacctgaatgtcttccatacctgaacccgcagcctgaag

SEQ ID NO: 119899 - DNA, 122 bp, Homo sapiens
atgagtacagagtaagtgctcaatgtatgctgtggtaggcagagtaatagcccccaaagacgttcacatcctaactctcaggacctgtgaacattcccttaaatggcaaaggggaattaagg

SEQ ID NO: 119900 - DNA, 122 bp, Homo sapiens
gcctgggcaccggggtggaggtgtgggcggggcttagcgtctcacccacagcgacgtcgccgaagttaaagatggtcttgcctttatgggacgtcaccacaacagatggtgccaccgtcggg

SEQ ID NO: 119901 - DNA, 122 bp, Homo sapiens
tcccgcagtgcccagccactgcaggggcacgaacctgggacctcagggtacccgggaccccgcacctgcaaggcagggtgtcgtggtggtccaggagccaagacccctgctctgtctcactg

SEQ ID NO: 119902 - DNA, 122 bp, Homo sapiens
tggacagagcatcagatgaaatcaactgctgagagagggaagtgagtgctgtgttggcaccgctgccagaaactcttgagaatgagcatcgtgtgccacttatccactgcttgccgacttca

SEQ ID NO: 119903 - DNA, 122 bp, Homo sapiens
gaaagtgcagaaaaggcaggacccctgacaccagcaaggcattggatctctctggacctccgggtggtggactttgggactggacagacctggtcacagtctaggttctacatcttactggt

SEQ ID NO: 119904 - DNA, 122 bp, Homo sapiens
ctggtgcttggcgctcacctgttccctggagtggcaccggctgcgttccaggcgggttcacggtccccggcccccgccccccagcgccagcgccttggggacctgctgtagagccgcaggag

SEQ ID NO: 119905 - DNA, 122 bp, Homo sapiens
aggccctgccgtccccagcctgctaaggcgaggtgatttatagcacccgccggatgagcccgtgcacttttgtgcaggatgagcgctctctagacagccctggtttcctccaagtcgcaggc

SEQ ID NO: 119906 - DNA, 122 bp, Homo sapiens
gcaggagagcggggttctaggctggccccggctctgcagtgcagccgggtgcctgccactcgcggggctctgtcgcagtactcgtgcctggcgcctcccctcagccacagagaccgcagtag

SEQ ID NO: 119907 - DNA, 122 bp, Homo sapiens
caaagtatagagaaagaaaagtggacccggggaactggcgctcagcatacagaggacccgcgccagcaccagtctttgagttcccttagtatttattgatcgttatcaggcgtttctcggaa

SEQ ID NO: 119908 - DNA, 122 bp, Homo sapiens
ggcccccacctctgcacgcagagacctctcctcacctcccgcccggccagatcacagggccgccgagtcagatgggatccctgcccccatcagcccttctgcactgcccagcacatatggcc

SEQ ID NO: 119909 - DNA, 122 bp, Homo sapiens
cgggccagcggctgcggagggtgtactgggtcccccagcagtgccagcccaccggcgctgcgcttgatttctcacccggccttagctaccttccggcggggcagggctcgggtcctgcagcc

SEQ ID NO: 119910 - DNA, 122 bp, Homo sapiens
tccgagtgccacgtctccaggaaccccctccttactcttggacaacactccgcccccgcccgggcctccgtcccccaaaccgccctcatttgtgcagcgccagatccttcggacacatccct

SEQ ID NO: 119911 - DNA, 122 bp, Homo sapiens
tgtccccgccagtggtattgtggtattgccggcccccacctcccgcacagcggtgcttcacggaattcctgaggcgtactgggagcaccggcacagccgccgccatttcccggcaggggcac

SEQ ID NO: 119912 - DNA, 122 bp, Homo sapiens
atttaatgtatttctgggtgatgggaaaatgaaaaaaacaatgtaaagtctgaattactgcgagacgataatctggctccactgcagccaaagtgggcccttaaaacatagaatccatccct

SEQ ID NO: 119913 - DNA, 122 bp, Homo sapiens
aagtgcaggcgaaggataagtctgtggtgctaggacccagctcccagagtgccagactggcgcgcgccaggagagaggcgcgcaggctggggcggcggcggcgcccacggagactagctcct

SEQ ID NO: 119914 - DNA, 122 bp, Homo sapiens
cgggagccctttcaccagggcagggtggcttcggtggccgagggacccgggaactgcagccggagccggcgcgcacccagccaacttcctgtttccgcggtagcgcgcgggcctgtcactga

SEQ ID NO: 119915 - DNA, 122 bp, Homo sapiens
gtcagagaaacgccagaactgttgttcaacacaggctggctgctcctgtcacctctcccacgccacccaccccttatgtctagtctcagaaaaccagaaccagggtgacaattgcccccaga

SEQ ID NO: 119916 - DNA, 122 bp, Homo sapiens
gttgtgctcccttgatgccatcagtacattccacaaagaggaagttcttctaactcactacgcagctgggcttggctcttactcaagagcattttggggtgaaaatatctaagtttaccagc

SEQ ID NO: 119917 - DNA, 122 bp, Homo sapiens
gtttctaagattatgtatcttgcacgtttggcacttgagggggtgctcatcttttgattccgctattgaggtagaggcgggacgggggaagcagctttcagtaagacccgcccgctcttgcc

SEQ ID NO: 119918 - DNA, 122 bp, Homo sapiens
cgccgacaggaggaagaggatgccagctcaggcaccagctgaggtttggcatttgctggccgcgggcgccgacctccagggggcgccgtggcctcgcgctgtccgggccgttgcatttccgg

SEQ ID NO: 119919 - DNA, 122 bp, Homo sapiens
ggtagcagccttgctgctggcttctcccagctccgtgttcggtcccggtggggtcacaggcgctgcggctctgtctgtcgcagcccaggtgagccaggagggggacgccgacctccaacccc

SEQ ID NO: 119920 - DNA, 122 bp, Homo sapiens
caagcgagcgtggagtcttctgagcaggccggggaggggcctctgcggggcgaacggcctcggcccggcgaggagcgccgcggtggagacggggtccgctggcccgagagcccccgcaggct

SEQ ID NO: 119921 - DNA, 122 bp, Homo sapiens
aaacaaattaaagagccaagcatcagaaatgatgcaagttccgtgtcagctctcagaggccgtgaaacacctgggcaatcagcaagggtgtgatgtcatccggagaaatgcttggctcacag

SEQ ID NO: 119922 - DNA, 122 bp, Homo sapiens
tgcggggtcgggtgtggatggtctgccgcgtctgcggggtcgggtgtggatggtctcccgcgtctgcggggtcgggtgtggatggtctcccgcctctgcggggtcgggtgtggatggtctcc

SEQ ID NO: 119923 - DNA, 122 bp, Homo sapiens
ttgcttctgctgagaaggggccctgcgagaaggctgggaccgccgggcccgggtgggcggcgtaaggagtccacagtcaagcccctcggtcactttcaaggtgacagcgacgagatccgcat

SEQ ID NO: 119924 - DNA, 122 bp, Homo sapiens
attcaaagcacaactgtaagcgactttagttacagcgaaactctaaggcacgctgcccttcggaaggaaacacggcattccccaacctgatagccctccgcgacgcattacgcaccgcggac

SEQ ID NO: 119925 - DNA, 122 bp, Homo sapiens
aatggcttttctaatagcagtttgtgggctaatggaaagatcgaagcaaaccttcattaacggaaaggagaatagggattttgaagccactgggtgaacacactggacagccagagctaaat

SEQ ID NO: 119926 - DNA, 122 bp, Homo sapiens
ccccaatagttggaacaaagtccacttgagattggaaatgactttcgggcttgtcagaagcgcacctccacccgcagccgcccccctcccgagcccagcgcggagcagccgggtttgaggat

SEQ ID NO: 119927 - DNA, 122 bp, Homo sapiens
accgggactccggggctgcacggcccgaatgcttcttcgtgggttttgtttaagcagccgcgacctgtgcctgccgccggctacctccgctgtggcgggcgagcacctagggtcctcaccta

SEQ ID NO: 119928 - DNA, 122 bp, Homo sapiens
aacggttggtaggaaccgcggcttccgggtggcgcgggtgaatgacgtaagtggcaagcgcgctggccaaccaaatagccagttggggaggggcgggcctgagtggaagaagacgggccaaa

SEQ ID NO: 119929 - DNA, 122 bp, Homo sapiens
gtttaggcttgaaatactttcctggggagataaaacacaaaatgaattaaagaaggaaatcgtgggtagctagttacattattctaccatgatgtttaaggcagcatcctaagattttgggc

SEQ ID NO: 119930 - DNA, 122 bp, Homo sapiens
agcagtcaagttccagtcccccatccccttaagctaagtaatcgtttcaaagctgcctgccgtatggaccctagactgcgtgttgccaccaatggctataaataaacctaacaatgctgtac

SEQ ID NO: 119931 - DNA, 122 bp, Homo sapiens
cctctacttctctacagggtgtccataaagtctagaactatcagttattttatttgttcacgagttgcagatgttcttgatgacatcatgtgcactgcctgcattctgaacttggtaggcat

SEQ ID NO: 119932 - DNA, 122 bp, Homo sapiens
cgagcagctccgagcgggacagagagcgccggcggccgcagcgcgagtgagctgggtgtgcgaggccgccgccgcccactgctgcgcggcccagcagctcccgccccactccgtcccaggat

SEQ ID NO: 119933 - DNA, 122 bp, Homo sapiens
ctgcagccgtgccgggggcctccggggccccgaccgaccgacagctctttcagaccgcagcgaagtttgcacacacgacagcacgtcccggggctaggatcttgcccgcctgcggggctgac

SEQ ID NO: 119934 - DNA, 122 bp, Homo sapiens
acttaataacatacaaaggaattccagagcccatgctgaaaccgcttaacagtagttaagcgacccccgcgtgtaggtcaaaccggcttccgatcctgttcctgagcctcagtttccccgac

SEQ ID NO: 119935 - DNA, 122 bp, Homo sapiens
ggcctcactctgttggtcagtctggtctccaactcctgggttcatgtgatccacccaccacggccttccaaactgctgggattacaggtgtaagccaccacgcccagtctaaattctcaaca

SEQ ID NO: 119936 - DNA, 122 bp, Homo sapiens
ggagacccctgcaccgtccagagagcggaggtgctgctcctctccggctcagtgtggtgacgcctcccaagtcacaggagcagacggggtcatcggcacacctgggagcaccctcggccttg

SEQ ID NO: 119937 - DNA, 122 bp, Homo sapiens
gccactgcttgggcgtgcagattgtgccgtcataatggaagctgagctttgaagaagtcacgcttaatgctttgatgcgatctcttgaaattcttaataactttctaacaaggggctctaca

SEQ ID NO: 119938 - DNA, 122 bp, Homo sapiens
ccttctgcaaaaaatgtttcaaaacaggcttgactgacaccacctccctgctctgctacccgaccaaataaattgaatttgttttaaaagagttcccttcatctttactcaagattccctga

SEQ ID NO: 119939 - DNA, 122 bp, Homo sapiens
gccatcctgtccaatgagcatggctcctacaggtacacggagttcctgacgggcctgggccggctcatcgagctgaaggactgccagccggacaaggtgtacctgggaggcctggacgtgtg

SEQ ID NO: 119940 - DNA, 122 bp, Homo sapiens
tcagtcaggccaggaggccagcgaggagagcaataactagggcccatttggatcctgcaccgaagattcctgcgtccccacctccagcccgtaagtgattacccgtacggacaccagccccc

SEQ ID NO: 119941 - DNA, 122 bp, Homo sapiens
ttttatagtctgctctaataataacgaacaaacccgtggtcacatctctgaacctgtatacgtgctgctgtctgccaggaaaaatccctgcttcctcccacttgtttgtctttcagatctca

SEQ ID NO: 119942 - DNA, 122 bp, Homo sapiens
agctagagggtgggaggcaggcccagactggggaagggacttgccccaggctgtgcagcccggtcctgctttggcaggacctcaagcaacccagagccctctcttagggtcaagtactcaat

SEQ ID NO: 119943 - DNA, 122 bp, Homo sapiens
ccctcgggacacccatgcccctcccggctcctttccgggttcctcggacctgtggggcgtcgctgacagcttttccagaacgcgggcgacacctagtggacatcacgggtcacaaccggtgc

SEQ ID NO: 119944 - DNA, 122 bp, Homo sapiens
ctgctgatcctgaaagttgaacacggggctggggttgcacacggtatccagggaaggtaacgatgataacagtcctgagtcaggccaggtcactgctcatggcccaggcatggaccacgggc

SEQ ID NO: 119945 - DNA, 122 bp, Homo sapiens
cctttcaggacaattaaatgaaagtcagagcctgggccggctccggagaagttagaccctcggagctggtctcggactgctggggcgtcaccccttcagcaacccccgctgaccatggcagt

SEQ ID NO: 119946 - DNA, 122 bp, Homo sapiens
aggagaggagcgtggagcacgcccggggcacatggggacacagcagcgctgggaaggcttcgtcctcgggagccggcgctcacatgcagggagtcgcccaggacagcaagcctgggtgtggg

SEQ ID NO: 119947 - DNA, 122 bp, Homo sapiens
ccctccgcccggcggtagcggaacccgccgcgggcgcgcgcccggcccaggggagtgggtcggcgcctgcgcagaggcccgccacgcccacacacaggccaccgcccccaccggccggacgg

SEQ ID NO: 119948 - DNA, 122 bp, Homo sapiens
ctaagacccctcagctgctgctcaggtgcagctgctctgtatgccaagcacggcccatgccgggccccgtcgaggcagcacagatatcgatttagatggaaaccggggtcggcgcggaggga

SEQ ID NO: 119949 - DNA, 122 bp, Homo sapiens
tgcagggaaggcgggcgcggaggttctatctgtttcttcctccttcgtgagcagcatggacgtgctagcggaggagtttgggaacctgactccggagcagctggcggcgccgatcccgactg

SEQ ID NO: 119950 - DNA, 122 bp, Homo sapiens
tcttggggacccagagatgagcgagaaccccccttgctcacagttaaccataatccaaggcgtgaagaagtggggagaggcagcacaggttactagaagtggtatctgaaaccctaacattg

SEQ ID NO: 119951 - DNA, 122 bp, Homo sapiens
ctgccacgtgccagttgcatgattctgggccagtgaaagcacctctatggaccagttgctcgcctgtcaagtggggataatgacacgcacattgtaaggctgttgggaggatgggatgagag

SEQ ID NO: 119952 - DNA, 122 bp, Homo sapiens
acccagccacacgtatagcagagtgcaggccctagttacccagaaacggcttcttatgcacgtataccatcacacacacatacccgtgctcatagaatctaaatattcctgctttagccagt

SEQ ID NO: 119953 - DNA, 122 bp, Homo sapiens
tttctgtctcccctaccaaccttgccccgacctcctgacgaatgtaagctccatgaagaccggaattcctgcctgatttgctcactgctgactcttcagcatttaaagcagtgcacaggttc

SEQ ID NO: 119954 - DNA, 122 bp, Homo sapiens
gaacttatcatagttctcatagaccagggtttgcatgtcgctgtctagagcccggatctgcggcaccatgtccgtctcactgtctatcagctgggccagagggcactctctaggcagcttgt

SEQ ID NO: 119955 - DNA, 122 bp, Homo sapiens
tttgaaatactacagcaaattatctttccttcagcccaaaagcagccagccaatttactccgaacagaagtgacaatgccccaggatttatcaccataaccttgactacaccagggcgaggc

SEQ ID NO: 119956 - DNA, 122 bp, Homo sapiens
tcacaaaagggagggaaaagttcaagccccttcatttaatatcatttcctggaagttgcacgtactgtttctgctgacatgcaattggccagaacttaactgcataactccaagcaacatca

SEQ ID NO: 119957 - DNA, 122 bp, Homo sapiens
ctggctgctgctgttatttatcactaacacttgccacaccagctcaaacgcgcgtatttgcggaccaggcgctgagggtcacgtgagcagcttggggccgggaggatcccctagcgccaccc

SEQ ID NO: 119958 - DNA, 122 bp, Homo sapiens
ctggccgggaaagtggagatagtacccttctcttccaccccccaccaccctcttgctatacggttcaggggagaccgtgatacaagctgtgaagtactgcacacgagtagatcatttccatg

SEQ ID NO: 119959 - DNA, 122 bp, Homo sapiens
caaagtaaatgtcaataactattactgaattctcacagcacctactgccccagacttcagcgtctgtcagccccgcctgggcgtggggcacagaatcacacaggaaatgtaaggctctaccg

SEQ ID NO: 119960 - DNA, 122 bp, Homo sapiens
cttcaatgaggcccaaacgtcaccctctgcgtcccttcaaaccacatgcaccccctaccccgtgagcaacatcctgaccttgttaagtgtcctcttgctttgctatgataataacatctgca

SEQ ID NO: 119961 - DNA, 122 bp, Homo sapiens
ctggcaccgggttttctccacctctatcagagaaacaggcaacaagaaagctgtcaggtgcgtcatccgtcagcgctccctggcggggctgcaggagtccccgcagctcgctcagaaccacg

SEQ ID NO: 119962 - DNA, 122 bp, Homo sapiens
actgcatctcagatccacagtccaccggcggctgcaacaattccacccagggctgcagcacgctggttcttcagtgtcgggccaggttggacctccggctggaggccttccacaccggaaac

SEQ ID NO: 119963 - DNA, 122 bp, Homo sapiens
caggacccctcggccgcaccccagcccacccaccacgggccttgactggcagctcctccacgtccatgcccagcagaccgaggtgttccggcagttctgccaggagctggtgaccgtgcacc

SEQ ID NO: 119964 - DNA, 122 bp, Homo sapiens
tttgagtgcttggctctgtaatcttggagacactctgcatacaccccacaattaagacatcgcaactccatgcaatgtttcttcagagaaagttagatgcaattagatcatttgaagatgga

SEQ ID NO: 119965 - DNA, 122 bp, Homo sapiens
ttactcctggaccagaccaccagccacacatccagattaaaagccaggaagcacagcaaacgtcgagtgagaggtaatggggcttctcaatcaagcaaaattctaggcttagacagtgtggg

SEQ ID NO: 119966 - DNA, 122 bp, Homo sapiens
gccatcggcaacctgctcgtcttgtccgtgaggccttcccagctggccgggctcaccccgcggctcctgcacccgtgcctgcccggggcatctggggccattccccactcctcttcaaccgt

SEQ ID NO: 119967 - DNA, 122 bp, Homo sapiens
tttattatactgaaacagtttgtgccttcagtctcttgcctcggcacctaggtactcttccgcccacacgggacgggctgggggtggccatctcgggctctgggaaggggccggggctgtga

SEQ ID NO: 119968 - DNA, 122 bp, Homo sapiens
tacatctgctggtactgctggaggacgtttagataccccaacagccttaaggcacacctgcgtttccactgcgtgttcagcggcggtggaggcggcgccttcctgcaccacgaacacgcggc

SEQ ID NO: 119969 - DNA, 122 bp, Homo sapiens
gttctctcttccactgatggggtggctgattttcgagaaaggttggggatgagaccaggacgggaccacttgctgcagccccgcggtcccctgctgggcttttggcttcagatccctgtgcc

SEQ ID NO: 119970 - DNA, 122 bp, Homo sapiens
gttttgttgctggtgagcaggtacggattcttgacttcaccgcacaaaagaacttgagagcgagcctaaagtaagagtaagcaaagtttatttattgcaaagcaaaagtacactctgagagg

SEQ ID NO: 119971 - DNA, 122 bp, Homo sapiens
tgggatctcagtatgcactccttaaatatttgcagaatttaagtgccacataagtgaccacgtgggcaacgccctcggggccttaagccgcgccatttttggggctaggattggttggaccc

SEQ ID NO: 119972 - DNA, 122 bp, Homo sapiens
cgacactggaatcaagaaaccgactccaagttgtattcaaagcatccactttgtgctctgcgttttgccacgttccagttgtatgtgagctgcagggccgcggagcgtggtgcaggggacgg

SEQ ID NO: 119973 - DNA, 122 bp, Homo sapiens
gaagcatattttgtcgaacttaattttgaattcgctatactggatattgtttcctgactgcgctgagagaaggaaaactgaatgttatatcgaaagtcccgtgctgggcctgggatctcccg

SEQ ID NO: 119974 - DNA, 122 bp, Homo sapiens
taatctgcgtagttaaaaacaaatacgaaatgagcgagaaagcacatagtagtcaaatctcgccaccacataaacaggttaagtttggaagcacagcccctaacattcggtgctgcttagca

SEQ ID NO: 119975 - DNA, 122 bp, Homo sapiens
aaatgactgttgattcactggcattaaagtgcctaactaccgactggcttccgaggttgccggaagaaacctgttggttgatccttagtgatctccaggttacaaaatgcgggttggtacta

SEQ ID NO: 119976 - DNA, 122 bp, Homo sapiens
ctcaacagaggggagagcgggtggtcgtgagaagtctgggaattttccgggcccactacacgccaggggcgggtctcccctcttaaaacgttgtgagccccagcgcgggcaggggggagggt

SEQ ID NO: 119977 - DNA, 122 bp, Homo sapiens
ccgcaatttaatctgacgatcaatttactggagtttccagttttgagtcctgctttgaagcgccactgtaagatttcgaaaaaggactatcttgacttacggttttgttttaatatttttaa

SEQ ID NO: 119978 - DNA, 122 bp, Homo sapiens
tgttgtcccaagtggtgggacatgtgcacatgtctttgaactgcacagggcaccagctgtcgttctacctctttctctctaagaaaacatactagaaaggagtgagagtgactttataaaaa

SEQ ID NO: 119979 - DNA, 122 bp, Homo sapiens
ccggcgaggcggtgcagcagagagctccgccccggtttgcacgaacaaaagagcgcctcgcgggagtgagctggcctcccggccttactgaactcaggcattagttttcgtttgtggaccgt

SEQ ID NO: 119980 - DNA, 122 bp, Homo sapiens
gtttattaaatactacaaaagacatactttctgatacaaataatggggaaaatgtataaacgctataggaagtgaaagtacgctacaaatcaccagttcctgggcagaatatagcaattagt

SEQ ID NO: 119981 - DNA, 122 bp, Homo sapiens
atggaatttgtagggggaaaatgttcccacagagaccattcaaggctcgggtagtttcagcggtgaattctaccacttaaggaataaataacaccaattcaacacaaactcttctagataaa

SEQ ID NO: 119982 - DNA, 122 bp, Homo sapiens
gcgccctgatgaaggcgtgcggggtgatgggatggccttcgccgttctcacccgatgtctcgttgttcagtcttccctgggttctgcctccgcctcgcccttccagccgcacgtgccttaca

SEQ ID NO: 119983 - DNA, 122 bp, Homo sapiens
gaagtgtcccactaagtcctaataagcccacatcctgacagcacagaaaagaacctctttcgggtgaaacaaacagcttaaatcagccaagcccctggcaccctctcctgaagcagcacttc

SEQ ID NO: 119984 - DNA, 122 bp, Homo sapiens
aggagcaccctctagtggaggcgggggtgaattcttaggtcgagctgatgcaagaaactccggtagccagcctctgtgaccttgtacatgagtttggtgtgcctattgtgatttaaaacagg

SEQ ID NO: 119985 - DNA, 122 bp, Homo sapiens
tcaccttctgagggacctacccctgactctcagctaaagaggtccctccagtggctgttccgttttctccaacatgtatgttgtctgtctcctccttttttttttctttgagacagggtctt

SEQ ID NO: 119986 - DNA, 122 bp, Homo sapiens
tgcttgctgctgtgactgaaatcctcctcccattgacttattctgagcctccagcacaggcggttgaaagcagtgaaacaaatacgttgtatagctgcaagcatgccaaggaggttatttcc

SEQ ID NO: 119987 - DNA, 122 bp, Homo sapiens
tctagactttgcctccttctcgttctagcattctgacactgtgtgcagtgtaatagaaaacgcggtttgggagctaggtttgcccaacaatagatattctggggtgattttcatcctttgca

SEQ ID NO: 119988 - DNA, 122 bp, Homo sapiens
acgcacacccgtgcctgcctttgagcttttcccaccctgaaaggagcccctcgccgctcacgtcctgtgttgaggctctcacagcatgagtgcttcggagccagaggaaccgtccaccatgg

SEQ ID NO: 119989 - DNA, 122 bp, Homo sapiens
tgtggtgaagatgatctttgagcagggccttgagaaatacttaggatttagcacgtttagcgcgtgcttttctcagtggtgcaagaagattaagccacattctggctttagagaggcatttc

SEQ ID NO: 119990 - DNA, 122 bp, Homo sapiens
tgacttttgcacctttgtcaaaaatcagttcggcaaatttgcgtcaaagttcgtgcacagcgcacagagctgtggcaaatgacacgaggaacctgtggagtgcttagctcaccctgctatgc

SEQ ID NO: 119991 - DNA, 122 bp, Homo sapiens
cctggaatgttgaaagctgctgtgggggaccctgtctgctccggaggggccccactcactcgggatccggtgatgaagtttgggagctcgcccgtgcccccgtgcagaatggttttcttgac

SEQ ID NO: 119992 - DNA, 122 bp, Homo sapiens
gagccgcccggacctggggaggggactggcccgggagaccagggtcgcgcgtgggggtcccgctgtcccagcaccccgctttctgccgggcgcgcccccaccaggttcgagtccgagcgggg

SEQ ID NO: 119993 - DNA, 122 bp, Homo sapiens
ttcttgcccagcgtgactggtctcactgactagttagctgttctgggggcagaacccactcgaaagcctcgtacctcccaggcccctcggcatattgtggttcattcatccagtccccaaat

SEQ ID NO: 119994 - DNA, 122 bp, Homo sapiens
ggttctggcgacctgtgcctgaggaccggggccggagggcggccagggagcaagggccagcgggccggtgagtgcctagctcttcgcggaggtgagctggcggcgggacgcagcggggaggc

SEQ ID NO: 119995 - DNA, 122 bp, Homo sapiens
ggtagcctgtgcgtcgcattccggcttcggggaaaaaccacctcccgagcaagggcaaggcggagcccctgtgatgggcaggcagttctaccaatgaggtgccccagccgctgtaagacccg

SEQ ID NO: 119996 - DNA, 122 bp, Homo sapiens
ctgcctggaagagtgggcagagcagagggttcgtcaccacggctccatgcggtactcccacgggcgcttccgtgcagggtggcaaggcgggagctgcacagaccccaggcggctcagcgtga

SEQ ID NO: 119997 - DNA, 122 bp, Homo sapiens
aaaggctttaccctttaagctctgatagtagtggccacagcaatgcagccaccactatcccgttgtcacaggcaacttgagctttccaagaagggtcaggcactaatccttataattaacac

SEQ ID NO: 119998 - DNA, 122 bp, Homo sapiens
ccggggggacccgcgcagtgaaaccaaagacgtggatctcctccctctgccacatgcgcccggctctgagtccctcttgaactccatccctgtctgaggactcaagacgtccttgagaaccg

SEQ ID NO: 119999 - DNA, 122 bp, Homo sapiens
aggaggcgatttcgaacgcggattggatcgtctgggcacccgtagttgggaacagcggaacgctggtcccggggactgagtaaggtgtctggatcggagggaggttcgggtgggcatcgggc

SEQ ID NO: 120000 - DNA, 122 bp, Homo sapiens
ctttctgtctgccagccatgtaccagggggtgaaaatagcatgtctactttattcctgagcgtcagggtgtttttctactagaaaaaaaaaataaaaccctgaaaaatagttttgaaactca

SEQ ID NO: 120001 - DNA, 122 bp, Homo sapiens
atctgtacctctgagaccatagtagcttccaatgtgacaggtctacaaggacactctacacgtctcgcatgacatcatcctctcttcctcccctgtttctctttccgtggtgccttctgatt

SEQ ID NO: 120002 - DNA, 122 bp, Homo sapiens
aataaaatcaacacctaaacccaaatgtggaccattatgccattctaaaacaggttctcacgatatggaaaaatctagatggaggggagctagttgaatttcgtgtctcgtttgtaattaca

SEQ ID NO: 120003 - DNA, 122 bp, Homo sapiens
ccctgcggggtcctggcagctcccgcgccaggactttgttgaatgaatgactgaactgagcgggcgccgcggggcggggcgtcccgaagcggacctcaaggcgggcggaggcgagagctccg

SEQ ID NO: 120004 - DNA, 122 bp, Homo sapiens
ttcattgcggatatctggaagccttccaggtcccctgaatgtagtagacacttcagcagccgtctcctaccccttttgccactaaatgcttcaaaactgccttttttcctcgccgccgggcc

SEQ ID NO: 120005 - DNA, 122 bp, Homo sapiens
tcgggaccctttctttaccccctacccgttgtggctcccaccctgcctcggactggtttacgtgtcctggttcacacccaggacttttctttgcaagcgaacctgtttgaagcccaagtctt

SEQ ID NO: 120006 - DNA, 122 bp, Homo sapiens
ctatgaccccggagccagtgtctttgaagtgcacgggcactcagggacagccacacccaccgggctgaaccccccaggaacgtccccccaccccacccctgcctccccgtgggtggctgcac

SEQ ID NO: 120007 - DNA, 122 bp, Homo sapiens
tgagggcctccgagctgggcccgatccagaagttctcctgctgcacgtacttgacgttctcgtagacccagtggttccacagaatcgagtccatcgtttcatgctgtgagaagtccacgggc

SEQ ID NO: 120008 - DNA, 122 bp, Homo sapiens
tgtcataccagtacaatttaataccaggtgctacctgagcacagggaaatgagtgcctgacgctgctgtgcaaaaccagcagtgacatcacagagacttgctgtgcttcctttcactgaatg

SEQ ID NO: 120009 - DNA, 122 bp, Homo sapiens
cgtagtgccgcttcttccgatcaaaggcaaagtgcttcaccttggaggcgatgcgcttgccgcgccggggcccggggactggggctcggccatactccttcctggtggggatggtggctttc

SEQ ID NO: 120010 - DNA, 122 bp, Homo sapiens
gaaatgaacagaggcccctgaaactgctgtgtctgcgaccatgcgtgtgcagctggatcccgtggtagccagcgagactccacttccagcagatgaggtggacaatgaagacaatgaggatc

SEQ ID NO: 120011 - DNA, 122 bp, Homo sapiens
cttccacataaacgcagttacttcagggaaggagaatgaggtaagaagagaggtaaataccgtatgttgtaaacggaaaaaagttatcatgcaggaattcatcaaatattaaactgttttcc

SEQ ID NO: 120012 - DNA, 122 bp, Homo sapiens
cttgcactggcagaaggatcagtctttgttttgtcttgcttggccttggcaggcagtgttcgtgaaaaagttgaatctgaattcaatagaactaggggagggcgcaaggaggatccagttga

SEQ ID NO: 120013 - DNA, 122 bp, Homo sapiens
acagttgagcccttcgggcagggcagcctagcggctcttgccttgggctccctgcgcaggcgcaatggcagtccagtcgtcctcaaatcaatcccgccagggcgctggacgtgaacgcgaaa

SEQ ID NO: 120014 - DNA, 122 bp, Homo sapiens
cggtgagggcgaaggtggagttagggacactggactggtccgatccgcagccggctcgagcgtcttccagtcacggggacggcggaggcgacccagagaggcagcaagcagctacgagatgc

SEQ ID NO: 120015 - DNA, 122 bp, Homo sapiens
catcgccccgtgctgtgccatgctcgggtttcaagagcccacagccagttggacacgccccgtccccgtcctcacccgccctgcccggaggtggctgggaccgttcatgacctgagaatccc

SEQ ID NO: 120016 - DNA, 122 bp, Homo sapiens
cacgtcaccatctcaacccaatgtaggccacccgctgcaggcgagcttccctacccaatccgacctcctagacggacaccccaggttccagccctacaaggggcgcgtactggcacaacagg

SEQ ID NO: 120017 - DNA, 122 bp, Homo sapiens
cttgcccgaaaaccattactccggcttccccctatctgtgccgcgtccccagcaaacacacgggttatcgggaagccaagtaaatgaccaataaatattttaatcactgttaaaaaaaataa

SEQ ID NO: 120018 - DNA, 122 bp, Homo sapiens
ggtacctgtgtgaggttcccatgagagtttactaaatgtgtctctgccaataccaatgaccgaaagagaccttccattaacttctgaattagccaaatgggacagagcttaatctaatatgt

SEQ ID NO: 120019 - DNA, 122 bp, Homo sapiens
atgatttggggagcgagccaacagataaagaaggatatttatttttgtttgtaatgtcgacgtcttctttcgggctcgatcaaacaatcaggagatctgtgtaggccacagcgtcattgcac

SEQ ID NO: 120020 - DNA, 122 bp, Homo sapiens
ccgcgctgacgaaaccaagggccaagcgtgcgagtgaatacgaacatcctggcgttaaaacgtcttgcattctagtgaaatgagacccattggacacagagaagccccaccacaattgcatc

SEQ ID NO: 120021 - DNA, 122 bp, Homo sapiens
gctgctcgctgcccctctcccgcttccctcctgtccgccccgcgctcccctcctcgctcccggttgactcactcctccaggaatagggatccccgtgttttcccgtcagtcccattctggga

SEQ ID NO: 120022 - DNA, 122 bp, Homo sapiens
caagttgcagcggccaagagtgagacccgccttgaggactactatgtatcccacagacctcgcggggccgcgtgacgccatcaggatgcgcgaggctcggggagggggcgggattagagtcc

SEQ ID NO: 120023 - DNA, 122 bp, Homo sapiens
tttctgaaatgccacctgctcgctccggtcctgcacacggcagataaccctgcacagccccgtgaaatcgaactggaaacacttgcagcctagatccccagctggccccgacatctggagtt

SEQ ID NO: 120024 - DNA, 122 bp, Homo sapiens
aacttgcctaccaccaccttataaattatgtggcttgcctaagcatttgtaacactgactcgggtattctttaagtggttatgaggggttttcttcctttttaaggaactcccatcttgtat

SEQ ID NO: 120025 - DNA, 122 bp, Homo sapiens
aagacaccgcagtgccctcggatgttctgctccacagtgaagggcccgctggagctcagccgcacctctgagaaggaagagtctttacacaggtccaggtcgcggcagaagttacagctgcg

SEQ ID NO: 120026 - DNA, 122 bp, Homo sapiens
atcaagagaaaggtaattcagagacgacaacgaagtgggaaagaaattacagggtcaaagcgaaagaaaaccaagctgcttgggtaggaaggtgcaatgcaagccaattgtttactgtatct

SEQ ID NO: 120027 - DNA, 122 bp, Homo sapiens
ctgttgaaaatggccatgtgaactagttacctcatacaagtctctttggatgtaacatttcgtacagctggcttaggctcattgtgatttgaattcacccatggttggggctcttcatttcc

SEQ ID NO: 120028 - DNA, 122 bp, Homo sapiens
gatgctagcggtccataacttcggctttcatgcagctcccgtcgtccctttcatgaggaacgtacgtgtgcgcgtaatcacgcacgtacgtacaccacgcacgtacgcaggaggcccgtatt

SEQ ID NO: 120029 - DNA, 122 bp, Homo sapiens
gcctcttggtataggcggcttcccggaagcactccatgcacaccgccgtcagcttcaccacgctctcggccagcggcaccaggttcaggatggccccaaatggctgcgctcccatggaaaga

SEQ ID NO: 120030 - DNA, 122 bp, Homo sapiens
taaaatatacacggagcgcctccgggtttgcacacgcgcgcgcgcgggtacaccctggctcgagtacattagccccgctgggccggctcccagttgcagaacacattccattcttcgcgctc

SEQ ID NO: 120031 - DNA, 122 bp, Homo sapiens
tttgtttttttgttttctacaaatcagagggatatggaacatgcagtgaaataatcacatcgggccagaaaaaaagaaaatacatttattgcactactgactttgaagtttgaaatgtgtac

SEQ ID NO: 120032 - DNA, 122 bp, Homo sapiens
caccggcggccacagcgcggccaccggacagcaggggggaggggaggtggtcccagggggcggggcagaggaaaaggcgccggccccacagtgctccccgcttccgcccagtccagcccggg

SEQ ID NO: 120033 - DNA, 122 bp, Homo sapiens
tcccagcacgaaacaggattgggagtggtacagatccctggagggagacatagcgcggtgcgctactgcagggtatttggcaggagtagtgtcttagccgcttccggccgttggtcgcaagg

SEQ ID NO: 120034 - DNA, 122 bp, Homo sapiens
ttttatcatccctgtgggacctatggacggctgtggaatccattcccactttccacactgcgctatacacccttccagctggatatatggtttgaggacatggagcactgatgtccccactc

SEQ ID NO: 120035 - DNA, 122 bp, Homo sapiens
gggagggctctgatcaaagtagacctctcccctccccgcttcagtgtgcttcttagaagtcgacaagcaagctgtctttgtttgccgttcctgagcagaaagaggagattgataccattttt

SEQ ID NO: 120036 - DNA, 122 bp, Homo sapiens
tagaagagtaattttggagtttaactgaatcatgtaaaatataatctgcctaagagtgaccgggttgaaatgagacaccccaagattttctgaaaccttgaagtcaagaagctggagaataa

SEQ ID NO: 120037 - DNA, 122 bp, Homo sapiens
gggggtcagctggggctgtggaactgcacgaaggatatagtctggagttcacgggggtcccgactcagcctccccactcctaggagcctgccctggaggcctcctccagtcccagcaacaga

SEQ ID NO: 120038 - DNA, 122 bp, Homo sapiens
ccttcggcacccagtgagcccagcatgttgcgatggcactgcatggctatggtgggtctgcggtggcggggacgggggtggggctctggcttgacttggagctcgtgaaacgtgcttgtcac

SEQ ID NO: 120039 - DNA, 122 bp, Homo sapiens
gagggagccaactgtggagctgaccaattctgcgtgaacactgagggctcctatgagtgccgaggtcagtgtctacttctgcagaggaggggacgtgaggagtggaggaagagctgctccac

SEQ ID NO: 120040 - DNA, 122 bp, Homo sapiens
ggttccagagtgaatacattattcggctggagccaagcccccagggctagggcgggagcccgagagcgcgtggggtctgggctgcgggctggagctgggcccgcgtgtccccgggcaccggg

SEQ ID NO: 120041 - DNA, 122 bp, Homo sapiens
tgtattgttccccaaatggaataatattatgcattggatctgcaatctgtgcatttcactcggtgacctacactggccatcttcccaagtcagttcatagagctccatctcgttcctttaat

SEQ ID NO: 120042 - DNA, 122 bp, Homo sapiens
gtggatcttgaacgtcccgtcctctgcagccgtggagatgcgtgtctgttgcttttatgccgctcaggccatggcgtttccggatagcagccaggttggagggacccgctgtctctctggga

SEQ ID NO: 120043 - DNA, 122 bp, Homo sapiens
cttgacttttccctttagcttagtgatttgggggatttcacaggccccccacagtgagcccgtgagccagaggtacaggggcttcagagtgcatctggtctgtcttcctcttcttccagagg

SEQ ID NO: 120044 - DNA, 122 bp, Homo sapiens
cccaccgtgaaacaaagaagcctcttttttgtttgatcagaaaattaaactccactctgacgtaaggttatactgtacacgatgaatggatgacagctgtctaagttcaggtattaggcaga

SEQ ID NO: 120045 - DNA, 122 bp, Homo sapiens
taaacacattttctgaaccggcataaattccaaggaggtaggtctgtagcagatccactacggtagtgtagagaggaggaagggcacaggttatttttaaaaattagtgtttgactttggaa

SEQ ID NO: 120046 - DNA, 122 bp, Homo sapiens
accagggcgcagatcaccttgttctccatggtggccattgcctcctctctgctccaaaggcgaccccgagtcagggatgagaggccgcccgagccccggattttatagggcaggctctgttt

SEQ ID NO: 120047 - DNA, 122 bp, Homo sapiens
cccatctaaccctgttgtcctgggcatctttatcggctccggcctggagaagcgagcgggcggctcgggcgttgttcacggcagcagcccagtgcagcgcagttttccctaggggacgacgt

SEQ ID NO: 120048 - DNA, 122 bp, Homo sapiens
gcaggcccctcatcagccctgcccggctcaacctgaagggacagaagctgctgctgttcccgtcaccccctggagaggcccccaccacgcccagcagctccgatgagcactcgcctcacaac

SEQ ID NO: 120049 - DNA, 122 bp, Homo sapiens
gatgccgttgagacgcctgccttgctctggagctggcctggtgtgcggcctcccgttgggcgtgctgttagttagctgcaggcttcctagatgccctttctcagattaggtgcggccccttc

SEQ ID NO: 120050 - DNA, 122 bp, Homo sapiens
ccgccggagtctgtttatgcatcaaatgtgcccacagatttttcctggtgcttggggagacgggggaggcggtgcgggcagcctcccgcccccccgctcccccccgccaaacacacacacac

SEQ ID NO: 120051 - DNA, 122 bp, Homo sapiens
tggaggtcagaagtccaaaattaatttcaatggactgaagttggcagggctggttccttccggaatctctagggaagaattcatttcctttccttttccagcttctagaggctgccttcatt

SEQ ID NO: 120052 - DNA, 122 bp, Homo sapiens
gggctgagtgttctcagtcacctagagctgcaccccctaacaccggcttccccaagcccccggacagccccacagctggcatggtgctcacagccccgagcggagccgccagccccaggtgg

SEQ ID NO: 120053 - DNA, 122 bp, Homo sapiens
cgcgcgccgggcacaaaggcgcggacctcggcctggccccgcccccgccgcctcccggcccgcctccctccgaggccctgcccccgccccggccgaggccacgccccccagccaatcctgac

SEQ ID NO: 120054 - DNA, 122 bp, Homo sapiens
ggctggctttaccttccatggctcagatactataccatgactcctgctacctggggtggtcgtttggacattcttacagatagccacatatagaggactggtttctgtctcccactttggcc

SEQ ID NO: 120055 - DNA, 122 bp, Homo sapiens
agctgtgcacgcccagcgccagctgtcaggagccggctgcaaacctgcagagcgagtcagcgccatcgagcactcgcagccgccgcctcgggctccagggcccagctcccttccacatcccg

SEQ ID NO: 120056 - DNA, 122 bp, Homo sapiens
atgttgctaggtctcacggaggcctttctgcactaggactccactcccagcctcctgggacgagtccttggggtagcaatggagtgagactccacagtcatccagacaagaagctcagttag

SEQ ID NO: 120057 - DNA, 122 bp, Homo sapiens
accgcggccgagcctcttcctactgggcatgagagctgacgagatagaacggaagagccacgaaaggccctttgattccaatacgaaacaaattattactcccggaatggaacaaaataagc

SEQ ID NO: 120058 - DNA, 122 bp, Homo sapiens
atctgacctgtaggtctccactctttcttcccagttctcagatggttcttggagcactggcgaagtcaagcgaaaataaggtggtgagttttccccaacgaaataattaaattttggctgat

SEQ ID NO: 120059 - DNA, 122 bp, Homo sapiens
gcagctgggcgcggtgctgaaggacatcacccctgagggcctggagatcctgctgcccttcgtgctctcactcatgtccgaggagcacacagctgtgtacacggcctggtatctgtttgagc

SEQ ID NO: 120060 - DNA, 122 bp, Homo sapiens
cctctctccggtatgggaacgcaagtggatctgcaaggcactgtcactcccaaagaccttcgcgcagaacctgcacttgtgtttgaagaatgcctcatcggaagtacttttcgcttcaaagg

SEQ ID NO: 120061 - DNA, 122 bp, Homo sapiens
cttacgttcctgtcaaaacgatattttgttcttactttttaaaagctcagaaagacgcaacgatttgcctgggatcacacagagaacaagcagcagagttgtggctccaaaccagggtcaat

SEQ ID NO: 120062 - DNA, 122 bp, Homo sapiens
gaggggcccctctcaccatggccttgagggcggggtgaggtgaacccacaggcctgtcctcgagggccgcagggcgggaggagggtcggctgctagggagggccatgacggccccgctgccc

SEQ ID NO: 120063 - DNA, 122 bp, Homo sapiens
gtacatgcgcagtgtcctagtgcccatcgtctgtttccccggccttgcccccgcccgccccgtgccgtggacatctgggcccactcatcgcccctccaggcccccggcgccccaccccctag

SEQ ID NO: 120064 - DNA, 122 bp, Homo sapiens
aagtttcctaagtagtccagtatggcagagctagtgatggagtcagggtaaaacctacttcgagtctggtcttaaccacgatgatgctccttcgacgatttcttcgagtactgggccctgtt

SEQ ID NO: 120065 - DNA, 122 bp, Homo sapiens
aatctgccagccttcaatgagccacgatcctataaacaggttggggctccacccccaggtcgctccttcagccctgcacctgcccctcttccccaagaggctgggtcaaccagcatctccag

SEQ ID NO: 120066 - DNA, 122 bp, Homo sapiens
agcgggagggggcaaggggctctctctgactcagctccggatttgtgcatccccgcagtgcggcacccgcagtcttgacttccccagtctctgactgaacagatgtttttgtccctcgcgga

SEQ ID NO: 120067 - DNA, 122 bp, Homo sapiens
ggcggcggcggggggtggcgtggggggcgtgcgaaagaaactcggggctggcgcggaggccgagggtccttcgcggggggctgctccggagtgggggatgcgaggaggcgctggggacggcg

SEQ ID NO: 120068 - DNA, 122 bp, Homo sapiens
tgccaatacggacgaaggtcagacagctttgatctcagacaccaggcacttttcagccagcgcaacattctcatttttcatgattcctgcctcgcgcccccacgtccccacagctatgcttc

SEQ ID NO: 120069 - DNA, 122 bp, Homo sapiens
ggtgagccaaatattgctatcctggttttaacagtgaggaatccaggtctgtgacaccttcgcccaaggtcacacggcgagtcctcatggtaaagggctctccccacccttagggtccccac

SEQ ID NO: 120070 - DNA, 122 bp, Homo sapiens
gctctcccctttccgcccagcccgccctgggctggcccctcgccagcgccaccttgaccgcggacctcaaggcccagcgccctccccggggccacccagcggccatctcccttttctcaccg

SEQ ID NO: 120071 - DNA, 122 bp, Homo sapiens
gatggatctgtgcagtcagggtttcttgctgaggtacatctggatggtcagcccttcctgcgctatgacaggcagaaatgcagggcaaagccccagggacagtgggcagaagatgtcctggg

SEQ ID NO: 120072 - DNA, 122 bp, Homo sapiens
atcgtgctgctcctctctgggcctctgtttcctcacccgggatgtgtaatttctatttcacgttctgatgggaaaatatctggtgcatagtaggagctccatcagtgaaccagagcgttctc

SEQ ID NO: 120073 - DNA, 122 bp, Homo sapiens
tatagaatatttgttaataaatgtatgggattaacacctatggaatgtggggggaagtatcgggtacagagagaagtcaagccgaatgcactcctagtgacagcctcagctgacccaacagt

SEQ ID NO: 120074 - DNA, 122 bp, Homo sapiens
tgccaaagcatcgagtgcgattggaggggtgagtctttcggggggaagtgagctgggaaacggttcctgggcacctgggagtgtcctgtacctgaactttttagaggaattccaaggttccc

SEQ ID NO: 120075 - DNA, 122 bp, Homo sapiens
ggcttcagctggacgcagatttcaccccgcagggcacacgcagacccatttgtttggaagcggcagtcctaaggcagtgcaggtgcctccacggccccagcccagctctcctgcaggtgtaa

SEQ ID NO: 120076 - DNA, 122 bp, Homo sapiens
cgcagcgcagctggagcagctgcgaaaattcaaggtgggtgcgcccgcgcccccatccagcgtccaccaaagtgtagctgccccaggactggggccccagactgggaagagagccgccgaga

SEQ ID NO: 120077 - DNA, 122 bp, Homo sapiens
tttaaaaattattttattctctgttaagtttttttgataaatttctcaattgattccctgcgtcgtcttagagtttgttgaacttccttaaaatacctattttcagttctttgagagatcac

SEQ ID NO: 120078 - DNA, 122 bp, Homo sapiens
tctatcttacgtaaataaagggggctttgctctcctaattgtgcccactgttctgtgcagcgcggaccggcgcatgcagcgagcggggctgcgagggcgctgctgtggccaggcgtctggca

SEQ ID NO: 120079 - DNA, 122 bp, Homo sapiens
cactcatcctgcaaagctttcagaatggccgggatgctggtggctgagggaggcttgggccggattgggtgagcaactgccgaaagggaaagcaggtatgaagaacataacccaggggcctc

SEQ ID NO: 120080 - DNA, 122 bp, Homo sapiens
cagcagctgctgacgcatgtagttctcaaactcgtactgggagcactcctccgtcaccttcgcctttgaggcggggagggtgggaaggagacaaagataaacccagatgaaggcagcgcagc

SEQ ID NO: 120081 - DNA, 122 bp, Homo sapiens
tcctctaaggggcgggttctctccatttcccactcccacgtgtggggagagcagccccaccgccggctcatacccctgcagtgttccccaggcccgcaggggggcagcagagcgaccctggg

SEQ ID NO: 120082 - DNA, 122 bp, Homo sapiens
gagccaattctgtgtaataaatgtcattttatgtttctttggagaaccctaatacaatgccggtctccttggtttgtagatagccattttctcccttgtcttcacatcatcatcttcttaca

SEQ ID NO: 120083 - DNA, 122 bp, Homo sapiens
attcttataatcactctattcagtaggtggttttatcctattagcagatgagactcagagcgctgtagtgacttgggaattggaccttaaaccatggtctttctgataccaaaaggaacttc

SEQ ID NO: 120084 - DNA, 122 bp, Homo sapiens
ctgtgggccaatcattcgttatgcaaatgaggttgagggttatagccagtagaaatgatacgctgaatcaaatgctgaccaagcaaacaaaagtggaggcctcaagatatgttctggaatcc

SEQ ID NO: 120085 - DNA, 122 bp, Homo sapiens
gacactacaaaaatccctgttggcctgatttcataagtgtcagtacctaaaactgagcaccgaaagcacttcccataaaagcaaaagtggtcttgttcattgccgccttgtggcagtttagc

SEQ ID NO: 120086 - DNA, 122 bp, Homo sapiens
tttttggccattatgcaaaagctgctaggaagagtcctctgtcgggttttgtccgaacctcggttttatttcactggaatcgacacccaggaatgcgactgctggtcatatgggagctgcag

SEQ ID NO: 120087 - DNA, 122 bp, Homo sapiens
ggttctgccaatatggtagcactgcctaaaagtggatgactgaagtacaacagatcaaatcggggattaccctaaaggtcagtggtgaaggaaaattttcaattatttttaatcatcttaag

SEQ ID NO: 120088 - DNA, 122 bp, Homo sapiens
ctcatcttccatactgtcaccagaggaaacgtcagacccacaaacctggtcatctcactgcgttgctgaaaaccctcccagggctctgcttccgctcggatagaatccacatcgcatcattc

SEQ ID NO: 120089 - DNA, 122 bp, Homo sapiens
gttggagggcttggcttggggggacgggtgcgacatcttgacttgcagacgtgtttagtacggaatatcagagtacctagtggccgcccgggccgcccaaactccagagtccgtctccgccg

SEQ ID NO: 120090 - DNA, 122 bp, Homo sapiens
cagatgccagcgctcttgcagtacaaagtccttgaggctgagatcactggctagtcctctcggcgcctcatgtttctgtgtgtgtgtgtgtgtgtgtgtgtgtgtgtgtgtgtgtgtgtgtg

SEQ ID NO: 120091 - DNA, 122 bp, Homo sapiens
aagaaaaaaaccacttgggaaaacagtatagtagtttcttaaatggttacacctaccttacgacctgggcattccacttccaggtatttaccccagagaggaaaaaccgtatatgtctgtac

SEQ ID NO: 120092 - DNA, 122 bp, Homo sapiens
atgtttcactaaataaaagaaaaccagaatcttctgctgtctggtcccctacggagggagcggggagcggggcccggcgcgagcgaggcacaagtccctttcctgctccccacccaatgccc

SEQ ID NO: 120093 - DNA, 122 bp, Homo sapiens
acgtttggtacaggcagaatctgtccatctttcgtcttctcaatgaagatggccactcgccggggaactagttcacagtcgtactctatccgctgtgcccgggcgatgaacttcccatctga

SEQ ID NO: 120094 - DNA, 122 bp, Homo sapiens
cttcccccgctgcgtctgtggtcgcttttaggtgcaactggagaaggcactgaagccctacgagattcacaccgtcttcggtctcctggggtcggcgccgagtgggaggatggcggaagtaa

SEQ ID NO: 120095 - DNA, 122 bp, Homo sapiens
tcctccctcaggctcacctgcccagccccatccctcccagtccgccacgcccccggggcccgccctgcgctcacttctccacgcccacgacgatgtagcggtcttgtaagaagtggaaccag

SEQ ID NO: 120096 - DNA, 122 bp, Homo sapiens
aattacagggattcggtttccccgctctgaaggaatgcattacctgcagcaaaggaggcgcggcctctcaggaaggccccgagaggaagctgaatgccccagtgcattccagccccatccct

SEQ ID NO: 120097 - DNA, 122 bp, Homo sapiens
ggggcgccagcgctgcaggtaggggctccggcggcggtgggcgcaggtgccgcggtggaccgcggaggggaccggagcacgaggggaacggccttgggggagcgccctccccccgtcctccg

SEQ ID NO: 120098 - DNA, 122 bp, Homo sapiens
aaatttgccacaggcttttggtcgtaaggcagacgactttcttcgtcaggcggccatgagcgaatcttcaggcacaacgaggggcaactggcggggaaggagtgtgacaaaaactcggtgag

SEQ ID NO: 120099 - DNA, 122 bp, Homo sapiens
agactctgtctccaaaaaaataaattaaaaaacccacattgattatctgacatttgaatgcgattgtgcatcctgaattttgtctggaggccccacccgagccaatccagcgtcttgtcccc

SEQ ID NO: 120100 - DNA, 122 bp, Homo sapiens
cagtatcaggcgaaagcatcacgtaccagttttcctgcatccattggatggcttcattctcgttgaactgcttttcgaattcatattcttgtaaagtcaacactgacatgttcattggggct

SEQ ID NO: 120101 - DNA, 122 bp, Homo sapiens
tgcacctggaggactctctgctacgtggagtaacccaggcacagagatacaaacatggcacggacggcccccactcacgtgggaaacctcaacaaggccaactcgcagaagcagagaacaga

SEQ ID NO: 120102 - DNA, 122 bp, Homo sapiens
ggggggtgcccgcctttctcctgcggacagcccctagttccgcgcgcgcccgcacccctgcgggtgtcctcactggcccggacggtcctcctgagcggagcgcccatttcctccctcccttc

SEQ ID NO: 120103 - DNA, 122 bp, Homo sapiens
aatttcattctgaacagggaagacagctcctagcacatgcaaatgaccctcttccaactccggctccagcaacttcgggcgggggccagccgggtcggctgaatgcgagggggatgcgaccc

SEQ ID NO: 120104 - DNA, 122 bp, Homo sapiens
ttcttgcgcgctgccagaaggagctattttgagcaggtctgtggcggaagtgggtgttcccgggtctctgctgcccagctgtgcccgctgccgtcttggggtcccggggtgcgcgggttggg

SEQ ID NO: 120105 - DNA, 122 bp, Homo sapiens
gtggcagtgccagcagcgagtcgtacaccttgcactgcatctggccggtgctctgcaccacgcagttcatccacaggccctcccagatgttctgcgacgtgatgatgttgctgccgatgaag

SEQ ID NO: 120106 - DNA, 122 bp, Homo sapiens
tcagcgccccgcactggttccgcgctcgaccaatcccaagtcttcttggagaactgcgggcgccaccggcgctccaggatcaaggatccgaggatttaaacctttcatttcgtcaacggtta

SEQ ID NO: 120107 - DNA, 122 bp, Homo sapiens
catgctgggcttgggtcgccgccggggcttgccccctgggctgctcggccaccgccgccccgggcgcccggcatgtcggtgcactacaccctcaatctacgcgtcttctggcccctggtgac

SEQ ID NO: 120108 - DNA, 122 bp, Homo sapiens
ttaggctccccactgagatttgttgaataaatgaggaaataaacactgtggtggggacaccgttgctttaagcaggaacagctctgaccctcggaaagcccccaggagatacagacccagaa

SEQ ID NO: 120109 - DNA, 122 bp, Homo sapiens
ggtgctagttgctaggcaggaaagggggctgatttgattctgtcctacagtgtccctggccggcctgctgtaggactccagatttctgtgagcagtcactctgtatgcgtccctgaattggt

SEQ ID NO: 120110 - DNA, 122 bp, Homo sapiens
ctgcttacagagcagcaggtggttctcattgccagacggacaggcctgggaccagcctctcggccctggggttcctgtgtgctccaaggacctgcggcctcggctgcaggagaggccagtgc

SEQ ID NO: 120111 - DNA, 122 bp, Homo sapiens
gccccatggcccgttcctctcccacctgcagacccgctacgacttcacctcatgcatgggcgtgctcctggtgagcatggtggtgctcttcatcttcgccattctctgcatcttcatccgga

SEQ ID NO: 120112 - DNA, 122 bp, Homo sapiens
gtaaccggggctggcggggccggagtcacaggttcctgcggggctgagccgggccaggggcggcgtctgtcagggacccaccgcggtctccctcgtcccggcagcagagggaccgcgagtga

SEQ ID NO: 120113 - DNA, 122 bp, Homo sapiens
aggggaaacaaggttccagaaaagcaggtaaaagggcaagcaaagcaggggtaggagccgcgcagagccaggagcaaagggtcctggcccggccgccatgttccctcctcccgcccctgcat

SEQ ID NO: 120114 - DNA, 122 bp, Homo sapiens
tgtctcctctcctggcctgcacattccaggcctcttcatggatgagggcggtgacagccacgcgggctctacctccacatggggggtttggccagctccaccctcctggcgtgtccccaggc

SEQ ID NO: 120115 - DNA, 122 bp, Homo sapiens
agatagataaaacaaattacataccaaggaagaagggccagctggcctcaaactcttacccgtaacacaggtgcactatctgcccacctagacccagctaaaggacagttgtcatgcctgga

SEQ ID NO: 120116 - DNA, 122 bp, Homo sapiens
cgtgatctgccctcctcggcctcccaaagtgctgggattacaggcataagccaccatgcccggccctgggtagaatcttaatttgaagagacatttttgacacattccttgcatcattccag

SEQ ID NO: 120117 - DNA, 122 bp, Homo sapiens
gacattgttaaaaatgacaacctccctactcgccaagagacttgacacttcttccttttccgcactgagacaggacaatttaaagcccagaataaaataaattaaaataaagtatcaagcat

SEQ ID NO: 120118 - DNA, 122 bp, Homo sapiens
ggcagggagtctttgagggttatgagctgtgttggggaggagatgtggttctgaagatttcgggggtggggaggctcctgttttcacactgtccatattgtaggataggttagaatggggaa

SEQ ID NO: 120119 - DNA, 122 bp, Homo sapiens
gtgcggcctggtccgggccatgtccgcgtgaggaccccgccgctgtcgccgctcccgttccggccctggcccctctgcccggcagcgccgcgcaccatgggctccattctcagccgccgcat

SEQ ID NO: 120120 - DNA, 122 bp, Homo sapiens
tcgttcgccttatctgtgtgctgttgtgtgtggtgtctctgacttgtcctgaaacagccacgtgaagtcagggccaacgtcttctggttcaactcggaactccccatttccagcccagcgcc

SEQ ID NO: 120121 - DNA, 122 bp, Homo sapiens
accagggaagcaatgcccagggccagccccaaccctcggctctcggtgccgcgtaaaacacgcttcagtctactgtcagattcttgaggttggctgtgcacacggtcagaggtccagggtct

SEQ ID NO: 120122 - DNA, 122 bp, Homo sapiens
aacatgtctgcgcaggataagtgagctttcggggagtgaaggggcacatcttgttcctaccgacggtgcttctacccccaggtaatcttagcagtggcaaagattaccagacacttagaaac

SEQ ID NO: 120123 - DNA, 122 bp, Homo sapiens
cccaagtaggaaaatctccattaaaaataactttatacacttgatcttagccaacagaagcgataaaagcaactttataatgtagctatcaactgttccactttactaaacttactaaagac

SEQ ID NO: 120124 - DNA, 122 bp, Homo sapiens
aagcacccaacttctcccgcctcggcttctagcagaaacgtgacggggctggactttgatcgccgagggctctctgctcttcagagtctgcttggaacgggataagtgggtaattccttccg

SEQ ID NO: 120125 - DNA, 122 bp, Homo sapiens
cccagcacataacaggtgctcaacacattcgcgaggggagcgctgagcaaagcggaggcccgggttccctcctggagaaacctgcttcccctccaaggcctcaagcgtccgctccttcactg

SEQ ID NO: 120126 - DNA, 122 bp, Homo sapiens
atagagagttggatttggaatgtgaaagatacttcatattcttcccggcacacacacacacgtgtcttttatgtgtggcttgtgtgaatgtgagtgcgtgtctctaggctctacatgtagga

SEQ ID NO: 120127 - DNA, 122 bp, Homo sapiens
ggcctaggtccagattattctaagttatgtgaacgtcagacaatgggatcttaggccagccgtgggcagtgttcagtgttttctcaatcttcagtttctcaacttcatttttcccctctctg

SEQ ID NO: 120128 - DNA, 122 bp, Homo sapiens
ttttcctctggtccgctattccagaggaatcacagtatgccagggctgaaggtttctgatcgctaacgtcaggggagtagaaatgtggttttggaggggatgagcgtgcgtttctagcagat

SEQ ID NO: 120129 - DNA, 122 bp, Homo sapiens
accttcctggccccccgaagatcactcccgctcgccccatcccggaggtgtcactggggccgggggacggccagatggccccatttaacaggactatccgttttgttgggggccgaagcagc

SEQ ID NO: 120130 - DNA, 122 bp, Homo sapiens
aggaaaatttaagcgtagcattttgagacttccctaaggcccccttctctagtacgcaatcgcggattcaccagcttgagtcagttggcctcagttttgcttttggaggtttaagtcgggtg

SEQ ID NO: 120131 - DNA, 122 bp, Homo sapiens
gtagagccccgccccctcgttctagggtggagacccgtccgcttgttctacggtggattccggccgcttgtctagggtggaaccccccagcttgccctagggtggaacccccccgctgccct

SEQ ID NO: 120132 - DNA, 122 bp, Homo sapiens
accgcctcttcccgcctcacccatgccctgcgcgcccagcatccaggagtcgcacacactcgacctctgcacacacatcacactgcagggccatgatgggtttactttcgccttcactcaag

SEQ ID NO: 120133 - DNA, 122 bp, Homo sapiens
gaaaaaatgccgtcgcgggcggggcagacccacgagcctgcacgcagccccgcgccgccccgccccgtccgcgcaaacacgcgacctcctcagctcccattggtttctgccagcactagcca

SEQ ID NO: 120134 - DNA, 122 bp, Homo sapiens
agtcaggttgtgtctaaacggggacctttggaggggcaggaggcagcatcccagcttccgcggaaaacagagtgagagcctagacgctgttaagccctcaactgtcgccattgggtcctccc

SEQ ID NO: 120135 - DNA, 122 bp, Homo sapiens
cggggacctccctgcccgccgcacccctgccccccgcccccgcccccgctcccgccccgccgtggctgtgcagcaagcaggggacagtcccatcagcaaagtcggggaacttccaggaagcc

SEQ ID NO: 120136 - DNA, 122 bp, Homo sapiens
tgaacaatagtcgggctttaaatggcaaacaagcaaacacacagagcacaaccccaaccccgaaaaagccaccgcggagagaagcaataactccctccgcagcaaaaggcgccactgaaacg

SEQ ID NO: 120137 - DNA, 122 bp, Homo sapiens
tgggaaccatctggtggccagaaaggttttaacacaggccagggctccctgctgtcctctcgtggcaagaggtggtatgacgccctaggtaggaatccttgccctgcgttgttcaggattac

SEQ ID NO: 120138 - DNA, 122 bp, Homo sapiens
ctctgtttttttttcctcctcgcacccccaacctgccagagcagccccacatcttcctcccgcccggcatctaccgccacccaagccacctgccaggatggggctgggagctgtcgggccgc

SEQ ID NO: 120139 - DNA, 122 bp, Homo sapiens
ttccagtgtaatggccaacccagtgcccagtcggtgtttggggctatcaacaacagtccccggttttgcatatgcactttccccaccctcattcagccacgtgtctcacaggaaatcgagcc

SEQ ID NO: 120140 - DNA, 122 bp, Homo sapiens
gctttgcacaggcatttactccaggggatggcgggccaccccagccccaaagggttaatgcgtcctggggcgtacagagctggtgaccttggggaaggccacacaatggactgctggaaacc

SEQ ID NO: 120141 - DNA, 122 bp, Homo sapiens
gcttggcccactcagcctccccataatttcacaaaagagtgactctaatgtttgctgcctcgtggggagccggtgggcacagcagtggattggatacctacaccagagaaggcctgagaggc

SEQ ID NO: 120142 - DNA, 122 bp, Homo sapiens
gcccccgcggcggggcgtccccgaagcgggcgctgacaccgcagtgcaccggacgccgcacgctcttttcgcgaggtgaccccaaggcgcggaccccgcgcaaaccaaacgaaccggcgcct

SEQ ID NO: 120143 - DNA, 122 bp, Homo sapiens
ggcttgtcttgatgccttatttaatacaacagtaggcacagcgtcctgggcacagacctccgggaggttagtgatgagagaggcacccactcctcacggggtccctgaggcacccacagacc

SEQ ID NO: 120144 - DNA, 122 bp, Homo sapiens
tgtacctggacgtggacgccaacgggaagccgctcggccgcgtggtgctggaggtgagaccgctcgcagggccggcctgggcgcgggacacgggcccggggagagccctgggccccgggcgg

SEQ ID NO: 120145 - DNA, 122 bp, Homo sapiens
atctcagctctgccattaactagctgtgagactcaagaataactaatcattttgataactcgtttttttactttttaaaatgaggagccaagtttagacaatgagctcggctcttcaccagt

SEQ ID NO: 120146 - DNA, 122 bp, Homo sapiens
ggcagcaccttggacagagccccgtctgcagggtagggctaggtggcaggactatgcccccgagggtgggtgcccaaaggtacggagacctgggtgtcacgcggaaagcccggatgcacagt

SEQ ID NO: 120147 - DNA, 122 bp, Homo sapiens
gaaagaggatctggctgaaagacccgcaactttcacttgttgagaacctttagccagcgccggcgtgcatgtgttttagttttattctttttcccttgcccccaaagccgtggagtacctgc

SEQ ID NO: 120148 - DNA, 122 bp, Homo sapiens
gtctctcagcaagtggcatcactgaatctctagatacctaagccaaggcctgggaatcttcgtctactcattctcagtcatcccttacactcaattagtcatcaggttatcttaagtctccc

SEQ ID NO: 120149 - DNA, 122 bp, Homo sapiens
atttttaccaaaatgaaccattggcttcctgtcagagttaatttcatttcatctcttggtcgctggccttgaggcagatccatacaacatctgtattgtttctgcttaggataatgattttt

SEQ ID NO: 120150 - DNA, 122 bp, Homo sapiens
cgcttggccgccagcttggctcccgtaactgggcgggcgcatagctggggctcagcggtgcgcgtcctgataaggagactgcgccttccagggctctgggaagagggccggggcaccgggca

SEQ ID NO: 120151 - DNA, 122 bp, Homo sapiens
tccagggccttctctctgttctacagaaaagagggaaagggggctggagaggcagggtaacgcccgtgggtgcctcggacacccagctctcccaaggctcttaagcgcgcaacagcaagaac

SEQ ID NO: 120152 - DNA, 122 bp, Homo sapiens
gggctgggctggcttggtgaggagctttgtctccaggcttgaaaccagccggtagcgactcgcttagggttttgtgatcttccgcggcgcccacggcacgcccttttctcgaggagctgaaa

SEQ ID NO: 120153 - DNA, 122 bp, Homo sapiens
tgcgggtgctgtggaaggagctctgatgccaggaggacctggaagccctgttctgagtgacgggctgcaggggcaccagcggcctgacctgcccgacagtgagccctgccgtcaggtagttc

SEQ ID NO: 120154 - DNA, 122 bp, Homo sapiens
ggaggggaagaaggccaggtcgcactgagccaggaagcagttggcaaaggggcggggtgacgcggtgacgcaatccgcctgcgcgctgggcggggcggggcgggctggggcgggctgtgagc

SEQ ID NO: 120155 - DNA, 122 bp, Homo sapiens
cctctcacctgccagccgtctgtctctagtgtttttccaaatgacatccagggctctggccgtggagtccctgatgtgatcgctaaaggacctccggagaggggctcgcagggggcgcgcca

SEQ ID NO: 120156 - DNA, 122 bp, Homo sapiens
tttacactgaataaaagtgtagaattgtccaaagtcaattatttgagcttacttttttttcgtatgtgtatatccacattttgtctcagcaaggaaataaagatgttttaaataaaattata

SEQ ID NO: 120157 - DNA, 122 bp, Homo sapiens
accccccgtttcctccgaagtggttggtgccttagcaactaaagctggcaactgggacatcgtccggtgctgcaggtctcagccgaagggcgtcggaaactgcgctcgcatcgagcagtttc

SEQ ID NO: 120158 - DNA, 122 bp, Homo sapiens
agctttggggcaagtctcagaagaaagaaatggggcttccacagaaccacttcctggggccggaagggactggagagagtcatttgacccaaccctcctggttcgtaagtggggaggctgaa

SEQ ID NO: 120159 - DNA, 122 bp, Homo sapiens
tcccccgggcgcgaagaagacgccagcccaccccagccgccggggagatcgcccaggccgcgctcagccccgcccctggctctgcccccgccgcggagcggaaccctccaagtcgcggcctg

SEQ ID NO: 120160 - DNA, 122 bp, Homo sapiens
gacagctgttcttgttcaagtgcccggcctttgcttttctgggatgaacttgaagaaagtcgaattggaatataatttggaatgattttcgaaaaaaacgaaccagcaatgcctggaaatga

SEQ ID NO: 120161 - DNA, 122 bp, Homo sapiens
tctggcccccctgaggagacgccatcttaaaggctgatcccagccggccacttccggtgccgcctgcagggcgggacttgtctcccagcaacgaggttctaggtcttttcggattcgctcac

SEQ ID NO: 120162 - DNA, 122 bp, Homo sapiens
cgtccgtgcctcatcatgacccgcacgctatggttacatgccccgcctcgcgctaccgcgcgtgccccatcatgctctgcgcgctcccattacgtgccgccacctcgcgcccctgcacgtac

SEQ ID NO: 120163 - DNA, 122 bp, Homo sapiens
ttctccagttttcccaattgcagtgtattattaacttctgggacctgactgatatctacccgcttagaaaagctatggaaagcaggccgggcgcggtggctcacgcctgtaatcccagcact

SEQ ID NO: 120164 - DNA, 122 bp, Homo sapiens
agcgtaacctctctgaaccactgtccatatgtcaatcaggacttacgaggccaccctgcacgctgggctggcctggtgggaagcatccgccctgggacccttgggtctctctccgctgtggg

SEQ ID NO: 120165 - DNA, 122 bp, Homo sapiens
tgtgacagggtgacagtgttaccgttgtttctttataagctgctttgacggaacaggtgtcgtcagggagtgtggaaattcctcttcacacatgtgctgtgccggcagctccctgtttctcc

SEQ ID NO: 120166 - DNA, 122 bp, Homo sapiens
caagtcagtccaaccatggcaggctctttgcatatgcgtccagcatagttgatgaacagacgtctacactagaggaaactggctcagttagtcagttcacaaaaccaatcctggccaccatc

SEQ ID NO: 120167 - DNA, 122 bp, Homo sapiens
gcctcagtctttgggcttgcacctcctccctggcagcggtgtgaccggagggaaaggcagcggcgagggccttggaggacctgcaggcagtgccccgcccacccagatttgggtgactttct

SEQ ID NO: 120168 - DNA, 122 bp, Homo sapiens
gctgctggctgcagggcacctggatgacaggcattccttggccaacacatgcttcagccgcgctgccggctgcagggcacagaggctccttcagtggaattttgcctacgacacagagcaca

SEQ ID NO: 120169 - DNA, 122 bp, Homo sapiens
actttttctccacgcccacccccgccccgttcccgcccccccccccccccgttacagctgcggcatctatttggtttgggttgtaatccagctgttttgaagtggaacgatttgttgatgat

SEQ ID NO: 120170 - DNA, 122 bp, Homo sapiens
cctttctttaggacagctccagaaggaaacgtgatagagatgataactccgttgtaggatcggattttgagccttggaccaacaaacggggagaaatccttgcccggtacaccactaccgaa

SEQ ID NO: 120171 - DNA, 122 bp, Homo sapiens
gcttccgtctttagggaccgtaaaaaacaccccacatacagcagcagcagctcaaggcaccgttagctacgtgcggccccggcgtttccgcgaagggcggcacgggcggggcggtgcttgtt

SEQ ID NO: 120172 - DNA, 122 bp, Homo sapiens
gggccgcatcaaagagggcaggaaggggcagggacaggttggggggacgccaccctgagtcgcagaaactgcacacccactccaccctatgctgggggcagtagagaaccagcaaggggcaa

SEQ ID NO: 120173 - DNA, 122 bp, Homo sapiens
acactaccatgcctggttaatttatttattgtggagatggagtctccccttgctacccagcgtggtctcaaactcctgggcttaagctatccttctgtctcagcctcccaaagttctcagat

SEQ ID NO: 120174 - DNA, 122 bp, Homo sapiens
gcgccacactcgccccctgccgggtcggactgcgggacgggttgccaggcgcggttccgccgccctcctggatcctggggaagttctagacacaggcccaggaccccgggctctgccggcga

SEQ ID NO: 120175 - DNA, 122 bp, Homo sapiens
gtcagagagctggcggggctgagggaaggaagcctgcctccctggcaggcaagcaggcggcgggcgcggaagcaccagctttcacgtctctggcagagccccactccggctgcctgctgcct

SEQ ID NO: 120176 - DNA, 122 bp, Homo sapiens
tcgggtgcgggcctgcggggggggtaggggagaggcagcgctctcagacctggccacaagcgttctggggaagccccctgctcccgaaccccaatcccgtgttccagcttcctccccgggag

SEQ ID NO: 120177 - DNA, 122 bp, Homo sapiens
ggttcaggatggtaaagagaagcacactgttcacgctccggatcatccgagttcccggggcgggagatcttctggctggtagagtagttgacaaaagctgggtgaccggcaatatgtatttg

SEQ ID NO: 120178 - DNA, 122 bp, Homo sapiens
tggaacatttttaaattgcacgtgttttcataatctttgttaatctgacacaaaatggaccgtatttatacttcgaatccttgtagcccatcattttcatggtggactgttatgatgtacag

SEQ ID NO: 120179 - DNA, 122 bp, Homo sapiens
ggtgaagcccaggaggctctctagtgggatagcccggccgatacgccaggcttggccatgcgaggtgagctgtcgcaggatgggctcggttacggccaggtgtgcaagcggacatgcgggtg

SEQ ID NO: 120180 - DNA, 122 bp, Homo sapiens
ctcaagtcttctccttggagaagtcttccctagtacactctctaaaatagtttctccacccgtcatgaggccaaattatttgtttacagtaatatcactttccccctcagctttattgaggt

SEQ ID NO: 120181 - DNA, 122 bp, Homo sapiens
acggtggcgtttcgagaaacgtcctcatttcgggagtatccagtcagaggctggtcaggccgccaggcctagcggatcatgcccaggcagggggttggacgtcaccgccacccggaggtcat

SEQ ID NO: 120182 - DNA, 122 bp, Homo sapiens
gcaccagagaaaggcagacagggaggagtggaggcaaggtgggaggtagggtcagggcaccgacccaacttaaaaggtaaggccaagtgtgttcactctttgctacattctcagagtcttgc

SEQ ID NO: 120183 - DNA, 122 bp, Homo sapiens
gggcctcagttttcctatctgagaagaagggcgaagagctgtgcccccgaccacacccgtcggtgatggggcaaaccgagggcaagcaggtttggttcctgcccagcaaaggtgagggagga

SEQ ID NO: 120184 - DNA, 122 bp, Homo sapiens
gcgcgtgtggcgaggggagcgggcgcatggtttcacggcgcgtgtggcgaggggagcgggcgcatggtttcacggcgcgtgtggcgagggcagtggatgcatggtttcacggtgcgtggcgt

SEQ ID NO: 120185 - DNA, 122 bp, Homo sapiens
caactacccaaggacacaaagtgacctggaggcgttctgcggtggcgctgccgtcaaggccggggccgcctggccagaccctccctcagacgccccccggggccgccctcactcccgcacgt

SEQ ID NO: 120186 - DNA, 122 bp, Homo sapiens
aatagggctctggccggctctgttccaaggaagggatgctgtccaacacacactcgcgcgcgcacacatcaccaccatgcccaggaatggtttattgtggaaataatagggggaaaatgttc

SEQ ID NO: 120187 - DNA, 122 bp, Homo sapiens
atagttacagctttaggcaaaagccatctttgataggattttaagagatgccaggttccccggggctgcctgaggaattcttatattcaggcaaattctcagagcactgctgacaaagacaa

SEQ ID NO: 120188 - DNA, 122 bp, Homo sapiens
aatagtcacacctatattttagggaaagtacagcagcttatattggtgcgatgccatttgcgtgggtagagggtaggcagagaagccatccttaaagaactgagaatcaagctgagatctga

SEQ ID NO: 120189 - DNA, 122 bp, Homo sapiens
agtgcgggcattgcaggctgagccaccacggccgccacgaccttctcttctggagcgtgtcgcttttgtaattatgatgtaaactccgggcacgcggggaccctcgcgcttcgctcactaat

SEQ ID NO: 120190 - DNA, 122 bp, Homo sapiens
cagatttggtccccaatttttagaacaaaaatattcacattgagaaagccaaggatagatcgaagggaatgcagaagcagtcacatactagttacatgcagcaagaaagtcatcctttagat

SEQ ID NO: 120191 - DNA, 122 bp, Homo sapiens
cttcaatcactggaaatttatacatcactggtgattctaagaaatcattacccaaaaagtcgctattatgatgtccataacagatgtactcagatgatttaatgcagaattcataaatcaga

SEQ ID NO: 120192 - DNA, 122 bp, Homo sapiens
ttcacgacatcacggcctggacacgtgacctcgctggtgggagccggcatccgtcatcatcgtcctgattgtagggccccggcaagtagcggcctctccggagaacacagacgagcaccatg

SEQ ID NO: 120193 - DNA, 122 bp, Homo sapiens
tgggttgggacgtgggtccacttttgtagaccagctgtttggagagctgtatttaagactcgcgtatccagtgttttgtcgcagagagttttcgctcttaaatcctgggggtttcttagaaa

SEQ ID NO: 120194 - DNA, 122 bp, Homo sapiens
cctcccttttacgtcacatttatttcaactcttagatgcttattattagacctgcagcctcgcttctttctggcttgcagcccaatttcgtacgggtcccttgggcccttgctctttttggg

SEQ ID NO: 120195 - DNA, 122 bp, Homo sapiens
tggtgaaggttcaggagttattggccacatttcacagatgggaaacagggcagcggggcacggggtttgcttcagatccgtgggtccttgctgagctctacttcattaagcgatcaatattt

SEQ ID NO: 120196 - DNA, 122 bp, Homo sapiens
gggaagctgcctatgctccctggacctcagcgtatgagcgggggagcaagacccctttcacggggctaattcaggctcgaggcctcccttggcatcctccactgaacaatactctaggtgtt

SEQ ID NO: 120197 - DNA, 122 bp, Homo sapiens
cgcgctaggagtgggtgtggcctctgcctccacattggaacaaggtgaggcagagggtgtcgcgtggtcttctgggaaatgtagttcgtctgccaggccggaaccaccgctcaaccggctcg

SEQ ID NO: 120198 - DNA, 122 bp, Homo sapiens
gggtgctcccccaaaacctagggatggggcagcctcgggagatgctatctgctttaaggacgtcgcttcatcatgtctaccgtgcacctaacagtggctgctggggaaggaagggaggtggg

SEQ ID NO: 120199 - DNA, 122 bp, Homo sapiens
gggtgtctggtccccttatctccttgagctctgcctggctctgtcccagtctgccaactccgggaagctcactggtggttcctggaccccagggccctcacccgcttctactcccactcaag

SEQ ID NO: 120200 - DNA, 122 bp, Homo sapiens
aaaccttgttgctttttcccagagtctgatggcagtgactgtgatcaagggaatcttcaccgccacaagtgcaggcagcaggtgtggttcaggtccccccccaccccactgtgctcctttga

SEQ ID NO: 120201 - DNA, 122 bp, Homo sapiens
tggaatgagagaaccgtttggaagcactggaatacagctttattcctacacgattagacccgttaccccgtgggtctggccgaccgtcctgactcggagatccctgagctgcgccgccgctt

SEQ ID NO: 120202 - DNA, 122 bp, Homo sapiens
cactgtcgctggaaagggatggaacgtcacggtgcgctctaaaaggacagggggcttgtgcggtgccctgttgtaaataatttgtaaagaaatgcgcggcgcccctgttgggaattggagct

SEQ ID NO: 120203 - DNA, 122 bp, Homo sapiens
gatgacactcaccgggatcggggatcgcacagcgcgggctcggggaagttgggggaggcacgcaacctttgaaccttttgcccgtggttggtgtctgaccttggacaagaccccctcccgca

SEQ ID NO: 120204 - DNA, 122 bp, Homo sapiens
aatagcgcctctccatccagttctcatctttgagaacgattcttgggatgaaagccacgacgttggatatgaacaacctggttgccaagttgtttgcatttttgcctcctctcctttctgaa

SEQ ID NO: 120205 - DNA, 122 bp, Homo sapiens
ggttttcagaagctcctgagagaaatcgcctatggcaggaaggcctggcagagagggcagcggggcgggtgtacctgctcagccgacatacctgtgacatccaacggacgcttttttagagc

SEQ ID NO: 120206 - DNA, 122 bp, Homo sapiens
tctcagtgcgggctgcagtggcgggagttagcgtcggcgtgccgcctgccacagcactgccgcctgcgtggcaccgacgccttcgcttctgcattttctggattgtggcttctccacatttt

SEQ ID NO: 120207 - DNA, 122 bp, Homo sapiens
aggacctttaacaataatgacacatacatttacctttgtaactcactgttaccagattaacgaccattactagcgtgctttgggtgcaaccacccactcttcaaattccgcttctgaagaaa

SEQ ID NO: 120208 - DNA, 122 bp, Homo sapiens
ttagaaataatacgaaggaaaatataaaggaaaaataactaaaatgatgttatcaatgcccgtctggccaccagtgttaaacgtatttagttgagttcatactcaactagaaataatgcctt

SEQ ID NO: 120209 - DNA, 122 bp, Homo sapiens
cctcgcgcaccacgtgctaggggagcgggcgggcagatggctgtgtctgtaagcgggaggcgtgcccggttcatccaaggcgcaagatggcgctgctttttgcacgttctttgcgcttgtgc

SEQ ID NO: 120210 - DNA, 122 bp, Homo sapiens
tattgtaagtgatattacaaacgatacagataaacagctagatggaagagctgcataggacgaggtatgggagaaggggttcagaacttccatgctctctcctggcacactgccctccagga

SEQ ID NO: 120211 - DNA, 122 bp, Homo sapiens
ttgttttcttaacagatgtatccagagctacagatcacaaatgtgatggaggcaaaccagcgggttagtattgacaactggtgccggagggacaaaaagcaatgcaagagtcgctttgttac

SEQ ID NO: 120212 - DNA, 122 bp, Homo sapiens
gtgcaatgagtggcggaaaggagcttttccttgtcaatacgaaaatctttgagtacaaatcgataaagctagagattcaaagactgcctttataaaactggagaagatgcactctggccata

SEQ ID NO: 120213 - DNA, 122 bp, Homo sapiens
tgtccctgcggcctctcaggccctcgggacactctaggaggccgatctgcagggtgggcacgccctaaatccacgccaagtcacccacgcattccttctgccaccctctcttggatccgaag

SEQ ID NO: 120214 - DNA, 122 bp, Homo sapiens
ggaacagagcaatcccagaagtattccaacagagctgaccctcctggttcctatgctccccgtgtgtaactcatgaagtctcaaagctcttaactttaaattgctgaatcattccagcaagt

SEQ ID NO: 120215 - DNA, 122 bp, Homo sapiens
taccagaacaggcagggccctggcggccctacacaggcgcccccttacccaggcatgaaccgcacagacgatatgatggtacccgatcagaggataaatcatgagagccagtggccttctca

SEQ ID NO: 120216 - DNA, 122 bp, Homo sapiens
caagtcaagtgcttttgatcacagtaagtgtattagcagctgaaaataattgttgggaaacggtaaccacacaaccttggtacgaggcaagaagctgtaattgagttttggtagtgttcttt

SEQ ID NO: 120217 - DNA, 122 bp, Homo sapiens
aaatggggatgagaacagcctgacctcctgggttgccatggtgattgagaataacataaacgaccggcctgtgtaggtgctgatgaagggttttctgagggaacaaaaggctgaggccttgg

SEQ ID NO: 120218 - DNA, 122 bp, Homo sapiens
cagcagccacattcaccaaggagggcctatccgcacagcagccacattcaccatggggggcgtatccgcacagcggccacattcaccatggggggcgtatccgcacagcggccacattcacc

SEQ ID NO: 120219 - DNA, 122 bp, Homo sapiens
cccaggctccacagagtcagatcacggcttcacaccagtcgttctggtcacttaggcgttcgcgtgagcgctcaaccccttaccgccacctcatcgtcactctacaccattctgagcgcaaa

SEQ ID NO: 120220 - DNA, 122 bp, Homo sapiens
cacacacacacacacacacacacacaccctagattgtgtttgcttcctcttccagaaagtcgccgcgtctgacccccaccccaccctttctctgctcgggttaacacctggtgcccggaatc

SEQ ID NO: 120221 - DNA, 122 bp, Homo sapiens
atctgccccctccagggcctcctgggagtgggacaggcaagtctgagtttcggttttcaccggagatgtaagagctggcctgctaaattgtttctgccccagtccttggtgatcctgttctg

SEQ ID NO: 120222 - DNA, 122 bp, Homo sapiens
cacggcggccctgagtgcaagcaccatcctgaaaccaggagcccatgaggccgcgggagccggaggaccaggaccgccctcgcactgccctgtgacgagctcccggcccagctctctgccgc

SEQ ID NO: 120223 - DNA, 122 bp, Homo sapiens
gcatctagacgtttccttggctcttctggcgccaaaatgtcgttcgtggcaggggttattcggcggctggacgagacagtggtgaaccgcatcgcggcgggggaagttatccagcggccagc

SEQ ID NO: 120224 - DNA, 122 bp, Homo sapiens
gatcctcctgcctctgcctcccaaagtgctgggattacaggcatgaggcaccgtggtcagcggtccttatttttggaggatgaacctgagctggtgagctactgtttattaagtccttgctc

SEQ ID NO: 120225 - DNA, 122 bp, Homo sapiens
aacccatccattctgtctagcttattggcactcctttctattttgtagactggatgctgccgggctcatgaattgctaataaaagccaattagatctttgaaattaaatgtttaaattttct

SEQ ID NO: 120226 - DNA, 122 bp, Homo sapiens
tggggacgcgtcaggcccagcgcacagcctgggcagctcagcctgtcagctgagcacgggcgcctcaaggggtgcggccctctcagaaggaaggtgagtctccctggagcccctgacgacag

SEQ ID NO: 120227 - DNA, 122 bp, Homo sapiens
cgccccccgggcgctccgcgtctctttgcggtcgtcccgccccttctccctccggccacccggggaattccaagctccctcagcagccagacccaggccttgcccggtacccgagcgcgacc

SEQ ID NO: 120228 - DNA, 122 bp, Homo sapiens
cgggccccgcggcaggagctctgctgggcggctcctctgtgctctctgcaatgcggggggcgccccagggtcccagcagcctcagactgcactgctccagcggggctgcctttgccccgggg

SEQ ID NO: 120229 - DNA, 122 bp, Homo sapiens
gaagctgggaaggagcgagcgggggcgcgaggcgtttacctggaggcagcggcttgggcgcgcagagcggccgcggctcccccgcacctgcggccatggatgaggagcgcgccctctacatc

SEQ ID NO: 120230 - DNA, 122 bp, Homo sapiens
acggcttttggggctcataaggtgcgtgaagatggaaagggggcccggcagtgcccatttcggctcccttgggaccccggcttccctgaagacccctgagcaatggttggctgggtgcctgg

SEQ ID NO: 120231 - DNA, 122 bp, Homo sapiens
agtagcttataggtagtgcatggtgcagaggtggtgttctgtaaatattcattccctttccgcatccctcaaagatgtgctgttctagacactcacacatctatgtattctgtttcaataag

SEQ ID NO: 120232 - DNA, 122 bp, Homo sapiens
gatggtggctatggccattgtgtgctcagcatctgaaggtcaaagggtgggctgactcaccgggccacacagcccatgaagcagcagctgagggactgctggactccggagcagcagcacca

SEQ ID NO: 120233 - DNA, 122 bp, Homo sapiens
cagttgtagccgtatttagcaatatgcaaaggagcagctgtagccatatttagcaatatgcgaaggagcggctgtagccgcatttagcaatatgtgaaggagcggctgtagccgcatttagc

SEQ ID NO: 120234 - DNA, 122 bp, Homo sapiens
ttgccacgtggccaggacgttctaggcggttcagactttagctgcccaggagcgcccccccgcccccgtccattcctgggccccacccgagtgtggccgggtgactccaccactcctcagaa

SEQ ID NO: 120235 - DNA, 122 bp, Homo sapiens
taaggggagatgatttccggccagcacaggcaaagccaggcagggagtcccctgaggcggcgcagcaggaggaccaccaagtgtggcccatacgcccggcatccggccctctccctgccttg

SEQ ID NO: 120236 - DNA, 122 bp, Homo sapiens
agcgccggcccgaggtaacggcgggaaggctcaggggcgtgcttgcggcaaccctgtaaccgccggtgcgcaagttggaggggcaaggggctgccgtgtcctggtctggaggcggcccaggc

SEQ ID NO: 120237 - DNA, 122 bp, Homo sapiens
catgaaaattttatctgggcacatacagacagtagccctgaacaaaatttactcatgccccgaaaagaatttctgggctttgtattgtttcacacaagttaaaacaatgggcacaaaagctg

SEQ ID NO: 120238 - DNA, 122 bp, Homo sapiens
aaattttttttaaaaaggactggtcacgtggccgatgggtagggtgcgcggttctcaacgcggcggacactcgcttgctggagggtggtttcagtcctctgctcttccgcctggatagctgc

SEQ ID NO: 120239 - DNA, 122 bp, Homo sapiens
tactcctctgcagatgctgcaatctttacactggaactaacacttagctgtggtgttccccgctttctttactcggagtagcccaggctcttcctctccaatccacaatttccctccaatcc

SEQ ID NO: 120240 - DNA, 122 bp, Homo sapiens
agcacttgtgtctcaacacgcgcagggcgcggctgcagatggaaaaaccgggaagctccgcgctgcaatgagccaggctcgcagtgaaaccatcgccaaggcaccaacgtctccctcccaac

SEQ ID NO: 120241 - DNA, 122 bp, Homo sapiens
agtgacccccctctggacctcaaatcacagaggggactagatgttcactgaggtccctgacggtcatagaaattctttcatattgcctgtatcctagttattttagcaaatgcctgtgcaga

SEQ ID NO: 120242 - DNA, 122 bp, Homo sapiens
gactccattcggtccacagggctggatggcctggggccgaggccaccccgaagcccccggcgaccccaccgtctgcgtcctattacccgaacactgcacgccgctgccctagggcgccctgg

SEQ ID NO: 120243 - DNA, 122 bp, Homo sapiens
cggctgccagcaactcctggcatatatcctatcttcttagaaaccccaataccaagagaacgcctctttcctagtttccctagcaaaagccctgagactcagtcccaccagaacaactcagg

SEQ ID NO: 120244 - DNA, 122 bp, Homo sapiens
caccgcgccccttaatccgttagcgtttcgaggaggcccagcgggagcccagtgggagtccgagatacaagtgttgatgttttgcagggatctgaacacagaagcggactccgaggaatcga

SEQ ID NO: 120245 - DNA, 122 bp, Homo sapiens
ttagtctgtcaccaatgaaacctggaacctttatgtggcccaggagagaaacagttcagccgagcccgcccccacaggagcctcacagtcctcaccacagtctccttcagctgttcctccaa

SEQ ID NO: 120246 - DNA, 122 bp, Homo sapiens
ggctttgtttcccacgatgtccgcatcgtcctctgtgtcagccatggttgccatggataccgtggctcccagccagaggagggtctcagggctcagaggctttgttgatgttaggccatcag

SEQ ID NO: 120247 - DNA, 122 bp, Homo sapiens
ggctgtccagggctcccgatggcttttctcccagccagcaggatcagaggagccaaggtccgacttgggcctggctggttgcccacagccctgctcagagggccggctccctgacccccatg

SEQ ID NO: 120248 - DNA, 122 bp, Homo sapiens
cctaaccctccagcggggcgaggagggagcgcatcggagaggtacctgtgcgatgggcagcggtgcttggcacctgagcgtaggtacgatactcagcaaggcacctgggtgggacataggag

SEQ ID NO: 120249 - DNA, 122 bp, Homo sapiens
ccggaaaaggccccaccgacggcccggaaggtgtcctggggcccgaacccggtgaggcggcgcttctgtgcctgcaccgggcacacagagctcgcaggccccctgccttgggagctctcgat

SEQ ID NO: 120250 - DNA, 122 bp, Homo sapiens
ttactgcctcctccaacacaaatgaagtccaggaaacggaaaacgtggcccaattaaaaacgtgtctccgtctctgcgtggactgccgggaggagatgtttctcattgaagatgccctctcc

SEQ ID NO: 120251 - DNA, 122 bp, Homo sapiens
agggggtgaagggtggcagagaggtgacaagccactgggaatcctattcagtggggatgccgacagggagtggctgtaatcaactgagcaacatctgtgtgaatgttattcacaggtcagga

SEQ ID NO: 120252 - DNA, 122 bp, Homo sapiens
aagctacgccccccacctccctggcctccgggtcgcgtcagaaacagccgcggggcaccacgggatatagagtccccaggcctgggaattcacttaaatgacacgtcgccgccctacaactc

SEQ ID NO: 120253 - DNA, 122 bp, Homo sapiens
aatggtgccctctgctggaaagaatcaagaggaactagagtgacaaaccctctcctttctcgtgttggtttcattacctggaatatggaaaagaaacatttatatttgttttaggagttaac

SEQ ID NO: 120254 - DNA, 122 bp, Homo sapiens
cagtccgcggttttctccgttactgtgcccctgttagtgactgccacttcacaagtgtcacgcccggcttgtgtcccaagtcagcggtcagaggccagcgcatcatgctgcataactacata

SEQ ID NO: 120255 - DNA, 122 bp, Homo sapiens
cccggactcgggctctctgggaccagcatacagcagaaggcaaggggaactgagccagggcgtctgttcacgccgaaatatctacctacatagaggagatggttagagagagagagagagag

SEQ ID NO: 120256 - DNA, 122 bp, Homo sapiens
tattttaaaaaaaccttttaatcaatatataacagacatatagaaaaggacacaaataagcgtagagcttagtgaatgttcacaaagcaacaacacctgagatgaaccagcatccacatcaa

SEQ ID NO: 120257 - DNA, 122 bp, Homo sapiens
atagataatcccccaaatccagaagccacctggacaacagttggctgaactgagctccatcgtgggatacatgctgatggtactgctgagttcaccaagggtctccccgggaccagaaaaca

SEQ ID NO: 120258 - DNA, 122 bp, Homo sapiens
cactgcaacctccctgcctgattctcctgcctcagcctgacgagtgcctgcgattgcaggcgcgtgccgccacccctgactggttttcgtatttttttgtggagacggggtttcgctgtgtc

SEQ ID NO: 120259 - DNA, 122 bp, Homo sapiens
aactaaaatcagcgtgcccctccttccccatggacacgtgcctcaggatgctgggagcctcgcctctggaggactgagctatttcaggaaactgaaaagccagtggaacaggcatttccaaa

SEQ ID NO: 120260 - DNA, 122 bp, Homo sapiens
tctgggggaatttcaagaagttccttttttgtttgtctctctctgtgtgtgtatcaataacgaggagggaacatagacatcaaaatcccaggtaatgaactaagaggaaatgacttttgggt

SEQ ID NO: 120261 - DNA, 122 bp, Homo sapiens
gatgcgcgagtacaaagtggtggtgctgggctcgggcggggtaggcaaatccgccctgaccgtgcagttcgtgaccggcaccttcatcgagaaatacgaccccaccatcgaggacttctacc

SEQ ID NO: 120262 - DNA, 122 bp, Homo sapiens
ggactctgggtgccctgtgtgggctcacatctgtctgcccagcaacgagccgcatcatcacgagcatacctggagggtcttctggggactcaccagtaagcccgtgagccacagaacaaaac

SEQ ID NO: 120263 - DNA, 122 bp, Homo sapiens
acgtggacatgctgggcgtgagggtccggggccgtttgagctgcctcgcctctgcttctgcgggttctcacctgggcctggagagggtcagggcagccctgcttacctgtggaggggcgtcc

SEQ ID NO: 120264 - DNA, 122 bp, Homo sapiens
gactcgttggcctgcggaagtgaggctgggggcccgggcaccactttctcctttttaggtcgtgactggggtgggggtgggggtgctgttggctgtgcgccgcctcccggctgggccgcctg

SEQ ID NO: 120265 - DNA, 122 bp, Homo sapiens
aagcaaataccgcacgttctcatgttcacgtgggagctaaccactgagcacacatggacacgaagatgagaaccacagacactggagacaccagggggatagggagcagggcaagggctgaa

SEQ ID NO: 120266 - DNA, 122 bp, Homo sapiens
cctcctctggccgcagccgaagctcccccttccgctgcacatcctcgctcaccacgcccacggtgcagctgcccccatgggccaggtctatactcaccacccacgtgtgtctcccccctgtg

SEQ ID NO: 120267 - DNA, 122 bp, Homo sapiens
actggtcttacttcagccagcagggcctccagccgccgccggagggcagcattctctcggcggagctgctggttgtcagccagtactgcttgcagccgagcctccagtccctgcagatactc

SEQ ID NO: 120268 - DNA, 122 bp, Homo sapiens
cccgacagcggcgaccgggaaagcaagaccgtctttttcgtccagcccaaattgcgaaaacggccacagtcccacaagtcccagagtcccagagtccctgttatcactcaggcccgccctct

SEQ ID NO: 120269 - DNA, 122 bp, Homo sapiens
tgcctctgtggaaatggtggtcgggaagcagccccgcccctcatggaggcgtggcgttcgcgccccactgccggctgcgtcttctccctcgctgaaagtctgaagggagccggcttacgttt

SEQ ID NO: 120270 - DNA, 122 bp, Homo sapiens
gtgcctgtaatcccagctactcgagaggctgagacaggagaatcacttgaacccagtagacggaggttgcagtgagccgacatacatgcagtcacctgtattcccagctacttgggaggctg

SEQ ID NO: 120271 - DNA, 122 bp, Homo sapiens
agataacaacgtgcagtgctccagtgatcaactgaaagatttaggaggagaggaacattacgggggatgagtaaaaaaccatcattcatggaatagtcactatgtacctgggcccattatat

SEQ ID NO: 120272 - DNA, 122 bp, Homo sapiens
ctcatagctggtttttcctttcaaatgatgaccacagcccactctggatgccaaatctgtcggttctcagggatctaggagggcaagagtggatctggtcaacctggggaagactcatgggg

SEQ ID NO: 120273 - DNA, 122 bp, Homo sapiens
tttccagtttttggccattatgcaaaagctgctaggaagagtcctctgtcgggttttgtccgaacctcggttttatttcactggaatcgacacccaggaatgcgactgctggtcatatggga

SEQ ID NO: 120274 - DNA, 122 bp, Homo sapiens
ggcccggcgctgtacggcctgctgacctatgtgaccggcgcaccgggcccgcccagcccacgtgcactgcgcattctgtcacgcctcacctgcaaccctgcctgcctcgaggccttcgtgcg

SEQ ID NO: 120275 - DNA, 122 bp, Homo sapiens
cctacccaggtccacacctgatagggctggagttgaggcttggttttaaggcaagagtttcgtttgttatttctccaaagagtcagctgtttgcaggtgtgtggttaacactatccttcgag

SEQ ID NO: 120276 - DNA, 122 bp, Homo sapiens
tgagcaatgcagaatcttctgataatagaggtttttaagagccagacactcgagctcgtgcgcgttggttcaggagaggagacagagtgaagttatcttggggcattagctgtcttgctttc

SEQ ID NO: 120277 - DNA, 122 bp, Homo sapiens
gggtcctcggagcaccaccatggtggacgacagcggcggctggtggagggcggggtcctccgggcccggcggtagtgtggtcgctgattctgtgaagggaccagaagtgggcggtggagacc

SEQ ID NO: 120278 - DNA, 122 bp, Homo sapiens
tgagtgtgagcatgtgtaaggatgcacgtgtgtgagcgtgcatgtgtgcgcggatgtgtgcgtgtgcctgtatgcacacatgtgagtacagagagaccaagagacagtgaggccagtgtgca

SEQ ID NO: 120279 - DNA, 122 bp, Homo sapiens
gaccccatacttggctgttgcattgcgatgcctccatcgacacgtgatgacgcgcagcggcgacacagtctcacagcggaaatgtcacagtgcccccaggggagctgatggagacaacagag

SEQ ID NO: 120280 - DNA, 122 bp, Homo sapiens
ttgattgaacaaaaagtttgattcagaactccttttaaacaggtgaaagcttcagtaatacgaggacagcattttcttagggcagccctttgctgggctggaaaacagctgtccccttcaga

SEQ ID NO: 120281 - DNA, 122 bp, Homo sapiens
gccaaaggtcacatggctcaggaccaagtgcagaaccaggacagcaagcctctgtcctggcggttctcacccagtctggacccaaaggcaggaaagtgttaagaaacacttgctggcaatga

SEQ ID NO: 120282 - DNA, 122 bp, Homo sapiens
agctggtagtggggaatgggaacaatgcaataaagtgtgtgtttgtaagagagagactgtcgagctgaagagagaaaccgactaagttgatggaggctgagtgaataaatattcacaaacgc

SEQ ID NO: 120283 - DNA, 122 bp, Homo sapiens
tccgcccggcgcggagaccgaaggctggcggctggtcgcgttgcaggtgaggttgtgacgcgcggtgtggagccgcggcccgggtgcgtccctgtctggttcctgggcggggttcctggaga

SEQ ID NO: 120284 - DNA, 122 bp, Homo sapiens
agcagtaccgcactttcagatcctcagaagagccgatctcttttatccaccagggtcttgcgtgagctggcagatctggtggcctggccggcttctgtaaccctgggagtccaagtcgagtg

SEQ ID NO: 120285 - DNA, 122 bp, Homo sapiens
gtccgggcgtggcccgggagccgtcgtagtggacagctcaggcagatacctcagtgtcctcggagttttgggcagggcgttggggtggggagtggctaggaagaacttctcctagccggagc

SEQ ID NO: 120286 - DNA, 122 bp, Homo sapiens
cagaaacctggtctccttgggaagcaggagtttatttttatccttttgtaagtattaactcggtaatcacaacaaacacggagcaatctcaatgctgtttatccggaggacagtctgcgggg

SEQ ID NO: 120287 - DNA, 122 bp, Homo sapiens
ttaagaaaccaaatgctgcatttaaccttggcctcccacgtaccatcttgcatggcaggacgcaggataatcttttccttttcttgttctattgcacattttaataaataacagagggagag

SEQ ID NO: 120288 - DNA, 122 bp, Homo sapiens
acagccaggaagttttcaacagaggtgcccaggggctgaggaagagtgtctccctgacaacgcacaagctgcccaacgtggctacctcatggtgttacgaccgcatggaggccgtgcagtgg

SEQ ID NO: 120289 - DNA, 122 bp, Homo sapiens
acggggccaggcactcacctggggcctcaaggttctcgcagagctcagacttggcctctccgttgggccggaagttgcccttctgcgtgaacttgttggacatggtggccgccgtaacgacg

SEQ ID NO: 120290 - DNA, 122 bp, Homo sapiens
ccatatgcctccctatgcagtgaagggccctagcagtgttaacaaattgctgagatcccacggagtctttcaaaaatctctgtagagttagtcttctccttttctcttcctgagaagttctc

SEQ ID NO: 120291 - DNA, 122 bp, Homo sapiens
ccccagccaggtgccgccgcggagtagaggccactctgctctacagggccaaggtcggagcgccaggctcctcctggccgtcccgcaggctccaaagcctctctgagatgagctgccttgaa

SEQ ID NO: 120292 - DNA, 122 bp, Homo sapiens
tgcggtgagctatgattgcaccactgcactatagaaatctgtgtaactttgggccaggctcggtggctcacgcctgtaatcccagcactttgggaggctgagatgggtggatcacaaggtca

SEQ ID NO: 120293 - DNA, 122 bp, Homo sapiens
atgctttgtccagattcttcccgattttatgggccagtttggcaagttttccctctgaggcggttgctgaggagtactgagagggaaatgccaagttaaggctggttcccttcccccctctc

SEQ ID NO: 120294 - DNA, 122 bp, Homo sapiens
ccaggaatttcacaatggatcaatatgcacccatatcactaaagagtggctactaaagagcgtatcttgtagtaggagataggcgcaaatgagaaaatgggtaggcatgaagaagaaggaaa

SEQ ID NO: 120295 - DNA, 122 bp, Homo sapiens
ggtcagggaggaagctcctcggtatccccccaacccggggttccttggcgtgtgtcctaacgagtacttggaagctcacagcaggcatgtggggaggcctttgttctgggtgagcgttcagc

SEQ ID NO: 120296 - DNA, 122 bp, Homo sapiens
aaggggtgacggacggcacctggaaaatcgggtcactcccacccgaatactgcgcttttccgatgggcttaaaaacggcgcaccacgagagtatatcccgcacctggctcggagggtcctac

SEQ ID NO: 120297 - DNA, 122 bp, Homo sapiens
gtcaggcaccagggtcccagaaggttccggctcctcttctgcgccttacccagctcttttcgtctggcaaagggtcacccagcgagcccccagcagcagatccttcccttttgctcctcctg

SEQ ID NO: 120298 - DNA, 122 bp, Homo sapiens
acctgtgtccatcctccagctgctggcacagcgtgggctccagctccagcaggcagaagtcgccggctgcagcgccgctggccccagggccgaagcccaggcagtgcaccgccggcagcagc

SEQ ID NO: 120299 - DNA, 122 bp, Homo sapiens
aaggccaccaggcacacgaccatgtagtagacacccatgtctccagaagtgaagatgacgcgcaaggtcaccgtgttgttcacggtgccgtagatgttagaagccacacacgtgtatttacc

SEQ ID NO: 120300 - DNA, 122 bp, Homo sapiens
tgtggaactgagaccatattcttagctgttaaaatcctgcttttgggggccagatggatacgagtgtctaatcttggtcctgccagtctctctgagcctcagtttccttcctgtaaaatgag

SEQ ID NO: 120301 - DNA, 122 bp, Homo sapiens
ctggtagtcaagaatgaaagagaagctcctttcacttacggctcctgagtgggctgtctccgcagagagggcagggccaagctctgtctcctcacgataatcatccccatagccataggtgt

SEQ ID NO: 120302 - DNA, 122 bp, Homo sapiens
agagggaaactccaggctcagcgcgcaacaaccaaaggccgggcaggaggcgcggagggccgggctggggccagataatgacgcccgctgctctccgcggtcccccaccctcaccccggccc

SEQ ID NO: 120303 - DNA, 122 bp, Homo sapiens
ccgcggccaagttctgagcgtgtgactgtgtgtgctgggccccaggcccctttgtcgccgcggcgtctgtcgtggcaaacaaaagtgaaccggattagccacagtggattaaaagatttacg

SEQ ID NO: 120304 - DNA, 122 bp, Homo sapiens
cggcggtaaggaccagtctgccagtccctaataagaaattgctaattttaaaaaccattccgaacgcgggcgcttccgggcccctcttcaactggcttcggaagaaggggggagaacacggt

SEQ ID NO: 120305 - DNA, 122 bp, Homo sapiens
cctgcgcttggctgcggagccgaagtcacctggcggcgggcctgcccccggcacccggcccgcacccgcaccccacggcccggtgccagggcccagccccgagcccatctccatgcctcagg

SEQ ID NO: 120306 - DNA, 122 bp, Homo sapiens
ttctaatagggccactctgggaagcaacactcgtccggttccagaagaacaaaatcacagcgtgacgttgaaacctggcaggaacgtggggggaacttaaccatctgcttaggaaagtgtgg

SEQ ID NO: 120307 - DNA, 122 bp, Homo sapiens
aacagcacccaggctggcttggtaagtgaccacagacctcccaagggatggaggcacccacgggtctccaagctgccctcacgggcctttcaacatcagtcgcattggatacagcagtggcc

SEQ ID NO: 120308 - DNA, 122 bp, Homo sapiens
ctggctggaggccgcgcagcagggaagtggcagtcaggaggcagcccaggccctcccatccgacttcagaggccagacgcacgccttctagacgctgactcacaagccaagtcactccttcc

SEQ ID NO: 120309 - DNA, 122 bp, Homo sapiens
catgtgggaacctgagggagtctgtcttagcccacctcctgggacatttccttgccaagccgagtcttgtgagcatgagaagaggcataacccctgtggcctcacacaaattctggtgtgcg

SEQ ID NO: 120310 - DNA, 122 bp, Homo sapiens
agggtcttggtgtctccctgggtagaggatgaggaggttcagcggtttccctggcttcctcggggcttctcggccactggagaactccaccagatcatcactgatgcggtgtcaggagcacg

SEQ ID NO: 120311 - DNA, 122 bp, Homo sapiens
tgaaggagcgacagatctgaaaatagccggagctgaggggcctcagggtctaccctgactcgcttttcccggacggtctcctaggagagaggctgtggccagctgacgcgacttccttctgc

SEQ ID NO: 120312 - DNA, 122 bp, Homo sapiens
gaaatagagatgcagcccaagaggagtgagccccaagccaagcgggagagacgctcaactcgtgttttagagaagttggccctggagctggagttcacaagaggcatagtaggttctgtagg

SEQ ID NO: 120313 - DNA, 122 bp, Homo sapiens
gtgcaggtctgttttgcttcagaagcctcacattctgctttgcccttgagtgacttcatgcgggatgaggaactgttgacccctctagagaggacaccccaagtccatcctgggctcctcct

SEQ ID NO: 120314 - DNA, 122 bp, Homo sapiens
tgtgggaagcagagtgtagtttgcgggcttcaatccacttccttctgccgattgttttcccgtagcagacggtgccaggtattgagagcgaccctcacattcctacagtgctctgtgtggca

SEQ ID NO: 120315 - DNA, 122 bp, Homo sapiens
ctgggagaagaaaagaccttttgtgggaggccctggcgttatggggctcccccaggccagcgtaaaactcatccctgcacacccacccccatctccacctctccttcctggctcagcagacc

SEQ ID NO: 120316 - DNA, 122 bp, Homo sapiens
ttttatcatctgagtcacactgtagcttgggctgctgagaagagcctctccagtggtccccgtttcttgtgtccattgtgtctgggcgcctgcccctgttgtttttgggagagttgtgctgt

SEQ ID NO: 120317 - DNA, 122 bp, Homo sapiens
ccgcgataccgcaaattcccagccgctggccgtttgggactctcctaccggaagtgaaaccgaagaaaacgccacgtcgaaggcgtgggttgccgtaagtgcgccgtcgtcacgcgcctagc

SEQ ID NO: 120318 - DNA, 122 bp, Homo sapiens
ggaagccgggcaaggaagtggacaccccgggagcctccagcaggaaggaagccccgcggacgccctaacttcagctcagcagacctggtcagatttccggcctgcagctctgttaaggggag

SEQ ID NO: 120319 - DNA, 122 bp, Homo sapiens
taggtggttctgagtccttccggaagctgccgaatcttagaagtcgcgccactgttgtggcgatggaagaaggcgaagctctacagaaaccattttggttgagggaagagtggttttaaagt

SEQ ID NO: 120320 - DNA, 122 bp, Homo sapiens
aaacccacttggaagacagccactcccaccaagcttcttgactttagtgtttaaaatctgcgtctcatgcgtgagattacactcctccaaacagacattgcgcctgtgtcacttcacccaaa

SEQ ID NO: 120321 - DNA, 122 bp, Homo sapiens
ggctcacggtccaggggttgtggtggtgggccgcagcggcagagagggctgctttgcccccgtccagccagggcaaacccgggctgtgcaacaagtgtgggcggcacatctggcctccggtc

SEQ ID NO: 120322 - DNA, 122 bp, Homo sapiens
tggtataacatttcttattttcttgttatttctctgtttgctccaatgcattataggctccgtgaggacggggaataagatcttaacatttcaccttcatctctcataatgaatggtcctca

SEQ ID NO: 120323 - DNA, 122 bp, Homo sapiens
gcccctttgtgacgtcacaatcagctgtttgaacgttccaatttgtgccgtgagccccgccgcagcggccgcacagactcaaagccccgcgggcgagctcagcagcccggagcgaccgcggc

SEQ ID NO: 120324 - DNA, 122 bp, Homo sapiens
cctctaattaaaggaaagatttaagggagagaaaggaatagcctatgcctcttacttgtgcgggtcagtgttcgctgaattagaagttattccaacatgaacacaatcctcaggatgaatga

SEQ ID NO: 120325 - DNA, 122 bp, Homo sapiens
gaagcggaggcggccaccgcgtgcaggaagggtctcccaggtggccggagaacccacaggcgtgtacggacaaggtgccctgggtgccctggctgacccctggtcagcccggccaggggtag

SEQ ID NO: 120326 - DNA, 122 bp, Homo sapiens
tgaggcggagatcgagctgaaggaaggcgacatcgtctttgtgcacaagaagcgtgaggacggctggtacaaggggaccctgcagcggaacggccgcacaggcctcttcccgggcagcttcg

SEQ ID NO: 120327 - DNA, 122 bp, Homo sapiens
ggcatgccgggaacggtagttctcggcgcctgaaagcgcggcgcagtgatgatgggggcccggggttggtctgacagcagcagctccgtggggcgccggttcccgcggccccgcccggtgcc

SEQ ID NO: 120328 - DNA, 122 bp, Homo sapiens
gttgtggattctttccatcaactgctgatttcatcttcaggaagcaagtccataacatgacgtatctggagtttgtgcttagaaccttaaattggaagcattcttaattatccatctaaatt

SEQ ID NO: 120329 - DNA, 122 bp, Homo sapiens
ctccgcgagcgcgcagtgcccagccccgaggggacgctgggactgccctccgcccaggaacggacaatctgcgttcacaactgagtctggggcctcccagactcccacggggaaacggcgag

SEQ ID NO: 120330 - DNA, 122 bp, Homo sapiens
catcccatccacagaaagagtcgcttgcagaaatgattttaaaactcccgggtgccaggacgtgaggagaatccggcagggagggacgggagaatttccaaaggtgccgctcagtgggaaaa

SEQ ID NO: 120331 - DNA, 122 bp, Homo sapiens
atctgctgcctggaaggtagggtgcgggcggccctccccgcagcccccgccgctcccctccgagagaccctgagcctcccggggctgcctgtccctgatcctggggcccccttgggcacccc

SEQ ID NO: 120332 - DNA, 122 bp, Homo sapiens
accccagggccagcttgtcctcctgggaggcgggacaggccccagtgaggttccgttgtgcgctgtgcctatctctcgattccagggcagatgagccacaacatcaccaccctgccacttac

SEQ ID NO: 120333 - DNA, 122 bp, Homo sapiens
gagcgtccgcagcctggagacgctggacgaagggagggttcagtcccgggagggaccaagcgggcggtgccagatttcaccacgctccccagaagggtgcacaagttaaaacttgggaattg

SEQ ID NO: 120334 - DNA, 122 bp, Homo sapiens
gtaattttagggcatagacaaaaacaatgccaaagattcccccaccaaaaatctcactcccggaaacaggctaagagagcaaaagactcttgttgccacagatattaaggaacccacaaatt

SEQ ID NO: 120335 - DNA, 122 bp, Homo sapiens
gccgcttccccctacggtgctgccccaggcaggaggcggacaaggctcatttggaccccccgaggccggtgcaggcgggcttgggccctccaaaggctcagcttttgggtttctaagtaaaa

SEQ ID NO: 120336 - DNA, 122 bp, Homo sapiens
aggcggtggaaactgtagagcccgcggctctgattggctacctcagagcaaggggcggggcggcggaggacccgaagggcgcgagagcggaacactgcgtacgcgcacttccggtctttgtg

SEQ ID NO: 120337 - DNA, 122 bp, Homo sapiens
accctgagcgaagccaagccgggcggcaggtgagccagggcagggggctgcagcggtgggcgagggggcggcggctccttcccggcgggcgcttccgcggcctgaaaacggtacccgccgcc

SEQ ID NO: 120338 - DNA, 122 bp, Homo sapiens
tgacgtgagaaaggggccgggctggggcgggataagccgcttctcccctccttccggaagcgtaacactgaacgtgcctgcgcaatgggtgtcgggtccgctttttcccaatccggacgtaa

SEQ ID NO: 120339 - DNA, 122 bp, Homo sapiens
aaacaatctttttctccaagagcagtttacttttcatttcttcttactaaataacatatgcgttctcataaggaggtgcaagaatatcatagccattcatcccgtaagatttcccgaaagaa

SEQ ID NO: 120340 - DNA, 122 bp, Homo sapiens
atctgagtagagccactgcaaactacagtgcaagttcaagttaaggcaactaagatgggacgtttttgggaaaccttgtaacatggggactggctaaagaagttagaactattgaacttgaa

SEQ ID NO: 120341 - DNA, 122 bp, Homo sapiens
tggagcccctttcctttgatatacactagccttccgacttccctttgttcttttttcacacgtcaggttttatcgctgacaagctccaacgcgtcaaaggcgttagatctgagggctgcagc

SEQ ID NO: 120342 - DNA, 122 bp, Homo sapiens
acctcagagaatgtcgctctaatggtggaatttcaggtactgccacgtagggaagagtctcgtgggaagggcattttccagcctctgtcacaaaatctccaagggaattcagacctcatcta

SEQ ID NO: 120343 - DNA, 122 bp, Homo sapiens
atgacttcaacgtgaactttccatcctccaaataacccagtaattgtacattttgatgagcggcatatccacaatgctcccatttccagctagtccccagtttttattatgttattggtatt

SEQ ID NO: 120344 - DNA, 122 bp, Homo sapiens
caactaaccgccacctgcatgcacaaatggaaacgacagggcagagggtcagcagtcacccgcgtctgggttcgcagctccgggtacgctgtagttccgcacccggttgcccacgcccggga

SEQ ID NO: 120345 - DNA, 122 bp, Homo sapiens
cacagacacgcacacacacagacttgctgagagggtcaaaggatgtctcttccggggcagcggggagtgtgccggaagccaccttcactgttcagtgcacagatcttttgcaacttcagtgc

SEQ ID NO: 120346 - DNA, 122 bp, Homo sapiens
acccactgcaccagccccagcaacatccctgggggcaacggcagcggcaagaagtgggttcggaagccggctctctcctgccccagcctcgggccgccttgccccagctctcgggccttgac

SEQ ID NO: 120347 - DNA, 122 bp, Homo sapiens
gcgtcatgccctgatgggaacttcccattcctccctggtgggcggagagaatcataggaccgccacatcctgtcatctccacttttctttctcttaaagaacagatgattgcagcgtggctg

SEQ ID NO: 120348 - DNA, 122 bp, Homo sapiens
gaccaagcttgaagggagaagacaccctgtgtgcaaagttccaacaggtgcattggctggcggccttctgggagtgtgagggctttaactgattcaagaacagatcagggctgggtgtggtg

SEQ ID NO: 120349 - DNA, 122 bp, Homo sapiens
cccaagtccggggttaggcgccggcggaagggggttgggaggcactgggttcccgaggcccgggccagcgtcctgaggagcattcaggatccctggcaaggccctcttgtccaagaggcccc

SEQ ID NO: 120350 - DNA, 122 bp, Homo sapiens
gcagcagcggtaggcccgggccccaccatgactcttcagtgacagtttttcttcaaacgccgcgcctgtagccaggaccggcgtgccgcgcgtccacgcgtcctcattggctcctgcgggtt

SEQ ID NO: 120351 - DNA, 122 bp, Homo sapiens
cgacctatctcagtgggttacctcacactgctacgcggactctaatgttggccacctgggcgtctggaaaccggccggaaggccacaggcagagaggcctgctcaacagttggatctctatc

SEQ ID NO: 120352 - DNA, 122 bp, Homo sapiens
tggccgtgtggggaatcgcgcctaggctggggctcccctggccccaggttagggggactccgatgtgtcctggggcgcttcctgcccatccagcctccgccaggcagcctggccctgaatgg

SEQ ID NO: 120353 - DNA, 122 bp, Homo sapiens
aagccgacgccccctgtgtgtgtttctgtcctgagcctgttacttttttgacccccgatccgtctcttcttcctcagcttgtcctccatcttcccctcctttacccttggttcccacatgca

SEQ ID NO: 120354 - DNA, 122 bp, Homo sapiens
tttgctcctctgatccagccctgccattcagagtcaggaaaatcaagacttgtccagttacgtaagtataccaatctttacttattttatcttttagatcttttctctctggttagatttta

SEQ ID NO: 120355 - DNA, 122 bp, Homo sapiens
cttttagttcacgtgtgtgcccacgtgcgcaatgtgttcatgtatgtgtatcaatacatacgcatggaaggtggcgtgcttttagttcacgtgtgtgcccacgtgcacattgtattcatgta

SEQ ID NO: 120356 - DNA, 122 bp, Homo sapiens
tgatgttggccatgatcaccccacaggttcaagtatagagtcctggaaagtggctattggcgttaattctgacaaatgtgtagaaaatatcctgactttttggttttctctttcaacagtca

SEQ ID NO: 120357 - DNA, 122 bp, Homo sapiens
tggggagggtttcctggacagaggtcctttggctgctgccttaagacgtgcagcctgggccgtggctgtcactgcgttcggacccagacccgctgcaggcagcagcagcccccgcccgcgca

SEQ ID NO: 120358 - DNA, 122 bp, Homo sapiens
tgagctcatctgttcttcagttttctttaattgacacttccactcctctcgatgtccctccgcagaccctgggatgacacagaagcgggcgctcgttgtcctttaagtggatgaacgaggcc

SEQ ID NO: 120359 - DNA, 122 bp, Homo sapiens
gagagcaacttcgagaaaggtgagctgcaacattaactcggctgatctgggacagtctggcgggggaggtgacatctgagccccacctgacttagaggatgtcagctatggatgatccgggt

SEQ ID NO: 120360 - DNA, 122 bp, Homo sapiens
gtcacacccagttttgatgactcaccagcatagagttgtacttgtgcctatgatttattgcggtgaaaggatatagagcaaaattgcaaacggaaaggcacctggggtgaattccaggggaa

SEQ ID NO: 120361 - DNA, 122 bp, Homo sapiens
ataaactttctgatggcagtttttcctggttgcagcctgggttccttgtaacagggtaagcgtagcgggtggttgtcaagaggggcggaggctggcggttacagggaatggagggatgggcc

SEQ ID NO: 120362 - DNA, 122 bp, Homo sapiens
tcatgggaacatcttatcaatatcctgccggccagcaagccatactacccagacccctcccgcctatacctataagtacccccagcctgtaagcagcagtgggcactggcattaggctggtt

SEQ ID NO: 120363 - DNA, 122 bp, Homo sapiens
tgtcgtccctgtgtattcttcaatccctctacgacaggggtccccacctccggccgtggacgggtagcagcagtccctggcctgttaggaaatgggccacaaagcaggaggtaagtggcagg

SEQ ID NO: 120364 - DNA, 122 bp, Homo sapiens
ggtgaagggtcagatacactcagtaggcccattggacttcaactatctcttctattgacccgaaacagtagtagaaattctaccagtaaagatgataatttgggttaaagctgtttcaagga

SEQ ID NO: 120365 - DNA, 122 bp, Homo sapiens
aattttataactctagggcccctgaaccaagacaacacattgcgcactacatcacaaacacgcaaaacatctgtgatttaccgggcattccataaatcatcctggacaatagtcttggctca

SEQ ID NO: 120366 - DNA, 122 bp, Homo sapiens
tgggacagcagccacaatgaggaactcctatagatttctggcatcctctctctcagttgtcgtttctctcctgctaattcctgaaggtaagactgattcttctcatttccattatgaccatg

SEQ ID NO: 120367 - DNA, 122 bp, Homo sapiens
tctcaggtgagctcaagtagattttttcagaaagacctctctttactatcagatataaaacggtgactcatcccatttccacaccctagcattccccatttcttccctgctttattttctct

SEQ ID NO: 120368 - DNA, 122 bp, Homo sapiens
gtggcaggtgcctgtaatcgcagctactccagaggctgagacaggagaatcgcttggacccgggggagcagagatggcagtgagccaagatcacaccactgcacactccagcctgggcaaca

SEQ ID NO: 120369 - DNA, 122 bp, Homo sapiens
agtcgccggccccgggaaggtgctccaggctcgcggctcctcgggggtcgcctctgcaggcggcctgtttccaatttccaggcgaggagcgacgccgtgatgcaaatctgccacttaccttc

SEQ ID NO: 120370 - DNA, 122 bp, Homo sapiens
ggacagcagccatgtttactaaaggctgagtttcatttagcatgtgccaagtcagagctgcgggctgagatttcctgctggaagtctgtggatgctggagaacagtagctgctgtctgcatt

SEQ ID NO: 120371 - DNA, 122 bp, Homo sapiens
tgccacctgcagagagggccacgagtcagacgcgccagggtgagcgtgcgtgggtgcacacgtatgcatgaattgtgcacgtgcacgcatgggagcatgtcagacacactccgaaggatccg

SEQ ID NO: 120372 - DNA, 122 bp, Homo sapiens
caagcagtcctagggatgtcctgcatggaactgtcctcgtcccctaccccaagccaccaccgccatcatcatgatgcacttgattgacagcatactttaagacagatgcatgccaggcactt

SEQ ID NO: 120373 - DNA, 122 bp, Homo sapiens
ccggagcggagagcgccgagccctttgttcttagtctatgagcaggagtgggaggcctcccggtgggcagagcagagccaggagcatccggggccccgcctcaggcttgcggagcccctgcc

SEQ ID NO: 120374 - DNA, 122 bp, Homo sapiens
ttgggcgaggggcaagctgacagttaccgagtttcctgatgagccctgccaggaccatctcgtcccgtcaatctgcagccgccggagaattaaactgccgcgccactgcgtccagccacaat

SEQ ID NO: 120375 - DNA, 122 bp, Homo sapiens
ccggacctgcctgggagccagtgaagggcgagtcagggcacgcgtcctggaggctgccagcgtccttgtagcagagcagtttcttgccgcttgggtcttcagcacgccaagccccccaccaa

SEQ ID NO: 120376 - DNA, 122 bp, Homo sapiens
gtcctcaccgtgcagactcggacactgaggcccagagctcgggtgggggctgcccgaggtcgttcatttcgaagttccgtctcccttagtcccctgtttccccgcacatacacctgggtcca

SEQ ID NO: 120377 - DNA, 122 bp, Homo sapiens
tagcacaactaaggatggggccagtgagggcttttcccctgaatcaaatagagcctccaccgtgacagactccagctcctgctccgggaaggggcaggcaagtgattctgggctctctgagc

SEQ ID NO: 120378 - DNA, 122 bp, Homo sapiens
aggagcagaatttgacattcccttccccaacaataacacggctaaaactcccgcgggaagcgtttcaggcggagagagagccggtcactccatccccacgggattaccctccctaccacaac

SEQ ID NO: 120379 - DNA, 122 bp, Homo sapiens
gcccctccgtccttgaggagcaaacctggggctgcggagaaccggggctgtctgtcttctcgctttgggggccgggcgccctgcccctcgcccagaaaagcctggaaatggtgtgggctatt

SEQ ID NO: 120380 - DNA, 122 bp, Homo sapiens
gccaatgtcctttaaccacactgagtctcattttaaagtgttgctttcctgaactaccttcgaacctgcggtgactgtcgtagtcctcagagcagggcacctcgatgaatctccctgccacg

SEQ ID NO: 120381 - DNA, 122 bp, Homo sapiens
ggcgcccaagccgccgccgccagatcggtgccgattcctgccctgccccgaccgccagcgcgaccatgtcccatcactgggggtacggcaaacacaacggtgagtgccggcgacggccagcg

SEQ ID NO: 120382 - DNA, 122 bp, Homo sapiens
tctgggggagggagcgcgtgcagggaggggcttgatctccacattttctcaggagtagttcgggcatccccatatcttctcctctccccttgtgaagaggacccagatctggcttctttccc

SEQ ID NO: 120383 - DNA, 122 bp, Homo sapiens
tgctcactttggtggaggcttatcatgatcgactaggacaattttctagcatgtctgcaccgaatctcttcccgatagaattgaaggtgaactcagggcagcatggagtgcccacctggcct

SEQ ID NO: 120384 - DNA, 122 bp, Homo sapiens
accttgtgatccacctgcctcggcctcccaaagtgctgggattacaggtgtgagccaccgcgcctggctggagtacttcttgaagttgttccagccatggtcattttttttttgtagcatca

SEQ ID NO: 120385 - DNA, 122 bp, Homo sapiens
gggtcctccgggtgatgaggagccgctggagggccctgagctgcacgtgctaatgattaacgccccgtccgtgctggccggtttctcaaatgcctcctgacgattgcgcacagccggacatc

SEQ ID NO: 120386 - DNA, 122 bp, Homo sapiens
ctcttctgcctctccccatggtcctgcctccgtgcatgtgcaccccagtatctctttttacgtgtataaatttcctcttcttataaggatgccagtcagactggattaatttccaccctaat

SEQ ID NO: 120387 - DNA, 122 bp, Homo sapiens
ctcgggtggaggcgctgctgtacgatgagctgtcgctgtcatttccatccacctcagacacgctgtctccagccagggaggtgttctccagacggtcgtcagtgtcgggggacaggctgatc

SEQ ID NO: 120388 - DNA, 122 bp, Homo sapiens
tactccagaatgagctccttcctgggttcttttccctctgaactctgccctgtagtgaggcgaggggctgcaaatgaggatggaatatgccaggctggcagcagacatgggcactggatgga

SEQ ID NO: 120389 - DNA, 122 bp, Homo sapiens
ggcgcctgggctggggttaggccggggggcggggcgaggctgcagtatcgggggcggggccgcgttctggaggcggggctccgggcgaggggcgtggcctgcgggcacccggtgggtgggga

SEQ ID NO: 120390 - DNA, 122 bp, Homo sapiens
cttggacgatggattatatagttatgagaggtgacagcgtgtgcccttgctcgctctcggcgcctcctcggccttggcgcccactctggccgcgcttgaggagcccttcagcccactgctgc

SEQ ID NO: 120391 - DNA, 122 bp, Homo sapiens
gtcgtgccataaggttcgcacctgagagagaacatagcactcttgagtgccatgggcacccggagccttaaccacagctctgtaacaccaagcaggaagcaaaaacatgactttgcaagttc

SEQ ID NO: 120392 - DNA, 122 bp, Homo sapiens
tggcggccgccgggggcaggcacttttgagctaaggaggaagcgggggagggaaggagggcgggaaggacgcgccacctacttcctgaatcccctgcaaaccccagaggagctcggcctgcg

SEQ ID NO: 120393 - DNA, 122 bp, Homo sapiens
gagcagtaagagggcatcccatgttccagttcaccttctatggggtgactaggaggttcccggtaactagggcagcccaggcccagcaggttgcaaaagcagctgcaagcttcagaaaccca

SEQ ID NO: 120394 - DNA, 122 bp, Homo sapiens
atcagttctgctgaataatcgaaaaattgtcgccggtgtgcaccaacgaactaggttccccgagttccattcaaaagacctcaaagcagttctagggctgttagtccaaagaataggaaggg

SEQ ID NO: 120395 - DNA, 122 bp, Homo sapiens
ccaagctgaggaagctcatccccactcaccctccagacaaaaagctgagcaaaaatgaaacgcttcgcctggcaatgaggtatatcaacttcttggtcaaggtcttgggggagcaaagcctg

SEQ ID NO: 120396 - DNA, 122 bp, Homo sapiens
cagccgtagccatgagtttctgccggggctagccctagagtacggagcaggcggacttttcggttccccgccccgccaggtggcggggcctactaggcctccgggcatccccggtctcaagt

SEQ ID NO: 120397 - DNA, 122 bp, Homo sapiens
cgggccgcatccattatcattagcgcctctctgcacgcaggtacaggaggggctgccaggcgctggctgcggctggctgagccggggaccacgctcctctgcaaatgcggacgaggaacacc

SEQ ID NO: 120398 - DNA, 122 bp, Homo sapiens
gtgagggctccagggctcccgccaagaagcccacggggctctaccaaacttgagggtttgcgttcggggacacggcgggcttggggctcgggcaccggcaggccgctcggagcccacccttg

SEQ ID NO: 120399 - DNA, 122 bp, Homo sapiens
catccctgaatttatatctctcttttccaagaaatccatactcattgttctttatccagccgggattcagacagcaagtcccacttgccaagagtgggtttatcaagcatcaaacgggcccg

SEQ ID NO: 120400 - DNA, 122 bp, Homo sapiens
ctttgcgctgtgtccctcctgctcctgcaatgggccacagcacagaaggaaagagtcctccggaatgggtgactgtatagaaagcaatcgaatctttaatcacttttcctactttacacttc

SEQ ID NO: 120401 - DNA, 122 bp, Homo sapiens
ccccacggctgagggcaggcaggactccaagagcacttctcccgggaaatacccacaccccggcttggcagattttgccgacaatctcatcaaagagagtgacatcctgagcgatgaagatg

SEQ ID NO: 120402 - DNA, 122 bp, Homo sapiens
ctggcctgacccccactccccctgcttgctctgcactcccccagctcccacccagcctggcgccctgcgaagacctttgctctcctgggcctggagccaggcaactgccctctctccacccc

SEQ ID NO: 120403 - DNA, 122 bp, Homo sapiens
ccccctactatcctcagtattcctgctggcattgtgacatgattgagcatggctcttgttcgatcccatctaacaccatgatgaattaattctgaccttttattcctgtatcatttgctcaa

SEQ ID NO: 120404 - DNA, 122 bp, Homo sapiens
accttacccagctaggtcgtcaaccccaggagacaggaagtggaaccgctaattccggtgcggtggcctctgggaaatacagtcctgagcagaaagaacctcagaagtcttggtctatggtc

SEQ ID NO: 120405 - DNA, 122 bp, Homo sapiens
ggaattgagaaatgcctgtccttccctacgtacctctgcccatcaagtcaggactgaaagcgaaggaaagtcttcaaagttcacactgaacctaaccaaaaactctcaaagacatagcctga

SEQ ID NO: 120406 - DNA, 122 bp, Homo sapiens
gaagaacacagaaaagtaaagagccctctaaacagcccaatcaagcatcatggaataccacgtgccaggtctcattcatgcctcgctggtacttcccgggtcctcctgccgcgtccgtccgc

SEQ ID NO: 120407 - DNA, 122 bp, Homo sapiens
aaaggatagttaatggagaatacagtgaagagaaaatggaaaatagcagggagtacagaccgcccttggtagtggaattggttacatgtgtttcatttgtttaggaaaaaatgtgtccaaat

SEQ ID NO: 120408 - DNA, 122 bp, Homo sapiens
gaggggacaaacttgagaaatgccaccaatgagaagggcaggcacagcaggtctcggggccgcccagccgtgtgggagccaaacgtggatgtgtcagtggccacgccaggaggtaaaccctc

SEQ ID NO: 120409 - DNA, 122 bp, Homo sapiens
gatcctctctgagctgggagaatattccaaccctccacagatgtgcagttggttcactagcgtgggtcttgtgggcccactcaaattgcattcccctggggaagggcagggtctccccttga

SEQ ID NO: 120410 - DNA, 122 bp, Homo sapiens
cccggtacgctgcagcggctgtctttctactttcaccttacttgctggtggcccagacttcgggacattctgaacctcactgtccttccctctacaacagcgcattcctcttggcccagctt

SEQ ID NO: 120411 - DNA, 122 bp, Homo sapiens
tcctccgctgcgcctggcttccagcttcgggccggaaccggaagtttggggggcggagcccggcggaggccaggagaccgaaaacgcggccgagcccggagcccggagctggagccagagcc

SEQ ID NO: 120412 - DNA, 122 bp, Homo sapiens
tgtccttcatgtgttgtgtgtggctcagaaagcctgtcacttggcccctgtgctctgagccgtgagggtggggaggtggctgttccattaaagtgggagtattggatggccctcttgaaact

SEQ ID NO: 120413 - DNA, 122 bp, Homo sapiens
ccttcttcccggacctcacctgtaacctaggagggctgagctgggcccccagaatgaaagcgtggcacccgagaagctgtcgaggccagccctcccgggtctgtgtggggtcgctggccgag

SEQ ID NO: 120414 - DNA, 122 bp, Homo sapiens
tgctcacttctctgctgcgtgcacactgacctgggagcaaacaggtttaggtctggtcaacgctgtgcttcacggaccactcacaatggggggaagcagagggtagcccaggggacagactc

SEQ ID NO: 120415 - DNA, 122 bp, Homo sapiens
cctcccctcctgcatccacagcctctccgcgtcggtgcctcgccctgggatgccccggcacgccccagctctgcccaagccttgctgtcttgggccagcacctcctctgccaaccctgtgct

SEQ ID NO: 120416 - DNA, 122 bp, Homo sapiens
aatggaacacgccccttgccagtgacactcggagggcgcaagagtcagtgtcgggctcatcgtgagcaggttctttctgcccccagttcagcaacccgtctgaacagatctggcgtcctgga

SEQ ID NO: 120417 - DNA, 122 bp, Homo sapiens
tttctctttctaaattcccagccaatgttttgctccttggaggcacacgtcttgccgtcccgagtcagcgaacgagcacacctgtgacccaccgcacgggcgacgaaaaccggagaccggga

SEQ ID NO: 120418 - DNA, 122 bp, Homo sapiens
ccaaaagcacacagtgtccaaatctccatcgtgcctgcaactcaggaacagctatctggccgcacagctctagggaaactcaaagcaggaacagctctgggtcctggagacgcccctgagaa

SEQ ID NO: 120419 - DNA, 122 bp, Homo sapiens
aagaaacaggcacaggggaaacaacttgggactcttgtcaaggctggagatgagcccgagcggcccagtcacaggggaggctccagaggagagagctgttcacctgttcggccctagagcat

SEQ ID NO: 120420 - DNA, 122 bp, Homo sapiens
gtgtatgactatgcaggtatatccatatttagcccaccagggctatttttcattttccaacgaattcatcatgacattactcataagccacctcagtgcatttgagatcaatttataaagtt

SEQ ID NO: 120421 - DNA, 122 bp, Homo sapiens
gagctgcttcagcttcctagtcacaggatcccacgcgagaatagagccataggttagcgtcgcaggacgttgttcgcccccggatacctcacatgcagcctaccctagagccagtcatttcc

SEQ ID NO: 120422 - DNA, 122 bp, Homo sapiens
gtgaatatttcagtaacattggctgtaaatcatacccaggccttttctttctgtgactcacgtgatgtaaggaagagatcagatgacgaggtcaagaggacacaaaacctcagccctgcttc

SEQ ID NO: 120423 - DNA, 122 bp, Homo sapiens
taagtgtggccaggatttctctgccctcaggattcatacaggccaataaaaaatgacagtcggagtgactgaagcataattgtcagttctcgaggtttactaagcctgcttcagggcgcatc

SEQ ID NO: 120424 - DNA, 122 bp, Homo sapiens
cctttctttagatgtctgtacatgtgtttacactctgtttccctctgtagggactttactcgcagaaagagaaaatatatttgagtccctgagatatatatacaaagatatctaccccaaag

SEQ ID NO: 120425 - DNA, 122 bp, Homo sapiens
tttttccctcctggtctggactactttagcgcaaggagcccagccagacacggcggctggcgctgctggacttctttattgatgaagttgatctcgtccgtagctcccggggttaggaatcg

SEQ ID NO: 120426 - DNA, 122 bp, Homo sapiens
cgacaagtgattcaaacaagaaataaaaataaaagaaagaaaaaacaacctggttctaggcggctctatctctcgtagtgttgattataccgcggaaggcgggaagagctgggaagtggcaa

SEQ ID NO: 120427 - DNA, 122 bp, Homo sapiens
ccagtcccactctgcttaactgctctggcatgcttgaaggcctagcttagcgtagcaggccgttgcagccgttctcgctctgtggcattgctctttgccttcttggtccagctgcctccagc

SEQ ID NO: 120428 - DNA, 122 bp, Homo sapiens
catgatccgcccgcctcggcctcccaaagtgctgggattacaggcgtgagccaccgtacccggcctgcttagccattcttaaatcatgggactgagtctacatagcacaacaagagctgatc

SEQ ID NO: 120429 - DNA, 122 bp, Homo sapiens
agggagggcagtgcgtatttgaagcctgtgcacgtgacacacaaagggcttagcaacctccgtgttttcccagcacaggatacccattcttcctgaatgtttcattgttaaattagattgtg

SEQ ID NO: 120430 - DNA, 122 bp, Homo sapiens
agcgaggctgaggagcatcacagagtaagacagctgctcagcatgaaccccacgactcatcgcagctaactccgttagctttcctgacgtttcctaacgtcctctgtgggggacagtcacga

SEQ ID NO: 120431 - DNA, 122 bp, Homo sapiens
tgagccaagacctcgaggcgctgctgagccggatgcaggcggaggaccccggggaccggccggaccttgaggtaagcgaggctgccctgggccaccccaggctgtgaccctgaccccacagg

SEQ ID NO: 120432 - DNA, 122 bp, Homo sapiens
agtgggctctgtcttactgggggccaaagtgagcgaaaccatccggaagggcttgattgacgtggagatgtacaactcgactcaagggctgctgatggccggctcagtcagtgctatgtttg

SEQ ID NO: 120433 - DNA, 122 bp, Homo sapiens
tctgcatcttccgggagagcaggggactcgtaccggggcttttctcctgggtccccatctcggcttggcgacgcctccggacccaggggctgccagagggagtgacgctgctgtcagaggaa

SEQ ID NO: 120434 - DNA, 122 bp, Homo sapiens
acctgccggccggagagtgcaccaccgagaaggcgcgtgaccccggaggccggggcggggcgcgcattttcaaaaccaggctttggcccagagtgctgagaaaggtgggcggcgagaggcta

SEQ ID NO: 120435 - DNA, 122 bp, Homo sapiens
ccgcggctttgccttcatccagctctccaccatcgtggtgagggcggcacagttgggggccgggcagccagggtcccggcccccggggtggagacgagggtccttttccccagcctcccacc

SEQ ID NO: 120436 - DNA, 122 bp, Homo sapiens
gtgtacatgtgtggtggtgcctgagaggcgatacagggaatggctacactcttttactcccgcccctggccttcgtagtacccttgaagtgatccactagtcgtaacccctccttccaccaa

SEQ ID NO: 120437 - DNA, 122 bp, Homo sapiens
gttaagcccagggacatgctcaatgaacctttgcagcaagaggcagtgaggcgctggacgcgggcgccggtgacagcgcgggcggccggggaggggcgaggggccgccccgggaggacacag

SEQ ID NO: 120438 - DNA, 122 bp, Homo sapiens
tcttcaaagctttggagaagttccaaaataccttcccgtaaaggtctgacgaaatcttctcgcaggagccggaagtgggtatccagatagatagcagtgctgtcgtattttccagaaatgat

SEQ ID NO: 120439 - DNA, 122 bp, Homo sapiens
cagaaagggcctttgaagtgactgactgtgaacttatttgacaagatgaaaataatccatcgcaaggctacatgatggatgctcggcttagtatctgggtgtgctgcaaccccacctaacat

SEQ ID NO: 120440 - DNA, 122 bp, Homo sapiens
ctcacctgatccgaatgccgtgggcacacacgctgacttctgggctctctgctttagtgacgaggagctaaaaatgaatcgcactatcccgaaaaagcaacttaatcatcaggagatactat

SEQ ID NO: 120441 - DNA, 122 bp, Homo sapiens
ggataagatgacataactactcccaaacagacctagaatcagaaaatgaatggaatctcacgtgccctttcgctatcacaggctgagagagacatggcagcaactagttgcctaagtctcag

SEQ ID NO: 120442 - DNA, 122 bp, Homo sapiens
acatgggacccaattcatcggttttcctcgtccatacatgcatccatccatccctgcatgcgtacatgcatgcaatacaaatcccgggacgccggcacggagagctgcgcctcgcccttgct

SEQ ID NO: 120443 - DNA, 122 bp, Homo sapiens
tcccgggccgctgcgcccccgccggccccgcctgcagccgttgggacccactaactgcctcgaaaagcctaggattcgactttgaatggtccgttaatgtggttacaaaacgtgactcggtt

SEQ ID NO: 120444 - DNA, 122 bp, Homo sapiens
ctgtttggggccgctcctgctacaaagggacagctgagaggtagaaggacgataggaggtcgcctgggtcagcccaagcccagatgggtcattcacaccttgcccagttttgggggtccgag

SEQ ID NO: 120445 - DNA, 122 bp, Homo sapiens
gactcattcaccaagtgtcagggctgattaggagtcattggagttgtgtggatccagatacgtcactccttgggagtggaaatcaggtgacacaggtgaggccaaggtgacccagcagcaat

SEQ ID NO: 120446 - DNA, 122 bp, Homo sapiens
gctttatgtgtctcagaatgttcttcatacagctgtttttattggggaaattctacttgccgaaaagtttgatagtgagaccctctccagtttgcagatttttctccttcctgctcaacaac

SEQ ID NO: 120447 - DNA, 122 bp, Homo sapiens
tattacatcattaaaaagaagcgcaaatcccatttctgaagcttagccgaaggcaggcgccggcagggagagctaagaggccgcctagagagtttgggccgggagtgggagtgggacaaggc

SEQ ID NO: 120448 - DNA, 122 bp, Homo sapiens
gtcttctcagtgcagacccttagagcgcgcactaaccccatcatcaaaacacggcaaacacgtggaaaaaggacaacctgcccaggggtgaagagcagcttctgaagcacgcagtgtaatta

SEQ ID NO: 120449 - DNA, 122 bp, Homo sapiens
cgccgaagacactcctttccttacgtgacctagttttcgctcgcccagtgaacctgttctcgcctgggtatgcatggtatataagcccggccatttcgtcaatatctgttatttgccaggat

SEQ ID NO: 120450 - DNA, 122 bp, Homo sapiens
tttatattcaagatttaataccatgtttgtttacttcacaggttatgagtgccagtgagccgccttagatagaagcatcgtcagcactttattaatgatggatagtgagaataaacccgaaa

SEQ ID NO: 120451 - DNA, 122 bp, Homo sapiens
cccgttccgaggaattgtaatagctccccaggaagaccaggatccagaagccgttgcccgcggacagctcgcccttctccttcctgttcacgttctccctgcacacccccagggcccagctg

SEQ ID NO: 120452 - DNA, 122 bp, Homo sapiens
tgccactgagagtagcaccagggctaaagatgttcatccactcactgcagctgcacttcccgggtgcctcctacatgccaggcctgcgccaggctaagggatgtataggcggtggagctgct

SEQ ID NO: 120453 - DNA, 122 bp, Homo sapiens
aactcagattccactgcaacccctgtccccactgcaccccggacccctgggccccactcacggccttccccatggtgcccggtgcctgtgctcccacccaacagagcctgggcccggaccag

SEQ ID NO: 120454 - DNA, 122 bp, Homo sapiens
ccaaagagcggagagaggcagcagcctggctcctggttggcttagggatcgcgggctgtacggaaggcggcagcagctctgcgcctgcgcagtgaggggagcgtgctagaacaggagggtgg

SEQ ID NO: 120455 - DNA, 122 bp, Homo sapiens
ttcctcaaagaccccaggcaccggcagggaggacacaggccggggcagagcgcccctgcgcgggggattcctgccactccgcgccagcctgcggcgcaaacgctcttctcagccgcagtccc

SEQ ID NO: 120456 - DNA, 122 bp, Homo sapiens
aaaatgtccggggcgccgctagctgggctttgtggagcgctgcggagggtgcgtgcgggccgcggcagccgaacaaaggagcaggggcgccgccgcagggacccgccacccacctcccgggg

SEQ ID NO: 120457 - DNA, 122 bp, Homo sapiens
gggttttccgtggggatggagggacgtgggcggttttccgtggggatggagggacgtgggcggggtttcgaggcattcagaaggtgttaagagaagacgaaggaaaaatgaatggtggaact

SEQ ID NO: 120458 - DNA, 122 bp, Homo sapiens
aggttcttctcctaactgtggaatgcagtcttctctgcgtctgcccttttgtgctgtgctcgaatggaatcttctcactttactggttttactaataaacagaagttacaaaggtccctaaa

SEQ ID NO: 120459 - DNA, 122 bp, Homo sapiens
caagccatccttgtatcggcctcccaggtagcttagtctacagctgtgtgccaccacacccggctaatttttgtagaaactgggtttcaccccgttgcccaggctggtttcgaactcttgag

SEQ ID NO: 120460 - DNA, 122 bp, Homo sapiens
ttcttttacaccatagtctcctcatgtgccttccctaatagataagaggcttcctggagccggggtgtgggctttctatagagctagtgctcaataaatctaagcagaattgaactgaatgg

SEQ ID NO: 120461 - DNA, 122 bp, Homo sapiens
cgtcagttcaaatctcttggttttaaaaaaatactttccctctgcgcgactggcgcgtcacgtcgcgcgcgaccagtccgcagggctcctcccgcgctgctgataggcccgcagacggcggc

SEQ ID NO: 120462 - DNA, 122 bp, Homo sapiens
acaggcgctaaagccagaaggccgtccaactggtcccttcggcagtgtgtcctcctgctgcgtgggctggggcctgagcacaggaaagggagttcaggacacggtggccatgagtaggtgcc

SEQ ID NO: 120463 - DNA, 122 bp, Homo sapiens
tgcacatgcgcagaccttctcagatggcgctccaggaggaagttggcgtatttgagcatgcgcgagggagtccgcgcttttcgctgacttttggcaaaggaaggactgaaattagccccgcc

SEQ ID NO: 120464 - DNA, 122 bp, Homo sapiens
gagaacttatggttctcaatatgttgtttaaattcagcagaagaatgaattagcagttctcgaatcaaaggttgtgttcacttgaaatatgtgttaagctttacttagcaaagaaagctcac

SEQ ID NO: 120465 - DNA, 122 bp, Homo sapiens
caggtgatctgtccttcttgcctcccaaagtgctgggattacaggcgtgagccactgccccggcttggtttgttttttgagacatggtctcactctgtcgcacaggacggagtgcagtagtg

SEQ ID NO: 120466 - DNA, 122 bp, Homo sapiens
gagcgcgctggcccggcccacccggggcggttgtggtcgctatatataaggtggggaggccgccggcccgttcggttccgggcgttaccatcgtccgtgcgcaccgcccggcgtccaggtga

SEQ ID NO: 120467 - DNA, 122 bp, Homo sapiens
cctgtttgtgttgtgtatgtttgtgaatgtattgggatgtcaccgtgtgtacttatgtcacgtgtgtgcacgcatcagtgtgtgcatgtgtgagtgttcattgagtgtggcactgacagcca

SEQ ID NO: 120468 - DNA, 122 bp, Homo sapiens
ccgacccccacaccatagacccacacgcaggcctgcacctctgtcctttcctgactctgccgctggaccgaccccccacactgtagacccacacgcaggcctgcaccgtcctttcctgactc

SEQ ID NO: 120469 - DNA, 122 bp, Homo sapiens
tctttttagacatgtgtggcctcatttcccttttttttctttgagacaaggtctcactctcgcccaggctggagtgcaatggcgcgatctcggctcactgcaacctccacctcccagactca

SEQ ID NO: 120470 - DNA, 122 bp, Homo sapiens
gggacagcggcacctgtacccctcacagggcggacgctgtggggctggagaagctcctggcgggggtaaaatcaaaagggggggaggggaggcagtagagatggagcttccagaaactcttc

SEQ ID NO: 120471 - DNA, 122 bp, Homo sapiens
ccggggctcaaaggagccaagcagtgatgacagtgagaaagcatcagttcagaagggacacgtctttcttctctgagcctcctttgttcccacctggtcctgatcctcccataaaggagggt

SEQ ID NO: 120472 - DNA, 122 bp, Homo sapiens
gtcagcaaccacttctcggaagagcccgggcgcggacagctcctttcatcagccccaagccggacaggaccctaagaccaagtcacccaggggctgttgcctagcaaccctcgtggccccgc

SEQ ID NO: 120473 - DNA, 122 bp, Homo sapiens
ctcagcttccctaagtgctgacacttcttacctggatcctgttgctgggattttttcagtcgactgaaaccccttttaaaataagtttggtccctttgtttgcttttcttgtcggcatgagt

SEQ ID NO: 120474 - DNA, 122 bp, Homo sapiens
tggccgcacccacgcggcgcagctcccaaagttgcagacagcccggcgaaccgcgcaatgcgcttcttctgcctgcagcagagaaaaggaaagaaaactccgcaggggctccgttggcttct

SEQ ID NO: 120475 - DNA, 122 bp, Homo sapiens
gatgatctcctgctccgtgaggtcgatgagcagctgcaggttgtgctccagctcgggcagcgcgaagccgggggccttggcctctttgccagactgtggcagctgttgggactgtagcggca

SEQ ID NO: 120476 - DNA, 122 bp, Homo sapiens
tcgtggctccgagatgctactcctcattcaagaactgttgagagcttaaggtgcgccaggcgttgggcgaaaggcctcgaaattcctcttgctgctgctgctgctgctgcttcctcttttct

SEQ ID NO: 120477 - DNA, 122 bp, Homo sapiens
tttttaatgatcatcccattacctaccactgaactaatgttgtgttattcaaacatctagcgtggtttaaaaggccacagagtaatggaagggccagtaactatttttacgtgaaatcatag

SEQ ID NO: 120478 - DNA, 122 bp, Homo sapiens
ctggactccctccctgattttgaccttagtttgtgtggcggggggggggatgagaggctgcggtccaaatggaatgcagtttgcctgtcctctatcagcatcaatgcatcacctttcccccg

SEQ ID NO: 120479 - DNA, 122 bp, Homo sapiens
gcgcgcccacggcctgtgaccccggcgaccgctccccagtgacgagagagcggggccgggcgctgctccggcctgacctgcgaagggacctcggtccagtcccctgttgcgccgcgccccct

SEQ ID NO: 120480 - DNA, 122 bp, Homo sapiens
aacattaggtggcaaatgggtcacagacactctgctgctttgcaccctctttgcacagaacgagggctgtgcacaccctagtttaggcggcatgcagtcaaggattcctgtcagttactcag

SEQ ID NO: 120481 - DNA, 122 bp, Homo sapiens
tgccaaccacagccttccggaaggcccccgacccggccccagggcactgtgagcccctgccgggttatcctgttgtccctgactctaagcctggggaggacagggacctcatctgtgcctct

SEQ ID NO: 120482 - DNA, 122 bp, Homo sapiens
gatctggcctacccagaggccgtctagttgaaatggcaaccccaaagaaaaccaaacctgcgcccgaagcaacagtgaccatcaacgcgagcggctctgatcttgctccagtccccactgct

SEQ ID NO: 120483 - DNA, 122 bp, Homo sapiens
gttgacagaagatggggaccgtgagccaaggccttctaggatctgggaaggacaaataaacgaattctctcacagagcctccagaaagggatgcagcctgctgatgccttgttttagcccag

SEQ ID NO: 120484 - DNA, 122 bp, Homo sapiens
tgaactcctgacctcaagtgatctgcctgcctcggcctcccaaagtgctgggatcacaggcgtgagccaccccacctggccaactggcaaaactcagccaccctgccgaccaaatgaaaaca

SEQ ID NO: 120485 - DNA, 122 bp, Homo sapiens
agtgagagagagataaagagagaaggaccaaggggaaaaagaaatgaaggggctgaaggccgagatgtcctacttctaagtagttctttgagaggcaaaagcttcattgccattgcagtccg

SEQ ID NO: 120486 - DNA, 122 bp, Homo sapiens
tggctgtcctcagtctttaagatcgcaacgcacactcgctccgcttcttctcgctaaacccgcgtattttacagcaggtttcctcagggttcggtgacaacattcgcattttctaaaatgaa

SEQ ID NO: 120487 - DNA, 122 bp, Homo sapiens
ttaggtgggttgggaactgaggagatgtgaggatgaagggtgaaggaagagcttgggtagcgggtgggagttgtaattcacaggcatttgcctttctggcctctggacaaagcagccatcta

SEQ ID NO: 120488 - DNA, 122 bp, Homo sapiens
gggggtcagtgcctactgatgggccccacctatagaaataaccatacaggctgacctggacggcagcattcgggaaacagccacaaaggattaaggcagagggcactacagttgtcatctct

SEQ ID NO: 120489 - DNA, 122 bp, Homo sapiens
ccctgtctcagtattcgcatattcaagaatgactgacaagagcgatgtttattacattcacggggaaaccctgtcccatacttagaacctaatatcttttggcacagagataccagaacaac

SEQ ID NO: 120490 - DNA, 122 bp, Homo sapiens
gtgaggaacacggatccatggcaccacaattattttatggacagggagacggaggcccaacggggacatgggtgaggagcggtgcctacagcatctaaaccgccccagaccctgcctccagc

SEQ ID NO: 120491 - DNA, 122 bp, Homo sapiens
gacaaacctgagtcccagaaaaataagagacaactcccacacaccaggctgtccgcgggccgccttgtcacagaaaggcagctccccagccccgcagagtcccgacagctgcccccgcgaag

SEQ ID NO: 120492 - DNA, 122 bp, Homo sapiens
gccactccgcccccaggcagaggtcacgccgcccactgccaggctttctgcaaagcccctcggacatccggcacaggtttcccaccccgacactgcgagcacgaaagccctgcctgagacac

SEQ ID NO: 120493 - DNA, 122 bp, Homo sapiens
tactattaggaagaaagtcagcatggtggtgagatgaacccgtacaaggtctcatttaaccgggtggcagggagggcctctctgaggagacttaaacagccctgagggctgaggaggagctg

SEQ ID NO: 120494 - DNA, 122 bp, Homo sapiens
ttacagctcttaaggcagcgggtctggagttgttcgttcctcccggtgggttcacggtctcgctgggctcaggagtgaagctgcagatcttcgcagtgagcgttacagctcctaaaagcaga

SEQ ID NO: 120495 - DNA, 122 bp, Homo sapiens
cagtgagccgtgattacaccactgcactccaaattgggtgacagaatcagactgggtgaccgaatcagtctttcatggtccaaacccaactcattctctctctctctttctctgttgctctc

SEQ ID NO: 120496 - DNA, 122 bp, Homo sapiens
aggtggccatggaatccccgcatgactgtccgagtggagagcaaggctggagagctgcttcgtcagcccagaagtttcagtccttgttccccaaaaagtggtcactgaggcaaagtgtggcc

SEQ ID NO: 120497 - DNA, 122 bp, Homo sapiens
tcagtttggattcacccaaaacaaaaatggtctccgtcggagtcaacgccctttcctgtgcggaccaatcagaatctcaaacacagggcacggggcccacacttccgtccggtctgcctggt

SEQ ID NO: 120498 - DNA, 122 bp, Homo sapiens
tcaggcccagctgtgacagcaatggtaatgtttctctttcacttgcagaatgctgaaaaacggccaagaaaaaaaaatggggaagctttttttcaggcagtacagagtagtgttaacagcag

SEQ ID NO: 120499 - DNA, 122 bp, Homo sapiens
cccccaccaccaacaggactctattataaacttttgttctaaacaaggagccaggctgggcgcggtggctcacgtctgtaatcccagcactttgggaggctgaggtgggcggatcacctgag

SEQ ID NO: 120500 - DNA, 122 bp, Homo sapiens
gatggaggctcagaagccgctgtgagtgttccgggggaagcactgccttctgcgtcctgccgcccccagtatttctcctccggctgaccctgaggactgcggggcagggagtgaggtgggag

SEQ ID NO: 120501 - DNA, 122 bp, Homo sapiens
aagccgcactccactctgactcccaggacgggcaccaggtgagtcacctagtaggggcggcggcggccccctcccctcgcgggtagggcgagggccctccgccacaggggcctgggagcact

SEQ ID NO: 120502 - DNA, 122 bp, Homo sapiens
tcgctcctttctctggtgctgctcattcgcgaggcctgagacgcggaccgtcaccttccccgggcccagcctggcctcaatgcaggcctcagagagagggacaaaacccggcccgcctccct

SEQ ID NO: 120503 - DNA, 122 bp, Homo sapiens
tgcctagcatccacggtgcgccccctgctggtggatggctcaggatggtaagcattcctccgccgcacatgctgagtgggggtgggatttccaagacctgcaaggagctgtttctcagcagg

SEQ ID NO: 120504 - DNA, 122 bp, Homo sapiens
aaggcataaattaaaggctctctaatgtttctcctcctctgaaaccccatgattcagcagcgtctcccatgtgtgctcaaaagttggacgtgcctccagcctaccctccaaagcagttgcca

SEQ ID NO: 120505 - DNA, 122 bp, Homo sapiens
gtttgcctccctggatcttatgttttaacacatgctgtagtgttcagattgcaaacacagcgaagggatgtttaaatcctaaaaacaaactgttttcattgcaatgtgcaaaacagcattcc

SEQ ID NO: 120506 - DNA, 122 bp, Homo sapiens
tttaggacccccatacacaaagaatcagctacgtaaagatgaaaatcagcacaagctgaacgtgtcactgatgatttgtgtgtcacacataaatggagaaaaacataaaagagctattgtcc

SEQ ID NO: 120507 - DNA, 122 bp, Homo sapiens
gctctccgccgcggaaacttcgcgtgacacaaactcctggggtgacagcggaaaggggagcgtgtaccttgtgaattaagagatttagtcacttgtggaatgactttattttatagcgactt

SEQ ID NO: 120508 - DNA, 122 bp, Homo sapiens
tgtctgggcccactccagaccctcctgcaggctgccccccaccgctccaccctctccccgcgctgacttccatccggaacctcattctgccaagcttctgaagtgccggccgggccagggac

SEQ ID NO: 120509 - DNA, 122 bp, Homo sapiens
tcagagttggacttcatcacttgtctgtgagccgacgcaggcaggcgtattctatatcaacgacagactctcctctgccatttcctttcctgaatctagttaacattcgggtttaatttaaa

SEQ ID NO: 120510 - DNA, 122 bp, Homo sapiens
cgcctggtcagtggggataagggctaactcctagagcccaccccgaccccacacacacctcggacccacccacgtccccaccccggcctggacctccacgtctgccggccacagcctttcgt

SEQ ID NO: 120511 - DNA, 122 bp, Homo sapiens
gcggtcactcaggcccagaaagtgcttcctgtgccgggggaggtgggtacagggaagtctcgcctgttggaactggctgtggggctgcggcggtggggacgggccacggcgttctgtgacat

SEQ ID NO: 120512 - DNA, 122 bp, Homo sapiens
cctcaggtggaaggaaactgggccaactctactttgtaagccatagggtgccaggtagcccggccaccctgagcctgtgcctccactgcccccgcgtggccagtcaggtgcagctgctccca

SEQ ID NO: 120513 - DNA, 122 bp, Homo sapiens
tgagccaccatgcccagcctctattaatacttccagactacagacttaaggacttagacacgtctttttcatccaaactcaaagggaagaagtgtagtttttttcttttccgtttttactct

SEQ ID NO: 120514 - DNA, 122 bp, Homo sapiens
actggttactctttaacgtatccacccaccttgggtgattagaagaatcaataagataaccgggcggtggcagctggccgcactcaccgccttcctggtggacgggctcctggtggctgtgc

SEQ ID NO: 120515 - DNA, 122 bp, Homo sapiens
tggctgaaggcggaggttgtgacgacgcatgtacaagcctgcaggagcatccgcgagcaccgctggccccaccggaaaccgggaagaggcaggacagcttctaccccgagcctcagagacag

SEQ ID NO: 120516 - DNA, 122 bp, Homo sapiens
tgcccgggggtcacagcagtcaggaccctaccctggagccggggccccatcctcaggatgcgcacacttaggggccgaaagcagtgattagtcagccggagctggacccggactctggtgtg

SEQ ID NO: 120517 - DNA, 122 bp, Homo sapiens
tcaggcctcgagtattgcccaaggcacatgggggagtgaggcacgggggatacagtgcgccgtggaggtcacactggagttctcccctccctggagagggatgagtgactgggtccacacgg

SEQ ID NO: 120518 - DNA, 122 bp, Homo sapiens
aactccagtttctgaagactgtcccaggaagtgtgtacaaggcaaatagtctaagaaggtcggaggtagagctcaggatgctgtaggttcccaagtgccacaggcaattcagaggcaggtaa

SEQ ID NO: 120519 - DNA, 122 bp, Homo sapiens
tttaaagccggttttttgagagagagaaagagacagagaaagaggtttctgtaagtagcccggacaatgagaacaagaccggctgtatgccaagcacgggatcccggccaaaacacatatca

SEQ ID NO: 120520 - DNA, 122 bp, Homo sapiens
tacttagaggttttgttttgaaggaaagaagggctccagatctgactgctgtcacctattcgaggctggagtttcccagtaaaacctaacccacacatttacgtaagccatctgttgaccca

SEQ ID NO: 120521 - DNA, 122 bp, Homo sapiens
ttcttgtgaatgggaatatattagtggagcataaatatttctttggtatgaccctcaatccgtctctcatctcccagtctccccctctgagccatcttttccctacattctgccccctcttc

SEQ ID NO: 120522 - DNA, 122 bp, Homo sapiens
gcatcgtggccaagcaggtgtcggactgctcagagtccgcatggcccaggagcaggtggtcggaggcccctggctttgtgcaaggccggatctgggccaggtggcgaaaggggcccagtcgt

SEQ ID NO: 120523 - DNA, 122 bp, Homo sapiens
gtatagattcaagtttggatgtcttgtatagctttcagtttcggtaagtccttcaagggccgacttatgtctctccttttctattaaaaacctttaccaaagtcttggtcagaattctggtt

SEQ ID NO: 120524 - DNA, 122 bp, Homo sapiens
gtgaccctcccaccctctctgcaggttctcggagcttgtggacggcagaggaagagtgagcgccaggttcggtggctcacccagcaaagcagccaccgtgagatcacgtgagtgccagggcc

SEQ ID NO: 120525 - DNA, 122 bp, Homo sapiens
ggcccaggaaggcttcagtgagaagaggaattggctcaattgcaccttccctgtcagccccgtagggtttcctgacacccagtgagacgccaaggatgaaagggctgtggggcagagatatg

SEQ ID NO: 120526 - DNA, 122 bp, Homo sapiens
gaaaagaaaattgcagcttgaagggaggtgactggaatggaggtgtaaagtggccagatccgtgtttacttccaaaggagggccaacagcatttgcagataaactggatgtagatacagagt

SEQ ID NO: 120527 - DNA, 122 bp, Homo sapiens
tggacgcgctcagtctgttgactcagtgcgggtgacccagctgggatctgtgcgagggcgcggccgcgcgcacccgcgcgctcctggcgcaggcagagctggcggcgccgaagtcgcgcccc

SEQ ID NO: 120528 - DNA, 122 bp, Homo sapiens
ctcaggtgatccacccgcctcggcctcccaaagtgataggattacaggcgtgagccaccgcgcccagccttcatttagtactgtctaatgatgttttcatactgcaaggagaaagctgagta

SEQ ID NO: 120529 - DNA, 122 bp, Homo sapiens
tgaaacttaaaccacccatgtgctctgccatcctcaagaagcttagatagcacctaaacccgggcgtagtcatgagctcaacagcagacctacaggagacgatagaacttaaattagcatcc

SEQ ID NO: 120530 - DNA, 122 bp, Homo sapiens
cttggtgtggccaggatccctcttctcctctatggtttggaaaccggcctgcctggcctgcggtgggtggctccggctgaaggctgtgacccctggagatgggtgggtcaacccagcctgct

SEQ ID NO: 120531 - DNA, 122 bp, Homo sapiens
gaacgcgtcaaaaggcaccaatgggcaaacacccagaggtaggcacaagcaggagtaggccgggtcttgtgagcccctacagccacgcggccctgcgctgaaggcaccgaggctgggtgctg

SEQ ID NO: 120532 - DNA, 122 bp, Homo sapiens
tcatttcttcactctgtctgagttctagggggttttccaagcttgtctgatcggatgcgtcgtctaggtctctgtggtgacggcgtggtgagaggtggagaggaggaggggcaggtgagcaa

SEQ ID NO: 120533 - DNA, 122 bp, Homo sapiens
gtgggaatccggcggaagggaagcacccgcagggagggctggaccccggaggctgcagagcgtcagaagcgactctagggaactagggggtggggtagggaggcggggacgtggaataaaga

SEQ ID NO: 120534 - DNA, 122 bp, Homo sapiens
gttttccttgcctccccagtttcttaccaaactctctctttgaagaactcccacttgatccgaacttggtctggatgaaagcaggaagtgcagccctaggtgccagggcgggagcaagcact

SEQ ID NO: 120535 - DNA, 122 bp, Homo sapiens
actcagcctaccgacaggcactgtgcagattcaagcggagagatgtccaagcagtgaggccgctgctgcaccggccatcctgagcccctactcggccttcccgtctccgcttccccgccccg

SEQ ID NO: 120536 - DNA, 122 bp, Homo sapiens
tgagatacagcacctttctgggcctcttacctatcatatttctgctgcttctgtggtttacggaaattgtaaccctttccgtgtgtgtatgggtgtgtgtgcgcgcgtgtctgaaagaagga

SEQ ID NO: 120537 - DNA, 122 bp, Homo sapiens
gccgggcgcggagggcgcgcccagggtgcggcgcccgcgtggcctgtcgccccggctgttcggtaccccagcacaggttcagggaaaagggtgccaccactaggctgacgcagcagccatgg

SEQ ID NO: 120538 - DNA, 122 bp, Homo sapiens
ttattccaccgcggctttttgccccagccgccgcggctctgagggcgggaagggcagactcggctgccagctctactggcgtcctggcaatggtagagctgaggggcactcctggtccagct

SEQ ID NO: 120539 - DNA, 122 bp, Homo sapiens
tgcgcggcccgggtgcggggtctcctcgtcatctcgggcgacactctgcaaacaatatggcggtcgggcgtcgaccgtggcgccttctctccgggccctcggggttgacgagggggactacc

SEQ ID NO: 120540 - DNA, 122 bp, Homo sapiens
gtgtgtgtgtgtgtgtgtgaaaaatccaatagcattcttgatatgcaggagtgaaattctcgggaggaaagccactgccaagcaacactctaacctctgcattgattttggatgcctagagg

SEQ ID NO: 120541 - DNA, 122 bp, Homo sapiens
ctcttcctcccaatgcccgtcaggctgaactcgcctcccccgtgactctgcctcgggcctcgcagaggccgctggtcacttcgtcatcattttgcccctggagacgtctttctttgtgcctt

SEQ ID NO: 120542 - DNA, 122 bp, Homo sapiens
cgtgactcagaagggcggctgcacctctaagttactgtcacagcagagacctcccctgggcgaggcaactggatccacagagagaacatgggctgccctccagaaagcacctcctgcccgcg

SEQ ID NO: 120543 - DNA, 122 bp, Homo sapiens
cggagagaggcgataccctgtgcagaaggatggaacggagccggccatgcccagggaacacgcatgcgcaaggcgggcacacaccccccccacgcggagcagtgggctcgtccaagctccac

SEQ ID NO: 120544 - DNA, 122 bp, Homo sapiens
tcatcaccctttcccccaaacagtcacctccacaagcacaacacaccacacacgcgcacacgttttcttattgccaaaaagggtggagggaaaggacaggaagtttttttaagtacacgcac

SEQ ID NO: 120545 - DNA, 122 bp, Homo sapiens
agggtccgcgccgagggcgggcgcagagcccgcggccgtcccgcctcccgccggcgctcccggcctttcccatccggcccgcgacgctccgcccgccccgtcccacatgacgccgcctccgc

SEQ ID NO: 120546 - DNA, 122 bp, Homo sapiens
attaatctacttcttcaattgtggggcctgtggcaggccttccaggcacataccctgttccgcaggcaggcccagtgcatcctccttggtagagttttgtgatgatagggttacacatctgc

SEQ ID NO: 120547 - DNA, 122 bp, Homo sapiens
tcctcgagggcttcctgtcagagctagaacctgagccccgggaggacgacgtggaggccccgccgcctcccgagcccaccccgcgggtccgaaaagcccaggcggggggcaagccagggaag

SEQ ID NO: 120548 - DNA, 122 bp, Homo sapiens
gtgactgcgcatgtatggggcctaaggtggggaaacggctttggcaatgtggacatgttccgacagggctcataccccagtggaggttactgtcaggaactgggttgcggagcgatgcgaac

SEQ ID NO: 120549 - DNA, 122 bp, Homo sapiens
aggagagaagaagaacagctatatcgcatgacccagtttccaaggcttaatttttcacttcggcataataaatttagaaagccctgacatttcattttcttttttgtttgtttatttgtttt

SEQ ID NO: 120550 - DNA, 122 bp, Homo sapiens
gggcttcaatttcctcatctggaaaatggagataaactcagctcattgttttgtgatgtccgaaattatgtactacccggtgcacagtaggtgcttaataaacatgagtcctttccttcaaa

SEQ ID NO: 120551 - DNA, 122 bp, Homo sapiens
tcggtgaaagccgtctagttgcctgagatgaatcccacatgccgggattcacacttcccccgagagctggattccaccgtgcccgccgggcctgcgaggacgagagctggattccaccgtgc

SEQ ID NO: 120552 - DNA, 122 bp, Homo sapiens
tccggaggcggagcttcagcagcgggagggggaggaatctggggcctcccaatggcagctcgggtgtcttccatcgcagccattcaacgtctggcgacggtcaaatttaaacacccctccca

SEQ ID NO: 120553 - DNA, 122 bp, Homo sapiens
gaggaagagaagcacgaattccgccggcgttggtaagcgctggcggggcactggggagggcgccggccagaggagggacccctggaaagggctggaggatgcaggtggtggccccagagatg

SEQ ID NO: 120554 - DNA, 122 bp, Homo sapiens
ggcagactcacctagcttgctttgtcaagcatagcttctcataatgcaatatttaatacacgtttttatcatgatgatgaatgtgctgaccccacaattacattttgtctaaatgttttatc

SEQ ID NO: 120555 - DNA, 122 bp, Homo sapiens
ggtcctgtttcaagatctgtgtaggtcactacttcatcaaaactggagggctcttaacagcgcttgccccttacacggtttggctgcgagggcctggtggccatgagccccggctgtcaaca

SEQ ID NO: 120556 - DNA, 122 bp, Homo sapiens
caccggctctctgagtgacattcagccctgcctgcgggagggcgaggacaagccgtgctccggccgtggggagtgccagtgcgggcactgtgtgtgctacggcgaaggccgctacgagggtc

SEQ ID NO: 120557 - DNA, 122 bp, Homo sapiens
tggagaccgtggtcatggcgatggcggtggcggtggcggtggcggtggcccaggcggcggcggcggacgggagcgtgacaggaggcggttgagagatcgtgaaagatctgggcgattctgag

SEQ ID NO: 120558 - DNA, 122 bp, Homo sapiens
gggctgacgctgccttgggttcgcctacgtccctcgggaattttgtcccggcgtggctcccgtagccagatgcttcgccgctcccgccccgctggctcccaaagcctgttcggcagtcgcgg

SEQ ID NO: 120559 - DNA, 122 bp, Homo sapiens
tatcccccgccccacggcctcatctcgagttcccaaaccatctatgttgtcaacaggggccggagggcaggtgttaacccattccggtcctcggggcctgtgcgtctccggtggtctcagga

SEQ ID NO: 120560 - DNA, 122 bp, Homo sapiens
cagcaccgatttaaaggagcccagtgaacgcccggctaaaaacagggaagaaacaggcgacgtttctttcaggcatatttcaggatgcctcactggagttttagcttactagacacctagat

SEQ ID NO: 120561 - DNA, 122 bp, Homo sapiens
cgagggcggccgggctggagaaaggccccagggctacaggccgggcccaggaagcggctgcgcctcgaggcccggcctgggccgcccagaagctcaagaggccgctaggtcgcggcggaggg

SEQ ID NO: 120562 - DNA, 122 bp, Homo sapiens
caggaagagagggggtcccgaggtcctgttttccctgtgggccgctggaaggaggcagtgcgtggaggaagctcctagccccggagttcgcggtccagggatcttctgtcggtaccagaccg

SEQ ID NO: 120563 - DNA, 122 bp, Homo sapiens
tcaagcccccatctaaggggagcctcctggaatttatttatttattttcaacgaactagccgggcatagagagagtagaatatgatgccacattctagcctgcaggggtggtagggacagaa

SEQ ID NO: 120564 - DNA, 122 bp, Homo sapiens
ccggagagacgggccagctgatgcccaggtcggggccctgccgctggccacactgggctccggtccaaggctagaaggctggcccctgctgcaacccctctccggctcctctgccacccacc

SEQ ID NO: 120565 - DNA, 122 bp, Homo sapiens
agccctccttctgctgtactgacttccttttcagttcctaaatgatggcccccagtagctcgagtctcattcgctcaagttcaaatccaactttccagtagctggaatagactatggttggc

SEQ ID NO: 120566 - DNA, 122 bp, Homo sapiens
agggataaagcaacccttgtttatcccatcttggctcttggtctgtgcccatggctggttcgtgccttggatacatggaaaataagtaaatgattaaaaaataaaaattaaaaatcttctat

SEQ ID NO: 120567 - DNA, 122 bp, Homo sapiens
atcaatcaatgtcaagcctttcagcagaaactggaacttcatggtgcagcagttcatcttcgcatgggccgggaggttgaacatcctgcatagtgctgccaggaaatccctatttcatataa

SEQ ID NO: 120568 - DNA, 122 bp, Homo sapiens
cagtgcctttcagcggcgtgtggatggcaagaagaacaccaagaaacgccactccttcaccgcgctcagtgtgacgcacagatcctcccaggctgccagccacaggcattccatggaaatta

SEQ ID NO: 120569 - DNA, 122 bp, Homo sapiens
ccagactgtttggctcccacaattttctttttgccattgttggacacattgtaagagtttcggcttccaaagatatgtagccacacagaatcagggaaggggccagaataatgctatttttt

SEQ ID NO: 120570 - DNA, 122 bp, Homo sapiens
gctgtaacactcacctcgaaggtctgcagcttcactcctgaagtcagccaaccacaaacccgccagaaggaagaaactccagacacgtccgaacatgggaaggaacaaactctagacacacc

SEQ ID NO: 120571 - DNA, 122 bp, Homo sapiens
cggacaccgacagccaatggccgggcccgtcccgccccatccgggattggctgtgcgtgccgcggccctccaccccgccccgctcaggatcttcccgggattggctgagctacccgacctct

SEQ ID NO: 120572 - DNA, 122 bp, Homo sapiens
atggtgcacagtggagaggagctcgcgctgggcccggcaggcctgctgctgccatccatgcggctccaacggccggtcctgggtgccttatataggctggcgggccctcccccgccgcacct

SEQ ID NO: 120573 - DNA, 122 bp, Homo sapiens
cctgcagactcggggtgggaggtcgccgagcttctgccggttttgctgtcacgggtcggtcggcaagttatgaggaaaaagatcaggttgcttgatccagaaaaaattaaaataaaacaata

SEQ ID NO: 120574 - DNA, 122 bp, Homo sapiens
gccaggggatgtggaaactcaaaagagacgtgaatggagcctgatatctgcaagctacaccgacagggggcgccagcccctacaggtgactccatgaatcttcggctccactcggctcttct

SEQ ID NO: 120575 - DNA, 122 bp, Homo sapiens
ccctggaccacttcctcggattctctcagcccgacagttcggtgactccttgcgtccccgcggtgtccatgaacagaggtaaagcgccctgataggtttgctcggaactgtcatgtttttag

SEQ ID NO: 120576 - DNA, 122 bp, Homo sapiens
tccccgtcacctactgcctctgactccccctgagtaaatgcaatgggaaaagcagggagacgtgctctcgactctccccagagcagaccctgcaggcggaagccacctgaatctcacttgct

SEQ ID NO: 120577 - DNA, 122 bp, Homo sapiens
ctttaggccctggggcctccagtgcccgtataaggctgtggcagaagccctgcccatttccgttccttccactccctatctccaccctcacacctccccaaaaacccacttcccttcttacc

SEQ ID NO: 120578 - DNA, 122 bp, Homo sapiens
tccttgtgcgccaaaagatcgggaaagagttgctagatattaggggttgtagcccctggacgcgccgtaatgcacgcagcgtcccctggctggcatcagccagatttcgtataatagctcca

SEQ ID NO: 120579 - DNA, 122 bp, Homo sapiens
ggtttagagggaacaagatccagggactgcagcgggagacgacaggcggggcaaggcggacgggagagggcgtgcgagagggggacctgcgacccggcttcccagggctgggaggggacacc

SEQ ID NO: 120580 - DNA, 122 bp, Homo sapiens
gtcactgcgcgttgccggggtagacgcgctggttaggggcaagggcgagcgtgcgttcagcgcgggggctgggcccgcggacaatgggccgtcaggggccgggttcccaagcctggggtgga

SEQ ID NO: 120581 - DNA, 122 bp, Homo sapiens
tgagccatacaccctccattgcttggtgctggggttgtgtggcctccactgggcacttgccgacctgagtctggggccaggggagcccaggctgccctgcactcctgcctcccagcccacag

SEQ ID NO: 120582 - DNA, 122 bp, Homo sapiens
gcctgggcaacagagcaagactccgtctcaaaaaagaaaaaaaaaaaaagaaataagatgcggtctctgtcctcaagaatcttagcactggagaccagcgtgttacatagatgtgctcctta

SEQ ID NO: 120583 - DNA, 122 bp, Homo sapiens
caactgccacatgaaagcaaaggcccactggaaccccaaggtgggcacgcagatgagtttcggatggcaggagtggcagagctgcaggagctgcaacggtcctccatctcctctctacgggc

SEQ ID NO: 120584 - DNA, 122 bp, Homo sapiens
gagggagggagggaggcgccgaggctaagagaaacagaaacaaggaaaaagggaaacccacgcccactctgtggccgtgagtgagctctgtgtgtgtcccagtgactagcccatgtgcgtgt

SEQ ID NO: 120585 - DNA, 122 bp, Homo sapiens
ggttgcggctcagtgctccccaaggacccagtgcgaagaagcctcggaccccacagctgccgtccgcgacccctaactccactctgcagcgaataaattaacatcttgggcctttcatttac

SEQ ID NO: 120586 - DNA, 122 bp, Homo sapiens
cctcccggcagggactcctcggctcccctctgttctgagactgctgctgggaccggggtccgactctaaagagaaaactcaaacagcaaaaaaaggaatatcgactcagttccgagggcggg

SEQ ID NO: 120587 - DNA, 122 bp, Homo sapiens
gggcaacatggtgaaactccatttctactaaaaatacaacaatatagccgggtgtggtggcgtgagcctgtagtcccagctactccggaggctgaggcagttgaatcgcttgaacctgggag

SEQ ID NO: 120588 - DNA, 122 bp, Homo sapiens
gaagtaagttaaaggggtgaagtaacttgcccaagatttcacagcagggagaggtagagccgaggttggaacccagatggtttcattctggatctcctattcataaccaatcctgttacttt

SEQ ID NO: 120589 - DNA, 122 bp, Homo sapiens
taagccctcctcaatcttctccactgagctgggcgtccagcagctagcacagtacctacgcgacaacggacaaagaataagtgcttgtgaactgagctttcttaacttctcgatggaccgtt

SEQ ID NO: 120590 - DNA, 122 bp, Homo sapiens
tcaggaaagaggccgggtgaagtacatcaagcgtccaggtgccgtgctggaagcaggctgcgtggtggccaggctggagctcgatgacccttctaaagtccacccggtatgtggctccacgg

SEQ ID NO: 120591 - DNA, 122 bp, Homo sapiens
ccacactaaccctaaagagtcactctaggatgaggtccaagaatttgggcttgaccccaccgctcctgtcccctgccctcacactgaggacctaaaggataatgaaaggggggaatctgtgc

SEQ ID NO: 120592 - DNA, 122 bp, Homo sapiens
cctgaactcagctttatggctacagcccagtgaagcaacgggatgtgaactccaaaacggcgaatcctcctttgctgtttccctctggtgcctttctgcagcctcggagtgagttcttggct

SEQ ID NO: 120593 - DNA, 122 bp, Homo sapiens
ggatagaggggctgtgtcatagacgtccgacgtgtctggtaaggccagagcgcctttcctcggtcctcctagacatggtgtccgctgactcatgagaaatgaaagtgggttgcgcgttgcag

SEQ ID NO: 120594 - DNA, 122 bp, Homo sapiens
aatggtccactccaaactttaatagtgacccactggacctaatacaagatttaatctgcacggcccagttttcttatccaaacatcttctcactacccaaacagagcctctccatccttgtc

SEQ ID NO: 120595 - DNA, 122 bp, Homo sapiens
cgagagtgcgttttggggtcccttctgcacgctccctttcccaccgggcaaggcccatagcgcaagtggaggtcgcacaaaggagggggcgtaaaaacagctttaaaacgaccagtgaatct

SEQ ID NO: 120596 - DNA, 122 bp, Homo sapiens
gctcctttcactgtccaaacgtcaaccaaaggaacttttgtgacgctaagacgctcccggcgtcctcacccgttcacagccagagttgatcttagaaggcagggggctcgcaccgagacgct

SEQ ID NO: 120597 - DNA, 122 bp, Homo sapiens
ggaagatgccggaaccttcctcaaacgaggccactctaggaaattgggaatttcacatatcgttagcactcagtcgacgtttattggcctaagaacgaaagaaccggaagatgcccttaaaa

SEQ ID NO: 120598 - DNA, 122 bp, Homo sapiens
ctgctggaccacaggggtcagagatgtcactagttaaggctctctggacccagccactcacggagttgtgggtaagggtgtggcctggtaggggtgagggtgttgggggtggagtcgcttcc

SEQ ID NO: 120599 - DNA, 122 bp, Homo sapiens
gcccctggctccctgcctgtagaccctaaattgggtgtgggcccagggctggccccagggcgtttgcatccctagtgtccaagcctgaggtgcactgcaggtccttcctatggtatgtcccc

SEQ ID NO: 120600 - DNA, 122 bp, Homo sapiens
cctgagctcgcggcggcgccggcgcctcgcactgttcctggctcggaagcacctcaagaacgtggaggcgactcacttcagccctctggagcctgaggagtttcagttgccctggcggctgt

SEQ ID NO: 120601 - DNA, 122 bp, Homo sapiens
ggtggcgacgtcgcccccgccccacctccctgcgcaagtgcgaggctgccggcagcgcggcgcacgctccggccgttcccggcttccgcgcaaaacttccatcctgtccacgtgaagttgtc

SEQ ID NO: 120602 - DNA, 122 bp, Homo sapiens
tggacgtcagggaatctgggtcctgtccctgggatggaagagctgagctgttcctgcctccggatcagcacctcggacagggacacgggcgcgagaggtcccctggcagccgagcgcgaccc

SEQ ID NO: 120603 - DNA, 122 bp, Homo sapiens
aagacgaatgccgaccattggctcagacaccataccacacaggcatttctggaggcatttcgcggcgttattatgggaagttgcgcggaccggggccttcgcgctacagccgaggagtctca

SEQ ID NO: 120604 - DNA, 122 bp, Homo sapiens
ggcaggatcctttacgatcccttctcggtttctccgtcgtcacagggaataaatctcgctcgaaactcactggaccgctcctagaaaggcgaaaagatattcaggagcccttccattttcct

SEQ ID NO: 120605 - DNA, 122 bp, Homo sapiens
agcagcggttgccagttttgggggccacagctgagcaggagctgaagttcctggtgaccccgcatcctgagctgatcctgtaggagcggcacgacatcgtgtgaggctgagcagagtctgag

SEQ ID NO: 120606 - DNA, 122 bp, Homo sapiens
tcaaatctgtacttagaaaatatctataaagggcatttgtccccgcgacagaaccgctgccgccatcgctgtcatttaagatcgcccgggtccctccgccgccaccatgtctctgggaagcc

SEQ ID NO: 120607 - DNA, 122 bp, Homo sapiens
accttcctgcggcagagcccgccctcatgctttctctgattggcccgaggcgctgccggccgaaccccgctcccaacccattcttgagtgcacttggagagatgtttcctccaaccaatcca

SEQ ID NO: 120608 - DNA, 122 bp, Homo sapiens
ccctgtggggtcgggagctgggcatgtgcccagctaggggacccctttctgcaggtttaccgccacaagtgccactagctgtgctcttctgctccatggtcgttcgcacacacacggtgtcc

SEQ ID NO: 120609 - DNA, 122 bp, Homo sapiens
cctgccctaccctggtgggctgacttttctcccctaacaactgtctctactggtctgccccgaatctctgggtccagaagtctgaccctttaacctggggaagggtgagccagtaatagaga

SEQ ID NO: 120610 - DNA, 122 bp, Homo sapiens
actccccccacctctgcacagtctgggtttggcctcccagttctctcatggaggctgagacgtctcaagagcgtttctgtactccagctgcgcgtccccaggcacgagcgctcgttaatttc

SEQ ID NO: 120611 - DNA, 122 bp, Homo sapiens
atagagcttagaaatgtaaatcacattaaaagctcagcccagtaggcaggtggcaagcttcgtccttctgctacagattctaactttttcttcccccggtctcatatccttagacatctgcc

SEQ ID NO: 120612 - DNA, 122 bp, Homo sapiens
gatccgggcgccttggaatgcggactccagaggcggcatctcgaccagacaagtttctcgcggcttggaatgagggagtcctgaaaccgacactcgttttatttaaccagcttttttctcct

SEQ ID NO: 120613 - DNA, 122 bp, Homo sapiens
cggggcttgcccaaagtggggaaacccagaggcgggaggctcccagtggctgggcaagagcggggtgcaaatgcgaaacctgctctcggacgccgtgacgctttgcagactggggcccctcc

SEQ ID NO: 120614 - DNA, 122 bp, Homo sapiens
ggtgggacagggccggtcctgacttggccccctccttcctccctggggcttcttcccgggcgcacaaagccaggcagggttaataatgtttattacgtgctttgatgagacgctgtctattt

SEQ ID NO: 120615 - DNA, 122 bp, Homo sapiens
ctgtgggcttcccagaagacggtggcgctcagggtacatctgctgcagggactgcagacgcgatccctgcgggctgctacaggagatactggctgcacaatactggttggggcttctgagct

SEQ ID NO: 120616 - DNA, 122 bp, Homo sapiens
ggctctgccttcaatccagacttcctaagtgggtttagaaaggccttccaacctgatgcacgtgacccctgcagactcacgccagccactgccacccccacaacccttgcgccctggcccca

SEQ ID NO: 120617 - DNA, 122 bp, Homo sapiens
gggacccggcctcgttaaatggggagtgaccagaggtggaaggggcaggaccagaaccttcgcaaaagaaagagctagacctagagctctggtcctggcttggcgaagaatgggagaggtca

SEQ ID NO: 120618 - DNA, 122 bp, Homo sapiens
cgccctctcgccgtcttggagtccaggactgtggccgggggtttgagggtgtggcagcaccgccccccgggtcccggggagcggccggaccgagctcccgacgccgggtcgggcggagggcg

SEQ ID NO: 120619 - DNA, 122 bp, Homo sapiens
aaccagagagtgccaggctgtaagggagaggggaatatccgcagggccctgccaggaagccgggcccctccagctccggggaaggctgggcctgagtgctcctactgtgtgccccagtccac

SEQ ID NO: 120620 - DNA, 122 bp, Homo sapiens
tttgccaggcaccccagccatcccacttcctccctctcttctgctctggctttgaaatggcgtgttgagagaatccaaagtttgatcctcatgaaaatgagaaattgcatgtattgacaatc

SEQ ID NO: 120621 - DNA, 122 bp, Homo sapiens
tcctcctgtgtctctggacaggatcttgtaggaggagcttaagagcagaactgtacttttcgtagcttacctcgtagttcctgtggtcccttggtttgatgcctttctgttcactggaacca

SEQ ID NO: 120622 - DNA, 122 bp, Homo sapiens
acacaacacgcgcacacgcgcacacacacacgcacgcacccaccccacccggctgccggacgcaagcgtaagtcaaggacttgcatgctagaatcagacagaaaatccagaaaagccacgtt

SEQ ID NO: 120623 - DNA, 122 bp, Homo sapiens
acgcacatccccagagccccgcgtgtacactttagctccgcgcacagctccagaatactgcgtgcataccttggccccatggacacctccagaaacagccaagcacacttactgcgccccat

SEQ ID NO: 120624 - DNA, 122 bp, Homo sapiens
cttttggcccgggtcttgagctgaaattccagactgaatgggaccgtgctgaaagttcgacgaggcaaaggagtatggcgcgggggcaagctttgacccccggcttcgtatcctcgggagag

SEQ ID NO: 120625 - DNA, 122 bp, Homo sapiens
cattcacagtgttgtatattcagtgatggaagtgcattcacagtgctgtgcattcagcagcggaagcgcattcatggtgtgcgttcagtggcagaagcgcattcacggtgttgtgcattcag

SEQ ID NO: 120626 - DNA, 122 bp, Homo sapiens
cgtgtgacgctggccccaccgtggaatggcctggcccccccagccccaccacccccaccccggctgcagattacggagaacggcgagttccgaaacaccgcagaccactagcccacccagca

SEQ ID NO: 120627 - DNA, 122 bp, Homo sapiens
gcagcccacccccacgagaccgcttaacttcgcgggggcagcctcgggcgctcggagacgcggaggcccagactgcagcctccggatgctggaagcccagactccctggggtcaccggctct

SEQ ID NO: 120628 - DNA, 122 bp, Homo sapiens
gatgtgaagccactcagggctgtgcagggtctgaggatctcactggggacggcctcccagcggccagctatcagcacgagttggagggaaagagccatggtgggggtcagtcacgtggctcc

SEQ ID NO: 120629 - DNA, 122 bp, Homo sapiens
gagacaactctctccagcaatagctgcccagctttgcccaactgttgcttcttggggcagcgaactgagccctggggctgctgctgtaatttataaggcaaattttattaaatttgtaacta

SEQ ID NO: 120630 - DNA, 122 bp, Homo sapiens
attcttggtagagaaaaaaagtcctggggatggaaactgagattagtgagggatagtggacgatgagcctgaaagggtggttgaagaggctctagagggcctgctctctgtaagcaggcaag

SEQ ID NO: 120631 - DNA, 122 bp, Homo sapiens
atttcaccacaaagtcctgcggatttgaattagaaatgaatggaaatccacagtactcaacgtgaattgcaacaataaaacattaagtaaggaatgattagtttgaggaaaggatattatat

SEQ ID NO: 120632 - DNA, 122 bp, Homo sapiens
gtccgtgtagtcatttattagctaattaagcatattccttgggcgcttactgtacccaagcgcagtgctaagggcaggtagagtcggtaacctgggtctgtccctgacctcaaggcactgcc

SEQ ID NO: 120633 - DNA, 122 bp, Homo sapiens
gaaacagcaacatcctcagaaatcttagagacacggctttgtaacccgggggagagacaccgcttccaaatataattgacgtggctttcctgccttaattcggggtatcctttttccaccac

SEQ ID NO: 120634 - DNA, 122 bp, Homo sapiens
tactatttcaacaatactagcactgcatgtcatccagtatacactgggaaaataaagtgccgcaagtgcatatccaggagactttgtggccaccagattatgaggaatgcatgtatttaatt

SEQ ID NO: 120635 - DNA, 122 bp, Homo sapiens
ccccccgcccctccggtcgcccccgccgcggcccccgccccctccccatccctccccgcgcgctctcccacatgaaaccttccatcacgctcagaaagaatgtgctacaacctcggcgctgc

SEQ ID NO: 120636 - DNA, 122 bp, Homo sapiens
ggagaaggtttccctaggagatgcacctgtctggcttccaggccgcgactgcgcaaactccggtcctgacactctagtctcaggtcccaactccggaagggttcaggcccaagcctgcacgt

SEQ ID NO: 120637 - DNA, 122 bp, Homo sapiens
gggggaggaaagaggcggcggcaccgatggggcgcggggctgaggggatctgatgggggccgggggcggcggcgctgcctgacggaggaagtgggggttgggggggctggggcggagcgagg

SEQ ID NO: 120638 - DNA, 122 bp, Homo sapiens
ggggatgtgaatgaacaaggggctgttcctgatctcgagctggggcagatccaagggctgcgtccagtcgggcgcctgacccacggcgggcacggagaacacctgccagtactgggcgatgg

SEQ ID NO: 120639 - DNA, 122 bp, Homo sapiens
atacctaggttgcaggaaagcgcagttaccaaatcgggcctctggagctcccaggaaacccgctgacagctccaggggcgcggggcaggcctcgctttcgaaagcagcgccacagcgttcct

SEQ ID NO: 120640 - DNA, 122 bp, Homo sapiens
ttgtttacacttttattttaaggtttgttctgtttctgattttgtttcgcactgaagttccgaatagacagatgtctattagaagaattgaaatgacatatcagagttttaatgccgtcgtt

SEQ ID NO: 120641 - DNA, 122 bp, Homo sapiens
tcgcgagggcccgcccctctccagccacgcccccaccgcaggccgcaggtggattggccacgccctcggaaggctccacccacactgcacacactatcgcgctgcgcgccaggtagctggag

SEQ ID NO: 120642 - DNA, 122 bp, Homo sapiens
gcagacggccgacccctgctgaatgacggtacgacggagctggtcacaagtgcagtgcaacgaccacccacgtggaaactgaatgcaaagatgagctctggaaagaagtcccggatctcatt

SEQ ID NO: 120643 - DNA, 122 bp, Homo sapiens
agggggcggcaggagggagcagcagccccagcagcagcgtcacccactgccatggggagccgggcggccccattccagccctggtgcctactgccagagaaagcggcactgggctgtcctta

SEQ ID NO: 120644 - DNA, 122 bp, Homo sapiens
ctaccgcaaccggccgctcgcaacagcttcagaggccggcggccgaggcttggcagtgcgcggcctcaacctgagagaagcccatccccaggcagatgagacattccagccccggggccagg

SEQ ID NO: 120645 - DNA, 122 bp, Homo sapiens
gagttttcctctcacacttgaccctgattttgttttgcagaagcgacaggctgtggacaccgtgagtaagagtcctggcaaaggggtctgtgacagagccctttttacaggcttgctttccc

SEQ ID NO: 120646 - DNA, 122 bp, Homo sapiens
cagcagcatgccgggagttgtaggcggtaactgctgcaaagccgaagccggcgcgcaaaccggctcccgaggcggcagctctgctgcaaccttttaatgggggaagagaggagactcagcta

SEQ ID NO: 120647 - DNA, 122 bp, Homo sapiens
gctatctacttggaggtaacctcagatcccacaggttgaggcttagtccccaagacagcccgcctcagacaccagtggcaagtccaggctctgaaacttctgactgactggctggctataaa

SEQ ID NO: 120648 - DNA, 122 bp, Homo sapiens
cagcctggacaatgtagcaaaaccccttctctactaaaaatacaaaaacaattagccaggcgtggtgtagagagtctatagctccagaggctgaagtgggagaatcacttgagcccaggagg

SEQ ID NO: 120649 - DNA, 122 bp, Homo sapiens
aattaaatgtgtgtaaacatgtaggtgaccttctagccctcggtgaaccagactaaaaaacgctcccgcactaggcgtggtgcccggagcggccccgccctcggagcacgcttgtgcgccaa

SEQ ID NO: 120650 - DNA, 122 bp, Homo sapiens
gccgccgccgcccgtccgccgcgctccctggcccgcgccgccgccgccgctgctcgaaggcgtcgtcctcgtccccgctctgttcgccgctgctctccgccgcctgagctggggcgcgaggt

SEQ ID NO: 120651 - DNA, 122 bp, Homo sapiens
acataaggcaatgtttgtaattgatttccacgaagatctagatgggttaaaggaacaaatcggaagatgtttggaggaagactctcaatagcattgtcatttaaaattaacactttgagtct

SEQ ID NO: 120652 - DNA, 122 bp, Homo sapiens
caagagcttgcttggctgcagattcaagggtccaggactcagaaaaaagtggtctgaggccgtctagaaataggcacagatacttccaggatgcatgtaacaataccaagttctctgagcag

SEQ ID NO: 120653 - DNA, 122 bp, Homo sapiens
tggacaaatgggaagttggtctcttctgaggagaatagaaaattagtgttagaaaaagaccgttgtggtgaagttcttaaaagtgaccagcatacctatatgttctgtgcaaaacaggttat

SEQ ID NO: 120654 - DNA, 122 bp, Homo sapiens
gcctataccttataaatatgctgaacaatgtcatctagtttttctaactccttgtcagagcgccgaaggttctcctctaggatatttctctagaaagcaaacagattttataagtcctatgc

SEQ ID NO: 120655 - DNA, 122 bp, Homo sapiens
gagtaggtggtggcaccgtgtccgggtgagagacctggaggtggggcctaggtgtctacccggccaggtgcgagaggttcatttgcatgctgttcccctccccccgcagcttgtaatccagg

SEQ ID NO: 120656 - DNA, 122 bp, Homo sapiens
agtcaaagccatcatttgctgctccctggacctctacaatagatccttaaatggtctcttcgccattacacagaccgccccaaattcggacagagtggaaatcagatcctgtcattaccccg

SEQ ID NO: 120657 - DNA, 122 bp, Homo sapiens
ctgagaaagaaagggggcagccccattcccagccatcctccccgcgctgcggactcgtcccgccctctcccgggccagcggccgaccgggcaccttgctcagcgcttctttcttctccttgt

SEQ ID NO: 120658 - DNA, 122 bp, Homo sapiens
agaactgctggccagcatgatggcgggcgtgaagtgccgcctggacagtagcctgccccccgtgcgacgcctgggcatgatcgtggcagaggtcgttagtgcccggatccaccccgaggggc

SEQ ID NO: 120659 - DNA, 122 bp, Homo sapiens
aagcctctgacgctcccctccccccatagctgaccaaggccagggccactgcgggagcaccgcgcgtccacgtgcacccagcatgcccggtcaccctttattacgtaagagtcccaggatgg

SEQ ID NO: 120660 - DNA, 122 bp, Homo sapiens
tggctgaagtagaaagcagataaagcccaggctcttctcattaaggactatctctgcctccgcagaccggccgggattgagtgactggggcggcagcacggggcatacattatgccagcaaa

SEQ ID NO: 120661 - DNA, 122 bp, Homo sapiens
cgacatcccgagcgcggcgcgtcccgccccttttacgattgtcccacgcgcggcgcgctccgcccccttttacgacagtcccgagagggcctggccgcctgccccgccctgccccgcgcccc

SEQ ID NO: 120662 - DNA, 122 bp, Homo sapiens
cagagaccactcccggcagcccgcgcgagctcaacaggctccgccgcggctcccgtcggccggctctccacaggcaaaaacgctctcgctgcgatacagcctaggcgccgccaacaaactag

SEQ ID NO: 120663 - DNA, 122 bp, Homo sapiens
gctgtaaatacagattaagcttccctggcttgccagagattcacttcttgctgtgtagcccggttcctaacaggccatgggctggtacccgtttgtggcccgggggctggggacaccttaca

SEQ ID NO: 120664 - DNA, 122 bp, Homo sapiens
gagtgcagtggtgcaatctctgctcactgcagcctccacctcccaggttcaaacgattctcgcgcctcaacctcctgcatagctgggagtacaggcacgcgccaccacaccctgctaatttt

SEQ ID NO: 120665 - DNA, 122 bp, Homo sapiens
tggcgaggtgggcggggcgggcaggcgagactaggtctttccctgtttggcctccgtagccggcgccggcgggtcgttctgtttgaatgaatgatcccagcagccgcgcccaatgggcgtcc

SEQ ID NO: 120666 - DNA, 122 bp, Homo sapiens
aggctggtatagtaggaagaaagctcaatcctaaagctcagtttggtgtttgtggcttagcggctggacgtccttagtgtgtcttggcttgtcgcctgtaaagtgatcagcatgacctggat

SEQ ID NO: 120667 - DNA, 122 bp, Homo sapiens
ccttcttgaattgggcgggggttaccatctccttcagctcgcccagatacttcttcagttcgtgtttctgggagagcgcgcgcctgatggtggtacggtcgttccgcacggtatgcctgagc

SEQ ID NO: 120668 - DNA, 122 bp, Homo sapiens
gcgggtgctgcccgcacagcctccgccctctgggcgctcctatccttcgcactccagacccgcagccccaacccaacacctgtgagctccagaagctgtctcccccgaccccgggccagcct

SEQ ID NO: 120669 - DNA, 122 bp, Homo sapiens
cccctctgcctatcccagctgtccaccacagccaggaggccaggcagccatgggtaatctcgccctgcccggtgcactggccatacggggtaagaggcctggcctcaggtcccctgcagcca

SEQ ID NO: 120670 - DNA, 122 bp, Homo sapiens
caggaaaaagggaatttgatgtgcgacagactcctcaagtgaatattaatccttttactccggattctttgttgcttcattcctcaggacagtgtcgtcgtagaaagagaacgtattggaat

SEQ ID NO: 120671 - DNA, 122 bp, Homo sapiens
ccggtatggaatttcttccccacagaaaaagtaagtgacaaccaactcactggcctggagcgcgtggacacctgccagtttctttggctctttgtgactgaaaataagatggaatggaacaa

SEQ ID NO: 120672 - DNA, 122 bp, Homo sapiens
cttctcaagtgccctcgctgcgcagccgcagggctggagcgagaccgccggccggaggcgcgtttctctgagttcacccaggaaccagacgcccgctggacgtcaactcggccggacgcggg

SEQ ID NO: 120673 - DNA, 122 bp, Homo sapiens
ggatttgagttggggaatcctgatgcaagttataattttgaatctcactcctctgagctgcgggcctgtgtttccagttgctttctaagtatcttcccttaatgttcagaaggcatctcaaa

SEQ ID NO: 120674 - DNA, 122 bp, Homo sapiens
gcgattgggcggcgtggcaggggtcacccactgctcttccggacgcaattttgaggaggtcggagcggaaggacgtcgtggagattgcttgcgctggggtgccacacttaggctgagctgca

SEQ ID NO: 120675 - DNA, 122 bp, Homo sapiens
ctcgagcatatccattaaggtcagaatttctgcagattgagctggagctatttttaggtacggttctaaagcagctgcaattcaagtgtcacagtgcatgcctttttggctcagcagttgat

SEQ ID NO: 120676 - DNA, 122 bp, Homo sapiens
gccacgcaccctggtgcccgcaagcagtgctggccgcgtacctgtctgggcacagggagacgtagagcaggagcagcggcccggcccccacgacggtggcgagggaggacctcatccaggag

SEQ ID NO: 120677 - DNA, 122 bp, Homo sapiens
gttggagttgttgtgtcccagccttcccaagcttccaggtgtcccagaaacccaggaaatcgagactcatgactcccagagaggatggcatctagaaggtgaggaatgctaatggtggaaga

SEQ ID NO: 120678 - DNA, 122 bp, Homo sapiens
ggacctcaggtgggaggccgggacagagcggccccctcgaggctggtacagccgggcccccgtgaccgcccggctaatcccctagagagaggcaaggcagcccagatcggcgggcacagggc

SEQ ID NO: 120679 - DNA, 122 bp, Homo sapiens
ggaagggcggctgggggtggggagacggcaggaatgttctcctggcctgctggtctgtgccggcgagtgtgctgagaggagggcctctggacatcaaaggttccttttgtccccttccgagt

SEQ ID NO: 120680 - DNA, 122 bp, Homo sapiens
ctccatgctcctcgccatgttactgtgccaggcctcacacaggagagcggatcccctctccgttctggagatccaggtgtctgcagggctgcgcccctctgaaggtgcagggaaggaatctg

SEQ ID NO: 120681 - DNA, 122 bp, Homo sapiens
tggcaccagaaagctcttaataatgtcgactcataggcgatacgattcagagtcagcggtcggcaggaaagttctggcactcgccctgcagtgcacggaaatcatgaggactcacgtgatgc

SEQ ID NO: 120682 - DNA, 122 bp, Homo sapiens
tctcttccgcagatgtacacgctgatcctggcacctttatgctcctcatatctagagaaccggcccctctcaagtgctttcccaaaaggtgttgggcttcagaaggggactctgtgagaccc

SEQ ID NO: 120683 - DNA, 122 bp, Homo sapiens
gtatgggaggaagtgtccaactctctgctctttgtagacattcctgcaaaaaaggtttgccggtgggattcattcaccaagcaagtacagcgagtgaccatgggtaaggatgaaggctggac

SEQ ID NO: 120684 - DNA, 122 bp, Homo sapiens
ccagctgggcccctggctcagggaggggccacgtcagtgctgccagagacgtcacaatgccggcccagccgttcggtgcgcgattggctgccgctgccacttacgcgtcgctcttcctcgtt

SEQ ID NO: 120685 - DNA, 122 bp, Homo sapiens
tggacagccgagtgtcatcggacttcctgagaaatacaaccggaagcaaattgcaaaccccgttacaaaatccgaatcattgagagaagggcagtaggggaggtccgcagacctgatggggt

SEQ ID NO: 120686 - DNA, 122 bp, Homo sapiens
aagctcagaccctggtctgaaacacagcattacctactgccttctctattttcatattcacgctacagcagattgcaaggcaagtcccaagaggagttccttcaacgttttaaatgatgttt

SEQ ID NO: 120687 - DNA, 122 bp, Homo sapiens
aaaatttttaggcaatatgtattgcccttgtctcctaaaatgaatgcgtatcgctgaatacgttgcagacctccacgttccattcaaagcgcctgccttgtggcagtgatgaaaacagacaa

SEQ ID NO: 120688 - DNA, 122 bp, Homo sapiens
tcctctaggaacccagcccgcatcctgggcaagaggcccacatgcaccttagaaagggcccgaaacagttcacgagtggggtgtgggctgtgggtccagacacagttatcctaaggccaggc

SEQ ID NO: 120689 - DNA, 122 bp, Homo sapiens
acttcaagtgatccaccctccttggcctcccaaagtgctgggattacaggcatgagctaccgtgcctggcctaagatgcttattttttaaacatgttagtagttactggtgccattccgacc

SEQ ID NO: 120690 - DNA, 122 bp, Homo sapiens
tgtcttgttgattagaagactatttgagtggaaagtggataacctggacctctggttcaccgtgcgcacaagtgtaacagttgtttttgtttaaagagtgaacggaatatttcatttatttt

SEQ ID NO: 120691 - DNA, 122 bp, Homo sapiens
cccacctgccccagagctgagaggaaagaagggaacaggattgagtgccaagtatgtgtccggttcacttccaggcctagaaagagttcaggaaaggagagagcacagcgtacatcgcaggc

SEQ ID NO: 120692 - DNA, 122 bp, Homo sapiens
taggcacagccctcagacttattccttggcctcaaggagctgacagtataatggggcagacgcacagtagagggatgtctaaagaaggcattcggatgaggcaccaagaagggagtgattat

SEQ ID NO: 120693 - DNA, 122 bp, Homo sapiens
tttttccaaaaatcaaaatttcaagtattattccagatgacatggcaaagctagcacaggcggaagccaaggtgcccctcaggctctgtagggtcttggaggaagggcccgggcagcatgag

SEQ ID NO: 120694 - DNA, 122 bp, Homo sapiens
gctccagggcccgggaaagctctcacccccgaacccggcgtggcccctccgcccccggcccgggaagccaagtccccgcaactgccctttccgcggccggaatggcctttcccgaccggccc

SEQ ID NO: 120695 - DNA, 122 bp, Homo sapiens
gcccattccatagaaaatccttgctatcttctttcccagtcatcttcttaattccccaggcgtcgtcttccacttcaattggaggtttcagaaaaagacgcgagggccgtgaaaaagaccag

SEQ ID NO: 120696 - DNA, 122 bp, Homo sapiens
agaggaggtaagaggagctgtttagatgcttatgtgaagaatctcttaaatccagtgactcgttggctttcagtgaatgagccctccttcagtggcctcttagaaaagtgctgttctgtccg

SEQ ID NO: 120697 - DNA, 122 bp, Homo sapiens
ctctggcccgcccctccgtgtcccttctggtcgccagtggacgccgacgtcatgacgtcgcgttccgtagggctcttcccgggctttggtgggtcacgtgaaccacttttcgcgcgaaacct

SEQ ID NO: 120698 - DNA, 122 bp, Homo sapiens
aggtggctgtatccaggtgtggcgtctccacccttggccttgcatggagaacccaggaagcgaagctacaagggcaaagcagaaggatggggatgtaggcagtgactgtgtccccctaaaat

SEQ ID NO: 120699 - DNA, 122 bp, Homo sapiens
tggccacgcccaccacggcatgcgtgcccctctgctctaggggccagctgatctcccaggcgtgcaggccccttgaatagcccctcttaccccgggccccatcagtgctctgggccacgggc

SEQ ID NO: 120700 - DNA, 122 bp, Homo sapiens
gccttcgacacacctgcagggtctcggcctctgctcccggcccgcgccgggcccaggccccgccctttgcggcccagcccagacccggaggcaccggagtcctctccccaccctagggcgta

SEQ ID NO: 120701 - DNA, 122 bp, Homo sapiens
catctccctgagactcttgagtagtcacgttacacatagggctggcttacttcttgtcctcggccactgtgctccctcccagctcagaggctacaagagggctggggggccagaagtcccgg

SEQ ID NO: 120702 - DNA, 122 bp, Homo sapiens
ttctttgcataatatctttgagtttcttccctgctgtgtctgttaatttttcattcctttcgattgctgagtggtattccattgtttggatgtaccactttttgtttaaccattaacccatt

SEQ ID NO: 120703 - DNA, 122 bp, Homo sapiens
cgtggcgcaggcgctggagcagaaccacagcctgaaggccatgcctctgccactgaacgacgtggcccaggcgcagcgcagccgcccggaactgacagcacgtgcagtccatcaggtgggcg

SEQ ID NO: 120704 - DNA, 122 bp, Homo sapiens
agctgtttgtcccccagctggctttttgcagtggaagaggcgcaaacagaatccgcagcacgtaggacagggagcctgaaatcccacgccgcacagcactcagtgtgtgcaggagctgaggg

SEQ ID NO: 120705 - DNA, 122 bp, Homo sapiens
aagatgacaacaaaattgactgcctacaagtatgggaattattttagctcacaaacatgacgcttcacaaaaaacaaattctgtttttcagatgtaacaaatagggatagaatacttaattc

SEQ ID NO: 120706 - DNA, 122 bp, Homo sapiens
gacgctgttgcgggcgggagaggaccgccgggcagggcccacgtggggatgcgggctggacggcgcccaaatgctccgcagggccaggctcccggcttgcacagctggctggtcttccgcct

SEQ ID NO: 120707 - DNA, 122 bp, Homo sapiens
gggggcgcgagctgccccaggtgagccgtggctcaggtccggagcgcggtcgggacacagcgcctctaggagaaagcctggaaggcgctccgggggtacccagagctcttagcgggccggca

SEQ ID NO: 120708 - DNA, 122 bp, Homo sapiens
tatcagtggcaaccactatttactttcaatcattctgcacctctttgaatcccgtcttgccgagttatgtttctacggttaagggagaaaacacacttttgatactcaggtggttgatccct

SEQ ID NO: 120709 - DNA, 122 bp, Homo sapiens
atttgtaaatactccatcttcactagccgcccctgtgagaggcactgagcccccatggtacgcagggttcgttgcgccctggtcgccagttggtgtggaagcctgatggtggtgactgggag

SEQ ID NO: 120710 - DNA, 122 bp, Homo sapiens
ccacccattccggcgggatcgctggccctgcagctcaggggagggtccgctgggctgtgccggtgccgtccacacactcttctcaggggccgtcttgttggagggcttgttgcagatgttca

SEQ ID NO: 120711 - DNA, 122 bp, Homo sapiens
ctgtgcttcctgcatgatgcactcttttagaccagtgattcccacatttgagcatgcattcgaatcacctggagtgcttgttgaagcatagattggtggattccatcaccagcatttctgat

SEQ ID NO: 120712 - DNA, 122 bp, Homo sapiens
tgcaacagggagatcagatacaagactggtaaccgaggtgtcagagttgagactcagtttcgcagattgcattggcaagtgaccaagtgggtggtgccacggttgacaaccctatttcttac

SEQ ID NO: 120713 - DNA, 122 bp, Homo sapiens
taggggtccgggccaggaaagcagaggggagcgggcccggccggtgcgactcacccggcccgctgcagtcagcgcacacctcgctgctccggagccgtttcgacatggctcccacctcccac

SEQ ID NO: 120714 - DNA, 122 bp, Homo sapiens
tgcccagggcagtggagagcaaagcccagctcacgcgccgccggtgcgctccaagtgccccggcggcggcaggagcagcagatccatcaccagccttctaggaaaatgggtctggggacctc

SEQ ID NO: 120715 - DNA, 122 bp, Homo sapiens
gcagacggcgaaaaccagaggtggttacagtcaagtttagggactgcaggagcgaattcccgaaggcttgcaggagccgcccggctctgcctccagcctttctctctgggcctagcgggact

SEQ ID NO: 120716 - DNA, 122 bp, Homo sapiens
cgtgccagcgcaaccttcagccaatcagcggccccgcgtggggagggcgtatgctctcggcgggctagagcgccgctgaaacccgctcctcgttctacttggaggacttgttccagccagcg

SEQ ID NO: 120717 - DNA, 122 bp, Homo sapiens
gaagatcccgcatgtggtcggggagcatggtgaggacccagccccaccccacggaggaggcggtgggacctaggcagggcgggcagggtctccggtgtgtcattcccacacccattgtgggc

SEQ ID NO: 120718 - DNA, 122 bp, Homo sapiens
aatcaggcccagctcccaattccctctccccagtcttctccaggtgtcccctcccatgagcgcacaggaaaaggaccacatggcctggcgagccctacacccactgctactgctgctgctgc

SEQ ID NO: 120719 - DNA, 122 bp, Homo sapiens
ccaaggagtgcagcccactgcctagcacagttaggctccccagaaacagctggtggctaacgaaccaagcaagccaaagaacaaaagaatgaccagggggtaggaggaagccagaaaggcga

SEQ ID NO: 120720 - DNA, 122 bp, Homo sapiens
ggtcattccttcgttcattttgggggtgtttcccaagagtgggtggcagagtcctccatccgacccttcccacctggggcagccatgtcggttggtggccaagcctccctgtgatggcagtg

SEQ ID NO: 120721 - DNA, 122 bp, Homo sapiens
ccagtccaggtgaaaacggagtcacgatacagggcaacagcgccacctcacggccggccccgtagcagcggcctccattggcgcctaaaaatggtcaggattcacattcaggtggattattc

SEQ ID NO: 120722 - DNA, 122 bp, Homo sapiens
gcccttcccggaggtcagcctgtcccaagagcgctcagacgcctccaacgcggatggccccggtttccatagccttgagccctgggcccagctggaggcctctgacatccacacggctgctg

SEQ ID NO: 120723 - DNA, 122 bp, Homo sapiens
ttccaccctgcccctagtctagtcttacatattgtacttggctgtttcatacttcagcagcgaatagctcgatgccttgctctctcagagcctggtgtatccacttggtcatttccccttcc

SEQ ID NO: 120724 - DNA, 122 bp, Homo sapiens
ggtccaaaaaactccttagaacatagttttacttgccttgggtcttcctgttcttggctgcgtcaggtaaaatttgagttcaacttggccccagaagctgtggtctcaccctggccacatgg

SEQ ID NO: 120725 - DNA, 122 bp, Homo sapiens
attaaatcaggattgggggaaacggtgacagtcttttcagcaagatgagaggccaccagccgggccagtgtcactggatttgagggagggccatttggccccttagttggaaaatatgcaga

SEQ ID NO: 120726 - DNA, 122 bp, Homo sapiens
gcaaaacctgccacacagtcgaacacgatgggcggggcggggggctgtaaaatgctgaggcgccccaagttgcccagatgcatgcaataaatgcaaggggctgcagcttgtcctggggccgc

SEQ ID NO: 120727 - DNA, 122 bp, Homo sapiens
gggcaagtccagctgtgtgtcagccacggccagggtggggcagcctgtccatctgggtgacgtcgcgccctgggacgggtagcgatggcgccaggggccgcccgcctcacgcccgccgtgcc

SEQ ID NO: 120728 - DNA, 122 bp, Homo sapiens
gccgcgaaggctatgctcgcgtgggagcgggtggtcgggcgggcctggcgcgggactgagcgttcgctccttgcccgcaggtggagctcttgcccgacagagacccggacagcgacgggacc

SEQ ID NO: 120729 - DNA, 122 bp, Homo sapiens
ggcctttctgctccagctgcccaaaggaaatgctctgctgcttttagccattttgcaacccgcatactgtccatttgcaagatagtggctgtggtttttccacacaaagtgaatgcaaatgg

SEQ ID NO: 120730 - DNA, 122 bp, Homo sapiens
ttcatggttggggcaggagagagggcggccagccactacactgagggggtgggggtcctccgggtcgtgggccccatcaggtgcctgctgcattgcctccatgaggctgctgatgaagaagt

SEQ ID NO: 120731 - DNA, 122 bp, Homo sapiens
cagcaaagctgcccttagacgagagctttcgcaccgctggcgcctcctgttgcgcgcgctcgatggagaagtggtcccgacgcgcgcgtcgactcttccagccttgagaggctagcggcgcg

SEQ ID NO: 120732 - DNA, 122 bp, Homo sapiens
gtgaagaaaattgtcacagaatgcagtctgactcagaagccaagctttcaaccactgttccgtactatgtcttttttgtgcgtgtctatgcttatgtttatatctacatatcactccatatt

SEQ ID NO: 120733 - DNA, 122 bp, Homo sapiens
agctgctgcccaaggaggcgcagatctgcgagaagcccaacctgaacgccatcaacatcacggcggccgacgctgacgtcgaccccaacatcggcccctacgtcttcgagctgccctttgtc

SEQ ID NO: 120734 - DNA, 122 bp, Homo sapiens
gacagccagagagggaccctggggagactccgcctcctacaaagctggttgggcctcagtcgcgtcatctggaaaatgggggtggcagggaacttcgccaattctctccacctccttcctgg

SEQ ID NO: 120735 - DNA, 122 bp, Homo sapiens
aagcgatccctacggccagaccccaactttgatgccctgatctctaagatctatcctagccgggaggaatacgaggcccatcaagaccgagtgcttatccgcctgagccgcctgcacaacca

SEQ ID NO: 120736 - DNA, 122 bp, Homo sapiens
actgtgttgatgttgtctgtatgtgtgtgtgtgtttcccccagaagactctgaagcttctcgagggcagggactgggttggattaatttctgaagttcagaacccagcctagggacagccat

SEQ ID NO: 120737 - DNA, 122 bp, Homo sapiens
tattactgtctcacttcccaacatctttggtggcccataagaggtgggagaggctgtggccgagaggacactccccaatgcccaccttaccactgcccgccccaggcagtgaagtggggagg

SEQ ID NO: 120738 - DNA, 122 bp, Homo sapiens
cagcttggagagccagccccatcggggttccccgccgccggaagcggaaatagcaccgggcgccgccacagtagctgtaactgccaccgcgatgccgaaggcgcccaagcagcagccgccgg

SEQ ID NO: 120739 - DNA, 122 bp, Homo sapiens
gaatacgttttcagttctaaaatcttctaatggatatgtcaattttaacagatttttccccgttaggtctaaatctctgctttggacggtagtgtgcggctggctgtcaggagcacgatcgc

SEQ ID NO: 120740 - DNA, 122 bp, Homo sapiens
agagggatgaggcgcagagggagtgggaggcccgtctgactgtcatgggcataaaggtgacgggggaggaaacccagagaaacttacagaacaacagtgaagggctggcagaggaagatggc

SEQ ID NO: 120741 - DNA, 122 bp, Homo sapiens
gaagagggtcaaagagtcctttcgctgagaagccacgggcaaaacgcacagttcagctaacgcaccagggattccggacagacccaccgggagaggcggggaagcgtggagggaaccacaga

SEQ ID NO: 120742 - DNA, 122 bp, Homo sapiens
cgcgcacccgcccccccgtcaatcagaagctgtcaccctcccccccggccaaccccctgtcgtccgtcaatcagcctctgattgagggaatgaacacgtggcctctatgctgcctaatcttg

SEQ ID NO: 120743 - DNA, 122 bp, Homo sapiens
ctttattggtcacttcccaagcaacttcaaagagcagtaactcctccacaggaagttcttcgacttcccactggggaagcccacccagggatgttacagagagggatcggcctcgaagcatt

SEQ ID NO: 120744 - DNA, 122 bp, Homo sapiens
tctgacatctatgggaccccactcctaccctgcgcctcaggggccgggacaaccgtgacccgtaccgactcctcgcgcctccgggatcaacctcagacccctgtgggctcccggggaagacg

SEQ ID NO: 120745 - DNA, 122 bp, Homo sapiens
ttcggacgctttgaaacagtttaaacagttggaacaaacacacccggagccccggaaaggcgttggtgtaggagctgcgcctccctgatttggagttgcagaaccttgccctgcttttatct

SEQ ID NO: 120746 - DNA, 122 bp, Homo sapiens
atgcagcggtgagatctcggctcactgcagcctccatctccagggctcaagccattctcccgcctcagccacccgcgtagctggaccacaggcgcgcgccaccagatctcagttctctcaac

SEQ ID NO: 120747 - DNA, 122 bp, Homo sapiens
atttatagagcggcagcacgcaaagaacaggtattactactaccaccggcagtaccgccgcgtgccagacatcactgagtgcaaggaggaggacatcatgtgcatgtatgaagccgaaatgc

SEQ ID NO: 120748 - DNA, 122 bp, Homo sapiens
gggagaaataaggctgggcgctgggctccgactctttctgccgcgacacttgagtgggcgcgtggagccgagagagaccctcagagtcccatccccatcagaagaaactccgtcggtgatgc

SEQ ID NO: 120749 - DNA, 122 bp, Homo sapiens
tttaacaacagaaagattttctgcaaatagttaacctgacagccgacttttcatctgcaacgtgaaatactagaaaacagctattagaagcaatgaaacttccatgcatacagcaccaaaga

SEQ ID NO: 120750 - DNA, 122 bp, Homo sapiens
gaaagaaactgcaaacccctttggttctgtttccttgctttcaataatgaatcgagacagcgtgtgtgtggtgagggagtgacgagtttcaacgtgatgaaggagataaaacccgacggtgg

SEQ ID NO: 120751 - DNA, 122 bp, Homo sapiens
cccaacgaccctcattcctcagagctcgcggcgacccctggccccgcgagaccgcgagcccggcctgtgacccccgccccagccacccacatccctcagcgccgccagcgaccccggccccg

SEQ ID NO: 120752 - DNA, 122 bp, Homo sapiens
gggttttttttgtgtgtgtgtcattacagggcgccggagaaatttaatctacccagcgggcggttccggaaaggcgcctgccgtgtagtcaggctgtgaactggcagaagctcttgccgcca

SEQ ID NO: 120753 - DNA, 122 bp, Homo sapiens
cctgccacctcccatctcccacgatggctcgcgccaggacatggcgcactccaacccctacgtcaagatctgtctcctgccagaccagaagaactcaaagcagaccggggtcaaacgcaaga

SEQ ID NO: 120754 - DNA, 122 bp, Homo sapiens
ccgctggtgaaggtggagcgggtcttctgcccggagaaagcagaggaggggccacggaagcgtgagcctgcccctctggacaagtaccagccacctccgccgccaccacgagagggagggag

SEQ ID NO: 120755 - DNA, 122 bp, Homo sapiens
gcagacgttcgctactttgtctcacatttacaattctcggatttgcttcaaaacattgcccgaagagtgcctgggctgcagatgtagacaagattaaccatgaattgataaggtagaaacta

SEQ ID NO: 120756 - DNA, 122 bp, Homo sapiens
ctggagacgttctggccgatgctcctgacggccgggagagggcgcgcgcggactcagcggcggcccagcagcctccccaggacccaggcagtgctggcagccaggagtgcggttccgccccg

SEQ ID NO: 120757 - DNA, 122 bp, Homo sapiens
ccccaccacaatcccttggaaagaatgccagactggcccacgccaacaagtcatcccatacgaaatggcccagtgcccgccatctaatgtactgaatgccgtgggagctccaaagtcatgca

SEQ ID NO: 120758 - DNA, 122 bp, Homo sapiens
gcaacagagtccatgcttacaggccagccgaggcaggaaggcttcacccaggccgggtggcgtcccgctctgccctcggccggctccgtgcctgggccgtgtttgtgcatgcgttctctacc

SEQ ID NO: 120759 - DNA, 122 bp, Homo sapiens
ttttttccaagattttcccagttagtgtttccccttttcccaggggggttggatctaagtcgtggaggtactttagtagcattaagggagggtcatctgaatgttctggggtcatcaccttt

SEQ ID NO: 120760 - DNA, 122 bp, Homo sapiens
cctgttggccagagctggtgaatcacccggccccagcagcctgcgtcctttcccaattaccgtagctgtcagagctgactaaaaaaccagtagcagctggcaggaaatgggtaagaaaactg

SEQ ID NO: 120761 - DNA, 122 bp, Homo sapiens
tttcagatgtaatgcgtgactcagagagattgcataacttcttccaggcctcagtttcgacgtctgtcaaatgggagtacattttccctcagcgggaggatcgttttgagtccaggagtttg

SEQ ID NO: 120762 - DNA, 122 bp, Homo sapiens
gtatagtaaatgtctaaaatcttaaagggagcttgatcataactaagatcatcaccaatacggacttttttaaatgccagatttaaatacacagaatccaaactgcttttatcaaaagcatc

SEQ ID NO: 120763 - DNA, 122 bp, Homo sapiens
gctctgctccggccaccctgagccgaaggctgtttgggtgaatgcgtggggtttctccggcgatcgatccctttggactggcttccccactagcaacctgcgcgtccccaccagaaccagcc

SEQ ID NO: 120764 - DNA, 122 bp, Homo sapiens
gctctagtgcagacaattagcatgatttctccactctgggcacgtcccctttgtaccactcggagtttctctgcccgaacacaaccctgccaacttccctctgaatacacagagctctgtgt

SEQ ID NO: 120765 - DNA, 122 bp, Homo sapiens
agtagagataataatagtacctacctcacagggcagttgtaaggattaaatgaggtaacccgggtgtaacatttaaaacagtggcagagtacatacagggatctgaacaaatgttagctact

SEQ ID NO: 120766 - DNA, 122 bp, Homo sapiens
cggcacctcctgcattttcactcattgtggggaagggatgttcacactgccttggtttaccggactgccacgtgaaactccactatctgctaaagtaagctaagagcagagcagagaaaatc

SEQ ID NO: 120767 - DNA, 122 bp, Homo sapiens
cgcaatcaccgactgcggtcagcatcttccttagagcagcgccccgggccacttggatcccggtctcaatttactaagcgaacccagaggatgccccgagtcctggaccgcagagccgctcg

SEQ ID NO: 120768 - DNA, 122 bp, Homo sapiens
tcatcttcactcctgaaggagattagggtactaagtattagcacttgtgggaaataaccacgaaagatgcaatcttttgacttaagaggtttttttaagagtttaaaattgcaaataaaagt

SEQ ID NO: 120769 - DNA, 122 bp, Homo sapiens
cggtaacgtacctgtcgcaaaaacataactttttcttggctcttaagacagaagcccagtcggtaaacagtaaggctcgcggtgctagcattttcatcgcaaagtatcctacctgtcagcgt

SEQ ID NO: 120770 - DNA, 122 bp, Homo sapiens
cacaatgcacatgagcacacatgcacatacgtatacacacatgctcatgcagtgcacacacgcatacccgcacacgaacacacacgaacacatgcacacacgggcacacacacatgaacaca

SEQ ID NO: 120771 - DNA, 122 bp, Homo sapiens
aacccaaatttacaggccaaatcattgaagaatgacaagtctaacctctaattaccatggcgggtagagcggggaggagatggtgcactgtacacagagcaccaggaacccaagggaagtta

SEQ ID NO: 120772 - DNA, 122 bp, Homo sapiens
accgcgtgattgccagctcgtacggggggaacacacagtgtgaccgcgtgattgccagtgcgtacagggggaacacacagtgtgaccgcgtgattgccagtgcgtacagggggaacacacag

SEQ ID NO: 120773 - DNA, 122 bp, Homo sapiens
gttcaggtttttttctccctaaaactgagaacttgctaaataatttttgaaaagcataaacgtaatacaccctgggttacgatcgagggcagaagggaaggcatttccaaggctcctgctgt

SEQ ID NO: 120774 - DNA, 122 bp, Homo sapiens
gtggggattactccgaagagggaaatagctgcttcccactccgggaatttaagacaaaggcgaatatcactgctgcatcatgtcggctgctcctaattctgcccttacgctgtgctttgtaa

SEQ ID NO: 120775 - DNA, 122 bp, Homo sapiens
tctccctggctcttttcctcttcttctctacacttctctgtcatccctttatctgtctgtcgccttctcatgcactgtccatctgtcctcgcttctctgactgcctccactcctgtctctgt

SEQ ID NO: 120776 - DNA, 122 bp, Homo sapiens
aaagtcttccttgcctaacttgtccagtgtaacttttcttacattataatggttattatacggagaaagaagcatgggttctcctggttgtttcagctgtataactttagtcaatatccact

SEQ ID NO: 120777 - DNA, 122 bp, Homo sapiens
tacagcgtcagcaccatcgagccccgggaggacctgctgtcgccggtgcaggacgccgaccgcttttacaggggcattttagaaccagacaaacactgctccaccacccccgccggcaatag

SEQ ID NO: 120778 - DNA, 122 bp, Homo sapiens
ttaaagtaactcaagagcttggccaggactcaaggctggtgggtgctgctgggcactgtgcggaggaaggatgggaactggaaacagttggaaaactgggggcgctgagatccatggctgat

SEQ ID NO: 120779 - DNA, 122 bp, Homo sapiens
tttttggaggcggcggcccctgggttgggcatagacaccgcactgggcttcagcgaggcccgcataggctgagcctgcccctcagggatcatggggcttttggatggtgatgcggggtgttt

SEQ ID NO: 120780 - DNA, 122 bp, Homo sapiens
ctggtaagcattcccgacctttagacctgccttggcccatagctggccacgagcccataacgatcacttcccggctgggtgtttaccttcctgggccccatgggttgagccagggtggcagc

SEQ ID NO: 120781 - DNA, 122 bp, Homo sapiens
ggtgaccagtacctgtttgttgttccggaacttatttcctggtgctgctagatggtatgccggcaaccacgtccaactcatgccaatgacttttaaaaatgtcatctcaaatgccacatgtt

SEQ ID NO: 120782 - DNA, 122 bp, Homo sapiens
ttttcccaagcaaaaagctggccaaaagcgagcctgagggtagcatccctgcctcagacacgttattcagagggaaaattgcccctgggcccctaactcacttgccccaaatgtcctgggat

SEQ ID NO: 120783 - DNA, 122 bp, Homo sapiens
accgtcggactcagcagcactcagctggatccaaaccctccgaccctacagctcgggccgcgctgccccctccgctgtgtcccaagggaatggggaaaatcaccaggggatcagatctcatg

SEQ ID NO: 120784 - DNA, 122 bp, Homo sapiens
acagagtgaggctttcagtgagaaaccctggaatgtcccagctcctgttagcaacagtgccgaagtccacaccagcagtgtccaacaaagacccgacgagagccacgtgtgtgtcctccaat

SEQ ID NO: 120785 - DNA, 122 bp, Homo sapiens
aaatggcccagcgactgtatttcatctttctggtcccaagaggacgctggaatggagagtcgtgcgtgagtgtgtgcgcgcgcgtgagggtgtgtaagtaaaatgccaaaaattaaaccacc

SEQ ID NO: 120786 - DNA, 122 bp, Homo sapiens
aaacagctagtgtctgcctgccctccaattctaatcctgtagttctgcagctttcacgtgcgtaagaactggggaaggggcttttgctattacagagtcccaaattgctcccattctgattg

SEQ ID NO: 120787 - DNA, 122 bp, Homo sapiens
gcccggggccctcctgaactccaggtctggccagggtttgaccaccctgcacccagctctcgactcagctacggcccgtgtccccagtagccccactaagactcagaaccaacaggtgcccg

SEQ ID NO: 120788 - DNA, 122 bp, Homo sapiens
ggccacaggcagcagcccagagaaattcaggcgcctgcctgaattcagctgccaaatgcacggctctaacttgtatctgccacatttgttcaacagctaatgagagggtatcagaggagatt

SEQ ID NO: 120789 - DNA, 122 bp, Homo sapiens
gcccgaggctccgtgcagattccgggccccacagacaaccgcttcctccaggaagcctaccgtcaagcccccctccagggctcctgtgtcaggagctggctccagggagagtgcgaccctca

SEQ ID NO: 120790 - DNA, 122 bp, Homo sapiens
ccactgcaaccagttcatcctgggagctgctgcgggttcttccgggaatccgcgccactgcgcctgcgcgctgagaaatcagcctctcacttccggactacaagcccctgaatgcaatgggc

SEQ ID NO: 120791 - DNA, 122 bp, Homo sapiens
atttgcactatctccccgatagaggaaaatgcctggcacagttcacagtgactgaagctacgctgaatgaatgaatcctggtctaagtggtaaaatgagggcattttctttatgctaaaacc

SEQ ID NO: 120792 - DNA, 122 bp, Homo sapiens
ctgcgccctgtgggtgctgagaatcttccctggcctctacctacgaggtgccaggagagccgttcctcaaagtcatgacaaccaaaaaatatctcccaacattgccacctgtgccctgggag

SEQ ID NO: 120793 - DNA, 122 bp, Homo sapiens
aggctgaccctccagtgctgcccatgagaacactgaatttggggaatgcatgcccaggaacggaaggtgagggctgtgcagagggtgctgagagtggcagccattgggattaggagggatgg

SEQ ID NO: 120794 - DNA, 122 bp, Homo sapiens
ctgaggtcacggtagacaagaaaacaggcaccagttattgtccaagaacacaggaacagacgcaggagtccccaagtcagcagcgcctatccacgacatctgtgatcgatgagacttaccac

SEQ ID NO: 120795 - DNA, 122 bp, Homo sapiens
attcctcaatcacaggtggtgcaaatcctacctctaaatggtactgaatctgcctactttcggggcaacctcccttacctggaccacaactgcaccagcctcctttctccctcaggagcttc

SEQ ID NO: 120796 - DNA, 122 bp, Homo sapiens
gcctgtgactatagggaaaggcccagtgccatgtgacagggaggagatgcagccctcttgcggtataaactcaggcttgttgtagaggacagaagtaactagtgggctagtgggtctgaaag

SEQ ID NO: 120797 - DNA, 122 bp, Homo sapiens
aagggggcggggggcgcaccaccccttaaagggcccgcaccaggaatgaatggagccattcgaacaattctgcatcctatttttggaggaagtggaattagtatttcttggagagacggcgc

SEQ ID NO: 120798 - DNA, 122 bp, Homo sapiens
cctggtaagagaacctatgaccagtgctcactcacggagacctctgtgtgatgtagggcacggtgcgggtggccgctctgcgagtttcgcagtgaaagtgtccgccgcgaggccccgtgatt

SEQ ID NO: 120799 - DNA, 122 bp, Homo sapiens
gggagggtaattaacgagggattaatgagatttccaaagtcaacagaaaaatcgatgggccgcggagcccgagcggcggctgcgcagtcccgctgggggagggcgtcgcgggcatcggtctc

SEQ ID NO: 120800 - DNA, 122 bp, Homo sapiens
ctttccttttgcctaggagtctgggacctcagtctttttatccatgctcttgggctagtacggggtggtggttataggacacaggtcaaaatcaaccctaggggtctgtgacttcagtgaga

SEQ ID NO: 120801 - DNA, 122 bp, Homo sapiens
gcccggcactggccgcgaagcctcgatggccgctctcggccagtgtttctgtgtcatacacgagaggtttatctgcttttgcaacagttgagggaagatcttagagggaacggttagttccc

SEQ ID NO: 120802 - DNA, 122 bp, Homo sapiens
tttcaatgcatcacatctcattaattaaagacacttccctagttttggtttaaagggcagcggaagatgacaaagttcacaaaagtccctgctgagtgtcaaggagtaacatgaaaagaata

SEQ ID NO: 120803 - DNA, 122 bp, Homo sapiens
gaggtatcacagaccaggcaggagcccagccgactcacatgaagctgcatgcggcgtgcacgcctgacgggggctggcagagcccacctcgctcccctgcagatcctcccagaggctgtcaa

SEQ ID NO: 120804 - DNA, 122 bp, Homo sapiens
agatcactccaggccctttcctaccttaggggtctgcaccggccactggcctcactgaaacgctcttccccctgtctcctgagggctggggcctctgcaccctgaacatctctggacaagcg

SEQ ID NO: 120805 - DNA, 122 bp, Homo sapiens
ggattccagccattgctgcagctgctccacagcccttttcaggacccaaacaaccgcagccgctgttcccaggatggtgatccgtgtatatattgcatcttcctctggctctacagcggtaa

SEQ ID NO: 120806 - DNA, 122 bp, Homo sapiens
ctgacctcaccacccaccagggaggtgggtcttattctgggcatcgtgccaagttcttagcggggccctctagaatctctaaagcaaatcaggctgaagaggggaaaaccagcagggggagg

SEQ ID NO: 120807 - DNA, 122 bp, Homo sapiens
acatcaatttttatttcattcgctaacacaatgggccattcatatcatcacaaataagaccgtatcagcatttcagacttaagctctttacctctagggacctgttatcaaaacgtaaaact

SEQ ID NO: 120808 - DNA, 122 bp, Homo sapiens
caaagcttcctgaggcagttgaaacctcttcccttcttgttctttgggaaacagaaattccggatctcagcattcttttcctctcatactgcaggctcccagcctcaggccccaatctaatg

SEQ ID NO: 120809 - DNA, 122 bp, Homo sapiens
cgggggagggcttaggtgcagaagggcaggctggccgcggccggtttggtctggggaccacgggctggagcaggtgggcaagcgccgggacggtgtggggaagacacttggcagcttctcga

SEQ ID NO: 120810 - DNA, 122 bp, Homo sapiens
ttgagacagggtcttaccttgtcaccttgtcacctatactggagtgcagtggcacaaacacgattcactgcagcctcaacctccccgggcccaagccatcagtcttccacctcagcgtcccc

SEQ ID NO: 120811 - DNA, 122 bp, Homo sapiens
gccagttcctgtctgtagcccaggagctggggtgggagacttctcttgggtttgcgattacgttctcaccttggcaccaggaataccgaatacatcccttttctgccggttcagactggaaa

SEQ ID NO: 120812 - DNA, 122 bp, Homo sapiens
gagatagagtgatggcagtgaggagggtactacttaggtgggtggaaaaggcaactcaggcgatctcctctaaagaggagaaggagccaactctagaaagaacacggtggagagagctatag

SEQ ID NO: 120813 - DNA, 122 bp, Homo sapiens
gcccacctcacgtggctgctggactgatgcctttcttcgtgttttgcttccttctctgcacgcgtgtgctgcttcaatgtcatttggtcggcggttttcactagtgattccgtgtcctcggt

SEQ ID NO: 120814 - DNA, 122 bp, Homo sapiens
ttcattaaggggtgagttattgcggtgcgagccaaaggtcacttcaaaggcttatggctgcgcgctttagtctttagaagcgccgggaacgctttgtgtgaggctttcccgggtgtagttta

SEQ ID NO: 120815 - DNA, 122 bp, Homo sapiens
agaccctgagggaggactgaggaggcccccacccctcatataggacccaaaataatctagcgccgcccctgctgccagccctggaccaccagggggcagacttgtctggctgggccacccct

SEQ ID NO: 120816 - DNA, 122 bp, Homo sapiens
ctgccctgcaaactgctcgttccacattctcggggtggtggggtgggtggggtgcgggcacgccctcccgcggaggcctataagggtgcgggggggacggggcccaggaggggagtggagcc

SEQ ID NO: 120817 - DNA, 122 bp, Homo sapiens
cccagtaattatcatttactctttaacatccacacagtaagatgcagtacaaaatgtgaccgtctacaaccatacaaaagtcccaagtcaaaatgaataaactcacactccttctcctgtca

SEQ ID NO: 120818 - DNA, 122 bp, Homo sapiens
tgtgcactgagaggtcaggccaggcagcatggggtttgagcagaactcctgagcacctggcgggagtttgaaggcaggagcaaatcgagcaggggatggtgctagagggcaagttcattcca

SEQ ID NO: 120819 - DNA, 122 bp, Homo sapiens
ttgttccgtcgcggcgccactcatctgtaaggcagggatagtcacacttgccctgacaaccgcgtgggtcgtgaaacttgttattcactgagatagtgaataacaacgctacttggtccagc

SEQ ID NO: 120820 - DNA, 122 bp, Homo sapiens
aaatgtgaagtattcacttctctattagtcacaccttttacaccatagactccaaagaggcgttaagcacctggttttcctttggctcagaaaaaccaaccaccaaaaaccgccgtttttta

SEQ ID NO: 120821 - DNA, 122 bp, Homo sapiens
tccgagtagactgagtctgtggcgagctgcgggccgattcctggccagtgccatctcagccggagcaggcctcggggcctcagaagcaggcttttatctggcccgaggctcccagccgttca

SEQ ID NO: 120822 - DNA, 122 bp, Homo sapiens
cattccctaccctgacttcatgggacagttgcatatcaagagcagacttggatgagagaacgactgcagccagaatttgagagtgcacgctttcaaaagagtgttcttgccaattattctgg

SEQ ID NO: 120823 - DNA, 122 bp, Homo sapiens
tcctcttctggcgtcctgcctgcctggagggccagcttgggggaggtgcacctccggtgccgagtagccctctgcccctaccttctttaaacactgcctggctcctgaaacatctgccctgg

SEQ ID NO: 120824 - DNA, 122 bp, Homo sapiens
ctgtctcaggggatcggccctgctggcaggcagccccctgtgggaggtactggcagagttcggagctcctgcccacccagcacatgggtctgggtctccacaagctcacctttcttcatgag

SEQ ID NO: 120825 - DNA, 122 bp, Homo sapiens
taggaggaagcacgggcagtggaggggactgctggagggtcccatctgggaaagcaggcacggatgcggggacatttccgcccgtcaccctggcaaagcgctcgcagggctggagggacaga

SEQ ID NO: 120826 - DNA, 122 bp, Homo sapiens
tgctctctgcatacgacgggtgctaacactagcatcacagatgcagtgttattagtactacggaggttattatcagtgtggcgggtgttctaattgctttcctgacgctacatttctgttcc

SEQ ID NO: 120827 - DNA, 122 bp, Homo sapiens
gtgacctgcatgtttaagacatcaactacaggaccctccaggggcaccctctgggatacccgccccgcccccacgttgccctccacttctagccccccttctggggcccctttctccacctg

SEQ ID NO: 120828 - DNA, 122 bp, Homo sapiens
agcaggcctccggaatgactaatgccccaccgggacaggcctggctctggcctggctgcccgccagagagtccacagccactttccaaggacagcaagggcaagcgttcctgacaagattcc

SEQ ID NO: 120829 - DNA, 122 bp, Homo sapiens
tccctgtgccacagcactacatccagagtgaggataattatagaatttactgtaaagggtcgttatgaggcttgaatgaattcatgcaaataaaccccttagaatttatgtgccgggaacat

SEQ ID NO: 120830 - DNA, 122 bp, Homo sapiens
cttcgatcctctcctggccccgtggccggatcttctcctgggctggactcaaggcctgatcgtctcgtgagcctgacctctcctgggctggtccgggggcctgatcctcatgtcctgtctgc

SEQ ID NO: 120831 - DNA, 122 bp, Homo sapiens
ccgcccttggcctccccgcgaccacatgtgcctccacagcgacccctgttggcccgatcccggctccaaaacttgttcttgcgtcattcccaccattgagtgagctcaggccatgtgcccag

SEQ ID NO: 120832 - DNA, 122 bp, Homo sapiens
aaggtcctcgttgacctgaggcagcgccgtcgagatggaggagcagctccgtggttctgacgtccctgggggcttgggggtactggacagcaatgtggggtgggggctgaaggggggttgca

SEQ ID NO: 120833 - DNA, 122 bp, Homo sapiens
aaaagtactttcgtttcccttctagacacctagaagtgaaatgactgggtcatattgatacggcagcagcaggcagtcctgagcggccgctgccatcgcgccggctgcagcggaaaggtaca

SEQ ID NO: 120834 - DNA, 122 bp, Homo sapiens
gagtgatggcaaaatgtctgtgtatccctgccccttgccttgtgactttacacctcccatcgagaggtggagtctattcccccagcccttgcatctggtctggcctagtgactttctttggc

SEQ ID NO: 120835 - DNA, 122 bp, Homo sapiens
gtgcccgccgtcctcacctggccagcgggacgcgcccgggaaccccgcacgcgggcgggccgcctctttgttagcaagtttgcctttctgtgattcagagcacgcggagcgaattaagtgga

SEQ ID NO: 120836 - DNA, 122 bp, Homo sapiens
ctgatggcgagaaacgctgcaggacccggctctggctcctcctcaaccttccctcgctgacgctaagatagcagcgtctccgaagagacagcagcacgagcccatttactgaattcaaccct

SEQ ID NO: 120837 - DNA, 122 bp, Homo sapiens
atgctgttaacccctctttactggagctggtgccaatcttggctcaagccaaaggggatacgaattcttaacctgagagtttcaggcactcatctcctgccagttcagcaagaccctagttc

SEQ ID NO: 120838 - DNA, 122 bp, Homo sapiens
tgctctgcccaggtctctgcatgggcctttgggtccggggtttgctggggttggcctgcgcggggtggggctcacctggagccatgtgctgctcccggcaggttctgcgagatggtgcagtt

SEQ ID NO: 120839 - DNA, 122 bp, Homo sapiens
cctgacttttggaatacagtggtaattatcaggttgtcgtggatgagatggaagtctgatcgcttgtgatgcttcagtgtactaccagaaatatgtcagtgagtttctttgaaggtattcat

SEQ ID NO: 120840 - DNA, 122 bp, Homo sapiens
tgcgcatccagctgtacttattgtgggcttcagctcccgtgggagccgcaggttcttgagcgggtcccaccacgggcccatccagcacctccctcagcatgtggctgccggctgccagcagg

SEQ ID NO: 120841 - DNA, 122 bp, Homo sapiens
ggcccctcacccttgatcttgtcctggagacccaagaaatccacaggatccaaaatgggccgggctcccggtaactgaatcatctcccgaagctccttgaaggtgggagcagggaatggggg

SEQ ID NO: 120842 - DNA, 122 bp, Homo sapiens
ttcacaaaagagagttgggccctcagggccgtgaagaccatgtgacactgtgctgttctgcgtcctattaaatccaaaaggggtcttttgtaaacctttctcctgtcgtcaccaggggaaac

SEQ ID NO: 120843 - DNA, 122 bp, Homo sapiens
gcagcaagatggcaaaactttcagaaatagctggaaaggaagaaaaagaattgaggttatcgagagcaggaaaattgaacaaggatctggtaacagcagcgtgtggcttggtatggacagca

SEQ ID NO: 120844 - DNA, 122 bp, Homo sapiens
ttcaaaactgtagaagagacagtcatcatgccacacaataatattagcttttcattcttccgtgtgcatttttactctgttttggtaaaaatattatcacgtgctcctggcttatctcatta

SEQ ID NO: 120845 - DNA, 122 bp, Homo sapiens
ggccttgcgcacccacactctccaaggcagggctcggtccgggggctggttttgccaaggcgaggggcgaggggcagcccaggcggccggatggataccaagagggcgcgtcagctccggcg

SEQ ID NO: 120846 - DNA, 122 bp, Homo sapiens
ttcggccccgccgcgcctcaaggcagcagccaccctggggaaggtggatgccggaagaggcgtcgcctgcgggtcacccagaggacacccggcggggaattccgagggtgggagtgaggaga

SEQ ID NO: 120847 - DNA, 122 bp, Homo sapiens
aacggggcacacctgccccgaggggggagccactccccaaattaacacacacacttactgcgcgtcagtcagagtcctagtgggtgttttggactctcacaaaataatctttaaaatctaga

SEQ ID NO: 120848 - DNA, 122 bp, Homo sapiens
catgccagaaatttaatctgtgtgtaaattaagatgtgccctcaaattaaactaaaaggacggtgacagtgttttctggccttacttacgatagtaaaaagcatgaaacaacctaaatattc

SEQ ID NO: 120849 - DNA, 122 bp, Homo sapiens
gagcccggccgagcccgggggcccagttcaccattgtctggccaacaggggcggggcgggcggcacggcgggctcgctcactggtcgggcggcgcgtccgtcgcgcccggcgcccacccccg

SEQ ID NO: 120850 - DNA, 122 bp, Homo sapiens
catccactcttaattttttgaaagcagtctgtagactctcctcctctccatccttggcttcggatttcattgtgcaagtttttacactacttatcgatgttcctgtttacactaaaaaagaa

SEQ ID NO: 120851 - DNA, 122 bp, Homo sapiens
cgtcggccgcctgctgccgcaggtgctgctgctcggccagatctgcttccagctcgctgacgtggcccttcagctgcagcacaacccgctggctctgtggggggactccggtcatgaggcca

SEQ ID NO: 120852 - DNA, 122 bp, Homo sapiens
gggcggtgggcgggagcggaggtcccaggccaggcacagcgtcctcctagcggcgcggagcgacctcaggctccaacacttcctttcggctccgggtcttgggccagctgccgcaggaccgg

SEQ ID NO: 120853 - DNA, 122 bp, Homo sapiens
gccaacaaaaagatcgagaagcagctgcagaaggacaagcaggtctaccgggccacgcaccgcctgctgctgctgggtaagggcgggcggggggcgccggccccggcccgggggccctcgaa

SEQ ID NO: 120854 - DNA, 122 bp, Homo sapiens
agccccctcccttgacattgcagggccagcacaagttcctgattttatcgaagggcctgccgctgggagatagtccccttggggtgacatcaccgccccaacccgtttgcataaatctcttg

SEQ ID NO: 120855 - DNA, 122 bp, Homo sapiens
gctgtattcccaggaatgatttactaagggacaggagttttattattaacccacagcaaccgcgtaggaaaggaaggcacttcctggagaatggagcgtgctgtgtatctactcacgtgtta

SEQ ID NO: 120856 - DNA, 122 bp, Homo sapiens
ctctcagtcggctggtggcggaatcccctccctctgcacctttcagaaagcggactcctgcggttaaactgccccccatgtaaagtgccagtagtatcccgaccagagaaagtgctttttca

SEQ ID NO: 120857 - DNA, 122 bp, Homo sapiens
gggatcttctgcttgctgcgtggcccgtggggctgtcactccgccctacccccgaaacagcggaagcagctgcctggagcttttgttctgtgctgctccttcagggaagaaagtggactttg

SEQ ID NO: 120858 - DNA, 122 bp, Homo sapiens
agtctcagagccggtgtaggatgtgccagtttggaaacccaccacagtccagggtctggccgtgcagcgtcccatccgccacccactagcccatctcgatctccactctcagagccctgatt

SEQ ID NO: 120859 - DNA, 122 bp, Homo sapiens
cgcgcggcgaggcccggggaggctgctgggacggcggcaggcaccctgctcctggaatggcgtttagacatgcaggtttctccatgatttaataggaaggaatgaaaggtgcagcgttttgc

SEQ ID NO: 120860 - DNA, 122 bp, Homo sapiens
ggctgatgtttcatctggtcagggaaccatccagcgcttagtacacctggcgctaatcggcggggattaatctcacaccccgcagctggcggaaagcagcgggaggaggcacctagccctgg

SEQ ID NO: 120861 - DNA, 122 bp, Homo sapiens
cccctggcccccaggactcccggctcgtggcccctgctcacctgcgggtctctgatctcccgtggcggggcactcctggtctcctgactcctgtccatccataaaaaccagctcctaaaccc

SEQ ID NO: 120862 - DNA, 122 bp, Homo sapiens
ggctgatgtggtcagcactgagcagctccgggcgggcctggccatgtggccagtgcggagcgtgtctgtgtcccacgccggctccggctgccccgtctctgtctcctgtgctccccacgcct

SEQ ID NO: 120863 - DNA, 122 bp, Homo sapiens
cccccaacactggggctcactggatgcgccaagaaatctcttttggaaaattaaaacttacgaacaacaaaggagcttcaaataacaatgggcaggtcagtggctcaagcgctcgtgttttc

SEQ ID NO: 120864 - DNA, 122 bp, Homo sapiens
ttctctgtctatacccacaccctagatgaactcctctagcccagtggctttaaacaccatcgtgatattgtgatacaataggaaatacatattttgtctttgtccctggttcctgacacaga

SEQ ID NO: 120865 - DNA, 122 bp, Homo sapiens
ttctgcttgttccacgtagcacaagtcagcaacacccgaacccccagagtccgccctccccgctcccaagctggaccccttacctggtgtggcgcccccagcgcccctgacctctgcgcccc

SEQ ID NO: 120866 - DNA, 122 bp, Homo sapiens
acgggcgcgagtgacagagcgaccttaacggattagcaccttaacggattagcaccttaacggattagcgtggcaaggtatgcaagcaagtcacctgctggcaatttgggggtggggagggg

SEQ ID NO: 120867 - DNA, 122 bp, Homo sapiens
tacaatgcttccttctccaccaagaaggactctaagatttcttatggttttgggactgtacgtccccgtttcttttgatttgccctactctaaccctctgaaaagcatgccagtttggataa

SEQ ID NO: 120868 - DNA, 122 bp, Homo sapiens
acgctcgggctcgcgggctgcgcagcctgggcagcgtccctctgctggggtctccagcgacgatagtgagccaacttcagggggctgttgggcatttactgggctgggtcctgtcctgctgc

SEQ ID NO: 120869 - DNA, 122 bp, Homo sapiens
ctctggatttcccctttactgaagaaaaatggggagacccagacaagggtcccgggactacgcttcccagccgcctccgcccggcgcccagtccaacttcccttacagggatggcccctggc

SEQ ID NO: 120870 - DNA, 122 bp, Homo sapiens
ctattttagcacgaaacaatgtttctttagccaaagccagagtgagtgggcagcaatggccgcgcgccctgctctgggtggtcccgaccccggggaagtccctgtgcagaacgggggctgcg

SEQ ID NO: 120871 - DNA, 122 bp, Homo sapiens
cgtaggccttgctgcaactcatcgcgccaccaacctggctcccgagatgcgtgagaccagcgctcagccccgcagcagtcgccaattccaagaggaaagcgcctgaaagccactgaggcagc

SEQ ID NO: 120872 - DNA, 122 bp, Homo sapiens
tgcgcgcgccacagaacctcttcctggtgtcgctggcctcggccgacatcctggtggccacgctggtcatgcccttctcgttggccaacgagctcatggcctactggtacttcgggcaggtg

SEQ ID NO: 120873 - DNA, 122 bp, Homo sapiens
tttttccttttctgcgtctgccaggtggggccctgagttcggagcacgtctggctctctgcggcatcctgcctgttatctctgtctggcaaacaaccactccgtgctcccagaacttcggag

SEQ ID NO: 120874 - DNA, 122 bp, Homo sapiens
tttctgtaggtttttacccaaggttttttttatccagagccaaataatgtacctggtcagcggggctccacagagtttctacaaagatgcaaactaagcaaagtaaagaatgttgatgcatt

SEQ ID NO: 120875 - DNA, 122 bp, Homo sapiens
ataagacaaggcttctgcattgaaattgttcaagaattgggttccaatttcccaggagcacggaaagcgttgccaggaaagcggagttgctggcgatttatgtcggtttttctgacataacg

SEQ ID NO: 120876 - DNA, 122 bp, Homo sapiens
gcctggaagacccgcctgtgtcgcgggccccctccctggctctggcctctaaagcgcccccggcacagcttcccggcccttgcagcccggtggggccggaaccttccccttgtcactgttgt

SEQ ID NO: 120877 - DNA, 122 bp, Homo sapiens
aagcttaagctcttagcacagggtgagcatgcttcccagcccatgcaaaaagatatgtggcggggcagagctgttattaaaattatagctgatgctccccctgcttttttggggagtgcata

SEQ ID NO: 120878 - DNA, 122 bp, Homo sapiens
aggagcgtccgctgagctcgggtgatcatgcacagattggggccagaagtcgagattctgcgcgtcctctcccgccaccccactcccggtcccctagagtggcccagactcaggctaaagtc

SEQ ID NO: 120879 - DNA, 122 bp, Homo sapiens
ggggcgcgcgggcagccgggctctccgtgcaaaatcgggtggaaggaaaaggagagcgggcgtagtgtttagtgcaggcacagtggccacagcgagcgatggatctctgactgatttcttcc

SEQ ID NO: 120880 - DNA, 122 bp, Homo sapiens
acattgtctgcaagggcgagcgagccgagcttactagaggcggctgcgctggaacaaaggcgcaaagtctccctgagaccaagcaattttgaaagagttggctagggagagggcctgggtct

SEQ ID NO: 120881 - DNA, 122 bp, Homo sapiens
ttcttcaatgagcagacaggagctacccaagcttcaatgtacgtaagaatgcatagtggccgccattttacaggttgaacttggagcttcaaagcagccttggataaaaccactgggccatt

SEQ ID NO: 120882 - DNA, 122 bp, Homo sapiens
tgtgactgtaacagacagaataatctgcacttgggtttctctgttgctttctagagcatccgctatagtaattctcacacctttccagtttctgcatggcagatagagcagcaccttgggta

SEQ ID NO: 120883 - DNA, 122 bp, Homo sapiens
aagatcgctgctaccagtgggcactcaaaacggggtgcccatgggtcccaggtacaagcccggccgaacgtatctgaagccccaggaaacacgtggcacaaattccgggagaaactgttagc

SEQ ID NO: 120884 - DNA, 122 bp, Homo sapiens
gtgactggataccagcctttcatcctaacaggggagacagctgaggggctccctccagtccggatcccgcccttctcagtgaccacagccaacgggacgatctccttcaccgagatggtgca

SEQ ID NO: 120885 - DNA, 122 bp, Homo sapiens
gacccatggtcagtggctgggggtgctgcccagaggctgggattcccttccagcaggagccgcagtggggctgagtgtgaggcaggctggctgaccactgtttccatggaccctgcgtccaa

SEQ ID NO: 120886 - DNA, 122 bp, Homo sapiens
gttcatatagggtcctgtctgggctgtggtcagagggacatgtggctttggaagaacggtcggagagaagcaacattgctggctctgatggaggaaggaagccgaggaatgccgccagcctc

SEQ ID NO: 120887 - DNA, 122 bp, Homo sapiens
cgagttccttatgtttccttgagctaaaaatatgtaaataatttttgtcccagtgagaaccgagggttagaaaacctcgatgcctctgagcctcgggaccgctctagggaagtacctgcttt

SEQ ID NO: 120888 - DNA, 122 bp, Homo sapiens
gacaagtggtagtgtgtgtgcgcttggttgcgagacaccatgtgcacaaacctggaggcacggtcgtcttgtgagagtgtggaggtcagcttggctcattagaaaccagggccatggccagg

SEQ ID NO: 120889 - DNA, 122 bp, Homo sapiens
agttgacggtggtaatggctgcagaagtctgtattagaaaccactgaatcatacacttcccgtgggtgaattacatggtatgtgaattgtacctcagtaaagctatgtttaagaaacagaag

SEQ ID NO: 120890 - DNA, 122 bp, Homo sapiens
gatcaagaccgacttcccaaaattccctcactgaatttacatagtaaatagtgatgagaccggaaccgctaacgtacgatgggcctaccacaattctataatgtaacctattattgtctcta

SEQ ID NO: 120891 - DNA, 122 bp, Homo sapiens
gaagtccggatgtagcagcttgaatttactggcagaggcttctggtccaaaataggcgtgcggcctaggacccatgatagaagtggacagagcgcccagagccgtcgtattgcaagggggag

SEQ ID NO: 120892 - DNA, 122 bp, Homo sapiens
tacctggctagcaaagaagtgcccgataattctgacgatcacttcctcattttcatctggcgtttggtcacgaggcacgatgacttctgcactggttaagttctgcagttcgttcacctgtg

SEQ ID NO: 120893 - DNA, 122 bp, Homo sapiens
gacccgccatgccacggttaaacggcccagatcatttttctttttcaagatttatctgctcgtgccaagctggggaccgggttgaggtagggcaagtccctgtccacctgcctgccagtcaa

SEQ ID NO: 120894 - DNA, 122 bp, Homo sapiens
tcctccgtagtcctgcaaagccaggttcctctggcagtcccagccggacccggcgtcttccgaatacagttacaaacctcgggttgtgcggtcgtatgcgcctcctcacgcctatccaagcc

SEQ ID NO: 120895 - DNA, 122 bp, Homo sapiens
ccgtttttcatgccatccttttgactgaaggctcttctctgcagcctgatatgaggtccccgtacccaggtccgccgagcgcctggagaaagcgccccgtgctgccctctagcgggggatgg

SEQ ID NO: 120896 - DNA, 122 bp, Homo sapiens
acacatcacacacgcactgaggtgtgagctgtggttatttctggcagattgttacttcttcgtttttcttgtctgtattttccacaaaaacatctattgcttgtgtaataataaaaagatac

SEQ ID NO: 120897 - DNA, 122 bp, Homo sapiens
tatttaactatgctgaatatttgacacccagtctctgtaggaaattgtgatttttatcagcgaagaggcaattaaatgctgtcatttggcacgtccatccatcagggatcttatcacccaag

SEQ ID NO: 120898 - DNA, 122 bp, Homo sapiens
tcgagtccagggggctaacaccaccgggctgaatcgtgtggagggcggatggcgggaaggcggaaggagcaggagatggaaaagatggtgccaaactgcggctttcagaagtgcgtcactga

SEQ ID NO: 120899 - DNA, 122 bp, Homo sapiens
gtctttgacaacttgaccagagggtccaaacaaaacagaaccgaaccgcatcaacatctacgactggggagatgatgtgagattccacagcagccccagccagccgaggccccagtgcttct

SEQ ID NO: 120900 - DNA, 122 bp, Homo sapiens
agagaagcggcccccaccccatcggagcgtcccagctccacgcgcgcgcctggcagggggcgcccttccccgccgcgcgtgccgggcagggtcccccaaggagaaatccctcttaaaagagt

SEQ ID NO: 120901 - DNA, 122 bp, Homo sapiens
gcatccattgcaataaatccttggttaaggtggttctagaaactgatgggacaatgtgagcgattccaaagctattttgcttttgctttgccggcaggtatgtatgggtttcctgtgatcct

SEQ ID NO: 120902 - DNA, 122 bp, Homo sapiens
aaagtgggggagtgaaataaaaactaaagccctagttaaatcctagcattatggtcaaatcgattttggagacaggtcggtccgctaaaacaaagtaacagtagaccggctgcaagctgctt

SEQ ID NO: 120903 - DNA, 122 bp, Homo sapiens
ctgattcacaataggcgctcaataaaacattattgtcctgaattaaattcccggggaaggcgcgccctcggggacttgggtacttcaggccccgcccaccactcccctggggttccaggcca

SEQ ID NO: 120904 - DNA, 122 bp, Homo sapiens
cccagatgccagggtagacataccagtgccaggatgctgtcagcatgtttctccagggcacggggctgatagtacgtatcctgccaaaacagatggcctccttaaggaccctgcccactggc

SEQ ID NO: 120905 - DNA, 122 bp, Homo sapiens
ctaccttttgtaacttctagctattgcaccttccttttcatctagaggaatgtttcctcccgagtgtatgtgccgcaaagtgctagttctgaagatgtcaataagtgttatgtagaaaaaaa

SEQ ID NO: 120906 - DNA, 122 bp, Homo sapiens
ccgcctagatctgggccgctggggccaggggtgcggtggggcgatggtctgtgacccctgcgcggctcagagcctaggggacaggggcaggagcggaaagcgcgggcctgattaccggacgt

SEQ ID NO: 120907 - DNA, 122 bp, Homo sapiens
tgaggataccaacattttttatggccccgtaaaaaaggagcagcccaagaaaagtgcaaacgaaggcaagttcagaaatcaggtagagagactcatattgaagacaagggaggagagtttca

SEQ ID NO: 120908 - DNA, 122 bp, Homo sapiens
gagcctgccggctgctgggagaggccgccgaagggcgggggcggtcaaggcagggtcccacggtgctgccattcgcccgggtctggcgcgggggggcgagagaagctgcgcgcagagggacg

SEQ ID NO: 120909 - DNA, 122 bp, Homo sapiens
acaccatgtactcttcacaggcaggtgtcttctggtggacccaactctgttggtacttgtcgtctccaaaaagtccccaaatgcgctagaggccagccagcccggtatccgagaggtaagag

SEQ ID NO: 120910 - DNA, 122 bp, Homo sapiens
ggtgggcctggtgcggtagctcatgcctgtaatcccagcactttgggaggctgaggtgggcggatcacttgagctctgaagttggagaccacctgcaccatctgtggaaaccccgtctacag

SEQ ID NO: 120911 - DNA, 122 bp, Homo sapiens
agatatcttcactgtgaaataactaaataaatgcccactcagtacagtaagtattgatatcgtcctatagcatttggctagaaagtggtgtcaatagggtttttccttcagactttgcaata

SEQ ID NO: 120912 - DNA, 122 bp, Homo sapiens
taggaccctccgagccaggtgccggatataatctcctggtgcgctgttttttaagcccgtcggaaaagcgcagtattagggtgggagtgacctgattttccaggtgccgtctgtcaccactt

SEQ ID NO: 120913 - DNA, 122 bp, Homo sapiens
tcgcacagacacgaaaaataaaaactttaatggtgcccaactctctcccagcccccttgccggccgtgcggcccggccggtctccgattcgactgcaaagtgtccagggccgccgccagctc

SEQ ID NO: 120914 - DNA, 122 bp, Homo sapiens
gaaaaactgtggttctcatgttagcaaatttgggacgaaatccgtatgcagaaaaagcgccgggccgcccgcaatccacccactccatgacccttttttaggacaaaatccctgggcgctgg

SEQ ID NO: 120915 - DNA, 122 bp, Homo sapiens
tttcgccggccgggggcggactgggaagccggcagaaatggaacgatttttaccgcggtgcgacgtgtcggctttgcacttggcggtggttcaggagccagttctgcagagctgggtgggga

SEQ ID NO: 120916 - DNA, 122 bp, Homo sapiens
tctaggacgtgtcaggacggcagtcagctccagacccacgtagtcaccaccaaccctgaccgtgtgaagtacaaaggtaaattccggctctacctcagggatgggctcaaacttcaaatcct

SEQ ID NO: 120917 - DNA, 122 bp, Homo sapiens
ccatgcctgagcctcccacccctccctgggctcttgtgcggccggagcctccccaatgagcgccacccactgcgccacggcgcccagtcccatcgaccacccaggggctgaggagtgcaggc

SEQ ID NO: 120918 - DNA, 122 bp, Homo sapiens
gaggtgtcgacgtcttggtaacccttctttatcaggaacacccatctgtgggaagggggccggtacgtgggcatcagccactctgctggcttcggggagcttccccaggccttggggtgggg

SEQ ID NO: 120919 - DNA, 122 bp, Homo sapiens
atagtttcgattgtgagccccgtcaccttccccccattcccgtccccgaatcttcgagcccgctttccagggaccctacctgagggcccacaggtgaagccacttagtgcctgatctgtgtc

SEQ ID NO: 120920 - DNA, 122 bp, Homo sapiens
gaggaagcagaagccagaggcacgcggcctgtgcgcttcgaagcgtggggcagtgtcagtcgcggtggggaaacgggcggcgtgaccaaggcaggagtgagggaacacagggggctgtgtga

SEQ ID NO: 120921 - DNA, 122 bp, Homo sapiens
caggggtctcaccccttcccttcattcagccttagctaaatgtcacctttaaagagagaccgagatcacgtgccactgcactccagcctgggtgacagagcgagactccgtctcaaaaaaaa

SEQ ID NO: 120922 - DNA, 122 bp, Homo sapiens
ggtctagagaaatgagaggagcccaagccaggggccagctccgagaaagggtaacctccacgcttctctctcccaaattggaaatgaagacaggttttcaaaggcacaggctccccctgcca

SEQ ID NO: 120923 - DNA, 122 bp, Homo sapiens
cagctcctccaggtacttcttctctcgctccttgatggtgttctccagcactgtgatcatcgcgtttttctgctccagttctttcaacaactcagcattttcgttctctttcactttcagtt

SEQ ID NO: 120924 - DNA, 122 bp, Homo sapiens
ggagtagcccaaaggctgggaaatgctgataagaggttcagctgctcgtcgtattccctccgatgatcttgtttctacactattttccttccagaaacactggagggggatgggccataaat

SEQ ID NO: 120925 - DNA, 122 bp, Homo sapiens
gcttggagcggtcagcgccccaaaaaaccacgaggaaaacagacgcgacacgactgggggcgtaggcgttgcagttctccagctggcctcacccgatactatgtttctcccattcactcctt

SEQ ID NO: 120926 - DNA, 122 bp, Homo sapiens
tcgccacaaccaccaccgccgccgccgccgccgccgccgcccgcaacccgcctctccctacgggtcccgactgggcaccacttccggtccgacacggccacgtgttacatctaaatggcacc

SEQ ID NO: 120927 - DNA, 122 bp, Homo sapiens
ctttaaagcgcccttccaacctgtgagccctgcattccttacccttggttggattcttcccgggctgggagaaatgaccgcttctatgaggagaccatgtgccgaggtcgtgtgctaggaag

SEQ ID NO: 120928 - DNA, 122 bp, Homo sapiens
ggtctggagtccttgttagtgcatttagtgctggtgagaagggtgggccccagtcttggacgctgaagtcctctaaagacaaggcagagacacagcctcagatcccccgtcatcttccactg

SEQ ID NO: 120929 - DNA, 122 bp, Homo sapiens
taaagccgattcccccaataaagggtgccaaggcttttctgaagccctgcttccggctggcgactttgaagctgagacgcaggttcacgcgcagtttccgaagacctattccgtccccaccc

SEQ ID NO: 120930 - DNA, 122 bp, Homo sapiens
ctcttttcctttcccggaacaatgagcagctcccagaacatgctctgacaggcagcaccgcgtggccgtgtctcccgcctgtcagagctgctcccctcgagacaccaacgaggcacagccca

SEQ ID NO: 120931 - DNA, 122 bp, Homo sapiens
gtcttgtatcgtctgctctggcttacagaggacagacactcctgagccccttgacagcaccggtgcccccggccagcccattccttgttgataccaggttgcattcccctgggccctcctgt

SEQ ID NO: 120932 - DNA, 122 bp, Homo sapiens
gggcatctgtgaggatggctggctttagcctgtagcctcccctcacctgtggtcgctgtccgtggagggtgtctgtccatggtcacctgcaggccgggggaccaggtctgggatgcccttta

SEQ ID NO: 120933 - DNA, 122 bp, Homo sapiens
tgagagatcctgcggaagccaccaagccagcttgctctgtctccagacagcaattttaggcgagtctctacttgggcctttccaagagactcccttttccaggcactgcacagctgccgctg

SEQ ID NO: 120934 - DNA, 122 bp, Homo sapiens
tcgtatcctacaaaccagaggaaggcgtctcacctgccagcggtggcaccatttcttccacggttgagttatgtggtgtgagcaaccaaggttatcgctggatctgcaagagtttggccact

SEQ ID NO: 120935 - DNA, 122 bp, Homo sapiens
aggacttattttttctttagcaacgtttcctggttttcctcatattaattttatacatttcgtgctgagtaaattaattaatcaactcactcaacaactctttgtccgaggctcagagtgta

SEQ ID NO: 120936 - DNA, 122 bp, Homo sapiens
gcctgccgctatttatagtgcagccagtccgctaaaaatacactgggcctgggcactgcccgccgggacatggcagcctggacgtggggctggggctgtgggcgctgctggcggggttgact

SEQ ID NO: 120937 - DNA, 122 bp, Homo sapiens
ctgcggctggggcccgggcgctacataaggggtcccggggcctctggctcccccaggcagcgccccacgcgcaactgcaccccgcgtgcccgagcgactttcgctttgctccccgaggcgcg

SEQ ID NO: 120938 - DNA, 122 bp, Homo sapiens
cccagtgccccacagtttggcactctgctcccagagtggtggcctgtaggccagctccgccgggggcgagtcagggcctggtgacggctccccatacaggctggcgtcctccgacccctcgt

SEQ ID NO: 120939 - DNA, 122 bp, Homo sapiens
cgggccccgcccctcccccgcacagagaaggaagcccgggcacacgttctccctgcctgccgctgacctgccctcccaaggcaaaacccgtcagtaatgaaagagacaggcatggactccgg

SEQ ID NO: 120940 - DNA, 122 bp, Homo sapiens
ttcaccccccaccatagagccggagacatggaaagcgtccagatatgtgctgttaggccacgtctacaaacctctgcggggtacacgtggccgtccactgtgtgctctgagcccccctcgtt

SEQ ID NO: 120941 - DNA, 122 bp, Homo sapiens
ttgcgcacacgccaggcagcgccgccgcagccccacggcgcgcaggccacgcccgtgccacgcccactctcacgcccctcctggcggccccgccccgcgcccccgctgccgcccgggagcac

SEQ ID NO: 120942 - DNA, 122 bp, Homo sapiens
tgcctgaatgagaaaaagactagacgtgcacacagtaatgtgtgagcagggaaacttcagcgaaggtttttatcatgctttaccccttttacatgctttaccccatgtgcaaacatttttca

SEQ ID NO: 120943 - DNA, 122 bp, Homo sapiens
gcccagctgctttgtcctcaatttgtttgggcctctaaagagctcacgtttatcaaaggccgtttcgcacctgaggccccgagttactgctgcctggaacacagggctttagtaatccgctc

SEQ ID NO: 120944 - DNA, 122 bp, Homo sapiens
ctgtctttccgccagtgttggggacacgatctgggggtccttcctccttcgcatgaaccccgtggctattttatcccctcggtttccaagccctcccttccagcaagctgcccagctgcccc

SEQ ID NO: 120945 - DNA, 122 bp, Homo sapiens
gtgttccaggagttagacaacagtttggatcctagcccagccactaactagctatatcaccgctcagttacttagcctctcacttttctcatctgtcaaagagggctgataatagtacttac

SEQ ID NO: 120946 - DNA, 122 bp, Homo sapiens
tgccaaggtgagaagccctgcattacactaacaaagcacccaacgaccgcgatccacgagcggagttgacagaacccgagtgcaatcattacgtgtaactgggcgacaggcactatgtattc

SEQ ID NO: 120947 - DNA, 122 bp, Homo sapiens
agtgacaaagaaaaccacagctgacacaaagtgagtcctcttccataaggccaacaaggccgaagtagcataaattcaagagagattgagttgttttctttttgtagatacacagggtacag

SEQ ID NO: 120948 - DNA, 122 bp, Homo sapiens
aagtggcagcaacagaggggactagcagcgaatatgtaagtgtctgagcagtgaaggttacggaaaaggtccaggctaaggttttctcagtggatatgtgagtgtgtactgatggcaagtgg

SEQ ID NO: 120949 - DNA, 122 bp, Homo sapiens
ttactcaaaaagggccccttcttgtggatatttttaagagtacattttgccacgctgtctcgcgtggggcctctgcagcagctgagacgtttggcagtttcttcaagacttggagtaaaacc

SEQ ID NO: 120950 - DNA, 122 bp, Homo sapiens
cccagggactctggggctcccagaagacagggccctcccccagccatgccgggaatgctgcgtgacagcggatcaggaaatggggcagaagcccatgaaaccctcggagtcaggtcaccagg

SEQ ID NO: 120951 - DNA, 122 bp, Homo sapiens
agattgtgcctatgaatggcaattcattcaacctcttaaaaactctttactgagcacccacgatacactaggtactcttctgggtgctggaaatatagctgtgaagaagataaaatctcaac

SEQ ID NO: 120952 - DNA, 122 bp, Homo sapiens
cttaactatttctgggtctcctcttcccagtcataaatatctcttggagtgtaagctcctcggagcagagatcctgtttccgtatttcctgtacctagaacagtgccagatccgtagtagac

SEQ ID NO: 120953 - DNA, 122 bp, Homo sapiens
cggaggcagagaggaaggcggttctgagagcttcagagagcgatggaaagcgtaagtgctcgctctccccggcgggcggggttctggaatgggggtcagagaaggaggcctgccttgaaact

SEQ ID NO: 120954 - DNA, 122 bp, Homo sapiens
ttctctccaccagacgtaaggcccggcaagccaaggcgcgccgcatcgccccgcgccccgcgtcgggtcccatccggcccatcgtgcgctgccccacggttcggtaccacacgaaggtgcgc

SEQ ID NO: 120955 - DNA, 122 bp, Homo sapiens
gtctcccacctccagtggatacacagctgcgacctggacccggaccggagcctcttcgcgcggggatgaacataccctacgatggcgccagttacctcgtcctaaaccaggaactgctctct

SEQ ID NO: 120956 - DNA, 122 bp, Homo sapiens
ggctgtgaacctgcacaggcaacaagacaggattttggccaaacccgcttgacaggttttcgattctcccagccaggagcagaaaggaggcagagactgccctgagccgccaggcgggttct

SEQ ID NO: 120957 - DNA, 122 bp, Homo sapiens
ggactcggcccttggctgtggcgctcatctggccggtctcgtccacggagaactccgcgacgatgttgtcctgcagaaagaggccctcggggtccttcttggccatggcgtaccaggtccca

SEQ ID NO: 120958 - DNA, 122 bp, Homo sapiens
tgacatctgagccccacctgacttagaggatgtcagctatggatgatccgggtttccacacgcagcagttctcaagccaggtgactgcaccgccctaaagttccctccacttttggcaatgt

SEQ ID NO: 120959 - DNA, 122 bp, Homo sapiens
cgagcgaaaaaccagcaccgcccaacgaacgaccaaaccgctctgcgctccaagcccccgcgtcgcctccgtttttataggcacgcttcacgctgcgtctctgcgtcatagaacccttattt

SEQ ID NO: 120960 - DNA, 122 bp, Homo sapiens
ctcagcttcaccatggcgacggccgtgtggcgcagggaggaccccttacagcaaccacagcgtcgggaatccgaaagggaaaggaggtgcgcaggcgccacacacggcctttacggcaggag

SEQ ID NO: 120961 - DNA, 122 bp, Homo sapiens
ctcatggtcctcacaaggcccgggacatggatgagaccaggcttgcgtcctctgcctccccgccccactgtggctgtgccagcctccctgacaggggctcttccgtccacgtgcccctcctg

SEQ ID NO: 120962 - DNA, 122 bp, Homo sapiens
cgccaccccgaggttccagtggacatcaaaacctcggctccatcagaggctccaggactccgatcgggacagcgcggggggcgaggccagggtgagggcgcggcgaaggagagacgcacagc

SEQ ID NO: 120963 - DNA, 122 bp, Homo sapiens
cgcgctcctgcctcctggtgttctggaggcagcagacacatcaagtttgtcgaagttagtcgtggtggttgtggcctgatcctcagcaagaattccccagcagcaactccataggggcccaa

SEQ ID NO: 120964 - DNA, 122 bp, Homo sapiens
gtgagggcttttgtgtcgcttcactccctctccctgtgccaatacagcagaatagagttacgcttccgcacccaagtcaactgtgtttagcccataaacttcacagccagtgaaatatgaca

SEQ ID NO: 120965 - DNA, 122 bp, Homo sapiens
ctgcatcctggagatgtggcccgcgaggacaccgtggggttcggaggaggtgctgccaaccgggacgcagctgtctcggggatgctgggcagggcgtgtagagggggatgacagcccctgcc

SEQ ID NO: 120966 - DNA, 122 bp, Homo sapiens
cccagtcaatcggacaaccatagcctccaactgacctttctgacagctctgagactcctccggccacgactaggtgctgtcctggaggaaacggtggaggacggccgcacaaaaaccaatct

SEQ ID NO: 120967 - DNA, 122 bp, Homo sapiens
tctgcttggaactccttataccctttccagctttgttttcctccacagcatctatcatgacgtatgtaacatactattgatttattttgcttattgcttgcctttttccattacaaaggaag

SEQ ID NO: 120968 - DNA, 122 bp, Homo sapiens
tgattcgcaaacgtgtgcaaaactagcaatggcgatcaacgagacttgctttgcacctaacgggactaaagagacggagacacctctttcatcaggatagtttttgcgacccacaaccatgc

SEQ ID NO: 120969 - DNA, 122 bp, Homo sapiens
aggaggcagcgacgggtggcgggtcgacgggggaggcagacggcaagacggcggcggcagcggctgagcactcccagcgagagctggacacagtcaccttggagggtacggcagcccaggcc

SEQ ID NO: 120970 - DNA, 122 bp, Homo sapiens
accacacaggctggtagacggtgggacggagaagcacagacgcgccattctctgaaagtccgagcaggctgaggaagaacaaagccgtggagaggctggcgacttgcgggccagggctcagc

SEQ ID NO: 120971 - DNA, 122 bp, Homo sapiens
tattgtagaggttcgaagagtggatagtggtcaacacggatacatcgtttcctcccctcacggcatctgtctctcccactagacttttcctttaaaggcagtgacttatgaatattattcca

SEQ ID NO: 120972 - DNA, 122 bp, Homo sapiens
gacctctgggattcccggtgagaatcctgcagggcaggccccaggtggagggggcgaccccggtctccagggccgggggaggcagcgaggcccaaggacaggcggcggaggcgggaggcggc

SEQ ID NO: 120973 - DNA, 122 bp, Homo sapiens
gcggccgtggccttagcctcgtaaaaattaaaacctgtatgtttcagcgaataatgaaaacgcagtctggatgaaagaccccatgacgcttaatcaggcatccagtacactggctgtggccc

SEQ ID NO: 120974 - DNA, 122 bp, Homo sapiens
gacacagtggttaggaattttaactctggagtcacactgggttagaatccactaaccagccgtgtggccctggacaagtcacttaacctgcctcagcttcctcatctgcaaaacagacatga

SEQ ID NO: 120975 - DNA, 122 bp, Homo sapiens
taaccggagtggaggcgtagggacgtgcagatcccagaccatcttttttgagacagacaacgttggtcaaagggatgttttgtggccttataagttcccaccagacacccccaacacaaaca

SEQ ID NO: 120976 - DNA, 122 bp, Homo sapiens
actgactgaatgaatgaatgaatttcctctgggtccaggaaacactcccattatatctgccgttccattctagccctctggtccctcaggaaaggttagcctctttgttgctcagagcatga

SEQ ID NO: 120977 - DNA, 122 bp, Homo sapiens
catcgggttttttttggggctgcgtcagccagtggcatttagggcgatggggcgctccgccgcggagactcctgggaaagagagcgtctgaagagaaaggcacccggagggttcggggtcct

SEQ ID NO: 120978 - DNA, 122 bp, Homo sapiens
cacatacaggcacacgcgctgcctaggggaactcacagatcaagactgataaaaattacacggcaaggccctgggggcaattggaatcctttttctaatctcgggaaaattcgaaatagcat

SEQ ID NO: 120979 - DNA, 122 bp, Homo sapiens
tgttccaagactatgccagtctaaaaatttacaagtgctctcaaaggtagatcttgtaaacggagaatgaagtctacattaaaggcattagactttacaatggaagtctggactctcaccag

SEQ ID NO: 120980 - DNA, 122 bp, Homo sapiens
attttaataaaggactatttacaaaacaaagggaaccaaccaggaatagataaacactgccgtggtagcaatgagaggcatgttactaaccctaagtctaaggcgccaaggggggcacttag

SEQ ID NO: 120981 - DNA, 122 bp, Homo sapiens
tatgacaatggagtcaaccctcagaaggcctcatcctccactttggaaagtggaaccttacgtcaggagctggcagctgtgtgctacgtgagtcctaggttcgggggtctctgatttccaag

SEQ ID NO: 120982 - DNA, 122 bp, Homo sapiens
taaataaaggcagcatgtgagagaaagttcttggctcactagggcgagacctggagaagccgaaggtaagaacatgaagtgcagtacagtcacaagacaggtagtgactcattcatcccagc

SEQ ID NO: 120983 - DNA, 122 bp, Homo sapiens
tttgtgcccaattccaagagggaaaagagatgtaaaccatcgacgtttgagaggcgtgatcgcctgattcctgtgggaagtaaggggatatgaccaggcctccctaacccaccagtttcttc

SEQ ID NO: 120984 - DNA, 122 bp, Homo sapiens
gtgggagcaaaaccaacgcctggctcggagcagcagcctctgaggtgagggcgaggggcgcgggccggtgtgggccgcagagacgttggagccggcgggggctggggactggcctcggggcg

SEQ ID NO: 120985 - DNA, 122 bp, Homo sapiens
tcgcctatggggtgataagaaaatgatccggctgcagccaggctgttgagtgtgagggtccggggggagagctgacaattgaaacagagaacacaatttgcatacagtgacttgccaacatg

SEQ ID NO: 120986 - DNA, 122 bp, Homo sapiens
aggtgcctggccgtggcctttgtggcattcaggaggaagggcccggcctggctggccgcgcggtgtcagtgctgggccccctggtgctgacctgcagcctatgtgcaggtacgtgcagcact

SEQ ID NO: 120987 - DNA, 122 bp, Homo sapiens
cgccacatggctcctttttcctgggaagcgccagggggcagtgggaaccgccaccggggccgctgtagcgggccttaaaggatgggaaaccttgatcacagatgccccccgccggccttcct

SEQ ID NO: 120988 - DNA, 122 bp, Homo sapiens
atcacctcttaaaaagagaatgaggaaaaaaacctctaaaatccctgcagtcataccccccgaaaagccctaaaattgcaggcgatgaagggagaaaacggcttggagccatgagaatggtc

SEQ ID NO: 120989 - DNA, 122 bp, Homo sapiens
ctcctctcctccgggagggcttgcctcgccccggtccaggatctctgccttcggttgaagcgcagcgcccccagccgtccgcaggagggatcgacgcctctgtctccccgaagtgagggcgc

SEQ ID NO: 120990 - DNA, 122 bp, Homo sapiens
aggttttgctctcccgcggatcacgtcccagcctccagctcagcaccagacacttgagggcgcaggataaaatatctgcagtcagaaagcactaataaccacccaagggttggaggaaagct

SEQ ID NO: 120991 - DNA, 122 bp, Homo sapiens
agaaggtcgtgtgaagtctcagcaggcccaaaggtttccgagaaccaaggcggctggggtcgacatgcttacaggcaaagtttccacacgggccttcaacaagcagcgctcagcagggaggg

SEQ ID NO: 120992 - DNA, 122 bp, Homo sapiens
acctgcgcatccccttgggggtctctgccccagcatgatgctcgggagcttccctgcctccgggccttcgctcatgctgttcccctcaccagaagcgccctttgtgtcttcatgtccttgag

SEQ ID NO: 120993 - DNA, 122 bp, Homo sapiens
gatctccaaactaaagtccctcttcacaccatccccctgctcccctcagaccctcagcgccgcccgacagaccgtgacgggtccccatgtgatcatctgggcccccaagaaagccaggtact

SEQ ID NO: 120994 - DNA, 122 bp, Homo sapiens
cttcttctccttcactttctggtcaaaagacttggagacgaacgccgtaagttcttccatcgccgccgcacgtcagcccggcgctcaacctctgccagcagagccccgctctttttttcctt

SEQ ID NO: 120995 - DNA, 122 bp, Homo sapiens
caactgcagccgacgggccctggagaaagccctcctggatggaatgggcagctgcctcttcgaacggctgcctagcctaccccctatggctgctttctgcggaaatatgtttgtggagccgg

SEQ ID NO: 120996 - DNA, 122 bp, Homo sapiens
tgggctggtgaggctacacaaacaaggagcaattgaatcaattctagaagactgagtatgcgtaggatgagtaggaagaggtgaggcttaggacctctcgatccattgtttgtgtttggtag

SEQ ID NO: 120997 - DNA, 122 bp, Homo sapiens
atctgcactttaaccagctcgtaggtgatttggaagcacattagattgtaggagccagctcggtgtggagggcagaggtcagggtgtggagggcaggggtcagggtgtggagggcagaggtc

SEQ ID NO: 120998 - DNA, 122 bp, Homo sapiens
cagggctgcgtgacctttcccgagctgtggaggggcgccctactgggctgcatctgcagccggtgggcgggcgggcaggcgggtgggcggccaccctctgcttagtcggcccagcccaccca

SEQ ID NO: 120999 - DNA, 122 bp, Homo sapiens
aggacgcccgggaagaggtggcagctggccctgcggaaaagcggcagccgccgctgctgccgcctaagggaaatccctggaccaaaaagcctccccagcacctgtccccagacacgacaggt

SEQ ID NO: 121000 - DNA, 122 bp, Homo sapiens
gactaggttaacttagtaagaaactgcccaactgttttccaaagtggctgtgccactgtgcgttcccaccagcagtaaatgacagtgcctgttgcttcatatcgtcatcagcatttggtgtt

SEQ ID NO: 121001 - DNA, 122 bp, Homo sapiens
tgggaccaggtgtgtaagggtgcctggcacagttgggggaggctgctgtcacttctccaccgctgctgctgcagttacctttgatgttttagttttgttgtagttacaccattgctggcttt

SEQ ID NO: 121002 - DNA, 122 bp, Homo sapiens
gcctggagcccggagaggggcggtgagggggccccggaagcccccacttcgcccgcatctcgtccttcaggtttgaccgtgaaggccctggagagcccccaccagcgccagcccccgacctc

SEQ ID NO: 121003 - DNA, 122 bp, Homo sapiens
tgaccagaaagggggactttgggatccaggacccccaggcttttgagttttcctcctggacgaagagaggcctgggaagaggggtctgcaagggagcagggagggagggcaggatggctgac

SEQ ID NO: 121004 - DNA, 122 bp, Homo sapiens
ggacagagcccagtttcttcaggcggtggctccagccagctctgccccacagggaaggagcgcgcagctgccacacaccgcaggcagcgctgacagactcggccttccgggagcgcaggcgg

SEQ ID NO: 121005 - DNA, 122 bp, Homo sapiens
cggagcagcagtggggctgccgggccctagggggagcaaatggtcctcgtttctgagctgcgaggctctcccagagaataagccatttctccggggcactcctgggcctcgaaggtgtttgg

SEQ ID NO: 121006 - DNA, 122 bp, Homo sapiens
gaataactacattcaggtgtagtaatagtaacgcaaagctctgaacaccacgagacaattcgttgcttccgaaacgcagccggcagcaggtactcgagatgagtagtgtgagctcccgagca

SEQ ID NO: 121007 - DNA, 122 bp, Homo sapiens
aggtggaggagcgtgtctcaagattggggctacctgttctttcgtggggcagggaaggggcggacagcagcgcctattctggaggaactggactgagatgtgaccccgaagtgttaccgctt

SEQ ID NO: 121008 - DNA, 122 bp, Homo sapiens
ccgggacgcgcgtgttgccagtccagccctgcaccgcgtcccctgagggcgggctgcaggcggccgggaagccttgcacaaccggcccaaaagaggaagcccagaaagtgctgaagtaaaca

SEQ ID NO: 121009 - DNA, 122 bp, Homo sapiens
ccccgcctcggccccgctcccctcccacctccgcccccggctctgatttcttctcccgagcgagctccgcaggagacacaggcgctggctgccccgtccgctctccgcctccgccgcgccct

SEQ ID NO: 121010 - DNA, 122 bp, Homo sapiens
ttctccaaaaaggacttgacctgctcctcatcctggaagtccaccatgccggccatggttcgcgccggcccaaagacggtcacgtgagccggcggagggggcggggcggggcgtggggctga

SEQ ID NO: 121011 - DNA, 122 bp, Homo sapiens
ggccgacaaacaggggtgctgcgcctgcgcgtccccggcggcagcgggctgtcctctaagcgcctgtcttccggctcctctgcatgctgggatacggagtccttggttgcagccggggaaga

SEQ ID NO: 121012 - DNA, 122 bp, Homo sapiens
aaagaggcgactgtgcgggtaccagtcgcggaaggggtcccagctggggtcccgcaggagcgagaaggggacgcggcgctcggtcatgctggctggctctgctggggacgtctgcttggaca

SEQ ID NO: 121013 - DNA, 122 bp, Homo sapiens
gaagcaaccagggctaggagtggacgattctattcccacaggggaaggcctcctccatcccggttcctccaaaaccactttcaggggataaattcagccactgcttccgaacaggacccctc

SEQ ID NO: 121014 - DNA, 122 bp, Homo sapiens
ggagctgctggcgtggtcacgccgcgaccctgtgcgaattgaggcgaggtgatgagttagcgggttgccatggcaacaggctggccacgtgaccagggtgctgctgccggcgctctgacgtc

SEQ ID NO: 121015 - DNA, 122 bp, Homo sapiens
cacaggatgaaatttttgttgctcacttgaccaaaggtcaagcaggctctctgtgcccagcgctcaaagataagctcggaggagctcggagtgtcccagttgttgaataaggagagatttga

SEQ ID NO: 121016 - DNA, 122 bp, Homo sapiens
cagtgtacttcacagagctgtctagcccaggtccgaggccccagaatgccaggacccaaacgccacagcaataatctttatcctccttccagaacagcccctgccacccccatcccagcgct

SEQ ID NO: 121017 - DNA, 122 bp, Homo sapiens
acccaaatctcatctcaaattgtaatacccacgtgttgaaggaaggacctataaccttcacgtgtcaagggagggaagtgattggatgatgggggcggtttcccccatgctgttcttgtgat

SEQ ID NO: 121018 - DNA, 122 bp, Homo sapiens
cacttggagaagcctgtactgcgtcagaggatgagcactggccagggagtctggagaccccggtatgggacctgctgcttatttggtgatctcaggccagccgcttaacttctgcgtttcct

SEQ ID NO: 121019 - DNA, 122 bp, Homo sapiens
ctttgttacatgcatagattgcaatgtggtcaagtcagggcatttaggctatcaatcacccgaataatgtatattgtatgcattaactaatttcttatcaccccccccccttattctctcac

SEQ ID NO: 121020 - DNA, 122 bp, Homo sapiens
agcatctcagcccagctggcgtgaaagttcgtcaaaacccatggcggtatctcggccaatcggagctggccaatggatgagaggcagctatttcattcaatcacgtccttccgacatcccgc

SEQ ID NO: 121021 - DNA, 122 bp, Homo sapiens
aacggggcaggctgtgctctgcgtggtgtggccctgcgaagatatagggtccccgaggctcgacctggcacagggtgctgaccctgcacgcctcgaagcttctgaggcttaggaggcagagg

SEQ ID NO: 121022 - DNA, 122 bp, Homo sapiens
tgcgctccaagtacgaggcgctgcagaccttcgcgcgcaccgtggcccggggacctgtggcgccctccaaggtggccaccaccagcgtcatcaccatcgtcaagtccaccgagctctcctcc

SEQ ID NO: 121023 - DNA, 122 bp, Homo sapiens
ctccctgggagacagtgctttagggccagaggaaagatcttccctgaaggcaaacgcccgcggagcccacaagtccgggccgcactgaacaagtcaggatgttgccatcggcaattctgcag

SEQ ID NO: 121024 - DNA, 122 bp, Homo sapiens
ccgctaagatgcaaataccctaggacgcttatgtaaacttccccctcccgcaggtgcacgcgcgggccacgaaacgctgggagaatatgaaaggccacctcttaaagaaatcatctccactc

SEQ ID NO: 121025 - DNA, 122 bp, Homo sapiens
gaggttcagccttccgcccctcccaactcggggacccgaccacccagggacacccaagcgcggcctttacctcaggccgccagcaataagaacggttggtaggaaccgcggcttccgggtgg

SEQ ID NO: 121026 - DNA, 122 bp, Homo sapiens
cagcggctggttcagggacgtggctggggtgtggtcacctccggggttaagagcaaccgccgggcagaggctcagctccacacgcctcactcctatttccaaaatacctttccattcacaca

SEQ ID NO: 121027 - DNA, 122 bp, Homo sapiens
gccaatcctatcagggagcctagttctgtaaggacctctcctaccatcagccctatcctccggagaagagccacagttgaccttcttagtgagtgacacagacgcccctcttaccaggacat

SEQ ID NO: 121028 - DNA, 122 bp, Homo sapiens
gaaggaatacattcatatgtctaaagtcttgccagagctggcctgcctttccatgtgctccgagtggccttctaaggtagcacaatcttcagtaaatagactttgcaaaaactgcttttctg

SEQ ID NO: 121029 - DNA, 122 bp, Homo sapiens
tcacggcacagcccgcgcacggcttggcagcccagcgggacccagggagaaacaggggggcgagaagagaaacaggtgcgtgcaagtgtactcacaacttaatgacctttgtcgggggaagg

SEQ ID NO: 121030 - DNA, 122 bp, Homo sapiens
gcacctacccatagtccctgaggtccagggtgtgcagctccagctggggctccccaagcccggctggcgccccctgcgaggcaaagcggaccagcttgtgggcgccggacgccagcgggccc

SEQ ID NO: 121031 - DNA, 122 bp, Homo sapiens
tgccagtgtccgcttttaattttggtcgctaagggcaagcgcccgtgacaaacatggcggcggcagcctcaggcgcagtcacctgccggagctgcgcccgggggccgcgcggagccaatcgc

SEQ ID NO: 121032 - DNA, 122 bp, Homo sapiens
tatcacatatcaagtactacacttcagcctgtgtaagggtgacctaataattccatgagacgcttacgcctggcccatcctgcacctgaggacgcaggggctggggaatgagtgcagtcacg

SEQ ID NO: 121033 - DNA, 122 bp, Homo sapiens
acagaatctccaggtgactgtgtcacgggagggaaacagaatctccaggtgactgtgtcacgagagggtaacagaatctccaggtgaatgtgtcacgagaggcaggggcacgaaacctggag

SEQ ID NO: 121034 - DNA, 122 bp, Homo sapiens
cgcggcgcctccaaggccgggccgaggggccgaggggccgagggcgggcagacgcggccacggcctaattctgacttctgaaggtcaccgaaactgcgctgtttttccagagatgggttgaa

SEQ ID NO: 121035 - DNA, 122 bp, Homo sapiens
aaaaggcactgagcatgctcggtggggagggcggggcgctcgtgggctgcgagtcggggccggagctcttcaggccggctcccgcgcctccgccgcccgcccgctcggagccgcgcccgccg

SEQ ID NO: 121036 - DNA, 122 bp, Homo sapiens
aagacagtccaacctttgaggcggggagggcaaaagaggccaggagttctcatggcacctcgtgggcggatgtgccaggggcttaattgcctcattagcatctgcctgctgcctgggcctgt

SEQ ID NO: 121037 - DNA, 122 bp, Homo sapiens
cagggtcagctcactgctcggcatctagcctggtcagggcaggtccagaatagaactgctcgctgggccctcacacctcccctcagccccggggctcgctgggccctcaaacctccccgcag

SEQ ID NO: 121038 - DNA, 122 bp, Homo sapiens
cgccagtggggctgaggccgaggtgcccgtgtgctggtctgtgcacccgtgatgcaggtccgtggtgacctgagggcagaggggggtgggactcggggggccgtgcacagtgagaatacagc

SEQ ID NO: 121039 - DNA, 122 bp, Homo sapiens
cccaccgcgcctctccgccgagccgctcgggggcggcacctcgttcatcaaatcttcgcacgcaggaaacgatggccgacgctgtcgattctccagccaatcctggcactccttaactcatc

SEQ ID NO: 121040 - DNA, 122 bp, Homo sapiens
ttccgccacgcgagggagaacctgcactgggacggggtgcactggaatggacgtgtgcaccgctgcctctcccagctgctgctggcccacgtggccgacgcctggggtgtggagctgcccca

SEQ ID NO: 121041 - DNA, 122 bp, Homo sapiens
ggatgaggtgttgagggctgggcagtgacagctcaggaatcaagccctgtacccactccacgcacacatgcagcttcagtttcaaaacatgcgtggaaggatcttttggaaacacgcccaga

SEQ ID NO: 121042 - DNA, 122 bp, Homo sapiens
tccagggccagcagacgaaattgtttgggtgcaggtgcggtcctggggtcacttcggccacgggaggagttcccacgactaccaagggcagtttcctacccagggaccacggagacctggca

SEQ ID NO: 121043 - DNA, 122 bp, Homo sapiens
gcctcagcatgcagccaagtgagctgacatctgactttatcctaacagttataattaaatcgaaagtctagttaaactaacattaaagctatgaccagaaacatcacacaggggaaatgtga

SEQ ID NO: 121044 - DNA, 122 bp, Homo sapiens
agcagatgatgatgagcaccaggacagatgtgggaagttaggcagtatcctagggcatttcgccagggcagcttggatgtgtgctttggaaaataccagtcagacaggacaaaatcagggcc

SEQ ID NO: 121045 - DNA, 122 bp, Homo sapiens
atgtctggacaaacatgccccaagcctgacggcccccatcgtagcctccctcgcaagccgcgccccagactagagagagggcctgcgcattcctgtcctgccagtccggcagttccctctcc

SEQ ID NO: 121046 - DNA, 122 bp, Homo sapiens
tccgaagccgagatttccacgaagctccacaaagctccccgccgcctctctcggtctcggcggagaccccggtgtgtccccgggaggagagtatttactaaccagaacctcaggggctcccg

SEQ ID NO: 121047 - DNA, 122 bp, Homo sapiens
ggaatcctccgcgtctcctacagccgccgaaccaatgggcagaccggggagagcgggacgcgcaggagagggtttgaaaggaggtgtgggttttaatttttaaagagcataattgggctgag

SEQ ID NO: 121048 - DNA, 122 bp, Homo sapiens
ctcagcaaataatacagtattttcttgtgtggtgatgctttgtcagactgccagttgatacgcataggatataatgatgaagggaaaaggcagtttctgccgtcagacagctaccttctaaa

SEQ ID NO: 121049 - DNA, 122 bp, Homo sapiens
acgaggccctggcttccccaagccgccatgtgagttggggaggaggcccggccttgcaggcgaggggccattggtgctcagagcctcctctcaacgctctagacccagcaacctgggacagg

SEQ ID NO: 121050 - DNA, 122 bp, Homo sapiens
tagcctaattggggtgagacgggtgagagaaatgctcgtttgacgggactgggattagagcgacagttttggcccagaagttaggctgatgccaagggcaaaacaggaaaacccggagcaaa

SEQ ID NO: 121051 - DNA, 122 bp, Homo sapiens
tcagcgcatctcaactcgcggcaggccgccccgcgagccgcctctccctttcctgcggctcgaagggaccccagcgtgaaccgtgtgcttgtttttcattgtctccatctcggggcttcctt

SEQ ID NO: 121052 - DNA, 122 bp, Homo sapiens
tgtcgcggctcggctgagggagcgcgcccgctgattggtcgaatttgaaaaccttttgcccggggagaaaaggcgaggaggaggggtagcacgcagactgccaactatccgctgatgtagcc

SEQ ID NO: 121053 - DNA, 122 bp, Homo sapiens
ttggagaggccacggatgcccaaggacaaagccccagcgggcctgtgggaggaggtttctcggggcgccagtgatgcaacttaggcttatagtttaaccgtaaaataaataatacaaatgat

SEQ ID NO: 121054 - DNA, 122 bp, Homo sapiens
ggctggctgcttcgctccgagccgacttttcgccaatggtccaaagggacatgtccaagtcgcctcccacagcggcggcggcggtggcgcaggagatccagatggaactgctagagaacgtg

SEQ ID NO: 121055 - DNA, 122 bp, Homo sapiens
cccccagggggcccctcactcgagtccttgcttgcagtgcccatgggcagcagaggtgtccggagatgcaacagggcccagacccctaccagcctgtggcccagctgggggcaggactccgg

SEQ ID NO: 121056 - DNA, 122 bp, Homo sapiens
tcacgggagtgaacatcatctacacaacagcttccacgtttgcaaacatgcacagcttagcgaccacgtttcaaagagccacgtggataactgcctatattactggtactcaatttccaggt

SEQ ID NO: 121057 - DNA, 122 bp, Homo sapiens
cctgtggcgcctacaacaagcaacacgtggaattgaatgttgaagagccgcgcggggccgcggagtgcgcgtgcgcgcgccgccgctgctgcccgggcccgcctggagccctagcacacagt

SEQ ID NO: 121058 - DNA, 122 bp, Homo sapiens
gaccggggaagccggggcacttcggtacgcagcatggctccacgtctcgggccagcttcacgtctgattggatgaagtgtcacgcagggagcctctcagcaaacctacctgcgttgaaggtg

SEQ ID NO: 121059 - DNA, 122 bp, Homo sapiens
tgtgccgccccctcccactgccaaggcgcggctgtccccggctgggtggactcgcgcgcgcgcctcctgccccaccccagcaggctaacactggcgcactgggcctggctccccgctgctac

SEQ ID NO: 121060 - DNA, 122 bp, Homo sapiens
ggggacccctgctaactgagacccacccttcccctccaccctgcttctgtatgtgggagacgaaaccaagagtcattgggggcagcaggcatttcccagggttaaggctgatggaaggtccc

SEQ ID NO: 121061 - DNA, 122 bp, Homo sapiens
tgctaaagttcctgctgagttcccaggcaaaactttgtgaaatgggaactttgaaaggcacgatggtgctccatgaagttaaccttgctagctgctgtaggccttctggtctctgttcttcc

SEQ ID NO: 121062 - DNA, 122 bp, Homo sapiens
ttattcactgttctagggctcagaacaggcacgcgataaaagccagcaccgttggccgggcgcattggctcacgcctgtaatcccagcactttgggaggccaaggcaggtagatcacctgag

SEQ ID NO: 121063 - DNA, 122 bp, Homo sapiens
gcgggggagtccccgggcgagcacgtgccgcggtgcgcggggggcggggagtcccgcggacgccttcattgctgctgctgctgccgccgcggccgccgctgcctcttccttcctcctgcgcc

SEQ ID NO: 121064 - DNA, 122 bp, Homo sapiens
tcacttcatgaatacggctgagcggatccggctgcctgatgactgcaccatcggctacatcgtggaggccctgctgggtgtgcccctcatccgcagcggcctcttccactcccacctggaga

SEQ ID NO: 121065 - DNA, 122 bp, Homo sapiens
gtcctgcgtcgcttcccagctaccccctgggctccgcccccaggaccgcgcgcgccaccacgtgctcacgtagttggcaggcatccgcctgtcagagcctcggaggtactgggggcggaagt

SEQ ID NO: 121066 - DNA, 122 bp, Homo sapiens
agcctgggtgatagagtgagactccatctcaaaaaaaaacatagagtctaaccccagctacgtgactgctctgtgaccttagttaagtcacatctgctgtctgaggcttggtcccttcctct

SEQ ID NO: 121067 - DNA, 122 bp, Homo sapiens
gaggaagacgctgcctcccaatggcctggacgggatgtttccaagctcttgttcccctaacgtctcaacaggcgctcactgaagtgtatgaatattttttaaaaaggtttttgcagtaagct

SEQ ID NO: 121068 - DNA, 122 bp, Homo sapiens
ataatcacaaggataataatgaggcaatccttccatttctctcaaactggtcaggcctttcgtggatactcagtccaatctggcaacacaatgtttgagctgcatggagaacttggagaggg

SEQ ID NO: 121069 - DNA, 122 bp, Homo sapiens
ccaccgatgaccctctgggaggtcataccgtctggcaagtggtcttcatcgctttcttaacgggcatcctggccttggtgaccatcatcggcaacatcctggtaattgtgtcatttaaggtc

SEQ ID NO: 121070 - DNA, 122 bp, Homo sapiens
agactaaaaagcaagactgatactgctttagaaagaaagaataaaccacgtgccttactgcgaaaaatccaggttcagagtcacttagagaaagtctgctcagagctactgaacgcttgagt

SEQ ID NO: 121071 - DNA, 122 bp, Homo sapiens
aggtgccctcccccagacacttgcaaaaatgtagagagaggtggagggctggggtgcctgcgagcaggtcccagttgcaagaattaaagccttgcaacaggttgggggaagcagggcagcgc

SEQ ID NO: 121072 - DNA, 122 bp, Homo sapiens
ccaggcaaggcgtgatgctctggaggtagtgggctacgaggattcctgaacccacgaggacgtctgggtttccccagggttacggctgctgtgagtcagagccccgatactccccgtccacc

SEQ ID NO: 121073 - DNA, 122 bp, Homo sapiens
gttgtcagctaaagctcaaatttggcttggcaaccacacttcagttttgacacagtctttcgaggaattcctgaaattagtttccaaaactgtaaatttgctgaggctatttggctgtttaa

SEQ ID NO: 121074 - DNA, 122 bp, Homo sapiens
cggcggcgaagggaggcgctgggtgagggagcaggtttgtcgccgtcggttggtggtcctcgccgtttcagaaaagcctcattttgggagtgaaggacgtcttctgggagtggttgaagcct

SEQ ID NO: 121075 - DNA, 122 bp, Homo sapiens
gggcgagcctggagaggaaagatctcttcccacaccctgcctgggtgctttcaagaatcccggcaaagaccctggggcgcacggcgcgccaccttggacatgtcgcctgggatcggctaccg

SEQ ID NO: 121076 - DNA, 122 bp, Homo sapiens
gaccccgccgttgctcctgctgctgcccctgctctcagctctggtcgcggcggctatcgacggtgagtgagattccgcgtcccccttggacccctgggggcaccctctccccagcccccact

SEQ ID NO: 121077 - DNA, 122 bp, Homo sapiens
ccccagggccagcaaggggccacttttctcccaaggcctgggctccgtggtgcattccaccggctcacactgccttggcctgcacaaggaggccctgcatacaggggtgagtcttgcttaag

SEQ ID NO: 121078 - DNA, 122 bp, Homo sapiens
gtggcgggacccacacctactccgtgacctgcaggcccaggggtcgagccccaggtagaacgtctagacggactccgcccttagcgccgtacggggaaccttctcccggacgcagacacgga

SEQ ID NO: 121079 - DNA, 122 bp, Homo sapiens
ctgttgggttggcagtgccaccctagtgagcacacaccttgactgctggccttcatgtttcgaccacagcaggaaggggaggtgtgttcagctagagagtgacaatgagggaggtcactgga

SEQ ID NO: 121080 - DNA, 122 bp, Homo sapiens
gcaggcgcacctgctctactactgcgccagccgccagggcaccggctccccggccgcagccgccacagacgagaagcccaaagagacctaccccaacgagcgcgtctgccccttcccccagt

SEQ ID NO: 121081 - DNA, 122 bp, Homo sapiens
atcaggcaactagtatacatcacaacgtgacagatggatgagtgatctgtttccctgccccgagaaactcacagcccaggaagggagatagaaaggattgtgcagtggcacgatctctgctc

SEQ ID NO: 121082 - DNA, 122 bp, Homo sapiens
ctcttggaagcccctgccacggagaagcctctgttcctttgaagtgtcaagatgagacggcgcccggaggatttgtgtcaaaacgtgatctaaggagatgtcactcctcgtgtctccagtca

SEQ ID NO: 121083 - DNA, 122 bp, Homo sapiens
tgcctggcctcgctcagaccccgggcacctgggaggtcgtgcctccttgaaatggccactcgccaggctgctttgcaccgcaccgggcacaggctgcggccactcaggaagcccatcctggg

SEQ ID NO: 121084 - DNA, 122 bp, Homo sapiens
gaccgttcctcgtgcaggcgttgcacaagctttgcttcctttaatccccagggttccctccgagccagctgcttttgtcacccccatgtaactgatgagactcctgaggctgaagtttgggc

SEQ ID NO: 121085 - DNA, 122 bp, Homo sapiens
gaaagccgccaaggtggcgcccatctgagcgacaggagggagcggccctggcaggacggacgtgggaactgcaggggcacaggccctacgtgagctgcgtgggtggaaaccgaggctgggac

SEQ ID NO: 121086 - DNA, 122 bp, Homo sapiens
gggcaggaaagaaacttgctagactggtaatcaaattcaagaaccggaggcgtcttgacccgaatgagactgcgggcgccgcctagtaggtgggattaagaattgacgaaccttttcccaat

SEQ ID NO: 121087 - DNA, 122 bp, Homo sapiens
ctcccagtcctatccaccccagagctcacacaccaagtgagtgagctctccaaagacccccggggagaatgagacacaagagaaacctgcctgcaaaaggttccaatgcattcctggatcct

SEQ ID NO: 121088 - DNA, 122 bp, Homo sapiens
ccacctgcagaggcacaattgcccagcgtggggtggaaggcaggctgggagctcccgggacgcggcgtggcagcgcagggctcggctagatgcgctcctcctcggactggttgagtaaggga

SEQ ID NO: 121089 - DNA, 122 bp, Homo sapiens
gtatcttcagaaagctatttaattgttctgatttttttttttctgaaaggactgggcttgcgctattctaacttgagatttctaaacttagactaggttccaagaatctacttggttttgat

SEQ ID NO: 121090 - DNA, 122 bp, Homo sapiens
aggcgaaggggcggggcctaaggacggcccgccccgtccccggcgctggtcgctcgagtccgtgagcgaggaaggttaacagggccttctgcccaaggtcaaggcaccgaagtcgggagagc

SEQ ID NO: 121091 - DNA, 122 bp, Homo sapiens
gcccgagtcccagaaggcggcgatcctgggctgcgggcaaggcggtgagtaccctctaggcggcggcctcccggcgtccctcagcacctcgagagctgcggcggcggcggcgcgcggggcct

SEQ ID NO: 121092 - DNA, 122 bp, Homo sapiens
ggactgcagccatcttaccccggaaatgacaacagtgccgcaaactggagagactctcctcggcgcggcctatcaggagatgggaaacgcgcctccccctgggcgaccaatagggagggaag

SEQ ID NO: 121093 - DNA, 122 bp, Homo sapiens
aggcgagagtgcagtgaatgtcagaacaggagggtcacgttgtataaatcactcccactccgcccttagttgtgtggagtgtggtttgttgttgttgttgctagtagacagtttgggccgaa

SEQ ID NO: 121094 - DNA, 122 bp, Homo sapiens
ctgggtgggttttcggtgctaaatcctcccgagggtctccttccctctcccccctgtccccgcttctccaccagccaaggctcccaccgccgctgtgggattttccgtgggagaagtatggg

SEQ ID NO: 121095 - DNA, 122 bp, Homo sapiens
ccattgaaatttcttctgtgaagtagactattttttttggtaaagcatttgatagaatgccgattatatcttcaagggttaggactgctgtttattgggttctctcttcatagtaagcactg

SEQ ID NO: 121096 - DNA, 122 bp, Homo sapiens
aggtgccttagttactggacagagaccccgggttccttagttactggacagagagtgctgcgcttcaggtgccatggcctcagtttcctcctttctgaagtgatgaaaatacattgtgcgcc

SEQ ID NO: 121097 - DNA, 122 bp, Homo sapiens
cctctccccagctgcaagcctgcctcccagaaacgaaatctgcctgctcttttgacagctcggttgaaggtgattgatgactatctggagaccacagtacacatcatataatatctgctgcg

SEQ ID NO: 121098 - DNA, 122 bp, Homo sapiens
gcggtcgggctggctgccgggcagcatggaggagctgagcagcgtgggcgagcaggtcttcgccgccgagtgcatcctgagcaagcggctccgcaaggtgcgtgcggcccgccgggcccccc

SEQ ID NO: 121099 - DNA, 122 bp, Homo sapiens
cctctttccagatgggtcccacccaggcgtataacagccaattcatgaaccagcccgggccgcgggggcctgcctccatggggggcagcatgaaccccgcgagcatggcggctggcatgacg

SEQ ID NO: 121100 - DNA, 122 bp, Homo sapiens
ctactggcttatttcccaatctgtccactccactctatttctagtacctgagtcataattcgggctttattatctcacatttcattttgagagcaaagtgatatctgtttttttaatgccta

SEQ ID NO: 121101 - DNA, 122 bp, Homo sapiens
aatttcttcctccaaaaacggctgcgatcgctcaacatcagcgtgcacagctggacttcacgttcccatttgcagtggattcttcatctgaaatgctggtagtatttgtcagcctggaagtg

SEQ ID NO: 121102 - DNA, 122 bp, Homo sapiens
tgcagcgccagggcctgggcctgggctcgggctcccacccgcgtggcgccgcagtcctggcgagccccgagcgctctgtccccggtgaccagcaggcggcgctatctccaggccgcagccgc

SEQ ID NO: 121103 - DNA, 122 bp, Homo sapiens
cctcgcaggctatttttagcagggtatataaggcgcgggcggccgcgcgccggaggagtccgcgctgtgaggtgcgcggccgagccctgcactgcgcccgcggccggagctaagggagccgg

SEQ ID NO: 121104 - DNA, 122 bp, Homo sapiens
ggctgcagggtttaaagagccgacccacgtgcccagcagcctcctcagatccgttctctgcgctgccagctcaggtgagccctcgccaaggtgacctcgcaggtgagcaggcgtccactttg

SEQ ID NO: 121105 - DNA, 122 bp, Homo sapiens
ctctgaaaacctcgacaacgacgcctctctcttcagtgcccgcactgcgtcccaggctgacgccaaggaggcccaagacagccctgggtggccattaggacgggtctggaggggacatcagt

SEQ ID NO: 121106 - DNA, 122 bp, Homo sapiens
cgttattgtttctctggcaactgggacggttatccccagaggtagaccaataatcagtcacgtaagacgttccgctaaccaatcaccctcttcctttcttgatattgacccgccctatttcc

SEQ ID NO: 121107 - DNA, 122 bp, Homo sapiens
ctcttgccccttttgtaaaccttatgtcaacttctaatattttaagttttccagcttaaacgttagtgctttcttaaactgaccttaagtatacatgttaactagtggggtatgtacattta

SEQ ID NO: 121108 - DNA, 122 bp, Homo sapiens
ctcatttctctgtgaccagtaagtagggaaagcaagcacacatacacacacacacacacacgtgcacacgcacactgacagacaaccttgctcactcacatgggcatgcccaaacccttctt

SEQ ID NO: 121109 - DNA, 122 bp, Homo sapiens
ttcccggcccgcggctggggcctgaggttgggccgatcacccctcctaccagtcctagttcgggtctagcggaatggctgggctccgagaagggcgccgggcccacgggcgggacggccagg

SEQ ID NO: 121110 - DNA, 122 bp, Homo sapiens
gggcaaaggccgaaaaaagtttgggactccactcccccccgctgagccgatggagggcatcgcccgctgcctcagcactctggtgacgtggaatcggggtcccctctttcagggctgatttc

SEQ ID NO: 121111 - DNA, 122 bp, Homo sapiens
caagccaaaaggcacaagaattaatgaacagcaccaagaagactttgatcattgggcccacggtctttcccagccagaatacttattgattaccaccttcctgattcagaatcagtttgcag

SEQ ID NO: 121112 - DNA, 122 bp, Homo sapiens
tcaatgccggctccgctcacaccatctgtgtccacgcagagggtcgggccgtgggagccgcgagtgtctggcccacacttctgttcttaacctcgcaatgtattcaggtttccccaggcgga

SEQ ID NO: 121113 - DNA, 122 bp, Homo sapiens
tacgtggcaacattacaccacggtggctacggcaatgcaggccacgcgtctgatcccaaacgacacctccctgttataaattcttatgttggttccgcaagctaactccttaactgtcgtta

SEQ ID NO: 121114 - DNA, 122 bp, Homo sapiens
gtgaagtgctccatctgctctgctctgctctctccaaacgttaccactctggcaacaaaacggagggcaccgtggctagagactatttgttctcttggacggtggagagattcttttaaatc

SEQ ID NO: 121115 - DNA, 122 bp, Homo sapiens
tgatcagatgccagggctgtgatcgtctagctcagcatcctgttttatcagagaggaaaccgaggcccagggatcaccaaagcttagccagccacagagagtacagctcccatgtcccagca

SEQ ID NO: 121116 - DNA, 122 bp, Homo sapiens
ctaaagtgctgggattacaggcgtgagccaccgcgcccggcctcctagcaggcagtcttacggattatgaatttaaaacatgaccagtcagtaagcatggttacgctctttttgttttttct

SEQ ID NO: 121117 - DNA, 122 bp, Homo sapiens
ggtcagcgcactcttgcccacaccgccggcgcccaccaccaccagcttatattccgtcatcgctcctcaggggcctgcggcccggggtcctcctacagggtctcctgccccacctgccaagg

SEQ ID NO: 121118 - DNA, 122 bp, Homo sapiens
aacttgagaaacgtccttcagaatgcaacaggcaattgtgagccccccattgccagccaacgagaaacggctcggccccggggactcgagccctgtgggagggacgacctgctccccgttag

SEQ ID NO: 121119 - DNA, 122 bp, Homo sapiens
tgaattagggtggaatttgacacagtccacatctgccaggtgtcctgcatatatcctcagcgggtacgtccgatcaaatgaccacagcctggcggtgcggtcgtgggacccgctggcgaagt

SEQ ID NO: 121120 - DNA, 122 bp, Homo sapiens
agactggggggaggaaagactcagagatgaagtgccttccccactgcatcctctcagggacgatggcacgatggccaggtgacttatcactggtgacttgaccttgatcccatagttaaggt

SEQ ID NO: 121121 - DNA, 122 bp, Homo sapiens
cggggggcggagtctcaccgctcaccatcatccatgggaaccaatcactaggcaccgccgcgggatgccaaccaatccccgccagcagagggtgggaaggtggagtttcataggccaggggc

SEQ ID NO: 121122 - DNA, 122 bp, Homo sapiens
ccaaattcagcagggatgaggggctcaacttaattttcaagtaatattaactaatacggccgggcgccgtggctcatgcctgtaatcccagcggtttgggaggccgaggtgggcggatcgcc

SEQ ID NO: 121123 - DNA, 122 bp, Homo sapiens
gaagatttcgtgtttacatccatgtcattttaatctcaaatctttatgtcctttcaccagcgcagaaaaggagagccagccgctgcaggggcggcgagcacgcagcaggcacttaccgttgc

SEQ ID NO: 121124 - DNA, 122 bp, Homo sapiens
gtgaccagtgcctggctgtctgtgatggtgtgctgggcgtcttcgctctcgatgacccctcgtctctgatccagctgcagcagatatgggccacctggggccctcaccccgcccagcccctt

SEQ ID NO: 121125 - DNA, 122 bp, Homo sapiens
atagaatgatctggctcctaaagaaagaagtcagagttcaaaatgctgagtcattcaccacgagagcagtgcctgaggagaagtaggtcagcctgggccgagcctccccacccctccttggc

SEQ ID NO: 121126 - DNA, 122 bp, Homo sapiens
ggcaagaggaccggcggaggcacctctctcgagtcttaggctgcggaatctaagactcagcgagaggagcccgggaggagacagaactttccccttttttcccatcccttcttcttgctcag

SEQ ID NO: 121127 - DNA, 122 bp, Homo sapiens
aaagcaatcatggagactgcatggaagacagctgctgtagacccggtgatggtggtgatgcgttcagggcaggagccctcggagatggtgatccgggcactgctctgcagatatagaatgag

SEQ ID NO: 121128 - DNA, 122 bp, Homo sapiens
cgaccccgcgcaactggctcgggtctgcacctagatggctgtgggccccacagggatggccgggcgggcccgttcggccgctacctcagggtcgccagtccccgcgcgcggccgcctcccgc

SEQ ID NO: 121129 - DNA, 122 bp, Homo sapiens
gagggaatatttggcacagcagcgaaatcgggagtgtggggtgcgggcatcgcgtggacacgctgtgaactgggatttggagcacgggtgatgccagagtgggtgatgtcaggggctggcct

SEQ ID NO: 121130 - DNA, 122 bp, Homo sapiens
tccccattcatgtgtttcttagccccccagggaagaatgcttctgtgggggacgcagccacgattccttggaaggagaagctgagcccagccatgctggtctcctcctggcactgatctaca

SEQ ID NO: 121131 - DNA, 122 bp, Homo sapiens
tctcgtggtgcttttgctgaaatacctccttcagatttgacgctcagtcctctctctgtgcgatcagacaaaagtgtggtatttaagccataaacaaacagagtggcagacaataggtgatt

SEQ ID NO: 121132 - DNA, 122 bp, Homo sapiens
ggcactggggtgtgggaggccgtagccaggcccaggcccacaggtggctgcgggcagctccggagcagatgttggtgcccagcggcccgcgttgctctgggtgggtgccctcccaccctctc

SEQ ID NO: 121133 - DNA, 122 bp, Homo sapiens
cctctcgcccctggtccgcccgcgtcccccgacccgaggtcagcctacctgccggccccgcggcggcagcgcgctgcagcccaggctgatgtagacaggcagcttctcctgggtcagcgaca

SEQ ID NO: 121134 - DNA, 122 bp, Homo sapiens
ggccgcacgccgggcggtggggccgggaacccctgctcctcctcggcctccgatccgctgcggccctgggtcctgctcgctgcccgacgccgctgccacaacctccgcccgggccccgcagc

SEQ ID NO: 121135 - DNA, 122 bp, Homo sapiens
attgaaacaaacaaacaaattcccctgtgtccactgtcagctgggccttgggcttttcaccgtaagcctctgcctggccaaaaacaaatgtacatacacgaggcgcaggtccttctcaagtt

SEQ ID NO: 121136 - DNA, 122 bp, Homo sapiens
tcctccttccccaggacctgagctcccagcatctgcagacgacccccgcagcctttccctcggacccccctcgaagccccctggactgattcccacccacgactcacaggcattcctcccac

SEQ ID NO: 121137 - DNA, 122 bp, Homo sapiens
acactttctcgcggcgggtcccctccgcagcccgctcccgcggccagcccgacggcaagacgcaagtctagcttacgtgttaggatcatggtgtccggcttctttctgcacatcaagcacgg

SEQ ID NO: 121138 - DNA, 122 bp, Homo sapiens
cacaccctccctagcccgggcgggggggttctccatctgccgcccctcccggcgggcaggcgaactctctcctaccgcaccctcaatctgtccgcggtcgcggggctcggcgggggcggggc

SEQ ID NO: 121139 - DNA, 122 bp, Homo sapiens
aattaaaactgcccattgctggaggaaagcaatcaagccagattgaccaatatgcttacacgcttgtctggaaacttttctcccttaaatagggaagctgaaagaggaggatcattataaat

SEQ ID NO: 121140 - DNA, 122 bp, Homo sapiens
tccgcacacccggtccacgaggctccaccacgctcgagctgtgcggccatgggcaggctgcgtggcctctcaagtggggtcaatgatggtcaccaccacggagggtcgtgggggtgctgacc

SEQ ID NO: 121141 - DNA, 122 bp, Homo sapiens
ggggagaagcctccgcgcccagcaaggacgctgcaggaccccctaccccgggtttccgcacggctccatccccagtgcgggcagcttctatggctcctttccggactctccagatctgtctg

SEQ ID NO: 121142 - DNA, 122 bp, Homo sapiens
tcctgtccacctggtggagttttctcagccaaaaggggcagctctgcaggctgcaggcctcgggaaaactagagtggctacatatggctgcagggaacaccagggctaggcacgggccgcct

SEQ ID NO: 121143 - DNA, 122 bp, Homo sapiens
taagtctgctggcctccgccatcttagtaaagtaacagtcccatgaaacaaagatgcagtcgggcactcactggagagttctgggcctctgcctcttatcaggtgagtaggatggagtggaa

SEQ ID NO: 121144 - DNA, 122 bp, Homo sapiens
actttattttacggctctgagtgtgtggggtgtgtggagcccgggccagggaggagggtccggctgcggaggagctccctgacggtgctgtcggcctcaaataaatcccaaaaagtgacggt

SEQ ID NO: 121145 - DNA, 122 bp, Homo sapiens
gaaactgtagtcctttgggtgttattcgtgcctccgccctcctagtacctcctgggctaccgcaaagccacgtggcgaaatcgagaagcgcaaaaacagccgtgcgcggtggctcacgcctg

SEQ ID NO: 121146 - DNA, 122 bp, Homo sapiens
agcccgggcccccctctggaggtcaagcggctggcgagaggcaagaggcgcgcaggagggcggcagaagcggcgtcgcgggccccgcgccgggcaggaggcggagaagcgtcgggtcttctc

SEQ ID NO: 121147 - DNA, 122 bp, Homo sapiens
gaagaggcgcacgaagaagcagcagatgagtgggtccaggcagctgttgaggctcagcagcgccaggctgagggtgtgcaggatgtcgagcgtggaggcggcgcgacaccggtctccgttgt

SEQ ID NO: 121148 - DNA, 122 bp, Homo sapiens
gagttggtagaggtgggagagcccaagtcagaccccctgctgtgggaagctggacttgaccgcgcacaggtcctggggctgcggaggaggaagaccgctcacgccttagatgtaggggggcg

SEQ ID NO: 121149 - DNA, 122 bp, Homo sapiens
cattacatgcttaataactttctggggaaataatgacctcaggaaagagaatacttgtgacggggatgtattaaatgaattaactacaaaactattaatcacaaaacagcgttgggccaggt

SEQ ID NO: 121150 - DNA, 122 bp, Homo sapiens
ggagcgctatgggagacgagtctatctgacctctgcagtctcgaccataaaaaatgaccacgccccggggagggggtcagttcagagacccaccccgaggtgcgcattctctttctcaggga

SEQ ID NO: 121151 - DNA, 122 bp, Homo sapiens
ttcccaaacctctccgcccttccacccaaaactggctgtttgagaaacgacccaatttcccgactatcccgcccagcctcgaagatgggagggagagagggcaaccttgtcgcggtaaggca

SEQ ID NO: 121152 - DNA, 122 bp, Homo sapiens
tttctaggaaacatgcctaaccaaggcaagctcctccttctgagtttatatatacctggccgggcatggtgacacacacctgtaatcccagcactttgagaggcagaggcaggcagatcact

SEQ ID NO: 121153 - DNA, 122 bp, Homo sapiens
cctttacccccagtgtttcccttgggtgtctcaaatcccttcaccccctgcaggcagacacggcagccctggggcgccctggccaccctgggtcctcacctgtccttgggaagccgccgcac

SEQ ID NO: 121154 - DNA, 122 bp, Homo sapiens
agctcttctagccttgcctgctccctgggctggctctcccaggcggggatgggcagggcccgcctgtagatcagggtcaggaactggctcagggccctggctgcctgctcccggctgagcag

SEQ ID NO: 121155 - DNA, 122 bp, Homo sapiens
gtttaacaacaggggcagtcgataatcagcaactggcttttatttaaggaaatagactttcgctgaagtctggtaggacaagaaggagttagtcctaagtaacattgcagtagattattaga

SEQ ID NO: 121156 - DNA, 122 bp, Homo sapiens
ccttctcctggtggcaggcaagcagatgtcctctgcggagataccgccagctccccaggacgcagactgactcctgtttgctcgctggaccaaccccaggcagaaggtggaaggtgggaaca

SEQ ID NO: 121157 - DNA, 122 bp, Homo sapiens
tgggagcctgggctttgaggccttgcgaaatccccctgtgccaccgcccagccagacacacgagcaacccaccaaggggcgggtggatgcggccttggaattcagagttcccgtttgtagaa

SEQ ID NO: 121158 - DNA, 122 bp, Homo sapiens
cgaggggcgaggtatgcattgtagcgacacggactacttgtgaagcctttgggcgggagtcgcttaaagattaactttctcgggtttccgttaccaaaagcgtttccgtgaatagcgtgatt

SEQ ID NO: 121159 - DNA, 122 bp, Homo sapiens
cgtgtaccaaaagagcacgacgcattgcccacagttaagcaggaaacagcagcagaaacacgcgggagtgggattgggagggaaagcctttgtgagttttttagcactttgcgcgtttttat

SEQ ID NO: 121160 - DNA, 122 bp, Homo sapiens
ccacactcccgtgcatgacaacgcccacccacgggtgcagagatgctctgtgcgaacagccgtggctgaggacaccaggacatgcaggcctcgtccacatgggcatgtccgagtccccggag

SEQ ID NO: 121161 - DNA, 122 bp, Homo sapiens
aggctgcatttctgaaacggcaaatatctgggtgggacacaggtgtgtggcatgctggcccgggtgtggcacagctgggcaggtgccgtgtgcgcagttggcgccactttcctgggagaaac

SEQ ID NO: 121162 - DNA, 122 bp, Homo sapiens
ggcaagaaggaaggagggaacagcatgtacaaggactggaaacaagagaggctggccaagcgtgggacagtcaatagctcagtatggtaaggagttagaatttaagacatgcaaattgtgga

SEQ ID NO: 121163 - DNA, 122 bp, Homo sapiens
cccgaccttcctgcgccatcaacttctcaggagtggctggagaaagatgcatgtgccaagcgagacaacaaccccaggtccatgtgtccaaatccccgtagccagggcggcggccagccaaa

SEQ ID NO: 121164 - DNA, 122 bp, Homo sapiens
cctagccggcgcaggactacccaaggtcagaggtcagctgcagctagagacttcagttcccgagctgctccttactgactagccggcaggcgcgggaaaggcatgcccacctctccgctgca

SEQ ID NO: 121165 - DNA, 122 bp, Homo sapiens
agtcctctatagatgtcattccactgcctctggcatctgtggtttccatggcgggagcaccgcaccatgtctcagtctctttttagcttctgactgtttgactgtggtgtgtctaattgtgg

SEQ ID NO: 121166 - DNA, 122 bp, Homo sapiens
aggcgaggcgaaggcgcagttggagctgtttgctgtgagcagcacctctccaggtggggccgcccatggtggccctcaacactggggcagtgggtggactttgcccggtgtggcggcaggaa

SEQ ID NO: 121167 - DNA, 122 bp, Homo sapiens
attcgctctcgcaatgtctgtccatcagaagttgctttccccaggctattcaggaagccacgggctactcatgcttccaacccctctctctgactttggatcatctacataaagggggaaga

SEQ ID NO: 121168 - DNA, 122 bp, Homo sapiens
ccgcgccaaggtgcagagcctgaagatgagcctgctgctggcgctgctgttcgtgggctgcgagctgccctactttgccgcccggctggcggccgcgtggtcgtccgggcccgcgggagact

SEQ ID NO: 121169 - DNA, 122 bp, Homo sapiens
acatcataggttaaaaggcctagaaaactccgcgctccccttgccagaactgcagactcgcgagcctaagtctccgagaactcagggattgtgaaacccgccccgactctgcgctagcagcg

SEQ ID NO: 121170 - DNA, 122 bp, Homo sapiens
gggagtctgaggcaaaacattaaacaacgaggggacctcaacaatctatgacatgaacaccgaaaagaccgctggtctgaggcaagaaggcaccagtagcaattcactcctagccttagtat

SEQ ID NO: 121171 - DNA, 122 bp, Homo sapiens
gggttgccccagctggtcagttgcctcacagacgctaagtgggaggacagggtttccagccgggtgtgttcacctgcagagtattggtgctgtgcccccacaccacgctggcccgggtttct

SEQ ID NO: 121172 - DNA, 122 bp, Homo sapiens
ccccgctagcgctccccctctaatgtgtgatctggaagctctataaagcctgatgtaatccgtaatgcagtctctggctcccgattcgggatccagtttcagagagcgagagattggggagc

SEQ ID NO: 121173 - DNA, 122 bp, Homo sapiens
gccccaccccctcccaaaacaaaaaacaaaacccaccgcagcaaggagcagtatttgtgacgttggctcaatatttttgaatatcatattattgttgatgccgctatcttgatgtaccatgt

SEQ ID NO: 121174 - DNA, 122 bp, Homo sapiens
gagtgtggacaccggagcatggggcggtgagaagacacaatacgaggcctgccgtccgaacgcggaccctgcagcccctgcggcgggaagccgtgaacacaaggctgagtttgcgcctctga

SEQ ID NO: 121175 - DNA, 122 bp, Homo sapiens
ccagaaggctgtgggcgtacaggccgccaaggggagaaacagaaccgacgccggcctaggcggatctgcaaaaaaaagcgggaaaggagtgacccgtatgcttccgaagcacgcgaccgtga

SEQ ID NO: 121176 - DNA, 122 bp, Homo sapiens
gccctgtcatgctgtttcccagcttataagaaacagaaatatctcatcagatagatattccgcataagtggtgaaaaataaatgttcctgactttacgcgtttgaccaaataacatgaaaac

SEQ ID NO: 121177 - DNA, 122 bp, Homo sapiens
gaggcggatctcccttcggggagacccggagaacaatagccgaccctggtgtccatccgacgacaaaccagggccacccaggacgcgagggtgcagttttctggtgctgggaatactccctg

SEQ ID NO: 121178 - DNA, 122 bp, Homo sapiens
gccacctgtcctctctcgcccacgctgcctgggaggcgcgcttctgccgccttcttgccgcgctcgctctagcctcgcccactcctgcggccttacagggccgaacctcaccctgccctgcg

SEQ ID NO: 121179 - DNA, 122 bp, Homo sapiens
tcctgtatttctgtgcctgtttctcctgtttctgagaaaagtgttctctgagccccttgccgtgggtgagtgttctccgaaccccttgccgtgggtgagtgttctccgaaccccttgccgtg

SEQ ID NO: 121180 - DNA, 122 bp, Homo sapiens
gaggcttcattggtttttgtggaagggctggcaaggcagggccagaagcttagggttggccggtttgaatgattctagcagtctctgggccataggggccatcgctctttgtctgagacctg

SEQ ID NO: 121181 - DNA, 122 bp, Homo sapiens
agcaagcaccctcacccgaagccagtgatccccaaacccagtctctggttgtcagtgggacggcacaggaagcattccggtctcctttgggtttcagtcctctttgacatcctgttctatac

SEQ ID NO: 121182 - DNA, 122 bp, Homo sapiens
ccctctcagggcgccagggcccagaccaaggagctaagagtgatcgggacttgggggtaccgggtggaactccttgggggccgcccgccaggcttcctgggctgcaactcggagcccagaga

SEQ ID NO: 121183 - DNA, 122 bp, Homo sapiens
cccttttactttgccggtagaacacagttatgggtcgcaagaagaagaagcagctgaagccgtggtgctggtatcctttgtcggtttgaagtcgaggtcgcgttggggtgccggttgttggg

SEQ ID NO: 121184 - DNA, 122 bp, Homo sapiens
ccacccctggagggcggggcttggctgcacccacgtgtggtggagttaaatgctcctagccggcagaggagctagggagtgtggcactgagccggctcaggcagagacgcggcaccatggct

SEQ ID NO: 121185 - DNA, 122 bp, Homo sapiens
tatgccgtgtgccctctgtggccaggccgtacttgttgctggcgctgatgtcactgcctccgcgctgccagcgcaccttcactcctgcccgctctgtctcggcctcgaacacggcagggctg

SEQ ID NO: 121186 - DNA, 122 bp, Homo sapiens
ctcgtagtcagcagacgctgactccgacaaaggaggaaaagacctcggatgggtggcgtacgctcctggttttcacaacggtatttattattttgcccggtgctattctaaatgatgctaaa

SEQ ID NO: 121187 - DNA, 122 bp, Homo sapiens
gaaaaacggatactctcatactccacccattaatttatttacagaaagaaattcttttagcgtcagactctcagaaattatgatttaggttacttgacatttgggccctggggctgaaaagc

SEQ ID NO: 121188 - DNA, 122 bp, Homo sapiens
ccacagctcaaaatcctccaatggctttttctgcccttagaataaacttagggtggagttcgtgaccaacatggtgaaactctgtctctactaaaaatacaaaaaaattatccgtgtgtggt

SEQ ID NO: 121189 - DNA, 122 bp, Homo sapiens
cagcatggcgctggtgaggccgggacgagctcggattgacgtcattccccggcaggcatgcgcagtggcacccgcaggatgcaatcctagtctgccaggctgggcggcggtgtgggcagaac

SEQ ID NO: 121190 - DNA, 122 bp, Homo sapiens
cccgcggctttctgtaacccgatccccgcactccgctcccagggaagccgccgccccgcgcgccgcccggctctgcccaggccagcgctatagttagcaaccttccagcaactccgcccggc

SEQ ID NO: 121191 - DNA, 122 bp, Homo sapiens
cactaccaccgccgccacctcctcttgccactgcctctggggttccccagacgccgccatcgctcaaaggtgctgctgtccaacctggacggtgacctctgccctttgcccgaccccgtaac

SEQ ID NO: 121192 - DNA, 122 bp, Homo sapiens
aagggaatcccgtccctgagaggaccaagggcacaggagtagtgctcgggaccctcaggacggggcatgcactgtgggcaacgccaggcctcaccgtcgtgcgtgtgcatgcctcaccgtcg

SEQ ID NO: 121193 - DNA, 122 bp, Homo sapiens
cgagggttgcagggaagggatgatgtctcccttccccaaaaagaatctggaggccccccacgccctccaccccgccagggagcggtgcatccgacaccattcttgtcagagacccacagtca

SEQ ID NO: 121194 - DNA, 122 bp, Homo sapiens
atcctgcgggactacgtgtgtccccagtgcggcgccacacgtgagcgcgcccacacccgacgcttctgcccacttactggccagggctacacctccgtctacagccacaccacccgaaactc

SEQ ID NO: 121195 - DNA, 122 bp, Homo sapiens
tgtgcaatctcaataagacaccatggtaaaatttcagaaaattgcattgccttagagatacgggcagattttttcagagcaattgaatgtattcaaagatgtcttaattaaaataagaatag

SEQ ID NO: 121196 - DNA, 122 bp, Homo sapiens
ttttcttcagtttgacatgatgatgaacaataatcatcaagcaagcttgaatcaagcaagcgtcactcaataggacactcaataggaacaaagtgtgcatcagtatttgagaatgtctttat

SEQ ID NO: 121197 - DNA, 122 bp, Homo sapiens
gcggtcgacctacctaacctcattgtccggtagtgaggcatggtgtgctgtgcactcgtccgtgtatgtgtgaacatgcataaatatgtgtatgtgtttgggcacatgtgtgcacgtgcatg

SEQ ID NO: 121198 - DNA, 122 bp, Homo sapiens
gagcaggggactctgagggtctggtggggggggggactctgagggtctgggggcccccggcgcagggacagcctgggctgcactgatgcctgagagccaaaggctggctggatcaggttcca

SEQ ID NO: 121199 - DNA, 122 bp, Homo sapiens
gcccgagtctggcgggtctgggtctccgcctccgggcccagccgcttccgccgccggctacgcagtggtctccgagccacctactgtgtgtcccgccgggcccctgggagcggccgctaacc

SEQ ID NO: 121200 - DNA, 122 bp, Homo sapiens
caactataactactacatcgaggaagacgaagacggcgaggaggaggaccagtggaaggacgacctggcagaagaggaccagcaggcaggggaggtcaccaccgccaagcccgagggcccca

SEQ ID NO: 121201 - DNA, 122 bp, Homo sapiens
cggaaaagcgatccaggtgctgcagaagggattccatgaggtgcgcgaaggccctacttccgctttcaccttggagacggcgactctctgcgtactgattggaacatccgcgaaatgatacg

SEQ ID NO: 121202 - DNA, 122 bp, Homo sapiens
cttggccggagcctcaacggatgggcggggagggggcggggccgggcaacccggaaggtccggcgtcccagccgcctacctcgctgggaccctggtcttgctgtcccccgctggcctcctgc

SEQ ID NO: 121203 - DNA, 122 bp, Homo sapiens
atcatccaatcccggccattctgagtcaattactgatgcattttcattcaattcttttcacgtgctgagtctcacttgaggaaagggacccgcgttatggagttggcaagtgccattatagc

SEQ ID NO: 121204 - DNA, 122 bp, Homo sapiens
ccccaggctgccccccgccccccgggcagccatggccaccgctgctgcttccaccaggcccgaggtggcccccacgctggcccggcctccgggaatcaacagcaggccctccccttctgcat

SEQ ID NO: 121205 - DNA, 122 bp, Homo sapiens
ctagggcacttctccctccgcgttcatacaggttgccacaaaaagcttgggcctgaagctcgaaggccccggacccgctggggaaagaactaggcctgccactcagggattcgagtccctgg

SEQ ID NO: 121206 - DNA, 122 bp, Homo sapiens
cctagggcctagcaggggggcaggggaatggggcctggcgcccacgcagtcagcaagaaacgcccaagccctaacaggcagccagtggtctgggggagcagccagggctcctgctgggaggc

SEQ ID NO: 121207 - DNA, 122 bp, Homo sapiens
ttgagggttactccctgccccacgcagtcaccaagctccacgtggcgggcagggacatcacggagctcctcatgcagctgctcctggccagcggccacaccttcccctgccagctggacaag

SEQ ID NO: 121208 - DNA, 122 bp, Homo sapiens
ccgggagcgagccagtggcccgggagtgggcggcgttgcgtttgggtgtgtcctcggcggcgacagcagcaggtgtttcttggccggggccccggaagctccacctccccagcgggcccgag

SEQ ID NO: 121209 - DNA, 122 bp, Homo sapiens
ggagtagagacaataagttaaaaccaggagtatatgcagaaagagtagtaggccaggaagcgtattcaggaagtgtctgtggatcacattgagggactaagtggctaagttggctggacttc

SEQ ID NO: 121210 - DNA, 122 bp, Homo sapiens
gatctgagtgggcagccgaggaggaacccagaagacgccagcgatggagctctgccggggcggaatgtggccaggaggggcgggagcagtgacggcctgtccggcgctagaacgagggaccg

SEQ ID NO: 121211 - DNA, 122 bp, Homo sapiens
ggctttaaaagaagaagaagaaagacctggtatgctgtacaaaaaactgcaaaccaggcacgcagatataagtgttacaagaatccagaagaagcagcaaggagatggggctaggagtttgt

SEQ ID NO: 121212 - DNA, 122 bp, Homo sapiens
ggggaggaggccagccagtgtgaccggcgctaggaaatgacccgagaaccccgttggaagcgcagcagcgggagctaggggcgggggcggaggaggacacgaactggaagggggttcacggt

SEQ ID NO: 121213 - DNA, 122 bp, Homo sapiens
tcttcttttctatttgttttttcatgacttccgaggaaggtgagatggctgttgccattgcgatgtaatgttcagtgtatgaaatgacagtagcaaacctttccagggatgcttatctgggg

SEQ ID NO: 121214 - DNA, 122 bp, Homo sapiens
ctcgcttggctgcagctccggacgctggctccaacctgtgaaacagagcaggctcagggacgggcccccagccagggccagcccacagccctcctaagctaccgggattgtgggaaggggca

SEQ ID NO: 121215 - DNA, 122 bp, Homo sapiens
gacacctacagccggggccacgacagttccagccagagcgaccactatggaggaggaggtcgctcactcgatgccaacagcagtggccgcttgcctgacgcctacagtgggggccatgacag

SEQ ID NO: 121216 - DNA, 122 bp, Homo sapiens
agccacgtggggacatgctggactaggagggtcagagccagtttgagggtctggtgacctcggctccctggcttaaccaggtccttatgggtgagaatcctgaggagggggagagggatgga

SEQ ID NO: 121217 - DNA, 122 bp, Homo sapiens
aggcaggtgggggcctcatctttaacctgttgggggaccaaaagttaaaatggcaccaaccggatggttccatctcgattgctattttctcactcagaaggagaaatttaaaaatccaaaca

SEQ ID NO: 121218 - DNA, 122 bp, Homo sapiens
ctgaactctcgcatcccggggttcagttcccacaaagcagcctggagaggtggagggggacgggcactttcctgcaggcacctcccctgccgctcccccggaccctccacagccagcccact

SEQ ID NO: 121219 - DNA, 122 bp, Homo sapiens
gcctgagctcagtctctggatttctctctttctctcttcctcaaaggttgtcactcacagcgcaatccctgcccgaggcctccttccatccgagaagatggaattagcccttgcttttccag

SEQ ID NO: 121220 - DNA, 122 bp, Homo sapiens
tggccttgatcatgcccaggcccatctcgatgcagcagtaggcatggtcggcccggggctcgggacagcccgccacgcagtagtaacagtctcccagggtgctgattttctcacacttggtc

SEQ ID NO: 121221 - DNA, 122 bp, Homo sapiens
gcggctcggactctggcgactccgatgcggctggggggctgcgctggcgcggcggctccgcggggtccccctcacgtccggctcggctccctttatcgcgctcctccgcgatggcggcggcg

SEQ ID NO: 121222 - DNA, 122 bp, Homo sapiens
tttcacacctaaggcggtggctctaccaatcactgcctccaccctgaaaatgcccctttacgcacagcagtgaaccaaaaagccctcccagaccaaagcacgagccaaggctaccctgcacg

SEQ ID NO: 121223 - DNA, 122 bp, Homo sapiens
ggacgttttctcgtggctaagaaaagccgaaggtccgtggactcattttccttgaaggagcggaagggttgcttgcagaccgcacggtgacgtcagcgtctctgggcccccactgagggggc

SEQ ID NO: 121224 - DNA, 122 bp, Homo sapiens
cgggtcccgcgtgtccaccacccctacagggagatgagcccccggccttgtaaaacgagccgggggccagggcttggccatctgagatcgcactctcccatgctcgtcttccccgctcagcc

SEQ ID NO: 121225 - DNA, 122 bp, Homo sapiens
tgagggtgcggcgcagcaggcggccccgctggtccacgccgtgcacgctagccgagatgacgcacatcagctggtctggcagcgggatgcttgtgtactgggaccaccagcggttcaccacg

SEQ ID NO: 121226 - DNA, 122 bp, Homo sapiens
actggctacgcccggactccggtgcgcagccagtggagctcttttcacccggtgcttctacgactccgccaatcagaaacttcctgcctggggcccaaccgccggagagtagcgcgtaggga

SEQ ID NO: 121227 - DNA, 122 bp, Homo sapiens
agcgcaccaatcacggcgcagctccgccctatataaacgggcgggcgcagcgccgcggctcgagtcccggccagtgcctctgcttccggctcgaattgctctcgctcacgcttgccttcaac

SEQ ID NO: 121228 - DNA, 122 bp, Homo sapiens
actttccagctcttccgaagttcgttcttgcgcaaagcccaaaggctggaaaaccgtccacgatgaccagcatgactcagtctctgcgggaggtgataaaggccatgaccaaggctcgcaat

SEQ ID NO: 121229 - DNA, 122 bp, Homo sapiens
ttaaatacagtgcccagctgtcatcggcttacccagttcaagttagctccatttacatgccgctatttccctaagttgtttatctttctcccagagagtagcttcctcgcctggctacccta

SEQ ID NO: 121230 - DNA, 122 bp, Homo sapiens
cccaggcagcagagctcctggccccaacgatctccaggtgaacggggcagcctgtcagtgcggcagagccatggggctaactctatgtccctggcattgctgtttaagctaacaggttaggt

SEQ ID NO: 121231 - DNA, 122 bp, Homo sapiens
atggtgtatttctcatgatttatgttcttgaattttcaacataaaacacttatcagaggtcgttggttgcagggagactaaatgcatgtgtatttattttccagtccagtaaagtaggaagg

SEQ ID NO: 121232 - DNA, 122 bp, Homo sapiens
gagtcagcgtccctctcgatgttggtttcttcgttttacaaataacacttgggcggggcgcggtggctcacgcctgtaatcccagcattttgggaggccgaggcgggcggatcacgaggtca

SEQ ID NO: 121233 - DNA, 122 bp, Homo sapiens
tccccagaagaagagggcggcggggcggggagtcttttgttttatttatttatttttctgcggagtacaactgttagtgcctgccggttgcttagcaaggtggtcccttacgattcacagcc

SEQ ID NO: 121234 - DNA, 122 bp, Homo sapiens
gagtcttttgtgtctcacagaaggaccaggttttactattcaaaggagaatgaagaaccacgagaaccaaaactgattaattaagggttttctctgacttaagaatgagctatgagttttat

SEQ ID NO: 121235 - DNA, 122 bp, Homo sapiens
gcctggacaccagtcagggtcgaggcctcaccagcatcttggggcctcactgggcacagacgcgtgagcgcccggcctgcagacctgactctggcagccgctcaggccctcagagggagaga

SEQ ID NO: 121236 - DNA, 122 bp, Homo sapiens
cagatgatctcaaggggcatgcagacctctcaggttggctctgtccatcctgcccatggccggtggtctgcagggctggcttccgccctggctcttcctctctgggtctaggtggccaggct

SEQ ID NO: 121237 - DNA, 122 bp, Homo sapiens
accaatcacatgctgactagaaaaactcaagactatggccatagtgtccaggtaagtgaccgttcttttccctaggcccatattcccaaaaaggtgctctagcccacaaattctgagaatga

SEQ ID NO: 121238 - DNA, 122 bp, Homo sapiens
atgcggcgactcccggcacgaggctgcgtccgcgatggcggaagcggaaacgcgcggaggcgagcatctcattggacccaatccgagggcggcgtgtcgtcatcaagctgcgcgggggcata

SEQ ID NO: 121239 - DNA, 122 bp, Homo sapiens
ttctcgactggcctgttcgtgatggaagaggctggcctgccacgttcgtgatgtcagggccgggcagtggacgggcagaggccgcgaggaagaggagaccaccgcccagatctcctcatggc

SEQ ID NO: 121240 - DNA, 122 bp, Homo sapiens
gagagagagagagagagagagagagagagagagagagagagagagataggacttcctccccgattcgcaaagtgaagtcacttcccaaaattagctgaaaaaaaagtttcatccggttaact

SEQ ID NO: 121241 - DNA, 122 bp, Homo sapiens
ccctctgcgcctgcgccccggcacgaggtggggcggcgggcgtcagtacagtagagtgtgcgccggggtggggggcaacggtcagccgtcaccctgagacgggcggcggcgggatggcaaca

SEQ ID NO: 121242 - DNA, 122 bp, Homo sapiens
ggttctgtgagcaaatcctgcccaagtcaactactgggaaaagcctatacttttagaagccgatggcgcatttgcagcacagaaaaatagggtcacacataaacccaaatccatgtgattaa

SEQ ID NO: 121243 - DNA, 122 bp, Homo sapiens
ggggccaacagggacctggagctaccctggctggagcagcagggcccagcctctcatcatcgaaggcagctgggaccccagggtcccccacacctcgtggcaggtaggagctgctgactgcc

SEQ ID NO: 121244 - DNA, 122 bp, Homo sapiens
actgtcagctgtcaggaggcagcctgacctctgactcatcaaggaacatgttctggaggacgcgcattacatttctgacatattcatttggtttatgttacctttattccagactgttggaa

SEQ ID NO: 121245 - DNA, 122 bp, Homo sapiens
ctgacatttccaagcctgccatctcctgcagtatattcagcacataagatgagccagatgcgcactatacaacactgttgcataacctggcctttcctctgcctgtgacccccgtgtcccca

SEQ ID NO: 121246 - DNA, 122 bp, Homo sapiens
agcctttctgcagtgtgaaaatcctccaagataaagagacagattgatggttcctgccgccgccctgtcctgcccagttgctgatttcaggaaatactttggcaggtttgtgggtcatagag

SEQ ID NO: 121247 - DNA, 122 bp, Homo sapiens
cttccccctctgtgggtcccgcgaggagactctcgggctttgaggtgagacctgaagttccgctggccggtagtgtagcaggaaagggcaggtcctcccgggtcgtgagccagtagcctcct

SEQ ID NO: 121248 - DNA, 122 bp, Homo sapiens
cccaccatccccccacaaccctccccatcaagcaggctcctgagtgctcgggcacggcctcgtagccctggagggtcgcgatctcctacaagcctctggtgttttccctgcccaggctggag

SEQ ID NO: 121249 - DNA, 122 bp, Homo sapiens
cgtcccctcctcacaccccaccccggacggccacaacgacggcgaccgcaaagcaccacgcggagatacccgtgtttctggaggccagctttactgtgctagaggaagagggtccccacatc

SEQ ID NO: 121250 - DNA, 122 bp, Homo sapiens
ggtttatagtgttgtcatgagtatttcaagctttttatacaatgcccctttgttggaattcgtctgatgttatccttatgattagactagtgttttgggttttggggaggaaaaccacagtg

SEQ ID NO: 121251 - DNA, 122 bp, Homo sapiens
gcaggagaatcaggcagggaggccgcagcgagccgagatggcagcagtacagtccagcttcggctcggcatgagagggagagggagacgggagagggagagggagacgggagagggagaggg

SEQ ID NO: 121252 - DNA, 122 bp, Homo sapiens
agcccttctagaaactccaaggacgtattaaattcactcactaaaatattttgggcatagcgtagttgctgatcatctccatgattacttctttgaagtctttcctttgaacattttttaag

SEQ ID NO: 121253 - DNA, 122 bp, Homo sapiens
ccaggcgaagatgaggaaaaagcttcctgttgccgttgagtgtagcggcgggagcgcggccgtgtttccctgtccgccgtttgtagcaggacctcactttatattaataaaagcgtcccctc

SEQ ID NO: 121254 - DNA, 122 bp, Homo sapiens
agttgtgctgagactccaaagggtagcatgaaaggatattatgagctgtgaagatgctatcggagagttttcacttcgagtgtcccatgctgagtcttcctgagagcagcctagacacaagc

SEQ ID NO: 121255 - DNA, 122 bp, Homo sapiens
cccttccacaagaagggtctcaaagagcagcgagggtctgcatgccctgacatggcccagcgcagacctgctcatctcagcgagggtctgaatgctctgacacagcccgacacagccctgct

SEQ ID NO: 121256 - DNA, 122 bp, Homo sapiens
gcctatgaccgctatgtggccatctgcaagcccttgcactacatggccatcatgaaccagcgaatgtgtggtctcctcgtgaggatagcatggggcgggggcctgctgcattctgttgggca

SEQ ID NO: 121257 - DNA, 122 bp, Homo sapiens
cagacccacatgtgcaactgcctcttgtcttcccctggatggctctcacaggatacaggccgtgtccagacatgagctcaggggccctgcaccccaccctgctgtgccccaccctgctgggt

SEQ ID NO: 121258 - DNA, 122 bp, Homo sapiens
catgcccagggcaacctcgtggctgtgaaacgtgtgaaccgtaaacgcattgagctgacacgaaaagtcctgtttgaactgaagcatgtaatgtggggagtgaggcagtggcatggagaagg

SEQ ID NO: 121259 - DNA, 122 bp, Homo sapiens
ttctggaagcttcctgggcatgccgggtggtcagcaccccttcaaaggccttcctcaccccgacagctttggggtccaagacacccaccatcagcttgtgccctcgatgttccggtgaagta

SEQ ID NO: 121260 - DNA, 122 bp, Homo sapiens
gctcctggctggtttagtggcttaggtgttcctactgaatgttccctggtctctgcctaccgcatcatagagaggaagttaagcagtggtgatatggagaaaatgagatagttcctgtaaat

SEQ ID NO: 121261 - DNA, 122 bp, Homo sapiens
aaaagggaagtagtaagtctctaaatcatccttttttttgagcacttgtggaggtggcctcgccctgctttgctagcagtgttctgtccttccacatcagcagcccttgggatgatggcagc

SEQ ID NO: 121262 - DNA, 122 bp, Homo sapiens
accttgccctacacacacgtgtaccttctcggagcccaagggccagattggatgcgaacgcggagatcacaaaggcccgtaaacacggggccagcaaacacatcggtttttacaaagctctc

SEQ ID NO: 121263 - DNA, 122 bp, Homo sapiens
aggatgtaggttgggccaaataagggaataaaagcaggccaccgcccccccccccactcccgccccgccccaagcagcagcggtaccctgctggggtccctgtccatgctgtggaagctttg

SEQ ID NO: 121264 - DNA, 122 bp, Homo sapiens
acctcggggcgcggagaacttgggccgcgggagacctcggagaggagcaacctcggggcgcgggagatcggctctaactgcgctcccgccgcgcccgaggctctgagcgcccagcgcgcggt

SEQ ID NO: 121265 - DNA, 122 bp, Homo sapiens
gaagagaggaaagcccggcgaccatcatgcccggctgccgtgggtggtctggattggaggcggcagccgggctgtgtttgtgcggagggtggcagggggccagcggaggaaactgcccaggc

SEQ ID NO: 121266 - DNA, 122 bp, Homo sapiens
tcttggtaactgcttcaacaaaccagaggaattaattagaccgctgattttctccggaagcgcgaagcactaggccgtttgaggatctccgctccgctttgcctgggaccaggaaaagacgc

SEQ ID NO: 121267 - DNA, 122 bp, Homo sapiens
gcaaccgtccccacccagttcgccgtcacctacctcggaaggaaggcaggaaagcactggcgtggtgtccttaagctttctccacgggagctgggcacctcgttcccattccgacttcttag

SEQ ID NO: 121268 - DNA, 122 bp, Homo sapiens
aaactctctttctacaggagaaacctgggggtgggcaccttaaccaagcaaccgaatcagcgtcgtaacaatgagatagtctgacattcgcgcctcctgaggtggtgggctgtgaagcacac

SEQ ID NO: 121269 - DNA, 122 bp, Homo sapiens
ggaccttttcggtgttctctctaacgcgggaaaagtttggggcccagagggattgctcctcgttccaacctccagcaagctttcctctgggacttgtgaaccgactgttgttttgtaggtct

SEQ ID NO: 121270 - DNA, 122 bp, Homo sapiens
gagtctgaacacaagggaaaggtgtaatcaggtgggggtgtgctgggatcgctctgactacggcttggaaaataaactatagaggaccagactagaaccaagccagattcattctgtggttc

SEQ ID NO: 121271 - DNA, 122 bp, Homo sapiens
ctctgcgtctaagtacacatcccggagagaccctggccgccgcgcacggaggcgtggacacggacacacagtgcagcactgttggtcgcagggaaaacggtaaacaacctgaatacgcattc

SEQ ID NO: 121272 - DNA, 122 bp, Homo sapiens
atggaagtcaaactggaggtcctgttgtcgcagagcattcggtggtgaggctgttgtgtgcgcggatgaggggaggtggcaggagagaattctacatttagggggttaggctgaaaagtgtt

SEQ ID NO: 121273 - DNA, 122 bp, Homo sapiens
cgtttgagcgttggggacgcaaacacgagagtgcttggtgtgagcacacaggaggagtcacgacagagcagtgtaagagccgccacgtgggtcccacacagggggagtcacgacacagcagt

SEQ ID NO: 121274 - DNA, 122 bp, Homo sapiens
tagatgagaacatcgagaggagaaaccactacttagatctcgccgggatagaaaactacacgtcccaatttgggcctggtaagggactcaagcaccctgcaatgggcgatgagggcagggcg

SEQ ID NO: 121275 - DNA, 122 bp, Homo sapiens
ttttgtcttcgaagaggctggagtcgtgccccgagctgcccgtggagagttcggtgacttcgttccctcctactttgaggaccagcttcaagggcttctctacatactcttaaaaaaagaaa

SEQ ID NO: 121276 - DNA, 122 bp, Homo sapiens
aagagaaacacagaaggaaatctaaacaagcgctgactcgagagaagtaacacattcctgcgggagccccaaggggaggtagcacccacacaaggcacagcagcacccgcgccaggacgggg

SEQ ID NO: 121277 - DNA, 122 bp, Homo sapiens
ccatcctgtgtgtcccagccttttgagcagaaactgccaggcaggacctgctgggccgtgcggggcaccctcggcctcaccctgcagtgtctgtggcactcactgcttttctaaggctcgcc

SEQ ID NO: 121278 - DNA, 122 bp, Homo sapiens
ccttgccagcattacccatcctcatcagaaactggcagcggcagccacagctcgggcaggcggctccagccccaggctggatttgcagaatctgtcctttgcctccaagcccagctttcagc

SEQ ID NO: 121279 - DNA, 122 bp, Homo sapiens
agggtcctgggacgaccttgtacccagacggacgggacgtgccctctctctccgctgggccgctttgaacttccctatgactcaggtgatggcgcagaagggggagagaaaaaaggaagcag

SEQ ID NO: 121280 - DNA, 122 bp, Homo sapiens
gaagagcactggagtaaaaaccccagtacaaaccttactggggacagtgggcaaccttgtcgggttagtaaaaacaaatggtgtgggccctggaaaatgagggctggaggctgtgaataaag

SEQ ID NO: 121281 - DNA, 122 bp, Homo sapiens
caaatctgcaagcactccttgcagataaaacagctcagactgggagaggccaagagaacacggaggtcctgaagccccctgtgcttgagtcaggagcccagaggctggtgccacagctccaa

SEQ ID NO: 121282 - DNA, 122 bp, Homo sapiens
gggtccatcttactgcaggaggggcatgcaccccttgctcagaactgttccacatgtgggcgctgctcagtgtcccccacccctaccacaagggcagtgaccctggagggcagggcctcctc

SEQ ID NO: 121283 - DNA, 122 bp, Homo sapiens
gtagcaatgcttgtcctcctttaagacaaaaatccctaacattgtgctgtcccttgaacacgtccgtgtgtgacctaggtgcaccgtgtctgtgcgcgcgcgtgtgtagcgtctgagcgtga

SEQ ID NO: 121284 - DNA, 122 bp, Homo sapiens
agtggtgaactgaagtgacattttacctgtcttcgttgtatttgaattttataagaaagacggatgtgaatcaaatattcccaattatgaattcaatcactgataattgccataaatgctat

SEQ ID NO: 121285 - DNA, 122 bp, Homo sapiens
gctgcacaagtgatgtgaagaagccattgatgaggtttaaataggagactgacccagctgcgtttgtggtctttataaaataattctggattggaggaatcaattgaggaaggaaggaggga

SEQ ID NO: 121286 - DNA, 122 bp, Homo sapiens
ataactcttgatggaaacttaaattcaagtgtaaggaaaacagcaaatttggagccagaacgcagactgagccctgatctaccacctcctgtgcagctttggcctcaggcagtttattttac

SEQ ID NO: 121287 - DNA, 122 bp, Homo sapiens
gcttctagctgtccaggctccgccccctgtgagtgtgtaagtgtgtgatgctgccgcggccgccgccgccgcctgtgcagccgctgccgccgccgccgccgccgccgccgccgccgccgccg

SEQ ID NO: 121288 - DNA, 122 bp, Homo sapiens
cacgtactaccacttttatgctagttggcatctgcctttctatacaaagctactattaatcgacattgacctatttccagaaatacaattttagatatcatgcaaatttcatgaccagtaaa

SEQ ID NO: 121289 - DNA, 122 bp, Homo sapiens
ctgcaacctccctgcctgattctcctgccacagcaggccgagtgcctgcgattgcaggcgcgcgccgccacgcctgactggttttcgtattttttttggtggagacggggtttcgctgtgtt

SEQ ID NO: 121290 - DNA, 122 bp, Homo sapiens
tggacaggtcaccttactgacccctacctttgcctcctgtcccccttctcctaattaacacgaaacacactgtagcccagtccctggtcagtcttgaaaacagagataactttcatcagaaa

SEQ ID NO: 121291 - DNA, 122 bp, Homo sapiens
aaggaatgctcaggcttcctggaggattcatccattcacagttgctaaaaggaagcctaccgtgtgctagatggggctgccccagtgccctgggccaggtccctgctgttcaattgggtggg

SEQ ID NO: 121292 - DNA, 122 bp, Homo sapiens
ggatggaggggatgggggcgggccaggtgggtcccaagaagacctgcgcgagactggggacggcgcggggcccatctctcccctgggaggctcagaggcccgcaggtttctcatggaagccc

SEQ ID NO: 121293 - DNA, 122 bp, Homo sapiens
ctggggcaggatcagcagaagctgcttacaggtcttaagggtgaggggcagcggctgtgccgggtgtggacgtgatctcctgagccagccccctgcactttgactccacgtggctcctggcc

SEQ ID NO: 121294 - DNA, 122 bp, Homo sapiens
gacaaaagagagagggaaatggcttggcatactaacttagaagccacctggagcccatctcgccctgtctccagacagacagatgatatggtgactcagagactacttctgggcaaggaaat

SEQ ID NO: 121295 - DNA, 122 bp, Homo sapiens
agcaccaggcgcaaggcaggctctgtaggcggtggcagcggcggcggctgctccaagtcccgctccgcaccccacccacctccccgaaaccggaaatggctgcagcgccgccgccaattccc

SEQ ID NO: 121296 - DNA, 122 bp, Homo sapiens
agatgcaccagacgtggccagctggactcgtgtgtgtgagtgcggggccgcgccactgaccgcaccacggattcctctcagcaccacagcaatcacgacctgaatgcttcactacagttctg

SEQ ID NO: 121297 - DNA, 122 bp, Homo sapiens
gcttcccagcattaagacatgcacccacccctcttctaagattttctaaaacttgtatttcggggagaaagacctcttttaaaaaataatcccaattagtgggagagtaaatggctgacatt

SEQ ID NO: 121298 - DNA, 122 bp, Homo sapiens
ctgcctcgcgccgggcccagcgtgcggccctggaagcctggctcggccgccgcccgcgcacgctggccttctttgttactactttggctcagtggtttcctgggctcgctgctcattccctg

SEQ ID NO: 121299 - DNA, 122 bp, Homo sapiens
gtgacctccctcttctcgtattatcttcatttttctcactgctctccagtcacattgtcccgcatgttgcttctccaacatgctagacatgatcacaccttagcgtctatctataggctgct

SEQ ID NO: 121300 - DNA, 122 bp, Homo sapiens
ttcgcgagcagatcctcctggatccaccagaaagtcgaaaagacatggtggcagcacagccgggcaaccccttcccagaaagaggagcaaagccagggttcaccttccacacttgttagctc

SEQ ID NO: 121301 - DNA, 122 bp, Homo sapiens
acacttcccagaagcagcctgcggtgactgcctctgttaaatgacgtacttcctgaaagccggctccggataggttgcttagaggaagtaggcggttctaaaccgccggcggctaggcctat

SEQ ID NO: 121302 - DNA, 122 bp, Homo sapiens
acagttaactagcaacctcgcgcattctcgcgagaatgagtcccctcaagggcacaggtgcggtccccagcctcttgggcccccagtcaacctcactgtccacaccgagccctcctgcgcac

SEQ ID NO: 121303 - DNA, 122 bp, Homo sapiens
tgcacaggttcatcgtctaggtgtgtactcatgaaaacaaatctcttgtgttgcagatagcgctcgttaaggttgatttctgcatatcagtgagagttcagtgatcttacattcaacataaa

SEQ ID NO: 121304 - DNA, 122 bp, Homo sapiens
gcaaatatccctttggaaggctgagtggccggctccgcatcgcagaaggcggctcaggggcgctccgcccggactttgcctggtgcggccgcccgcgtttccgcctgcgcccagcgcccggg

SEQ ID NO: 121305 - DNA, 122 bp, Homo sapiens
tctcaggagataagagtccagggtcactccagggtatctagtctgctggcagggaggggacgagtggggacattaaccaggatggggcccctggaggagacctagtcccagggcggggtggg

SEQ ID NO: 121306 - DNA, 122 bp, Homo sapiens
taatgtcagccagaggtccggacggactgggacccagaagagccaccagaacaagacatgcggacacaggactcagcccgattcttgcgtgccttccttatcaaggctttcccctctgaaaa

SEQ ID NO: 121307 - DNA, 122 bp, Homo sapiens
ctaggtgagggatggcccgaaggggataatttttcataatttctgtttttgtacagggtacggttttgttttgttgttgcttttgagactgggtctgttgcccagctggagtgcaatggtgt

SEQ ID NO: 121308 - DNA, 122 bp, Homo sapiens
ggctactgccgaagagcaggtaaaagctcctgccacacctgggcgagactggacttagggcgcaatgtatatgctatttctggggcatttgtgggcctcaccctaaggacttctgattggct

SEQ ID NO: 121309 - DNA, 122 bp, Homo sapiens
ctctgggcctcgtgtttccacagcacagcatggccgtcccgcctgattaaagtattgatgcggcctggacgctaagcatttagctgccagacgtggtgtgagtatcttcccgtctgttcact

SEQ ID NO: 121310 - DNA, 122 bp, Homo sapiens
gaaggacttacttaccaattcaccaattaaaaactgactttctagggtgtaaggcctaagcggtcgctgcctggggaatggttttgaccgtttacctgggtcccggaggccttcatcctccc

SEQ ID NO: 121311 - DNA, 122 bp, Homo sapiens
tcctcttcccccttgaatgctcagtcagtggatggtgtttctgaaactttgagaagacatcgactccccaccccaagacaaaacattgacaaagagggaccctcccagtacctcctgtatca

SEQ ID NO: 121312 - DNA, 122 bp, Homo sapiens
cgcactgcccgacagcgggtgcagccaatggacgggaggcgcccgtcctcctcgcgctgccgccccgtccacgtcctccacagtacacaatggccccagaggaaggcccgctcgcagcacgt

SEQ ID NO: 121313 - DNA, 122 bp, Homo sapiens
tagtaactgagatctgagttaagtaagttcggggcagggacttgatcatgggaccattcacgtcattttatctattaaagaacacttggtgaggaatgatagtgtattttggatttgcttga

SEQ ID NO: 121314 - DNA, 122 bp, Homo sapiens
gccatggtcggccaactgagcgagggggccattgcggtgaggaggtgccgggggctgggccggcggtccggggtggctgcggccccgagcctcgcggagtagagagggggaggggagcccgg

SEQ ID NO: 121315 - DNA, 122 bp, Homo sapiens
gagtcataactaacaactttaagaagtgggcagtagaaagaggggcatgatgggagaaagcgtctggtctagtgtgaaatatgactcatgagaactccagtcagcaaggtgggatttgtgca

SEQ ID NO: 121316 - DNA, 122 bp, Homo sapiens
ggcggcagagcccatcctgaatagcggctttctctgctgtgtgggtgggggcctcgggctcggatgctgcctgagttggggttttggttttacagtttcccactcgtgtaactttaaggagg

SEQ ID NO: 121317 - DNA, 122 bp, Homo sapiens
ggtagacagctgagaaataccagcaggccttggaagtgaaaactacaatacaacctcaagcgtgaacaatcacaaaaacatgcctgtcagtaataaagaacctgaaagcaagggatgtctcc

SEQ ID NO: 121318 - DNA, 122 bp, Homo sapiens
tattctctgtgggactcatggaagaaattactctttagcttttttatagtatagaaactgcgttttgtatgactgtttatgtttctcattttgcacttgctgctagaaaacttaaagtcaga

SEQ ID NO: 121319 - DNA, 122 bp, Homo sapiens
agcattcattttcactaccaacaaatttattaagaaacaagtagaaaataaatcagtggtcgacttggggaccgtaatggcttccattcctaactccaagctacttgcctttggctctagag

SEQ ID NO: 121320 - DNA, 122 bp, Homo sapiens
ggctgtcttggggggtggctaccatggccacccagaaagtgaatggcagtactagctgatcgcctgtttgtgccctggacagtaggcctgccagtcactgatgtgtgggaatgaaaagatgc

SEQ ID NO: 121321 - DNA, 122 bp, Homo sapiens
ccacgacggcggggacatgaaggcgcaaaaaccctccgcggcaggagcaaaaaaccctggcggcgggggcaaaaagcggctggggtgataaaaagccgcggcggtgggggcaggaagccgcg

SEQ ID NO: 121322 - DNA, 122 bp, Homo sapiens
gctccctcacaaacactaaccccagtggttctcctcccagcactgcccctcacccctgcgcggcgtgtccctctgggaatccactcgcaggcgacctccagcgtgtgtctacttgctgcttc

SEQ ID NO: 121323 - DNA, 122 bp, Homo sapiens
ttgctgccacttggattcggtgccagcctctcccacaccccttacttttcaccttgttcccgttagctctttgtttctcgggtgcgtgttttgaatgaattaaagcagtgggttctcggagg

SEQ ID NO: 121324 - DNA, 122 bp, Homo sapiens
tgttaaagatagtttagtttccttcttttattttcctggcaatagcccaccattgtatatcgaaagaaaaaaaaattgataaattattgtctcatgaattctagccaatcacaaacgtactt

SEQ ID NO: 121325 - DNA, 122 bp, Homo sapiens
actggtctcattgccagtaacgctgtgcgcggttgagggagtgtgttgggagaatagccacgcgttgtctgtcctggaaggaacaagccagtgagagccggtttaatggggcggccggcgaa

SEQ ID NO: 121326 - DNA, 122 bp, Homo sapiens
gcctatcgccaggccgagagtgggcgtggccgacgtggggtgggtagcagccgaccgagtcggaccggccagttgggcgcgcttccgggtgtcacctccagagggcgccggctgcggagccg

SEQ ID NO: 121327 - DNA, 122 bp, Homo sapiens
ctgcctgtgaccacggagacagagcggacgatgggcttggtggtggcggcactgccaggacgccgggacacaggcggagggagacctgtcagactcaggtccacacctgctgggctgcgctc

SEQ ID NO: 121328 - DNA, 122 bp, Homo sapiens
gtacagcagaatcttgtactgcagatgagacatttcagttaataatgaatacacccccgtcgccaggaacacaccacagacgcgggtgctgcagagtgacattggtgcagatagcacaaagc

SEQ ID NO: 121329 - DNA, 122 bp, Homo sapiens
acgtccttgttctgggcccacagattaaaatccaattgctctggcaaggggcctaggcagcggtgtattgtaaagcttcacaggtgatcccattatgaaaccaaggtaaagaagcactgctt

SEQ ID NO: 121330 - DNA, 122 bp, Homo sapiens
aaacatgtccacaaattagtagccctgaatcacaaaaaattctgtagcatctgtgggcaacgtttattcaattgagatataaactgaattgcaggcaggcatcccatcagctcgtctggtgc

SEQ ID NO: 121331 - DNA, 122 bp, Homo sapiens
gttctactcactgggaatacagcagtctgtgccaagttctgttctactcactgggaataccgcagagaacaaaacacctaccatcatgcaacttacattctacttggggaaactgaaaatat

SEQ ID NO: 121332 - DNA, 122 bp, Homo sapiens
tgcttttacgttaaagtggctcccactcgcagttattagtgtgtgcggcgagcccacacccgcacacacatgaggccaactccccacaagagtgctacgcagagcagtagcaatccatctgt

SEQ ID NO: 121333 - DNA, 122 bp, Homo sapiens
tccccaatcccgcagctcgccgcacccgctaacccggacgctccacgtcagccgcgccgccgccgcggggtccgccccacctcacaccccagagcacgcagctccgcccaccgctcacggag

SEQ ID NO: 121334 - DNA, 122 bp, Homo sapiens
caaaacggggttacagaaccacacttgggaagggggtgaacccgagtctggtcttggctgcgaagttgtgggactgtgcgatccatcgattctgagcctcattattttctttcttttttctt

SEQ ID NO: 121335 - DNA, 122 bp, Homo sapiens
tgatgctaggccaaagaagaattacagtagtgaacgatttcgcctcagtgcccatctaggcgctgccccttggttcagttcttcatggtttccagggaggcagggagcttggaatacccaca

SEQ ID NO: 121336 - DNA, 122 bp, Homo sapiens
gggcagctcctattagcggtatgtagattgccactagtcttagtcagccccacactttcacggagcacacagttcacactaagagatctgtgactccccacttctcagctgatgagcctaat

SEQ ID NO: 121337 - DNA, 122 bp, Homo sapiens
ctgttgtcttagagttgttaaaataagagcccccatatcaggtttagaaaatactgtcaccgaacgaacgtcgctgtcctcagctccacctccctttcctttgacagatatggttgttttct

SEQ ID NO: 121338 - DNA, 122 bp, Homo sapiens
ctaggggctgggcccaccgacaccccacgctggcaatcccttctttactccccccgcccccgggaatctacgattactttatctcaagccttttgagggtaccagcaaaacacctttctcgg

SEQ ID NO: 121339 - DNA, 122 bp, Homo sapiens
cggcctgtcccatgcggagctgcctcttcatgccgttggcgtctcaggcagtcagtgacacgtggtctctttgcaggatgtcaccccatacatgaacccttcgcctttcaccgtctcgccca

SEQ ID NO: 121340 - DNA, 122 bp, Homo sapiens
gggcgaggggcacaggggcagcagtagggcctcgggggcaggaggcgcgaaggcggagggcgcgcaacccgcgcgggccccaaacacacacgacacacacgcccggcgggggcggggctctc

SEQ ID NO: 121341 - DNA, 122 bp, Homo sapiens
ctccagccttggtgacagactccatgtcaaaaaaataaaataaaatgtggtatatatatacggtggaacattattcagccttaaaaaataaggaaattctgtcttttgtgacaacatggatg

SEQ ID NO: 121342 - DNA, 122 bp, Homo sapiens
ggatcctccttgaccttatccagagacaaggcacgcggggttactggaggctcaagggtacggagtcaccagccgttgggtacctcctgacgcccaaaattgtccaagtctttcagaatgca

SEQ ID NO: 121343 - DNA, 122 bp, Homo sapiens
cttaagagtctagcaagtggaattgttagtagttccctcataatgaattgccacattgaacgaggaagttttctgtgttggttttatgttttgctgtcttttggacatctattttcgctata

SEQ ID NO: 121344 - DNA, 122 bp, Homo sapiens
ccagctaatttttgtatttttctggagacgaagtttcaccattcggtaatctgcccccctcggcttcccaaagtgctgggattacaggcgtgagcaccgcgcctggcctgaatgctgtactt

SEQ ID NO: 121345 - DNA, 122 bp, Homo sapiens
tgcccgcccgccgagagccatcccgagccataagaggctccatgtgaccggctgacatcacggccgccgctctgtttacaccgcgcccctccgcttcctcccggggcgggaggcgggaggcg

SEQ ID NO: 121346 - DNA, 122 bp, Homo sapiens
tggcgatgacacggtgccgcaggtgctccagggcctcggtgaagtccccgtacaggctttcgcctgtgaccgttgggtggaaggcctcagacatgggagtggacgagcactggccaaagagc

SEQ ID NO: 121347 - DNA, 122 bp, Homo sapiens
cgcagtccttctcagcatggaccgcacttgtgaggagaggcccgctgaggatgggagcgacgaggaggacccagactccatggaagccccaacccggatccgggacactccggaagacatcg

SEQ ID NO: 121348 - DNA, 122 bp, Homo sapiens
cggtgcggtggggccggtcccgggtgctcgggccaatggcgcttcgcccgctccccgccccggcccgccccggcctcctcgcccggcacacagcgcctgccagcccctgccctctccccttc

SEQ ID NO: 121349 - DNA, 122 bp, Homo sapiens
ccgaccaagggggaaaacttctgcagaaacatcaaccgagcttccgtcttaagcagccaacgagcagccacgcagcgtgctgctagcgggacgggaggcgacacgcgggcgcgtggccggct

SEQ ID NO: 121350 - DNA, 122 bp, Homo sapiens
tgttttcttctctcatctgtctgcagctgacattcctctaacttgtctggtcttgttctccgtggccttttctggtcccacatcctctgaacctctcaatcttggggtgcttcaaggttgag

SEQ ID NO: 121351 - DNA, 122 bp, Homo sapiens
cgtggcccccactggtcagcacaggtgggtctgaaggcacctgtcagggtctctgctggtcggagccagcacacaggggctgagcgacaccgacggcccaaaactgtctggtactcggtgtc

SEQ ID NO: 121352 - DNA, 122 bp, Homo sapiens
atagccaattaagcacacactgtatgtcaggctctcttctaagtactttacatgttttatcgcatttgagaaggcaaaaatcagccctgctattaaccagactcaatgacactgacaggctg

SEQ ID NO: 121353 - DNA, 122 bp, Homo sapiens
gtggtctgtgccaggaggagcactgtcactgtcttgctggagaaccgtggcagccacatgcgggcggctgggggccttcgggtggagtgggcaactttagggacccgggccctcatgcccat

SEQ ID NO: 121354 - DNA, 122 bp, Homo sapiens
tcggtggcctgggctggaacagtaggagtccccggacccagagcccagggggctgctcagcggaggctgtgctggcccggaagaaacaccgtcggcggccatcgaagcgcaaaaggcactgg

SEQ ID NO: 121355 - DNA, 122 bp, Homo sapiens
gggccacgctccctagatgggccacgctccctagctgaaccatgctcccttgatgggccacgctccctagctgaaccacgctccctagatgggccacgctccctagatgaaccacgctccct

SEQ ID NO: 121356 - DNA, 122 bp, Homo sapiens
ttgaagggattttcgtccttatgactgggccttacgactgggtagagtggtggaatggggcgaggaagaaacctactagagtttcttgtgtaaggaagtattaataactggttccttcctcc

SEQ ID NO: 121357 - DNA, 122 bp, Homo sapiens
ctgacaaggctccccttttcttccctccatccccccaaccgaagaagagagagggggaggcgggagcagagactaacgagaaacaacaatgaggagataactattacaaaggcaaacactgg

SEQ ID NO: 121358 - DNA, 122 bp, Homo sapiens
ggtcctgctgctgctgtgcccagggtagacccctcctttccacagggatgcttctgtttgcggggacggtcggtgcagctgcaaggctggaggcggccggcaggtgcccggtgctggctgca

SEQ ID NO: 121359 - DNA, 122 bp, Homo sapiens
cgttcgcaccgcaggcggtgcagtgctggaggccggaagctgcctgctaatcggctaccccgagtggagcgccggggcggcaggcgtgggatggctgcgggtggcggggccggcggagaggg

SEQ ID NO: 121360 - DNA, 122 bp, Homo sapiens
tgtctaaagtagtcggcgaatattaaaatagtcctaacaataaaataacactcagtcaaccgtgtagccttcttccgagtggggaggagaatagctcactctccctagagggcctaagaaag

SEQ ID NO: 121361 - DNA, 122 bp, Homo sapiens
aaactgaccagtgcagagtaacagggaaccggactccaacaaattaacagtgccacgtgccggtcacacttgtgcacagaggcaaccaaccgttctccttcgtgtgccagcaccgctctggc

SEQ ID NO: 121362 - DNA, 122 bp, Homo sapiens
ggctgagggggagggtctccagggtctctgaggagggccggtgtcccgggcaggcggggtcggggtctccggagttcctggggtctgagggtgtctctggggtccctgagggaatctgtggg

SEQ ID NO: 121363 - DNA, 122 bp, Homo sapiens
tttttaaagacaaggtcttgctctgtcatccagctggagtgcagtggtgtgatgacagctcgcagatcacagcaacctcgaccacctggggtcatgggattctcctgcctcagccttccaag

SEQ ID NO: 121364 - DNA, 122 bp, Homo sapiens
ccgcgacctggggagctctgtagcggccaggcccgggaggcacgggcccttcggggatgacgtcacgggcgggggccccggacacgcgagccttgcgccccacagacggcggcgcagcccgc

SEQ ID NO: 121365 - DNA, 122 bp, Homo sapiens
accctttggacctagaggaaaaaaagagcaaagacaaacgatgaaggaatgaggaccacacggaacacagggaggacacgcagtgggtgggctgcacgccacatcctacccagcaccacgag

SEQ ID NO: 121366 - DNA, 122 bp, Homo sapiens
ctccggcggccgctcggcgcgcggtggcggctggtggcgaggaaaaaatgggccattgcccgagcgatcagtccatataaggctgggctccactcacgaacctggggaggcggggagagggg

SEQ ID NO: 121367 - DNA, 122 bp, Homo sapiens
cttgaaacaagatcagagacagcaatgaaaggtcagagccaagagggcctatgcagtgggcggacaggcttgtcatcgtgaccctcaagcttcagagggtccgagatgctcagaccctctgc

SEQ ID NO: 121368 - DNA, 122 bp, Homo sapiens
atactttagtaagtgaactatatggtactgaggcaggatagatagtcaaggagatgaccacgtccttgggacatggcaaccacactgtcaacagcacaatgagccctgtaaccatgttcatt

SEQ ID NO: 121369 - DNA, 122 bp, Homo sapiens
tggggctcgcacctactgagccgcgaagaggcggcctacatggtggacatggcccgcgagcgcttcgaggccgtcatggcggtgctcagggagctgccgcggcccatgctgctggtgctgcg

SEQ ID NO: 121370 - DNA, 122 bp, Homo sapiens
tccaggccacgcccctcacccacagccctcggaggctctctccgcggctccgcctccaagcgacctccgcaagtcctctcgtaacccctggagtagcgccgtccccgggcggcggccccgcc

SEQ ID NO: 121371 - DNA, 122 bp, Homo sapiens
tgctcggcgatcagcaggatctcctctgaggtaggcttctggttctgcaggcagagggctcgttagcccgaggcccaccgcccgccacccctcaggtgagggccacccaggagaggggggcc

SEQ ID NO: 121372 - DNA, 122 bp, Homo sapiens
gctcttaggacgcagccgcctcatgggggtccaggggctctggaagctgctggagtgctccgggcggcaggtcagccccgaagcgctggaagggaagatcctggctgttggtatccttaacg

SEQ ID NO: 121373 - DNA, 122 bp, Homo sapiens
cggggctggccaggggggaagggaggggagaagagggagccgggcgtctcagcgcgggagcgggtttcagggtccccgggcccctcctcgcgccccgccgctgactataggggcggggccgc

SEQ ID NO: 121374 - DNA, 122 bp, Homo sapiens
gggggtcggggtcctccggccgtcctcgccgccgtccctagcccgccgcccgcttctccccggagtcagtacaacttcatcgcagatgtggtggagaagacagcacctgccgtggtctatat

SEQ ID NO: 121375 - DNA, 122 bp, Homo sapiens
gcatcagctgccgctttctcagggcaatgctgcgtctgccttagttgcagaggaggaggacgaagggttttctgggtccggagtggtgctagccagatccactgcacgcttggggtttccgc

SEQ ID NO: 121376 - DNA, 122 bp, Homo sapiens
ctctgggccctcctcactctgtcatctcctgcactgcagtccagggtccagatagatttccgggatacagcaccttcacacctccaggccaggacccttgcttagtcccagtgcctgcacca

SEQ ID NO: 121377 - DNA, 122 bp, Homo sapiens
tcagctgtttttcttcccccgcgtggccaggaggggtaaataatatgcagtggggcggggcgttctggaaggggtgtgccagggagggaatgatgggggtcccaggcaaagctccgaactct

SEQ ID NO: 121378 - DNA, 122 bp, Homo sapiens
gctgccgtccggcacagggctgcccctcagaatgtgacactaatatggcactgggaccatcggcagctcctccgcccttcccatcacagccccggaagtcccattgtacctccattggaacg

SEQ ID NO: 121379 - DNA, 122 bp, Homo sapiens
aaatggccagaaactctgaggcacactccggaggctgcttccggggcacctcggcacggccgcttttccatcccggccctcacttgatgcggtccagcagggttgaaattgtttgaaatgct

SEQ ID NO: 121380 - DNA, 122 bp, Homo sapiens
cctggcggggctctcggagccgctgagcgggaagaggcacaggacattgctgggcgatcgcgtcatgtccgaaggcggcctccccgtgccaccccacgggagcggcggccgcgctggctggg

SEQ ID NO: 121381 - DNA, 122 bp, Homo sapiens
gcccagctcatcgagcttcttcccagctgtgaacaggagggcctgttccctaattcttgccggtaaggtacttgcaaaaatctgcttccagactaaaaaattgcactttaaattaccttttt

SEQ ID NO: 121382 - DNA, 122 bp, Homo sapiens
acccaccccccgggctccatcagggatggctgtgggtgcaggttgtggccacccatgccccgggctccatcagggatggctgtgggtgcaggttgtgaccacccacgccctgggctccgtca

SEQ ID NO: 121383 - DNA, 122 bp, Homo sapiens
ctgaaggaaagcaggcacttaaagtttatcccaaacaaaactgtaattttaactggtccccgagttgagcctcactcgatgaatgacttccagggcctttggctctttgggactaaacgaga

SEQ ID NO: 121384 - DNA, 122 bp, Homo sapiens
ggcagcagcgagcagtcacaggtattcagggtcctgacgatgctcccaccaccatccaaacggtttctaggttatcaccgtcacatactcgctaagcccaccgtgcagctgtgtgacactaa

SEQ ID NO: 121385 - DNA, 122 bp, Homo sapiens
cgttcacactgtctgtcctacgtccgggatggctctgttgcctcctctccatggactggccgtgcataccttgtgtggacagagttgggacggtgctcccggctgcatcggccgcctgtgct

SEQ ID NO: 121386 - DNA, 122 bp, Homo sapiens
cgagcccgggacccgctggaggtgagggctgagttttaaccactcctcacctcccaggctcgcggttggacgggcggaagccctgtgagtccagatcgctttgtgtcgggggtggggaaatg

SEQ ID NO: 121387 - DNA, 122 bp, Homo sapiens
agtgaaagagctgctggggattggggtctgcccctgcctgctgtgtgacctcaggcaaatcgcctcccctctctgcgcttgcctttagcgcccgcgagtcttgtcttccacgctgaaaaagg

SEQ ID NO: 121388 - DNA, 122 bp, Homo sapiens
ttagcggggcactgccggccaccagaccacaggcaaaggatcctgaggcagctacagcctcgaaatattttaagatggcagcctaggctaagcttgcctttttcaaacagcccagcgtcact

SEQ ID NO: 121389 - DNA, 122 bp, Homo sapiens
cttttagtgttccttgtcctgattcaatagaatgtttgaccacgggataccaagcaactacggggttccaagtgcctgtgtgacccacaaagtcatagatggtacaggcccaacagcattca

SEQ ID NO: 121390 - DNA, 122 bp, Homo sapiens
ctgaccgccagggggcgactgggccccaccgcggcctccagctccttcagtccttcggcccgaggaagctccttggagggagcttgtcatttccttcacagccccaaatacacgttcctatt

SEQ ID NO: 121391 - DNA, 122 bp, Homo sapiens
gggtaaccacctatctcctcccagcctcaaggcaggcctgggcctatgggctgcatcccacggtccagccaggcctgcttgccagcagtggccatgtgtcccagcctacagaaggcctgccc

SEQ ID NO: 121392 - DNA, 122 bp, Homo sapiens
gctgaactggagaccagagacagacgcgagatggagagacccacggacagtcgccgacaccgggcagaggaagaaatacatacagaagcagagacaggctggcacaggagaggctctgggga

SEQ ID NO: 121393 - DNA, 122 bp, Homo sapiens
gccagggccgttcctcccagccccaactaacgcacccatgaaagcacgtggaaaaggcaccgcgaaaccccagcccggggcctctgacagctcagcaccaggctccacatcaggtgagggga

SEQ ID NO: 121394 - DNA, 122 bp, Homo sapiens
ttatttggaaaacacagaaagcctttgtttgcctcatgttccttgcttagttaaggaatccgcaatgcattttctaaaagttatttagagtgctcagcagtctaggatgttcccacccaacc

SEQ ID NO: 121395 - DNA, 122 bp, Homo sapiens
catccaaaatatacttaaaaaaaaaaggggaaaagaagtagtccgtaccgggaaaggctccgccccctcctggatcacaaacccttcgataacatgcgtcaggatttggggtttcacaatgg

SEQ ID NO: 121396 - DNA, 122 bp, Homo sapiens
ggccaaaggcgcagcggcttctggtcagagccgcagaggcctgagacgtgggccgcgccccggcccaggagaccccgcggccgcgccctaaccctcagtctcccgactgcgactgcgacccg

SEQ ID NO: 121397 - DNA, 122 bp, Homo sapiens
ctggcaggagggaccgcagaacaggctggtcccaggggcctccgggcagcaatgaggagccgtgtcagagcaggctgtgcccgggggcctccaggcaggaggccgctttaggttttgcctgg

SEQ ID NO: 121398 - DNA, 122 bp, Homo sapiens
taatgtgtggctgtgggtggggggcggcgaggcggacaggggcagcaggcagggtggccacggtggttcaggggccatggtcccaacctccccagccctggcccctgccctggtcacctggt

SEQ ID NO: 121399 - DNA, 122 bp, Homo sapiens
gccaccctcagccccaccccttcccagcacaggccctgttggggcatctgaggagacccacgtggcctcatgacaatatgtgtgtgcatgctggttcacgaacacacacacacatgcaacca

SEQ ID NO: 121400 - DNA, 122 bp, Homo sapiens
tagtgggaccacaggtgcctgccaccacgcctggctaattttttttgtatttttcagtagcgacggggtttcaccgtgttagccaggctaattttttttgtattttttagtagcgacggggt

SEQ ID NO: 121401 - DNA, 122 bp, Homo sapiens
caggagagaaaaacaacagaccctttctcttccctctgcctgcctctagaagggacggagcgcttgtgcctctctggtgagaatagggaagagcaagtgcccttgctaagtagggaggagaa

SEQ ID NO: 121402 - DNA, 122 bp, Homo sapiens
gctggccctgttgctctacaagaaggagaggaggtaagcgggtggcagggcgaggtggggcgggtggatgcatgcctcccatagctaatcttggggtcagttttgtggggttttatttattt

SEQ ID NO: 121403 - DNA, 122 bp, Homo sapiens
taacatcattacagtagatctgataataatctgagattgaccaaggagcatggttctctgcgagtacttctacatcagacttttattatctccatttttcccacagcggagtacattactga

SEQ ID NO: 121404 - DNA, 122 bp, Homo sapiens
gccgcccctgctgcttgctgtgtagatgcccttctctccgactcccgcattaacttttgccgctttccgcccctctcctgggattgcctctctcttcaaccagagtctcagtctcgtcaaat

SEQ ID NO: 121405 - DNA, 122 bp, Homo sapiens
atgccggggctgtgcttacaagatcgtgctccagtccgcatggaaaattactcccaaagacgtggtcggagaggtcgagatctctgagccttggcccccactgcttccacttttgactgatg

SEQ ID NO: 121406 - DNA, 122 bp, Homo sapiens
cggcgccgaggcgctggagctgctggagcactgcggcgtgtgcagagagcgcctgcgacccgagagggagccccgcctgctgccctgtttgcactcggcctgtagtgcctgcttagggcccg

SEQ ID NO: 121407 - DNA, 122 bp, Homo sapiens
tctagagtctaattgtagaaaaagaacacatattttcacaaaacaaaagaaggcttacaacggcctgaggaggcagaacaggaacaccctgtactcgtgcaaatgcccctggatgctcccag

SEQ ID NO: 121408 - DNA, 122 bp, Homo sapiens
tttctactggatagtcttcattaatttcttcacctgccgttatggctgactcacggccttcgactccagcctcccggaaagcggtcgggcaacgatgacgacaatgacgcgccagctctgcc

SEQ ID NO: 121409 - DNA, 122 bp, Homo sapiens
gtgctgtgatcccgccaaaggagaagctgccttcccggggaaggggcagagaggggccggcgggctgaggccaaccagcgcagaaagggcctggcagccattactgtagcgctggcggctct

SEQ ID NO: 121410 - DNA, 122 bp, Homo sapiens
catcttctgatttgactttattcactcctgtgacgacactcaccgcgctctacccaggtccggttccaggtggtccaggtatacagcgaagcccctgcctcccgagtttgtgctctgatggg

SEQ ID NO: 121411 - DNA, 122 bp, Homo sapiens
taaaaactggtagaaccaaggaatgctgaatttccaaacgcctcctaagggaactgaaaccgcaaattggccacttggctgagaaatgctctctttccctccaacacacactttccttttcc

SEQ ID NO: 121412 - DNA, 122 bp, Homo sapiens
atgtggtgacacagggtgccacagcaacagcgcgacgttgtcaaagcgacaggcaggaagcgcaaaacaccacgggagaacaggaggccccacagaccacggccaagccaggccactgctag

SEQ ID NO: 121413 - DNA, 122 bp, Homo sapiens
tggagggtttgcctcctccacctgaagcacatggccccagctccctgtcctgggctcaaacgtggtctttgcattcatccctgatgaagttcccctgagagcattctgctcattagtccaac

SEQ ID NO: 121414 - DNA, 122 bp, Homo sapiens
gacgtcctcttgtcccccattccctttcctctactccacactctgcagaggaagtccttgcgcaggacagtgggcagtttgcagaagagattatgtggagaagtttcaggcagagggccagc

SEQ ID NO: 121415 - DNA, 122 bp, Homo sapiens
cattccgggtactaaaatcatttcttgtccccgccttcagctccacaaatagttcagtcccgccccgcagcgtccgacgggaaaggaaagggggaggacgccatgttggacggaaccatctg

SEQ ID NO: 121416 - DNA, 122 bp, Homo sapiens
ggacgttgacccctggccggtgctgggcgcttgctcttcagtcatcttgccctgacctggcgtggcaggcccgagcactgctcttttacaaggaaacaggctcagaggccttgagtcacttg

SEQ ID NO: 121417 - DNA, 122 bp, Homo sapiens
ctgctcccagacattctcttgttatctctctgtttcctagcctacacacgtgcacagacacgtagctgctgttcaggaactgagctaatggttttaaagtctgttccttatctttgctggag

SEQ ID NO: 121418 - DNA, 122 bp, Homo sapiens
ctttcccattttgaaggaagtgagcagatgttttctggttgctgtgtgggactgcgggaacgtcactgtatgtatagcagccctgactgctgcctccacaggaaatcacacaaaagggccca

SEQ ID NO: 121419 - DNA, 122 bp, Homo sapiens
tccccttgaagagctgctgtagtctctgcttggcctctttgctcagcttcaccatggcgacggccgtgtggcgcagggaggaccccttacagcaaccacagcgtcgggaatccgaaagggaa

SEQ ID NO: 121420 - DNA, 122 bp, Homo sapiens
atgtgctggtctaaagagggaagcactaaggtcagttaggaagcagaagtgggagaaggacgagaatgactgagaccctttgatggggttttcacgagaaggaatggaaggggcagggtagg

SEQ ID NO: 121421 - DNA, 122 bp, Homo sapiens
ttctccagcggcatcgcggcgaaggggacagcggctgacaggacacaacttggttacgaccggctgcggcagcggaagcgggaggagtcggcgaatacgcccggccgcctgcggcccggctt

SEQ ID NO: 121422 - DNA, 122 bp, Homo sapiens
catgctcaaggcccacaaggagaagtgcttccgcgtcagccacaccctggccggcgacggcgtccccgctgccccaggcctgcccccaacccagccccaggcgcacgcactgcccctgctcc

SEQ ID NO: 121423 - DNA, 122 bp, Homo sapiens
ggacctcctttctcagggacatgtcttggtttcccctcatggcctcctttatcacacctgcgcgtctctcgcgcgccgggatcctttctcccaacgttttacccaggactgcagcccttgcc

SEQ ID NO: 121424 - DNA, 122 bp, Homo sapiens
ccctcagcctggaggctgcagccgctcgagtcggcccgggtgggggcggggtgggggcggcgcggagggcacggagattacggcggcgccacccgggacatccagggccccgaggccctggg

SEQ ID NO: 121425 - DNA, 122 bp, Homo sapiens
tggggaggtgccagggtgtgggcgcagcagggagcgggtgtgttaggcccccgcccatcccgcgcccgagccccatctggctcgggctggcacctcgaatccacgtgatttctcggcagcag

SEQ ID NO: 121426 - DNA, 122 bp, Homo sapiens
cccgccgcggcctcggggaaggggccaggcaggcggcgcctggacccggggacccgagggcgcagcagcctccggcccccgcccgcccgcccacctgcctcccaccgcccgcccgcccgcag

SEQ ID NO: 121427 - DNA, 122 bp, Homo sapiens
cagatccaggctcaccagtcctgtgccactgggcttttggcgttctgcacaaggcctacccgcagatgccatgcctgctcccccagcctaatgggctttgatgggggaagagggtggttcag

SEQ ID NO: 121428 - DNA, 122 bp, Homo sapiens
gggcctccagagggttgcttcttgtcccaagtagcctatggtgaccaggtggccctcaggcgccccccactggacagaagtgtaaccttggaacactggcaggggctggtgcctcacttagg

SEQ ID NO: 121429 - DNA, 122 bp, Homo sapiens
cccccttgaagctgccaccacagccaggacggtgcccggtcccacacagctgccagcactcgctgcggcccccacaagcccgggctcccggcagccaggagctgaccagactgcagctgtat

SEQ ID NO: 121430 - DNA, 122 bp, Homo sapiens
ccctccggcttccaccacagctcagatggaaagggagagtgccctggattggccgcgggccgagcaggggccatgccttcatctgcctagggctctaattcaccccagcctgtaattagcca

SEQ ID NO: 121431 - DNA, 122 bp, Homo sapiens
gcgccttcccgcagtgtcctggatgggggtgggcgccgtgcaggcctggtcgcctgcgcccgcgacgggggcagcaggccacgctccccgtcggggtcccgccatcgccccctccctgggcc

SEQ ID NO: 121432 - DNA, 122 bp, Homo sapiens
gggagctggtgcacagtatacaatgggtcctcatctttaggaatacaaacaaaaagaacacgtacagaatgtttacatgagcataggctatgtctggaaagacatacacaaggagccagtag

SEQ ID NO: 121433 - DNA, 122 bp, Homo sapiens
aaggcctcatcatccaaagtgtccagccagagggctgaagcttagggccagaggcaggggcggagagagaccgagcctctgccctagtttttattcttcaactaaccactgctctatttatt

SEQ ID NO: 121434 - DNA, 122 bp, Homo sapiens
actggcgggtggagcaagtcaagcagggcagctcatgaacgcccgggagtccaggaggcccgggtggggacgcctggatgacgtcactcgaggtgggcaggccccgcgcggggcgtgacgtc

SEQ ID NO: 121435 - DNA, 122 bp, Homo sapiens
gagcccgggcgacagagaagcagcaggaacggagcccgggcgacggagaggctgcaggaacggagcccgggcgacggaggggctgcaggaacggagcccgggcgacggaggggctgcaggaa

SEQ ID NO: 121436 - DNA, 122 bp, Homo sapiens
ctgggaatcagaatacctggattcctacagccctgactcccagagagatcctgggccagtcgtttcctctcgctggctttggactctgctctgtcctgtgggtttaaaaagttgaaagctct

SEQ ID NO: 121437 - DNA, 122 bp, Homo sapiens
agcctgtgtcgtccatcaacttccagaggccgccgcttcatgaattacacaccatgcaaacgtccggccagcggcttaagtataaagcgtgagaaacacaggagatcattccgtgttcgtgg

SEQ ID NO: 121438 - DNA, 122 bp, Homo sapiens
gcaagcacgtgccgccactcctgactggtttttgtatttttggtggagagggggtttcgccgtgttggcagggctggtctccagctcctgacctcgagtgatctgcccgcctcagcctcccg

SEQ ID NO: 121439 - DNA, 122 bp, Homo sapiens
acatcaagaaacttccagagacagatctgactctgaagactgcagggcactgcaagaactcgatgggtacctgaggccagaaactggcagagctcgcggaggaagccaccagcccctggccc

SEQ ID NO: 121440 - DNA, 122 bp, Homo sapiens
cagcaccctgccctgactgtaaagtcaggcggcctgctcctgttccgcctcctaccggcccgcctgttttttcgcctgtggcttaggaactccagcctcacctgatctccgaatggacctca

SEQ ID NO: 121441 - DNA, 122 bp, Homo sapiens
tcagggcccaccctgcctcgaggttgctgtgggatactgggtggataacggcgatacaggcgcaaacacgtgatgctgtcgtgttctgccataaaaaggcatgaagtctggacacgcgctac

SEQ ID NO: 121442 - DNA, 122 bp, Homo sapiens
accgccccggaactggctatgggcgggccccttgcagttgacgcgggggcggggagtcagcgagggcgagcctactggagtttgccgggggtgggaagaaggtgggcctcgagcaaagccgc

SEQ ID NO: 121443 - DNA, 122 bp, Homo sapiens
ggtgcctggtacatggtctacgttcgacaaaagtgaattctgtctcctgtctctcctgcccgccgggtcccgggggacccaggcattccggccttcggtcggcccccccacgccggccctta

SEQ ID NO: 121444 - DNA, 122 bp, Homo sapiens
agccacaggcgagatgaggagggttagggtggggcctgggtttctggggtgatgactgagcgaatggcaggactatgcacattgccagaaaacaggaggaagagcaggtctggagtaaggtg

SEQ ID NO: 121445 - DNA, 122 bp, Homo sapiens
tgagaatcctgcctatgctgttcacaggcccagagccatggctatctcctcttcctcctgcgaactgcccctggtggctgtgtgccaggtaacatcgacgccagacaagcaacagaacttta

SEQ ID NO: 121446 - DNA, 122 bp, Homo sapiens
gtggccctcggcccgtcttgaccgagtgataaagccgggggtcctcttctgctttgtactcgcctggggccactgcatcccgcacgatgtcgatggtgtctgagggagttcggcaagcattg

SEQ ID NO: 121447 - DNA, 122 bp, Homo sapiens
tgcgggcattggggccatagcctgggtgttcacagtcagggcagaggaagaagggggacgcggcactgggactcagcttgcacggagccaaactctggccccaagttgcccccttctaaatg

SEQ ID NO: 121448 - DNA, 122 bp, Homo sapiens
tgtcacaggatgggtctggggagaagcccatgcacacagctcctccacaggccccggccccgccagcccagtcctggacagtgggtggggacatactcaacgccaggttcattcgaaacctg

SEQ ID NO: 121449 - DNA, 122 bp, Homo sapiens
atggcatatatcagaaagactgtgagggcatgccttcactggatgagacacacagaaaggcggcagagcagggtgactttatgttaattagtgaagtaagttcatctgaaaaagctacataa

SEQ ID NO: 121450 - DNA, 122 bp, Homo sapiens
ccaggtgggcggtgacctgagaggtggagtacaggactggaccttggactcagggtctcccgcgtcggcagcatcgctgcctgtcctctgatgcttccctcggcggggaagagggggctgtt

SEQ ID NO: 121451 - DNA, 122 bp, Homo sapiens
ggggggccctggagggagagagggaggcctgcctgatgcccgccctgcctccttcctgcacggtacctgtgcttgtagagatagagcacgaagcccgcaataatgagggcgatgaaaggcac

SEQ ID NO: 121452 - DNA, 122 bp, Homo sapiens
agcttctttgaatctggaagtgcggcatcgtgaaccctcctagcagggtgccctgtcctccgctgaccggactgagccacattgtctgctctgagtccatgtttcttcagcactggtccaaa

SEQ ID NO: 121453 - DNA, 122 bp, Homo sapiens
tggttttgtttgtatttaaattgcaagttttgaactgtcagcaacacctaacagagttgacggatcactgggctcctgcctaataaactctgttcaccgacttcacatactcttggttttcc

SEQ ID NO: 121454 - DNA, 122 bp, Homo sapiens
tcaaaccagagaggaagtgctgcggcttccctggtgggacattgtgctctctctccctctcggagggcccctccctctgcactttcagcgatttcaagatccgcacattactctttatcaac

SEQ ID NO: 121455 - DNA, 122 bp, Homo sapiens
gtttcactatggtcctggggcagcgagctcccgtggggtgaaaggcgccctctgcagtaccggatgcggcagcggctcagaagggctgtgcaggggatcgctggttaattgatcagagccag

SEQ ID NO: 121456 - DNA, 122 bp, Homo sapiens
acatctcctcccagttcagcagtcaccattcctctttgggattacaaaaaggtgatagcacgcctgggcctcattataacaagactccagggggtgtggaaagagcttttctccagtctaaa

SEQ ID NO: 121457 - DNA, 122 bp, Homo sapiens
cactcttgtcctggggctggaatttggttgtattgatcaatgctggaattaatgggtcaacgggagggacctgactcagtaatactagccatatagagtttgccttgtcttattctgaggat

SEQ ID NO: 121458 - DNA, 122 bp, Homo sapiens
agcatgtgtggtcacaacccaagtgtgcaggtgttgatagaggatgtgaaagtgtggaggcgagtgactaaaccagatacccaaccggccaactctcacttgtggcagggcctggtctacca

SEQ ID NO: 121459 - DNA, 122 bp, Homo sapiens
aggaccatgtgagcagatatctaagtgcgtggcatctgggccccttggctagatggtggtcgatgttggtttctttgtgttaaccccaagaacattcagtagctcagggtttgcagaggttc

SEQ ID NO: 121460 - DNA, 122 bp, Homo sapiens
aagaaaccaccaaactgttttacaaagtgactggaaaattttacatttccaccagcaatacgtgagtgatccagtttttctacctttttttaacattacgttaatctatgtagatggtaaaa

SEQ ID NO: 121461 - DNA, 122 bp, Homo sapiens
gacagatgcatggctcatatgtagacaccacacaccatattccctatcagcaccgacggacgcatggctcaactgtagacaccacacaccacattccccatcagcaccaacggacgcatggc

SEQ ID NO: 121462 - DNA, 122 bp, Homo sapiens
cagcgggtccctgctctgccgtccggggatcccgcgggtggtccggagcccggggcgcggcgcgccgttcattcccgcgtcctggcggggcctgcttcttcccgagccctctccctgcggct

SEQ ID NO: 121463 - DNA, 122 bp, Homo sapiens
caggtgccggcttctgtgtcctcagcgggtgcctcagtcctgccccggaggctgcagggacgcagactccccaaggtgcatggaccctgccccgggcagccgctggacttgagacttggggt

SEQ ID NO: 121464 - DNA, 122 bp, Homo sapiens
ctccatttgtcttctgcccataacccaggagcccagagtcctagttactggtctcttttgcgtcacctattactgtttgctgtagagatgtgaggtcctactctcttggctcagttcattag

SEQ ID NO: 121465 - DNA, 122 bp, Homo sapiens
tggcgagcaaccatcgaaaataaaacaattgctgtccttggcggcaaaggcctctatggacgcctccagggcagcgcagggaaccaaagggcaccccagatctctgcgggttcgcgccttgc

SEQ ID NO: 121466 - DNA, 122 bp, Homo sapiens
gagcggttaagagggtgagaggcccgtcaaactctttttggtgtttaggcgctcctcctccgggcggtgtgttgggagggcccaggtcaaggcgcgcgtgggcggaagcggcggcggcggcg

SEQ ID NO: 121467 - DNA, 122 bp, Homo sapiens
cctgtttccagaaaagggccggctcctgatacacggccatccactggggagtgcagaacacgcatttaaaaatgagcagactagatacaggtcacaaagactttgctgatgaaacagcttgc

SEQ ID NO: 121468 - DNA, 122 bp, Homo sapiens
cccaggctcaggagccccgcccgggacggagcctggcttccccgggacgcctgcagcgcgcgcccacagtctcctgcgccctggccccggctccgcgagcccgacccccaacccgaacccca

SEQ ID NO: 121469 - DNA, 122 bp, Homo sapiens
tttctgggccaggcagggggagggaccgggcaggtcagaggcagggcacttcagctcagacgtccaggcaggccccaaaggggagctgtgtgtctccactctgagtgctggcagcccgccac

SEQ ID NO: 121470 - DNA, 122 bp, Homo sapiens
ggagaggacgtgggcagctcgtgaacccggggtcccttcctggagaggacgtgggcagttcgtggacccgggtcccttcctggagaggacgtgggcagctcgtggacccggggtcccttcct

SEQ ID NO: 121471 - DNA, 122 bp, Homo sapiens
cccagaataagaaaatgaatgaatgaggcaaagaaacagatttgtcactccccacgcgatcgcgcccacaaaagaaaacatggttttaaggcgtggaaaatgaagttgtactacagacaaaa

SEQ ID NO: 121472 - DNA, 122 bp, Homo sapiens
cacatccaagaagactctcatgatccgaagtaatttccctccctaccatatccctccctgcgctatcaggaagggataaggttcagtataacttagtaaatgaatgggatgctcacctcttt

SEQ ID NO: 121473 - DNA, 122 bp, Homo sapiens
gcccgggcgaggctgcgccccattggccaactgcaatgaggtcattgcgggggcgggggccggcggcggcgcaggggcggggctttacggacgcaagcacgtcgaagcgctgctcctggagc

SEQ ID NO: 121474 - DNA, 122 bp, Homo sapiens
ttgtaggtcagggaggatggactgagcccagatccggctgctgcacctccacgcggtgggcggtgagccacggctcctgtcctcgccaggtcacccccagggtctggccgccctgtctcagg

SEQ ID NO: 121475 - DNA, 122 bp, Homo sapiens
tttgactccccgcagggaggcaacacctgaacagtgatatcagccaagtactgtggatgacgggagtccccagcccggctctccctgccctcccatgcccaggcctccagctctgaccctga

SEQ ID NO: 121476 - DNA, 122 bp, Homo sapiens
tcccctcgtggtcggaggagtgccctacaggctggcggctaggttgcgacttggacaaatcggcggaggcgagcgtcacccgactccgcgggccctgagccttgatagcctctgtacttctc

SEQ ID NO: 121477 - DNA, 122 bp, Homo sapiens
agtaaacaagtagggtacagccaagggtaaaagtttgtcctcatctaagtatctgctctacgcttcaactgcctcataagtaaaacagagctgagttacaagacttctcacgagtgttactc

SEQ ID NO: 121478 - DNA, 122 bp, Homo sapiens
cggtgtcagcgccccggacgggggtgggagctttggagcccaccctgggggagaccacgccgcacccccgcccagccccgcgcacccccagaggcttttgcagagccgggaagttggctgga

SEQ ID NO: 121479 - DNA, 122 bp, Homo sapiens
tcctcaggcggaggcgaccttctcccgggccgacacaccctctgcatagtcactgcatcacgcgtgtgcccacacctgttttcccaggcagtcccctgaaaggggtggtggggggagcaggg

SEQ ID NO: 121480 - DNA, 122 bp, Homo sapiens
cagaagattcttctgaccctgggattgttgaggaatctttgttcttttgtttggcttcttcgtgccaggcctcggggcaggtgggcccattcagggaggccaggtgtaccccgggagagggg

SEQ ID NO: 121481 - DNA, 122 bp, Homo sapiens
accgcaaaatccacaatctggggacttactgaagatgttttatagccttcattacttggacgaataacaaaggggaaaaatgctaaaacttggattttaaaatctgagaagccaccaggtcc

SEQ ID NO: 121482 - DNA, 122 bp, Homo sapiens
tgtttcttgagttggttcctggaaagggagctgaaatggtttaatcgctcttccatgaaacgcaggcggtgaggacagccaccagacaggtaaacacactgtgcattgatccttttacgact

SEQ ID NO: 121483 - DNA, 122 bp, Homo sapiens
cagcagctgctggcccaggtgctaagaccctcactgcccggggttggcggggctggcgggcgggccggccgctccaagtgcggggcccaccgagcccacgcccacccggaactcgtgctggc

SEQ ID NO: 121484 - DNA, 122 bp, Homo sapiens
tttcttccaggggctggtgtccaaaagcagaggtggagcgtgcctgacaaacaggccacgcgggggccctggagagggccacctcgcacccaccctggttgcacctacagcacccaaggtcc

SEQ ID NO: 121485 - DNA, 122 bp, Homo sapiens
ccaggcctcacctcttcagccagggccagaggaagtacaggccaaccccgctgcttaacacgcctgaagagagggtggcctctttccctcctagggctctgcgggaaaagaagcctcagggc

SEQ ID NO: 121486 - DNA, 122 bp, Homo sapiens
agtagtcgagctgaactccttcctacagaggtttatttgaagaagaaagcagatccatgtcgcacttaagcctctgaaaccattttaattttgaggttttgcaggagacgtctttaagtaac

SEQ ID NO: 121487 - DNA, 122 bp, Homo sapiens
ggcggggcccgcgcgtcagccgcgggagccggccaatccagtggctctcctccgcggtcgcgtcataggccgaacaaccaaacagaaaagtttaataaacagcggacggaggggccggcggt

SEQ ID NO: 121488 - DNA, 122 bp, Homo sapiens
gctgaccccgtcccactgccgagcccaggacatggccgggcctctcgcagctgcaggaaacgctcttgggaggagccagtccttggaggaagcctgggaaggagaccctcagcctgcagccc

SEQ ID NO: 121489 - DNA, 122 bp, Homo sapiens
gatccagctgaaccagtgccgctcggcggaggaggctctgcgcatgttcgccgtgtagggcgtgggcagtaaaggctgttcccagcactcccgcctccgcttctgtcccgccgcacgcgtcg

SEQ ID NO: 121490 - DNA, 122 bp, Homo sapiens
agggtttgtttgagctgagcactggggttaattgcccacctgtcctcagcccttctcaaacgtctttcatgctggctgaacctaggggacgactaccctaagggcagtgctcaaagggaaag

SEQ ID NO: 121491 - DNA, 122 bp, Homo sapiens
gggtaagacaaggagcaaacatatatttgtttctgatgccaaccacctgaagcatcaaatcgtctccactttttagatttcaccccggcacatcaacatcgctctaaagagaaattcagctg

SEQ ID NO: 121492 - DNA, 122 bp, Homo sapiens
ccctttccttccagatcctgggtactgaaagccttagggaagctggcctgagaggggaagcggccctaagggagtgtctaagaacaaaagcgacccattcagagactgtccctgaaacctag

SEQ ID NO: 121493 - DNA, 122 bp, Homo sapiens
aaacgcatcttttttttttttttttcacggttattaaaaccgagggtggggggcggaggacgcacgtgggaacccaccaggcgcctcagcttctgcactacaactcccagaaggcgccgcgg

SEQ ID NO: 121494 - DNA, 122 bp, Homo sapiens
gatcctccccttccaatgagactttctgattgtgtctaccaactctcctattaggaaacccgtgggttgcatgcagctattctgttgtattctcattctcactctccctcccttctctcact

SEQ ID NO: 121495 - DNA, 122 bp, Homo sapiens
gatagaacaatgctctgaatacccagagaaggcaaagccagggccactgcatggaggaggcggaggcctggagatgggctctgaggatgggaagagttcagacaaaaagaaaaggaagagca

SEQ ID NO: 121496 - DNA, 122 bp, Homo sapiens
gggtcccgcccgtctgaccccccaagtgttgggaaacggggccgagctgcctgggtcctccggaagagaagacaccgcggaggcgtgccggagttcagggcgccgcccggctaattggctgc

SEQ ID NO: 121497 - DNA, 122 bp, Homo sapiens
gcagcctcggcgtccacatggctgaccgccgctggactcttgcgggcgatggaggactggcggtggctgaggtcagcacctcccaccaggccacccgctccgaatctcatcatcgggaggag

SEQ ID NO: 121498 - DNA, 122 bp, Homo sapiens
gaaacgagtgggacactctgcatgctcagcgtcctgcgggaaaggtgagacatcacagtgcgttccccgcatctcggtccaaaccccccaactgacactcccgcatcctggattgtggggcc

SEQ ID NO: 121499 - DNA, 122 bp, Homo sapiens
tacaggtggagcccaggctgtgatgcaccggctcagcgagcggagtggaaagccaaggtccgcaggatctgagctgtccaaggtcactgcacgcccggctgcgccccgcccccgtcctcgcc

SEQ ID NO: 121500 - DNA, 122 bp, Homo sapiens
agaaggagggagagggaggagtcttggactctctcggagaacgaggctggggctggccaccgagagtggaagccgctgtccagaggttagagccacccaagagctggtagtcgagtggccgc

SEQ ID NO: 121501 - DNA, 122 bp, Homo sapiens
ctgtcagtccgtgccctccccacagccccgccccagagtcaccggaggacccactggcgccgccgccgccgcagcagcagtgcagcaaaccccacccacccgacccgccgccgcggcaagga

SEQ ID NO: 121502 - DNA, 122 bp, Homo sapiens
ggctcgggaagggagctggggcggtgagggcatggggtgaggcatggcgatgggggagggcgagggcgagaaagggcaggcactctgcgaattaaaggccttggacttgaagcgcccgccta

SEQ ID NO: 121503 - DNA, 122 bp, Homo sapiens
agggctactttgatctccagctgcatggtcctttcctaggcagagaatcagcacaggggacgtgcacagccttgggctccagaaggcttccggtctccaccgcggctgggcgctctgccagc

SEQ ID NO: 121504 - DNA, 122 bp, Homo sapiens
ataagccaagcttggtttagccttagccgcttgcgtgttgaaacctcttccctctatgttcgccggaccaggatcattttagggcctcccagaccgtctcaaccttgtaacttactgatagc

SEQ ID NO: 121505 - DNA, 122 bp, Homo sapiens
cggttatcctccagagatcgcgcatcagcacagaacatctggactgatgttcttttaccgcgctgtccacaggcttaactcaagtgctctgagccctgctgagggaggccgcagaggccgcc

SEQ ID NO: 121506 - DNA, 122 bp, Homo sapiens
tgccgataaagcgaacgtttacactgtgagaaaggcgagattgatttacgaatctgaacgcgccagttttatggctgatcacaaatccgtcagcgctcaactcacgctgagaaacttcccaa

SEQ ID NO: 121507 - DNA, 122 bp, Homo sapiens
tacagttaagtctttaatccatcttgagataatttttgtatgtggtgtaaggaagctcttcgggtttgatcttctgtatatggctagccagttgtaccagcaccatttattgaatagggaat

SEQ ID NO: 121508 - DNA, 122 bp, Homo sapiens
gtaacttccctgatagcaccctgctgctggcagaggagctgtgtgctgggagcttctggacgtctctcacttttcacctttaccttttccttctatgggcaatgacaccgtttgcagagaag

SEQ ID NO: 121509 - DNA, 122 bp, Homo sapiens
gatgtcgctccgagtcttcagcactgggccgcgtatgacagcatcttagtgggtgcggagcgggacagcgcgccgggggcgtggcaggggcgtggcctgtccgcggggcggggagtgcgggg

SEQ ID NO: 121510 - DNA, 122 bp, Homo sapiens
cagaggcacggcgggatgaattgcagccttgaaccttgcggcccgctgttgattgagttccgctgtcttagaaccccgtcgaacaaggcgagttcatttcagactgacgtaccaccgcttat

SEQ ID NO: 121511 - DNA, 122 bp, Homo sapiens
tgtgtgatttggggggaggtggtggcatattctcacccatattccctctccccacctctgcggccaccaggaggcagcatgtggctctcactgcctgaaagagcctgtccccggtgctttga

SEQ ID NO: 121512 - DNA, 122 bp, Homo sapiens
ctttccttcctgtcttgctttcttctctccatttctttcacaaatatttacagagcatcccgcatgcattcatgcatgtgctagtcacttggaaaaaatagaaaaacaaataaagtttcttc

SEQ ID NO: 121513 - DNA, 122 bp, Homo sapiens
gcttggctgggaaggctccgtgagacgccggggcttgattgctaggaggtgaaaaactttcgagaactcagagcaatccaatggacagtccatgttccacataattatcaactcactttccc

SEQ ID NO: 121514 - DNA, 122 bp, Homo sapiens
cccaggcagaggaggcaggatgggccccagggatgaagctgatggggaaggcagctcctccgggggggtggacccagaagccccttcctccagcgatgacagagactcattccggagtggat

SEQ ID NO: 121515 - DNA, 122 bp, Homo sapiens
cattatctgggagcttttcagaaatgcagaatctcaggcctcactccacacctgctgagtcggaatctgcattttaagagcaccaccagcttattcatatggagattgaagcttgagaagta

SEQ ID NO: 121516 - DNA, 122 bp, Homo sapiens
cacatccccggggcatcgcaggacacctgctgccccctatcggtggtgagaacaataacccgaacccggttggaatcaactggaagaggccttttgaaaaaaagaatattccaggactacgc

SEQ ID NO: 121517 - DNA, 122 bp, Homo sapiens
ctcaccgcccacacagtttgggtcctaccaccgaggctacctggttctcagttacccaaccgttgcgggggccccaggaaaggacggcgtggcatattaaaggcaaagtaattaacgtgagc

SEQ ID NO: 121518 - DNA, 122 bp, Homo sapiens
cgagttcatctccaagtcactttttgtaaacgccccgcacagcctggaccggcctgcccccgcccagcgagcctcaggggcccagccgacagccaggctcacgcgcccttgaaatctgccgg

SEQ ID NO: 121519 - DNA, 122 bp, Homo sapiens
cgctccgccttccatgcgctctcctcattactcgttcacagctgtgcttgtgaaacctgccggaagagtcggagagcgatgtggattctgaattgggtgaacctcagcagctttcttaaccc

SEQ ID NO: 121520 - DNA, 122 bp, Homo sapiens
gggggcggggacatgaggccgttgggcggggcctgatgccttggaggcggggcctgaggccgtcgggcgggtcggggagggggtttcctttccgcagcagccgtccgggcccccagaggtag

SEQ ID NO: 121521 - DNA, 122 bp, Homo sapiens
cctgctcaaggtgctgctctgggtggcctctgccttgctgtactttggaagcgaacaggccgcccgccttctgggcagcccctgcttacggcgcctctaccatgcctggctggcagcagtgg

SEQ ID NO: 121522 - DNA, 122 bp, Homo sapiens
ttacactcttttgtgtgtctgcgagtcaaacttgtagcgcctactggggaccagtggaaacgtgatggtcgccccctgcgggaccaggtgaataaagctccttaagatgcattcaactgagt

SEQ ID NO: 121523 - DNA, 122 bp, Homo sapiens
gcgtccgggacttactcctttccgcagggcagcacccagggacctgagtgttgcaaggtgcgagaggggagcgccgcggggagcgccgcgggaagcgcatggtgagcggtttctgctgtgcc

SEQ ID NO: 121524 - DNA, 122 bp, Homo sapiens
caaaaccaaccaaaaaacaaaaagaaaacacacaaaagctcccaattcgacttttgttagcgggggcaaaaaaggagagatgacatatttctcttcagaaatttgccactacccaccccctt

SEQ ID NO: 121525 - DNA, 122 bp, Homo sapiens
acggtttcactctcttaccctctgtaaaatcctccttaacatggtttaaccaccacccggcgccgccgcggtgactctccagaccctgcgcggggccactcactactcggggtgcgcgggcg

SEQ ID NO: 121526 - DNA, 122 bp, Homo sapiens
cgccagccctcggacgcatgggcccctgggagttgtagtgtaacctgcagtgcactgaggcgctgaggagaccaaggacaaaggggcggtcaagactacaactcccagcggacatagcgcgc

SEQ ID NO: 121527 - DNA, 122 bp, Homo sapiens
acatctgggttgcaaatgacactttgattggatgtaatgttcaaatggccctccccacggcgtctccggcaagccttctgcggagaggtgtcctgttgagcgatccctcactgtgcgtgctg

SEQ ID NO: 121528 - DNA, 122 bp, Homo sapiens
ggcagaaacctgtttcttctgcagaaactagaaaaaaaccactttctacccggggacagacgagcgtgactgtgggaggtctgcaggtggcacagctgttttcagccaagagaagaatgctg

SEQ ID NO: 121529 - DNA, 122 bp, Homo sapiens
atttctggacagaaaagctggtaataacctcctcacttttttcctgtgaacccagaattgcgaatggagggagtaaaaaagcgtaatcttggagcagggggctgcaaacagaggtctgaatg

SEQ ID NO: 121530 - DNA, 122 bp, Homo sapiens
agctggagtaaggtaactccaccgccgacctccgaggagttcatgtggactcagcccaggcgcagagaggaagactcctgagagtcctcgcgaaggagggaaacacaccagaactaaagttg

SEQ ID NO: 121531 - DNA, 122 bp, Homo sapiens
gctccggttcacggggcaaaggaggtgacgatgggcggtgggcctgtgaccccaggtccccgacaccagcgagccgggtgatgggagggttgcgccaggagttacaaggccggtgacccgaa

SEQ ID NO: 121532 - DNA, 122 bp, Homo sapiens
tgcccctgacccacatggacctggtttccaggccagccgcatgggagtggaggcagtcatcgccttgctagaggccaccccggacaccccagcttgcgtcgtgtcactgaacgggaaccacg

SEQ ID NO: 121533 - DNA, 122 bp, Homo sapiens
ctgtcaaggggctctgggtgcccagcggcctgcattgtagctgggaccgttgacgatttgcgccctgggcaggtgggaggtgccttggagttgggtatctggttgggggcctccttgggctg

SEQ ID NO: 121534 - DNA, 122 bp, Homo sapiens
ggagcctgctgaggtcatttcctgtgcctctccgcgagctgcctggagagctgagcccagcgctctgcctttaaggagcgggcggggagccgaggggaggagggcgcccggcggagcgttga

SEQ ID NO: 121535 - DNA, 122 bp, Homo sapiens
cttcacagcaggcatcggggcctggcatcggggcctggaagtttctttgggatcatttgtcggacaccaatttcagaagtttaaaagcaggttgggaggagggcacgtgttttgcaatcagt

SEQ ID NO: 121536 - DNA, 122 bp, Homo sapiens
aggtattggcaatgccatccttccagttgctcatgccataagccctggaataaatcctcacgttctcttttccactcacattccatatccaacccagggataaatcctgttggttttacctt

SEQ ID NO: 121537 - DNA, 122 bp, Homo sapiens
aaaggaataaagttgatgaaatgtgtgtggtgtgtgatgtgagcaatttttctttaaccacgctgtccatgttggatgtgtggtgtgtgtctgtatctgtgtttactctgcttggggttctc

SEQ ID NO: 121538 - DNA, 122 bp, Homo sapiens
ccctgagaatggagctggagggtccacgggtcagtgtcctcacctgcctgccagtgggcccgcggatcagtctcctcacctgcctgccagtggcactcatctctgaacataaccataaaaat

SEQ ID NO: 121539 - DNA, 122 bp, Homo sapiens
ccagactgaaagggaagccctgtctgttgctctttgctgcggattcgagggaggccgtctcgagtcgctcagaagcgacctaaagaaggcactggcctctgtgcgccgaacctccacgagat

SEQ ID NO: 121540 - DNA, 122 bp, Homo sapiens
cggttccggcgctcttatctggcgggaaagccagctcctctaccgtgtcccctgtgcgcccgcggtcctctgaggacgcccgccccgtaccaacccgtcctggcttccactcggccccggag

SEQ ID NO: 121541 - DNA, 122 bp, Homo sapiens
tccagccgtgcaatgcccaggagtatccacaaggtgtcagcaccttcatgataagcagggcgggccgggcggtctttttctttttccttttctcgtagtagttccctggttggcctcaagat

SEQ ID NO: 121542 - DNA, 122 bp, Homo sapiens
gggcggtgggggtggacagctccggccaccagtgcccgggaaggagggcgcggggctgcgcgtagccgctggccagcaggttgtaaaaaattaggacagctaaatgctcagggagtcgtcca

SEQ ID NO: 121543 - DNA, 122 bp, Homo sapiens
gctgaaagccattatcctcagcaaactaatgcaggaacagaaagccaaacactgcatgtccgcatttataagtgggagcttaatgatgagaacacatggacacagggagagaaacaacacac

SEQ ID NO: 121544 - DNA, 122 bp, Homo sapiens
gtcgcttccggcccggcgaggggcgggagcgattgtgaacggcggcggggcagagccaatcgcggaaaacggcaggaggagagccaatcccgagggtcggcggacgcgggaaggggcggagc

SEQ ID NO: 121545 - DNA, 122 bp, Homo sapiens
ttcgatccgcgttctccccattttggggtgtagcttggattcctgagcccagttttagtgcgtggccgaccgggaggccggcgaggcgctctaggccgagcggcttcgtctctatgaccaca

SEQ ID NO: 121546 - DNA, 122 bp, Homo sapiens
tcccacgtgatcaatgaacagggagaaggtgttgcttgcagtctctcaaactgtgttctgcgagtggcctgaatcatatcaacctgagtcttctaatagaatgcaaatttctaggtcctgca

SEQ ID NO: 121547 - DNA, 122 bp, Homo sapiens
gcaagccggggccgagagcctgccaacgaggcctcggttgaatacctgcaagaggtggcccggatccgcctctgcctcgacagagctgcagatttcctctcggagcctgagggaggcccagg

SEQ ID NO: 121548 - DNA, 122 bp, Homo sapiens
cacgagtataagtgtgagacccacacgcaggcctgcacctctgtcctttcctgactctgccgctggaccgacccccacaccatagacccacacgcaggcctgcacctctgtcctttcctgac

SEQ ID NO: 121549 - DNA, 122 bp, Homo sapiens
gtcccggcgcattgccgtggagtacagcgactctgacgacgactcagagttcgacgagaacgactggtccgactgagcaaaggccggcggagaggccgcgtgtgggagcgtgttgaagattt

SEQ ID NO: 121550 - DNA, 122 bp, Homo sapiens
cccgagtccaggatccaggtgagggcccgctgcgttcgcaagtgcgcgctggagcggaggcgctgcggactctaggtctggactgcgggctcctgaggccacacccgggacgttgcaggcac

SEQ ID NO: 121551 - DNA, 122 bp, Homo sapiens
gtttcaccaatgtccctcagtccatttgtccaggtccagaagtattcatgaggagctatgcgttagaagagagcacttgggctgggcatggtggctcacacctgtaatccagcattttggga

SEQ ID NO: 121552 - DNA, 122 bp, Homo sapiens
agagcagatgagctaggctgtctacaaatgtgtcggatccagctcccgccatccttccttcgcaaagcagagcttgccaagcctgcgcacccacgggctgcctctcttcaaagggcggagcc

SEQ ID NO: 121553 - DNA, 122 bp, Homo sapiens
ccctagctgctgtgcttatcaagactgcatttatacttgtttgtgttcagattgtaaaaccgcataggattcaagtggtccttgccagtcatttctccccttaagccctgttattttgatgt

SEQ ID NO: 121554 - DNA, 122 bp, Homo sapiens
cggcggttcctaccccaggccgcaggggagacggggccccaaggcaggtgagtgactgcgcgccccctggcaggggaggcccggtggtgcggccccggagaccaccctgccccggggaaagg

SEQ ID NO: 121555 - DNA, 122 bp, Homo sapiens
tggctggccctgccggtcctgggcaatgaagggcttagcacccgggccagcagctgcggacggtgtactgggtcccccagcagtgccagcccgccggcgctgcactcgatttctcaccaggc

SEQ ID NO: 121556 - DNA, 122 bp, Homo sapiens
cccctacctggggtggaccaagcacaggtcagccccctccccttggcgtcgggtcctactcgagcgccccgccccacatccaccaagagaggctgagctcagcagagtcgtcccctcccccg

SEQ ID NO: 121557 - DNA, 122 bp, Homo sapiens
tcggccatttggtagtggtgccggagacggacccctttagatttcggggcggctgaggagcgcggcggctgctctgtggctgagtgaggggggtgggcggaatggcgggggaagggaaggtg

SEQ ID NO: 121558 - DNA, 122 bp, Homo sapiens
gggcaaccgcacagtgcattggatgtgagtatttcagtacgtggagctggccagtggagccggccgaggtcaggcagagcgtacagcagcgcgcgtgtccgtggggagggagggtcctcccg

SEQ ID NO: 121559 - DNA, 122 bp, Homo sapiens
ggccagccaaacacaggagacaagggtgctcaccccgggccgaggcctgaagacggctgccgtccggggtcccaggaggctgcccaggctgtcgtcgctgaccccgcaggtcccggccgtct

SEQ ID NO: 121560 - DNA, 122 bp, Homo sapiens
cggactgagacctcgttccaatattggcgctgtcatgtagctaatctgtgcaacctcaggcgagtcttcccggatcctgtttccttctttataaaatatctgtcttatagtgtgttgtgaga

SEQ ID NO: 121561 - DNA, 122 bp, Homo sapiens
atcagaggttattgtctaggcccgcctcctgggggacaggtgccaagggaagtgaaaagccggcagaaaatgagccagtcacagaggctctgagacctctgctaggagccagggctcaggca

SEQ ID NO: 121562 - DNA, 122 bp, Homo sapiens
ctctggggactttcacacgcgcgttcacacacactccagtgcggacccacgatctgtgcacgcagccggcaggtgagccctgggcacatgcatgcaaacctgcccacctccctgcacgtgtg

SEQ ID NO: 121563 - DNA, 122 bp, Homo sapiens
agtaggcagaggcctgggtccccagatttggaggcaccagtgtagaccacctcaagaccacgggggagggtggctactgtggccctagtcttctgcagaaggagactgggacgctgttggtt

SEQ ID NO: 121564 - DNA, 122 bp, Homo sapiens
ctctagccgaatgccagacccagattctagttgagtgtgtctgttgaccagctagcagctcgaggaatctgttcattgtcatgcatgttggggaggagcagttgagaaggtgtgtgaggtgg

SEQ ID NO: 121565 - DNA, 122 bp, Homo sapiens
cgcatgcaccatatgtgcaatcccccaccatcctcaacttgtaggccctgcaaaggcgcgcgactggcttagaagtcccagtcaattcagggtgaccttagcagacaaaggctggagcgccc

SEQ ID NO: 121566 - DNA, 122 bp, Homo sapiens
cagcggcccccgagtcccacagcaaacccaggggcaggcttcaggcaggtgtgggcataacggggcagggaggcagacaggtgatgagggcagacatgtctgatgcacaggcaatgagaaca

SEQ ID NO: 121567 - DNA, 122 bp, Homo sapiens
ccgggcgccgggcgaagaagttggggcgaggcgggcagcgggggtcccgggggctgcagccgctacggggcccaggggcgccgcatctcgttccctgccgcagcggtctggccgggcgatgg

SEQ ID NO: 121568 - DNA, 122 bp, Homo sapiens
tttgtcaaagcagaggcctgagcaaagtaagagctcaagcaaccgaaaccagctgcctggcgagggctcagcataaactgagcagaataaccacaaggggaagggtgtctagacagcctcgg

SEQ ID NO: 121569 - DNA, 122 bp, Homo sapiens
ctgtgggttcggcactaggtcctcctccccgtggcttcctagtaggcatgtggtggtgtacgcctgctgggcacctagcgagaggggtcgtgagttgggagggagccacgttggggtgcctg

SEQ ID NO: 121570 - DNA, 122 bp, Homo sapiens
cagccagcgcctgagcacagctgaggacgactagactcgggagacggtcttgagccaccgcgcagccacagaaaccacaagatctgagagctgggcctgccagtggatgagagtctccctct

SEQ ID NO: 121571 - DNA, 122 bp, Homo sapiens
ttggcgccccctgtggcatccgcgacggctgggggggttcagcctgggattggcgggccccgggtgatgtcaggccgtcggagcccataggctggctgtgcgcgggtggctgtaacctgaga

SEQ ID NO: 121572 - DNA, 122 bp, Homo sapiens
catccccaactccgccaaggccagaataagatcccggatgccaggagagcctacagttcacgaccgtgggtgatgctttacgtttagattctccgccggagtcccagagctcggtgttcagg

SEQ ID NO: 121573 - DNA, 122 bp, Homo sapiens
gatggggtttcaccatgttggccaggctggtcttgaacttctgacctcaaatgacccacccgcctcctcacttgattcttaaggcttatggcaagtgatactggcctagttacagacctaac

SEQ ID NO: 121574 - DNA, 122 bp, Homo sapiens
ggggctagagagagcatgagaaacctaggggagccataaatagcctaagccgatcgggaccggggaaggaggagaaactgagacggtccggaaagagccgaaagcggtgtccgggtgggtgg

SEQ ID NO: 121575 - DNA, 122 bp, Homo sapiens
gatgtgtttgttgggattctgcgccctttgagtgtctcggggctctcctcgaggtgctgccgggcactgccggggcatgatttcttcgcaggaactaggggagcaagagcaggagcgagctg

SEQ ID NO: 121576 - DNA, 122 bp, Homo sapiens
ggtgcgggccctaaggcagcttgccagagccctgcagctgggaaatggcaaagctggattcgcagcccaggcaggctggtgccagagggcttttggggattggagggtgcagtgaaatccag

SEQ ID NO: 121577 - DNA, 122 bp, Homo sapiens
aaccaccacacctggccaataattgaccttaaacagaggaagttaccctggattatctgacggcatctaatatatcacatgagctcttaaaaccagaagaggaaggtatgagagagaggtag

SEQ ID NO: 121578 - DNA, 122 bp, Homo sapiens
gcgtgcgcgccgtgcttgtgggctacgacgagcacttctccttcgccaagctgagggaggcgtgcgcgcacctgcgcgaccccgagtgcctactcgtggccaccgaccgtgacccatggcac

SEQ ID NO: 121579 - DNA, 122 bp, Homo sapiens
cagggctgtgcagggaccaccaggctcccgggctaatgaggtctctcccctagagatgggcgggaacccactggagaacagtggctttgaacctggagccttcgatggcctgaagctcaact

SEQ ID NO: 121580 - DNA, 122 bp, Homo sapiens
ttttccccctccctcttttcctctcttattctcttccggtatctcctcttccccagtccccggttctctggtgcccatcctggggtatggcgctctgccgggtctcctcatgctgtaggcgg

SEQ ID NO: 121581 - DNA, 122 bp, Homo sapiens
cgcccggggctgccccccgccccgccgacggccacccgcgccccctggccgagccgctcgcgccccgagacgtcttcatcgctgtcaagaccaccaaaaagttccaccgcgcgcgcctcgac

SEQ ID NO: 121582 - DNA, 122 bp, Homo sapiens
aggaacagggctgggccaggcggcttttgccgtcacatggctgatttgcatacacgggctcggccgcgcggactccgccgggctcgcgacttccagctcgcaggcggcggggatcgctgggg

SEQ ID NO: 121583 - DNA, 122 bp, Homo sapiens
ggcaagcgcttccagatggtggccgaggggcccgtgcgctcactcactgtgttggggctgcgcgcagaggacgcaggggagtacgtgtgtgagagccgtgatgaccacaccagtgcgcagct

SEQ ID NO: 121584 - DNA, 122 bp, Homo sapiens
acaccatcatctacagggacctgggcttttccattggtgccctggggtctgtgtgactaacgggtcagagccactctaggagagcaggtggttgtgggagcagccaccacctttgtgtgggg

SEQ ID NO: 121585 - DNA, 122 bp, Homo sapiens
ggctcgcgagctgacactgaagctggcgcggaaagcgcgcaggacctctcaggaagcctccgcggggcctcacgggaagccgccgcggagcttcacgggaagtgtagtccccttacccccta

SEQ ID NO: 121586 - DNA, 122 bp, Homo sapiens
caggggcttgcagatggccacgtagcggtccagggccatggcggccaggacgatgcactccgtgcatcccagccagtggaagactgcatattgcacagtgcagcctccatagctgatggtct

SEQ ID NO: 121587 - DNA, 122 bp, Homo sapiens
ccgccgcgcgccggatgctaagaccgcgatttccccggatgctagggcggtgatttcccccgtgacaggccccgccccggccccgcccaggcccgggcggtcccgccccactgagctgtggc

SEQ ID NO: 121588 - DNA, 122 bp, Homo sapiens
tatttgagtaggtctaacaagcccgtattaccagaaattatcatctggtcatttccagtccgagaacagaacacttggttgtcctggcatttcccaagcagggggaggagttctctgcagga

SEQ ID NO: 121589 - DNA, 122 bp, Homo sapiens
tccgcggcgccggccaatcgccgctgccatcctcccgctggggtgatgtcttcaggtgtccgggaggggagaaagccctgcgtacttccagccccgctcctgtgccaggaaccggcggccct

SEQ ID NO: 121590 - DNA, 122 bp, Homo sapiens
gtgatccaggtgagagacaacgggggcttggactgggctggagctgtggagttggagagacgccggcaaattcaaggacttaggaatggattaactgcgagggttgaagaaaaggaatgagg

SEQ ID NO: 121591 - DNA, 122 bp, Homo sapiens
agggcctggagccccctactcatttacttaccaccaagtccccatcagcattcagaaagacgccagcagaagagtccaatggattctctaagtctccaaaacccagagattcagttcagtgg

SEQ ID NO: 121592 - DNA, 122 bp, Homo sapiens
tcaatgcctgaagtgaccgaaatcaccaccagatggcagcatggaaagcagttcagaccgcggcctccgtggggcccgggggtccagtgcccgcaccactatggggcccgggactgggctcc

SEQ ID NO: 121593 - DNA, 122 bp, Homo sapiens
tccgcttgcgcaatacgtggtaagaaaccagctgtgaggggctggcccaacgcagagcggcgcgaggtccgcttggcatctacaacaatcgaggggctagtccagaagttcaaggcggggtt

SEQ ID NO: 121594 - DNA, 122 bp, Homo sapiens
gatgacgtggacagctccccaaggagccacaacaggccaccccagctgtaggacagatcacgtgctttggctgcacaggggaggatgcccaacaaaccgagacggcccacgtcagccactgg

SEQ ID NO: 121595 - DNA, 122 bp, Homo sapiens
tttcatctaggaatcggacttcaaaatcccaggaacctgagcgattctataaggtgataacgccattatccaaatgctgcatactgccttctgataagcctgctgtctccttaggaaatccc

SEQ ID NO: 121596 - DNA, 122 bp, Homo sapiens
gtggtggcgggagcgggcccaggcccgaatgtggcgtgggctcaggtgtctggtgtcgggcgccggaggaggttcgcgctggggtttggtgattcggaggcctggggtgcagacgcggcgtg

SEQ ID NO: 121597 - DNA, 122 bp, Homo sapiens
cagagaatccatgctggagacagacaaaaagacacctcccttttaatgctactgtcataccgtgcttaaacagctattgtgggaatactcagtgctttaaactaaataacaaagcaaccttg

SEQ ID NO: 121598 - DNA, 122 bp, Homo sapiens
gagacccaacagatgtaaaaagcagctttgtcagagctttccatatctgagagcgaagcccgaagttgaaccaggacattcagtacctaaaacatgtgaaatctcttgggcccccggaatca

SEQ ID NO: 121599 - DNA, 122 bp, Homo sapiens
ttggtgtcagggtgtgtagaagttgaaagtgaatggcaactctagtgtcttgttgtgttacgaactttcaccaggtggcagaagagtactgtgaagagaagtcacaaggattcacaatcact

SEQ ID NO: 121600 - DNA, 122 bp, Homo sapiens
caggcggagtagggttaacctcggaaggctttctccaaggagttgcactgcggaccttctcgtactttcctccgtcgccaccctgcccactcgtcctgtgctctccggctgccctgacactc

SEQ ID NO: 121601 - DNA, 122 bp, Homo sapiens
acttccgtagggtcggccagcgcggagtcttcagttgcgcctggccaagttttttgcaaacgtcaaatggcccaggagcagtcctgtccccagcccccacctatcctcctagacccctgatg

SEQ ID NO: 121602 - DNA, 122 bp, Homo sapiens
tggacaggtggctgcgagcaggctgggtccctggggcagctctggcagatccggttggcacggactttctcctcctgctgcagtgcgcttttcctccggggcggattaggttcagccgttcc

SEQ ID NO: 121603 - DNA, 122 bp, Homo sapiens
ctggcagtagcttgcggcgctctttggaaaactgcttggctctcactggaaacacagccacgcctcctctgggccccggtagctctggcgttaagtcggctggagactggcttggccacggc

SEQ ID NO: 121604 - DNA, 122 bp, Homo sapiens
catgcccccacaaccttgtcatcactaggaaaaggagtgtaggagggctctcttcacccccgacattcacttttcagagctgtgtgttatttttaaggatgcatcatggctttgtgggaaag

SEQ ID NO: 121605 - DNA, 122 bp, Homo sapiens
gcatggaagagactcgagtccgtgttgtgtcctcatagcccaccgaggaggcagcagtgccggacatttcgcggataggttgtggtctctgagtctcctcctctcaagaggatgagatttgt

SEQ ID NO: 121606 - DNA, 122 bp, Homo sapiens
gaggccccgccccgcactacgggttgcaatgagggccaactccactttgggctccctatccggacaggtggctcttgccctttagactacagttcccagcatgcccaggcgattgcgtccca

SEQ ID NO: 121607 - DNA, 122 bp, Homo sapiens
cggtgagcggggcgggggcgggagttaaagggcgctgcgggcggtaacgtgacaccgcgacgcccgccccctcgccccatcccccctgcaacactcccccacccccccggctcccgcccccc

SEQ ID NO: 121608 - DNA, 122 bp, Homo sapiens
cccggaagaggcctctacgggaggcactgggaaggccgccccgagagcgactatgggcgccgccggttaccatggcgacaaccccgccgaaagcccccgcccgccagctgccccgcgggcct

SEQ ID NO: 121609 - DNA, 122 bp, Homo sapiens
caacacagagtggcttaaaataatggttcattatgatgtaatggccctgtggactgggtgcggtagttctttcttaggtttcttatgtgtggtagtcagtttctggctgcggctgcacacca

SEQ ID NO: 121610 - DNA, 122 bp, Homo sapiens
ctcgccctcgcagggcgccgcccggctcgttggcggccgcggcgcggcgcgccccatgcccgtgtgtggccatgtcctatccgcagggctacttgtaccagccgtccgcctcgctggcgctc

SEQ ID NO: 121611 - DNA, 122 bp, Homo sapiens
gagagatgtcgctgctgcggtcgctgcgcgtgtttctggtcgcgcggaccgggagctacccggtgagaagtcctggtgctggtaccgacctgctgtccctgcagctctcctgtgcgcctgta

SEQ ID NO: 121612 - DNA, 122 bp, Homo sapiens
cagtgaattgagtgtagggacactgcttggtgctggaggcggggtctgctgtccatcagacggaaaggctggtggtgagaagccagtccctgtcctgctgcagtcctgtccagccaccgagc

SEQ ID NO: 121613 - DNA, 122 bp, Homo sapiens
tttcgcttgctattctgtcctatccttccttggaattggaggaaaataccgggcacctgtcgaccagttaaaaacgattagcatggccgccggacttaagactcaggtgtgagactatctgg

SEQ ID NO: 121614 - DNA, 122 bp, Homo sapiens
gggccaaggacacagccggtccccacgccaggtcccccgcaccgcggcagctaacggggccggttcagccctcatgcagcagtgggggcgtcttctgttctgcttgccaggtgggcatggct

SEQ ID NO: 121615 - DNA, 122 bp, Homo sapiens
gtaaattgcatctgtgcctaatatctgtctcccccactgactataagtcctttgaggttgcgtctgattcatttctgtgtccacccactgggcctgacagaggcaggcctgagcacacattt

SEQ ID NO: 121616 - DNA, 122 bp, Homo sapiens
agaaaaaaaaaaaaaaagaaaagaaaaaagagaaactgcaaatcacctatatattggtaacgaaagaggggataccactaccggtcccagatacttaaatggtaaaggtggaatgtaaaaat

SEQ ID NO: 121617 - DNA, 122 bp, Homo sapiens
agaactcctgggaatagagtggcaaggctgggcggccggcagaaaagcatcccggcctctcgggctcccagctcgatacgcaccgcagagcgccaggaaccgaccagaggcaggctggtctt

SEQ ID NO: 121618 - DNA, 122 bp, Homo sapiens
atgcgggggcggggggttcatgcgggggcggggggctcatgcgggggcggggggctcatgcgggggcggggggttcatgcgggggcggggggctcatgcgggggcgggggggctcatgcggg

SEQ ID NO: 121619 - DNA, 122 bp, Homo sapiens
caggctagattagccggagatcttgatgcctggcagtttgcagtagttttgcaacccccacgacagcaaggtggagcccatcaagcggtatgggaaccattttcttttaagctgctcaaaga

SEQ ID NO: 121620 - DNA, 122 bp, Homo sapiens
cgggcggtgcgtggggcggtggctggcctggtgggggcgggggctgcttcttaaaggagccgtcagagggtccccagcggccccagggtgggaaggggccagagtggagagatgctgctgcg

SEQ ID NO: 121621 - DNA, 122 bp, Homo sapiens
ctttctctcccttttgtgaatgggccgcggtgtctttgttctgtagagaagcgcccgtgtcgctgacttttgtgaaccagagaaggatcttgtaaaacctccttttctccttcgtacgcccc

SEQ ID NO: 121622 - DNA, 122 bp, Homo sapiens
ccctgcccccgcctgtcctaggtctgttctcagagcgatgggccgcggagactgatctgccgccatgattggaggcttattcatctataatcacaagggggaggtgctcatctcccgagtct

SEQ ID NO: 121623 - DNA, 122 bp, Homo sapiens
tgggggcgcggcgcggggggcgtgcggggcgggctggcggggcgggcggcggtggaggagcggctacggcgcgcccggagcccggagcgcgagtgcacctcggctaggagccgctggcgcct

SEQ ID NO: 121624 - DNA, 122 bp, Homo sapiens
aaaagaaaagaaagaaagaaagtaaaagcccaattaatgggggtttcaagcttagaggaacggagctgctggggttgtaaattcaggcaaacattcagcactagaaaaaacaccataatgtt

SEQ ID NO: 121625 - DNA, 122 bp, Homo sapiens
tttcggcgcaggaagcgcagcacgtgctcgagggtcatggtctgcaggcgcaggcgcgtgcgcagtgctctctgctgcaggctttcctgcagccgctgcagccagcccacccggcccagccg

SEQ ID NO: 121626 - DNA, 122 bp, Homo sapiens
ttcactttttttcttctcctttctgcacactgacacttaaaaatacatatttttgtcgggcgcggtggctcacgcctgtaatctcagcactttgggaggccgaggcgggcggatcacctgag

SEQ ID NO: 121627 - DNA, 122 bp, Homo sapiens
ggggtgtacacacaacgtgtttacgatatttaaagtaacgtcatcctctcccccccaccccgaatattacgaacaatatcacaggggggtgtacacacaaagtgtttacgattttggaagta

SEQ ID NO: 121628 - DNA, 122 bp, Homo sapiens
ggcctaggttgccaattttggagctctgcttcaggcaggccgcccctggaggagcgtgttcgacaaaggtggggattgccgagctcctctccgcaccatttttgggcagtccttggaacaaa

SEQ ID NO: 121629 - DNA, 122 bp, Homo sapiens
gcactaaaaagcctcaggacacagtgtaggaagccatggaaacagtcctgcccctccctgcgctctacccacaccccctgctgaccaatatcacagtaacacagagctggctttgacgtgcc

SEQ ID NO: 121630 - DNA, 122 bp, Homo sapiens
cgcttccctcttacaagaactgaagtcaaatctgacctacctgacctcggggtcagaagtcgaggactcagaggtggaatttttatgggcacccacacggtagtcgatccgctctcctctgg

SEQ ID NO: 121631 - DNA, 122 bp, Homo sapiens
tgaagggaaatggtcaaacttacaagaggatcctgtagctgaaaaacaaagataaatcaacgtgtacagcctgctgaaagaggagctagttttcgtactactttcctgaaaggaaatatcag

SEQ ID NO: 121632 - DNA, 122 bp, Homo sapiens
gggggtggtggtgtctggagactgggcctacctgcaggggcatcctccggagttacgggccgggaaggaggggtcatttagggcgtgaggattccccgtagagagggatttcagcagaagct

SEQ ID NO: 121633 - DNA, 122 bp, Homo sapiens
gccgtgcctcaggattctttctcctcgacgctggtacccgtgcggggaaacagagggtgacgcttggctggtgcccagctcccctggtttgtttgtggctcagctgtcagggcctccaaata

SEQ ID NO: 121634 - DNA, 122 bp, Homo sapiens
agcgtcctacgcgtgaccttgggacccgcaaatgtctgcgccggaggcattgcctcttcccgactatgggggatactgcacggggctcccgatggcctcttccacgcctggcccttcacttc

SEQ ID NO: 121635 - DNA, 122 bp, Homo sapiens
acctgctcactgatcccctgggagcagccactggcctcaactccactccccggcccccatcgtgtgtccagctgaggcctggaatggcacaagttttacacctgcaggaactgacatcctgg

SEQ ID NO: 121636 - DNA, 122 bp, Homo sapiens
catccgtggcagactcccgccatccggattctccctttcctgccggcacctctcttcttgcgagtggcccagaagcaggggtggtcgttccgctggctcctgctgcacaccaggccctgggg

SEQ ID NO: 121637 - DNA, 122 bp, Homo sapiens
cgtcggggtcctggcagagacagcggtgagagcaggagcaggtgcactggcagctgcagacgcgccgccaggctcccggacaccgcgggcgcgccccctggtggcagccggctccggagccg

SEQ ID NO: 121638 - DNA, 122 bp, Homo sapiens
gaaaacaagaatgtctggatgtggattctggcttctgaatcctgggcttgggagtggagacgccccaccttgggagcggctcagtgctcagcccctccagtttttggaaggcctggcctcct

SEQ ID NO: 121639 - DNA, 122 bp, Homo sapiens
gactgttggggcaagggcagtgggtcagaggtcaccggtgcccccaggaccagtttccagcgagaagagagccaggagccccgggcacaggcccacggtgatgaggctcctgaccgagctcc

SEQ ID NO: 121640 - DNA, 122 bp, Homo sapiens
cgggaatcaccagaacatcaagcggagggcgttaggaatcctcaatcaaattccagactgcgccactccttgtgcagatcgctcagacgtctacccagacctcgacccagtttccacccgcg

SEQ ID NO: 121641 - DNA, 122 bp, Homo sapiens
gagccctgatctccctctgggacgtacctgtagcccgagaaggtcgaggatgcagtggggcgcgctgcgcgcacgagcatctcggccgcctcagcagccaccgggtttagcgggttcccgca

SEQ ID NO: 121642 - DNA, 122 bp, Homo sapiens
aggacagcggcccggggtgcgccccctttgtctgtccccggcaggcgccgcgtccccgcgcgcttacctggtcttggagaacaggaaggcaagtttgatcaggcccgtaggtgaacagcggg

SEQ ID NO: 121643 - DNA, 122 bp, Homo sapiens
tccgtgtgtctctccatgagtgtctgtgcgagtctgtgtgtctctccgtgcgtgtctgtgcgagtccacgtgtctctccgtgcgtgtctgtgcgagcctgtgtgtctctccgtgcgtgtctg

SEQ ID NO: 121644 - DNA, 122 bp, Homo sapiens
gtgtcctctgggaaagcacaggtaccaccagggtccctctcagaccttgtagtaaatgttcgccgggctctgcgggggcatctcctggacgatgtacaccgggtgcccgtagtcgccgctga

SEQ ID NO: 121645 - DNA, 122 bp, Homo sapiens
gttcctgccctggcaggtgccttttctcggggcctctgcttggtcaaggaagagctgggacgtgtagccaccgcctctggttccttccacgcccacccagctgagctgctctgccctggggc

SEQ ID NO: 121646 - DNA, 122 bp, Homo sapiens
cggtttcgtcgccgctaaggggtggtggtgtctgatccgtcaggctctgcgcttctctctcggatccatcctcaatgtccaggcaggactctcacatgaagccggtgctgtctgctgttcac

SEQ ID NO: 121647 - DNA, 122 bp, Homo sapiens
cagcccccttctctgcccattctgaacgggagcccttctcactgactgcacagaggcacgcgcaggccgcctgctggggggccggggcgtccaggcagcggggccttgggggacgctcggtg

SEQ ID NO: 121648 - DNA, 122 bp, Homo sapiens
ctgtctccagtgagaaataaatgtctcttgataaatgcatttacacttactctctagtcacgatcagccagtcctctgggtaatgtcactttgaaggaaggttggatgcttatcaggagaga

SEQ ID NO: 121649 - DNA, 122 bp, Homo sapiens
gcggctgcgaggagctcgggcagaccaatcacaggccggaaggggcgggacctcccacgccgaggatagattgagcgcagaactaaccgcgctctgaaaggttctaaatgtctgcggggctc

SEQ ID NO: 121650 - DNA, 122 bp, Homo sapiens
ttcctttcatatgaacaagcatacttttcctgtggactcagcgtgaaccactgtgaatctcgtattggggattgtgagtgggaagagacatgctccttggtgaggtgttgtccaagtacatc

SEQ ID NO: 121651 - DNA, 122 bp, Homo sapiens
cttacattgaggtataatttacatacagtaaactccacccatttaagatgcataattctacgaatatttttggatgtaaacaccccaaactgctaccacagtcaggatacagaacctgaatc

SEQ ID NO: 121652 - DNA, 122 bp, Homo sapiens
tgtgggctcacagggcactgagctgccaagggagctgcttaccttgagggactctgtttgcgagcccagccccttggtgcacagctccatcacggagtaggagcaaaacgtgtctcggactt

SEQ ID NO: 121653 - DNA, 122 bp, Homo sapiens
ctttcttcctctcagtgcctggacgcagcgccctcttgcgacagggaggaaataatgcgtcgagggggcatcctcggccaccgccctggtcctcaggctttcctcgtacctggtgcgtctgc

SEQ ID NO: 121654 - DNA, 122 bp, Homo sapiens
gcccagagcccagcaaggcccaagcaggggcactgctgaccccagaggtttcctgccaaccggaagtggcactctccaaaaaaatcctgcatcacaagtaacatgttcaattctccatgtca

SEQ ID NO: 121655 - DNA, 122 bp, Homo sapiens
gaaaaaaaggaaaaaaattaaccagagagggtctgtaatctcgcagagcacaggcagaatcgttccttccttgctgcatttcctccttagactaatagacgttttggaaagttcggctagtg

SEQ ID NO: 121656 - DNA, 122 bp, Homo sapiens
aacggcctggggagtcactgcaggtaaccagagctggagccaggcttcccactccaggcccggggctctcccccgaacaggcgtgggaaggggtgcgagctgcacgcggggctggggctggg

SEQ ID NO: 121657 - DNA, 122 bp, Homo sapiens
ctccagaggctgagataggagaattgcttgagcccagcagtttgagcctgcagggagctacgattgcatctgtgaatagcccctgtatttcagcctacgcaacacagtgagaccctgtctct

SEQ ID NO: 121658 - DNA, 122 bp, Homo sapiens
aagaatggaataccaaggaggagacgatgaatttttttaccttgatgactactaggtagtcgacatgggtccggcaaaacatgcctcactctccagcatccaacccaaggagcatactcatg

SEQ ID NO: 121659 - DNA, 122 bp, Homo sapiens
tctttctgaccctaatcaccttatgttgttggatcttactccaagttcatctactttggtcgtggattcggaactgagcctagagtccatgaaggactctagcaagaatgagcacaattaga

SEQ ID NO: 121660 - DNA, 122 bp, Homo sapiens
cctgccagctctggtgggcagccgcaggcaccgtgtggccttggatgatgaaactcggggcgatgactgcaccatccagcagcctgcgtcctcgcaggtgcgggcagtgagggcggtagggg

SEQ ID NO: 121661 - DNA, 122 bp, Homo sapiens
cacgccgccctccccccgccacccccccgcccacccctcattccttccgccttgaggtaccggcaggggaagtgcaagctcaggttctgggaagagcctatcaagccaagatctgaaaggaa

SEQ ID NO: 121662 - DNA, 122 bp, Homo sapiens
aaaaggcccgcgcgtagactcagggcacgaggtgggggggccttacctgggatgaagactcgcggggcagaactccgcctggtggagcaacggacgtttctcaggctgcctgcgaagtggct

SEQ ID NO: 121663 - DNA, 122 bp, Homo sapiens
aacttggctatgtctgaaaacatggcggagtatctgacagagtccttcatgtaagaggggcgtggggtaaaatccacatgggaaaggattgaaactgtcttcactgctcagatttgaagaga

SEQ ID NO: 121664 - DNA, 122 bp, Homo sapiens
ccgggatcccgccgggtcaggttctctgctctggacttgggaggctccgttgcctgctcccggagggagacgcgctgccgaggagaacccagcgggtaatgaatcccccgcgcttctttgcc

SEQ ID NO: 121665 - DNA, 122 bp, Homo sapiens
cgagtcaaagtcccaggagactggagtgaccagctgcaaatgctctgggctgcgaaacaccggcttccgctcctggccagagctcaccaatcagcgcccggctttctccgtcatttcctcct

SEQ ID NO: 121666 - DNA, 122 bp, Homo sapiens
cgagccaggcagtgatttgaggcaccggcttcaccttcacccatggtccggagagcctagcggggctcgccaccgcctcccggctccccttccacgcctcatcctgccagcctcgccgcccc

SEQ ID NO: 121667 - DNA, 122 bp, Homo sapiens
ctcttcctcagctttggaactcagaacacatcacgccgaaagatgctctatcaggctgggcgcggtggctcatgcctgtaatcccagcactttgggaggccgaggcgggcggatcacgaggt

SEQ ID NO: 121668 - DNA, 122 bp, Homo sapiens
ggggctaggcttgaggggttttggggggtgtagaaggtggccctctgctcctccaggcggcgggactgggcttcagccaccaggtccagaaggagttcagtctgcagggagagcagggaggc

SEQ ID NO: 121669 - DNA, 122 bp, Homo sapiens
gagagctaatggtacagggtttctctggggggtgacaggagtcctgaaatgaggtagaggcggcaggcacacagcactgtggatatacttaccgccaccgaatcgttcacttaaacctgggt

SEQ ID NO: 121670 - DNA, 122 bp, Homo sapiens
aggctctgaggcagggggttcagaccctctcgcctcgggctcctgctggctggccccacacgtgccccctccagccccagccctgctcagtggagaaaacagataaggcaggaaatgtggcc

SEQ ID NO: 121671 - DNA, 122 bp, Homo sapiens
cagtgcctggcactcagtagaaggctgtattcatttcctagggctgcagtaacgaagtgccgcaaactggatggcttaaaacaacaggaatgtattctcccacagttctggaggccagcagg

SEQ ID NO: 121672 - DNA, 122 bp, Homo sapiens
gccgcagtccggggcctcctgcccccgccgggcacctccaggtcccgcccccgccggccccgcccccagccccgtcctcaccgagctgggcccgatccagaagttctcctgctgcacgtact

SEQ ID NO: 121673 - DNA, 122 bp, Homo sapiens
agttactctgagaggaaaccctctgcctgttgttgaggaggactgagcacagtgcttaggcgctgagggggaaaaagagggggaaaaaaaagaaaatgatttcctgggaagttgtccataca

SEQ ID NO: 121674 - DNA, 122 bp, Homo sapiens
cgtggagaactgtagctgtggaaagcctgcgccccaaggagggacgcgggggtgcagtcgcggcccattatctgtgcccgggaagtcctgaaggctctaggagctgtcagattaaaccccca

SEQ ID NO: 121675 - DNA, 122 bp, Homo sapiens
ctgtgagacttctgaggttgactaggaaaagaacttagtcatccataaatcagtaaaagtcgtggtaacatctagaaagggctaacatcagtgatgtgaagtcgtcagcctgtggttctgag

SEQ ID NO: 121676 - DNA, 122 bp, Homo sapiens
cctggaggctggagccctgcctggacatttcccttaatcttgttatcctcctcagagaggcggcacccaccccattggcagacgccacgggaattctctgggcctgcttgtcatcactccag

SEQ ID NO: 121677 - DNA, 122 bp, Homo sapiens
gcagaaggacaaccaggaggagggtgtctgccccatctgccaggagagcctgaaggaggccgtgagcaccaactgcggacatctcttctgtcgagtgtgcctgacacagcatgtggagaagg

SEQ ID NO: 121678 - DNA, 122 bp, Homo sapiens
tcctgtcctgatgaaacaggaaacacaattgtcatttgaaagttagggctgagggccgggcgcggtggctcacacctgtaatcccagcattttgggaggctgaggcgggggggtcacctgag

SEQ ID NO: 121679 - DNA, 122 bp, Homo sapiens
tcccaggaattcgcccggttaatagcacccagagcccctgcgtttgtgtccggttgataacgcccaaagcccggcgtccatcaccttaggatagacttaaagcctctgcacctggaactgtt

SEQ ID NO: 121680 - DNA, 122 bp, Homo sapiens
ccgccgtccccagtatcccgggaccgtgcgccccacacagccagagaatcagccccgacacgccccgtgccctggttgctcctgagctcaagccattggttgacccaagcataggctccgcc

SEQ ID NO: 121681 - DNA, 122 bp, Homo sapiens
ctgggggaccggcctgtccaggggcagtaccggcagctggtaacacacttccattgaatacgcccgccctgcctccgcgcggcgcccgccctgccgcggccgccggcccctgcagtgggagg

SEQ ID NO: 121682 - DNA, 122 bp, Homo sapiens
gccccatccagtggccccgtccagactccgcccacctcaggccctacctcgtcaaggccccgccccgtgcttccgtccctctgcaggtccaggtacgtgtggccaagtgtggggtcgccgcg

SEQ ID NO: 121683 - DNA, 122 bp, Homo sapiens
cagcagctctgcctgccttggtgaggtccgtcagtaacagtcgcccagtccagaagacttcgccccaggcctacccccagggcgtcggtgcgagtatggctcgcttcctttccttagtgggt

SEQ ID NO: 121684 - DNA, 122 bp, Homo sapiens
gccagtgttcctggggagacagaatctcattgcctcccaccccaacctgagaaagcctctcgtttgggggtggggtgaggttcagggagggatcctggatctactccaagccctgtttgctc

SEQ ID NO: 121685 - DNA, 122 bp, Homo sapiens
agggcgtgcggcctgggggcggggctccgcggggcggggctttccccctcagccactgcgcgcagtttgtcaaatggctacatccaggttcagaaaccagctgccttcattccttcactcat

SEQ ID NO: 121686 - DNA, 122 bp, Homo sapiens
cgaaactcggcccccagccttgggcctgggaccccggctcctctccctagaccccgccctcgaccccgaccctgcaccccgaacctcggaccccagcccccggcccccccttcggacgccgc

SEQ ID NO: 121687 - DNA, 122 bp, Homo sapiens
ggggagaatgacacagaataaacatttcccaccttggaaataaatgtctcctattggcttcgatgtgtgtgttgataaacgattttcgattgcctaaggatttctctgctaatgggaggcca

SEQ ID NO: 121688 - DNA, 122 bp, Homo sapiens
cgtatctcatcttcagggtttttgtgagaacatgttgcttcatcctgccctgctcagccccgtgggttctcttggcttctggtgacctggggtgcacctcctcttcatcaccaggagggcca

SEQ ID NO: 121689 - DNA, 122 bp, Homo sapiens
acggggagctcaccaccgcatatacactctgtagttccatcccaggaacgcttgaacaatcggaccgggctgaactacccaccgaatcagctaaacgcctccctttgcagccacactcaaac

SEQ ID NO: 121690 - DNA, 122 bp, Homo sapiens
ttatttatttatttatttattttgagtcagagtttcgctctggttgcccaggctggagcgcgacggcacgatcttggctcactgcaacctctgcctcctgggttcaagcgattctcctgcct

SEQ ID NO: 121691 - DNA, 122 bp, Homo sapiens
ttggtaatctgaggaggaaatgatttcccttcctggctacctttcgttttaactgtctttcgggtacaaagtccagtcattaattgacgtcaaaccacagaaaggcaattatagctagcatt

SEQ ID NO: 121692 - DNA, 122 bp, Homo sapiens
ctcggcggacaccaggcagtcccccggcggtcggccgctcggaggacgcggaagatgtcccggggaactcaggtgaccccgcccgccacccacagaaagagccaggccggggttgcttccca

SEQ ID NO: 121693 - DNA, 122 bp, Homo sapiens
ccagttcccagttcccatatctccctcccttcatttcacccccactagaggttcagggtgcgtccttcttccggagccaggcctgggattgaaccagacccgcatctgtgaccttgggcaag

SEQ ID NO: 121694 - DNA, 122 bp, Homo sapiens
caccacacacaaacatagaaagttagaaggtttaagtacagggtaacaacaaagaaataacgtttacattctctggggacacaaagagccctggaagagtttcaggaataggtgcttttatg

SEQ ID NO: 121695 - DNA, 122 bp, Homo sapiens
agaacctaggaatcaccttttctatgcaaaccatcttgcactgccattacaaatgtctttcgaataagagtaatactgatttgaataaaacagcactgaaggttgttatcaaaaagtattag

SEQ ID NO: 121696 - DNA, 122 bp, Homo sapiens
tttacatgccagatgtaggcctgccccggtgcctgcctggagctgctggcgtggtcacgccgcgaccctgtgcgaattgaggcgaggtgatgagttagcgggttgccatggcaacaggctgg

SEQ ID NO: 121697 - DNA, 122 bp, Homo sapiens
gctgttcggccaagtggtcagcgaggaacaccaggacatccgtggggtcagcagggggatcgccggggagggccaggggcttaggaaggtcgggggcctgggggtccacccgggaccggaga

SEQ ID NO: 121698 - DNA, 122 bp, Homo sapiens
gagacgcgcgcctgcgctgcggacagagcggtgcttctcgtctgggccccggttcctggacgacctgggacttctaggcagcgactcccagacagaattggaggagaaaagatgcgtgtggc

SEQ ID NO: 121699 - DNA, 122 bp, Homo sapiens
cgctgccccggggagcagtcccgcctgtagccaggggctccctgcagttgcagagaagtccgcagccaacggagctctcccggggcccacccgtgaaaggacctggtcagggccctctccag

SEQ ID NO: 121700 - DNA, 122 bp, Homo sapiens
tctgggcccagcactgccatacacctgcctcccatgcccatctgcctgcctgaccctgcccgctacctggtgcctagccctgcagggcccacatccactcccatgggctagcatccagacct

SEQ ID NO: 121701 - DNA, 122 bp, Homo sapiens
gcccaggctggtctcaacaaactcctgggctcaagtgatcctcttgcctcagcatcccaacgtgttgggattacaggcgtgagacaccatgcttgtccactcctctacccaataagcaacac

SEQ ID NO: 121702 - DNA, 122 bp, Homo sapiens
gccaactccccggatttcctgtcctcgggccctgacactcccaaggaaagctctgaattgcgctcgctgtttggtttttgcttgttgtagttactctgggggaagagccgggggcaaggggg

SEQ ID NO: 121703 - DNA, 122 bp, Homo sapiens
ccaccaagtccgcctccgagaagtcctccttcttggattcatctacctcctcaggggccacgtccggggcccggccattgcccacccccctctctggcggcgctaccgccgccgcctccttc

SEQ ID NO: 121704 - DNA, 122 bp, Homo sapiens
ggaccgcttggcacagatgagcacgatcctgcagggggacggagtcaggggagacggggccggggagcggggctcaaggtactgctgcttccagagctacagacatttccatggaaaattcc

SEQ ID NO: 121705 - DNA, 122 bp, Homo sapiens
ttggggatctctttagggataacgggttgggggtggggcgtccgtacctgggagcgttaccgagcctggtgtaggataagaaaagaagggttatctttcgtttaagccaccactgggaaaga

SEQ ID NO: 121706 - DNA, 122 bp, Homo sapiens
cctagggcgccggcctgccttccagcccagttaggatttgggagttttttcttccctctgcgcgtaatctgacgctgtttggggagggcgaggccgaaacctgatcctccagtccgggggtt

SEQ ID NO: 121707 - DNA, 122 bp, Homo sapiens
gtgcgtggcggcggcccttgcgtgcggccggggtgcctggggtgggccgagcggcccgggcgtctccccaaagtctttgtttaggcctcacatgggagcggggctaagaaaatggcggggct

SEQ ID NO: 121708 - DNA, 122 bp, Homo sapiens
agggcagggtgaggcctcgggcacacagccggcgcccagtcacccggcccagatggagggcggccgggccctgcacaggcacttgccaaggtggctcacactcacgcacactcgtactgaga

SEQ ID NO: 121709 - DNA, 122 bp, Homo sapiens
gagacttgctagttagcccagggctgtaggacttgaacgtccggtaggacccgctgctcacgatgctggaccacgtccctgtggacccagccttcccgcccacacattcacacacgcaattc

SEQ ID NO: 121710 - DNA, 122 bp, Homo sapiens
gaaccagagagacttcatggcatcctccagcccaaggtggcttccggtccgaggtggggtcggttcgcgcgaggagcgcacagcagaggacatgggctgtgcgctcagaggaggagctggct

SEQ ID NO: 121711 - DNA, 122 bp, Homo sapiens
aaggcagagaagcataaatattaatattgcttaatgggcttaaacttggtaatagagccacgtgccagtggttcggggcagtttcgccagtaacgtgctctcgggttaccctgctcgggcca

SEQ ID NO: 121712 - DNA, 122 bp, Homo sapiens
taacctatcttgttccttaactgctgggagaagtagctgggctcccagagacccttggctcgttcagaccctgcctaccttgggagctgggagttgcaggacaggcaggcaggcctgaggct

SEQ ID NO: 121713 - DNA, 122 bp, Homo sapiens
gtatgagaaccattcacatccagcagagtgcttgaggttgtgagagccccacaaccagcacgctatcccacagcatcacaagcacagcaaggtcaacttgatctgtagcaggttattaccct

SEQ ID NO: 121714 - DNA, 122 bp, Homo sapiens
aagaatgatgccagttcttggaaatgcagtgatgagtgaggcacgtgtagtcactgtgctcgtggaatgtgcagtggaaagaggagggcagacattaaacagagttacaatgaagggtagtg

SEQ ID NO: 121715 - DNA, 122 bp, Homo sapiens
ggagttccagtacctcacgggaggtcttgttgacccggaagtgcatgggaggataagcaccgaagaagccatccggaaggggttcatagatggccgcgccgcacagaggctgcaagacacca

SEQ ID NO: 121716 - DNA, 122 bp, Homo sapiens
acggaaggttggtttccagtaaaatgcattaactttggctcaaaccaagatgatgggtaccgggcatgggggtggggaggcagttgaagatccactgagctttgtctcagggcagccctgct

SEQ ID NO: 121717 - DNA, 122 bp, Homo sapiens
aggcgcggcccggcggaggagggaagaaagagcgagccgggccgggagaggcgccgcgcccggtcccgcgcccggtcccgcacccgctctcagcggcccaagcagtttctttctgggtgaca

SEQ ID NO: 121718 - DNA, 122 bp, Homo sapiens
gatggcatgagaaaaactaggaaatacctgtggcacgtttgcactgggtgctttattaagcgtctccattttttctaaatctgcctctaactctgtctggcagaggctgagatctttgtcta

SEQ ID NO: 121719 - DNA, 122 bp, Homo sapiens
ctaatttgctgcttgagagggcagtccaaagcatgacagaagcatagaagtagcagtgcccgacaactcctctgcagagccttcctggagaaatctaaacatagttagagaatgttcttaca

SEQ ID NO: 121720 - DNA, 122 bp, Homo sapiens
cacctgccattgtgggttctgggtggaggtcgctggggctgaggcaggcagggaccggcccgcggcctctcccagctagggagagactccacatgcctaggtctggagcaggagaggggaga

SEQ ID NO: 121721 - DNA, 122 bp, Homo sapiens
gttcctctaaagaatagagactcccggctttccatgagacaaaaagcaggcaattcaacacggcaagcccttaatatacctgcacgtttctctgtaaggactgatttagaaagcggactcac

SEQ ID NO: 121722 - DNA, 122 bp, Homo sapiens
ggtggaggctggagcttgtgtcccacggcacacagaatgcaggcttagtgcggttatgttcgattcctagaaggcctgttatggtgtcttttgggaagatgcgatataaaaatgtgcagtga

SEQ ID NO: 121723 - DNA, 122 bp, Homo sapiens
agttccatcttctcatctcctctctgttgtctactcagcacttccttgtattcttaccgccggaaaaagtcagaaaagaattcactcaagcacagagggctctgaactgggcaacagctggc

SEQ ID NO: 121724 - DNA, 122 bp, Homo sapiens
ggcccgaggagttagttaagtctccagaggggcccggttcggcccgagcaagtccaggggcgaacggcgtcatggagcccataggggcgcggctaagtttggaggcgccgggaccagcgccc

SEQ ID NO: 121725 - DNA, 122 bp, Homo sapiens
aggtgttgggggagcgcaggcagcgagcccccaactgaggccccagctcccagccctgggcggccgtatcatcaggtgctcctgtgcatctcggccagcacgggagccagtgccgcgcagga

SEQ ID NO: 121726 - DNA, 122 bp, Homo sapiens
gcgaaacgaaaattgcgtctctcttcctctctctttctcctcacaaatatttgggggtcacgggttccaaggcctagtccgggaggtacccctgcccccttcgccatccctggaacttgcag

SEQ ID NO: 121727 - DNA, 122 bp, Homo sapiens
gcttgggtaaaatagcctgcctaagacaggcaaggatttgaaccccatgttcttccatgtcgcatcatctcagcctcccatcacaccaccttacaccctagcaccccaccacacacacaact

SEQ ID NO: 121728 - DNA, 122 bp, Homo sapiens
acgttcccggaccaaacagaggtcggcctgttacatcgctaacgacactccctgctgtctcgcttgcaagtttccactcaccccggtccgtttacccatctcctcaaatgctagtttaatct

SEQ ID NO: 121729 - DNA, 122 bp, Homo sapiens
tggaggcacgggggttattgaggggggcaagagaatctcaaccccgatacgtttatgtttcgacttccccgaatttccttgtgcctgcgttttgctgcctgggatccctagcgtgagaaggg

SEQ ID NO: 121730 - DNA, 122 bp, Homo sapiens
ttgcctccctggtggtggagatgcctccccgtctcggatcccacctcatttctccgctgtcgacgtgggctgggggtcgctttgaaagacacttccttgcaaatacccaatctgttttcctg

SEQ ID NO: 121731 - DNA, 122 bp, Homo sapiens
agctctgggggctgctgcagctctggggctggtggctgctccctgagccaccacaggccccgtctcttccaccggcgccggcaccagagccccgactgctgtgagagtgaaccttctggggg

SEQ ID NO: 121732 - DNA, 122 bp, Homo sapiens
aacatgcatggtctaacattgattggcatgttaaagaatccttctgtggccagcgattggcgggcgtgtctgggctctagccaatccggaaaggggcgggctggttaagcgtcaggttcctt

SEQ ID NO: 121733 - DNA, 122 bp, Homo sapiens
caggcgcccgcagcccggcaggaagtgacgggggaggggcaggcgcccgcccccggcccccgcccgcctccaggcccggccccggccccacccccacccacggtccgaaccacaagttccgg

SEQ ID NO: 121734 - DNA, 122 bp, Homo sapiens
cttcggaaaaattgttagctgtgaaggagtttgaatcacgtaagtctttctgtgaccagccgcgcagttctctcagccacagatttcacatgggttgggcaggattgaagcgaggacgggct

SEQ ID NO: 121735 - DNA, 122 bp, Homo sapiens
gcctggtcctggggcctggatggtgctgccctctgctggagacagcgaataagctccttccggttgtctaggatggtgtcgaagctctcctgcagtcgggcctgctggtcaatcaactgatg

SEQ ID NO: 121736 - DNA, 122 bp, Homo sapiens
aagcagggggtgtggtggcagtgggggtggctagggaggggtgtatatgagtgggggagccgatttcatctcggatcgcaggaagagaacttgctcaaaagaatttttccccagcaaaagtg

SEQ ID NO: 121737 - DNA, 122 bp, Homo sapiens
tttccagagatagtggagttatgttgcttccacacagtgaccagtcatgccggcgtttcccgtcagacccagagtcagaccacgcagtcccggcaaagccgcctccctctgaccctcacggt

SEQ ID NO: 121738 - DNA, 122 bp, Homo sapiens
cacgccgcggccctcccattttctgcgtcctcagcgggctgagctgccagagagtcttcccggacctattcccgtcctatgcattcacattggcatcctggtttgggggaagaaaaacaacg

SEQ ID NO: 121739 - DNA, 122 bp, Homo sapiens
gcacgcccgcgggagttaaggatgggcgcccgcgggcgtgacggggccgcggggcgtgggcgccgctccccggggctggagccggcagagggcgctccgggctcgctggacacccgcgcttc

SEQ ID NO: 121740 - DNA, 122 bp, Homo sapiens
tggtttattgctagctcattttgcccacaataagcactttggaggggagtaaaccctccccgtagactaagtcattcctacaaacaggcgggaggaaagctgggactggcctgtcaacattg

SEQ ID NO: 121741 - DNA, 122 bp, Homo sapiens
agggccgcccgttgcttaaaatgaatccctccgcccatctgagcccgccccccgggagcgcggggcccaatcccgttacaaggaccacggacttccgtttcgttccgcctgtaagtcccgcc

SEQ ID NO: 121742 - DNA, 122 bp, Homo sapiens
ttcctaaccctgcgtgaggctctttcacctgcctcaggttaagtaggcagaccccgcgggcgggatggtcaaagatatttagttcccggtaccggagggctaggtgccaggggcaatgggga

SEQ ID NO: 121743 - DNA, 122 bp, Homo sapiens
acccgctccctccactgtcccggaggcccacagacattcccgcattctgaggctcgctcccgtcccgtgccgctgttaccggcctccggccccggctcatacaagcaggagcacatcgctct

SEQ ID NO: 121744 - DNA, 122 bp, Homo sapiens
ccatggcactggaggatggccaggtccttggcactgccattagctgcctgggggaaggcccggtgcagaggcggccagcagctcaaagccaggatgccagccagagggtgggggcaggtgag

SEQ ID NO: 121745 - DNA, 122 bp, Homo sapiens
gcaggttcggcagctggaccagcagtacacgatcctccgctcgcccctgatatacggtggcgtggctgtttctctgggtctgggggtcctcaccatgggtgttttactccaaggagccaaga

SEQ ID NO: 121746 - DNA, 122 bp, Homo sapiens
tgtcaccatagagattgcccatccaggcagcgaagcagcagggccaggcagctcagatctcgaactccagagaactgcacagtcatctagacatcaatgccttttccggggcctgatgaaca

SEQ ID NO: 121747 - DNA, 122 bp, Homo sapiens
gcaccccggcgtctctggccctttcttattctttggctcctcatccaccgtgatgagaagcgctgctgtggccacggcacactgcttggcttgggtggcgggttcatggccagttggtgtca

SEQ ID NO: 121748 - DNA, 122 bp, Homo sapiens
gcagcacaaactcaggagctgttgtttcatttaataataaatatgcatccttgaattcaacggaggaacatgctcctggaatttagaagcaagaggggctgggcgcggtggctcacacctgt

SEQ ID NO: 121749 - DNA, 122 bp, Homo sapiens
ccccgctttttttctgcgttctgctcggtttttgtagccgtctgtttttgcaccccatttcgttttgtttctagacggtttggtggggggtgaagctgcattcataccccttcctcttgtta

SEQ ID NO: 121750 - DNA, 122 bp, Homo sapiens
ttccccactcgcagggagctcactcctcggcggtgccgcagccctgtccggactccactgcgcctctgaggggctcaaatacgaattcaaggtaagctgcgcggctttgcgaccggctctgc

SEQ ID NO: 121751 - DNA, 122 bp, Homo sapiens
acgcgccgagccctctcagtgtggcgctgcccggcggcgaggggggtgtggaacgaagcacggtcaagacagaaaacaaagtcagcaggtcacctggcaggttctgggcgaattatgcaacg

SEQ ID NO: 121752 - DNA, 122 bp, Homo sapiens
atatttcctaccacactgcaaaatgatgatgaaagaaagtatgtctaactagtgaaaaagcgatttaggcagctaaatcattgtgaactgatagcatgcagtgtattgttagggcgttcctg

SEQ ID NO: 121753 - DNA, 122 bp, Homo sapiens
ggagccgccgcacttgttgcacattttcgttctgactctcttgtggagttctcttacagccgttgtctttagtcatccctcccccacccggagctgcgacaatggcgttgcccaggaaacgt

SEQ ID NO: 121754 - DNA, 122 bp, Homo sapiens
ctgggattacaggtgtgagccaccatgcctggcctatattgtcaaatatctttacttgtccgtaaatacacttctaccttgtcatttacaatgtctgcatggtattttggtttccagctaca

SEQ ID NO: 121755 - DNA, 122 bp, Homo sapiens
gttgtccaaagcagattgactccagccggccagctcagaagagggccgactctgggctggcgactccttgagaagggctctctctggtcccaggtggtatttacttaaccgtatcatcatct

SEQ ID NO: 121756 - DNA, 122 bp, Homo sapiens
gaaacacttctcatcatattgtatgtaagtaattgcatttctgctcttccaaagctcctgcgtctgtttttaaagagcatggaaaaatactgcctagaaaatgcaaaatgaaataagagaga

SEQ ID NO: 121757 - DNA, 122 bp, Homo sapiens
ggcggggcgctcacgtgggtacgtgggcgccaagagggccggctgtgcatccggcgtgggcggcacagaacgacctcgccccgcccgctgggtccccaagcccgccctgcacagccgggcct

SEQ ID NO: 121758 - DNA, 122 bp, Homo sapiens
ggaggccggggggtaggcacggcgcggacgcaccctaggatcgccgccagagggcgccagcgcgctccttcgcgtctgctgctgccctgatgaaaacgctcacagcgcacgcggtacagacg

SEQ ID NO: 121759 - DNA, 122 bp, Homo sapiens
tagaggcggagagtgggagcagagctcccttggcccctccagccaatgggaagagagattcgctaggtcaggcggtggggtccaaccacccacgctggcccgcagccctcttagcgggtttg

SEQ ID NO: 121760 - DNA, 122 bp, Homo sapiens
gaaacttctgatagtttttaagctttcctgaggcagagctcatctttgaaatgaggaccacggtacttacctcacagagccattgtgaggattgtcaattaatacttggtaagtgcttgacc

SEQ ID NO: 121761 - DNA, 122 bp, Homo sapiens
ggccatttcctgtttctctgcagttttcctcagctttgggtggtggccgctgccgggcatcggcttccagtccgcggagggcgaggcggcgtggacagcggccccggcacccagcgccccgc

SEQ ID NO: 121762 - DNA, 122 bp, Homo sapiens
tgaagaaattagaccccttaaaagttttcttttttttctttctttctttttttaatagaccgggtgtcactggctctgtcacccaggctggagtgcagtagtgtgatctcagctcactgcag

SEQ ID NO: 121763 - DNA, 122 bp, Homo sapiens
tcaaggaacacaaaaaggtcaacttgtttttgcagctgtccgttgtttttcaataactaacgtacaggagcagatttctccgaaactttgctggatgaatgcctcaaggggctcatgcaatc

SEQ ID NO: 121764 - DNA, 122 bp, Homo sapiens
ctaccatcccagtcaacatatagtagtcctgtttttaggatttctctctcctttctttcccgtcttcctttagggaaatgctttggggtaggaagcaacaaaccaaacagcagcaggcaagt

SEQ ID NO: 121765 - DNA, 122 bp, Homo sapiens
gagccggggacattgcccactcctcggaccctgcaggacttgggaaggtgtctgctctcgcgaccctaagggcagtgcactcttagtctgggtcagcttagggttatctgtcttcactttgg

SEQ ID NO: 121766 - DNA, 122 bp, Homo sapiens
catcgctaaacagcagctgaaggtcaggcgaactgactcgctgcggaatctgcctttgcacgtgatcagtcggacgtctacacccgcagccgtcttctgtctccgcctcaccctcaggcctg

SEQ ID NO: 121767 - DNA, 122 bp, Homo sapiens
aaagcgaggagtgagtggctggcaaggctccttcggaaggtggcaataacagtcatagaccggtcacatcaattgggtgtttactgcgggccagtgtgtgccaccaacctcacacccgaaag

SEQ ID NO: 121768 - DNA, 122 bp, Homo sapiens
ctgggccagctggcagatggtgtggtggggctggatgactttaggaagagtcaggagctgcgggtctggccaggctatgactatgtgggatggagcaaccacagcttctccagtggctatgt

SEQ ID NO: 121769 - DNA, 122 bp, Homo sapiens
agactaaacgggatcgcaacttgcggtggttcgcccgcctgcagctcttatacagcagcccgtgccgtgcgccctgcttgctgcagcccgccctgtgtaactcatccagcctcccctccccc

SEQ ID NO: 121770 - DNA, 122 bp, Homo sapiens
cagccatcatgcgaggcggggggacttacgaaaggcggagctacgcgagagcacgtccagcgaccggaggtggggcgatgggacccagtccgggccggaagggagcagggggtggggctcgg

SEQ ID NO: 121771 - DNA, 122 bp, Homo sapiens
agctccagggttaaatataggaatacttttaaggagtttttgggctgatgtttatgttaacgttgtagtttcgaatttgaatagaggagtctcacccagactctttgtatgaatgtcaagct

SEQ ID NO: 121772 - DNA, 122 bp, Homo sapiens
tacagtaagaaagtacaactcttgtaagaagacaaactgtatctttttaatttaatgatgcggacttcatatatagtaagaaatttaagtcatttaaatgggaaaaagagtccagtatcata

SEQ ID NO: 121773 - DNA, 122 bp, Homo sapiens
tctcgggtacctgcccactcctttcaatgaattgtagaaaatatcccacccgcaccctgccgaagcttgcctggcagagaagtgctctgaggtctaacttttccgtctcccgctatcctcac

SEQ ID NO: 121774 - DNA, 122 bp, Homo sapiens
tggagatgtggaggaggcaacgtctgcagaggagcctgcaggcaccagcagagaatccgacggccaccgcagcggaggctcagaccggccacgaccgagggcggagaggcacagtgggaggg

SEQ ID NO: 121775 - DNA, 122 bp, Homo sapiens
taaagaattttcttaactcagcttttcctcccagtgctaagcatgccttctcatttcacgcgggggctgctctggtgtcaagccccgtggaagaagcctcttgtgaggccagccccagagcc

SEQ ID NO: 121776 - DNA, 122 bp, Homo sapiens
aactacacaatggaatggtatgaacttttccaacttggcaactgtacatttccccatctccgacctgaaatggatgcccctttctggtgtaatcaaggcgctgcctgcttttttgagggaat

SEQ ID NO: 121777 - DNA, 122 bp, Homo sapiens
agtatcttattttctgttgttggttagttaggctaagtaaattacagccaactcactctacgaaatattaggttgctgttaataatgcaaaatataaagatcatcacaacacagaaaaaaat

SEQ ID NO: 121778 - DNA, 122 bp, Homo sapiens
tacacgactggtgggaaaacagtggttgcctggatcaacggcaaacgctccggccagtggcgaggccaaatgccattcacctagttctcagagttttaatgcggctgggtccacctggaggg

SEQ ID NO: 121779 - DNA, 122 bp, Homo sapiens
gagaccctggggacaaaataaatgggtctcccaccagttgaatgacaagtatcatcagatcggaaacgaggctcagtttctggatgctgagtggactgtgcgtgcgggaatattttaagacg

SEQ ID NO: 121780 - DNA, 122 bp, Homo sapiens
gcactcctcagcccttgggcggtcgatgggactgggcaccctggagcagggggcggcattcgtcggggaggcttgggctgcacaggaacccacggaggcgggggaaggctcaggcatggtgg

SEQ ID NO: 121781 - DNA, 122 bp, Homo sapiens
cacgtcagcggcgggattcgattctcccaggagcgcaaacgctactgagaactgcgcctgcgagggggtccgggctgcgggctccttagaagttaatcctggtgatcccaggtggaacggtt

SEQ ID NO: 121782 - DNA, 122 bp, Homo sapiens
tgaactcctgacctcaggtgatccacccacctaggcttcccaaagtgctgggattacaggcgtgagccaacacacaaccagcattgccttgaccacagtggatcttgggtgtctgtttattc

SEQ ID NO: 121783 - DNA, 122 bp, Homo sapiens
cgctgagagactacgagggtccggttcagttttaattctgtctctaatctctgcaacagccgcgcttcccgggtcccgcggctcccgcgcgcgatctgccgcggccggctgctgggcaaaaa

SEQ ID NO: 121784 - DNA, 122 bp, Homo sapiens
ggcaagactttgttaggacaagggctttgtaaagcacagaagacttgaacttcacctgctcgggaggctaaggcaggaagatggcttgagcccaggagttcaaggctggccactatgctcac

SEQ ID NO: 121785 - DNA, 122 bp, Homo sapiens
gcgccaccaccgcgggtagcagggcggggcgctctgggagccgctgggtgtctgggctggcgtctgcaggggccccgcgggatcaggccggctgcaggggcgcggcggcgcagcccaccttg

SEQ ID NO: 121786 - DNA, 122 bp, Homo sapiens
ctgcagtggagggaggggctcagcaagaaagcctgggccacgcgggaggcatttccgggccgggagtggcgggagctgcgagcttcccatggttttgtcgcgtgtgtaaggcgtggggagtg

SEQ ID NO: 121787 - DNA, 122 bp, Homo sapiens
ggcctcctgcttattctacatttctcatgtctctctaccatgccagactagagtcaagctcgacagggtcttcttttcccaatgactccgccaagcccattcccttggctgtagttttgctg

SEQ ID NO: 121788 - DNA, 122 bp, Homo sapiens
gcagggctgggcaagctgaagacgtctcttgtcaatttcttctcattgtggtaaagtatacggactataaaattgaccattgtaaccatttttaagtgtgcagttctgtggcattaggtaca

SEQ ID NO: 121789 - DNA, 122 bp, Homo sapiens
gtccacccctccaggtcggggagagccacggggagattcctggactgcggaggagccgggcgagcggggggagcacgacccgggtggactcagactctgcccagccttcaatcccctagggg

SEQ ID NO: 121790 - DNA, 122 bp, Homo sapiens
ggatcagctgggtgcactttaaatccttccagcccagagccctgaggcccaagtcacccccgcctgctcctgtgggaccccttggatcagccaaccattttatcatcatccatcatgtcccc

SEQ ID NO: 121791 - DNA, 122 bp, Homo sapiens
cgctgccatccaggaggtactgagacggttcggcagcccagactggtatggcacctgggacgcccttgccacaccgcggcttccactgaactgctcttcctgcgccccaggtgacccagccg

SEQ ID NO: 121792 - DNA, 122 bp, Homo sapiens
tcacgggcagaggcgaggggcgggggtgatagaccccggcggcgaacagacttggcgcaccgaagattcccaaaggcgcgtgctccgctccctctgggtcctggcaggccaggggcggcagc

SEQ ID NO: 121793 - DNA, 122 bp, Homo sapiens
gcttcccagagacgcccttcctgaacctgatctaccagacaaaactgtctttttctcagtcgtctcctcctgagtgctgctgcccttcctgttgggggctgagatcctctgccacaggaaga

SEQ ID NO: 121794 - DNA, 122 bp, Homo sapiens
gccgcgacgcgagggggcggaggactggggagcaggggtcgccggggcctctggatgcctcgcctcgcccacgctcactgtcttctcttctgaagtaacgacccggcgaggagcttcggatc

SEQ ID NO: 121795 - DNA, 122 bp, Homo sapiens
ctcaagtagtaaaatcaaagcggatggacccttatttctgaggagtgaaagcgagaagaacgatgcgtgtaaaatgctagttccttaattcacacaatccagcaccggctcccggatgatca

SEQ ID NO: 121796 - DNA, 122 bp, Homo sapiens
cgtgccaggtgggcgccgggcgccaggccccaggagggcagccccgcccctagccccgcacgcacctggaaggcattgttgagccacagcaccgagcaggaggtgatatctccgatgcggtg

SEQ ID NO: 121797 - DNA, 122 bp, Homo sapiens
ctcgggacctgcagcccgccatgcctgagcctcccccacctccgtgggctcctgtgcagccggagtctccccgacaagcgccaccccctgctccgcggagcccagtcccatcgaccacccaa

SEQ ID NO: 121798 - DNA, 122 bp, Homo sapiens
tctctacccttatcacttctccacttctaatgaatttgcctgaataatatcaggtgaaaccgatgaaatcagtaggtataatttcttgtcacttttccattgttctaacttcttattatgca

SEQ ID NO: 121799 - DNA, 122 bp, Homo sapiens
aacttgaagctggtagttgaggaagaaggagaacttctgaacccatgaagagagtatacccggtttgggtgggcaggactccaaagcctttaggatcgatggaccagaacagagaaatgaaa

SEQ ID NO: 121800 - DNA, 122 bp, Homo sapiens
agcagaaggtgagccccgctggctgtgccgccgggaacaagcctgaggctttgcactcggcgccggcacccttgcagcctgttgactttctccaggagccgtgggtgtggtgacgtgtgggt

SEQ ID NO: 121801 - DNA, 122 bp, Homo sapiens
tccaaaggggccggggtctttggagggatggcccagaagtgggttgagtccagaggtccccgggggagtcctgtctgggaggagggaccgagatgagagtggactcgtccccagagtgggac

SEQ ID NO: 121802 - DNA, 122 bp, Homo sapiens
acgggccttgttcaccatgtcggtgctggatgcgctttgggaggatcgggatgtccgtttcgacctgtccgcgcagtgagtttccaagattcccgagggatcttcaaccctgtagagggcgc

SEQ ID NO: 121803 - DNA, 122 bp, Homo sapiens
cccgatctccaaccaccttcaccctcgcccccaccaccaccacccccagctcctcctggccgcctgcggtccagctgaggcccgcctcctccaggaagtcttcctggagagcctgtcctggg

SEQ ID NO: 121804 - DNA, 122 bp, Homo sapiens
aggacagctagcaatggaacatacaacactatgctgaaaaaccacaacagcttggttaagcggaggagagaaacagagatggccttcatggagtgaagctgtcaatgcctgccatctcctta

SEQ ID NO: 121805 - DNA, 122 bp, Homo sapiens
agcggctcacagaggctgagcgctgtgcacacctgtgccggggcactgtccggggccccacggagcatgctcaggatggccgaactgtgggcatccaccatccacttgcatccggctgaaga

SEQ ID NO: 121806 - DNA, 122 bp, Homo sapiens
gaaaggatcctaggacaaatcggagagtaataccaccccccgatccacagctggatgtgacgatccccatcgcagggcggcggccgcgtccagagacatgggaagtaatatcaccccactct

SEQ ID NO: 121807 - DNA, 122 bp, Homo sapiens
ggaacgccgcgatggctgcgcagggagagccccaggtccagttcaaagtaggtaaccctgcggggcgggaggcggccgagcccgaccgcgtgcgactcgcgggtccctcctcctggggccac

SEQ ID NO: 121808 - DNA, 122 bp, Homo sapiens
ggcagtggcggaaaggaagccaccgcccgggatctgtggcttgaaaatttggctttgcctcgtattggctttttgagtttttttggaattttcccgcggtcgcccggcagtggagccgcgcg

SEQ ID NO: 121809 - DNA, 122 bp, Homo sapiens
accgcctggaccggctgcttaagtcaggtgggactggggcctgtagggtggggatgggaacgctgagctattcatcaggaagatggaagaagtccatcactggtcagaggcatctgtctgtc

SEQ ID NO: 121810 - DNA, 122 bp, Homo sapiens
ggccgaggaagtggtgtgagagactgacgtgaggtggcacgagagcccagttgccaatgacggagctgcgagatacggcgagagccaacgggagcggagtgagaggttctccgaccaattgg

SEQ ID NO: 121811 - DNA, 122 bp, Homo sapiens
gtcccgccaccttgcttacacggcgggagatgtgttctgaccagcacgggatagaaactgcgaatcaagagatacctagtactcccttcccagtgaacaaactgctaacgttgttgtgtgtg

SEQ ID NO: 121812 - DNA, 122 bp, Homo sapiens
gcagagccagtttagaacgtgggtggctcagctagaacgcaggcggagtgggcaggagaacgtggcggggagggcttggaacgcggagaacgtgaatagaagtccccgaaggaaaagagaaa

SEQ ID NO: 121813 - DNA, 122 bp, Homo sapiens
aataagcatgtgatgactaaatactaaataaagaactcttggaggtaaaaatttaatccccgttttacaggtgagtgaagtgggataaaatggcataattcactcaagatcataagctattg

SEQ ID NO: 121814 - DNA, 122 bp, Homo sapiens
gctcagggttcagggggtacgctagactcctctccccattcgattcttgcatttggcagacgagtcacccgggcagtgggatgaggatggcaccaacagagtcaacagaaggaagacggctc

SEQ ID NO: 121815 - DNA, 122 bp, Homo sapiens
cccagatcgccggcgaagcgcagggggaggctgggaagggcatcgggagacacgggcctgcgccccctacccgggccccggcccacctgtccgcacacctgtccgaagccttaaaaggtctt

SEQ ID NO: 121816 - DNA, 122 bp, Homo sapiens
gcgccgaggccaggtaggtggtgagttacttggctcggagcgggcgaggggacgcgtgggcggagcggggctggccagcctcggcccccatgacccgctgtcctgtgccctttcccagcgat

SEQ ID NO: 121817 - DNA, 122 bp, Homo sapiens
gcttaaggcagccctgctccccatcttcaatccgaagctggggtatcccagagaaagtctcgctctgagctcctgctggggcacctgcccagccatgcccctcgagggcgtcgctgctctca

SEQ ID NO: 121818 - DNA, 122 bp, Homo sapiens
gggtgggaaacgtgggaagggtatggatgattttttttttcctcatctgggaatctccatcgtggatagcaatcgcttctagagctctcctgggaagctcctctggggaaggggctatgccc

SEQ ID NO: 121819 - DNA, 122 bp, Homo sapiens
acaaaacagaacacaaacgaggacgagaagaagaaaaccaaccaacaaacaaaaaaaaaacgaccaaagagtttgcatgaaaagcaagcactcaggaggaaaatattagcagcaaagtagtt

SEQ ID NO: 121820 - DNA, 122 bp, Homo sapiens
ttgcggtggagccacagtccctgcggtcccggtatccagtctgggcaggaagcagcgggccgtgagccagctctccagggggctgacggacatcttcctggggaccagcatctcctccagct

SEQ ID NO: 121821 - DNA, 122 bp, Homo sapiens
gcagctggagaagcgggaggcctgagagaaggacaagggagcgtcccacttcgggacgttcgcaaggtctccaaactgatgggctgtgtagcccccagcttgtttctgtccagtgctgttga

SEQ ID NO: 121822 - DNA, 122 bp, Homo sapiens
taggtggaggcttatccaacactaactgagaaagctcgtgaagtaactcgtgtgcttcttcgagatcttattcctagatttggactgcccttacggatcggctcagataacaggccggcatt

SEQ ID NO: 121823 - DNA, 122 bp, Homo sapiens
aaagacaaggaagcaggcaggagactgggatgtcagtgctgagggacagggagggatggccggagcaaagtcactgaggccctcagggaaggcttcctgaaggagacagggaagcgagagga

SEQ ID NO: 121824 - DNA, 122 bp, Homo sapiens
ggagggtttctagatcagactcttcatccatgaaccttactaactcaaacttgagatgggcgagatctgcaaaagaacaagaaagaagaaaacgtattggagaaagggaccgggggttaaag

SEQ ID NO: 121825 - DNA, 122 bp, Homo sapiens
cagcctgggaggtgatttctgcacttcgagggtcatggcacagactgagtgaagatttgccgagaatattctggaagatgggacctcagttttgtctcaaccactcccctggcttcttctcg

SEQ ID NO: 121826 - DNA, 122 bp, Homo sapiens
ctgtgagtgccggaggccgacgcggtggggtcgggccgggagggctgggccgtgggtgtgcgcaggtgtgatgtggctgacgtgttttcatcaactcaattttcctttttttttaaagacac

SEQ ID NO: 121827 - DNA, 122 bp, Homo sapiens
ccccccaccctgctggttttcaacagcccctccacgtcatcccctccgccctcccctcgacgtggcccctcgctttgcacaactgcccccttcagcagcagccagcctcaatgaaagcctga

SEQ ID NO: 121828 - DNA, 122 bp, Homo sapiens
gtgtgatctctgggtggggccatgatccttctgggcgctggtccaagcgcgtggtgaggccgtcctctcctgcagaaccccggcctcttcgcccctgcccgctcacctgttctgtcctgctc

SEQ ID NO: 121829 - DNA, 122 bp, Homo sapiens
aaggtacgcccttgaggagcaggaccatgaagagccgctggcaggaggggcagtgacccacgctctccccgtcctcactcgcctgggtgggtggagcgggggtggggggtcagggctggaag

SEQ ID NO: 121830 - DNA, 122 bp, Homo sapiens
ccagtggcttccagaggctggggagggtttctccaccagtcctgtctccattagaggtggcggcaggcctggggcaaaggtgccatagactggagctatttctacagctgcaaggaagacgt

SEQ ID NO: 121831 - DNA, 122 bp, Homo sapiens
acagatgcacgggaggccatacggtttaggcaaaggggagcacaaaagttgaagatgaggcgctgccatcaatgctgggacttcaggccaagggcaggagctgaggaagccacaagggagga

SEQ ID NO: 121832 - DNA, 122 bp, Homo sapiens
gcaaatgctggaggaagtaccgcctccaagctacagcggcgccgccgaagccaagagcggcgccttccgcagagggactgcggcttcctgcgcagcgccccctaccggacaggcggcgggaa

SEQ ID NO: 121833 - DNA, 122 bp, Homo sapiens
cctcaccccttgatacagttttctgatttgtttcaatgtctttgaagtacataaaggaaacgtcaacaagacacacaacagtagtagtagaacagcaggcacttagaagctttaggatttgt

SEQ ID NO: 121834 - DNA, 122 bp, Homo sapiens
ccctttgcctggaacatctcttcctttcttcttatcctttaagatccagctggcctcttccgctgcgtgcgggatcctagcgcaggggcagcgcaagttccaggcgcccaagccagggaaga

SEQ ID NO: 121835 - DNA, 122 bp, Homo sapiens
caaaggtcttctatattgttgtaatgtatagtttggttataaatgttattgtaaagtaggcgagagggggtcttttatttaagcaagtattgaactaatagttctttgaaaggaaattgtca

SEQ ID NO: 121836 - DNA, 122 bp, Homo sapiens
caagcctgtttttcatcacaacaaattttcacatacaggaatgcaatcagtattttctaacgtccaggagccaaaaatcactatttagtctatttttccatttctccccaaagagcagaatt

SEQ ID NO: 121837 - DNA, 122 bp, Homo sapiens
cctgataaagttacccggtgaatgcttacatctcatgtctgtatattggatatataacctcgtctgcaggtagtagcaataatttcatcctgaggccctctgacaaagtgaaaccaagccaa

SEQ ID NO: 121838 - DNA, 122 bp, Homo sapiens
caaccgaactctgttacataaagttagttctgttagatcttccaccccacccccatcccgcgggagcgagtaaatagaattcatgagcttagctccccaggttcacgctctggaatggtttc

SEQ ID NO: 121839 - DNA, 122 bp, Homo sapiens
caagtgctctgggaagagctgtggtgtacatgtaaacagcattttgcttcacttcttgcccgatctatctaatgaggctcagagcctcagttggcactgttttatacccagtgggagaaaaa

SEQ ID NO: 121840 - DNA, 122 bp, Homo sapiens
aggagggtccccctccttcccgcctcccgccgccgccgcctccctctcgcttccgtgctccgtgctcccttccacgctccggaatcagcccaccaggcactccggacccggctccggggcgg

SEQ ID NO: 121841 - DNA, 122 bp, Homo sapiens
gagcgcccccgccccggagcaggggtccgcgctgggggtccggagggcgggggcgcggcccgacgccccacccccagcttgttcactgccgccagggcccagcgcctgaagcgcgggtcctt

SEQ ID NO: 121842 - DNA, 122 bp, Homo sapiens
cggcagctccagggctgctgccacccctcacattgacacgtttcctaatcctctggcaaacgcagagcaagtccacagaaccctgctgtcaccacctcggagccaaacttagtctcaactca

SEQ ID NO: 121843 - DNA, 122 bp, Homo sapiens
cgccggtgcgatgacacactgtcccccggctcaggctgtggctgccctgcactttgttggcgatcacccagacctggagcacagaccccatgaagccctcagccctacctgcagtgggacgg

SEQ ID NO: 121844 - DNA, 122 bp, Homo sapiens
ggaccccctcagcgcgctacgcccccagccgcgctcgccctgcctgtgtccgccattacgcgattccccgccctgggcggcagccacaccccgccaatggccctgattggctcactgcccca

SEQ ID NO: 121845 - DNA, 122 bp, Homo sapiens
gtgtgtgtgatagccctagcaaacgtccagtgctttctcaagctagaggtctgtgttcttcggtgtctgtaggtccgtcccatctgaatgcttctgattttctacccccgtatcactttcta

SEQ ID NO: 121846 - DNA, 122 bp, Homo sapiens
ccaggggggaggtgggggccagaactctgaggaccagatccagacccacagccgcagctacgcttcagcatccggctccagctggaagagacccccactcacttcctccccacacactgctg

SEQ ID NO: 121847 - DNA, 122 bp, Homo sapiens
attcccctcctgccccttccctcccaccttgcttctggtgtgctgtcctggaattgcacgcgcttcctgaccaccaggctctggcccttgagaagccagcggggctttgtccctgttgctct

SEQ ID NO: 121848 - DNA, 122 bp, Homo sapiens
gcaattgtgaagctaatgcaccctcagtgactgatggtaaagcctctccacggctctcatcggccttcgctttgccttcgtagtctctcacaccatggacagctctgctgaacacccttcca

SEQ ID NO: 121849 - DNA, 122 bp, Homo sapiens
gcaggtggtagagaaagtagctttactgagacggtggctgtgtctgctccgggatgaggccgtgtccgctccgggatgaggccgtgtgggctccgggatgaggccgtgttggctccatgaca

SEQ ID NO: 121850 - DNA, 122 bp, Homo sapiens
tggagcccagtgcctgccatgaccaacttatgaggtgaagtaagggcttccccctaggaacgcatgtgcttaatacagatgtgctgtgtgctaggtaccctaaggactacaggaaataatga

SEQ ID NO: 121851 - DNA, 122 bp, Homo sapiens
ctaggcatagggcaccctgggcgtgcgggttctatagcacagggtgcacagaagatggggcgtccaggtgcagggttcatagaacatggggtactcgaggcgcgtggcaccgtgggcgtgga

SEQ ID NO: 121852 - DNA, 122 bp, Homo sapiens
gtggcgctggcagatgtgtccatgtggcgccccatctccatgatgcccagcaccatggtgcgccgggccaggatgcccaaggcggcctgcgttggttgtggaagggacatggcgagcatgcg

SEQ ID NO: 121853 - DNA, 122 bp, Homo sapiens
catctaagtctgcccctctcttacctctttggccccatctagttgtattttttaagccaacgcccattgtggtggcctttgaagggaggaagttgcacataaggagtacctacctgtttggt

SEQ ID NO: 121854 - DNA, 122 bp, Homo sapiens
tattttacacacatcagcaagactaacttttaacaacatgaatcagatgcggtcattcctcggctcacccttctctcatggtttcccgttcctgttataatggcccacaggcttcactggat

SEQ ID NO: 121855 - DNA, 122 bp, Homo sapiens
cacaggatagtcaggtccaaggagatgcaaatgggggacgcggttagggagtcccagagccgaggtagagggggagcagtggtaagatgagcgagcagtcgactctggttggaagggtccag

SEQ ID NO: 121856 - DNA, 122 bp, Homo sapiens
ctcagtgacagtgaaacaaccttcaagatcaccttatgaatgaacctgttggtaactttacgtaagaaaagaaaccaataaaagggggttctacaggagctcgtttaaatgattctctcttt

SEQ ID NO: 121857 - DNA, 122 bp, Homo sapiens
cggctccaggccaccagggcggccgctctggctctgccctgttaaagtgggggcagcgcccgctgaaaattggcacatcttggcttccgcaggtaccagggcctttaaaaaggttcagctgg

SEQ ID NO: 121858 - DNA, 122 bp, Homo sapiens
acggggacaaatcccagtgagcagctggccagctggcacagaccacaaggacggaagtgccgtgttaagggggcgacatgatccaacccgcttcaccctcacacagcccgatttgggggtgt

SEQ ID NO: 121859 - DNA, 122 bp, Homo sapiens
caggaagaggggccagatatctgagtgttcctctttagtttcttcaattgcaggtgaggacggggagctgcgctgtgtagggaactgggggtgggttcaggacgaagtagctgcagcctctg

SEQ ID NO: 121860 - DNA, 122 bp, Homo sapiens
atcacgtatacacaccagccacatgcacgggacatggcgtgatactgtggacatgggccccgggagcgccacacccccgccctgtgcacggtgtgtcacgcgagtgcatgttcgcttggctt

SEQ ID NO: 121861 - DNA, 122 bp, Homo sapiens
tatcgaacaggctcaagaggggagggggtggggtctggctttttaaggatgggtctaatgcgttcagctgttatcacactttgctgattgtaatcactcgttttatggtttcttttccagct

SEQ ID NO: 121862 - DNA, 122 bp, Homo sapiens
gctttcagtaagcttcctctcgcctcccccaaatgccatttatattcttggatgtggtttcggtaatacaggaaatataagaggaatttatgattggatatatactatgtctatttggattt

SEQ ID NO: 121863 - DNA, 122 bp, Homo sapiens
taaaaataaacaatataaaattcattgggaaattgaagtgatttatccagtaatctagtgcgtctacccagagcctcctttctgtggcccagcaggtcctgtgtctaactaggacattatga

SEQ ID NO: 121864 - DNA, 122 bp, Homo sapiens
gcagagtaagcacaagaggacagctccgactccctaggatttcagctctgaccagtcgcacgcctggctcactggcttccccacacccaccaagttgttcttaaaaactctgctgcccgaat

SEQ ID NO: 121865 - DNA, 122 bp, Homo sapiens
cctttaccctcaagtaccactaacacagatgattgatcgtttccaggacaataaaagtttcggagttgaactattgtgtagttttgtttgtgaaagattgtgcccatatcctcagttcttct

SEQ ID NO: 121866 - DNA, 122 bp, Homo sapiens
cctctggcttcctgctgccctgaggcctctgcaagcaagggctcttgcctccggggagcacgcccaggaccgtggcaggggctcccaaaggccggggacaggcctgagcaagcggagagccc

SEQ ID NO: 121867 - DNA, 122 bp, Homo sapiens
cgctcgcggccccgccccgggcctcccgtggggctttaatgacataagcaactttcctcgcgcaccccccgccccgtcttggtacggcctgtccggcgctcgacgttccacccccctctctc

SEQ ID NO: 121868 - DNA, 122 bp, Homo sapiens
ccgtgagggggcgctctgcgggcctcggcctcggcccttccggacgcccgcacaggtcgccggacccagagagtcggcccttaatagccccctcctggaagcgctaggtcccgaaactggcc

SEQ ID NO: 121869 - DNA, 122 bp, Homo sapiens
ggagccttgacgttaggaacgaagtctaacctggatctggagccgggtgaggagtggcatcgggaggttggcgggtaggaaagcaaaggagaggtcagggtattactggccagattggggtc

SEQ ID NO: 121870 - DNA, 122 bp, Homo sapiens
cctcccctgtcccacgaattatgaggcgccataaacctccttccacaatcttgagctgatcgtccacttttccgggcaacactcacctttccatcgtcccatccccctcctcccctgacctc

SEQ ID NO: 121871 - DNA, 122 bp, Homo sapiens
gcgagtgagtcaacaaggccccttccctttcctgccaccactctcattccctgggtcctgcgcagtctctggcctgttagcaggcactgccaccccagcagcctgcgtcctcaaagccagtg

SEQ ID NO: 121872 - DNA, 122 bp, Homo sapiens
tcatccattcatcctgatcgttcctccatgagacagggtccctttgttgctggctggaagcggccgggaagcgtgggctcgctgtggcatgggcaatgccacacggctccagggaagcgttc

SEQ ID NO: 121873 - DNA, 122 bp, Homo sapiens
tggaaagagaacctccactgtggggtattgacgtcattggaaagagaacctccactgtggcgtattgacgtcgttggaaagagaatctccactgtggggtattgacgtcgttggaaagagaa

SEQ ID NO: 121874 - DNA, 122 bp, Homo sapiens
acttggaaaagcagcagttttgggtgctgcttggacagtttgcaaacaacgggcaggacccgcgcttaaattcgatatgaaaaacgcaccttggaaagtatgccttggcctgattatcgggc

SEQ ID NO: 121875 - DNA, 122 bp, Homo sapiens
catgatggccctctggtggccctctaacgtctccagggcaatgtgggcaatctcagcctccgtcttccccaggaacatctgacaggcggccgccaacatctccttgttctgcccctggattt

SEQ ID NO: 121876 - DNA, 122 bp, Homo sapiens
tagatatacttgttaatatgcattaccaaaacaataacagctggtagaggagtgtgcttgcggacatgaatcatggagaggatttctggaaggtgaccctctcgagacgcaacatagaataa

SEQ ID NO: 121877 - DNA, 122 bp, Homo sapiens
gacaaaattaaatgaaatgtgcaaaataactgcacaaactctgtgctgggtgcctggtgacgcggaaccgtcggctggcacgctgcgcccccacgtggaagcttgcaaggtttggcccccta

SEQ ID NO: 121878 - DNA, 122 bp, Homo sapiens
attaatcccatcctctcctccaacacagaattccacccacgcacctattccccctcccagcgcttcagacacctctctcatcgaaaaaccgggcgaagggaagccggcaacgagcggagaac

SEQ ID NO: 121879 - DNA, 122 bp, Homo sapiens
aaggtgcaactgagggcggttccaaaagccttgactaagccctatgcaaaaaccttgtgacgcactgctgcacagtactttatatatgctcttggttacagcctcgctagctctgagctagt

SEQ ID NO: 121880 - DNA, 122 bp, Homo sapiens
ttcaacttcctgcagctcagaagaggggtccccacccgagagcgccgggaccctgtcccgcgctgcctcccaagccggatggggttgagcgcgcccaccccagtcccaggagctcaggcccc

SEQ ID NO: 121881 - DNA, 122 bp, Homo sapiens
gccgtcactgcctcccagtctaaataaaaactgcctgctctgcacacgcagcttcaagaccgaccccccagctcccacttccaatcagatcgcctgtcctaaacccttcttacatagaaatt

SEQ ID NO: 121882 - DNA, 122 bp, Homo sapiens
agctatatgctagtttctgctggaaacgctgactctgcctcttagcccctgggttgaagccgactagagaatctcagacgtgcttaaccggtctgttgggcttccctgcccttttccagtcc

SEQ ID NO: 121883 - DNA, 122 bp, Homo sapiens
cctttcaacgtcgcagggcttgtcagtgggttctgtgacagaaccgtgcaagtaatggtacgcggagagggcgcgcgaaagcgcctggctcgttcctggagcccgggctgcggacgccccct

SEQ ID NO: 121884 - DNA, 122 bp, Homo sapiens
catttaattctcacaacaagagggtgtgtagctgcttgtgtttttcattgtactttcatacgtgaaagcttatctttagagaggtccagaagcttatctcataatgtgaacttaccttgtac

SEQ ID NO: 121885 - DNA, 122 bp, Homo sapiens
agctctagataaggcctgagacatcgtaggagtgccagggatctttggttactgagaaaacgagcagctagatcaaggttcccaacaccaacacgctggggacatgttgggagtcaacttag

SEQ ID NO: 121886 - DNA, 122 bp, Homo sapiens
tacctctccgcgaagctgccgcccgagcccagtgggcgccccagcttccctcgcccggcgcgcacgaagccaccaggccacctccccgcccggtccatctggatgttgaaggaatcctagaa

SEQ ID NO: 121887 - DNA, 122 bp, Homo sapiens
gtaactccgaggcccggcctgccttctccttctgtgtgtcgcgccagttgttctgaatctcggctctctagaaggtctagtcaggttctttactcactatcttccgggccagaaaaggcgag

SEQ ID NO: 121888 - DNA, 122 bp, Homo sapiens
atgttgtcccggagcaggtccccgctggagaggtgcttcagctcgaagtgtgtagtgatgcgcgacgacacggtgcccttgcccgagcccggggcccccatgatcaccgctcgcagcagccg

SEQ ID NO: 121889 - DNA, 122 bp, Homo sapiens
tccttgttttcattagggagggccccttagattacatctcccatgagacttgaggccaggcgcggtggctcatgcctgtaatcccagcactttgggaagctgaggcgggcggatcacctaag

SEQ ID NO: 121890 - DNA, 122 bp, Homo sapiens
aaacaaaaagataggcaataataaggctggcaaggttgtggagaaattgaaaccctcatacgttattggtggaaatgtgaagtagtacagccactttggaaaacagtctggcaacttctgaa

SEQ ID NO: 121891 - DNA, 122 bp, Homo sapiens
aaccgttttcttcacgccactcatgtgagcagctccctgtgcaccaggtgatgttccagccgcgggggtcagcagtgaagggacagtgtccccggggctcacggtgtagtgcaggcagcact

SEQ ID NO: 121892 - DNA, 122 bp, Homo sapiens
ccacatgatgactcagatgtgtgaaaacaggggcgcccgcaccctgtgtctgctcctccccgggcccaagcgcccttgttcctcaggtccctcacaggactagagcctggccctggctgcct

SEQ ID NO: 121893 - DNA, 122 bp, Homo sapiens
gtgcggcctcctccacacccaggctgtagggcatagcctgtggctcccaggctacaaatgcgtgcagagtgctactgcgctgaatgctgtaggccactgcggcacggcgctgcgtgtttgtg

SEQ ID NO: 121894 - DNA, 122 bp, Homo sapiens
agagtcagatcctgaaagctgcgcagaggctaagcaacccaacaaggcaggtgaactggccgctgagagaagaatcgggtggagcagagagcagctgctgcagggcagacagccggaccccc

SEQ ID NO: 121895 - DNA, 122 bp, Homo sapiens
gctcctacggaaacgccggctctcacgtggaggtcacgtgacggatgctgggcgggaccacgcagctttgttttgataccccgggtgtggaaatacaaacacgtggtctgagttgtggcgct

SEQ ID NO: 121896 - DNA, 122 bp, Homo sapiens
tcagaggcctgacagaatctgtattggatgtaagcatatctgagcagtgcaagaggtagacggtagccaacacaatggataaagcactcaatatttccttggcttgcttgtgtcttcacctg

SEQ ID NO: 121897 - DNA, 122 bp, Homo sapiens
agtaattactgcattaatcccagaccccatcccgattcttgtcggggactgaagggtctccgcctggggctccgaagtcgatcatttcacattcacgcttcccaaaacgagacacaataaat

SEQ ID NO: 121898 - DNA, 122 bp, Homo sapiens
actgctagccttctgctctccacagaaccctggaaaatggcatccaccagccagtgatcacgtgcttcaatatgccctagaatggcccagccccacatctgactcatcatctttcgcaagca

SEQ ID NO: 121899 - DNA, 122 bp, Homo sapiens
tttgctacagaatttaccatctactcatctacctaagaaacggacttaaatatgttgagtcgccaccccttcatccgaaaaattccaacttggcgtttttcccactgatgtttccttgactc

SEQ ID NO: 121900 - DNA, 122 bp, Homo sapiens
agttatctattgccaactagcaccaattctccaaatcaaagtgtgtgaggaaaacacactcgtgcaatcctctttaacagaagatacaccaagtaacctgtctgtctacttctgttacccag

SEQ ID NO: 121901 - DNA, 122 bp, Homo sapiens
aagaaagtaagtgaagaaatgtcttctagaggcttctttgtatcagccgaggcggtctcacggttagctctgggccccctgagaaccgggtctgaaattcactatttcatggtctcctacag

SEQ ID NO: 121902 - DNA, 122 bp, Homo sapiens
aagagcccccctggactcctccggcagagggagcctggcaggagtgggtgtgtgcatgcacggaggcctgcaggagcccccacggagttcccggccgtcccagcccctggccctgcctggca

SEQ ID NO: 121903 - DNA, 122 bp, Homo sapiens
ggtagcggtagccctcagagtccacttcactcgcctcagttcgccccgcttctctgtgcacggattggttccaccgaccggaagggccacaaggatccccgcagcagccgtgggttgcgcct

SEQ ID NO: 121904 - DNA, 122 bp, Homo sapiens
ccgctttccaaaaggctttagtggaaaacaggtccagggtgggcccagtggagtgggccccggaggcatggggcacggggcttaggagaatattcggatggcttgcgtggctgtgatgtggc

SEQ ID NO: 121905 - DNA, 122 bp, Homo sapiens
ttttggtctatcctaactctcaactataaagagaaacattgttccgtctcagcgggttgacgtagtataaagccaccacactcccctgccccaagctgattctacactctagacaccattcc

SEQ ID NO: 121906 - DNA, 122 bp, Homo sapiens
cactgcagcgattgcgagaatgaggaggacaacagctacaaccgggggtaacgaaatcctcggagtccaattcccgtccagcctcccacaacctgggtctctggggtgcggggaagtcaccg

SEQ ID NO: 121907 - DNA, 122 bp, Homo sapiens
gcaggggcgggggatgtcgaagggtcaggtttgtccaggccgcgccaccttcgtttcagacgttcagttcgtttcccctacaaaggaagaggagaccggagacgggacgtttgctttgttgg

SEQ ID NO: 121908 - DNA, 122 bp, Homo sapiens
ctctttgctcttttggatcattcaccacgaggaagtcagctactatgtcatgagggcacacggcaaagaactgaggtttcctaccaaaaactagcactaactggccaaccacaggagtgagc

SEQ ID NO: 121909 - DNA, 122 bp, Homo sapiens
aggacacttagcaggcactgagcaagcaggcccccacctgcccttagtgatgtttggagtcgttttaccctcttctattgaattgccttgggatttccttctccctttccctgcccaccctg

SEQ ID NO: 121910 - DNA, 122 bp, Homo sapiens
agcggttggagacaaagctcgcgcgcacattggacccgggtgggaggtggtaccgcaggccgcgttgaccggaaagtaggtccgtgtcatcgtctgcgccggaacctgcgggaccggatcga

SEQ ID NO: 121911 - DNA, 122 bp, Homo sapiens
gttggtgcgcgcgcgcgcgcggctccgccccgcccgcttggcgcgcgcccccgccaggtccgctctcgtcccccacccctggcgcggacggggtggttccagctcactctcctcccccgagc

SEQ ID NO: 121912 - DNA, 122 bp, Homo sapiens
ctgggagccctcggcgttttggtgggagggggtcttgctggcgcagtggaaggccggctgcggggggaggcgatcgctgccaccctgtctaagaagaaacggcaccaacagcgttgcagttt

SEQ ID NO: 121913 - DNA, 122 bp, Homo sapiens
cttcccgctgctaggctgggttccctctcccacctgcacctgggttctttctgggcatcgcgcctcctccagcccagggagccgcctgctttgggaagctgctatgggaactggcctgaggt

SEQ ID NO: 121914 - DNA, 122 bp, Homo sapiens
acaaaaagctgagatttaggccggtgtttcttactggtgcagcctttaaatgcacacctgcgaatgttcagtgcaccttccgcttcctggctctatttcagtcaaacctgaggtcgtagtga

SEQ ID NO: 121915 - DNA, 122 bp, Homo sapiens
tcaggtgatctgcccaccttggcctcccaaagtgctggcattacaggcatgagctttgcccggcctcttggcttgttcttagtttagggtgactacaaataatggcattattgatctcctgc

SEQ ID NO: 121916 - DNA, 122 bp, Homo sapiens
tgttttggaccaggttgagatggaggtagacaaagagaggatagaggagaggcatcacttcgtggctatgctgggaatcagaatctataatgaaagaaaaagaaggctttataatcagcata

SEQ ID NO: 121917 - DNA, 122 bp, Homo sapiens
gaggtgagtatcccgccaggtaaaggcggggcggctggcggagctgtgcctcggcgtctgcgcctggtgtgggaggaaagcgggtctcccagctccacttaaacccctaaaacctgggactt

SEQ ID NO: 121918 - DNA, 122 bp, Homo sapiens
tgcttccaagtgctaaggaagcttcaatagttactgggaaaaccacaggggtcaaaggtccgtcgagttatttcccggatccgagtctgacgtcttttccccgccgcttgcggtggttgtga

SEQ ID NO: 121919 - DNA, 122 bp, Homo sapiens
aaggtgccggtacgtgattggaataggaatgcgcatgaacggagaaaaccctcaccattgcgtccttttgttctttttgcgaggaagagatccatgggttggctcttactgaacatgaaatg

SEQ ID NO: 121920 - DNA, 122 bp, Homo sapiens
gtgcttctcaaatctcctctaccaggtcacagttctctttagcctagattacctcaatagcgtcaaaaccggtatccctgcctcctgtctctcctgcttcaatccattctcacagcacccca

SEQ ID NO: 121921 - DNA, 122 bp, Homo sapiens
ggccgtcgagaggcactagggtctgtgccctctataccatgtggggtgcccccttccatccggtgacttcagtgcccagctatgcggggggagggactggggtcgggcccggtgcccaggag

SEQ ID NO: 121922 - DNA, 122 bp, Homo sapiens
catgtcagtcagccgtagcagttccaccgtgcacggcttgcttactgaaggtgacaggctcgctgagctgctgtagagcatgggcgagagaggcgcatcgtcgtcctggacttcatccaact

SEQ ID NO: 121923 - DNA, 122 bp, Homo sapiens
ccgctgaagccaggggaggaagcaccctggcgggtcactggctgatggaaggacaggcgccgtgatggttaagtgtgtccatgttggctacctgatttcttttcagccagtctcagctttgg

SEQ ID NO: 121924 - DNA, 122 bp, Homo sapiens
cctcgtgtgcatctgtgggagtgcaaatgtgcacgtgtgtgtgtgcatgcatcggagaggcggaatgtgtgtggggctggaaactgataatctttaaaagatctcccagacttaaaattctt

SEQ ID NO: 121925 - DNA, 122 bp, Homo sapiens
cccggcagctcctccacaccacctaggaggggcccttgaagtccatgttgagaccaggctcgggtggtctcaggtcgagaccttggcctggggtggggacccaggccagagagactcccagg

SEQ ID NO: 121926 - DNA, 122 bp, Homo sapiens
ctcaaacccagcaacttagaaaacggctgtagcggaaaaaaacccgctgctttgttctcccgccaaaggagccaaaagggacaaactgctgcgctctgggatgattattttaattaaaatag

SEQ ID NO: 121927 - DNA, 122 bp, Homo sapiens
caaattaactatcaagtgaaagttcacttaaggactttcccagctcttcccctctgcaggcgttgaaaggacaggaacagaactttccggacacttcccttaccacgagtccacgttagagc

SEQ ID NO: 121928 - DNA, 122 bp, Homo sapiens
ggaaaataacccaaccatatgtgcaaggatatcatgtttcacaactctggggggaaacatcgttttgtattttgtaagaatggtgccacctggagttcttcaagtcgttgtggccaagcata

SEQ ID NO: 121929 - DNA, 122 bp, Homo sapiens
atttgggaattcactatgttgcctgtgtaaaccataaaatatataaaaataaataggaaacggacactgcccttaagggactgatatctggtaagagaagtagaatcagtctgtaggcaaag

SEQ ID NO: 121930 - DNA, 122 bp, Homo sapiens
gcagtaaagggcgctcgggactgtgcggatcaacagtctgtgcggggcggcgcgtgggggcgggcttggccccgcccgcccctgctttgtgcgcagcccccggcccgcgccactcgaggcgc

SEQ ID NO: 121931 - DNA, 122 bp, Homo sapiens
ggctgtgaaccagggctcctggggcagccgtgggggccgggcccagggagtaggggcagccgggccggcctaagggaccttagtgccaggagggaaggggactttgagctggggattgatgg

SEQ ID NO: 121932 - DNA, 122 bp, Homo sapiens
cggccccgggcccagggctcgccccgcagctcctacctcgctcggcccctcgggcgcccgcggctgctccggcccagctgtctggcttgcccgcccgcccgctcgctccctccctcggccgg

SEQ ID NO: 121933 - DNA, 122 bp, Homo sapiens
cttgcgcttcttgccatccttcttctgcgccttggtcacagccttcttggaacccttcttcggagcaggagctgacttagctggttcaggcatgctgtcagaaaacaataacagcagtgaga

SEQ ID NO: 121934 - DNA, 122 bp, Homo sapiens
agcaggggggaagcggaggtgctctgggagggcccagttctgttcctccccagcctgacccgggctcctccaggcctcggctctcatggtgcagggtcctttagccggtttctggggctggg

SEQ ID NO: 121935 - DNA, 122 bp, Homo sapiens
cacagcctccgccgcggccgccttccgtgagcccccgcaccccggcttgctcccgaggggcgcctgggctgggctccactgctgcagtgttagttactagcaggaacatcagagatccccat

SEQ ID NO: 121936 - DNA, 122 bp, Homo sapiens
taagctgtcacttgttttctttactttcctgctttctctcatattgcctctaattagtaccgtccttattttttaggggacagatccaaatccgtgaatccaggggcttcatcacgatcttg

SEQ ID NO: 121937 - DNA, 122 bp, Homo sapiens
ggctccgcaccccgcggctgccatctagtggccacaagcagggacgccaggcagtgagtccgctcctaccaggcgagcgacaggccacaagagggaagacaccgcgccagcagattcctgga

SEQ ID NO: 121938 - DNA, 122 bp, Homo sapiens
tcagaggcagagactgtagaggcagaagcaaagcaagacacagagcatttcagagacccacggcaagagacagggaacagcatggagaactatgaaaaaataggcttccagagaaagagaaa

SEQ ID NO: 121939 - DNA, 122 bp, Homo sapiens
cttatcatctaagactcactctggaagtcatctcaacaatgatatttgctttaatctcctcgggtgacagagatccctctttcctggtcaatgtgacagtcctgaatttttagagctccatc

SEQ ID NO: 121940 - DNA, 122 bp, Homo sapiens
gaatttcaaagtctacaagttttgagatgagttgagtattaattcacctgccacaagagccgtgaggtgtagagcaagcttgtccaacctgcggttcatgcggcccaggatggctttgaata

SEQ ID NO: 121941 - DNA, 122 bp, Homo sapiens
gagccaagggggggcatgccgtgggacaaacgggctgtctagggccagtggctaaaggggcgggaggggaggagtcctcagggatcctgtttcaacaaacgtttctttcggaggaggggaag

SEQ ID NO: 121942 - DNA, 122 bp, Homo sapiens
ggggcggagcggcggcggttgagctgctggctgagactctggggcggaaacggagtggggcggctggggaggcgaggggcgggccggggcggagaccgggaggcttctcctcaggccgcacc

SEQ ID NO: 121943 - DNA, 122 bp, Homo sapiens
ctgacgggcctgtgccgtgggccccagctgtgggggcgctgttgatgcgcagccaggcctcgccgccagagcccgcacgcttccattccgctgacttcatcgacgccctcaggatcgctggg

SEQ ID NO: 121944 - DNA, 122 bp, Homo sapiens
caggctccgcacaagaaggcgtgcatggttggtggccgcagcgtccgtggccacttgacacgtgttctgtgagcctgggattctactaaaagccagatgccgttcacatgcggactgctttc

SEQ ID NO: 121945 - DNA, 122 bp, Homo sapiens
ccgcccgcctggcgctgctgccaccgcgtgctccaggaggtcctttccggggaggccgtgcgagctgcacgcacactctcaacacgcgccacctcggcacctcctcgcggccccgggcccca

SEQ ID NO: 121946 - DNA, 122 bp, Homo sapiens
ctatctgtttgctggaagatatacaagacttttgaggataatacttaaatgaagatagaccggatggtaattcagttggataatgatcagtgacgttgaacttcttttcatgtgttcattgg

SEQ ID NO: 121947 - DNA, 122 bp, Homo sapiens
aagagcgaggcaggcacctcctggaaacagttgccgctgaggttgagcacctggaggctgcggcagagcggcgactgggccaggcccttgggcagcgcactgggcccgccgagccggttgtt

SEQ ID NO: 121948 - DNA, 122 bp, Homo sapiens
tgtgtctcagatgtccagaacatttgagaaatacaaagtacaacttggccaggccactctcgaacccagtctcttcttgcagattctggataagcctgaacaattaaaataaatttctaact

SEQ ID NO: 121949 - DNA, 122 bp, Homo sapiens
gcaggtcagtgggtgcgcgcaccatgcacaagccgaagcaggtcgaggcattgcctcactcgggaagcgcaaggggtcaaggagttcactttcctagtcaaagaaagtggtgacagacggca

SEQ ID NO: 121950 - DNA, 122 bp, Homo sapiens
aagggccgagcctaatctaccagttacttctcaactgtgggctaaaacgaacctaggggccgggcacggtggctcacgcctgtaaccccaacacttctcggctaaaacgaacctaggggccg

SEQ ID NO: 121951 - DNA, 122 bp, Homo sapiens
cggtgccggtgcctcgtttcgggctcgaagagccccaggtcctctgcagagggacgtggccgcccatttaggaccctaatgcccctctgagccgggctttctatgggagtctcagccacgag

SEQ ID NO: 121952 - DNA, 122 bp, Homo sapiens
aggctgagtcccaaccgcagcagtcgctgaatggtgactttttctgtctattcactggagcgaggggttgttcttattaccactgttgggggtggggagcaaatgtggaaagctttgtgcct

SEQ ID NO: 121953 - DNA, 122 bp, Homo sapiens
caggaagtgtccatttcacaggcagggaactagcccgaagacccagcgtgggcaggccaacgcccctagcctgattctcgaatcttcgccaaaccctcttacaggccaacagtcggggcctt

SEQ ID NO: 121954 - DNA, 122 bp, Homo sapiens
cctgcagcccgccatgcctgagcctcttctcccctacccccaccccgccgtgggcgcctgcgcgccagagcctccccaggatcgccgccccctgctccagggcgactggtcccatcgaccgc

SEQ ID NO: 121955 - DNA, 122 bp, Homo sapiens
actttctcccgtctttggtgagttgggtcctctaaagaatgatccacgcaaggctgtgtccgttgtagtctctacggcagtaccggccaaaagggaagagactcgaagactgccaaaagacg

SEQ ID NO: 121956 - DNA, 122 bp, Homo sapiens
gcctcatcagctgtgtgtgttgagaggtggggacgggggagggatgtgtcagactctgagcgtggaccagaactgcgctcggagactttcagtgaaagcagaggagagatttccaaaggttg

SEQ ID NO: 121957 - DNA, 122 bp, Homo sapiens
cggcggccgcggctcgccttttcctgagtagagggtcacgaggggactacaagccccagccgtccgcccccgcagtcgccagttccccgtctgccctcgccggggctccgcggcctggttct

SEQ ID NO: 121958 - DNA, 122 bp, Homo sapiens
attttccccttgagaatcggtgtggaaagggctccctcggggttttccctgtcagaagtccgtcacccacctgcgagtgtaaattttatttgctttaggctttgttggtcactccgaaaagt

SEQ ID NO: 121959 - DNA, 122 bp, Homo sapiens
agttaccatttatattagtatagttctctaggactaaatctaacacaagatgtatgagaccgctacacggaaaactataaaacatttggttaaatggaggaacataccacgttcaaggattg

SEQ ID NO: 121960 - DNA, 122 bp, Homo sapiens
gaataagaaatggcttaatgcccttgaggagctgagagtccgtcagagtggcacccaactcgttgataacttaaatgtaatgtgtctcttattgcagaatacttgctccccaaatcctgtta

SEQ ID NO: 121961 - DNA, 122 bp, Homo sapiens
cccgccacccggagggactgtaacttcggccaggccctgcccctgggacggggacatcggcgaagcccctcctcccacccgccagcaagtgctgggcctcggggcgtgcagcgagccgggct

SEQ ID NO: 121962 - DNA, 122 bp, Homo sapiens
ctggttgcagctcttgtttgaaggagggagttttgcagggaccctgacgctacagccaggcgtgcccaagaacaataaaaacaagggcagcatccgctcgacggtgggtgctctcctgctgg

SEQ ID NO: 121963 - DNA, 122 bp, Homo sapiens
agtggcctaagggtggtggaaacaaagggaggtaatgaatcaccccgggaaaccagggcgcgcttggggtcccccacaacagactcagttcgccaccgacgtccccgctagtgcaggatttc

SEQ ID NO: 121964 - DNA, 122 bp, Homo sapiens
ccctcagctggtgcggccgctctcaatacccactgcgcttgcgctacagcttcgtctcgacgggtttgctcctctcaaacgctcactgcgcgtgcgctagcgcctctttcaccactgggcgc

SEQ ID NO: 121965 - DNA, 122 bp, Homo sapiens
tcgagcacactccggagagggcggcctctgagccccgaaccccgaactccggcgcagcgtcgcacctctgcccaatgaggtgcccctgacgtgcctgctgcggctgccctgctccccccagc

SEQ ID NO: 121966 - DNA, 122 bp, Homo sapiens
cctgatcaaggaaaaggaaggcacagcggagcgcagagtgagaaccaccaaccgaggcgccgggcagcgacccctgcagcggagacagagactgagcggcccggccccgccatgcctgcgct

SEQ ID NO: 121967 - DNA, 122 bp, Homo sapiens
tcactgtgcatcagcctgagtgacagaggaagagtctgtctccaaaaaaaaaaagaaaaacgatagagattcttgggcccaagagtttgcattctaaccaagctcctaggaatactgatgct

SEQ ID NO: 121968 - DNA, 122 bp, Homo sapiens
gcgcgcttgcgctcgccgccgaccctcgctcggcgcccacagcagcccgcatggagtaatcgccaaatggcgacagaccctctcccagtgcggccaccgcccaggctttcggggaatgtctc

SEQ ID NO: 121969 - DNA, 122 bp, Homo sapiens
gctcggggggcggggtctgtggcggcgcagcttacaccgcggtccccttatttggatctgcgggaatgtgggctggagaggtcctgccgtggtaccagcctccagcctgcccccaggactgc

SEQ ID NO: 121970 - DNA, 122 bp, Homo sapiens
agaaaggcggggactggcttctaggtttaccctaccgaagataaaactttagtctccaagcgcagtgacttcaggtttggatatgtgggtcctgttcaactcgagtagctgagagaaagcaa

SEQ ID NO: 121971 - DNA, 122 bp, Homo sapiens
ggtaaggggtgggcgattgggttgggggaggcgcgccagcctggtatcttctctaggcatcgcacttatctctcggtgcctcagttctttctccaccccggggacttaatctggccagaagt

SEQ ID NO: 121972 - DNA, 122 bp, Homo sapiens
ctgcgggggcgaggtcaacctccggaccccgccaagccctgcggccgcctcagggccatgcgtccctcgctcggcctcgcgggccgcctgtgaatctccgagcccagacccggaagagccgc

SEQ ID NO: 121973 - DNA, 122 bp, Homo sapiens
ccagggcagcgcggcccctactccctgtcaggtcgtagaggcgagcagggaccagctggtcgccggcccctcgggcaagatggggaaccgggagatggaggagctgatcccgctggtgaacc

SEQ ID NO: 121974 - DNA, 122 bp, Homo sapiens
aagttctgttaataaaatctacagtcagaaaagtggcaccgtgtcctgcctaatggtgttcggggtgtcctttccacaggccatccagagtccttttccactgcggtgtcagcactgtctag

SEQ ID NO: 121975 - DNA, 122 bp, Homo sapiens
ttagaggggcaccccatctttgtggccatggcggtggtagagcggctgggaggggctctgcggcgagcaagggagcaggcggtaggggttctgcggcgatgggcgggctaggggcggggcgc

SEQ ID NO: 121976 - DNA, 122 bp, Homo sapiens
ttctggttgtctggggacagtcctcctgtcatccccagcctagtctcaagggttctgggccggtcaccctgctgcctctgtgctgtgtctctggatctggcctccatgggaaggaccctggg

SEQ ID NO: 121977 - DNA, 122 bp, Homo sapiens
cctgcacagagatgggcaggcggcagctgcagcgatgggcaggaccgcagcctctgagcccgcaatgacaccgtggcgtcggtagatggctgtagacaagtgtgctgagctgtgcggtgtga

SEQ ID NO: 121978 - DNA, 122 bp, Homo sapiens
gtcttccgcacggagtcattctgcttttggaatttgtattcttaggagtcactgccaagacggccggcaggggccccacccgtgaggcaaaggggtcggtccccgaggcgtccgcgttcatc

SEQ ID NO: 121979 - DNA, 122 bp, Homo sapiens
tcgtgcagcgtgttgtatgggctgatgcctcccacccccatgccagcccacagcaaaacccggcagataatcagcacatcccactgtttagtcatatttgacaactgggttaacctggtatc

SEQ ID NO: 121980 - DNA, 122 bp, Homo sapiens
tgggccgtggcacacacagtgtccctgtcaggcctcacacggtgccaggccacacgctcacgtctccatctcacctgcctgggtggcacaacccgtcacacaagaagtcaggcgtctttagg

SEQ ID NO: 121981 - DNA, 122 bp, Homo sapiens
ttgaaactggattaactaggggggaaattgtagcactgaagccaccgtgactgtcttttgcgctgtgtggaaactccggtaaaactctttgggcaacagtcttatcaccagctcttcaacgt

SEQ ID NO: 121982 - DNA, 122 bp, Homo sapiens
gaagaaaaggcgctgagaggggcgatgggcggacgggccgtgcccaccacagggaggtcgcggcacctgtcgctcctggttcccagggcggcctgtcaatcacccacgctgggctcagcttg

SEQ ID NO: 121983 - DNA, 122 bp, Homo sapiens
gctgctccgccgcatcattaattcattgcctgtttcctttatgctgcactctggcagcaccgatcataatacattcatttgcttttaacacagagatttcattcttaccccttctgccccaa

SEQ ID NO: 121984 - DNA, 122 bp, Homo sapiens
cggctgaggcccagcaagaattcaagcatggcgaaagtgtgccggcagtgctagggaacccggcaccccctccgcagctgctggcacgggtgctaagcccctcactgccctgggccggtggt

SEQ ID NO: 121985 - DNA, 122 bp, Homo sapiens
gtttccgaagtctgccgccagggccaagtgtgctgagcttggtgaccgctggcctcaggacgctacaaagcgcgcaaaacatcgcgcgttgggcaccctctggccatagggtcccgcacggg

SEQ ID NO: 121986 - DNA, 122 bp, Homo sapiens
ctcattgcttgtattgggaaaacacaaagcatatgtcctagtgatggtagctcagcagcacgggccatctttgtataaggtggtcaggtgtccacctgattgcttttgcacacttcttctca

SEQ ID NO: 121987 - DNA, 122 bp, Homo sapiens
tgggcaagaaaatgctgcatcgggcccttattccagagagtgcagagctggggccaaggtcgtggtcaaaaaggaaaggagccctcatggactccagggtcagaagttccctcgggaaacca

SEQ ID NO: 121988 - DNA, 122 bp, Homo sapiens
aagaaaaaaaaatatttaaaaactaagatgatcagattttaaactagtttgggtctaaagcggaagggaatgtctgcgtagagctctatagaggcatgtcatttcttttctgaagtgggcaa

SEQ ID NO: 121989 - DNA, 122 bp, Homo sapiens
aggtgggaagggagccccggagatggcggggacgagggccaacctgaagagggcggggcccgagagacaaagctgatgtggccgccgcggcgcttcataaacttcagcccgcgtggaaaggg

SEQ ID NO: 121990 - DNA, 122 bp, Homo sapiens
attcttcttcagaaacataactcttaggctcaatctctattcctggtcttccatagctatcgtcttctttttaaagtactgtattttattgaatctaagctagtatttgttgtaagaagcac

SEQ ID NO: 121991 - DNA, 122 bp, Homo sapiens
ggtccctggatacaaacaacgacgccattttcccaccagttctatggaaacagaaagttacgcctcaaggctttctgggaaataaagtccatactctggggccaacgcgcaaatcctcgtcc

SEQ ID NO: 121992 - DNA, 122 bp, Homo sapiens
cgtctgcataaatctagtccaatccagggccccgtagcaaggcgccaaagctgggggaagcgcatttctgttctctcgcgagcacgacgcggtgcctcccagtcctcctccggccctccctc

SEQ ID NO: 121993 - DNA, 122 bp, Homo sapiens
cgtgccacgtgaccctccagctgtgcgcgcccagacttctggagctcagctccgccccggcgccaggagcactccggcctcagagtggggactaatccctgagagggagcctcctcactctc

SEQ ID NO: 121994 - DNA, 122 bp, Homo sapiens
aggagggagagaagcgggcacagttcacatgagtgccgggaagggacagctgagcagccacgtgggctgggcgtgtgggctttggcctgtgagggccccgggtcagcggagaagggcacggg

SEQ ID NO: 121995 - DNA, 122 bp, Homo sapiens
aacaaatttacatctccccatccctcatttctccttggctgcctaaggcatcatggttaccgtagcagccagatgctgatgatgcctccaggggacggcaaggtgaaactgagccagttccc

SEQ ID NO: 121996 - DNA, 122 bp, Homo sapiens
tcaggcccagtgtccaagtgtccgtttatctgtccgtttgcatatgaccgtagatcggcacgccctgctccagctgcggcatgtgcagggttaaggcgagaggaggtttccctgagtcggag

SEQ ID NO: 121997 - DNA, 122 bp, Homo sapiens
agtagcagtcttcttcgctgtgttcgtcgccgccgccgccgccaccgccgttgtcgccgtcgctgctgcaaccaccagcagcggccgcagaactacagacaaatcccccatagccactcagt

SEQ ID NO: 121998 - DNA, 122 bp, Homo sapiens
cttccgggggcgggcgctcctgtccgtggagtcgggcagcaaggtgaggcgtgggcgtggcggtcgaagggatggaggctggctcatccccagggctctcccctgcacagcctcatgggtgc

SEQ ID NO: 121999 - DNA, 122 bp, Homo sapiens
gtgctgggattatgggcagtgagccaccgtgctggctataggcgctattactatccctgtcgcagataaagaaataagacctaatatcacaaagctaggagaggtggaattgaaactcagcc

SEQ ID NO: 122000 - DNA, 122 bp, Homo sapiens
ctttgattctttttaacacatggttgtgggctgaatggtgtctcccaagaagtcatatgccgggatcctgtcccatagtgcctcacaacgtgacattgtttggagttagggttgttgaagat

SEQ ID NO: 122001 - DNA, 122 bp, Homo sapiens
ttctcacaccctccagtggatgattggctgcgacctggggtccgacggacgcctcctccgcgggtatgaacagtatgcctacgatggcaaggattacctcgccctgaacgaggacctgcgct

SEQ ID NO: 122002 - DNA, 122 bp, Homo sapiens
agattattaaaatatcaattctaggtatgttcttaggggcttctgactttaagaagggatcgtgtgtgaattatgcactttactgtaacagggacaccacattctgattttaagagttcatc

SEQ ID NO: 122003 - DNA, 122 bp, Homo sapiens
ggggcagcacccgataaccaaacacggtcatgtttctgctgcaaaacatgtgagtattcacgcccagtggggaaaaacgagggctctaaatagtctcagggcagggcagtttttgctgccaa

SEQ ID NO: 122004 - DNA, 122 bp, Homo sapiens
aaacttgtggtctcccagaaaaaacatttctcgcagcttccctgatggctagatttggcacgtgactgaatttgaccaatgggatgtcaactgaagggtcgcgtacaacttccaggaagggc

SEQ ID NO: 122005 - DNA, 122 bp, Homo sapiens
cgtaagaggctgccctatgtgttgtaggatgtttagcagcatctccagcctcaacccactcgatgccagtagtatccagttgtgacagctaaaaatgtctccagatattgccaacagttgtc

SEQ ID NO: 122006 - DNA, 122 bp, Homo sapiens
ggagccgtggggagggctggactgcagtaaggacgcctcgtgggatgtgccaaaccgctgcgtggagcctgggctgacttctctggatcttggtgcaactggcgtggcccttccaggaagcc

SEQ ID NO: 122007 - DNA, 122 bp, Homo sapiens
ccctcagggggccctcttcccaggctcacttatctttgttgtatgctgagctaattagctcgaaaggctggctgacaggcgggttcccattgctttcttctgttaaacacacccacctacag

SEQ ID NO: 122008 - DNA, 122 bp, Homo sapiens
gacctgaatggagggtccaggcaggttataaggggaccacaccagccttggtcctcagcacgctccagctggctctggtttccagctcttctcgtcaccgagtagccggggggtcccagcgg

SEQ ID NO: 122009 - DNA, 122 bp, Homo sapiens
aggggagaggcctccggacggcgaagtgtccctagggacccagacgcctcgggagcgatccgggccgctgcgaagccctgcccaccaggagtggatccccaggattcacctcccggctgcct

SEQ ID NO: 122010 - DNA, 122 bp, Homo sapiens
cacgactcagaggcccagatccatggttcccctctttaaaccttcaccccagcctctgtccgcccctaaggcagcccctgaaggcactgactgttaccagctgccaaggaagttccagccca

SEQ ID NO: 122011 - DNA, 122 bp, Homo sapiens
gggacccacgcggggagtgggctggcagtgcgcgcacagcggcggcgagtgggtcgtgcacgcggatgcggggtgggagtgggggcgcacgcgcgggcgtgggcgagcgggccccggcagtg

SEQ ID NO: 122012 - DNA, 122 bp, Homo sapiens
aatctggggggatggggaggtctcctcatctctgagccttgagcaccaggcctgaattttcgcctctttcgcacaggtgcccgactcggagtccgggaggcgggccctctttccaggtaccc

SEQ ID NO: 122013 - DNA, 122 bp, Homo sapiens
gttcccacccaaatctctccttgggccaaatggagataattgaatcatgggggcagcttccgccatactgttcttgtgatagtgaaaaagtcttacaagatctgatggttatataaatggga

SEQ ID NO: 122014 - DNA, 122 bp, Homo sapiens
aggagatgagatgggctggggctggactgtggcatcggcatccgtcgaccccagtttcaacgccgtgtgggcgagatctgtcctgtgtgtcctgggcctcccttaggtgctgaccccacagc

SEQ ID NO: 122015 - DNA, 122 bp, Homo sapiens
acccatttcccattctctcaatattgattcaattatatttatcctttttctaattatatgcgatccagaagttgctcagcaagcagtctgtggaagtaggctgaactcctgaatccatgaga

SEQ ID NO: 122016 - DNA, 122 bp, Homo sapiens
cgacctccctacactagggcagcagctgaaaccaaagaggggcccacttgcccactccagcgggaatgatattgggtcactgggcactcaccatgtgtcaggctctctgtaagtgctttaca

SEQ ID NO: 122017 - DNA, 122 bp, Homo sapiens
aagacggggcagtgcgtgtgcgcgcgcgggcaagtgcatgtgagtgcacacttatgtgagcgcatgtgtgtctgcgcttgtgcgtgtccaggggaaccacagggagcaccctcattctaagc

SEQ ID NO: 122018 - DNA, 122 bp, Homo sapiens
ttttccttatgttgtctctgagagcctgacttccgttctccctgctaggctatccccaggcgtttccttccttgattcatgaactctaagatgactagatcaccaggtcggccccaagtatt

SEQ ID NO: 122019 - DNA, 122 bp, Homo sapiens
tatctcagtagatggaacgtacaatcggcttttataccgagacattccattgcccagggacgggcaggagacagatgccttcctcttgtctcaaatgcaagaggcatgccttcctcttatac

SEQ ID NO: 122020 - DNA, 122 bp, Homo sapiens
gagtgggatttgggaaactttttgttttgcctttgttgtttgctactgatcacctgcgtgcgagggaggcttcttggagtcaggtgggtacatgttaacttgaaagaagcgctccgtctgcc

SEQ ID NO: 122021 - DNA, 122 bp, Homo sapiens
gctcataaggcagcaacagctgacttttgggatggatcacagctagacctcccagctccacggtggctgtgacctcccagaccagggcagcccagcagccggtgccctgaaaacccagcaag

SEQ ID NO: 122022 - DNA, 122 bp, Homo sapiens
tcagagggcgcctggtcatcctgagagccttgccttcgcagtttgagattaggggaagttcggggcctgagaaggtgggcgcgatgctggagctgggaattcttcctcggagcccctggacc

SEQ ID NO: 122023 - DNA, 122 bp, Homo sapiens
gtgactactgtagatttcctgtttttcttgtgtgcctaggaaactaaagccacctgggaacggtatcaagaagaaagcctgtgaagccttctaagatgggaaagacaaaagaaagctggcag

SEQ ID NO: 122024 - DNA, 122 bp, Homo sapiens
tattaggaaccagttacctaaacaatgtaaatgcattagaccaggagcatactagatccccgatctagttactgaagcacaaattctattggcaaaacatgcataaacatacacattctaga

SEQ ID NO: 122025 - DNA, 122 bp, Homo sapiens
cggcatctgcataaattggttaatgggtgctgttgaagagagtgtgatttgtccaatggccgaactcaggagtccttgagtacttgacccaggaagacaggggagagtaggcttagcaatta

SEQ ID NO: 122026 - DNA, 122 bp, Homo sapiens
aaccctgaaaggaagaacttgcatcccctgagaacaaaacgcagcctatccagaaacccacggaagcagaaggacgccagagaggaccctttcgaccgggttccgcgttctcctgggtgaca

SEQ ID NO: 122027 - DNA, 122 bp, Homo sapiens
ctcccttcttccctcgctgtgctcctccatcccaggctgcggcagatggaacgggaggtgcggcgcccgcgggcgcccgggcgcggggctctggggagggaggggttaaaggggcctcggcc

SEQ ID NO: 122028 - DNA, 122 bp, Homo sapiens
gactgaatcaatacaaatatgtaagtgttactagaaaaagaactcaagtacatgttcttccgattattcatcaatagcatcaaaaggaaatgatgtggatgaaggaaacattatatgtgtgc

SEQ ID NO: 122029 - DNA, 122 bp, Homo sapiens
tggctgaaccgccacagctggcagcggatccccgttgccgtcactgcctgggccctgctgcgggacagctaccacgggggtctgtgcctccgcttccaggaccagcacatcaccgtggcggt

SEQ ID NO: 122030 - DNA, 122 bp, Homo sapiens
gttctgcttattctctggcctgcattttgctgttttcagtcctgtcagaatgactgtctccgagctggggggggagtccactccacgtgtgctcggctcacctgagcggtagctgctccgca

SEQ ID NO: 122031 - DNA, 122 bp, Homo sapiens
gccccggccccgcctccgccttgctcgccccgccccggaagtgacgtatagcacgccccgcgggcccttgaaaaggcggcgcagacaagcagccgcgtcagaatgcttctgggagtcggggg

SEQ ID NO: 122032 - DNA, 122 bp, Homo sapiens
atctgcgcgtgcgagggatcgcagttccatcccgaaagcgctccccacccttccccggtccgtggaaaaagtgtcttccacgaagccggtccctggtgcgctggtttcacagatgcggagtc

SEQ ID NO: 122033 - DNA, 122 bp, Homo sapiens
gccaggccccgtccggagcgccctccactggccagacccggtccagcggccggcagctagcggccaggtctcagtccagctgcagtgtgggcggagaggtgcatcctcccgggccctaagtt

SEQ ID NO: 122034 - DNA, 122 bp, Homo sapiens
tccacctccgcctcctcctgctccagccgccgccgccgctgccgccggcggctcgggggccgaccaaccccggcgcaacctttagccagggacggacctctccctggatcctgtacccggcg

SEQ ID NO: 122035 - DNA, 122 bp, Homo sapiens
tgacaccaggcaccagacgggactcgcaggcatttcttcctccgtaggtagagatgccaccggccgctccgagcagcgctgcgaggaccccgggaggaaacctatacgagcatctggcccag

SEQ ID NO: 122036 - DNA, 122 bp, Homo sapiens
cgaatttcatgtcaggcataggtaggcaatgccagatcagttgcccctagtttttctccccgcaacaaacgaattcagatctaagaaaaaaaaaaaaaaaaaacctgtggtatcaaggccac

SEQ ID NO: 122037 - DNA, 122 bp, Homo sapiens
gtatctgtgctacctacatctgctttcaacaaagcccttcccttattgtctgctagtgcccggagaagtaccgggacattgaaaatttctcattaatttaaattatgtgagatcaaagagat

SEQ ID NO: 122038 - DNA, 122 bp, Homo sapiens
gaacctgtcaaagcaagatggaagcaacccactgagcttctgtcatgaaaagcctccttacggtggaaacgtctgcaccaacttttatttatttagactctttaaaaacctcttgacctcat

SEQ ID NO: 122039 - DNA, 122 bp, Homo sapiens
cagcaggaggacgcaggaggggcgaagtaaccccgggaagacgttcttccccctcccttacggattcagtgtagttcctggcataagcaattctgtcaccgggcggtcttttctaattcgtg

SEQ ID NO: 122040 - DNA, 122 bp, Homo sapiens
agcccaccatgcctgagccttccccctcctccgtggattcctgtgcagccggagcctccccgacgagcgccaccccctgctccatggcgcccagtcccatcgaccgcctaagggctgaagag

SEQ ID NO: 122041 - DNA, 122 bp, Homo sapiens
cgccccgcctccgcccccgcccccgccgcgccgcctctctcccgcgctccggaaggcctgcgtccccgctccccagccaggcgccaccacctgccgcccaggcagccaggcgactcttcttt

SEQ ID NO: 122042 - DNA, 122 bp, Homo sapiens
cctgacatgtttttaaacaccgtatgagccaagcaaaacacatctgcagtttgtattcagcgccacgggccgtggatttgggacctcttctggggagtctaacaaaggcactttacgtccca

SEQ ID NO: 122043 - DNA, 122 bp, Homo sapiens
ctggtttttagcgagcgagaagcaaaacgcctatgcgccgcccgggaatcgaacccgggtcgcaagaatgggaatcttgcatgataccactacaccagcggcgctgttgacatgcccagccg

SEQ ID NO: 122044 - DNA, 122 bp, Homo sapiens
gaaataagaaaataaaaagacctttagggtagtaagagatggcactttcggagaaggtggcgtctaaggaaatgtgaaggatgagaagggaggaaccagccaccattcctgtaggaagctca

SEQ ID NO: 122045 - DNA, 122 bp, Homo sapiens
ttgctgttccttgtgattccaaaaaccctgatttggggcccatgttcaggctggctttcacgctggctctcagtctggtcagatgcaatgttcttgagaggagaggacctgactgttaccat

SEQ ID NO: 122046 - DNA, 122 bp, Homo sapiens
atcagggagcgctatgtggtgcaaatcactccggcgttcaagtgcaccgggatctggcctcgcagcgcggcacagtggcctatgccccacatcccttggcccggccccaatcgggtggccga

SEQ ID NO: 122047 - DNA, 122 bp, Homo sapiens
ccctgtgaagtgaggtctgctctgccgtgggcctgtcggaggaggctgagcagagacttccgtctgggccccgagctttggcagtgcacgggaaggcgccccctccctctggcccgaggctc

SEQ ID NO: 122048 - DNA, 122 bp, Homo sapiens
cacctgcccttgccttccctttcccagcctctctcctggcggggaactgtttggaccagtcgtcagcggcggccagaaagttttcctgctgtctgcctgaaggtcgcctgtgtcagggggaa

SEQ ID NO: 122049 - DNA, 122 bp, Homo sapiens
gggtgacagacgcacctggaaaatcgggtcactcccacccgaatattgcgcttttcagaccggcttaaaaaacggcgcacgacgagattatatctcgcacctggctcggagggtcctatgcc

SEQ ID NO: 122050 - DNA, 122 bp, Homo sapiens
aatcactcctttttttcacatcaagtgccctactgatatattttcctttaaaatccagcccggcagatagatgctatctcagtagcttactgtttgaaaatgagattgaggaattgtgattc

SEQ ID NO: 122051 - DNA, 122 bp, Homo sapiens
atttcccttccccttttcttggttgtcgctcgctttctttggttttctttctcggtatttcgttgtcaaggccacccttgccgtcggatcccggggtgctgggtttctcccggccgctcgtt

SEQ ID NO: 122052 - DNA, 122 bp, Homo sapiens
ccggccaggcctcactttagtgcctgtagaagattcgaagcacagaagcccctggcatcccggggaacccccgccccggccccaccccaatcacgataaaccctggcctttggaccagctcg

SEQ ID NO: 122053 - DNA, 122 bp, Homo sapiens
tctgggtctgagctcaggccagttgatggggagcctcaagcatctccatgaggaaggtgtcgatgggggtgtcaccaatgagcttgaagaaaaacagatgctctagacacttaaggccaatg

SEQ ID NO: 122054 - DNA, 122 bp, Homo sapiens
gtctccttgggtacccctaagacatgaagccctatggagacaggagacgccagaggggcccggaggaccctggtcagaaggaatatgggggctgtctgtggcccacactgccttaggagtgt

SEQ ID NO: 122055 - DNA, 122 bp, Homo sapiens
tagctaacgtggaccgaatgcttgctgcatgtgaggagcttcaaggatatcagctcatttcgtcctcacaataaccctacaaggcaggagctgcaattaccccatttacagatgacgaagca

SEQ ID NO: 122056 - DNA, 122 bp, Homo sapiens
tagaagagttagctggggagagatttgactgaagagaaggaagcgtgtttgcagtgttaacgcagtggatctgcctcaagaggcccagaacttaagaaagccaggaagctatttttctacga

SEQ ID NO: 122057 - DNA, 122 bp, Homo sapiens
ggtcccgttccagccaatggaaaccggacacagcagtaggtataaaaaaaccggacacagcgtcaggttataaatgaccctggtctccttcattcggtgtactctcgtggcaaaactgctgg

SEQ ID NO: 122058 - DNA, 122 bp, Homo sapiens
agtaagtttgccaaaattcatcaaactgtgctaagatctgtgcacttcactgaatataaacgtcatttaaatgtctacttcatttaaaaaacaaagaagctgattggaagtgctgagccctt

SEQ ID NO: 122059 - DNA, 122 bp, Homo sapiens
gttaaacagattgcacgtagctgaaaagtaaccgaaaatctggactggcgcggtggctcacgcctgtcatcccagcactctgggaggtcgaggcgggcggatcacttgagatcagaaatttg

SEQ ID NO: 122060 - DNA, 122 bp, Homo sapiens
gagctacccaatttactccccaacccaccacaggcaggcacgcacacccataatttcaggcgagacgaggcaggcctctgagaacagcactccaacaggctttatctgagtgctcagctgga

SEQ ID NO: 122061 - DNA, 122 bp, Homo sapiens
actggccaccgcaagggaccgcctgatggagctctgcaagctggaagctgcggaggacatcgcgtaccagctctcacgctctcggaacatcacctatccgccggctgggcagtccgtgctcc

SEQ ID NO: 122062 - DNA, 122 bp, Homo sapiens
tggtgactgttttgtccccagcgagggagaaagcaaggacttctgggtttggggagagctcgtgaaccatgttgcagtttgtccccgcttgtcctcattgggggctggtagattggcagaag

SEQ ID NO: 122063 - DNA, 122 bp, Homo sapiens
agcgggccgaccattggctcaaggtttaaaatgtagtctttggatggtctcatacagacacgccaacaagagtcaaggggaaggattcatcacacaactttaacagctaaatataaacatta

SEQ ID NO: 122064 - DNA, 122 bp, Homo sapiens
cgggtggggagttcccagagaaggatgccagccttcagaccgtgacacggaaaccccacccgggtctacagccttcacaccacgacacggaaaccccacccgggtctgcagccttcagacct

SEQ ID NO: 122065 - DNA, 122 bp, Homo sapiens
atgggtgggaacccgaccacactagcgcgctagaagagtggggcggaaagacatctcccgcgcatgtgtggaactggggggactgattccaagacaaggcgcccaccccacagagcaagttt

SEQ ID NO: 122066 - DNA, 122 bp, Homo sapiens
cagtaacgcggacaatgaattttactttcgctacccaagtgagtgcggggtgagggcgcgcgggaagcaaagaccccaagatttgcaaagaccctccggtgtcttgggagggagcatttggg

SEQ ID NO: 122067 - DNA, 122 bp, Homo sapiens
ggtcccatgaaatgaaattgagagagctttttccggcgcctggttggttggggcggcctccgttcggtgcttttttcatcctcgacccagtgaccaactgtgtttgccctgatgtttctttc

SEQ ID NO: 122068 - DNA, 122 bp, Homo sapiens
cggggccgaggtgacaccgtgggctgggggggcggtggagcccggggccggggtggagcccggggcccgcctggtgtccggggccgaggtgacaccgtgggctgggggtgcggtggagcccg

SEQ ID NO: 122069 - DNA, 122 bp, Homo sapiens
tcctttcactcgggaaatctcgtaatcgcatccattgtctttttggtaagtaaacggtgacgtgagaaattttgatggggttagctcagtcattggtgattatgtctcagtttagggtagat

SEQ ID NO: 122070 - DNA, 122 bp, Homo sapiens
cggtcacaaatggggaggtggggtgccccagcgctatctagtgggtagaggcctgggatacggctccacgtgctatggtgcacaaggcaacccacacagcaatccagcccaatgtgcccact

SEQ ID NO: 122071 - DNA, 122 bp, Homo sapiens
taggtctccattctggtcctctccaattcatcctttgtgctatagctccagtgatccttacggaatgctgttctgatcagatcagaactctgcctaagacccttcaaaggcttcgtattgct

SEQ ID NO: 122072 - DNA, 122 bp, Homo sapiens
cagactccatccttgacccggggatgagcatgaaggcattgtcccaaaggcagaggccaccgtggtaggaattccaccaaggccagaagggaaaaaggaagaacccaccgtgtctggctgtg

SEQ ID NO: 122073 - DNA, 122 bp, Homo sapiens
aaactcccccctccccaaaggtccattgctggtggataacatgtgcaccccgctgaggtgcgacagctggcccgactgcagaattcatcaactcctggctttggtttcattgcccagacttg

SEQ ID NO: 122074 - DNA, 122 bp, Homo sapiens
cccccgcccaccaacccctccgaggcccgcagccccgcccgccgccctgcagcagggggtcgctgccacggcccagcccctcccgccgaccgcgtccctcttgctggcctcagccagccgcc

SEQ ID NO: 122075 - DNA, 122 bp, Homo sapiens
ggagcagttcgagaagtggcgcttcagcatgcccttcaagctggcccaggtggtgcaggccgcctgcggccctgccatgcgcctcttcggctacaaactggcgcgggacgccgccgccctca

SEQ ID NO: 122076 - DNA, 122 bp, Homo sapiens
gcaatcttttatgggtttctcattaaggaggaaggtttcctgcttaggggtagccttctccgggcactcagcctcaccatctgctggatagaggggagaagctctacaccttttactacacc

SEQ ID NO: 122077 - DNA, 122 bp, Homo sapiens
ttccaggacccgccctctcccgccggaagcgccctcctcctggcggaaacagcttctccccgtcccgcccctcagtctgctcttcacacggataccacgaatgccacggtggcctcctgaag

SEQ ID NO: 122078 - DNA, 122 bp, Homo sapiens
attcttttctcagtagccctcgacaagcgagtagtatttcttggctccaagtctcataaacgtgtaaccagactccattggaagacggtaaccccacgcgatacggactgtgcttgtattaa

SEQ ID NO: 122079 - DNA, 122 bp, Homo sapiens
tggcaggctgtatggtgagtgtgggcatggccgcccctccgtcctctttcccctctggcccgtctcgcatctgaacacctgggagtctgtgattagacctgagaagaggaaatgaggggcag

SEQ ID NO: 122080 - DNA, 122 bp, Homo sapiens
actccgcgtagcctcaagcatcggccatgcgggccgcgcggtggcgccagagcgcgcggccggtcccactcacccagcactcacagggtcacctggcactgggcgacgcagcgcgatgaggc

SEQ ID NO: 122081 - DNA, 122 bp, Homo sapiens
atctgaaaagaaagagaagaaatgtcaaccaaacgtatctcaccctcctcacttcccacacgatagcctgagcttgcgagtctgtgaggttagacactcccgccaagtttcactgctgttgt

SEQ ID NO: 122082 - DNA, 122 bp, Homo sapiens
gcgcgcctcacgtcagggccaagagcctagcgcgtagctttatggctgactcggctctggcgctctagccaattccgaggctgcaaactccgcttctccgctcgcagtctggttcctcccct

SEQ ID NO: 122083 - DNA, 122 bp, Homo sapiens
gaacgcggacactcactttctcgtggaagatggactccatgtttatttgtctggagccaacggcccccacgccgaaccaccccctccagctccgccccctgcccctctcctccgcccacccc

SEQ ID NO: 122084 - DNA, 122 bp, Homo sapiens
cttacatctccctccgtctttctcttacaacatcaccagtcattggatgtcaagcacagccggataattcagggtcacgtcctctcaagatccttaacatgattacttctgcaaagacgtaa

SEQ ID NO: 122085 - DNA, 122 bp, Homo sapiens
gggcacgcccaacacttactgctccaaggctctggagttccaagtgccgctggtgtttaacgaagtgttcagaatccccgtgcattccagcgcgttgacactgaagtcacttcagttatacg

SEQ ID NO: 122086 - DNA, 122 bp, Homo sapiens
gcagggtcaggacagtggttgagatggaagctgactttctagaagagcaccggtgaccttcgagatcagggtcaggacagcggttgagatggaagctgactttgtagaagagcattgatgac

SEQ ID NO: 122087 - DNA, 122 bp, Homo sapiens
aggtcccttggtggatggtacgggggccgtggatagggagcaaggctcagagcacctccccggctcccatggccatactgacctaaggcatcctgtgccttgaaaaatgccccactcccaag

SEQ ID NO: 122088 - DNA, 122 bp, Homo sapiens
agtaagctcagggagggtaaacacagacgccagagcactggtttgagacggggatgtagccgctgtgcagagactcgggtagggcaccggctatcgcggagtgaaaccctcagcacagtatc

SEQ ID NO: 122089 - DNA, 122 bp, Homo sapiens
actaaacggcagcatgttttaacagaagttatttactcctagaggacccagaaacgtttgcggcctgccggaacaggacaacatagggctctgggaagagtccccctttcagaggtgagaac

SEQ ID NO: 122090 - DNA, 122 bp, Homo sapiens
ggtttgtgttagagttgatgttcagctgcccctttgaatgggggaaataaataaaatttacgtaacaacagtggttttacaaggaggtggaaagacaatctctgtgtgtactccagcatctg

SEQ ID NO: 122091 - DNA, 122 bp, Homo sapiens
cttcctatgacacacgggactcacacatcacttgccaaggaccacaactgccagggacctcgagcatcaaatgcttgcctccctgaggagagaggacagatgctgctggaggagatgtcagg

SEQ ID NO: 122092 - DNA, 122 bp, Homo sapiens
gcctgagcggggccttccggtcttcggaggctctgagtgccggttacgtaacggcggctccgagcgcctggggtcctcccagagctcctgggctcgagctctttccatgagcacctcgggcc

SEQ ID NO: 122093 - DNA, 122 bp, Homo sapiens
tccttgtacaaggataacatcaaatctagccaagcgacggtagtcaactgattcctttttcgccttagctttagcttctttcacttcctttatcaactgacagtactttgctttagaaaata

SEQ ID NO: 122094 - DNA, 122 bp, Homo sapiens
tccacaaattaaaaccttttatcagcctctaagagctgtgcaaactaattagactttggccgaactttgccaatgactccctcgaggtattattataaaattttgagcttggaaacgcgtcc

SEQ ID NO: 122095 - DNA, 122 bp, Homo sapiens
cagactacctgacttgccgcggctgggctggcccccggggtccgcgcggctggaggcgcccgcctcctcggggattcccaatcctcggcgacccctgctcaatgtggcggctgcagctgcag

SEQ ID NO: 122096 - DNA, 122 bp, Homo sapiens
catctctaaagaggtaagatccgccaggggtgctgaatgggggcttcagttcttcctgcccgaagggtccttgagaagcctgtttgtttttcccggcgcttgtctccacccatccccttctc

SEQ ID NO: 122097 - DNA, 122 bp, Homo sapiens
atatgaaaaaatgctcaagatcactaatgatcagggaattccaagtcaaaactgctatgccgtatgtaccaccctacttccgcaagaatggccataatcaaaaaaatcaaaaaataatagct

SEQ ID NO: 122098 - DNA, 122 bp, Homo sapiens
agatagcgtgggggtggggcggatggtgacggggagaatccaccagggattggggggttgcgcccccacgatccgactcctttagtgcatagtacccctaagggagaggagtcaggggcggg

SEQ ID NO: 122099 - DNA, 122 bp, Homo sapiens
cttcctggtggatggtgctgccaaagtagggcctcgtgtttcactccagggagctgtcgccgtggaaatctttaatcaccatgcattgttttcactctattctttctcctcttagaaaagaa

SEQ ID NO: 122100 - DNA, 122 bp, Homo sapiens
gtgtctgtggccacacacagctctagccttcctctagccaggtccctgccctccgcccaccgcagactcaccgatgaactcgatggacttgtccagccagggcagcagtttttcacagtagt

SEQ ID NO: 122101 - DNA, 122 bp, Homo sapiens
ccctctctcaggggagaggtgaaaagaggttatgtggaacagacagtgataacaggatgacgtcacaggtgtgcctcaaagaagtccctggtgagctgggctcataactactctgcagtgat

SEQ ID NO: 122102 - DNA, 122 bp, Homo sapiens
agatggttatcatcatgggccttcccaaagggggacagtgctgagagcagcctgacacaacggttgaacttttgagttaggaatctgtattagtccattttcatgctactgataaagatata

SEQ ID NO: 122103 - DNA, 122 bp, Homo sapiens
catctcttagctctgcccagggggctggtgaggaccctaatgtagggagtgtatgtaggccgcctgtcattgacaagttctcggcctttgtcagatgttggacaaggccataaggttcctgg

SEQ ID NO: 122104 - DNA, 122 bp, Homo sapiens
cgggcacgtccatggctaccacggctggggctgccggcgggagcggggcccccaggagcgcgaatgtcctctctgccgccttgtggggccttatgtgcctctatggcttggccaggaggccg

SEQ ID NO: 122105 - DNA, 122 bp, Homo sapiens
tcattaccggagagggagcgaggaattccagcaacacccactttggcaccgggaagccagcgggcggcgagcgggcggcgagggggattaacccgtgcggagcagggggcggcgcggggctg

SEQ ID NO: 122106 - DNA, 122 bp, Homo sapiens
agtgaatgggccacgtcccgagccctggtccggctcccaggaggccacacacactccgtgcgaagctcaccgactccggacgccgggacaggagcagctgcacccgcacctcggccataacg

SEQ ID NO: 122107 - DNA, 122 bp, Homo sapiens
gaggccgggtccccgcgccttccctagcgccctgcctctctttggccgcgctcgcaggaccgcctgtaggagagtgaagccccagggtttccttgctgatggagtcccccaccttccccagc

SEQ ID NO: 122108 - DNA, 122 bp, Homo sapiens
ggacgatccgaccgcagcccccggcgccccaaagtccggcagctggggtgttgtcgccagcgcctgcgcctcctgggagcttccaccgagacgccctcgccagagcccaggaggagtcgggc

SEQ ID NO: 122109 - DNA, 122 bp, Homo sapiens
cccaggctggctgcgagggcgccggggaggtcactgttactccagccccgcaacccgcggcggccctcgcacacttccgccggaagtcagcccctcaggggcgccgtgctgatgtcacgagc

SEQ ID NO: 122110 - DNA, 122 bp, Homo sapiens
acttctccagcgaaagcaaacgggcgaggacacctagggcacgtttcagcgcagacaggccggcccttctcgcggcctcgcagtgtctctctccaggttcccggggatggtagatgaacgtg

SEQ ID NO: 122111 - DNA, 122 bp, Homo sapiens
ccgctgatagtgagggccaacccggcgccatccagtttaaagaggcatctgcgcgccacacgcctgacacttcacatttgctagtggctacatttttctaatgaaaaaagaaagttacagta

SEQ ID NO: 122112 - DNA, 122 bp, Homo sapiens
atggggagatcagggttccacattttcgggtaagcattagccgtcctggcgctgcacgagcgtattctacaattccgaaaactactaacttttccgtctgcaacctttaataattgagaggg

SEQ ID NO: 122113 - DNA, 122 bp, Homo sapiens
aaggcctttccctccacggacgctgtgcgtgccctgctggagcagcaagtacccacagtgcggtagcacggagaggaccactatctgcactgtcagcactttagccccggcagggctggagc

SEQ ID NO: 122114 - DNA, 122 bp, Homo sapiens
tctgccaatgagcgaggtccgagaggcccgtcgcccagcccagtcccgatcggcgcacgccgctgttcgcgtgtctggttccaaataaagtttttcgcgactttgaattttttttttaaagc

SEQ ID NO: 122115 - DNA, 122 bp, Homo sapiens
caccagcacaaatactgcgaccccagtgcgtgcgctgttgggaaagggacgcttgggaaccgggctgatattcccgacaatgcagccattctaattttatgtagccagggtctgctctgatt

SEQ ID NO: 122116 - DNA, 122 bp, Homo sapiens
aggcggccgtggcgcggaggacttgacctttacggcacgagaggagggcgctggctgagccgcagggagggggacgctgctctctccagcctcctccacccaatagcagtccgctcgaccca

SEQ ID NO: 122117 - DNA, 122 bp, Homo sapiens
gaatgagggatttttcctgggataaaggcccccgtggagggtggtcagcagccctgaggacgtggtatgagacccacagccttccttgactccagagcggccaggaagctgggactccagca

SEQ ID NO: 122118 - DNA, 122 bp, Homo sapiens
cgctctcccgggatcccggggcgagccaagcgagcctgtgcttcccagcagccatcgcgccgttaagggcgctggcagccacgcttccagggctaccgccttcctgaaactgggggctgtct

SEQ ID NO: 122119 - DNA, 122 bp, Homo sapiens
tgtgggaatttgaaattgcaggcacaagaggaaaatcaaggaaactcaggaatctggttccgcttgaagtctagccaagaggagaagagggtacacagaaggtagattgtgagggtaaaatg

SEQ ID NO: 122120 - DNA, 122 bp, Homo sapiens
ccgctcaggcaccgcccagttgccttggtaaccgtgtacgcgggctcggcgccgcgttctcggaaatcctcgcgagcagtacattctccggctgctgcgggtctctcagggccagcgaaggt

SEQ ID NO: 122121 - DNA, 122 bp, Homo sapiens
gcagccatggcgcctgcagggaaagaaaaacagccaaggcgcggcgggtcagcagagccgcgggcgcctaagagtcccctccccgaccggccccgcctcgcatacagacccggacctgcggc

SEQ ID NO: 122122 - DNA, 122 bp, Homo sapiens
cttcctcgcactgactgaggatctctgttttgatgtctccctcgcactgactgaggatctcggttctcatatcttcctctcattgactgaggatctcggttctcatatctgtctcgcactga

SEQ ID NO: 122123 - DNA, 122 bp, Homo sapiens
ggattgtctcctacgagcatgtctgcgccctcacagcctgtcccgggacagcgtggtccgcgtcccccgagcccccattgtgtcttgatactttggggtgcacatggctattgatctctact

SEQ ID NO: 122124 - DNA, 122 bp, Homo sapiens
ggcgacgcgggcggtcccaagggcgtcgggggctcctctctccgcagctcggcgaaccgacggtgttggggactcgcgcgctgggtccagtggttcttaacagttcaacagttctgtagcgc

SEQ ID NO: 122125 - DNA, 122 bp, Homo sapiens
agcctgattcaagatgtattttaaaggtaaagtctctgggacttcctgaaggactggacacgaggcgtgaaaagcactgaggaatcaaggatgacttggaggtttccggcctgagcaaccag

SEQ ID NO: 122126 - DNA, 122 bp, Homo sapiens
tctgaacagtaaaactgtaagaacacactaaaacatgaatagtacttattcctggatggtcgtattagaaatgttttttaccttcattcattaaacaaatatttactaagcatctaccatgt

SEQ ID NO: 122127 - DNA, 122 bp, Homo sapiens
tcagtcggtagagcatcagacttttaatctgagggtccagggttcaagtccctgttcgggcggcatgtctttgcttttgggtaccgcacttcgcataaaatggtaacaaaaatagttactag

SEQ ID NO: 122128 - DNA, 122 bp, Homo sapiens
taatgaccgccccacctggcatatactggctggcctcttctctgtcacaggggtcttagtcgtgaccacatggctgttgtcaggtcgtgctgcggttgtcccattggggacttggcggcgac

SEQ ID NO: 122129 - DNA, 122 bp, Homo sapiens
gaaagacgagatcctgggcatcgccaacaaccgactgatccgcatcgacttggccgtgggcgacgtggtcaagacctggcgtttcagcaacatgcgccagtggaatgtcaactgggacatcc

SEQ ID NO: 122130 - DNA, 122 bp, Homo sapiens
ggaggcattcacctttatgtgttagaaaaacatgaccagaaatcaaagatgtcagagccccgaagcagctaatgtaataagcactcatgttattaaaggttttgccttgtcgtaaccaaccg

SEQ ID NO: 122131 - DNA, 122 bp, Homo sapiens
ggagtgcgtgcagcgtgtggcatctgagcaaagccagagccacaccgtgtggctggggaccgcaaacacctcactcagctcccctcagcctcaatgttcccgtctgtgaagtggggcacagg

SEQ ID NO: 122132 - DNA, 122 bp, Homo sapiens
cacggtagggatcaaacactggagacgtcctaaaactcccacagagaagatgaaatgcagcgcaaactttaaagacttcccgtcattagctgagaccttgctgctcctggcccagacccctc

SEQ ID NO: 122133 - DNA, 122 bp, Homo sapiens
agctccggcgccggagtctgacgagagaagggaggggaacaaggatagagcgctcgccaacggccgacgctccaggccgtcccgcccagcgcagctgcacccaatcacaatgctcagatcgg

SEQ ID NO: 122134 - DNA, 122 bp, Homo sapiens
ggtgaggtgcgggtgcatccagccgaggtgcagagcccaggtttgcagcagggtttctcccgccgcccctgatgagacacagactagcaaggactgtctgtcccagccgggatttgtcactc

SEQ ID NO: 122135 - DNA, 122 bp, Homo sapiens
caatccagcggcatgtcaggggtggcccatgctgttcattccctgaaacgctcacgctcccggcaagcccaggcatacacagcaaaaaacacctcactccaattgccacagaaaaagcaacc

SEQ ID NO: 122136 - DNA, 122 bp, Homo sapiens
aacttctcaatctctccaaacattctacgaccagtgctttgtaccagtttgtacaaataacgactacaatgacactctcttccaatatcactgtcatctttatccttttaacaccagcaaca

SEQ ID NO: 122137 - DNA, 122 bp, Homo sapiens
tcctcatgaactctcttctacttcggactctgtttcctgtgccatggccctgcagcctgtcgacatgaccctatcgtcgaagcccggactgacccgtccagctctgcagccctgcgggccat

SEQ ID NO: 122138 - DNA, 122 bp, Homo sapiens
gctaggccaagctgctgggcacccaccccaaggctggaaggtggggctggatgcccaggtcggggccatgcaggatgtcggggggtggggcaggcaagctccagggctgggactggctctct

SEQ ID NO: 122139 - DNA, 122 bp, Homo sapiens
actacaattcccagaatgcgttgcacccaggtccctcagctcttccggaaaggttttgttcgcgtaactttgttgataacaggtactgctggctgctgggtctcttgggcaagacacaggta

SEQ ID NO: 122140 - DNA, 122 bp, Homo sapiens
gagagtccattgacaagctcttaatcgcagctgcccttgcagggcctgtccctgaagtcccgagtaatgggatttggcgcttctgatccatcgggctggccgcttcccgtgtcataggtgga

SEQ ID NO: 122141 - DNA, 122 bp, Homo sapiens
cgcggccgcccgggcgggggatgggtctctgccgcgaggaggatggttttgtccggcatgcgcttggagaaggcggtttgcagatcggggagggagccctgcccgggagagggtgggtcgta

SEQ ID NO: 122142 - DNA, 122 bp, Homo sapiens
ctgattcccaggcactcaggccagggcctggagcatagtaagtgctgactaaatatctttcgaatgaatgactctactcttcctcagctggactcatgaattctgtcgggtcccaaaatacg

SEQ ID NO: 122143 - DNA, 122 bp, Homo sapiens
catctgagaaaggctgagtggtgacgtggtgcctgcgggatgaaggcagccaccagcgctcgtagcctcctggctcaggcagcgactctgtagacagaaaacgtgggagtagcctgtttctc

SEQ ID NO: 122144 - DNA, 122 bp, Homo sapiens
tttttttgcatgaggtcccaattagtccaaaacaatgaggcatcccttaatcccaaatgacgcttgctcctacgcctgtacctttccttgtcctatcaaaacatcaagacttgtagtggtat

SEQ ID NO: 122145 - DNA, 122 bp, Homo sapiens
ttagatgacgtcacctccaggaggactcgctttttcattaatgaaaccggccggcgcgggcgcatgcgcggcaggccgccttccctctcgcttccccctcccctttcccagccgcgctctca

SEQ ID NO: 122146 - DNA, 122 bp, Homo sapiens
cactgccctcccctgagtgagtcaccttagtctgaggttcctgtgccccaagtcacccaccggagagggagagaagcggcagagcccccacttccagtgctccagctgagggctggtgaact

SEQ ID NO: 122147 - DNA, 122 bp, Homo sapiens
gaagggaccacttctgtgaatgagctcacctccaggggccaagatgggagccatgagccccgccgctccggccactccagccaggtctgggaagggctgtggtgagtcggtgctggccgtgt

SEQ ID NO: 122148 - DNA, 122 bp, Homo sapiens
tttgtcctcctgatctcacagatgcatgactgatgggacccaggaagcagcaacaaatgtcgccaaccagtgccttgtgcaccacgtctgccccagacagacaccactgcctggcatggctg

SEQ ID NO: 122149 - DNA, 122 bp, Homo sapiens
gggggtggggtgcggtgggtgggggcgtctgctttccacaggactcccaggcttcgccgccgatctacaatttgctgaaggagcaaagaacatcctcggctctaagtagggcttttagtgtg

SEQ ID NO: 122150 - DNA, 122 bp, Homo sapiens
ccgaggggaagaaaatcaccccatccgtggtagggagggtaccggccacagtgaaacttccgcccagcatggcagcacgcacataggccaatcgacccaccacacacacaaggccaaagaga

SEQ ID NO: 122151 - DNA, 122 bp, Homo sapiens
ctaggagcctgggggccccgtcgtccggcctcggtctgagcccctcggggtaaccctgggcgtctgctccccccgggccccaagcccgccacctccggggacccctgcgtccgagtccccgc

SEQ ID NO: 122152 - DNA, 122 bp, Homo sapiens
gctgcgcagcgccttcaggaggccacccgacatagtgcagagaagcggaccacaatgcggcgactcccggcacgaggctgcgtccgcgatggcggaagcggaaacgcgcggaggcgagcatc

SEQ ID NO: 122153 - DNA, 122 bp, Homo sapiens
ctgaatcagtagcccagggactgggtccaggcctgggcaggaagggagggggccaggctgcggggcccaggttcctacctgctgctcctcccggggggctccatgggtctggacctgtccca

SEQ ID NO: 122154 - DNA, 122 bp, Homo sapiens
agccatctgaggacggccgtgggggcttgggagatggaggagggggtgttggggggaagccgtgctgactctgggtgagaccgtctctgctgccctcacctgggccctgggcccacccttct

SEQ ID NO: 122155 - DNA, 122 bp, Homo sapiens
ttgcctcttccatgcttgaactctccttgaactttgaagatccatcttgagagtatgatacggccatctcttttgcatctggttattttagctccaatttgcagccttaaatggcaattatg

SEQ ID NO: 122156 - DNA, 122 bp, Homo sapiens
cccctaaagcgccacgacatcagtggagtctaaacaccgcgccggatgatggcgtcaccacggcgctcattggagccctgggaagaaggttgaaaggcattctgggaaatgtagttcaccaa

SEQ ID NO: 122157 - DNA, 122 bp, Homo sapiens
tcgtgggtcccgaggccatcttcacgctaagggcgaaaaagcagttccgctggcggctgtcgcgcaccaggaaggtgcccacgggctcggcgcgcagccgctcgtgcgccccgtgcacgctc

SEQ ID NO: 122158 - DNA, 122 bp, Homo sapiens
gagccagctgtgccgggcgccccgctgtgcccggcctgccgaggggccacgggtctgcggcgggaggcagccctgcactgccaagcggtccttggctaggccagtcggcccagagccctggg

SEQ ID NO: 122159 - DNA, 122 bp, Homo sapiens
gcgtcggtgcagacctggagacgggcatgggggggctgcggctgctggctgtggccctcacgtgctgctggtggccgcagggcagccagggtaagaccctgcggggcagcttcagcagcacc

SEQ ID NO: 122160 - DNA, 122 bp, Homo sapiens
tatctgctttttcatttgagtccccttccttctcattttcaaagaaattaaaatgaatcccgctggatgcaaaatgacaccccgattttgtggaagggattttctttgtgtgtttatatgtg

SEQ ID NO: 122161 - DNA, 122 bp, Homo sapiens
gcagcagctgcatttccattccagcttccaagggctgagtgtgggggtctccagaggagccgctttactgacagatgtatcctctaggattccagaggcaatgccagatgtcagtgtgcagc

SEQ ID NO: 122162 - DNA, 122 bp, Homo sapiens
gggagtattcctgtctattcattgtggagagagacctaacccagaactaagacctctacccgccatttctactgctgccatcccgtgttaagagctgagcatacaaatccttggggaaaact

SEQ ID NO: 122163 - DNA, 122 bp, Homo sapiens
tgcgcggaggcgtcctctcaacccttctgcccggcgactggtgggttggcggctaaggggcggagacaagaggggccgccaccatctcctccaatggaagggagacaggggcgggcttaatg

SEQ ID NO: 122164 - DNA, 122 bp, Homo sapiens
tcctgagaggccaaaggcacctagcgcgtgtgcttcctggtggaagcagggctgcagatgcgatagggctctccatggaaacctgtccatatttggcctcgttaccatggagaaggcaggca

SEQ ID NO: 122165 - DNA, 122 bp, Homo sapiens
tatcttacctggttactccgaaggagttgaatttttttaatgttttgggtacgtagaccccgtataattttgctcctgggtccacaaaatggtgattttgggggagggttacctatcgtgat

SEQ ID NO: 122166 - DNA, 122 bp, Homo sapiens
tcccatttatggcatggcttgctattgtaaacagaagtaacaaaattcatagaggtaaaacgtgcagttccagaaggagcagtaccagaactagcagctgctgctgacactgggcggtgtga

SEQ ID NO: 122167 - DNA, 122 bp, Homo sapiens
gtggttgtcaggcctactctgaaaaggggctggaaaggtctctctagagttgtgaagcaacggctgcatgtgattagtcagtccttaccttgaaatgatttatttaaaaagaatacattgtt

SEQ ID NO: 122168 - DNA, 122 bp, Homo sapiens
agctatagttaggaatacacaagcggtaaaatcgagtccttacagccataccacaaggtacgtccatttggactacaagaagagcttcctttaaagttcctatttcagcataaagaggctgt

SEQ ID NO: 122169 - DNA, 122 bp, Homo sapiens
aggaagtgacataaagtcgttcaattgcgcggacacactcctccggaaaccaagctccttcgactctgggttccgtttctagccgctgtccagtccccgcccgtttcaggaaaagcggcgcg

SEQ ID NO: 122170 - DNA, 122 bp, Homo sapiens
tatgatttttacgggctttccatttaaatagtataaaattgtgaaacagtttgagaaagacgcctttattacagtgcccaagacagtctttaagacacagattcaaacttccattcacaaaa

SEQ ID NO: 122171 - DNA, 122 bp, Homo sapiens
acgggaacaggcaaatcaattgcactcgtatggacgtattgaaagcaaagtgcgagttggcggtggcacttcagcactagatgatttggtggggtgaaaaattggagcccactggaaaagac

SEQ ID NO: 122172 - DNA, 122 bp, Homo sapiens
tcaagaggattcactggcaacgcagtgaagctcttagcacaggggctggcacacagtaagcgcctggtgtgggcagggcaggaggtgggcaggggtcgatttcaggatgtaaccatggagac

SEQ ID NO: 122173 - DNA, 122 bp, Homo sapiens
aggctacagaggaggggggcgcccttaatccctacgtgcccgcccaccccgctcccacgccggggccctgtctggggtctctgggagagtcacccccaacttcctgcccccaccccgcctcc

SEQ ID NO: 122174 - DNA, 122 bp, Homo sapiens
ggtgggggcgcccggagactctggggtgttgggtggggccttggttgccgaattccgtgccggtgcctcccccagtcaagccccctgtgcatgctgccagccgccgcccttgctgggttttt

SEQ ID NO: 122175 - DNA, 122 bp, Homo sapiens
ctatcgcagaggctgttattccttgggtctcccggctgaggggaggagccgagcgagcggcgggtgtccctgagaggccacctttcgaccttcgagggccaggaggatacggggaggtggcc

SEQ ID NO: 122176 - DNA, 122 bp, Homo sapiens
cggttgtgccaccttgagctgcggctcaagatggtgtccgcccttgcttctgcgcctgtgcggaagcgcccggccctcacctgcgcaggtgagctgggtcgtctgagagggaaatggggttt

SEQ ID NO: 122177 - DNA, 122 bp, Homo sapiens
gggacctccgagggactggggcgtggggccgaacgcggggcgcgggggcaggaaacgagtcggggaccaagcgcggcggctgagccccgtccgccgggggtggtcgggccgcgcgccctggg

SEQ ID NO: 122178 - DNA, 122 bp, Homo sapiens
ccagttcctcccaggaagcccaggagcctcactggggcagacaataaaccctcagagcctcgctctgtgtgctgcttcttgcggggaggcacagggccatgtgtgtaggaaacacacgaaca

SEQ ID NO: 122179 - DNA, 122 bp, Homo sapiens
gcagatagaggagtctgtgggttctaagagggagcttcactaggcatggattcaccagaccgggaaatctagggtcacgtgtcagcttgctacaattagctttagacctcatttctccattt

SEQ ID NO: 122180 - DNA, 122 bp, Homo sapiens
gtcagtctcaggggtcgaatacaaattctctaccctggagagggacgcacaatccaggcacgagccacgccctctttctatctccatcctccctgactcccttcccgcccccagaagagcag

SEQ ID NO: 122181 - DNA, 122 bp, Homo sapiens
cagccaggacaggaatgggggtggaccgagccatgaatacccgtggagagcggcctaactcggccacccactctgtgagagaccccttttccagctggactgtgccggaccctggtgtgggg

SEQ ID NO: 122182 - DNA, 122 bp, Homo sapiens
tggtttttgtcctgcccactgtttgggacaggatggttcagtcagaccacatttgcaaagcgagagccgtctgtggagtcccggcccgtggggtcctggtgttgggtctgtctgctgccgcc

SEQ ID NO: 122183 - DNA, 122 bp, Homo sapiens
gatgatccgcccacctcggcctcccaaagtgctgggattacaggcgtgagccaccgcacccggcccccacgggccatttctaagcattgcccacagaaggctgtgggtctgagcctccagct

SEQ ID NO: 122184 - DNA, 122 bp, Homo sapiens
tgctccgacctcatctgtgactctcgagggctcctcgtccactgtggcgagtgcagaggacgcggcctgggcagtgcctgcggggagaccgtgctggcctgggcttcccagtgagcggggct

SEQ ID NO: 122185 - DNA, 122 bp, Homo sapiens
ccgccgggccgagtgctctcctcgcgggcggggatggtgggagcccgagcggggacggagcgggagggagggagactgcggcgcggagccgggcgggccgggccgggcaggggctgagctgc

SEQ ID NO: 122186 - DNA, 122 bp, Homo sapiens
tactctagaaatgtggtcatagaagctgcagggcccctgcgctgggctcggcacccgctccggcctggagagcggtcagaggtcccacccacgtccctgcctgcctgccatggccagccggg

SEQ ID NO: 122187 - DNA, 122 bp, Homo sapiens
acgcagaggctcattacagggaatgactaagtgagctgcgcttccaagggaaaccccactcgcttctgctcgctgagacgctcatccttgagctattttgactaaggcggcttccaggtgct

SEQ ID NO: 122188 - DNA, 122 bp, Homo sapiens
gctgacgggcggtgggaagagatgggaacctatggggttgaattcctgcccagtcatcggcgcttggctaccccctgctgggcgggaagctcttggcctcagactcacacattatgctcagg

SEQ ID NO: 122189 - DNA, 122 bp, Homo sapiens
acagttcaaactgaccacgcgaagactaaaggcagtagaggtactttctacaaatttagccgtgcaatctaatagcgagcaggccgagacgcccgcgattgaaggccggggtggagaaagta

SEQ ID NO: 122190 - DNA, 122 bp, Homo sapiens
ggcaggacagccagccacaggccctgattgtgcaggacttcctgcctctgcaaaggcagtcgggggctgagcagggttctacccggctgggtccaggcagaagtttttcctccccacctccg

SEQ ID NO: 122191 - DNA, 122 bp, Homo sapiens
gagacagtgacacacacggtgctgaaaccctactccacagcgtggctctcagcaaggctgcgcgccgggaggactctcgcaggatgcgcctgacatctctccctgcctggtggcagcagagg

SEQ ID NO: 122192 - DNA, 122 bp, Homo sapiens
ctgggaggcctcaggtgggaacatacctttggccaaaggcaccaggtaacccgaacgccccggggaggacccctgcctgcatcgccgcggccgtccccccctaccccgtccccagcagctcc

SEQ ID NO: 122193 - DNA, 122 bp, Homo sapiens
cagaggggcagagttggtggcgtgagttgctgccccttccttcctgctgtgggccagaggcgccaccgcgcccggtcctcgaggaagacgggagcgggacgtggcgagaggcctcctcagca

SEQ ID NO: 122194 - DNA, 122 bp, Homo sapiens
tcccgctggttgtcaatgaccttcagctgctggacataagcccaggtgctggctggactccgggtgctcagggactgctccgagcctggtggaggagagtagtcagggaggcactgatgccc

SEQ ID NO: 122195 - DNA, 122 bp, Homo sapiens
tggacgatggccgccgcgtccgggacctggaccgagtgctcatgggctaccagacctacccgcaggccctcaccctcgtcttcgatgacgtgcaaggtcatgacctcatgggcagtgtcacc

SEQ ID NO: 122196 - DNA, 122 bp, Homo sapiens
tgcagagtcggtggctctgaggctgcgaggtgggacctgctgctgtgctgggtggctggacgtgttctacaatgggacctggggcgccatgtgcagcaatgccctgaaggacctctccttgt

SEQ ID NO: 122197 - DNA, 122 bp, Homo sapiens
ggggcctgtccagagctaggcctgagggcggcttcctctcacctccaggggcagcgactccgccatcgcatccctgccgcctccgcccccactgcgcaaggctttctgggaaatgtagtctc

SEQ ID NO: 122198 - DNA, 122 bp, Homo sapiens
tggatgtgaaagagagcttggagaccccagagacctcggaaccttcagctttggaagtgacgtcggtggggtgggtggggggagcacaggctctggagtcccggaagtgagcggggagctac

SEQ ID NO: 122199 - DNA, 122 bp, Homo sapiens
taaagaggctgcagagccgcggggtgcggcagtgcttggcgggggcggggtgcagctctgcgtgcatggcgtccacctggggaccgcaggtgtcaagccggggagagccagtgccaggaggt

SEQ ID NO: 122200 - DNA, 122 bp, Homo sapiens
ggggtccctccctaccttgccgaatggcaattcccaggcagcctcaggatgtggtgacctcgtttttaaagaggctccaaatggtccccacaccacgtttctctcgagacacaggcaattgg

SEQ ID NO: 122201 - DNA, 122 bp, Homo sapiens
tgggccgaagagggagacagtgtccgcggcctcccaggaggtggcgccagaggattaagtcgccagcggtgggcggggctgaagagtcgggctgtgggcggggctaataacgccgccagctc

SEQ ID NO: 122202 - DNA, 122 bp, Homo sapiens
gcctggcacacagtaaacagcaagtgaatgacaagcagttggcagtggccggagctccgtcgctggggcgtggagagggccgccccggcccgcagttcccgccctgacactgggataacttc

SEQ ID NO: 122203 - DNA, 122 bp, Homo sapiens
gctccggggccctgcacagagatccagttgcagaaccaggcgtcgtccttaaggaggtgccgtttgcgcagtttcacaaacagcagcggccccagatactccggtacttccaccttgagttc

SEQ ID NO: 122204 - DNA, 122 bp, Homo sapiens
aaatttgaagtgtggtttctactgaatgtgtgtcgctttcctaccataacatcaaaaaatcgtaagtcaaaccgtcataaactgggaccatttgaaattgctagatatacccaatagtatct

SEQ ID NO: 122205 - DNA, 122 bp, Homo sapiens
tgcaggtgtacctgtcatgcatatatatgacttaccaaaaaaaaaaaaatcacagaatcacgaaggtggaagaaatcagtcaaacccttggagactatccttatctaaatacctttcaagct

SEQ ID NO: 122206 - DNA, 122 bp, Homo sapiens
cgggtccgcgctgcagcgaggtccggaggctgcaggtcagggggctgcgcggaaggggtgcgcgcgcgccgtgccaattacctgggtcacgtgacgcagccgcccacgggcgcgcgcccctg

SEQ ID NO: 122207 - DNA, 122 bp, Homo sapiens
cttcacaggaacttcagttctgctcccaaattctagtccattggtttgagtcttgctgaacgctgacagactttctggaggtcctggtattccgagcaccagaagcccagattgggtcccca

SEQ ID NO: 122208 - DNA, 122 bp, Homo sapiens
cgaacttccgacctcaggtgatccgccagtcttggcctcccaaagtgctgggattacaggcgtgagccactgcaccgggccgagcttaccacatttttagtttcccatttgaaatgactcaa

SEQ ID NO: 122209 - DNA, 122 bp, Homo sapiens
cagcccagtcaagggaatgccaaacccagcagagaaaaagtcaagcccagcaaaggaatgcgagggaggaaacgccaatccaagcaagaaacaccaggcaaagcgactaacgccaagccaag

SEQ ID NO: 122210 - DNA, 122 bp, Homo sapiens
gtgttccgcatttctgaatggaccccttgtgaacaaagcacaccgggaaatgcgggttggcgatggaaggcatccttgggggtgggctgtcagaatggcatttgcccagattcatcaactca

SEQ ID NO: 122211 - DNA, 122 bp, Homo sapiens
tgatgttaacaggataatacagtttaatgtaaacagtatcgtgccagccgcgatccaaaacgtgattgatatctccaggtggagcaattcggggtggggtttttttctcctacttctttttc

SEQ ID NO: 122212 - DNA, 122 bp, Homo sapiens
ggcttctcaccagcctctcctacaaatctgttttattcatctctgcagtcagaactaaaacggcaactggccacggtaggcgttcaaggagaatgaaacaaagaatatgcctgtttcttccc

SEQ ID NO: 122213 - DNA, 122 bp, Homo sapiens
gccaagcgtggaaaggctgtcttttccctggatgatgtataactaagcaggagagagcttcgagtgggttcaccacatcagccaccactcctgcttctgagcacagggtgctctcctcttga

SEQ ID NO: 122214 - DNA, 122 bp, Homo sapiens
aggaggaatacaaagagcatcccactggcttggctccaagtcagggggccttccctaatgcgacagacagacaagagaagaggcttcggtaatcccactgtcttccccaggatgagtggaat

SEQ ID NO: 122215 - DNA, 122 bp, Homo sapiens
gaacaaccggaaggaaaacagtgcggcgggaagcgggcccagaaggaggcgcgagaggcccgcggcgccggcctgatgcctgcagcgccccatggcggcgggaggcgggctggccggcgccg

SEQ ID NO: 122216 - DNA, 122 bp, Homo sapiens
ctaaagtgatccacccgccttggcatcccaaaatgttaggattacaggcgtgagctaccgcgcctggcctgaatgtttgttttaaatggcgattatagtgtgactgtactatgtattaggca

SEQ ID NO: 122217 - DNA, 122 bp, Homo sapiens
gtatttgtcgaggggctggaaatggtacataaatagccgggaaacaatgctttgagctggcgcacgagtggggatcgggctgcaaccgggacggggtatgtgcaggggacgtctcgccggcc

SEQ ID NO: 122218 - DNA, 122 bp, Homo sapiens
aagggcctgctccacctcgaccgttaccggggatagggtctcggggccaggcacggcgttcgaggcctcccacccagccgaccggccttggggacccttccccgctggcccgggccacgcgt

SEQ ID NO: 122219 - DNA, 122 bp, Homo sapiens
taactgcgctcatgatcatgacggggtgtgatcagcgctccctgccgagacgaacggaaacgtcgtctaggagggagaatgctaggagggagaatgccggccttggaagctgagcaccccgg

SEQ ID NO: 122220 - DNA, 122 bp, Homo sapiens
tggagctcatcttgttccctgatgtgtctcgagcccattggtagggtcatacaaagcccacggttacaagcagtggtaggattgcagccgtgggcctgctggacacacacatacaccaaaga

SEQ ID NO: 122221 - DNA, 122 bp, Homo sapiens
ccagggaccgaccttggtaccgtgttgtcatcatgaccaaggcgaggtactccctcaccacgaagacctccctcccaccagcccttggactcagctcattctgcgggcggtggcgtgtgacc

SEQ ID NO: 122222 - DNA, 122 bp, Homo sapiens
cgcgggggccgggagccgggtcctgggcgcgtggaggctgcagggaaaccgctgaaggcccggccgggcccggggaagggcggccaaaggcttgaggggttttgcgcgttcgtccgtgcgtt

SEQ ID NO: 122223 - DNA, 122 bp, Homo sapiens
tgaactcctgacctcagatgatctgcctgcctcagcctcccaaagtgttgggattacaggcgtgagccaccgcccccagccaagatttatttttaaacatgtcaccaactgtatgctttaga

SEQ ID NO: 122224 - DNA, 122 bp, Homo sapiens
gaaacacgcaggcagagttagtcacccgtcaaggggagaagcctccgcgcccagcaaggacgctgcaggaccccctaccccgggtttccgcacggctccatccccagtgcgggcagcttcta

SEQ ID NO: 122225 - DNA, 122 bp, Homo sapiens
tgtcttggaagaggggctaagatgtgggacgaacgtgattattcaatgggcatgcgcttccggccacgcatcacacgcacatacaccagcgcggttatccataactctaccatttcaagtga

SEQ ID NO: 122226 - DNA, 122 bp, Homo sapiens
cactaagtggtgagaggggtcagttttagatttttgcaattccccagcgtggagacaggccggctctatacgagaataagtgataggcagaggaagaatttggcagtgttcccgggttgatt

SEQ ID NO: 122227 - DNA, 122 bp, Homo sapiens
aagcaacaaaagccgagatttactgaaagcgaaagtacattccacagggtgggagcaggccgagcacagggactcaagatccctgttacagaattttctgtgcttaaacgccctccagaggc

SEQ ID NO: 122228 - DNA, 122 bp, Homo sapiens
ggtggcctagattgacttagccaactctgctttctataatagttggtgccaaaatgcagtcgtcttttgggctttacctccttggcatatgaggttctgattttattttcccagcttttgag

SEQ ID NO: 122229 - DNA, 122 bp, Homo sapiens
acggttagtgctgcgccacgctgacgctcagtcagtactatgtagatatcattagtgctgcgtcacactgactctcggtcagtaccgtgtagatatcattagtgctgcatcacactgacact

SEQ ID NO: 122230 - DNA, 122 bp, Homo sapiens
caaaatgaaaagactcacgtgctttttcatctgcttctttctttctgaagtatcaggcttcgaaatccccataaatggactttctgaagtaagtacttacagatcactccttgctgttggct

SEQ ID NO: 122231 - DNA, 122 bp, Homo sapiens
aagcacctccatcttcggaatttttagcggcgagttggcgggcagctccgagccacagggcgcagccatcttccaagcggccgccgctgcaccgcccggaagtgacgcgcccgcgcatccgg

SEQ ID NO: 122232 - DNA, 122 bp, Homo sapiens
cagggttcaggcttggagcggttgcaccacccacaccacgtgctacgttcacgaaagagccggccgccaatgcagtctgtccctctaacttgttctcgttacaaaggcagcagacgcgtgga

SEQ ID NO: 122233 - DNA, 122 bp, Homo sapiens
gcagtctgacagcaaggcaaaactatacatctctgaaagcactagtaaggaagagataaacgtggacctaagtccttcaggagtcagaaaggaaaaggtctgcttactgagtggtaaatgga

SEQ ID NO: 122234 - DNA, 122 bp, Homo sapiens
aggaccctttactttattgtgaccaagggctccctgatggattcttcataatgggactgccgtaacagtttcatttgtaaaagatcctataggtagtaatgtgaaaaaactgacaatgggcc

SEQ ID NO: 122235 - DNA, 122 bp, Homo sapiens
gcccggtgaggaccggggcgccgagggctgggctccccggcgcggtgcagagcgaggcagcggcctggatgtgtgaagcgtccccatggctccgcaggaggccaagcctcagggctcaaggg

SEQ ID NO: 122236 - DNA, 122 bp, Homo sapiens
aggtccagttggcacctttggcttctttttcttcatcttgtggaaatgcaagggtcattccggttctgcttccagtgatgggcgaatctgtattaactggtagagtgagggtggggggatat

SEQ ID NO: 122237 - DNA, 122 bp, Homo sapiens
aaggcaagaagcaggggagagagagaggcataaagcgagatgacggaagcagtagaaacacgatgactgcagatgaaacatgtaaccatctgttggcccactctgcaagcaattcttctctc

SEQ ID NO: 122238 - DNA, 122 bp, Homo sapiens
gcctattttccgaaagataagtttagccctgtttgaacaggaactcaagtgctctgctgccgctgacgcagagagctcagctccactaatcacattcagaagttccgagcccaccacctaga

SEQ ID NO: 122239 - DNA, 122 bp, Homo sapiens
gaaaagcatgttctcttctgccaactcttccgcgatggagtcttagggcaaagcgggaagcgatgcttctgctctgggcctgcctgaggttccctctgcggagggagggggctaacacgcca

SEQ ID NO: 122240 - DNA, 122 bp, Homo sapiens
ccatcgagaggaaagcacctccgaggttcctagagaggccggcttggcgacttggggagccggaagcccatcccgaggcacttcctgtccggtcattgttctcgtgccggtagaagctgaag

SEQ ID NO: 122241 - DNA, 122 bp, Homo sapiens
caggaggaaacggaaggggaacttactcaagctgctctccccacggtcgtttgcagggggcggagcatgcggtctggcagagcagctggtgggaggggcgctcaggtgctgggctgagccct

SEQ ID NO: 122242 - DNA, 122 bp, Homo sapiens
caaatttaatttaacaaaatcttcacaacccaacagtttcagtgtagtgtgttcctaaggcgacagaggaacagatagaagggagaaacgagcgtggggagaaccattgttatttgggaaag

SEQ ID NO: 122243 - DNA, 122 bp, Homo sapiens
gcttgtcctgtgatttttcttctaacttgcatattcaataatccgtccctgactgcgtcacgagcacaaaaagtcttttctccaaaggagaagactttcgccaatcaaccttcagccatgcc

SEQ ID NO: 122244 - DNA, 122 bp, Homo sapiens
aatttcaagtaattaatatcaagtaaaatttaaaattcagttccttagtcacactagccacgttgtgagtgtgcaacaggtaaagctagtggcacagacatagaacatttccatcagcacag

SEQ ID NO: 122245 - DNA, 122 bp, Homo sapiens
ttcgctgtgaagatggcgtcgggcagcggggtaggtgttgtgtctgaggaggaggttttgcggggtggggaatggtttttcagacctgaatagagacaaactcctgcacccgactggcttcc

SEQ ID NO: 122246 - DNA, 122 bp, Homo sapiens
ctcagggctgggctgaccccagagatagcctgtgctgccccctcccctgggctcacccagcggatggacatgcagccaggggccagtgtggggctggtccattttccctgaggggccagctt

SEQ ID NO: 122247 - DNA, 122 bp, Homo sapiens
gcctctactatatgctggaccggttctgggttagggaccgtcaagggtctccagctgaaacgatccaaaggtgctctgacatgtgccctccaagctaaaagttttagcaaaatcgaaaactt

SEQ ID NO: 122248 - DNA, 122 bp, Homo sapiens
ttcaccatgttggccaggctggtcttgaactcctgacctcaggtgttccaaacacctgggcgtcccagagtgctgggattaagtgagccactgcgcccgccatggactttcttgttctaagc

SEQ ID NO: 122249 - DNA, 122 bp, Homo sapiens
gctctgtgtacatttaaggcagttcctccagcgtcagctctgacaaagtggccctggtttcgctgtgggggatggggaggggaggatgaagatggcacggcccctcattagtgtcacgggct

SEQ ID NO: 122250 - DNA, 122 bp, Homo sapiens
cagcccctcgtaggtctgcacgtcctgcttcggatcccaaatcctggctttctgaagaagcgcgggaagaagagagagagtctgtttccgtgaatcgatttccctgaaacacgtgaggtttc

SEQ ID NO: 122251 - DNA, 122 bp, Homo sapiens
gggtgctgtgtgccttgagcagacctgcagcaccaggacagccacgcaaatccagtctcacggcgtcagcaacgctaccggcctccctccggaacttcccaagagacaggagaggcgggggc

SEQ ID NO: 122252 - DNA, 122 bp, Homo sapiens
caaattcctccgctgtctcaatgccttcacaagagcgagtaagtggtagaagctgggattcgaacccaagcagttggactccagtgcactctaaaatctgtacttcatggaaagagagaatc

SEQ ID NO: 122253 - DNA, 122 bp, Homo sapiens
cagctgcgcaacaacttccggttctggtggcgggtcggggcggggcccggaacgcggggacgttgccatggagaagagccgctgtggccgcgcacttgggacagggaaagagaaccgggagg

SEQ ID NO: 122254 - DNA, 122 bp, Homo sapiens
cgcggggaagcttttgcacctaaggacacttcctgtttcctagtaacaataggaagtgtccgtagagctgggagtagactcctggctcatgccagctgcgccctcttttctctacctccttc

SEQ ID NO: 122255 - DNA, 122 bp, Homo sapiens
caccaggtcgagtatgaggtgctgcaggccttggctgggaaggctgagaatgagctgtgtcgcaggaagaggatcttccaggtgaaccgaaacatcagccggctccaccatgagactgaagg

SEQ ID NO: 122256 - DNA, 122 bp, Homo sapiens
gcggaaggggcggggtcaggtggcacttccgtggcttcgggcgggtgagtatggggagtgcgcgcggcgtccaggagtcgggactgggctcccgcctacggccgccctcccgccggggggcc

SEQ ID NO: 122257 - DNA, 122 bp, Homo sapiens
tcctcagcaggttggatggtgctgacccctcctcgggttggcttcctgtctccaggtggacgtcctgtactccagggtctgcaagcctaaaaggagggacccaggacccaccacagacccgc

SEQ ID NO: 122258 - DNA, 122 bp, Homo sapiens
gaaaaggctaagtcagagtccgcgaccttgccggctctataccttcagagggctgcagagcgcgcgcgtcaagtccgcggaaagttttactagtcagctcctccagcgcgcacagcggcgac

SEQ ID NO: 122259 - DNA, 122 bp, Homo sapiens
cgccccgcccctgcttgaagtggctcaccccggactttcaggatctcacacgaagtgcttcgctttcccctgcagggatggtactctctgagcgcccttggaactttgtaaatagctgcatt

SEQ ID NO: 122260 - DNA, 122 bp, Homo sapiens
cctgttacttagattttgtaaaatctgggtaaaagatgatgagaatggcctgcagttgtccgtgaggtcgttcagaagaccagacgaatcccaggactaataattctcaaaattaattaaac

SEQ ID NO: 122261 - DNA, 122 bp, Homo sapiens
ccttggaagaaggaaagggatgagaaaggtgcgctggcgggcgcacccggcggcggcgagcgcggaggtgctgcggtacctaccatggtattcttgtcccggaacgtagtaggtggggttgc

SEQ ID NO: 122262 - DNA, 122 bp, Homo sapiens
aggggtcagttcggttcagagcgactcagcccctcgactcgggtcttaaaacctccgagccgccagttctgcctcaggccgcgcccccttaaagcgccaccagacgctgcgccccgttaaag

SEQ ID NO: 122263 - DNA, 122 bp, Homo sapiens
attgagccaggttggggtttgactttagttactggctcctcatcttcgtcttctcagagccgtgggtactgccacctgctcacccactctccctagccccagagcgcagtccgtgctggtgg

SEQ ID NO: 122264 - DNA, 122 bp, Homo sapiens
ttccatctccagcgagacagatgcgaggaagggaagagggatgccctgtgtgcatctgcccgcactgcgagtccttgccactccttagatcaacggagccagagatcttgccaccaacacac

SEQ ID NO: 122265 - DNA, 122 bp, Homo sapiens
ggtaaggatagctggccatggtgattctgacgtcacactcaggcaaggggtggggctttccgctctcaaacccgcccctcgtctcggctttggggctgggcccgcatctgattggacgtccg

SEQ ID NO: 122266 - DNA, 122 bp, Homo sapiens
ctgtccaggagcgaggctgagatcctctgtgcctctggccagtcttcacagtagtcactacgggtcaaacatgaagaagtcagcatctaacagtgaaaacgggcggcttgtaacagcatcaa

SEQ ID NO: 122267 - DNA, 122 bp, Homo sapiens
atttggcaaaggatgtcagaccatgctataaccctgttcagttgcagatggatgaggtgacgtctttttgccacctgctggggagcagttgagaggctgcctcctcattcaccctgagagtc

SEQ ID NO: 122268 - DNA, 122 bp, Homo sapiens
caaaagccctggtacgctggcgccggggtttggggatcgggcttccaggctgcgtcttcccgggttcccactagctactcactgctccaaggttatggctgaactcatacatacctacgttg

SEQ ID NO: 122269 - DNA, 122 bp, Homo sapiens
caatgagtagagttggggaaagcgcgcagtggcgatttgtgagctcgttatctcggaacccgggctaggggagggatttaagcgggaggggggcgtgaaagacacaagaagcacagaaaagc

SEQ ID NO: 122270 - DNA, 122 bp, Homo sapiens
gaggtgcggcgcttccctaagcgtgggctacttccgtatttccgagacagccaatgaccgcgataggtgtcttccttgacagcacagtctcatgtccccgacatccagacttactcgtggcg

SEQ ID NO: 122271 - DNA, 122 bp, Homo sapiens
aatgttattaagaacatgtatgtgtctgttaaaaaccaaacagcagcacatatttcaggtcggagggtggttttagaaaacagacatggcctaagacaataagacctagatatcactcacaa

SEQ ID NO: 122272 - DNA, 122 bp, Homo sapiens
acagttccttctagtccagtttctgcacacggagcaccctactccccatcgtgtccctgacgccgagaccgtggaaggaggctctgccagccgggcctccactcaccatgtgctgggccagt

SEQ ID NO: 122273 - DNA, 122 bp, Homo sapiens
ctgctgattactcagccacgcccaagatcctgctactaccctggtttctggctccacattcgtcactattgagatgacttactggtcacagtaaaagcaagttgataaaggtggccagtggg

SEQ ID NO: 122274 - DNA, 122 bp, Homo sapiens
gactggggagtagatgagaaccctgagtgggtggctggtttcttgaggcatacatatacccgacacaccttacacctctgatttggctgcattttggaatcatctgggaagttttaaacaat

SEQ ID NO: 122275 - DNA, 122 bp, Homo sapiens
cggaggcgtgggcgccgggcacggctttacccagaatgcctctggagggccggctccccgcgccccggccctgccgcccaacgctcccggccctggggccctgactgcccgcacgctgacct

SEQ ID NO: 122276 - DNA, 122 bp, Homo sapiens
ggaggtctcaccgccccctgggttgtcaggtgagctcctggggcagaggtggccctgggtcgtccgaccatcctggtgtgggctcagtctggacccctgggggtctctcccaccccgagact

SEQ ID NO: 122277 - DNA, 122 bp, Homo sapiens
ggatccccgcccccttgagggcgccccgtccaggggggctcgcggggccgaggtttggggcgccgggaggagcgggaaggcggggacgagagggacggagcgggctgactcgggatccgccg

SEQ ID NO: 122278 - DNA, 122 bp, Homo sapiens
ccggcaacgcgtacactcgcgcatgcgcgacttccccggaacttccaaatccacagctggcgcctcagctcccgcactgcgcatgtccggagcgtgcgcaagaaacttggtcccactgaccg

SEQ ID NO: 122279 - DNA, 122 bp, Homo sapiens
gagaagagggactgggctgcggctgtccgcgatcgcggccgggcccggcgccccgccgcccgcctgctcacctgccagctgtcttcgcagtagcagtgccgactgcagctccgtcatcctcc

SEQ ID NO: 122280 - DNA, 122 bp, Homo sapiens
cagaaaagatgagataaagctctgttgccactttcatcataaccgtctctcacctctgcacgagacaacaaggtcaggaaccactttttgttagtcatctttataagcttactaatcactac

SEQ ID NO: 122281 - DNA, 122 bp, Homo sapiens
caagcctcccagacagcatcaaggagcaaccccaagactgggcagggtgggctctaatgccgcccacggcgaggagggctgcccgtgctgcctaaatgggttcagaatgaaggccgctctct

SEQ ID NO: 122282 - DNA, 122 bp, Homo sapiens
ctcaccctcatggaagcacaaaggccatcccacagaggggcacaaaggaaacagctatgacgagcaaggccaacacaacacaaaacaacacccacaagtaccacaggtaagactgacattgc

SEQ ID NO: 122283 - DNA, 122 bp, Homo sapiens
ccaaaagcccttttatcctaaagttgaaaggttttgcgatagacgcggagagatgcatgccgggacttgtagtcccgagtcgtcatagtcgagctcttccggtcacttttagtgggcggcag

SEQ ID NO: 122284 - DNA, 122 bp, Homo sapiens
cgaaggcggagctgggcatgagcacggccatggtcctgctgtcagagcaacctcattccacggggtgagcatctcgcaccttggtgcggaagcccagagcccacgctgacttctgcaatagc

SEQ ID NO: 122285 - DNA, 122 bp, Homo sapiens
aactactaagcatacattgatgtgataggcagcttgtttaggaggaaataatgtcgcgtacggagtgcctgagcatgtcttcaggtctgattcagttggaaagaaaagaaagtcctgtattc

SEQ ID NO: 122286 - DNA, 122 bp, Homo sapiens
gacgaagaaatcatcgctatgcatgctggccttgggatgggggcgcaaagcccctggacgcgccccgcctagtgggcgggaacgactacagcccccagcatgacccgcggccgcccatgcca

SEQ ID NO: 122287 - DNA, 122 bp, Homo sapiens
ctcaaaagttaaggaactccgctttccagacctttccccaggacccgcctcggtcctctacgcccctttgctagctaggcatcctccgtcggtcgccagcccctgcggacccagctgcctca

SEQ ID NO: 122288 - DNA, 122 bp, Homo sapiens
caaggaaaagccagtgagacgcaggaggggtgagagggactgcgcggcagccggcgctctcggggagaaggcctgccgctctgctttctgcatttctttgctggaatttattgctcatccaa

SEQ ID NO: 122289 - DNA, 122 bp, Homo sapiens
tcctggtctgcagggtccctccaggcctttcctgtccgggcagagagacagtcacaggggcgatcggaggacgcgtgcgggagggccgggggcccgcgcggtcacggcttctcgtgacagtg

SEQ ID NO: 122290 - DNA, 122 bp, Homo sapiens
aagtctctagagctaaaggaaggagatccgggctgggctgagaagcatcttccaggatcacggccttcccgcgggacacaccaagcccattccggatcttgctcttcctgaccatggctggc

SEQ ID NO: 122291 - DNA, 122 bp, Homo sapiens
gagccacagcagctcactggcatgaacacaggctcactgatccatcagcaattcctggcacgcattactgcctgtgcaggtagacaagcctgggacacacccccttcaagaaggaaacaaaa

SEQ ID NO: 122292 - DNA, 122 bp, Homo sapiens
atttaattcatgcttttatcatcttgcttctagattgtagaattaatttcctacctggttcgcttatctaaaaattctcctcttctgctcttccccctttgccatcactgccagatgctctt

SEQ ID NO: 122293 - DNA, 122 bp, Homo sapiens
gttgggaggcaggagagagggaggcagtgagttgtgtcttgctctttggagcctgtgttgcggcgtggagtcatagagaaatgtgttttctcgaggcccaaagaggttagccacggggagag

SEQ ID NO: 122294 - DNA, 122 bp, Homo sapiens
tcagcatccctggggttatgatagaactttctagtaacagacaggagatagcaccccttccgactgtggaaacatcctggtcactgagcaaaccgggctgggccactccctgcctggggcgg

SEQ ID NO: 122295 - DNA, 122 bp, Homo sapiens
ggttatacttaaccagcctggtggaatttaaagcttgcccccaactcttcccaaaactcacgtaatttgaatgagaatacaaaactcaaaacaaaaaccatcagtaaaaagcaaaacccagg

SEQ ID NO: 122296 - DNA, 122 bp, Homo sapiens
gaacatagactcctagagctggaattgtatcttggatttttggttccgctggtagcacaccgtgctcaataaaaattaatccatcaatcaacaggacagaaaatcccatcctgccagaagca

SEQ ID NO: 122297 - DNA, 122 bp, Homo sapiens
agccccgggaccgctgtggacctcgggacctggacgccgtcctggctgcgcaggaggggccgctggcatggactaagaaatcctgacaccaagaagggcccctcgctcttgctggcagggca

SEQ ID NO: 122298 - DNA, 122 bp, Homo sapiens
gggagtagtggacagggctgactccaggcaacagtcccaaacaggctgcaccaatgtgaccgcacctcccctgagtgcaggcaaggggtgctgtgctcacgctctcagcctgggtgcatcct

SEQ ID NO: 122299 - DNA, 122 bp, Homo sapiens
gatgccagtggtagctgaatgtgcctcactccaggtcctcctggaattatcctcaccactcggctgagggatgctgtccacacccctctcaccgatgtggacgtgtgcacgcggtgtgtgtg

SEQ ID NO: 122300 - DNA, 122 bp, Homo sapiens
gagaagggacacaggaagtcctggccagcactccagctctgctgttgatttgctgtgtgacgtggggacagtatcttagcctctctgtgcttgggacctcctctgactgtcaggatcactgc

SEQ ID NO: 122301 - DNA, 122 bp, Homo sapiens
ctccataaggtaactctccaggggaacctgggccctctgatgatcacatttaggaatctgcgcattttttcacctcaacctatgctctctgcagctcctacagagttttgtaacaaagaacc

SEQ ID NO: 122302 - DNA, 122 bp, Homo sapiens
gacaaagtatccaagccgttacaaaccctcatatgccctgaaatgttttctttccatgaccgtaagcttgttgagaatatagacaaaaatgccaggaccatgtaagcccccaaaacaacatc

SEQ ID NO: 122303 - DNA, 122 bp, Homo sapiens
tagggaaaacacagcaaggcatttggcccagaaaaggcacctgaggaccttgaattagagcggccactcctcatgtgtccttgttcatgaggaacatagagctaaaatcaataaaaatcaca

SEQ ID NO: 122304 - DNA, 122 bp, Homo sapiens
gaacctcccgctcagctccggcaagagccaacctgctcccgccgagttccgcgctcagctcgaccccgccttcatcaagacctacgaggacatcaaggagaacctggaatcccggcgcttcc

SEQ ID NO: 122305 - DNA, 122 bp, Homo sapiens
ccctgtgcccctacccccagaagccccgctccaccagcaggcactcaggccaggctgcaccggccccacccgaagccactcagcagaggcagcgcagtgtctggtgtccactctgggctctt

SEQ ID NO: 122306 - DNA, 122 bp, Homo sapiens
gccagatgggtgacatagaagccctgtacagaagtaagcagtcagtgcctgctgggagggcggaagaaaggcttcatggaggatggagatttagcttggacttgaagcatcatataatataa

SEQ ID NO: 122307 - DNA, 122 bp, Homo sapiens
caggtttctcctccctgtgagagcccaggtgttgagtcaggcgtgggagctgggcaaaggcgtcccgaactgtctgcatgcgtcctctggtgtcggatgagcgcggaggagaagctgaaggc

SEQ ID NO: 122308 - DNA, 122 bp, Homo sapiens
cagaagggccttgagagggctggctcagtggcacgtgggggccttgggtggttgggtccccgagacaggccatctcgctccttgtgtggcaggctgcggggccctgcttgcctgggtcccac

SEQ ID NO: 122309 - DNA, 122 bp, Homo sapiens
ggtgacgccgtttccacttgaggcctggtctcagaccacgaactacaaggaaaaccacgacgaccactaccccggcctaagcggtcagctttctcctcctcctctgcgcgccggactcacgg

SEQ ID NO: 122310 - DNA, 122 bp, Homo sapiens
ctgagggaaataaaggagggatggtagattgagaggactgagaagaatgaaaaaggcttacgaaataatctcgtgtccttaaaggatgcttcagagaagagctctttgaagcagctgccagc

SEQ ID NO: 122311 - DNA, 122 bp, Homo sapiens
ctgggactagaggcgcccgccatcacgcccggctaattttttttgtattgttattagagacgaggtttacaccgtgttagacaggatggtctggatctcctgacctcgtgatccgctcgtct

SEQ ID NO: 122312 - DNA, 122 bp, Homo sapiens
gctggtcctcgtagggtgcggtgggcactgtcagcaccgggatggggctcccctctatggcgcctcctggccggtcctgctgcggctcccggagccggagggaatctgcagcctgccggggg

SEQ ID NO: 122313 - DNA, 122 bp, Homo sapiens
cgttttcacagttgtcccttttaattttgggaaatgagacaggagagaaggaaaaggaggcgagcaaatttttactcacacttaacactgggctggaagttgtggtcactctgagcacatag

SEQ ID NO: 122314 - DNA, 122 bp, Homo sapiens
cgtggggcgagactcggccgggcgcagagtggagcagtgcaggccggcagctgagcggcgcgtgtgagcctgaacttgtagcagacacgcgtgaccctccggagaagttcttgcctgcgctc

SEQ ID NO: 122315 - DNA, 122 bp, Homo sapiens
tcccccccggcgcggatgacactagaacctccttaagttgcgtcgcgccacagctgtctgcgaacactgagctgcctggcgccgtcttgatactttcagaaagaatgcattccctgtaaaaa

SEQ ID NO: 122316 - DNA, 122 bp, Homo sapiens
gctcgagggggaaactgaggcggggacgtgccagtgaattcattccttcctcagtccacccgcaggcctacaaagctgtctccccttcctcagcgccacaaggaacagcagggacggatggg

SEQ ID NO: 122317 - DNA, 122 bp, Homo sapiens
aaacaagaacccgtccctgctggggatcctctacgggaagaagtacgaggcggacatgtgcgtgaggtgaggccagaccctgtggctctcgcgccgccccccataccttcatgagcttgcgc

SEQ ID NO: 122318 - DNA, 122 bp, Homo sapiens
ggtctggaagtgccaggaagctgcctttaacatcctaccgcagggaacaatgaaggttgccggccagggagaagacaggatagagacgtctctgggtttgcagccagcctgcctcagatggg

SEQ ID NO: 122319 - DNA, 122 bp, Homo sapiens
cacaggagtacaaggtggggaagcagacacacgatgtcagtgtgggtaaaaagggagaagcggcagaggatgagatactccctaggtagagatcgtaagctcctactactcactttgtattc

SEQ ID NO: 122320 - DNA, 122 bp, Homo sapiens
agcttagcggcttgtagcggtacagatcgttgaccacgcggccgcgacggccctggctggcgtcagtcaggaagctgttaatcacctccagccggtgcaggtgcaccacctggaagttaccc

SEQ ID NO: 122321 - DNA, 122 bp, Homo sapiens
gctgtcaggcaaggtcaacgcgctagagtgcaagagcctttgctttgcggattgccgcagcgccgggtgtgggcgcaggtggggatagagtgctgggttttgaaagagtgacccgcaaagct

SEQ ID NO: 122322 - DNA, 122 bp, Homo sapiens
ctttttggcgcttgataaatcaagcattcatgtagcattacattcaacagaaacatttctcgtactttgggtttaagatccttgtccctccagttcggatgtcgtgacatctgactcttcat

SEQ ID NO: 122323 - DNA, 122 bp, Homo sapiens
ctggtaggcggcacgcaggtcggctgccttggtcttgtcagcctgcatgcagttactgagcgcctcctctgcctgcttgcgcgctgccttgagctccaggatctcctgctgcagccgcaggc

SEQ ID NO: 122324 - DNA, 122 bp, Homo sapiens
cctgattgtcctaaaacggcagggactctgcacacacattctctgagaatggggctcctgcgggccggccagcttggggccagagccttccggagaagggcgcgtccaagcccggggcggac

SEQ ID NO: 122325 - DNA, 122 bp, Homo sapiens
cgacacctgcgacacccgcggtccttccacccagaccctcgaccccagaggcagccaggccggcaggccaagggtgcccaggcccaggccaccctcaccacgtgcttctctgagagcgcgga

SEQ ID NO: 122326 - DNA, 122 bp, Homo sapiens
agaaaccaagatcaatcttgaaaatatagttgaacgaattaggcttcccaatttccaaaccggctacaaaatgacaataataaaaacagtgtggtactggtgtaaggacaggattataggtg

SEQ ID NO: 122327 - DNA, 122 bp, Homo sapiens
cactcatgcatggaagaccaatcagagagcgtacttgtctcatgggacaatagcactcatcgaaatagttgtctgactggaagagaaaggaaagcttgtagccaatcacagtgggctccgcc

SEQ ID NO: 122328 - DNA, 122 bp, Homo sapiens
ctcaggggatgggaggacaactcgctgaagttcgtggccccaagacatgcggagaacccgcgtctgcagggctggtggcgtccagcacagggcagggtcctggtgtcctcgccccacaaggc

SEQ ID NO: 122329 - DNA, 122 bp, Homo sapiens
tgggggcattccacccacagacccgctctggacagtgtgcgccctcagaggcagggagggcgtctggaccgcagtctcatgtgggtcactcttgggggcctcgggcagcagcaactgaagga

SEQ ID NO: 122330 - DNA, 122 bp, Homo sapiens
aatttttaaaaaaaaaaacatttttaatgggctgagagccgcctcgtggaaagcccggggcgggggatggagtagaaacagctgcgggagtgattcttgtctccatatatgtttataaggca

SEQ ID NO: 122331 - DNA, 122 bp, Homo sapiens
cagactcatggcagttttgtggggacacgtctgccagcccctgtgtggatcatacttttgcggtgtttgtttctttattgcacaatggggatggtggcacacatctgtcaggccagccaggg

SEQ ID NO: 122332 - DNA, 122 bp, Homo sapiens
caactatgtatgtccaagggcctccatcaattccgtgaagcatgagcaagggcggaggaacgggagcagggatttgccagggaaaagtagtagtctccagaaactgaagcctagagagagat

SEQ ID NO: 122333 - DNA, 122 bp, Homo sapiens
tgtgtgatcctgagtttaagcaagagtggagtttcaagtttttggagatggtgggctcaccgtaagtttctgtaacacccaccaagtgcacacgtggggcctctggattccagaagcttttt

SEQ ID NO: 122334 - DNA, 122 bp, Homo sapiens
ggcaaaccctttcgagcagcgcctcccagtggccagaaggtgaaatgacggcagtggtgccgcctggtaaatgaattggttctgtgacccgggaagctgtgcttggctctgatttcttttct

SEQ ID NO: 122335 - DNA, 122 bp, Homo sapiens
gtcctggaggggcccatttccgtccgtcgtggggggaggcacagtgagtccactggggcacggcagcgtctaagccacaagccgagcacataagccaggtcctaacggagcctatgtgtaag

SEQ ID NO: 122336 - DNA, 122 bp, Homo sapiens
caccatacctgaattgtttgatctctgcccacccagaatctgttttccttgtaccatgctcgtgctcactctgcgttctggactcccaaggccccaccactgagcctttgtgcatgctactg

SEQ ID NO: 122337 - DNA, 122 bp, Homo sapiens
ggcgcggggatggggctgggccgcccttggtagccgtcctgggctgggggccaccctggccgcgtggtcaccggcaagaagcccagggcctcacccgggcgcggcgtcgcgggggccgaggg

SEQ ID NO: 122338 - DNA, 122 bp, Homo sapiens
tagctgttctaataggtaggtagtgatctctctcattcgggctttcctttgcatttcccgcgtgactagcaccgttggatgtcttttcatgcgcttatttgccatctgtatccagctgtctc

SEQ ID NO: 122339 - DNA, 122 bp, Homo sapiens
cctaattgctccaaggctctctccgcaaagtctacgactgcaagccgcaaagtcaaactacgtctccaaaacgcagtgggcagagcaggagggcttgtgtctccattttcgccgcagggcgg

SEQ ID NO: 122340 - DNA, 122 bp, Homo sapiens
aaagaatcagcatcactggctgagagagcagctttaccagcagagatcaaaggtgccagacgtggtttcttttgattcactcagggagcaggacaagtaatcagaaaagtgtgattttcctc

SEQ ID NO: 122341 - DNA, 122 bp, Homo sapiens
gcgggcacagacagcttcaacgggcacccgccccagggctgcgccagcacccctgtggctcgggaactgaaggccttcgtggaggccacctttcagagacagtttgtgctcacgctgagcga

SEQ ID NO: 122342 - DNA, 122 bp, Homo sapiens
gcccacgttctcctgtgactcaggtctgactcaatgccatttctgaaacagcctggggggcggcgggagggggagggaaggtgtttttgcgaaaatgacaaaacaactccttgctcagggca

SEQ ID NO: 122343 - DNA, 122 bp, Homo sapiens
cgggccgcagggcgtgggccgcacacggtgggtgtcaggggcgagagtggctgcgtgcctcgatccggctggcccagggcgagtctgcctttcctgcctgaccccgcccctggagcttggca

SEQ ID NO: 122344 - DNA, 122 bp, Homo sapiens
tattgaaaaaaataccagggtgggtgcaggggtggggctgagccgaggagccggacgcagcgagagccaggcggagtcagggaccccggcatcccgggcgggcggagtcagggccccccggc

SEQ ID NO: 122345 - DNA, 122 bp, Homo sapiens
tatatataactggaaaaaaacaggtcgcagaacagaaggtatgtatagtgtaccatttgtcggagagagaacctgaataattagtatacgaatagaaaaaaaatctggatagcaaaatgtta

SEQ ID NO: 122346 - DNA, 122 bp, Homo sapiens
ctcaccatctcgccgggggagcgaggccacttcggggtcggattggaaatgttgaggcttcgcttgcttcctccgcgacatgctggctcaaacatcagctggggcagaataaaaaattacta

SEQ ID NO: 122347 - DNA, 122 bp, Homo sapiens
atcaactgttttcaaaaggagaaagatgcattctgagttatgcttaactttgtaattgcacgatttagctgttgtgttcatgtcactgaaagtacccagtaaagttgatgtctaattcatgc

SEQ ID NO: 122348 - DNA, 122 bp, Homo sapiens
aatgcccaggggtcctggaacggggaccaggatgcagggccactcctggtggagaaccctcgtgactactccactgaattaagtgtcaccatcgccgtgggggcctccctcctgttccttaa

SEQ ID NO: 122349 - DNA, 122 bp, Homo sapiens
ggaagctgtggtggcaaacgtaagaaaatcaggttcattggtgtttgcatatagcgagggcggggcggagcaaaaacgtagaaaaggcctatcagaaggctttctttcgtgcggttcctcgt

SEQ ID NO: 122350 - DNA, 122 bp, Homo sapiens
agtaggcagttgtggtggttgatgcctctgcccaggcaacattgaagtttctgaaactgacggggccaatgaagatacagccatcttcactggaggctcttgtctgggagttggcaggcagc

SEQ ID NO: 122351 - DNA, 122 bp, Homo sapiens
cccacagcgcagcggcgggctgaagggctcctccagtgcggccagagcggacgccgaagccgaggaagcgccaagagtgagggctgctagcacgttgtcacctctcactgggaaggacactg

SEQ ID NO: 122352 - DNA, 122 bp, Homo sapiens
gagtgaagactgacctcatcaatgacaaaggccgggtgtgaacaccagagggagctctcccggggcgcctttgtggtagaaaagcaccggagcctcacggagatcaccgacgccacgggacc

SEQ ID NO: 122353 - DNA, 122 bp, Homo sapiens
cagcccgtgggcggtcgaactgcctctctgcggaaggaggactgcattgtgtgcggccgccgcgctccgaggtccccgggcctctgtctcccgggcgtcctccagcagcgggccttcggggc

SEQ ID NO: 122354 - DNA, 122 bp, Homo sapiens
acactctttgtactattttggacagtccaaaattaggggaattcattggagtaaatatttcgatcatttctgctggtatgagttgtatagagaatacaagagtgtcaattccaggaacaggg

SEQ ID NO: 122355 - DNA, 122 bp, Homo sapiens
agcagcgtggcttccaaagtggaggtggaaattaagtggcatttacatagcagagctgtacggataattagtaattcaacacacagccattcaggacaaggccaacatgaggagtcatataa

SEQ ID NO: 122356 - DNA, 122 bp, Homo sapiens
actcccttatggaagatcactgagtcatgagatctgtggtttgtctgattctccacttcccgaagccagccaaggctaaccgacctgggattctgagagactgtccaggtgagctcgggtgc

SEQ ID NO: 122357 - DNA, 122 bp, Homo sapiens
taaaacctgaatttcccgtctctgtgtattgattcctaacgcgcagaggcgttgcttgaacgttgtttgaactcctaggcattccagggggcaaaagcacctcggcaaaaacgtgcaggact

SEQ ID NO: 122358 - DNA, 122 bp, Homo sapiens
cttcagagcagcgctcctccggttaaaaggaagtctcagcacagaatcttcaaacctcctcggaggccaccaaagatccctaacgccgccatggagacgaagcacctggggcggggcggagc

SEQ ID NO: 122359 - DNA, 122 bp, Homo sapiens
gcgctgccacagtacacgctgccaccacagcaggacaacgcccacggcccgtgaaccacgcgaggacaacgcccacggcccgtgaaccacgtgaggtgcgacacttttgtcctgccctggga

SEQ ID NO: 122360 - DNA, 122 bp, Homo sapiens
tctacgtaccgttctcagtgacagccagggtttgagcatccccactcccacacgccacatcgatgaccttcagtcctttaagcccggctaccagcatcggaatggcctcgtcctcactggag

SEQ ID NO: 122361 - DNA, 122 bp, Homo sapiens
ctcggagatgaaataggatgaaagcctagctgtttggggcgggaggcgagattgggggcgcggtgctggggtcttcgatgttttaccagtatttctaggtgaagcagcatattggaagtcat

SEQ ID NO: 122362 - DNA, 122 bp, Homo sapiens
ccggcctttcctcggcgctgtgctttcgggggtggcagggcaagtgtccaatgagccgtgcgtgtgtgtgtgtgtgcgtgcgtgtgcgtgtgtgtgtgtgtgagtgcgtgtgtgtgcgtgtt

SEQ ID NO: 122363 - DNA, 122 bp, Homo sapiens
gtggtgagttcagattctttcagcaggtcctctggagtgatgggcagctggtctcatcttcgccgccccgcctcaccgtttctcggtagttcttttcagttaatggaattgccaaacgttgc

SEQ ID NO: 122364 - DNA, 122 bp, Homo sapiens
tttggggccctctccagaatctactttcaggatgggttaagaccactgagtgttcaataacgtaacccattaagctgagaaaaaaatctgacattcaggaaacaatgattcaagagtctgga

SEQ ID NO: 122365 - DNA, 122 bp, Homo sapiens
gccaacctcagaaaaacatgtattttggtcaaaatgggccccttttcaaacttgtcaccccgtgggtcagggcacagcctgcccccagccggttctgcatattaagcagtggcttggtcacc

SEQ ID NO: 122366 - DNA, 122 bp, Homo sapiens
tgcatttctaaagctggcctcttgttccactttcacaaaagacatttccctatgaaagagcgttaacatcccactgctcttcaaaatggaaaacaagtttgcagtaagagacaagatgatca

SEQ ID NO: 122367 - DNA, 122 bp, Homo sapiens
gccgaggccaaagaccacgtttctcgtcagcaactgcggcggcggcgacgaaggcaacgacgaagaagctggtttctcagcttcggttggactctggtttttcagtccctcccggagccgca

SEQ ID NO: 122368 - DNA, 122 bp, Homo sapiens
agaaaggaggacccaggactgcacagccggcggctggaggcaggtgcagtgctccgtcgccgattcacacagtggcaggcaagagacaagctgtgttgaaggcactcggtggcgcgtacaat

SEQ ID NO: 122369 - DNA, 122 bp, Homo sapiens
gggttggaggtcagcatagtcccagccctgggatgagcacagtcccagccccagggttggcggtcggcacagtcccagccccaggcggggttggaggccagcacggtcccagccccagggtt

SEQ ID NO: 122370 - DNA, 122 bp, Homo sapiens
ctttgggctgcttctctagatcgttgacaacatataatgcacacagagacacaccactttcgaagaagactgttcaggaggctaagttcttaaaatcttcaaaagaggtatagctggttggc

SEQ ID NO: 122371 - DNA, 122 bp, Homo sapiens
caaggctgcttttctctaaacactaggttaggaaaaaagaaaactgggaatacatttaaccgactccatcaactacataagaaagcacctttgagagtgaacttgtgtctaatcaccacctt

SEQ ID NO: 122372 - DNA, 122 bp, Homo sapiens
cccggccgtgcctggcaggtttctcgctgcagcatgcgctacctggcgctgatggtgtctcggcccgtactcaggctccgggagatcaaccctctgctgttcagctacgtggaggagctggt

SEQ ID NO: 122373 - DNA, 122 bp, Homo sapiens
actcccaggtggttctgaaggtctcccagggccacaggctttaccggccccacctggcatcggacaccatctaccagatcatgtacagctgctggcacgaggcaagtgtattctctgggtgg

SEQ ID NO: 122374 - DNA, 122 bp, Homo sapiens
atgcccctatgttagcgattgtttttatctatccagttcaagggtcctggtgatttattacgtaacacttcttttttaactaagatttctagagcaacaatagaaggaggaactcttacatc

SEQ ID NO: 122375 - DNA, 122 bp, Homo sapiens
cttccagcctccagcactgtgagaaaataaatgtctgttttttatgcgtcgcccggtctgcggccttttgttgcggcagccagagccaactgagacagatttcagtaccgcgcgcagagcgg

SEQ ID NO: 122376 - DNA, 122 bp, Homo sapiens
cttttcttagcctgagctgccctgacatggtctgacggctcacaaggtggtgagtgcagccgggctgcagtgttcaaggagggcgccggctggccgcccacctgtcagaggctgcgccagaa

SEQ ID NO: 122377 - DNA, 122 bp, Homo sapiens
agctgtgacatcatggcaggggtgaggtcagggacagctgtgagccagccagggggcaagcgtgtaggttaggggatcaatcataaagatttggctcaagcagccgggagccatgggggcac

SEQ ID NO: 122378 - DNA, 122 bp, Homo sapiens
cttcctgctattaaaagatgtaattaaaacagcaaaggtagcaagcatttatgaggtcagcgtagggtctcagtgttccctaagggccctgtcagtcatcctgaatcctgcccctacctgga

SEQ ID NO: 122379 - DNA, 122 bp, Homo sapiens
aatcaaactcgtgcctgcgcctccttgtggtgggaagggagcatgacgcggtgactggcccgggcgctgacagtttccttgctgtgatgtcagcccccgccgcagatgtggttacccccacg

SEQ ID NO: 122380 - DNA, 122 bp, Homo sapiens
ccccagcactgggaacaacccgtctacacacagctcactcgaccttgaggaggcctcccacgaagggcgaagatggccgagatgatcctaaaaataaccgaagaaagagaggaccaaccaga

SEQ ID NO: 122381 - DNA, 122 bp, Homo sapiens
taatttgtgagtgcgagtggggagcagcaggagatccttttcataggtgaggtccaggaacgagcctggtcgtgctaggcaaggcccttcccactgtcagcctgtgtttacccatccctgct

SEQ ID NO: 122382 - DNA, 122 bp, Homo sapiens
tgctggcctgccgcggccaggcagctctcccaggctccagacctggctgccggctgcccacgctgccctgggaggcttcactcatgtgcaccccatgccatctagttagtggcttgggcccc

SEQ ID NO: 122383 - DNA, 122 bp, Homo sapiens
ctcctccgcctccctctgatattttatttaaattcttccgtcccctcctgtccataccagcgccgcgacttgggggattaaattagtcgcgtcgccacattcccccgccgcctgatggcctc

SEQ ID NO: 122384 - DNA, 122 bp, Homo sapiens
agcctaggcgacagagtgagactccatctcaaaggaaaaaaaaaagaaatcttaggtagtcgaaagtatcctcttgccgagtcagttcctgggtgggggagccacaagattaatctgggtgg

SEQ ID NO: 122385 - DNA, 122 bp, Homo sapiens
ccctcacacgcacacacactcgctggatcactcacacacacacatccacgagaggcgcggcgcctctttggtcgtgcagccagcccctggcttgcttttgaaggctctgctaagtcgatggt

SEQ ID NO: 122386 - DNA, 122 bp, Homo sapiens
acgttgaattgaggatgagcgctcacacaatattaagaatttctttccaagaaatgtgctcgggtcaaacacaaggcctttctgtccatgatccgcctgaaaccatggtttccttgttttcg

SEQ ID NO: 122387 - DNA, 122 bp, Homo sapiens
gaatcagaaatcttcatctttggggactcatacacgtttttatttataatcgtgataaatcgagagagaccacccaaggcatatctaaattagatgtgagatgagaagaggggcttattcct

SEQ ID NO: 122388 - DNA, 122 bp, Homo sapiens
aaggacattagaagatttaatatctataacacagagagacatgggcatccctggacaagccgatagctcatgcccattcagatctcactgtcacagttgctgttgcccactcatttagagaa

SEQ ID NO: 122389 - DNA, 122 bp, Homo sapiens
tcaacaaacagccgaaggctggaatgaataccgtatacaggttagacattggagaaacgacgaatacctgttagccctcgatcaagtgcagggggtcgatattcaccactcagatgccccag

SEQ ID NO: 122390 - DNA, 122 bp, Homo sapiens
acaccgacccaaggaccactccttccaggaacctagcctaaagcaaaggtgcagacagcccggggccaccgctgacctctagggcaagccaaattaaggctgggagaggatcctgcaggcca

SEQ ID NO: 122391 - DNA, 122 bp, Homo sapiens
attgagtgaagcactagcagaggatgggagctacaatgccgtggggttcacttacggtagcgactattacgacccgtcagagccgacggaggaggaggagccttccaaacagagaggtgagt

SEQ ID NO: 122392 - DNA, 122 bp, Homo sapiens
attctgacacacacaaataagatgtacaaatgctggctaaactctcacttccaccagtcccggggacttcctggcctctggctatgacattggacactaattcgtgtttcacttaggaacaa

SEQ ID NO: 122393 - DNA, 122 bp, Homo sapiens
ctcttaaccaggacctgctactgcctcacacacacacagcagtgaaactgcgaaaacactcggatggcttgggaacatcaagcttatgggaatacataacatcaccagcagcatgtcctgaa

SEQ ID NO: 122394 - DNA, 122 bp, Homo sapiens
gatttgagcctaagcctgtcgtcattctgtcctctaagccactgtcagcggacgctccatcgtaccagccctgggatggctgagccaggctctgcaaccttaaaacagacactcaagaaaaa

SEQ ID NO: 122395 - DNA, 122 bp, Homo sapiens
ccgtgtacctccaggtcggagttgatggaggagacctcagaggagctgccggaagacacccgggcccggatgacctgaacgggagggtacgacggggggtcctgcagggacgcatctccggc

SEQ ID NO: 122396 - DNA, 122 bp, Homo sapiens
tcggctcagtgctgcagccccagccccggctcccacctgccccccagcaccccggaaccccggcagagcccaccttgctccttgaagccatctgtattggtgccggcgttcaggatggtggc

SEQ ID NO: 122397 - DNA, 122 bp, Homo sapiens
gtttttaacatttgtccacgttgtagcgtgggtcagtgctttattcctccatggatgcaccgcattgcatttctctgttcgtctgttgatggacgttgggttgtttccagcttttggctgtt

SEQ ID NO: 122398 - DNA, 122 bp, Homo sapiens
cgggtgcctttgaaaatcaacgacaacttgagcacaggtaaggcctgggagccgggcccgcggcgcccacccctcccccgccccggaaagttagtgcaactcgcgcggggccgcggccaggc

SEQ ID NO: 122399 - DNA, 122 bp, Homo sapiens
caggggagctaaacgtctgctttttataaggaatctggccgtgagatgttggcctgggaacgacagtgcaagaggacagagggaggcctggcgggtggagggcgctgccatcttggagatag

SEQ ID NO: 122400 - DNA, 122 bp, Homo sapiens
accattgttaaatatgaatcatttcccctacttgatttgcaatgctaatatcaagcgccacgtatcaggtttctctatgtgctctaatatactcttataggaccactatcatatatgcagtc

SEQ ID NO: 122401 - DNA, 122 bp, Homo sapiens
gggtcttaaagacaacacacaagtgccttttgcaaactctggtcactacactcaggtcaccgttatcagagggggtgaggtcgggggaaaaatcccatagtaaagactaccaaagtcactga

SEQ ID NO: 122402 - DNA, 122 bp, Homo sapiens
cagcgtctgggaagatgcctgttaccaggcggatagcaaaaggtgtcaaggaacaacacccgatacttagcagaccgggaaagggcggggaggggggggggtctccctttccccgggggagt

SEQ ID NO: 122403 - DNA, 122 bp, Homo sapiens
gaggaatgatgaccttgagcctctcccggccaggctcaggagggctgggtggtgctgccccggggtctcagctgcaggatgtgacctgcccctcacccgttatggccccagccccgaggtca

SEQ ID NO: 122404 - DNA, 122 bp, Homo sapiens
taaaattaactcactcatcatcatgcagttaggagaacagagaaaggaaggggcttgcaccgggtcacatagggagttagcgtcaaagtcaggactaggaaccagccagggccctctaactg

SEQ ID NO: 122405 - DNA, 122 bp, Homo sapiens
atggacatttacatcaccgccagtggcatcgacgaccaggctctggaggatgaccggctccggaagtactacctagggaagtaccttcaggaggtgctgaaaggtaagggcggggccccttc

SEQ ID NO: 122406 - DNA, 122 bp, Homo sapiens
tcactgacgtccacagtgactgtcacatgcgtgtcagttgttctgtgggtttgctgtgtgcggggcactgtggaaaggaagaaaggcctagattccagtccagctccaccactcagcagctt

SEQ ID NO: 122407 - DNA, 122 bp, Homo sapiens
taggctattttgtgacacggacctggtgtgggagcgagaggaggtggcttgattgccgggcgtctgttccgagggaggagggtgttgccatctccctcacatgcccttatcacccctttctc

SEQ ID NO: 122408 - DNA, 122 bp, Homo sapiens
tgcgagcgcctggaagccaggagtctgttctctcttcctaacccttcttagatacgccaccgcccagcacacagtaggtaagccatgaatggcttttgaatcaaggattgaatgaatgtact

SEQ ID NO: 122409 - DNA, 122 bp, Homo sapiens
atattggagccccaagggttcatgggtagcgtatttacaaaggagcctcctccgccagcccgtgccaccgctgctaatgagagcagtcattaagtaaatgagacgtcgcctttagctggctt

SEQ ID NO: 122410 - DNA, 122 bp, Homo sapiens
ccaatgagcgccgcccggccgggcgtgcccccgcgccccaagcataaaccctggcgcgctcgcggcccggcactcttctggtccccacagactcagagagaacccaccatggtgctgtctcc

SEQ ID NO: 122411 - DNA, 122 bp, Homo sapiens
ggctgggtgttgaagggactcaacgagctaacgcgtccagcatacccagcgcttggaagtcgacacaggcgtgactgaggggatttgtcatcgccatgattactactacagccacccgattt

SEQ ID NO: 122412 - DNA, 122 bp, Homo sapiens
gacaagacgtaaccagaatagacatgatgatattcgttaaaatttactaaagatttactgcggagcaggctctgtgttagatgcctcatactgattatctcatttaatcctaaacagagcct

SEQ ID NO: 122413 - DNA, 122 bp, Homo sapiens
gtccgcgctcatggagcagatcaacaggtgtggtgggcagggcccctcgtcgcgaccccccgccgggatctcgccccggcgcggcgccccgaccctgagcgggcccctgtctccgcagcgtg

SEQ ID NO: 122414 - DNA, 122 bp, Homo sapiens
gcgactgcaggacgcccgcgcccccggcaccgcctcttcccgcctcacccatgccctgcgcgcccagcatccaggagtcgcacacactcgacctctgcacacacatcacactgcagggccat

SEQ ID NO: 122415 - DNA, 122 bp, Homo sapiens
gaggcgggtcagagaagccgccggtgcgggcgacgccttggaacccacggccgccactgccgccacaggtgcctcacagtgccctctgtcctcgctctgggaatcaaaaccccggttgggaa

SEQ ID NO: 122416 - DNA, 122 bp, Homo sapiens
aactgagccaggggcagaggcaattgacgttactttttgcccctctcctgctggggccaacgttcggcgaggagttcagggaggaacagccgtccctggcctgggggaaagggaactaggtt

SEQ ID NO: 122417 - DNA, 122 bp, Homo sapiens
gaccgccttcccaatgcgcccaggaacttccacacgacatacaggggaggggcttcctctcgtagagcccaaactgagggaggaattggtgccaagctctgtatgtctgatgtcacctcaca

SEQ ID NO: 122418 - DNA, 122 bp, Homo sapiens
cgtggaatcgtgagaaacgttactatcgcgtcactgccagtacatgctctagctgccgtgcgggcactggcctcatggaagccttggcaggtcaaacaccaaggccagcctgggcaacacac

SEQ ID NO: 122419 - DNA, 122 bp, Homo sapiens
ctggcggtgtctcagcgcgggtgaccagtccttgcggttgggaaatgtgtcgtgggcgcccgtggactcgttttgcctttgagattaaataggaaattttcccaggacgagtttaccggagc

SEQ ID NO: 122420 - DNA, 122 bp, Homo sapiens
ctcccaggatgcctgtcgtgtttattataactggttctccacaggcttgtcggtgctccacgccagcagcacaaacaacccgccctctgtgtcccaccgcagggaatctgagtgctggccca

SEQ ID NO: 122421 - DNA, 122 bp, Homo sapiens
ggctgtggcacagctgctggcagagtccagagcaggaaggcagagcggaagtaaaggaaccgagagggctgggaccacagaagctagagctgtcgccctgccatccccaaaccgcataggat

SEQ ID NO: 122422 - DNA, 122 bp, Homo sapiens
tcctccctaggggcggggcgagcactcgcggcgcggggcgcgcacgtggcttggccgggacgcctggtccggcttgctggcttcaactacggtgagatgttttgcgaccctggggtaaaatg

SEQ ID NO: 122423 - DNA, 122 bp, Homo sapiens
cgacgattaggccccaacttgcacatctgccctacaggaggcagcaaggccctaaacttacggctgcccagaacataactgcacccagggaaaaccttgttgcggttacccttaggaacacc

SEQ ID NO: 122424 - DNA, 122 bp, Homo sapiens
aatgcaaagttcacttcagacacttggttgagacttgaagtttagaccaatcctgagatgcgtggtgatcctgagagagagcagactgcctgccaggtaaatggtccatattatttccttgg

SEQ ID NO: 122425 - DNA, 122 bp, Homo sapiens
taaccgcacacgtgtgtccctcctagccaaccgcgcacgtgtgtccctcctagccgaccgcgcacgtgtgtgcctcctagccgaccgcgcacgtgtgtccttcctaactgtgccccgaacgt

SEQ ID NO: 122426 - DNA, 122 bp, Homo sapiens
ccccgccgcctctgaacaaacttttctttctcttcaagttgaggccggcgctgcaggcagcggcggctgcgcggtgaacgaggcggcctgcgcggcggagtgctgagtcccgatccccggct

SEQ ID NO: 122427 - DNA, 122 bp, Homo sapiens
ttgcactggtaacccccaaacctgagcctctgtgcctgggtccggccatgcagtcccacacgcccactcttccgggcctggtcaccgtggttctccttgtgctcatgaggcaggggccggca

SEQ ID NO: 122428 - DNA, 122 bp, Homo sapiens
taggaaaccatgctccccctggacagctccccaggaaggtaacccttggcgttgatcttgcgattggaagggtgttcattttttaattatgctgacagacattcagtgagaactgtacttcc

SEQ ID NO: 122429 - DNA, 122 bp, Homo sapiens
caccggctgcttccggggacacctgaaatcagcagctggaactgacaatttggagagccccggggatggtcatctgagacctgggttacaatacaagtctgacctcggggcgagtccaggct

SEQ ID NO: 122430 - DNA, 122 bp, Homo sapiens
actatttacgcaataatacagttcatgatgaacacttgctttccttttgggagtctgaaccgcaaatgctaggcagagggtgcctacaatgaagaggcccagtaaaatccctgggcacagag

SEQ ID NO: 122431 - DNA, 122 bp, Homo sapiens
gccccgaccttgcctcccgttccacaatagagcatccattgtaagtgggtaattgggttccggcacatcccctcccccggctgggggtggaagcaaagggaaacacaatctgttttctattt

SEQ ID NO: 122432 - DNA, 122 bp, Homo sapiens
cccgtgctcctgtcctccccatctgctctgcctacagaaccctggaatggcgatttctggcgtgctgctggtcttctgcctcctggagtttggcatcgcatgcgcatcttcccactttggct

SEQ ID NO: 122433 - DNA, 122 bp, Homo sapiens
gaggatcctgggtccacacagacaggcgaccgccccggccccagacgggaagcggcactccggggaccgaagctcccagcccgcgctcggccccagcccctgttcccgcctcagagccgcag

SEQ ID NO: 122434 - DNA, 122 bp, Homo sapiens
acccccccgcagtccccgctcggggacgagccccaaggggccctggagcagtacaggccacgtgcagtttggcaagagcccccagacctggcccaggcgcacaagaccccgctctccagagc

SEQ ID NO: 122435 - DNA, 122 bp, Homo sapiens
cacgcgccactcccttccccaccgcaccccaccccgacacccacgatgccacgcttcaggcggggctctaagacaaggcctttctctggcacatgcactttgcttccacttcatgtaaggaa

SEQ ID NO: 122436 - DNA, 122 bp, Homo sapiens
cctcgggagctgacaacagccaggctacaccagggcacccgcctctcaaaatcagctgggcgcccactctcctcctaaagaacacccttctggccctcagtctgttccccttctcaggtaga

SEQ ID NO: 122437 - DNA, 122 bp, Homo sapiens
cctctgagcgcggccgttcccgccacacatggaggggggcgggtggagacccgggaggaccgaagtcacgggggctgtggggccaggacagtcccacatgtgcccctcctgggcggaggaca

SEQ ID NO: 122438 - DNA, 122 bp, Homo sapiens
aatgtagagagtgtcaatcaaaggcagagctctcagagctgggaaggaggctctagatggcggctgtgccttagagagagcgcgctctgctccctgcctttgcctcactttacgcaactttc

SEQ ID NO: 122439 - DNA, 122 bp, Homo sapiens
actgtaatttaggtgatcgttgctttagcttcccagtcacctttggctccctgatcccttcggcttttccagctggctgactgctatcctggaagctggaggaagcttgggtctttgtgaca

SEQ ID NO: 122440 - DNA, 122 bp, Homo sapiens
agaagttcaaactggaagcaaggtgttttttttcattggaaattgtcagagatcgtaacgcgatgaaatataataagcatagtctctatttcagaatgagacgctgaggagttatgacaaaa

SEQ ID NO: 122441 - DNA, 122 bp, Homo sapiens
agctttccatgggctgtggggaaggcgtcagtgtcgggtgagggaacaccagcttcacctcggctcatctgggcgtggcagacgactgcttcctcacctggagagtgttcaaggacagcaag

SEQ ID NO: 122442 - DNA, 122 bp, Homo sapiens
agggccgagcagcggctctgtgagtccactgcccccttttggcttggaggcagagtgccccgccagagctacgcgttcccagccaggtaatttttgaagccacgtgcaaaggtttaagcatc

SEQ ID NO: 122443 - DNA, 122 bp, Homo sapiens
gaagaaaagaatgaaaccaccgtaagttcttcagactcagtcgtcagcaaggttatggcccgaagccgtgcagaggcggcgcgcggggaagctactggcagagctgtgcgcactgggggtgc

SEQ ID NO: 122444 - DNA, 122 bp, Homo sapiens
cagcaccggccgcagtacctgctaggagggctgtggaagcccgcccagggcctccgcctccggctactgggctcctgtgtgcacctaaccctgaagggaatccgggccctatggcgatggcg

SEQ ID NO: 122445 - DNA, 122 bp, Homo sapiens
agcctgtttggcgaccccaagcaagcccctgtgtccctcctgctggaggtgagctgggagcgtgcagagcttttggctttggggtttctatctggatcacccgagggactggtgcctgaagc

SEQ ID NO: 122446 - DNA, 122 bp, Homo sapiens
aggtgtacgtcttgtccgggagactcgacgccccgtacgaggccgggaagggcctcagcgcgtcatagccagcctggtagaggggcagctggcccaagaaggagtcctggccgctgggaagg

SEQ ID NO: 122447 - DNA, 122 bp, Homo sapiens
agccctgggcgctagtactacagctcctggggaaacgccccggggtgttggtgcccgactcgtcccccagccgtcttcggcttcacggggtgggggagggacagccctgaccccatctgctc

SEQ ID NO: 122448 - DNA, 122 bp, Homo sapiens
aacctctgcactttcttttctctgtgaaacttttcattttagccttctttttcagttattcgtcattgcagatattttgcaaactcaagcctccctactaagaactcaggaagcaaccaatg

SEQ ID NO: 122449 - DNA, 122 bp, Homo sapiens
ccggcaccttgttttcaagagtttaaattccagccttacaaatgttccagctgggaagggcgtctccaaggcgcgatccacactggtctcctggaaggcccactgtaagtgtgagtggattc

SEQ ID NO: 122450 - DNA, 122 bp, Homo sapiens
agactggaggtctcggggggagcccccaggccacgcaccacaggccagggtccttgggagcgcccccggctgtcaggtgcctccttttggtggttgtggggcgcagtggggctgaggtctgt

SEQ ID NO: 122451 - DNA, 122 bp, Homo sapiens
tcagccataagatggcggctgcgctgactgcgggatcccgggcgtcctgtcttttccctgcgcagtgactgggccctgacctggagtcctctcagggcagctctggaccctcagcggcgcgt

SEQ ID NO: 122452 - DNA, 122 bp, Homo sapiens
cagttcttctcaagagaggacacctgcgtgcccagtaagacatgccctcagctggagttccgacatctgatctctaggaggaaagaagagaagccaggagctagaaagaaaccagaaagagg

SEQ ID NO: 122453 - DNA, 122 bp, Homo sapiens
tttctcgcgaagcagcacacgatgttggacagcaaagctgttacttggcaaggtggaactcggccgagagcggctccaaagtcgcgtggccagtgccaggaattcagattttggcaaccgca

SEQ ID NO: 122454 - DNA, 122 bp, Homo sapiens
actacttccggcgtctgctccgcgcccccccatgtcgctgccgccgtggtaccgccctctcgcggctgcgcagtggcaccatcccaaccgcaccgactggtaaccccgcccacgggaagagg

SEQ ID NO: 122455 - DNA, 122 bp, Homo sapiens
aggagggcggtggggtggggagacatggcccaggtcccagcagtgcagcctggcctgaggcgcaccaatgcaaggacagaactctgcagcagacacaagcagacaggatgtgctgcccgggg

SEQ ID NO: 122456 - DNA, 122 bp, Homo sapiens
cccgcgggcccgcactcacctgggccgctctccgacacgggcccgccgataggtaccgggcgataaggaagtacagctctgcgggaagacaaggagtcaggtcaagccccggcggggagggg

SEQ ID NO: 122457 - DNA, 122 bp, Homo sapiens
aaaaggattgaggagatgtgtgagtcctggcagagggcaagaggagagcagagggaaattcggccctctctgagtgtcgatgcaacctcccagacccctccaggatctaaggcaggcaagag

SEQ ID NO: 122458 - DNA, 122 bp, Homo sapiens
ctcttctgtaaaatcttagaaggcaatgagaagctgtgagctcatctagttttggagagacgagcttaggcagatctgagttcagatccctgttctgccactttctgatcatgtgaccctgg

SEQ ID NO: 122459 - DNA, 122 bp, Homo sapiens
catcccttcggacgacctggccagctcctttcctttccccatccccacccggggagaccccgcgcccagcagctcaccgcgctcgggcactgctccctctgccacgcctgtcaaggctcggc

SEQ ID NO: 122460 - DNA, 122 bp, Homo sapiens
tataatttttttttcgtatagacgggatgtcaccatgtttcccaggcttgtctcgaactccggaggtcaaacgatccacccaccgtggcctcccgaagtcctaggattacaggcatgagccc

SEQ ID NO: 122461 - DNA, 122 bp, Homo sapiens
gcggggtgcagagcgggaagcgggcccgctcgtgggtgtgggatccgcgtggtacgggatcggagcgaagcggctgctttgggaggcggggttaggggccctgctgggccctgggtgcccta

SEQ ID NO: 122462 - DNA, 122 bp, Homo sapiens
catattcttagaaacttatcacaggtttattggctttccatcttatcacatgtcatatctcgaaaacattaaatagaaacaaaagtctccatgcaattttcagatgaaaaacattctgtgca

SEQ ID NO: 122463 - DNA, 122 bp, Homo sapiens
ctgcccgcctgcccgcagcaccctgccgcgcctcggcgtgggcctgcggaggggcgggggcggggagtgaaaaatagctgcagtagttgtagcaactggacaaacattccagagattggccg

SEQ ID NO: 122464 - DNA, 122 bp, Homo sapiens
gcacttttgctcggggctccagattgtagggcagggcggcgcttctcggaaagcgaaagccggcggggcggggcgggtgccgcaggagaaagaggaagcgctggcagacaatgcgacccgac

SEQ ID NO: 122465 - DNA, 122 bp, Homo sapiens
tgccaggcaggtgtttactcactcatctgctatggccctgggctcactgccgccgccccccgccctgtgggtttgtcagcagtttgatgtgtatttttccataaaaattcattgttatacat

SEQ ID NO: 122466 - DNA, 122 bp, Homo sapiens
gctataagttatacctgttatgtatactttgtgactgagacttaaaatattttaatgtgccgaccggtgctgttcagtagaactttccatgatcatggcagtgttttatatctgcactgtct

SEQ ID NO: 122467 - DNA, 122 bp, Homo sapiens
gcgtttatcgatgaaacgccacagtgggacctcctggatcaaatagtgcaatgatgtaaacgcttagtattgtcctggaacctgcctccgaaaaggccgtgcgctcccgcctgggatcctgc

SEQ ID NO: 122468 - DNA, 122 bp, Homo sapiens
tttgtatgacataaaaatcagaataagaagtacctgacatactttctacatctgtagttgcggaagacattttaataggtaagagcaaaagcacaagcctgcatacttcttttttaaccctg

SEQ ID NO: 122469 - DNA, 122 bp, Homo sapiens
gggttcccggttgcggttgcgggttctgttgtgggttccgcagccctaggcctggagccacggaagggcctcccaacgcccgttctcaccttccctccagccctctcacaaaatgcttccgt

SEQ ID NO: 122470 - DNA, 122 bp, Homo sapiens
gcctccacgaagtcgtggaaaaggtgcggtgtgcctgtcctgcgcctcctggcctctttccggatctgggccttcccttaggggtcccctaggccggagtagccccaacctttgattgcggg

SEQ ID NO: 122471 - DNA, 122 bp, Homo sapiens
gccggaacaatagcgcgcgcgggcggggcgggggcgggggcggggcgctcctctgggcaccgcccccggcccgccccccgcgctcgcagtcccgctcgcacactggctcccacccgccgccc

SEQ ID NO: 122472 - DNA, 122 bp, Homo sapiens
ccgccctcgtgcgcaggcgcagaaccgttgtgaccagagcggttgcgggctgagcggtttcgagccggcgtcggggagcggcggtaccgggcggctgcggggctggctcgacccagcttgag

SEQ ID NO: 122473 - DNA, 122 bp, Homo sapiens
cagtgggacagatcaggaggacagccaagagctgtgtcctggacacacagtctgggcacacgaccccagcggcaggcaccctgacttcttccctcctgggccaactgcctctccctctgcca

SEQ ID NO: 122474 - DNA, 122 bp, Homo sapiens
tgtttgacagtgggaatgcatggccaaattttgagctctggaactccaggctgtctgtgccgaattcctaccagccaagcaggcggggcgcaggctttgccgattatgaaaaagggcacgtg

SEQ ID NO: 122475 - DNA, 122 bp, Homo sapiens
agcggcccgtcccagatggtcgccaaggaccagggggcgattgagcggcagcgggcgtcccgctggcctcgggctgggctgtggttcggtccagagccgaccggcccatagtcaggtcggcc

SEQ ID NO: 122476 - DNA, 122 bp, Homo sapiens
ggaaaaagaggagggagacccgcggatctcaagtcgcccggcccgccatcttcccgcatgcgcagtacaccgcccccctctgcgcatgcccgccgctgccggagcgctcccacgcaccgatc

SEQ ID NO: 122477 - DNA, 122 bp, Homo sapiens
aacgccctggctctcaggcctggactctagggcttagccagatgcctaaaccgcccaagccgagaaacaacttagaagacagacataaccctgggattcagggaaggcgcgagcaccgccca

SEQ ID NO: 122478 - DNA, 122 bp, Homo sapiens
gtgtgtgagtggatcaacagccatttccacttatccaaagaccttgattgcaagaagatacgtgcttcaacaaaaacttggcagtggaagttttggaactgtctatctggtttcagacaaga

SEQ ID NO: 122479 - DNA, 122 bp, Homo sapiens
aatcagctcggagagagtcgcgtgcaggctgcaggtgtagggagagccggggtcaggctccggtgcgccgcgggggatggcggaccctccgggggccgtgctccccgcattcccaccacggc

SEQ ID NO: 122480 - DNA, 122 bp, Homo sapiens
agcagtgactgcaggaaaatctcttaatgtctttctgccggttttcacctataaaagaagcgcagcaacatcactgagctgacaaggtattttaattctgcaaagcactagacagaggactc

SEQ ID NO: 122481 - DNA, 122 bp, Homo sapiens
ctgccatgcctgagcctcccaccccctccatgggctcctgtgctgcccgagcctccccgacgcgagtgccacccccgctccacggcgcccagtcccacggaccacccaagggctgaggagcg

SEQ ID NO: 122482 - DNA, 122 bp, Homo sapiens
gaagtgcgcatgctcatgtcgttccaatgacgccattgctcgctcgtgacgccacgggggcggtgcctgcacatgggtggagcctcaggtcctatataaactagagcctggccaattgcgaa

SEQ ID NO: 122483 - DNA, 122 bp, Homo sapiens
tcgggcgtccgtgtcaatcaggttttccccggctgggtccgggtttaaaggctgctgctgcgcagggcgctcccatggtgccgcgcggcgggcgggtttggattttaaatccccgcggccaa

SEQ ID NO: 122484 - DNA, 122 bp, Homo sapiens
ctggatggagttctcagggttatcgtgtggctggtaccatcctgatgatcatttctggttcgtaacaccatttgggtggattttcggcattgtctttataaatttcttcttcttcttgcccc

SEQ ID NO: 122485 - DNA, 122 bp, Homo sapiens
tgaccccgactgtggactcgcttagagtagaaactgctgaagtagaccagacaacgtcagcgcctgggtgatttttgctcctgtggctcaacagctgatctgacaggaattcttgctgagcg

SEQ ID NO: 122486 - DNA, 122 bp, Homo sapiens
ccacgtgttggcaccaaggcctacccaaaggcccctgagggatggcttataagcagccaacggctgttccaggcaatgaccagggctgagtgttagttaaatgaggcccctgccctgctgga

SEQ ID NO: 122487 - DNA, 122 bp, Homo sapiens
tataaatcttcaattacatacatcaaaaacagacctggctgtgtgctaacccttccgagacggcagggacaaccaactgggggttttctgtttcaaagcatggcctgaattattaatcctcc

SEQ ID NO: 122488 - DNA, 122 bp, Homo sapiens
ctttattctgctgcttgagcgggccggggcggtgggccgccatgccgcagcgcgcgtgtacggagtcagcactgcttccgggccaggacaagcgcttccggtcccctccaagggggcgggcc

SEQ ID NO: 122489 - DNA, 122 bp, Homo sapiens
gcagcagccagaaacgatacttcagcgagggggaaaaggtgaatattgtgcagggtgtctcggcctccatccaggacaaagggtccattcagaagtttgtgccctacctcatagcgagtaac

SEQ ID NO: 122490 - DNA, 122 bp, Homo sapiens
gcgggcggagagtcagccgagtgggggcggcgctcaccggtggtgggactatggcgggagcgcagcgcaccctctccgggcgggtctataaatgccatgtaaaagccaaccccgcaggggcc

SEQ ID NO: 122491 - DNA, 122 bp, Homo sapiens
tgtctggaaggtgagcagggccacagagcaccaagaaaataccagggactttgcaggtctcgggtggattcaggttgatccaacagatgccggcccagggcctgcaaggaggctcctttcgc

SEQ ID NO: 122492 - DNA, 122 bp, Homo sapiens
cgaggttcctaggagatgcagaagacactgccctgaatgcctacagccggctggcaatgccgccccagagcagagcggcgggtgccgcctcgccttcttataggctcgcagcacttccagtc

SEQ ID NO: 122493 - DNA, 122 bp, Homo sapiens
tcacatggaagatgttgatataaacatgaggaatgagtcaagattccattgttaaagcaacgtggctgaaatttgatagtaaacactcctagtgtacactgagagtatctggggtagtatag

SEQ ID NO: 122494 - DNA, 122 bp, Homo sapiens
ggtcacaaaccaggaacacatgccctccaagttagatagctttttttcctctttaattgccgtttaaacacacatgctctcacataacacagaaggtgagagctgaatgaagttttctgggt

SEQ ID NO: 122495 - DNA, 122 bp, Homo sapiens
gagaggtaatgaatgaaaggcacattttctccaacttgaggaccgctgcatagtactagacggtaccagccaggctgatcaaaaagttctaattgaggacatcccccccttcccaaatttaa

SEQ ID NO: 122496 - DNA, 122 bp, Homo sapiens
cggccgcggctgctcccgacacgttgttgttggcgttggtggcggcggctgcggcggcggcggccgcgagctccagccccgggccatcgctccagccccagatcacttcccctttggcagcg

SEQ ID NO: 122497 - DNA, 122 bp, Homo sapiens
acctttcgagttacctgccatttggactcacttatttggaggagatatgtaaagacccagcgtaatacctgtatgctcaataaaaagtatttgctggtactccttcctgcccgtcgtgtgac

SEQ ID NO: 122498 - DNA, 122 bp, Homo sapiens
taccatgaaatgtaccttttaaagtgtgccattgcagtggttttcgtatattcacaaagtcgtacaaccattgccattatctaattctggagccattcagaaacacccatttttttatggcc

SEQ ID NO: 122499 - DNA, 122 bp, Homo sapiens
ggcggtggggcggggcattggcggctccagcaaccggaggccgtcccagggagggccaatcggagtaaggaggtgggagaaacctagccaatcagtgtgcaggacgggcaaggagggtggtg

SEQ ID NO: 122500 - DNA, 122 bp, Homo sapiens
gagccacgcgatagccccctcgagaccacctggggtaggaacacgaggctcgggctggggcgcacctattccctgcttccagatgagccctctccaggctttatctccttcccattttggcc

SEQ ID NO: 122501 - DNA, 122 bp, Homo sapiens
agagacagcagagggcagtgcagcgtagtgcaagaagctctggctctggggccatctggacgagtctgaatcttaactctggcacctgttagtagagaggcctcaggcaaatcgcttaacac

SEQ ID NO: 122502 - DNA, 122 bp, Homo sapiens
tttgttttatttcatctccgtccctctgccctccccttttcgctatcggtttcaattctccgctgaaacctctgaggaggccctgcccgccccactgtcccgccggccctccccgcagcacc

SEQ ID NO: 122503 - DNA, 122 bp, Homo sapiens
aaaataccatttctgttctgagaaaatttacaagcatcttcctggagcctacattttactcgaagtaatagctatttttatagcttacaataaaagatgcattttggaatatatttcgcttg

SEQ ID NO: 122504 - DNA, 122 bp, Homo sapiens
caccccccctttggcgagtcggcagccacgtccttgtcctcacccgcagcgcagtgacgccgacccatccaacggtcatcgcatgcgcgtgccccgcgcaggccccaaacccccacggatta

SEQ ID NO: 122505 - DNA, 122 bp, Homo sapiens
ctaaagcatttaccaagttgtattgcaatggtttgtctacacagctagttttccctctaacgacttcttcaagatcaggggctatgtcttattcgtttttttatgtccccggggattagcta

SEQ ID NO: 122506 - DNA, 122 bp, Homo sapiens
cgggtgaagggactgattttgattatcatcctaccagatagagattattccctctgcacccgggttaactgaaacccggtgggggtagatccttgccattttccggccctgtaccccactgg

SEQ ID NO: 122507 - DNA, 122 bp, Homo sapiens
agcgcgcgggaaccgaccgggccttactctggggcgggcagctgtaagacattcggagggcgggtcgggcctggctggggcggagactgggcggggccgggcccgggagcctcctcagcccc

SEQ ID NO: 122508 - DNA, 122 bp, Homo sapiens
aggcagtatggggagggctgtaacaaaggtgtctccaggagcatggtggggtgcatgggacgtgcatgggaccaaacacagcaagtctccctggagggtccagggagtatcctagagcaagt

SEQ ID NO: 122509 - DNA, 122 bp, Homo sapiens
ggaggaagcagggggcttccgagtgggtgacccagacgcgggctgtggggtggggcagttcgtggggtccggtcctggaaaggcgtcgactgccccccaactcttctggtttcctctacgat

SEQ ID NO: 122510 - DNA, 122 bp, Homo sapiens
ttactttctttccaaacgagctctaattttaagctcaacgaccaaagacggagaggcagtcgctttgagctactcctggctatttgttgggaaatcacctaaatccgttcagatttagccag

SEQ ID NO: 122511 - DNA, 122 bp, Homo sapiens
ccgggttgtcccgggccaggctgtcgctgagccccaggtctcgtttttgcagagggtcgccgcttcatctccgaccagagccggagaaaggacctctccgaccggccactgccgggtgagtg

SEQ ID NO: 122512 - DNA, 122 bp, Homo sapiens
aacagtatgcctcaactccttcatactagtaggaaattattatgttcattccttgagtctcgcggcgtcgggaggtcacggcgtcaggcttcccagacagtcgtaaacgccatgtgtttacg

SEQ ID NO: 122513 - DNA, 122 bp, Homo sapiens
atcaggagagttgaaaaagggaaaaaaaaaaaaatagaagaagaaaaagaaaaagaaatacgcccaagtagagaagaattggaagaaacagcaggaaaaggcttctaatgaaactgttgtgg

SEQ ID NO: 122514 - DNA, 122 bp, Homo sapiens
acaatatgtattccttcattgtagcaataacttgtacttcaagattccctagaaaaagcgcggccttgacaaccaaatgcagtgcattaattatacagagttacatactgttgaaactgaag

SEQ ID NO: 122515 - DNA, 122 bp, Homo sapiens
cacgcgcacacggccgcgcacgggcggggagggggcgccccgccgtcacgcgtcgctgtgcgagggattttgtgcctttttaagtccctgtatgttaatgcagacaatccggagagcttgtg

SEQ ID NO: 122516 - DNA, 122 bp, Homo sapiens
gctatgatttgaaggtattttgtttttgttttcagtcccctctgctctttgtcttgtccccgcagttctgtctgatactaagaactgccacgtttggaatatcctcatgatcacacatctgg

SEQ ID NO: 122517 - DNA, 122 bp, Homo sapiens
gagtagccaataatgcctaatggactcaagtggtcacaagatgccatcattgagaagggacgttcaaagatcacagaactgaacacatggaaaaagctgagatccaggaggagacctgaggt

SEQ ID NO: 122518 - DNA, 122 bp, Homo sapiens
cctacgtaaatcagacaccacttcctcaagcgtgtctataaaatccagtgaacaccacagcggttttctctttccagcacccctctctcgcgcgagagagagagctgttctcctttccgttt

SEQ ID NO: 122519 - DNA, 122 bp, Homo sapiens
ccgaggtcacggccagggtctgagcccgcggtcgcaggtctggttcggggtcagattccgcgcggcctccagggggcgccgtcgcccgcccggctcggcccctcgcgggctcgctggcgttg

SEQ ID NO: 122520 - DNA, 122 bp, Homo sapiens
cccagcaagcctgttttacagtcaacggatcgtcctctgctcctccgagcagctcatctgcgttcggctgtgcgatctgagtgtgttcactgaagcacagcacacgggcagaaccgcacgct

SEQ ID NO: 122521 - DNA, 122 bp, Homo sapiens
gattttggcccttgcaagaatccgtcgggcggaggacgcgacaacggccacgggaaatgacgtcattaaccctgtggcttccgtgctggaaagagagggagagctcttgcgaggcagaacag

SEQ ID NO: 122522 - DNA, 122 bp, Homo sapiens
gggaggcaggcctcccagttgctgcagtttggaatatgtcaggtcccaccctcccagaggcggggccagggctgagtcctgccagcctcatttctctatccctctgagaacccagacgggca

SEQ ID NO: 122523 - DNA, 122 bp, Homo sapiens
tgcagggcaggcttccctaggggcaggcccaggcctatagcccgggacccgcatcccgggcgagctgcaccctcccgagaccttccccatctgtacaatggggacaggacaaggcccagcag

SEQ ID NO: 122524 - DNA, 122 bp, Homo sapiens
ctgcctccaacatctggcaaacacatccacagctgtgcagctgccggaaacgcctcctcccgcttctcctccatgcacgcaggccctcaaggatggctttctgaggaatttatggggtcgcc

SEQ ID NO: 122525 - DNA, 122 bp, Homo sapiens
gaagggaagcccagtgcatccctcgtttccccttctggtgcctccttcctcacatgactgcgtgtcatttcttagagtcctgcaacctgaagatgtggtgttagcccctctccccgtctctc

SEQ ID NO: 122526 - DNA, 122 bp, Homo sapiens
ggtaataatagcggttcagtagcttctcaattgatggagtgaaaaaattgttatagaactcgctgaaccaaaccacaacgatttctccgggtgacatactgcaaggttttttaaaagcacag

SEQ ID NO: 122527 - DNA, 122 bp, Homo sapiens
tttgttcaggctgccataacaaagtaccacacactgggtgcttaaacaagagaaatgtatcgtctcacagttctggaggctgaatgtctgaaagcaaggtgttggaggattggttctttctg

SEQ ID NO: 122528 - DNA, 122 bp, Homo sapiens
gctccccggcctggtctgcagaccatcatccaccccttcaccgcaggccactgccgcggtcgatggtggctttgaggaaaaccctggctgggtgaccagttgtgacaagagctggaggctaa

SEQ ID NO: 122529 - DNA, 122 bp, Homo sapiens
catcactctctgcttccttgccctttcacacgtgacttttctgctgtttccacaaaggggcggagtgtatttccctactccttgaatatgggctggccccatgacttgctttggccaacaga

SEQ ID NO: 122530 - DNA, 122 bp, Homo sapiens
gaggggagtatttaagggatgtaagagtggctccacatctgaaaatcaaccagtgtaatccgtcgcaccgttagagaagcgacaccgttttcagttcggctccatctggagactaacagggc

SEQ ID NO: 122531 - DNA, 122 bp, Homo sapiens
tgttcacagtgaattctaccagtgccatacacagaacaggagtcacactctgcggcctgccgaccctgcggagagaccagcggcccacgatgcccgttccctgctcctagcctgcccactcc

SEQ ID NO: 122532 - DNA, 122 bp, Homo sapiens
gtcgccttttacagcatcaaacacttctgttgattttctgcatcgggaggtccttagggccgagggatctcttaaacagttgaggaaaaatgggcagggatggtggcttgctcaagcttgcg

SEQ ID NO: 122533 - DNA, 122 bp, Homo sapiens
acagcaagaaacggacccatgggacaggagagacgcaggagccccaggggacaagagagacgcagaagccccaggtgcctttggtggccagtgctgaatttcgcaagcaacattagaaactt

SEQ ID NO: 122534 - DNA, 122 bp, Homo sapiens
acctttattcctaaggcacaaaaccagagcaaagcagagacaacctaagtcctgggtctgcggcaggacggggccgagccacagactacagctctcccagacgcttctcccatcagatactc

SEQ ID NO: 122535 - DNA, 122 bp, Homo sapiens
ggtgctccatccaggtgcctgttattggaacaataaagtcatgttacttcattaggagtccggcctctagattgcgaggcctttaaatggatgatccctccggtgtctggctgcccagttag

SEQ ID NO: 122536 - DNA, 122 bp, Homo sapiens
ctgatccgcatcgacttggccgtgggcgacgtggtcaagacctggcgtttcagcaacatgcgccagtggaatgtcaactgggacatccggcaggtgggcccagacccagggtatatggatgg

SEQ ID NO: 122537 - DNA, 122 bp, Homo sapiens
ctctcccgtcctccctcggtctctcctctttctttctgcactttgtccaatgaaagaaggcgagttcgggaggtgaaagttcagcagaaggacaaacccctgtttgcaaggaaacagaaacc

SEQ ID NO: 122538 - DNA, 122 bp, Homo sapiens
caacacttttatttttagtttttagagacggggccttgctctgttgcccaggctagagtacgatgtagtgatcacggctcactgcagtcttgaactcactggctcaagcaagcctcccacct

SEQ ID NO: 122539 - DNA, 122 bp, Homo sapiens
tggggctgggggggtggtgtggcgcggggtgggggggcatgccaagaaaagtgtcaaccgcggagcccacccaatggtcaggtagacgaaccccttggagttccaaaggccaaaccgcggcg

SEQ ID NO: 122540 - DNA, 122 bp, Homo sapiens
tatgagctgtaacactcacgacgaaggtctgcagcttcactcctgaagtcagcgagaccacgaacccaccgggaggaacgaacaactccagacgtgcggccttaagagctgtaacactcaca

SEQ ID NO: 122541 - DNA, 122 bp, Homo sapiens
gttgtaaggccaagaggctatgggcagggcactgacaacgtcagttgtgcttccccaaaacgtggctcagttctggcaatgaatagatcctcagtaaagcgtgctggttgaacccagagagc

SEQ ID NO: 122542 - DNA, 122 bp, Homo sapiens
gggctcgcaccccaaccccgggaacaccctggcccctttccctaacgctgcccactgaggcgtcctcaccgtctaccctgttggggtcgctctctgacccccgcgctgcatccccgggaccg

SEQ ID NO: 122543 - DNA, 122 bp, Homo sapiens
cagctgtgccctcgccgactgggacccgagtgacatctactggagcaagcaggggctgcacgtgagcaggcagccattcggtcactccccgtcattccaacacaatcgaatttgtgtagaaa

SEQ ID NO: 122544 - DNA, 122 bp, Homo sapiens
catctgggagcacccgtcttcactgggtgattcctccaggggagccacagcctcaggaagcgcgggggcggcaggggtgggggctgagggccggagatgtggatcgctttggatatcctgag

SEQ ID NO: 122545 - DNA, 122 bp, Homo sapiens
gcagcagccagacacctcccaggaacccaatgtaagccctgtatcgatggcagcttcctgcgaagccactgtgagcgtgtgaaaaatccccaccgtaggaacaaaagtttttgtatctaaaa

SEQ ID NO: 122546 - DNA, 122 bp, Homo sapiens
aagtagtccagaggcacccttggatttgcacagttatacttaaaaacccagaagacacttcgcccttgccctaggatcaccccctcaactccctagtccctggcaatcattagtctactttc

SEQ ID NO: 122547 - DNA, 122 bp, Homo sapiens
cctgggggcccagccaggtatccccgtctcggcaggtgtggttcctggaagctgcagagacggccccaggatggggcctcagctgaccgtccctcctctgcacccactgtggccgcagcctc

SEQ ID NO: 122548 - DNA, 122 bp, Homo sapiens
tcctggcatcctggtctcctgcactgagctgtggtgagcacatctgggttcctctggatacgtgtgcagggagggggatgcactgggtcgggtcaatgatgagaaccttatattgttctgaa

SEQ ID NO: 122549 - DNA, 122 bp, Homo sapiens
gaatgttcccaaactctggctaactcactcccctgtgagccatcctagggctctgtggcccgggaagagacgcgtcaactccgcgggtctgcgcgcagtccttagccgcaaagtgctgcaag

SEQ ID NO: 122550 - DNA, 122 bp, Homo sapiens
ctcccaggttcaagcaattctcttacctcagcctccagagtagctgggactacaggtgcacgccgccatgcctggctaatttgtgaagcttcttgaaatatgaatccagtggtattcagatt

SEQ ID NO: 122551 - DNA, 122 bp, Homo sapiens
taaaatccttttaaggttttaagaagagcattgttatctctgtggtactgacgaagaccccgcaagctcaccgagattaagtgcccctgcctaaggttacaaagcctcttatcctcaggcca

SEQ ID NO: 122552 - DNA, 122 bp, Homo sapiens
tgcagcacagtggggctctgtaagaagcgacccgggcagcttgagcaggggcaggctgggcggtgcctacgggtctctgtccaccggagcctctgttcagcccacctcagtgtcgctccgga

SEQ ID NO: 122553 - DNA, 122 bp, Homo sapiens
aagtgccccacccaccccgaggctggccaggtgtgcacccagcagctgctgagagcagagcgtggggtgtctgcaggtgaatcccagctctggctggtcaggttttgctgtttctgccacca

SEQ ID NO: 122554 - DNA, 122 bp, Homo sapiens
gggttgttaccagcttttagggaccagaaaacccaggtctgtctcacctggacatgtgtccgcagcctgggcaggcaggttcttgatatgcaggaacaagactagcaggacagcgagccccc

SEQ ID NO: 122555 - DNA, 122 bp, Homo sapiens
gggaggcccagttgccgcgaggccagcggggagcggggccagccccgcgcccctaggatccggggcccacccctgggagagccacctcctctgggtgtgcgagttccacatccccaagacgc

SEQ ID NO: 122556 - DNA, 122 bp, Homo sapiens
tattgtcaatactcctttcagagtagtgccttctaaatatataagggtaaacttacaagccgtctgaggttttatcggctaatttccccaaagcagatcaaatcctctttttgaaccccttg

SEQ ID NO: 122557 - DNA, 122 bp, Homo sapiens
gatcggggcgctgattcaagtttcggagcctgttaaggctgcgcttggagcccgcgcaggcgagacgcggcggggcagggagaaggcgcccggagcggccacttaggggcgctgtgcgtgcg

SEQ ID NO: 122558 - DNA, 122 bp, Homo sapiens
agcggggacgggcgagactggcataagcgtcttcgcgagggagcaaggcggcctgtgggtcggcctcaccccggcctccgacctgaagatcccagcatgcagcgcgggcgcggggcccgacg

SEQ ID NO: 122559 - DNA, 122 bp, Homo sapiens
ggactcaagctctctggtttggattctaagtttttggagcctgctgtgactcttccctctcgccctcctgctcttggaggagtggactcccagcatcacctaggcttgctgtaattaggcat

SEQ ID NO: 122560 - DNA, 122 bp, Homo sapiens
ggactcagtggaagtgggggtaaaggatcccgggcatgctcagtcctccgtggtgagtgccggcagtgatgagatttcctcctgtaatggtctgggggcttcatcatgagctgcacccgaac

SEQ ID NO: 122561 - DNA, 122 bp, Homo sapiens
ttctcggtgctcggggaggggacgtggcactcttgtggcccttgccgtggtgagcccccacgccactgctgtcctgagcactcacagcattgcccccatgtagtcctaagggtggtcctgga

SEQ ID NO: 122562 - DNA, 122 bp, Homo sapiens
cgtaggagggcgctcctgtgaccttccttcttaaaactaacgccttctgttggtggtgggcgcctgtaaccccagctactcgagaggctgaggcaggagaattgcttgaacctgggaggcag

SEQ ID NO: 122563 - DNA, 122 bp, Homo sapiens
gggggctgacaggtagtactgctcactcagctatccctttctcctcagcacaaggagtgacggcctgaccccctgggctctaaagaggaatgtctgctgttgcacatctggctgaggccacc

SEQ ID NO: 122564 - DNA, 122 bp, Homo sapiens
gcttgcccccaggacgggacaattcacattcacatcttcctgggcagtccgtgttctcagcggctccacagggctgtgcttagtatcagaagattaaagtcaaacccgaatgctgaaaaagc

SEQ ID NO: 122565 - DNA, 122 bp, Homo sapiens
ttcaccaccactgcgagcctcaaggcccctggcaccgccacagcaagggaaaaaactttgcgcgtgcagcccctcgatttcgcttcatgacaaccgtgctagagattggcgcccccaatttt

SEQ ID NO: 122566 - DNA, 122 bp, Homo sapiens
agataacggaagattatggggtcctggattcccagggacctcggacttctaaaatccagacgtcctgcaatctgtcttaggcccaggcgtggcagccccaccggtcgagtgggcgggtcggg

SEQ ID NO: 122567 - DNA, 122 bp, Homo sapiens
cccacgaggcccgccctcggatgccccgcctgtccccgcaggtgcgcagcgtggccgtgacgcacaccttccagatagccaaggcccgcgcccagctcggctacgcgccggataagtttagg

SEQ ID NO: 122568 - DNA, 122 bp, Homo sapiens
cactcccctgacgcaggccagggcaaaggcctcacgccccgggatagacaggaagtcccacgtctgctctgcccctaggtcatgcccgtgctgacgccacatcgccagggccgcactccatg

SEQ ID NO: 122569 - DNA, 122 bp, Homo sapiens
ctgatatgcccttgtagtgccttttagttgatgcgtgtctctgtataccttcttttctctcggccgtttcctgttcttctttgcccctctttgccagcacttatctgtggaaggcatccagt

SEQ ID NO: 122570 - DNA, 122 bp, Homo sapiens
aaatctggactccagagtttaagcgacccttcactggcttttcccggtgtctttccctctcgcctcattttcccctctgtgaaccgggtaaaggcatgagatgcggttggtggggtagaggg

SEQ ID NO: 122571 - DNA, 122 bp, Homo sapiens
gtccaactgcctgctaagtgagggggaaggactgcagagcttggcctggcagggggccagcgggctggtctctgcagatgctgcggtgtttgataagcaatatgtgcacttggcggcaggag

SEQ ID NO: 122572 - DNA, 122 bp, Homo sapiens
ctgctcccctgtactcattagcaacctcacccaccctactctcaaagcacacttggctctcgtatccaggagctctgcatctatagattcagcaacagcagatggaaaatattcagaaaata

SEQ ID NO: 122573 - DNA, 122 bp, Homo sapiens
ttctgttaattgatctgggtgttcacttggtgaaaagtctggaagctgtacctgcgacatcgcactttcctaatgtacgttatatttcaataaaagatttttttaaattggactgcttgaaa

SEQ ID NO: 122574 - DNA, 122 bp, Homo sapiens
gcgtccgcctggggcaggtcagaaaagggacgcgaggcggcgctgtcacagcattctatgcgccccagcgccctgggccgcgctggtcttgtatcatttcagtggtccctcccgtctttgac

SEQ ID NO: 122575 - DNA, 122 bp, Homo sapiens
tacgcgcggactagcggagctaggggaaggtgccagggtggccgccgcctcagtagcacgcggacggctggaaagtcagcccccgtttccgcctcacccaggattgctccactcggggcctt

SEQ ID NO: 122576 - DNA, 122 bp, Homo sapiens
gtcactgggaggttgtgtgtagtgcggtgggctctgtctgccagagccttgccagccgagcgtccaggggccagctgtgtccatcagcatcacttgggtatttgtgagaaacgcacactttc

SEQ ID NO: 122577 - DNA, 122 bp, Homo sapiens
ccctcccaagaaactcatgctcaactctgtctgggtgagccctcgccatggaggcagacacgtgatgatggaaacacaacacaagctggtggcaagccaggcaagctcccccacccttggca

SEQ ID NO: 122578 - DNA, 122 bp, Homo sapiens
caaggtggcttatccaacatgctcaaactcaggtatccagagctcttccggctgccctcacgcagccgaaattagtgggggcagacccgggctgtaaagcatggtttgaggacacgccagat

SEQ ID NO: 122579 - DNA, 122 bp, Homo sapiens
gcccgcaggcgctcctccatcagcccccgaagcttctcccaccggctctccagctcgccccgcaggctgccctccagcttcagccgtgagctctccgaggccttcattctctgtggggagac

SEQ ID NO: 122580 - DNA, 122 bp, Homo sapiens
acgaatcctgggccagaggccacaaaggccctcccatttttgtcctctgtgtggcccagccgcggtggagcaagggagaccaggcgcccttccctgtccccgtcctcaccgtgaataacgac

SEQ ID NO: 122581 - DNA, 122 bp, Homo sapiens
ttattttacagctgaataaacgggctcagagagagtaagtaacaaagaagagcagatttacggcccgtgacaagcaagtctagagccagaattcaaacacaggcaagccaactccatagctt

SEQ ID NO: 122582 - DNA, 122 bp, Homo sapiens
ccagatgctctgcgccatggcacccccctcaccaccccctctgcgtggcatggcgagggccgctggagcctgtgtttccagcgctgcccgcgcagctgtcacttacagcgatcagtggaaaa

SEQ ID NO: 122583 - DNA, 122 bp, Homo sapiens
gacaggcaaggtcacggcatccaggctgcaatgcaaatgcctaggtagtgcgcacggcagcggtaatccagaatcctgcccaaagagggtcccgcaatcaccgcccacttccaggcgggctt

SEQ ID NO: 122584 - DNA, 122 bp, Homo sapiens
gccgagggggcggagtcatggaaacacgtgccacggcctggatgaacctgcagggccgaacgctcagtgaaaccagccaatcaccagagcacaactgccgcggcactccgctgaccacccac

SEQ ID NO: 122585 - DNA, 122 bp, Homo sapiens
gtcgggctcagagtcaggaggagccacgaatgaatccaaatctttctagctccaaacttacgggattcctacctctttcctcctgctttaatgaggacagagtgggcttctcagtcccctca

SEQ ID NO: 122586 - DNA, 122 bp, Homo sapiens
gatctgctgacgttgagcccaacatatcccagcgcctgccttttgtaaactctgcaaagacgctggcatcctaaagagtccctggctcctgctggatacgttaaccgaggcatggtagacct

SEQ ID NO: 122587 - DNA, 122 bp, Homo sapiens
agggacaggggcttcagcagggagcccccagaccggccctgacaggaattcaagacctggcgcctgctcattcccccagtcggggcggcggcggcaagcctcggccggcggcgatctgcaca

SEQ ID NO: 122588 - DNA, 122 bp, Homo sapiens
ggcggcaggccagcatcaagctgtcagccaggtggaggcgaggtgctgccgtgcaaaagccggacggacagcgagtggggaagtgtaggagagtcgggatgttggttgagccatttaacctc

SEQ ID NO: 122589 - DNA, 122 bp, Homo sapiens
gcttctgcctggccacccgcaggagaatgtacacagtgcagcctctactgctaacgtgggcgcttcgtttctacagagtgcattccattagcctagaagtgtttggggtcacccagtgcacc

SEQ ID NO: 122590 - DNA, 122 bp, Homo sapiens
tgtcttcggcttttatagcctgttgcccacttcgaagttttctgctggacagagggcaggcgggaggttcgttctggtatccggagtgggagttgaagagaggtgtctgtcaaaagaccaaa

SEQ ID NO: 122591 - DNA, 122 bp, Homo sapiens
tgatgtttaccaatctgcttctgtaacatccgtcttccatctgctgccaatttaaaaacccgactgcgccatgtcaggggtataacttgcctgttcctccagcctacggagcctctcgaaaa

SEQ ID NO: 122592 - DNA, 122 bp, Homo sapiens
taaatgcggctacctgattgagttgtagccaaagaggtcagaagtgaggtccaccacttccgggcttatccctaaaaccttaaacatattgcttctacatgccttcctcttctcccagcagg

SEQ ID NO: 122593 - DNA, 122 bp, Homo sapiens
ggcacagctgggatcttggtatcagccaggatattcagatattttcaaccaatgccataacgtggcaggttttctggggaccaaatgcagtggttttagtttctaattactgccgcgtatga

SEQ ID NO: 122594 - DNA, 122 bp, Homo sapiens
tttccagagttcatggatggaaagcaccagacgagcagatggcatggtggaaagagcctccgagagggaattaggataactgagttccagtcctgaatcacttatagactactatatgtctt

SEQ ID NO: 122595 - DNA, 122 bp, Homo sapiens
ctcagaggggccagggcctggcctagcctggaatctggatggacctcttctgccctggggcgcgccgtttacccaatcctgacctcagagagcgtctgtcgttctggtgggaaaaccgagac

SEQ ID NO: 122596 - DNA, 122 bp, Homo sapiens
taaagggctagctcacatttcctgtgaaactcaggcaagtttcactgtggctttaccctccgtgcttagttgagccatttccatttaaataccccctgacccaaggattacctcaatggact

SEQ ID NO: 122597 - DNA, 122 bp, Homo sapiens
ggggcggccatcaggactgcccgggggttggcgccctgctgggttccaagccggtgggcgcggacagtgtggcgggaaggccgggcctggcgggtgggggcgcggcctggcggtgggggtgg

SEQ ID NO: 122598 - DNA, 122 bp, Homo sapiens
tttggtgtggagagtacctagagattcctaaaaaagcaaagaggaagaaggtttgctgtgcgcatctgggtaccctgctctatctccagggttcccaggatctctctgttacagctggtttg

SEQ ID NO: 122599 - DNA, 122 bp, Homo sapiens
tgatttaaatcagcagacggcatgagggcctcatccaatcagctgaaggcaggggagtgtcgcctaagggcccggaggaggaattcccaggaccgccacagagaagcccggcctgagcgcac

SEQ ID NO: 122600 - DNA, 122 bp, Homo sapiens
tcgcttgagtctctatcagagggcaaggtatgagcgacctacccccgtgtccgtagggcacggggcatcgagcttgcccttacccagtcgtatgctcatcgtcccaggtcaagggggcatgc

SEQ ID NO: 122601 - DNA, 122 bp, Homo sapiens
attacaatgagtcttcctcagtagtgctctcaggtttgtgattgttctgccccctagaggcggctttgagaagtgcttgagatgaacgtctctgtgactccctcatcagcaggctcagctta

SEQ ID NO: 122602 - DNA, 122 bp, Homo sapiens
gtagaatagggcctggcaaaacctttgctagcaaagcgccttttgtgccgggctgtggctcgctatcgacatctcgtccgttaccaaggctgggtttcctactgatttccctcctcctctgc

SEQ ID NO: 122603 - DNA, 122 bp, Homo sapiens
tgctccccgctgcagtgattggccgaaaggagtgggcgcgccggggcggggcggggtctccgctgcctcagggacgggtcttttgaagtgcctggtgtgacccatcttccgtgcttgaaatc

SEQ ID NO: 122604 - DNA, 122 bp, Homo sapiens
aagccttccctctgtttctgacaccaattctcaggcctagtgacctagaaagtgccagagcgcctcagaaactgacagtgtggtgggtgcaggtcatttcccaacttcagaatatgcacttg

SEQ ID NO: 122605 - DNA, 122 bp, Homo sapiens
gatggggcctgagcttcagggtcactgaggcacctctgggatccaggccacctggagccccggacctcccagactccactcacccattccctctccccgcacggcactcacaccaggggcgg

SEQ ID NO: 122606 - DNA, 122 bp, Homo sapiens
actctcttccccatttaaagcttgtaaaacaagattcttctttttccaaggcctcacccccgtctggccagctgtctcatgcttagcaagtctttgagacagggactttctcatagtgggga

SEQ ID NO: 122607 - DNA, 122 bp, Homo sapiens
acagggttaggggaggcttaagacactgtggggacctctgggtgacccccggctctcttacgcgagtccagttccttctgcagggcctcacagatggtccgggcctctcctaggtctttatt

SEQ ID NO: 122608 - DNA, 122 bp, Homo sapiens
gctgctgcttggattcgctggtggaggaaagtgcgacctggacctgcgcttaggggctcccgtccccttacttcagcaccagaggggatggacagcgtctccggactgagctgcagccacag

SEQ ID NO: 122609 - DNA, 122 bp, Homo sapiens
gtcttttaggagacatggccagaagggccgtttacaaaactttggcagaagaaaaaaatacgttgtgtatgggagtccaaaactaccgtcatgcttgcacagactctaaatacacattttcc

SEQ ID NO: 122610 - DNA, 122 bp, Homo sapiens
tggcatctggctgcgttgtggacgggactcctgagggcgtggtctagggctgcatcggggcgggaccctggtggggcgtggccctgggagggtgtggcctcgagcggggcgtggcctcgggc

SEQ ID NO: 122611 - DNA, 122 bp, Homo sapiens
agttctcattctgcatccctgctgggcgagaggccatttctcccaaggtagctggggcatcgttattgatgaagtggacttcaagtgactagttaggaaagtcctcagggttcctttcccag

SEQ ID NO: 122612 - DNA, 122 bp, Homo sapiens
cacgtcatcaggtctgtccagcagcgagagcctccctcccgggaaacccaccgacgctcgcgcccaccctgatcagccccggggagcagctcccccaacaaagggtggatgtgtagaccctc

SEQ ID NO: 122613 - DNA, 122 bp, Homo sapiens
ccgcccgcggtgaaaataagacgcggggccaatcaattaccgagccattaagggcgggaacgcggagggagcggcccacagcccctgctccccagccgaacatcccccgagccgcaggccgc

SEQ ID NO: 122614 - DNA, 122 bp, Homo sapiens
cccgggacgggcgggggcagggggtggcggggcccgagcgatacagcccctggcgcagtccgttcctctagacaggtgagtcagcacacctgggcggccccagccaccaaggggctttgtgg

SEQ ID NO: 122615 - DNA, 122 bp, Homo sapiens
taatgcataatgcatggatgttactgagaggtccctattttgtcctgaatttatctctctcgcaaacccccagaggactctattggttcgttgtggttctttactgaacttcgtgcggctga

SEQ ID NO: 122616 - DNA, 122 bp, Homo sapiens
gctcgcggcgtgcgcagggtcctcgtgctgctattaacgtatttgcccatttgtaaagcacgattttaagggatggtgagttaaacaccgctttttcggggagggtgacggggcgtgggagg

SEQ ID NO: 122617 - DNA, 122 bp, Homo sapiens
cgagtctcctcatagataaggccagaaattcgcttgacaccgccgcgacgagcaaggcgccggatagctggcttagtgatgccctggatgttatcgcgcaaaaccttgcgatgacgcttagc

SEQ ID NO: 122618 - DNA, 122 bp, Homo sapiens
atgggggcagaggctgattccaaggtgaaggccattaggacccagcgtggaggcagaggccgggtccagggtgaaggccattaggacctggagtgggggcagaggccgagtccagggtgaaa

SEQ ID NO: 122619 - DNA, 122 bp, Homo sapiens
tttgcacgtctgtgtttgggtacaaatctgagttggcatgaagataagaatggacggaaccgggaggttaacacggggtggatgtaaattagatgaaaaaagactaccctcaaaacaagcgc

SEQ ID NO: 122620 - DNA, 122 bp, Homo sapiens
gacccatagactagcagggaggctgctggtgtcatggaaaagctaaaacccagagcctctcgcctgaacccaagcccctcgcagttatgtgggttcacagccttggctgctctggcttggtt

SEQ ID NO: 122621 - DNA, 122 bp, Homo sapiens
gttccaagtgacaagcagaggcccctggcttgaatctggggtcggttattactgctaacccgaaccaaaccccttccctcaggagacgtctcttttctaagctccctatgtccagggacccc

SEQ ID NO: 122622 - DNA, 122 bp, Homo sapiens
ccggccagcggggacgtggaggtgacatttctctgacccacaggactgtgggcgccctgccgagcgtcgcgcggtcttggggcgacctgcagtggggcccctgcggcgcagcgcgcggtggg

SEQ ID NO: 122623 - DNA, 122 bp, Homo sapiens
ccacacggcccccgcagggcacagccttacgcagcccttgcgttgcactgattccccggccgcgcccactgcatagtggctctcctcgtcgtccgcatcctccccagaagagtctctgcagg

SEQ ID NO: 122624 - DNA, 122 bp, Homo sapiens
tagagggatgtttgctcgttcctttcccaagtgggtgttggggcggtgggggagagatttcgtgcagtttcttggtgatgaggtaatgagttccagatttcaggacagagcagagtgcgcgt

SEQ ID NO: 122625 - DNA, 122 bp, Homo sapiens
tctgtgcatattcaaatgagcatgttctaaactacagagtgtgattggcgtggagttccacgagctgaggcatcccttagatgtgattgcaaaggtatctgtaacatctgttgctttggagg

SEQ ID NO: 122626 - DNA, 122 bp, Homo sapiens
ctcaggtgatccacccgccttggcctcccaaaatgctgggattacaggcaggagccaaggcgctcggcctggagcctcttttataagggtgtgaattccattccggaggactccaccctcat

SEQ ID NO: 122627 - DNA, 122 bp, Homo sapiens
ctagggtaggaaactggacggcatggagacttctgtgttaaaacacaagagaacccttaacgttaaaacctcaagcttccggagcatgtcggcgggagggacttaacagcggaacccaacat

SEQ ID NO: 122628 - DNA, 122 bp, Homo sapiens
tacccagctccaggagctccttcacgatggcttttccgatgcccgtggccccgccggtgacgatggccacttggccctgcagcaaaccaggcgccaggtagctcctgcccttagcccaggag

SEQ ID NO: 122629 - DNA, 122 bp, Homo sapiens
tgtttgctggtcagacagacaaatgggctagagtaagagggctgcgggtatgagagaccccggctccgccctggcacgtgtccttgctggcggcccgccacaggcccccttcaatggccgca

SEQ ID NO: 122630 - DNA, 122 bp, Homo sapiens
ggacatcagtgagtggcataagggcatccaggaggagatggaagcgcttgtgaaggatcacggtaggttgcactgagtcaatgccctctgcagatgtttccgcttcagtccatcaactggca

SEQ ID NO: 122631 - DNA, 122 bp, Homo sapiens
tgtgtcatggatatactttatctcattcaatccttaggatggtcttgtggtcaaaaggttcggagagatcccatcactgacccagggtcatatattagcaagttgcatagcaggatttggat

SEQ ID NO: 122632 - DNA, 122 bp, Homo sapiens
ctaattttttttgtatttttcagtagacacagggtttccctgtgctagccaggatggtctcgatctcctgacctggaacatcacccttttgcagacgaagaaacaaggaggaaatgcctggc

SEQ ID NO: 122633 - DNA, 122 bp, Homo sapiens
ccctggcttctaaccagcaaccagcgtgatctttaaaaatgtaactcgaggtatgagaatcgcttgaacctgggaggcggaggttgcagtgaactgagatctcgccactgcgctccagcctg

SEQ ID NO: 122634 - DNA, 122 bp, Homo sapiens
gagttccgtggcaccaccagagctcactgcagccttgacctcccaggctcaaatgatcttcgcaacctcagtcctcagagagtagctgggataacaggcacacacaccaccgctcccagcta

SEQ ID NO: 122635 - DNA, 122 bp, Homo sapiens
attgtcattgcaggatgtacgctgattactactgagcaccgactgtatgccgggtgccttcgtggcacttctcggttgcacgctggttagtattgagcaccgactgcatgccgggtgccctc

SEQ ID NO: 122636 - DNA, 122 bp, Homo sapiens
aagcttgtcagcgaaaacgctgtgctgagcccggcagaagtctgccctcacactcagaatcgccgtaaatgtgcaacgtatattccaacgaaaaacgctggcgagcggggaccgggcattga

SEQ ID NO: 122637 - DNA, 122 bp, Homo sapiens
ctgcacagacaagggccagggttcagacagaagacaacgcccacaccagccacttggatccggaagattcctgtacacacttgcatgggtgtaaaattactaacctggtggctaaagaggta

SEQ ID NO: 122638 - DNA, 122 bp, Homo sapiens
aaggaatggaaggagggggagccgacaagtccacgttcaccgcatctgcgttggcgattgcgctattgatgcgcatgcgcaaaaggaagaccctgattggtttgtgggacggtctcaacgtc

SEQ ID NO: 122639 - DNA, 122 bp, Homo sapiens
gtcccaggccttaggagtaattacagcggcccgtgattggctagagctcaccacagaggccggttattggctcagcctcaccaaagtggcttgtgattggctccagaggactaaccggggac

SEQ ID NO: 122640 - DNA, 122 bp, Homo sapiens
gatcaccttacatttttggttgggggcccccccctcgtgccctgtttatgtttgactaaccggaacatatgacaggatgaaatgtttggcagaagaaacattgtattggacacttaatagcc

SEQ ID NO: 122641 - DNA, 122 bp, Homo sapiens
agttctgggaccgttaattcatggatcctcagatacactcgggcaattgttctgggtttccgggaggtgcgagggcgttcctcctccagggcgcgtgcaggccacgctgagcagccctgctg

SEQ ID NO: 122642 - DNA, 122 bp, Homo sapiens
ccagaaaccaagttcagtaaaaatttgtccatttatagaaagcatcgttagaaattataacggttgctacattggacaaatatacagatttctttgtgtgtgcatgggtttgattttttttt

SEQ ID NO: 122643 - DNA, 122 bp, Homo sapiens
tgaatttaaatgtacagagccacatgtggcagtggctggtgtactcacagtggtcgaaaacgtatcctcgtttcacccccaaacaatgaactcactacctctctcctcccagtctctgaatc

SEQ ID NO: 122644 - DNA, 122 bp, Homo sapiens
ggcccaggatctcgggatccccaccctgtctcggcgcgaggagggcaggcgaagtgggggcggcctcgggaggccctcgctcaccacaggcgccctccgcagtgagccacgcgcgcctgcgg

SEQ ID NO: 122645 - DNA, 122 bp, Homo sapiens
gggatggagaggggctgggccaggacaggggactgggcagggctgcccgaaagtcggggccggggccggggccggggccggggcggggccgcgccgggggcggaccccgggcccggcgcgtt

SEQ ID NO: 122646 - DNA, 122 bp, Homo sapiens
tcgcagtcttaaggccccgccttttcagacagcttccgctgggcctgggccgctgcggggcggtcacggcccctttaagcctgagccccgccccctggctccccgccccctcttctcccctc

SEQ ID NO: 122647 - DNA, 122 bp, Homo sapiens
agctaacccccagccacggggtgatgcgcggacacgaggctctcgcctctcccgttcggacgccctaagcctccggacttaccgttggcatcccaaacgcctttccggagccacaaagacag

SEQ ID NO: 122648 - DNA, 122 bp, Homo sapiens
aagcatatgttagtctaagtacaaataattgtcacacagttacaccaacctgaacaatgacggcaatcttgtctggcagagaggagatatacatatatgtaagaaagaagaaggcaaaaata

SEQ ID NO: 122649 - DNA, 122 bp, Homo sapiens
gcgggaggagagagcggcgcacggcggcggccacttgttgcttagatcccaggaacttggcgcttcctgcccttgtccccactttacagatgagagcgctcaggcgcctgatttgacaggtg

SEQ ID NO: 122650 - DNA, 122 bp, Homo sapiens
cactgcctgctgcacctctattaaagagctgcaaggtggtcacagccctgcctccctcaccggtcatctagagtccacatcctagaatcatgctgcacactgaaggagctcagcatagctgt

SEQ ID NO: 122651 - DNA, 122 bp, Homo sapiens
gatctctgtcccctccttgctacccgtcctgccccgagggtgccctggcggaggttgagtcgggtcatccacctgcactgggtgcccccaaggataggaaggttcaggcaaccggctgccgc

SEQ ID NO: 122652 - DNA, 122 bp, Homo sapiens
tggtgccagtggtgtgcatgtagacacctgagcagcaagccggagcacggaaggtaggagcgtgtgccgggtgcagggtgctgcatgctcacccgaggggcacggctctgagcatggaaggt

SEQ ID NO: 122653 - DNA, 122 bp, Homo sapiens
gctaaccgcgtctaaacagccagccacttgtaagccccacctatattgaaattacggggacgctgctgttttccgattgcaagattttcctgatccatgcaattactttcgctgccctctac

SEQ ID NO: 122654 - DNA, 122 bp, Homo sapiens
tcagggaggctgggccacagagcccagcagaaaggcagcaaagcaggtttgggctggaatcggggaacaagcgggtcacggtacatcgaggaagcagggctggagcttacctgagaaagcga

SEQ ID NO: 122655 - DNA, 122 bp, Homo sapiens
tgccatggggttgggcagatactgggacgctccataaggctgggggtgatacatcacctccgcacaactcatggcagccggggcagtggcggcccccgagctgccgccgccgctctacgcgc

SEQ ID NO: 122656 - DNA, 122 bp, Homo sapiens
gagccccgccggccccagctcccgctccccaggaagcgaagggttaagctgtcagcggcgcgatgttaaacaggtgtcaaaggcgccccatatatctgcagattgaaatcaaattcttcgcc

SEQ ID NO: 122657 - DNA, 122 bp, Homo sapiens
acagccaggcccaagttgccacaagcctggccccgctgaggttcacgccgaggtcccccccgaagttcccccctgagggccccccaaggttcggctctgaggttccccccagaggatccccc

SEQ ID NO: 122658 - DNA, 122 bp, Homo sapiens
agacccagctggatgctactgtgctactgcaacagtcatggcaagaagccacggtcacaccgaggccctagagagccaaaatcagtgctggggcaatgctgacaggatttgctgatggatta

SEQ ID NO: 122659 - DNA, 122 bp, Homo sapiens
cacttcccactctctaccctttccattaaaaatattttaatgaataaaaagtcatcttggcgattaaacagtgtctggattcaggaagcaagacgctcgcagttaaaaaccgttgccactcg

SEQ ID NO: 122660 - DNA, 122 bp, Homo sapiens
cacccgccgcacccgccgcacccgccgcacccgccgcacctgcccgctcgccgctcggtccgcagtgtctccgcgcgcccgctccgcccgcatttcaagccccacaggccccgcccccgtct

SEQ ID NO: 122661 - DNA, 122 bp, Homo sapiens
tttaagagagggtcatggggcacgagactgaccgggcccctgcgggagttactgcgcatgcgtgccgtgggcccgggaggagtttgccggggaggagtgggtttggaatcggggttaaagga

SEQ ID NO: 122662 - DNA, 122 bp, Homo sapiens
tttacctcgttgcactctgagaccaagatgggtcaccagaagctatgctggagccacccgcgaaaattcggccagggttctcgctcttgtcgcgtctgttcaaaccggcacggtctgatccg

SEQ ID NO: 122663 - DNA, 122 bp, Homo sapiens
attctctgaccttggtttccatgaaaccacactgtttttctctcttcccagcactcatttcgttaccttccatgaatctgctcattctccctctaccataattacgtatgctcttctctggt

SEQ ID NO: 122664 - DNA, 122 bp, Homo sapiens
cgcccagcgcaggagctcgcacccaattaatcctctggagatggccgcggctgttgttaccgggcagttcatctccggctctgggatgaggctgggacgccagcttccaacttccagaggaa

SEQ ID NO: 122665 - DNA, 122 bp, Homo sapiens
gttttaatagcttaacacaatggtaatttatttccagcttatgtaacagtgcttattgggcgctcagttgaggctggaaatagacatgtgagtgttttatggactaggccttgaagaagtgt

SEQ ID NO: 122666 - DNA, 122 bp, Homo sapiens
cccgtggagacacatggctgcatgctaggccaggctgctgttggcactgggcgcgctgcccggaggcctccgagatgcttgacagcaccacctccattctttccggttatctgtcagaaatg

SEQ ID NO: 122667 - DNA, 122 bp, Homo sapiens
cagagagtgttgggctgagctgtataaggatactggtaagcaagctgtatatttttaaaacgtttctaaagctgctccagagtttctaaagcttgaatacatgatttacgtattcaagagtt

SEQ ID NO: 122668 - DNA, 122 bp, Homo sapiens
tggcactgctgttacttgttaacgctcgaagtcaaaagtgtttggagctgcctctggtcacgactagttgggggcagacagagggtggggtgggggggctaccattttgttgttggcaacta

SEQ ID NO: 122669 - DNA, 122 bp, Homo sapiens
gcctccaccaccgcggccagcagctggttgttcaggaagtcaatgaccgggccccgagggcggtactggaactccgagatgaccatccagtgttggatggggcttcccgaggccggtgctgc

SEQ ID NO: 122670 - DNA, 122 bp, Homo sapiens
agattccaggaaggcttccacgaaagggaaacccccggcgcatttcagcccgcagccccgcgcgcacaccgagcgcacatccccggccctgctcttgtcaagtttgtagcctgattcttcgg

SEQ ID NO: 122671 - DNA, 122 bp, Homo sapiens
cctaaggtaaaggttcttttcctttagtgctttaaatatttattgcttctttctcctggccgatagggtttccaatgtaaagtctgctgccagatgtgttggagctcccctgtatgttattt

SEQ ID NO: 122672 - DNA, 122 bp, Homo sapiens
gaaggacgggcgtgggggtgaggagaggtggggtgcagacacagctagatggaaggaatacgttctgatgctcgacagcacagtagggtgactgtagtaacaacaatggattgtgtattttc

SEQ ID NO: 122673 - DNA, 122 bp, Homo sapiens
ctttacagaagagttccatctggtaagcccgggtggtgagcgaagccaaagatgacaacacgagaaggggtcaaagccaaggtttcctcacgctgcctttgtcttcttcctgcagcctggcc

SEQ ID NO: 122674 - DNA, 122 bp, Homo sapiens
agaacgcgtgtgttcaagtgtgggcgtggcaggcgtcgtgtgctcgccccgcgcactgtgcggatcgcccagacagccttgacaggtttttgcagatgtttgggtgctacggtgtggggaaa

SEQ ID NO: 122675 - DNA, 122 bp, Homo sapiens
gcaggagataaactcccaggacgcaaggaagtcagcaaacagctgtgcaggcgtgagctccgcacagcgcacacggggccggcaggctggggacagtgccgccaagatgcaggcagctgagc

SEQ ID NO: 122676 - DNA, 122 bp, Homo sapiens
gcctgggttgaggagcctcccgggcaggtccttcccccagcgctccgggccacgggcctgcgcgcctgacggggactcagtgaaaaacagctgcgaacacgaggcctagaaccagctgcaca

SEQ ID NO: 122677 - DNA, 122 bp, Homo sapiens
gtaaaacaaggagataggaaatgcatgctatactaaaagtttgttcaaagaacatccgcacgtgcaaatgtctgagaccagaggctgcaagcctccctgtcgctcttagggcttcggtagcc

SEQ ID NO: 122678 - DNA, 122 bp, Homo sapiens
gacggtggggaggcctgcagagagacgcctggttacacaggtggagcggagcggtgtgcacgcacacaggtgggtgccttcaccagcaaaaccctcaaggacacgctttctcacgggaatat

SEQ ID NO: 122679 - DNA, 122 bp, Homo sapiens
ttgcgcatgcactagctggccgcaagctcgcaaagacgctggctctaggtagccggttttcgcgagtttgtggcacagtgttggactgaacgagttaaggaacctgttcaaggagggactcg

SEQ ID NO: 122680 - DNA, 122 bp, Homo sapiens
cttccctggaaatgcagagggctttactaacagaacccacagagccgtttcctgctccctcgagctgagccgcaactcttcaagggaggctgctagagccccaggtgtgaagggcattctgg

SEQ ID NO: 122681 - DNA, 122 bp, Homo sapiens
gtcctgcgtgacgtggatcacttgctgcccaggcggcgggagcggagggggcgccgaggccggattcatcttctgcaaaaagaaggtcagatcagccttttatttaaagtcggaggaagtgg

SEQ ID NO: 122682 - DNA, 122 bp, Homo sapiens
tttgcataaaccaatatatttgcatgtaaatacaggttactggatgaaaatatgtttgaacgttgttcgtgggtgcccccgtacctgtcactatcccttggtactcggcctcaattccttct

SEQ ID NO: 122683 - DNA, 122 bp, Homo sapiens
caggtgcccctcttattatatgccagccagttgttttaaaggccatccatgggaggacaccggcctctaggtcaagggagctgtgaagggagacaggactgacaaggagcccagacagacac

SEQ ID NO: 122684 - DNA, 122 bp, Homo sapiens
tgacctcgtgatctgcccgccttggcctcccaaaatggtgggattacaggcgtgagccaccgtgcctggcccaaggaagacgaggttttaaatcataaagattctaaaagactgccttgaca

SEQ ID NO: 122685 - DNA, 122 bp, Homo sapiens
aaaatattagaggaaggaatcagaactgagaggtgttcattcattcgtttattcacttaacgagtgtgtaggcaccttctaagtgctccgcactggactgggcattgagagggaaatgaaac

SEQ ID NO: 122686 - DNA, 122 bp, Homo sapiens
tttggccggggttcctatttaccactcagatcgcctccaccaccctctacgctagggtctcgggaagccccagggcagaaagctgaaaagctaggagaagacttggtttcgaggacctcttc

SEQ ID NO: 122687 - DNA, 122 bp, Homo sapiens
caagatggaggcggggggcacccaacatccacaccacccccggccccaccagagccccagcggaaaccaaggatttccagaatacacatgtgctcacaagtgtacacacgtgttcacaaaaa

SEQ ID NO: 122688 - DNA, 122 bp, Homo sapiens
gagatagtgctccgctacgtgttagagctgctgaggaccttcccttgggctaaaatggtccgtggaagatgtaagcagggctgctttcgacttcttaacgtcacaagtaacagaggtttttt

SEQ ID NO: 122689 - DNA, 122 bp, Homo sapiens
agagatgaaaatggttacttcatctcaatttacagtggcccaatgttattttatcccatgcgtataactgctcgtatcactgtgagactacaagcagcaaataaatgggaagaaaacctact

SEQ ID NO: 122690 - DNA, 122 bp, Homo sapiens
cgggcttcagaaagtcggatggggcagaggatccaggttggggggttggccgccagatggcgctcctcggccaggctggaaccggaggcccttgagaactcgcgttggagagggacctggac

SEQ ID NO: 122691 - DNA, 122 bp, Homo sapiens
gtgcaagaatgggaaaatgcaatcgaagtgaaggagaggccggcgtattttcctgaaatgcgcggcccgcaagcccaaacccgtttcccgggtgtccaggcagcgttctgcagcatctccaa

SEQ ID NO: 122692 - DNA, 122 bp, Homo sapiens
tatgctctcctctgtcacagcatggcctgtcccatgggctctggggatccccgaaagccccgacagcttactgtgggagatgcccggctgcatcggtatagaaatctggtatctgaggctgg

SEQ ID NO: 122693 - DNA, 122 bp, Homo sapiens
cagatgcgggctaggttgcagagaaaaaggaatgcttatatgttgtgggaatcaggaggccggagagatcactgggtgcaacaggaaggttttatttaggtggccactggcccagcggatta

SEQ ID NO: 122694 - DNA, 122 bp, Homo sapiens
tttgctgcctgctgcctgctgcctgcttgtgcttgaaactctgcccttcccacccatgcccgccttccttgcctgccagcaagcaaggcaaggtgggctaggggactggctcctccccttgc

SEQ ID NO: 122695 - DNA, 122 bp, Homo sapiens
aaaaacaggctagtgatgacccagtttggtctgcagattgaagatgtatagaactcttaacgtttcagcttgcaatgtaaatctttttatgacctgacttcttaatgtaatgacgttattgc

SEQ ID NO: 122696 - DNA, 122 bp, Homo sapiens
ccacccacagctcccagctgcacgctgccgcccagggctccaggagacggtactgtgggacgcatctgtctttgttgcagagcctctgcctgtctttgggggttcctggatggaggaggccc

SEQ ID NO: 122697 - DNA, 122 bp, Homo sapiens
ttcgctcttctccgggctcagctgcctttctccgccggtctcggcgagtgctggaactgtcgccagaaagaagcaataaagtagcaaagtgccaaacatttacaagacggactctcgaaatg

SEQ ID NO: 122698 - DNA, 122 bp, Homo sapiens
aacgagcagtttaggcttgaagtgcctcaaagcctttggtttttgttccctcacagggatcgtagaatgagtccctaaaggagactgggattcgacaacaatccttccatttcttttcccag

SEQ ID NO: 122699 - DNA, 122 bp, Homo sapiens
ctcgcggggctcggctccagggcacctggtggctggggagctgtattgttttcctgggcacggaggttcggcgccggttttaggattgtgcaaaaagagagtagaaggtacagagatttatt

SEQ ID NO: 122700 - DNA, 122 bp, Homo sapiens
ccccatcccctaaccctccaccctccttgttttaggagacattactccctagtgctacggcgctttcaactgaaattgttggtggctctgaaaagagcctttggtttaagttggcgcacacc

SEQ ID NO: 122701 - DNA, 122 bp, Homo sapiens
cagatgagggatggcgcaagcacaggcctgcgcgcagggctttaggcagatgagggatgacgcaggcacaggcctgagcgtcgcacgctttgcgtagatgagggatggcgccggcgcaggcc

SEQ ID NO: 122702 - DNA, 122 bp, Homo sapiens
gctaagtctgcagggaatctcacaccactaaaaatggacaggccagggaacttagcttcccggatattgaaaagtaaaggagacctccaagccaagcctgagccctgatttgaggaggtcta

SEQ ID NO: 122703 - DNA, 122 bp, Homo sapiens
cccaatactttgatgtctagaaatggatctcagtcagttgttgttgaagtcctcctaaaacggcatttgatttaattcaacacatactgagaccacagtcagccttctcacaggcgaggagg

SEQ ID NO: 122704 - DNA, 122 bp, Homo sapiens
cacacttaaatatgtttaaaattattaaatctgtttctgttaatctgcaaaaaaaaaagacgtttaggtcagtgtagtccagttaaatattgatattatgaattgcgtccctatctgtggtt

SEQ ID NO: 122705 - DNA, 122 bp, Homo sapiens
ataaataaataaataaataaataagataatttttaatagcaacgtgtcaacatagtgtgacgggaaggagcatgatgagacagaaggaaggtttaaactgggaaatctgagaaatggtatgg

SEQ ID NO: 122706 - DNA, 122 bp, Homo sapiens
ttgtcctgaatataaagcagttttttacatgtctatcttaataaatccccacaagaaccacgtgaggcttaaagagtttagtggcattcctaagtagtataatctactgttaaaatgttaga

SEQ ID NO: 122707 - DNA, 122 bp, Homo sapiens
gccaccggcttgaggagggtgaaagttcaattcttggcccctgaagttagcggaagggaacgggcatgttttggaaaggcccgccgggaattccctcagaaaccaggcgaagctccctgctg

SEQ ID NO: 122708 - DNA, 122 bp, Homo sapiens
aaaagccactggctgggcagtccaaacagggcagggagaaatgtagcaacagcctggggacggctaacagggagagggggcaggcaagagccttctccagcagccaccccgcccaggagcag

SEQ ID NO: 122709 - DNA, 122 bp, Homo sapiens
tcagtgtgcccagtcagtgggcgtgggcgttaccactcctttccacggaaatgactccgacgacccagatgttactaccttttccctagaaatttctgcataaaccgcccctgcatctgcat

SEQ ID NO: 122710 - DNA, 122 bp, Homo sapiens
cctggtctgtccacctcggcctcccaaagtgctgggattacaggcaagagccactgcgcccggccccattacatttttctatggaggagctcggtgactgaggataaactgctctccttcct

SEQ ID NO: 122711 - DNA, 122 bp, Homo sapiens
cgggcctgggacaagacaggcccgggcagagcctggagctcgttgtggtgtaggctgagccgtctcagggcgggcaggccagccagggcctcgggggccagcacgctgagcgcgttgtgcga

SEQ ID NO: 122712 - DNA, 122 bp, Homo sapiens
tttagtgagcacatctgcacattccaattttaatgacagctccttagaatttcttatcaacgaagacactaacaaagaatggcgcattcctccttctcctttctgaggatgccctaccctgt

SEQ ID NO: 122713 - DNA, 122 bp, Homo sapiens
tggctcggagaaggtggcattgtggccagtgccattgtcctgagagacgttggcacccatcgtggggagggagaaggagcccctgctgtcaaggggctctgggtgcccagcggcctgcattg

SEQ ID NO: 122714 - DNA, 122 bp, Homo sapiens
accgtttcttgcttacggctcagttcagacagtatttgttccgggacgctcagcgggaggcggtttttaccggctcactcgagaccccaattccaggcgccctgcagcttccctcagactcc

SEQ ID NO: 122715 - DNA, 122 bp, Homo sapiens
tctcagcagctctcggggggacctgcaggctggggaggcagcttctctctgcaatttggccgctcctggacttgttgcagccaggcttcaaagagaaaccaccgcttcctccccgagcccca

SEQ ID NO: 122716 - DNA, 122 bp, Homo sapiens
gcaaaagccaaaaagatcagggtctgccacactgtctccctaccgaagtagaatccaggccgccctttggttttcttaaagaagtccccatgggccgcagcctggacgtctgctccgttctc

SEQ ID NO: 122717 - DNA, 122 bp, Homo sapiens
cgcgcggaggggaagacccgggcagggtccggcgctcaccaggtagcagagcaggagcagcgcgcaggcagagcggccgccgaggccctgggggacgccgccactcgggaccatggctgcgg

SEQ ID NO: 122718 - DNA, 122 bp, Homo sapiens
agttaacagcggagcccatgaacgcaaagaaactcgccccttatctcagccacgaggcgccgccgagcccccacccgcctcagacctgggctgggtagtccaggatccactgctccctcggc

SEQ ID NO: 122719 - DNA, 122 bp, Homo sapiens
ggagcgtgtgagcccagtaggcagtggctgcgctgagccgtgattgtgccactgcactcccgcctgggcaaaagagtaagatcctgtctcgaaaaaaaaaaaaatggaaaaaagaaaaaaag

SEQ ID NO: 122720 - DNA, 122 bp, Homo sapiens
atttggcatacctgttttttgtacagcccaggaaacaggaacggttttgacatttttaaacggttggggaaaaaaacccaaaagaatcatattttgtgacatgtgaaagttatatgaaattc

SEQ ID NO: 122721 - DNA, 122 bp, Homo sapiens
cctctgcaagatcccgcggaacgccacctcgtagttgtgtctgcacaccgtgtccaactccgcccgggtcccctccaggacttccttctggctgttccagtactcggcatcaggccgcccct

SEQ ID NO: 122722 - DNA, 122 bp, Homo sapiens
tgaagtgagttgtccacaattaggagcagagtggggattagaaaccagttgtcagtttcccgggtcagggatctttccacacagttccagagaggaagtcctggctccaggcagaggaatga

SEQ ID NO: 122723 - DNA, 122 bp, Homo sapiens
gagaggtctggccatggattaacttcaccttgatggtctccatgggacataggaccaccacggcctcggccacgctagctcactggccgcaccgctgcccgccttgctgttcaccagtccct

SEQ ID NO: 122724 - DNA, 122 bp, Homo sapiens
tgaggttttttgagtcctcctcggttttctctagtgtgtttggggggtggggctttctctcggcgcctgctggccgtagcgaggtgggctgtggggttggggcagtgggcggctggcagctg

SEQ ID NO: 122725 - DNA, 122 bp, Homo sapiens
gccgggatccccgatgacacagggcagattccctgaatggggcccccggcgggggcgaggcgggcggtgaagaaggggcctggcacctgggaaggctgcggcctggcgagcgccccccccag

SEQ ID NO: 122726 - DNA, 122 bp, Homo sapiens
ctgcagtttcaggggaggttccgtggcagctgttctgaattccctggggatctgctcctccgggtgtctccctcagggtgggagggaaggccagaggagtatctggctatttccgtggctgt

SEQ ID NO: 122727 - DNA, 122 bp, Homo sapiens
tgaggaaaaaaaggcatttggaagattttaaaaacggcagcaccaaggattggtgcttgccgagggggtgagggatatgcggtggtgagatggtgccaacaaccaattatttcataggaggg

SEQ ID NO: 122728 - DNA, 122 bp, Homo sapiens
gcccgagcctttccctggcctaatccggaacacgcaggtgggacccacagctctgctgcccgcccctgcctggccgacgtggccccggctgcactcaccggttctgcagtaggggtaagcat

SEQ ID NO: 122729 - DNA, 122 bp, Homo sapiens
cctggtgaaaagattccaagcatagagggcctatgggaggggccacatggcaaggaacagcggctccaaagtggctgaaagcagtccctgaccgagggccaccaaaaaaactgagggactct

SEQ ID NO: 122730 - DNA, 122 bp, Homo sapiens
ggagggagaggcgagggcgggaggagggggctgcagacagctcctcccggcggcgcggagcgaagccggattcgcccctctcggctcgaaccaggaagcgcttcccttccgatctcccaccc

SEQ ID NO: 122731 - DNA, 122 bp, Homo sapiens
atgagctcccgagaaagctggaagcctgtcctacatttttttttaacctatttgcagattcgcaattgaaccctcttgagattttagagtctactggttttgtatattttttgcttaacatt

SEQ ID NO: 122732 - DNA, 122 bp, Homo sapiens
tattcgcaggtttggatctcatcgctaccatagactgttggagtttcaagggtggagatccgccattgctttttccatatccgcagaaattcctttcacatgaaatgtgagtctgttgggtt

SEQ ID NO: 122733 - DNA, 122 bp, Homo sapiens
ggacctgtcccaaggataaccgcacctctacgtggtccggaaggcctgcacgctgatgggcggtgggaagcccaacagggcctggtctcagtgaaaataacagcaatagcccacatttacat

SEQ ID NO: 122734 - DNA, 122 bp, Homo sapiens
ctgaaacctggcgggactggccgaatgtcagattagcccgagcagctacactgaacgctgcggaagatgcaccagaatcccggagtaggagccagatttccaaaggaagaaagctaggccct

SEQ ID NO: 122735 - DNA, 122 bp, Homo sapiens
ttatactttgccctttcccatgtgcctaatgcaagttgtttaaacaggaaaaatacacttcggtaatgctcaatttactgattgcatcgtgagagctccctggaaactattaagttcttcta

SEQ ID NO: 122736 - DNA, 122 bp, Homo sapiens
agctgtcccaggcccggccccacacaccagctgcagagatgagaaccacaatcgcattcacgcattcgtgcgcctacggctgtgtcagacgtgacttgtgctatttctgtatcaaaaaccat

SEQ ID NO: 122737 - DNA, 122 bp, Homo sapiens
aattcctttttaacttccctttggcgagaagacccctcttcctgcaggatttctcaagtccgttccattgagggttgctggccccttcaagtttccttcatccaggctcctaaacggagaga

SEQ ID NO: 122738 - DNA, 122 bp, Homo sapiens
aagcctcgctgactgacctcttaccaccagtgtggtccctcctcctgtctgtttagctctcgcttccggcacactggggaatgctattccacagatgtaaattgcactgtcatttgaagtca

SEQ ID NO: 122739 - DNA, 122 bp, Homo sapiens
gttcaagcaattcacctgcctcagcaccccctagtagctgggactacaggcgcgcgccaccggctattttttgtgtttttagtaacggggtttcaccctgttggccgggctggtctcgaact

SEQ ID NO: 122740 - DNA, 122 bp, Homo sapiens
tccagcaaatccctagtgtttgtttaaagtagaaagtcgtctcagtttgacttttgaaaccggcgatagagtctatgcagcaaattccttggaaactggaagtctcattcttcacgtccgta

SEQ ID NO: 122741 - DNA, 122 bp, Homo sapiens
ctggcctccgcttcgggccaggggacgggctgagcgtgacatttttgcactgtccctcgccgctcgccggagggaaatcgcgctcaccgcgccaccccgagtggtccccgagcagccagttg

SEQ ID NO: 122742 - DNA, 122 bp, Homo sapiens
tgtcctgctgctcctgttaagagggtagaggaggctgggcccagaagggcctgctcttttcgtcttctggtcctggagttgttgaaactcttattgatgcagacacagattatcaattgtcc

SEQ ID NO: 122743 - DNA, 122 bp, Homo sapiens
cacagctctctgcgtaggactgcgttcccattttatagagggggaagtgggggcatggagcggctcaggagctgttcagaatcacacagcaagtaggcgtagagcaggcctgaccaggagcc

SEQ ID NO: 122744 - DNA, 122 bp, Homo sapiens
tcaggctgggcccggccctgtgcccctgccgaggagctgcccttctctccctctggctgtcgcttcattctgtagcctcgaatgtcaccactcctcgaaacgcgggcccagcgtcttccagg

SEQ ID NO: 122745 - DNA, 122 bp, Homo sapiens
gcccccaaaacagagaaaccagggcaggtggtgtaggggggaagtgggggtcagtgctaccgtagggagataaccagggaagtttcctgcgaggggaaataaccccaggcactatgtgaacc

SEQ ID NO: 122746 - DNA, 122 bp, Homo sapiens
cgtgctggactcgcgtgtagcctctctggagggtggccgtgtcgtggtgggccgggagcccggtgtcacctccattgaggtaagcagctggggaccaggagagtagaccccctgagaagggt

SEQ ID NO: 122747 - DNA, 122 bp, Homo sapiens
gaggactggggcgtgtgtctgcggtgcaggcgaggcggggcgggccggggcggagtcacgcgccgcctggggacacccgcccccggggtcaaggtgcgagacaccctggctcctctgctgcg

SEQ ID NO: 122748 - DNA, 122 bp, Homo sapiens
tctggcttcacagctgagacctctaactccaaatggctcttcttgcccagaaaaataggtcgttggcagctccagcctcctggcaggcctgcctgctgacgccagcccagggttacgggaag

SEQ ID NO: 122749 - DNA, 122 bp, Homo sapiens
gttcccagaatccccattaaaacaaacaaacaaacaaacaaaacacctatccaagtgatacggttgaactttaaagtaaagagaatcacaaactggcagatctctttaatttatacttaggg

SEQ ID NO: 122750 - DNA, 122 bp, Homo sapiens
ggcagctggatgagcagctgtaatgggattagggctggctatgcccgcctccctgcatgccgccccgaagccctccctcccttcctcccccagcattctgatcaggattcagccctcggctc

SEQ ID NO: 122751 - DNA, 122 bp, Homo sapiens
cgggaggtgtggagggagaggcgcgggccggagccagagccagagctagagccagggctgcgcgcggcgctcgcctgctggcgcgggttccggggggcgcctgctgggcttgattggagaca

SEQ ID NO: 122752 - DNA, 122 bp, Homo sapiens
tgggctcaggaaggagccgcgtgactttctttatatgtttttttttcaccagcaacaagccggatttgagctggccattacagtccagtcacctaaagatccctgtgacttaatttccaaat

SEQ ID NO: 122753 - DNA, 122 bp, Homo sapiens
gcgaccacgtttccttaaatcagagccccgtggactccgccggagaactacattacccagcggccttcgcgcccttcgcaggaaggacgtctgcgcactaagatactcagttccaagtttgg

SEQ ID NO: 122754 - DNA, 122 bp, Homo sapiens
gactcaccctcatgaactcattttaacttgattacttctatagaaaccctatgttcagtacggttgcactctgagacactagaggttaggacttcagcatacgattttagggggacacaatg

SEQ ID NO: 122755 - DNA, 122 bp, Homo sapiens
agggctgaagccgtcttcgcgcggagaggttgcaggggcccctcggggatgagcgagcggcgcgggacgcagtggaacgggagggggcgtgccgagcagcccagagtgtgccgggagcgcgg

SEQ ID NO: 122756 - DNA, 122 bp, Homo sapiens
gcgcggcctgctccgcccgggcccagggcaggcaggtttggcggaggagggaaggccaaacggcctccagggccccgctgcgcaaacttgggttattttcagccacccgtgccctttcctgc

SEQ ID NO: 122757 - DNA, 122 bp, Homo sapiens
cctcagaccgcgggtggaagcctctctgtcctttcctgccgtgtgggcagaagtcatcaccgccctgacaggacaaaggagagaatggggctctcggcgggactgccacccttctgcccgaa

SEQ ID NO: 122758 - DNA, 122 bp, Homo sapiens
cttgtactgcacggtgaaggagtcaaagcggccctgggggacggtccaggaaaggctcagcgagtcaggggaggatcctgtcactgtcagctcccccaggagaggctcctcggggggccctg

SEQ ID NO: 122759 - DNA, 122 bp, Homo sapiens
ctcctgggatgctcagggcctcagagatgcccagtttcctacagggaacaagatctctcccgactgctcggttctactccgctcatcactttggctaccgtggctcttcagtctgaacagtg

SEQ ID NO: 122760 - DNA, 122 bp, Homo sapiens
ttgtgctctgcgccctggccctttgctaagccacctggctgggtgtaatccgagctagtacgtttctcatgcacgtcaccagggctgagtaatgagcgctggacgcctgtgtctggcgggtg

SEQ ID NO: 122761 - DNA, 122 bp, Homo sapiens
tgacatgctcgcccatgagctgagtctgccttgaccactgaaggaggctgccctggctaacggcggtgcccagtggcctggcctcacgcgtgggtccatcccggaaccacacagtgggcctg

SEQ ID NO: 122762 - DNA, 122 bp, Homo sapiens
tagccctgttctggatcggcctgtttacttgtttacagttttactgtttacttaccctcacgagattccaaattccctgagggcagggacaccatttcatccccagcaccagtgcaggcaag

SEQ ID NO: 122763 - DNA, 122 bp, Homo sapiens
cgctgggaggccctgacataggaggctcctgtgtgggggagcccgcggctggaactgctccgcttctggggaagacagagggtccaagagactgaaagcctgccctcagtggccagggggct

SEQ ID NO: 122764 - DNA, 122 bp, Homo sapiens
gctggatgagctgaagcgctactgccttggcttctgcctgctgtggatccatgccaagatcgtggtgctcatgctgtggcacatccttgacagccacaccctgaccaggcaaagcgcaggca

SEQ ID NO: 122765 - DNA, 122 bp, Homo sapiens
cttctgccagcgagggcagggcaggtggggcaagcggtggtgaagcgggttccgggggctcggtgagtctgaacactggctcgcctggaaggttggagccaccctgccaatcaagcagccgt

SEQ ID NO: 122766 - DNA, 122 bp, Homo sapiens
ccctcgactacacctggggtctctccttccttcctcctcgggaggagcccgactgggagacgccgcggggactacccatttccagcccgctcacctttcccatgcagcagcccctgcttcac

SEQ ID NO: 122767 - DNA, 122 bp, Homo sapiens
caggtgcacccttgatgaagcctcttctcacctcgagaggatctgatgtgatccaagttccgacttgggctggcacacagctgggctccaaaatcttcatccctctgctgggccgtcctctt

SEQ ID NO: 122768 - DNA, 122 bp, Homo sapiens
taggattgacttggcgatgcgggcgtttcttaagatattgtgggtagcggcaaattcatccgcgagaagcgctgggaagctaagcgctcaggccctctttccactccattacccaaatggcg

SEQ ID NO: 122769 - DNA, 122 bp, Homo sapiens
cgtttgaggaatctctgctacactggagtgtaaaccagcataatttgtcaccagagctagcgccaattaaattgattgcgtcggactgaactctgggacccctaatgcaagcactaagggaa

SEQ ID NO: 122770 - DNA, 122 bp, Homo sapiens
ttaagtactgacaatttttaaaaacaatgtaggccaaacaaaacacataggtgggccgggcgcagtggctcatgcccgtaatcccaacactttaggaggccgaggcaggtggatcacctaag

SEQ ID NO: 122771 - DNA, 122 bp, Homo sapiens
tgccccgggccacccacatggccgtccctcctccggcagtggtgacattgggcacatctgcgctccccgccttggcctgggcccactgaagggaagtagcagggaagtagccagaggacagc

SEQ ID NO: 122772 - DNA, 122 bp, Homo sapiens
aagactcataaatgagaaatcagaatgatgcaatgtgagaaactgatgttcaggagacttcggataatatagacaggatttacaagcaggaggccctaaaattacactcatgtcaaaaatca

SEQ ID NO: 122773 - DNA, 122 bp, Homo sapiens
gtgacaccggtcagcctttcccgcccctctgtctcctgctgccgtcgggaaggcagaagccgcgaggcaggccagtggtacatggtgctcccggcttaactgcaccctgcatggctccaagg

SEQ ID NO: 122774 - DNA, 122 bp, Homo sapiens
gcccagaggaaataagttggtgggcggagcgggccgcggaggccggctgtgggtggaggccggctccgagcgcaggccgtcgggagcaagcggcgattagccttagctagccatcgcatcta

SEQ ID NO: 122775 - DNA, 122 bp, Homo sapiens
aaattcttagaataagctagatgcacattaaactgttgtcattgctttttttccccctttcgagacagtctcgctctgtcgccccagctggagtgcagtggcatgatgtcagctcactgcag

SEQ ID NO: 122776 - DNA, 122 bp, Homo sapiens
gatctggggcgggagcgggcggagactgccgccaggagcctcccggccgccccagggctgcgcagccactggagcccatcacccaactccagacgctcctggctcctctacgtgggccggga

SEQ ID NO: 122777 - DNA, 122 bp, Homo sapiens
aaggctggagcctcccaaggacgctttttccccctcagaatccaccagggctatccctgacgggctgtaatgccccactctttgcagcagggtgcctgtgtctctcacggaagaccccaaag

SEQ ID NO: 122778 - DNA, 122 bp, Homo sapiens
gggccagccgggaggaggagcccgggggagaggggcaaagaggcgcaagtggaacaaaggcggagaaaggcttgttaatgttttaaaatgtttataaagataaactattgggacattatcac

SEQ ID NO: 122779 - DNA, 122 bp, Homo sapiens
gtctgaacccagtagtattttgtttgcagatttcttgtagaaagcagttaagagatttggcgctacacacagggcaggttaaggagtctgggttcaaatgctgatccttccattccttatct

SEQ ID NO: 122780 - DNA, 122 bp, Homo sapiens
aattattttctgattttgctttgctcagttgtctttagtgctaggttttgggacccagagcgttaacagtctttcctaaggagtcctgactagcactgtagtgcttaagaagaacaaaggtg

SEQ ID NO: 122781 - DNA, 122 bp, Homo sapiens
ggattaaggaacttgcccaaagtgtcatagctggccagggcaacatcctccgtccttgttcgtgacctcgatgtgcacctcctggctgtcagtgcctggctcccgtgcccccgcccctgctc

SEQ ID NO: 122782 - DNA, 122 bp, Homo sapiens
gctgggcaggacccacctctgaagtcgaagaagaaggagagccggttggccatcatcgctcgctggcagcccaccatgctgtagcccacgagtgtctcggggtctcggctcagggcctccga

SEQ ID NO: 122783 - DNA, 122 bp, Homo sapiens
aaacgttagaacactcatgcgcctgtcacttttctcctttgatacaggaaaatacaaccccgcactcaccatcccactgcttgagaaatctggtgtggaggcctgtcttgctgcttctttca

SEQ ID NO: 122784 - DNA, 122 bp, Homo sapiens
aaggccagggcagtgcaggcagcactttgacttggacattttatttttttgcttctattccgctgttttttcttggtagatgaatgtcttgggcataggactaatttagttatacagatttt

SEQ ID NO: 122785 - DNA, 122 bp, Homo sapiens
gttgtcttgaaatgcttttatagtgatctccataccttgcagggctctctcctttctcctcgcactaaacatcccttcatttgtgaccattgctaaaagttatagcagatcctttccccctc

SEQ ID NO: 122786 - DNA, 122 bp, Homo sapiens
ccgcccccagccgcgcagagcccagtgctgccctggggagtcagcggccagaagagttctcggcctgaaccagggatcctccgaggggaggggaggtgaccatggaagctcagccagggcct

SEQ ID NO: 122787 - DNA, 122 bp, Homo sapiens
ctgccaggcccctttctttcctggagtggagcagcgccgggcctgcacagaaggttctcccgaggactcctgcgggagggtgggagtggggaccgctagggcacaggagccgctgaaggcac

SEQ ID NO: 122788 - DNA, 122 bp, Homo sapiens
tgctgatggaacaagtgacgtccacagcggagatgtttgtgacccttagcaatgtctgcacgtggaacagcccgtggctgccttgagtcagggcctgggaagatgatggtatcgtctttcct

SEQ ID NO: 122789 - DNA, 122 bp, Homo sapiens
tattaaattttctgaaccatctttggaatatacaatgcaacatgaggttttgtaaaaagccgggcagactggcctcacttttccccaagtgtccaaatgacctaaaagtgctggggacactg

SEQ ID NO: 122790 - DNA, 122 bp, Homo sapiens
aaaaatttctggtaaacaaattggctcagcattctttctgtctgtctggttctttgtctccgtctgactcttaattaacttctcctctctctgaatctgtgtctgacttaattttttttaaa

SEQ ID NO: 122791 - DNA, 122 bp, Homo sapiens
attcattgagtgtaatcatgtaagtctaacacacatttaaaaagctctcagatatcatttcgccttcggttgatgtaagaaaattcaaaagctactcaaatcattcaataaatgataaaatt

SEQ ID NO: 122792 - DNA, 122 bp, Homo sapiens
actttcagcagcttagggagggagctagcagccggcgtgggggtggggagcgagggagtgcgtcctaacagagtctccagaggccacctcgctgccttgcgggggcgaggcagcccccaacc

SEQ ID NO: 122793 - DNA, 122 bp, Homo sapiens
aacaacttgtgttggtttgcaccataaggagaacacgcacaacatccactgccccgcatgcggctgccagcgtggcctctgtgctcaccggcctcgggggtgaggggtggtgactccccatc

SEQ ID NO: 122794 - DNA, 122 bp, Homo sapiens
aaaaaaagaacgaaaatgtatccagtgatgctgtgaacaacccggcaccagatgggaaagcggctgagcccagggcgccctaccccattcacctgcgacggcaccagtcggtctccaagggc

SEQ ID NO: 122795 - DNA, 122 bp, Homo sapiens
ccagagccagcagcacatcgagtgcgtggtgtgcggggacaagtcgagcggcaagcactacggccaattcacctgcgagggctgcaaaagtttcttcaagaggagcgtccgcaggaacttaa

SEQ ID NO: 122796 - DNA, 122 bp, Homo sapiens
gcctgaaccggggaaggcagacccggagaagagccaacgcttccttactcgccactctaacgggtcctgcccactgagcatgcccagcaccgctgcctacccgccgaggaatctcaacgtgc

SEQ ID NO: 122797 - DNA, 122 bp, Homo sapiens
acccaccccctggaaggattcctagcctagccccagcaccctcccctcagtcaggaccctcgacagctctggccccctaagtctctctcgactactcctgggctgggggagggctgcgaggg

SEQ ID NO: 122798 - DNA, 122 bp, Homo sapiens
gcagaccagagaggacgcacccccacccctaaacactttctggtgaggcggaccctgccccgcagccttcagcagatgagggaagctcccctccgagactctggatagccgccgggggggcg

SEQ ID NO: 122799 - DNA, 122 bp, Homo sapiens
ctccctttttctttcgtgtcctgaccacacgccattaggaacatgatccccccttctcctcgctcatggggtcttagtcttcagcaatatgacttattgcagcctgcgcaggttataaagaa

SEQ ID NO: 122800 - DNA, 122 bp, Homo sapiens
tctccctccctggccccgctccccgctccccgcttccctttcaggcctcagtaacatcatcggtatcatcgtctacatttccagcaacacaggtgacccgagtgacaagcgggacgaagaca

SEQ ID NO: 122801 - DNA, 122 bp, Homo sapiens
ccgcagacagcgcgtcgccaggctaaccctgcgtggaaaattcggaggtggaaggcgaggcgccttattgagggggccggcagcggcggcggcggcggcgagggggcggcgggggctgtgcg

SEQ ID NO: 122802 - DNA, 122 bp, Homo sapiens
cagagccccacaggccgcagcggggtggcgagggtgctgcgggctgctatccccgcctggcggaacgtgtgtcctgttgcctctttgcagacatgattaacaagcaggactgtaagtacggg

SEQ ID NO: 122803 - DNA, 122 bp, Homo sapiens
aatagaagtctgtgacaaacgtatagaaatgagtttcatgttgaacaagatccgtttctgcgttcctccctcatccagccttgattctccagatgcttaccaacttcttaatatttacctca

SEQ ID NO: 122804 - DNA, 122 bp, Homo sapiens
agggagaggcgcggacgggaactggggctgcacacggtgctggcaggccagcacaagttccgggtgggcgtgggcttggcgggcgtcccactcggagcagcaggccggcagcaccggccctg

SEQ ID NO: 122805 - DNA, 122 bp, Homo sapiens
cgggaagctctcccgccacctcatgaaggtcaagctcaagaagtacaccaagttcctcttcgtgcgcgaccccttcgtgcgcctgatctccgccttccgcagcaagttcgagctggagaacg

SEQ ID NO: 122806 - DNA, 122 bp, Homo sapiens
ctcagtcgccgccgccgctccgcgcgttcgtgtcctgccctggcctcagaggcggcccggcgccggcgaaaagttcctcggaaactgggttcccccggccgcagctctgctgggcggtcgag

SEQ ID NO: 122807 - DNA, 122 bp, Homo sapiens
gagagtcggcagggaaggttgaagaagggcagagtgtggaaagtttcttaggggagatgacgggacgttcaggaatggtctctggggtttactgagtcacactctcttcacccaaagcagca

SEQ ID NO: 122808 - DNA, 122 bp, Homo sapiens
gttttcaggaaaaagatccgatagcatgcaggccttctcatgctggcctggctcattcatcgtttcccctaatgactgactgaccagaaaaatgcacgacgctcccatggggccactcggga

SEQ ID NO: 122809 - DNA, 122 bp, Homo sapiens
atgtcagtaattataaggctatgtgggtctgcagacagctcattaaagacgcttgatctgcgtgaaaccaggaagcagaactcagcctctttgccactttctgtaagaaatccaaccacatc

SEQ ID NO: 122810 - DNA, 122 bp, Homo sapiens
aagaccgcaggaaaacgtgggaactgtgctgctggcttagagaaggcgcggtcgaccagacggttcccaaagggcgcagtccttcccagccaccgcacctgcatccaggttcccgggtttcc

SEQ ID NO: 122811 - DNA, 122 bp, Homo sapiens
cggattccctgcttctcactgctgggccctcggtcctggcctcgcgcggacccgccctggcgactggtcaactctgtttgacccccagcacacgcaataaattaccataacacacaactctg

SEQ ID NO: 122812 - DNA, 122 bp, Homo sapiens
attttgtgcctgtgtagcactttatatttgtaagtactttataatcactcattagctaatcgtatactttcattattgtagttatttaagatttattgggctctgtgtgcctggcactatga

SEQ ID NO: 122813 - DNA, 122 bp, Homo sapiens
agtgtggcgttttctctaaggtacaacaggtgaatagccactcctctgttacgcagcttgcgatgtcttcccactgtcctgaaagtcccaaacctttaacacgctgtggaaaagtccccaga

SEQ ID NO: 122814 - DNA, 122 bp, Homo sapiens
ggttgcagtgagccaagatcgcgccattgcactccagcctgggagacaagagcgagacttcgggaaaaaaagaaagcctggcttcatccaggtatttctatcattaaaatacctttgaatgg

SEQ ID NO: 122815 - DNA, 122 bp, Homo sapiens
cagggacagcgtggtgtccgtccacacccagtccatcactgcccgcagctccaccaggaacggcaccagccggaacctgcccacagccagggttcccgtcaggtgggctccctcatgcccgg

SEQ ID NO: 122816 - DNA, 122 bp, Homo sapiens
tccctcccgggatcggggccggagccggggccgggcggcccggggagcagccggcgcccccgctctggtgcaatggttgggtctggctccccgcatgccgcacattcctcggagtagccaac

SEQ ID NO: 122817 - DNA, 122 bp, Homo sapiens
gctcggcgcgtgtgtgtgcatgtgtgcatgcgtgtgtgagtgcatgtgtgtgagtgctgccgctgcccgcgacccctggccccgaaggtgttggctgaaatatggagaatagtcttagatgt

SEQ ID NO: 122818 - DNA, 122 bp, Homo sapiens
tgtcctattctggaattagtattttgccttggaatttcatagctgtaacgttgccgacctcgctgttggcgttgcccgggcttttcaaatatgtagataagactcaagggggcatccaggcc

SEQ ID NO: 122819 - DNA, 122 bp, Homo sapiens
gcgggctggtggggtgggagctgggggtggcggggtaggcgtaggcgggtggcttggacacgtcctccagcttctggatgaccttggccttcagggcagccacaggggatgcgcggggtgat

SEQ ID NO: 122820 - DNA, 122 bp, Homo sapiens
ggcgactatccccaccgcaaagcagctccgtgcgcatggctcctcgcagccacacgggggcgcccccgccccggcaacaatactcagggccggagggactccactgagatcccagtcggggg

SEQ ID NO: 122821 - DNA, 122 bp, Homo sapiens
aatctccaaattgtctctgtttcatcaacaggttgctcgtgggggccccgcgggcagaagcgcttccactgcagagagccaacagaacgggagggctgtacagctgcgacatcaccgcccgg

SEQ ID NO: 122822 - DNA, 122 bp, Homo sapiens
gacgggccggggcgtgggcagggcttgaggggccaggggactgtgtggggcctgacgggccggtgggtggggcggggcttgaaggaccggagggtgtgtgggcggggcttgataggcagggg

SEQ ID NO: 122823 - DNA, 122 bp, Homo sapiens
gtcaaggagggaagtgcgcggtgccacggaccgacacagttcgctctagcatctgacgctcggactccgcgccctcagccggatcccagagcccttccattcgccaaccgcccactgcaagg

SEQ ID NO: 122824 - DNA, 122 bp, Homo sapiens
gagccaaaacaacagaagatcaaaagacaggctttcacttctgcacacataaagatgcttcgcaaatgctcatttatctccattaacctattcctaacacgaaacgggaaatgtttaagtgt

SEQ ID NO: 122825 - DNA, 122 bp, Homo sapiens
tccagcggcgtccacgaggacagagactcgtgcaccgtcagggcgtgctcctccatctggcgctgcaggctgtccatctcctgcctgggacagaagaaggaggaagaaggcccagatcacac

SEQ ID NO: 122826 - DNA, 122 bp, Homo sapiens
ataaactcatgcctcttaaaaacgaccaaattatttggcttcttgggaggtggtaagtgccgtggatagaaagagaagtagcacacggttaggtggttgctgcagtatgaagtagggtgagc

SEQ ID NO: 122827 - DNA, 122 bp, Homo sapiens
ctgcccacgtccgatccggcgttgaaggtctccaggtcgatgaaggacggcttctccttgcggaaggtcaggatcagctgctccaggaagacggtcatgaagaagcccagcaggaggatggt

SEQ ID NO: 122828 - DNA, 122 bp, Homo sapiens
ccacacttgtagggtttctccccagtgtgaatcctctggtgcttcatgaggttgggcctccgggtgaatgtcttcccacactcgtcacaccggtagggaatctctcctgagtgcatccttcg

SEQ ID NO: 122829 - DNA, 122 bp, Homo sapiens
tccaggaatccctccccatcacaaggttcttaatcacagctgccgaatccccttttgccacggaaggtaacatattctcagttccggggattaggatgtgggcctctttgtgggccactatt

SEQ ID NO: 122830 - DNA, 122 bp, Homo sapiens
taccaaggaggaaacagaggcccagagaggcgaagcagtgcccggggtcccccgagctggcgacacgcagcagggggagacacagccgctctctttcaatgcagcttgcaagaagagccggt

SEQ ID NO: 122831 - DNA, 122 bp, Homo sapiens
cttgtgaagtcatctccgtgagcttcatgaagcaacaccgccaagggcctgagcaaagggcgctctgctccactcgagtgaaagcaaaatgctttcggggttgaatcactgtttttcttgac

SEQ ID NO: 122832 - DNA, 122 bp, Homo sapiens
cgccggcgcggctgaggagctgcccgagcctgcccctctgctccccagcagccacccgggcgttcgcgctcgggaaagcggtctctggcgcaccctctgccagttctcccacgcccctcggc

SEQ ID NO: 122833 - DNA, 122 bp, Homo sapiens
ctgctggcctctgcatcctgcagttgagcccgttgtttgttgggtgtaaccttactgtctcggttcagttctgaaatctctgtgcggctccttctgtcttggtcttcgctgagacgcccacc

SEQ ID NO: 122834 - DNA, 122 bp, Homo sapiens
ctctagggggtatttggatcagagaagattctgtatccgggcccatgagcctgctggtgccgctcccacgctgtggagtatactttaactttcaataaatccttgctttcattctttcattg

SEQ ID NO: 122835 - DNA, 122 bp, Homo sapiens
gtccgggaggggctgggctgcgcacgctcgcggggccgtcgcagatgggcggtttggaggcgctgcagtccctgggaaatgggagcctccgtcctgttctctctgctgcttggctgggctgg

SEQ ID NO: 122836 - DNA, 122 bp, Homo sapiens
ggtgaagccattcaccccaatgggggatgggatgctaggcacggctggtgcagtgatgcccggaggggtgctgccacctggttccaggcatacagaagggtggaggaggaggggaggcaagc

SEQ ID NO: 122837 - DNA, 122 bp, Homo sapiens
tgcccacgggaacacagcgctgacctacgcccggcaggcctccagccaggagtgcatcaacgtgcttctgcagtacggctgccccgacgagtgcgtgtagttctgttttatttgactacagt

SEQ ID NO: 122838 - DNA, 122 bp, Homo sapiens
cctgctcctcctggaggaaaagggtggtgcctgcgcccctgggaccgggtgaaagaggcccgggaacgttggagaaagttaggcactagaattagcaaacgggaccccagccgcagggcagt

SEQ ID NO: 122839 - DNA, 122 bp, Homo sapiens
gcagaggggttgggtgtgggtgatctggcttacggagtcaggccgtgaacattcaagggtcgggaaccacccatggccctgaatgggaccgaccctgttgagcaatggccatcctggtggtg

SEQ ID NO: 122840 - DNA, 122 bp, Homo sapiens
gcgcgatcacattctgtaaggcccaaagcgtgcgcatgtccccctagcccatcccccggacgcagtccacagatccccagtgcgcccaactggcgaaatctgcgagttcccggtgcgccccc

SEQ ID NO: 122841 - DNA, 122 bp, Homo sapiens
aatactattgcaacggcagtcagaggtcaagctgggggggtgcggtgcagctccctaacgcggggcagcctcaaagggggccgaccctgcccagcacgaatggcaccgggcggtgggggacg

SEQ ID NO: 122842 - DNA, 122 bp, Homo sapiens
gttcgtcatatccagggaggcacaggatgacattccattgaatgtcgcgacagacgtacacgcactgtgtgatattgttcctaatatccacgaagggagaggatgatattactcccagtaaa

SEQ ID NO: 122843 - DNA, 122 bp, Homo sapiens
ttcctgagcgagagcggaactgctgggggaaccttcgccaccctctcccgggcaactctacggggaaagcccagctgcggacaagccagacttgtggtcttctgccaggggcggcaggccct

SEQ ID NO: 122844 - DNA, 122 bp, Homo sapiens
acccctatcccgtctgcattacagactgggccagcatgtgatcaggctgctgatgcttcccgctgccagtgacatcagccggctgagccgtgcaatagagagcggcatcatccctcacagaa

SEQ ID NO: 122845 - DNA, 122 bp, Homo sapiens
gtgtgtgtgtgtgtgtaggtggtgacagagggaggcaccttgaggggcgcccacagggaacgtcatagccagagctttgtcagaattgctttttcccttctggcacaacctgcaatgctggt

SEQ ID NO: 122846 - DNA, 122 bp, Homo sapiens
ggttgaatggcagcccccgaaagcttgtctaagttctcactcctgtacccatgaatgcaacggtgcaaccatatctagaaataggatctcagccaggcgcagtggctcatgcctgtaatccc

SEQ ID NO: 122847 - DNA, 122 bp, Homo sapiens
gcctctttgtctggagggagaaggggtctctcccactaccaggggccccttgttggcgggcgtgctgaggtgcacacctgggagctcaagctccctggtgcacaaagcagtggtcccagaag

SEQ ID NO: 122848 - DNA, 122 bp, Homo sapiens
cagctgacgactcagcttctgcaggatgctggcagcatagccagcgagatagttggaagccgtcagggcacagggaaggggccgagggtgccctgagtgtgcatggggggcagccctgctgc

SEQ ID NO: 122849 - DNA, 122 bp, Homo sapiens
aatgtggccgcttctgctacctgagcctccgagcctcctgctgtggcagttctgggcagtcgcgtgagccgtgtgcacctgcctctctgtccgcgtgtgcgcctgtgcacccctgcccgggg

SEQ ID NO: 122850 - DNA, 122 bp, Homo sapiens
cctggcgcgtgcggtagggggtgtgtgagctcgggggtgtttgtgagtcccgacggcccccggggggtgtttgtgagtcccgacggcgctgcgctccgggggccggtgggggactgttccag

SEQ ID NO: 122851 - DNA, 122 bp, Homo sapiens
cttttttcccccgctcccaaagaaccgctgatagcatgaaagtcttttaaactgtatggacgagatctatttcctaacatttaaacggaaaatgacacgcagcggtcctttccttgagcgtc

SEQ ID NO: 122852 - DNA, 122 bp, Homo sapiens
aataaaaaattttaaaactgtataataggcagaacagtaaaacactgtactcagcaactacgcaagagatactaagtacaaaatgatttccctacattccccaaattctctattatctcttt

SEQ ID NO: 122853 - DNA, 122 bp, Homo sapiens
aatgcttaggccccacctcagtcctactgagttagaaactctggtgtgaggcccagcagccggtttcacaagccctgcagggcatgatgatgcactctaatgtgtgaggaccacggctctaa

SEQ ID NO: 122854 - DNA, 122 bp, Homo sapiens
tgctcattgcttctccgtgacaagttccagcctcgtaggtgcctggcctgcagttgaaggcgggtggggatggggcgaggcctcgtggagggagggtgggcaggcgggtcttcggcacactc

SEQ ID NO: 122855 - DNA, 122 bp, Homo sapiens
cttccccacaggtgggccccctggcattgactagcatcggtgagtggatcctgctggggtcgtgggccgtgcaccaggctgcatggggtcaccaagtattagccttcaggacaggagggttt

SEQ ID NO: 122856 - DNA, 122 bp, Homo sapiens
agatccattaccaggagcagtcgcggcaacagcagctgtcagcagtgatgaggcaggccccgagcaagacgctgcagcttgggcagcagtggcaaaagatgagggtggggagcagtacagtt

SEQ ID NO: 122857 - DNA, 122 bp, Homo sapiens
accgctcagctggtggtaggacgcaaacgaatcgccggttccttcgaagctgggcctccgcgtcactggggttggcatgagcccctttcctgcagtggaaaaaacaggaagacagcatcaga

SEQ ID NO: 122858 - DNA, 122 bp, Homo sapiens
ctggagacaagggcactacacgcacttcagaatgaagagttgtaagtcgctgacctggggcggactggagggtggggtggggtgggtgttgaggggcacgcccgggctggcatcagccctcc

SEQ ID NO: 122859 - DNA, 122 bp, Homo sapiens
tgttctttcttttcttcttagactgtatttcccagcctacctctattgagagagttgttacgaggttatgccaacaaaatgttcatggaaattatgtatgcgactgccaagcctgatcttcc

SEQ ID NO: 122860 - DNA, 122 bp, Homo sapiens
tctcttctctgctatctctgaatacgtgttctgctccttctctgaagtcgctatccagggcgcattgtcctcgcatgggtcacacacaccttctccttctccacctttgagccaccgctctc

SEQ ID NO: 122861 - DNA, 122 bp, Homo sapiens
tcgaaggtcacatcacggggccttagtgtatcacaggcatcatagctgcggaggacaattcggcagtggcagtggtagttgttctggtttcgggcattgatgacgactgagccatctgggag

SEQ ID NO: 122862 - DNA, 122 bp, Homo sapiens
agcccctgaagctgatgggtcagggcttctatcatttcctgacttgccatggggagacagcgtctgtccttgagggtgactgtctgactcagagctggcttgcaaaggcctctgttcctccc

SEQ ID NO: 122863 - DNA, 122 bp, Homo sapiens
agacagcagcatggagaagccagtcgggggagggtgtgggtggtcacagggacgtgtgggcgtggggtccagaggcctctgagggagcactgtgggtccctcgctgctctggatcctggttg

SEQ ID NO: 122864 - DNA, 122 bp, Homo sapiens
cgggccacaggacactcagctaagagcatccagggggcaccgagaggcaagaagcagggacgggctgtggctcgctagcccacccgctcccaagattcaactacgagctttttaactgcaac

SEQ ID NO: 122865 - DNA, 122 bp, Homo sapiens
tgctttcgtaaaagtgactgcttcttgtcttctaccccggcatttctcaaactcctagcgcggaggttttataaacctagcgctgcccgctagttgtggccgccttctgaaagtttctgtgc

SEQ ID NO: 122866 - DNA, 122 bp, Homo sapiens
gccgcctggcctaagagaattgcgttcagtgaagcgcagaagccgaaaggcgccttgctgcggccgcgccctgtggctgaacttaggccaattccgagcgagaccgagacgcagggcggcgg

SEQ ID NO: 122867 - DNA, 122 bp, Homo sapiens
gggtgacgccgatggccatctgcagcaccgtcaggtatttctggtacttcatcttgtccccgctccgctcgcgggcagggccccgccgcctccgccgccgccgcagacacagcccctccagg

SEQ ID NO: 122868 - DNA, 122 bp, Homo sapiens
cgcccggcgcccgcacactcgccagcccagctgccggcacgccggccagccagccgctgccgcttaccagtggcgcctcgctgactccccgggggcagctcttcaacggttcccgcagtcag

SEQ ID NO: 122869 - DNA, 122 bp, Homo sapiens
cagtgtgtgggggtgcagggcccccgatgtggggtcagtgggggtggggcgcagggtccccgatgcggggtcagagtgtgtggggcacagggcccccgatgcggggtcagtgtgtgggggtg

SEQ ID NO: 122870 - DNA, 122 bp, Homo sapiens
cacagtgagcgcagggccagtgccgccggggggaacctgaggctggccgcaccggagactcgaagaggaggacagctgactgcagcccccgccgtctgcaccccagccctccccgctcccca

SEQ ID NO: 122871 - DNA, 122 bp, Homo sapiens
agctttggagggttcctggacacaaggcctgtgtaaggaaaggatcattactgtcagcctcgatgctaatgtgagatgagggaatgtgccctgctctgatccaaatgctgagtttctgtgca

SEQ ID NO: 122872 - DNA, 122 bp, Homo sapiens
acctcaaatgatccacccacctcagcctcccaaagtgctgggattacaggcgtgagccaccgcgcccggccaggtctgcctatcttctgtgctgtgattctgcctggaagaagatggctgtt

SEQ ID NO: 122873 - DNA, 122 bp, Homo sapiens
gcaaccacctcagctggcgcgcggaaaacccggaaagtggatttcgcccccgctccctcccggaaactcctcctggtgcctgcgaccgttctcactgagcatgtgcagacggcggtgcgcat

SEQ ID NO: 122874 - DNA, 122 bp, Homo sapiens
ggaagtagggtctcaggtttgtgcctggccagggccacagagatggtcagcaggacggagcggggacgccccgcccatgccctccgaccctttgcagaggccaccacggtccaggcctgacc

SEQ ID NO: 122875 - DNA, 122 bp, Homo sapiens
gcccagacctagggctggactcaggagctgggggggcctcacctgttcccctgaggaccccgccggacccggaggctcacagggaacaagacacggctgggttggatatgcctttgccgggg

SEQ ID NO: 122876 - DNA, 122 bp, Homo sapiens
ggaattggccggccttttccagaactgccccaggggtgtgttcctcaaggagcctgaacacggtgattggaacagagacttcagggacagctgctgtgggagtcacagaagcaacagttccc

SEQ ID NO: 122877 - DNA, 122 bp, Homo sapiens
tctcatctgatcaggcatttcttctatcacataaagctcagtgattctcttgaaactagccgttctaaatctgtttcctcatgtaactaatggattcacaaatagtaaattaactgtaggaa

SEQ ID NO: 122878 - DNA, 122 bp, Homo sapiens
tagagctcgggaccctgccagccggcttcggacttctgccaccagcccagcaggttcagccgtctccaagaaagacagctccacacacccacagtgcagaagggaggcacgatctcctcccc

SEQ ID NO: 122879 - DNA, 122 bp, Homo sapiens
gacatcctaggcaacatgtcaaggggatgcaagctgggcacgtccagtactaaatcaacccggtccctgtggggtggggcctgccttccctggggcagtgagttcgccttttgttcaagggt

SEQ ID NO: 122880 - DNA, 122 bp, Homo sapiens
tcccaggcccctgtctcccaccctgctcattgtccacccaaggagttcctgtctcaacgccgtccctgcgaccgcctacaggtgacctccaaagctctgtgaccttggacctggccctcgac

SEQ ID NO: 122881 - DNA, 122 bp, Homo sapiens
ctagtccacatcccgaatgaggactcgacttggcgcggggcccaagcagagggttttaagcgggaacactacctgaatggggttgtctacatggtcctaaggaagaaaggcagagagcaagg

SEQ ID NO: 122882 - DNA, 122 bp, Homo sapiens
cgcgccggcgcgggcgcggtgcgggtgagctggtcggcgcttggcgctgcctggaccaatcgcttggcagcgcatctgaagctgttgtgatcgctggggcgacccgctctgggagggagccc

SEQ ID NO: 122883 - DNA, 122 bp, Homo sapiens
ggaggggtgcgacgcgcgctgccaggcagttctcacatctggatgaggagccgcagatgccgcgggggcgcgcctgcagctccccagaacggccaccggagggcacccgcgccccccgagcc

SEQ ID NO: 122884 - DNA, 122 bp, Homo sapiens
gtctctttccttagaatatcacttttagctccagtacttatcttactaatatattttttacgatggaacattagtcatgtaattagagaaacttcaggttaatctcagggttcaataatttt

SEQ ID NO: 122885 - DNA, 122 bp, Homo sapiens
catctgcaaatagtgatacttctccctcctttccaatttgtgtatctccataatacatctcgtgactctagctgagttggctaatgccccagaacaatgtagataacattggcaatcaaggt

SEQ ID NO: 122886 - DNA, 122 bp, Homo sapiens
ccgggagaaccgggggtgaggggcgatggctggagctgcggcccaagcacagctttcagacgcttgcccggaccctggcgcggggaggcggccgggactgcctttctgcgcgcgtccctgga

SEQ ID NO: 122887 - DNA, 122 bp, Homo sapiens
gctaagccagatgtcttcacagctttgatttcccatcccaaagtgcttagtgcagggtaacgctcaacgtatagtgaataaacgtcaactggaagatggagctaaacttccccaggagatgc

SEQ ID NO: 122888 - DNA, 122 bp, Homo sapiens
cttcactcccgaagccagcgaggccatgaacccacggagaggaacgaagaactccggactcggcgccttgagacctgtgacaccacgaaggtcttcagcttcacttctgagcctgcgagacc

SEQ ID NO: 122889 - DNA, 122 bp, Homo sapiens
aatcacctgagtgaagttaaggaacatgttccaagtgtcccgggagatgcccttgatccccgaggggttctctgttaggaagtttagccattggtccaataccggaggattgttctgggtaa

SEQ ID NO: 122890 - DNA, 122 bp, Homo sapiens
gaccggcggaggtggcagcatgaggaagtggaccccagagagcacaagtgacagaagtcccgggagccagagggtggggctggactttgactcacagcgcctgatttcagatgctgggttgg

SEQ ID NO: 122891 - DNA, 122 bp, Homo sapiens
tgaccaggtcaggtcctcctatcatgtgatatcacagcatcatgccattctcatgtgtagcgtttataacaatttgcaatcatatataaacaaatatttttttgaagtccaaagtaataata

SEQ ID NO: 122892 - DNA, 122 bp, Homo sapiens
gtggatcgtggtcgttataaccctgtgcttcacgatttatgatgtattaatgaattatagcgatgcactgtacttcgttttgctatgtatgcggccaaatatggggggggggttggaagggg

SEQ ID NO: 122893 - DNA, 122 bp, Homo sapiens
tggggtttgttccagctcattgctcatcaccccatggattgtttgctcatagcaaatctgcgccaaataaattccatgtcctccaaggtttgatacttaatagtaatataactaatcctgtt

SEQ ID NO: 122894 - DNA, 122 bp, Homo sapiens
ggcacatacctccaggcccgctctgcgccgcacaaacttgtctcccaggatttttccacacgaaacctgtctcccagggaatcagccagtccgatgagctgggcgttcccaccccgccctcc

SEQ ID NO: 122895 - DNA, 122 bp, Homo sapiens
actatcccggcctgggtcccggcctcgaggccatcagaactcgcagtgattggaggtggacgcagcggctggaccgggagcgcgaaactgctgcgctctccccaggatctgcgccctgcagc

SEQ ID NO: 122896 - DNA, 122 bp, Homo sapiens
atctcagggtccctctgcgaaggtctttagcctcccccccacttttctttcaaagaaaggcggtatgttcagtatgggctggcaggtttggtctaggataggatccctcatcccttagaaag

SEQ ID NO: 122897 - DNA, 122 bp, Homo sapiens
ctcgatctcctgacctcgtgatccgcccgcctcagcctcccaaagtgctgggattacaggcgtgagccaccgcgcttggcctagtgtcaaaatatctaaattcaaattcagggtctactttc

SEQ ID NO: 122898 - DNA, 122 bp, Homo sapiens
ttgaagaagaaacttagggacattgcagaaaatctgaaaggtcttttgcagaaaagaagtcgtagatgttccttatgaggatagacctgaggctgtggggtagaaatgactagagaagtgag

SEQ ID NO: 122899 - DNA, 122 bp, Homo sapiens
tttttgtacaagtacagcccttggttgtgtgacaagaccaccttgtcacacttgaacgtgcgtgtatcacataagcggccggtgtgaaggtcaatgatatggagggaatagtcttctagagg

SEQ ID NO: 122900 - DNA, 122 bp, Homo sapiens
caggagagccatttgccctgccgcctgctgctggcggttctgtgtctttacccagagtgtcgcttttagaaatgactacatttttgtgactaacctttccagacccatttcttgagtgtgga

SEQ ID NO: 122901 - DNA, 122 bp, Homo sapiens
ccggcccgccccggaaccatagagttctccgtggcttaagtaacccgaaagccatagactcgtggggaaggagcggctctcgctggcgtctaagacttccggcctccaacctcctggttggt

SEQ ID NO: 122902 - DNA, 122 bp, Homo sapiens
ggagggcacaggcgcttgcgcagtagggtggccgctcccggccgcgtgcagcgcgaacgtcggcgcaggcgccaaggctctggcagttggccagcacaccactacgcatgtgtgtcaactct

SEQ ID NO: 122903 - DNA, 122 bp, Homo sapiens
tgctgagcttgttgtagcccagctgcaggacctgcaggctcgactggcccaggaaggcaccgtcctcgatgtaggagatctcgttcttggtgaggttgaggtcggtgaggttcccaaagcgg

SEQ ID NO: 122904 - DNA, 122 bp, Homo sapiens
acatggactccaagcatttctctatgagctccccccaagtttcctccctccatggccctacgcccatagttagctctgtccagccctctggcggccctgatccgaaaggaaaccccaaagcc

SEQ ID NO: 122905 - DNA, 122 bp, Homo sapiens
gcctgaggccccgactgagcagctggatgtcgcgtgcggccaggaaaacttgccggtgggcgcgtggcccccgggggccgcgccggcgcccttccaggtaggggcggggccaggcggcgcgg

SEQ ID NO: 122906 - DNA, 122 bp, Homo sapiens
ccgaattttgcagatgccggttttctccgccaaaggccggatgcggccgataaagctgagcggatctgtgaactcctcccaactcggctcaaagacggggcactctggcggtggcacgaact

SEQ ID NO: 122907 - DNA, 122 bp, Homo sapiens
cgtggcggtgcggctgtgtaggaggagcagggcggcctcggtgggtcgctgcttggtgcccgagggcccccttccagggcatcttgtggacatgagcggcaccaggaccctatcccagagct

SEQ ID NO: 122908 - DNA, 122 bp, Homo sapiens
gcatttctcactctttttttacctctttacccatatactgaatgcaagagaaactagcctcgtttcacattttctagtaatacatggttaaattatgttcagggagtgagattttaattgtc

SEQ ID NO: 122909 - DNA, 122 bp, Homo sapiens
cgggaaaggtagcacctgagcctcccgggctgcgccgacacctggacacctgtctccccgcgggtgccacctactgctccaggggactccagtccccaggttccgccccacggggactgggg

SEQ ID NO: 122910 - DNA, 122 bp, Homo sapiens
caaggccacacacaccattggctacggcaccacgcggggctaccgggacggcggcatccccgacatagactactcctacacatgatgcccgcccacccgggctgccccgcctcagccccagc

SEQ ID NO: 122911 - DNA, 122 bp, Homo sapiens
gctgatggggacccagagtatgtggccctccttcctctagttcccaggcagggacgcacacgtgcaactccaaggctccatctattttcctttaataaacttcagcacggacacaaattcgc

SEQ ID NO: 122912 - DNA, 122 bp, Homo sapiens
ttttccaacatagacactctttcaccccaaggttaagcaagactggactctgaaagattccgggggaagaatccatgacccctgcagggcccaggaagtgtctgggtccagaggctgggagg

SEQ ID NO: 122913 - DNA, 122 bp, Homo sapiens
cgcccctcacctcccagacggggcggccgggcagaggcacccctcacctcccagacggggcggccaggcagagaaaggagacttcactgcccatccacgagggctggttgcatacactgcag

SEQ ID NO: 122914 - DNA, 122 bp, Homo sapiens
tgtagtgcgcctgggcagccgcctctggctccagggtcagcgggaggatggtcaggggctcgctgcccgtcagcctgggcacagagaggccagcatgagcccggccccaggaagccctgctg

SEQ ID NO: 122915 - DNA, 122 bp, Homo sapiens
ggggcgcggcgggcagcggcaggcgggtaaggtggtcggagctgcgagcgccgaatgctgcgcggccgcgcagccgccggggacggggaagcagagcgccccgcagagccgggcaccggttc

SEQ ID NO: 122916 - DNA, 122 bp, Homo sapiens
tgaggcttcaagttgggcggcgggcagcgaacttgacagaacctcgaaactctgcagatccgccgcccaacccagccgccagctccccgtgacttccgctttcggtctcaactcctctccct

SEQ ID NO: 122917 - DNA, 122 bp, Homo sapiens
tggttctgccttctggacaatctttccggtgagtgactgagcctgagaagcctgtcccctcggactggctcctgccgcctcaacactgcctggcatggggtacaaaggaatttgggggatga

SEQ ID NO: 122918 - DNA, 122 bp, Homo sapiens
ctcacctgcaagccccgcctcagcgcacacccttgccaggttggaggaagtcctggtacccggagcagtttgctttgtttttgcagtgtcagtgatctcacaagcacttggttggccacaca

SEQ ID NO: 122919 - DNA, 122 bp, Homo sapiens
cgcctttctgggttttccgctgaggtttgttgaaaagacgcctcccagactcttcactcacgaagtgtgttacaaaaactctcccggcaactgtcctgaccctcaccaatcacgctacagcc

SEQ ID NO: 122920 - DNA, 122 bp, Homo sapiens
ttccaaatgaaagtaggtatctgggccagcctttgatggtgtgtgtctgtatcctgagaacgaacttgagaaataaggcttctgtctactactggagacactggtagtataaaacccagagt

SEQ ID NO: 122921 - DNA, 122 bp, Homo sapiens
gaggagttgtcttaaccctaggcttggcggctggtttcagagatggagccaatatctaggcgactccttgtctccaggcttctcccctatcagaaaacaaagcgggagtcgcccgagatagg

SEQ ID NO: 122922 - DNA, 122 bp, Homo sapiens
gctgcagattccttgggagctcccggggatcttccagcaaataggagcaaatcttttccccgtggatcaggaaggtgcacgctctttgtggaatacgactgctcaccccgcacagcaagcag

SEQ ID NO: 122923 - DNA, 122 bp, Homo sapiens
ggcggagcccaggccctagggaatcgtggggtcgtatcccgcgggtggaggccggggtggcgccggccggggcgggggagcccaaaagaccggctgccgcctgctccccggaaaagggcact

SEQ ID NO: 122924 - DNA, 122 bp, Homo sapiens
tctgctttctgggctgcagcatttttagtcactgcactttgttgttgacattttacagggcggtgggtagcaaagttgatgcaataattttattaattgttgccaagagttttaacaccatt

SEQ ID NO: 122925 - DNA, 122 bp, Homo sapiens
ggagccccccgagacgggtgccagtcccactcgaggccggagaaagagggccgcctaccgcggccgcctgggcacccctctgagggccaagattgtagtcccacctctggccccgtctccgc

SEQ ID NO: 122926 - DNA, 122 bp, Homo sapiens
gtttggggttctctctgcagatttgggggagtctctcccgcgggatgagggggggctctccgccgcacccgcctatgatggcccagaggacccgagctcgggtcactcccgtcgccctcggg

SEQ ID NO: 122927 - DNA, 122 bp, Homo sapiens
ttaggagcttcttcacaccagattctatgtgaataggaccccatggacttctaccacatgcgggccctggccttctaaaggaagaacaatttaagactatgtagacaagatgtactttaaaa

SEQ ID NO: 122928 - DNA, 122 bp, Homo sapiens
cgggaagagccccgcctccttaaagagacagcagctcccagagaaacctgcgtgctgcggcgcgcagagcccgctcccgcccgcccttctcccgaggctgagcctcgagttcttaaagagac

SEQ ID NO: 122929 - DNA, 122 bp, Homo sapiens
agtcgtagtctatagtccaggaccagagtcctggtctatagtctagtcatagtccacagccgtagattatggacctatgacttagatccacagcctctttgcgctacccttctgttcattct

SEQ ID NO: 122930 - DNA, 122 bp, Homo sapiens
aacacaaagcctgtgaggttgtaaacgaacccagacggcggcgaaggtccaaggccggcccggcttacctgccgcggattcattgcgcccgcgaggcattgcccggcccgacccgccggcgg

SEQ ID NO: 122931 - DNA, 122 bp, Homo sapiens
gctggtgggggtggggacaggctccaggcctggcatcccggtagccgcagctgtcttttccggcccccgtgcactctccgcccgagcggagccccccggctcgcggggatcgcccccgagcg

SEQ ID NO: 122932 - DNA, 122 bp, Homo sapiens
ccaaggttactggtattgcagttcgtggaaggggaagagaggggagaaaatgaaatcaaccgaaatactggatggaggggaagaaaggtcaaaagaaaatagtttgtctgatatagaatata

SEQ ID NO: 122933 - DNA, 122 bp, Homo sapiens
tctccggctccttctggtagaagagccttcctccctcagggctgcagacccagccagagtcggggcccaggatttagcagtgaaggtggggctcgactttcctcacctttcctctttcctct

SEQ ID NO: 122934 - DNA, 122 bp, Homo sapiens
taagagccatgtgcctgatagatgggtcttgctaaggagctgatcttcagctcacaacagcgtctcctccgtgttctgttcctgaggtggcgagtcatgtgtggctgccacttcgtttgcac

SEQ ID NO: 122935 - DNA, 122 bp, Homo sapiens
gaggtggccggggggttggcgcgcccctcgcgcggggagcgctatgagccgggcgaagggcggcagcgacagccccagcaactgcctctgccggcgcctcccgcaggccctcgccaactcgc

SEQ ID NO: 122936 - DNA, 122 bp, Homo sapiens
cccggcgcccaggagcgccctgggtatctcctggctgctctcccgaatccttgcgcgccgcgcccctaccaggttcactgggtgcacgtagccgttctcatagcggtcctcctgcaacagct

SEQ ID NO: 122937 - DNA, 122 bp, Homo sapiens
cagggagatgagaaggaagcagatggcctcagaggagttcaggcagggcttggggagtgccgagaggtgaccggctgcctgtgcccatgcccacagaaagactgcaccccccgctgtgacat

SEQ ID NO: 122938 - DNA, 122 bp, Homo sapiens
ctcgcagttctgggaggtgatctctgatgaacatgccatcgactccgctggcacctaccgcggggacagggacctgctgctgaagcgtatcaacgtatactacaatgaggccagcggtgaga

SEQ ID NO: 122939 - DNA, 122 bp, Homo sapiens
gaaaagcccagaagtgtttcaagtggtgaccagcagagggcagcagtatccaccgcttcccgcagagcacggcgtgcggaggtagactgtcttccggtcccacccggagatggggaattcta

SEQ ID NO: 122940 - DNA, 122 bp, Homo sapiens
acctagttgggtccatttctctcacttctgagaccttttgctgctgccactcatagctaacgtgttttccatggaacactactccttgtccctaattgtcttctctccctacctcagcagtg

SEQ ID NO: 122941 - DNA, 122 bp, Homo sapiens
tagtggtctcaaatgtgcttccttctagtatagctacttatttggtcctatcatattcttcggtcacaattctctctacctcctagagaatgtttcaccgtgaactatgtgctgacttggaa

SEQ ID NO: 122942 - DNA, 122 bp, Homo sapiens
aagacaaaggaaaaaagcgtgtttgcaaacggggaagcggcggcgtgctgccgcgaggggcggggcggggccgggggaggagcccgcctgccgcctgccaagcccagtggtcctggccgtgc

SEQ ID NO: 122943 - DNA, 122 bp, Homo sapiens
caaagatcgtctgagcctcttagcaagcactcgtttatcatagcgagcctaggaggagggcgccaagcaaaacactaggtgtagtcttctcgagtagaatccaggcagtcgtggagcgaacg

SEQ ID NO: 122944 - DNA, 122 bp, Homo sapiens
tgcatagagcaggagccctgcgatgagccggggacccccttggaggtttagcggacaggacgtcatccacacaaagaagagccggcaggtcccgggctcacacaggtctggaatggtgccac

SEQ ID NO: 122945 - DNA, 122 bp, Homo sapiens
tcccacctgtggccagtccagcccctttcagcccaacccaggcgcccctccctccttccccgaaaagaactcaccgcgcccgcaaagggcgaccaggaagaaaaggaccagggaaggcgcgc

SEQ ID NO: 122946 - DNA, 122 bp, Homo sapiens
tgagcccaggagaatgaggctgcagcgaactatagcagtgtcatggcactccagcctgggcgactctggcagaatgagaccctgtctcaaaataaataaataaataaataaataaataaata

SEQ ID NO: 122947 - DNA, 122 bp, Homo sapiens
aattgaagcttatgttgcactgaggaagatttgtgtgatataacaggaagaacttccctgcgttagggtggtaagatattggagtaataataataatggccagcacttacagaatactctct

SEQ ID NO: 122948 - DNA, 122 bp, Homo sapiens
ctgggatccaggtgaactgagagccaggcagccccaggcggggaggtcagggctgagctgcgcttcgcggagagcttcccgcaccggctcttcgaagctccctgctccctctgcctccttgt

SEQ ID NO: 122949 - DNA, 122 bp, Homo sapiens
tttaataatacagttaggatgggttgccaggtctggcattgggcctagatgcccaggcatcgtggagtgcctccgtggtcactgggcacaggccaccagctcctccagggcttgctctcggc

SEQ ID NO: 122950 - DNA, 122 bp, Homo sapiens
tttcctattggctttgattctacctccttcacttgaggagcagctctctgctggcaaccacgtaccatcctgatttagaacttcccacaggctaacttaagacaccaaataaacacttgcac

SEQ ID NO: 122951 - DNA, 122 bp, Homo sapiens
ggcgaaggagccggagggcagtggagcgagcgcactgggggctcagacccaccccggacacgcggcttctcggccgtgttcgggacctagagcccgagggcctctcccctcggccttggcct

SEQ ID NO: 122952 - DNA, 122 bp, Homo sapiens
agcagtacagttatacctgggcaccaggggcagcctgacagaggctgagaggctgctggccgccagcttggccatcacggccggcaccgtcctcctctctgcccacttcctgctttggcaga

SEQ ID NO: 122953 - DNA, 122 bp, Homo sapiens
agcgcagaactgcataaagaaagaggagcgctcggccatgccgcacaggtccgggaggttcgcgttaatgtaccctgtttttgagcccaaggaacaagtatttagtcatgattgccactcgt

SEQ ID NO: 122954 - DNA, 122 bp, Homo sapiens
aaagattgcacaagaactgctttaagtagaaggactgatgtcagcaatcaagggtcccaccgagggctgcagatagttcttgaccttcacatgggaaggcgtcattgagttctgacactctg

SEQ ID NO: 122955 - DNA, 122 bp, Homo sapiens
tattttccttagcaaacatcttttactgcttttccaaaagactgaacttagccagaattacgacaggtaaaacttctcacttcatgagtttaatgaaatgactcgatctccccacagacgtt

SEQ ID NO: 122956 - DNA, 122 bp, Homo sapiens
ccccatggcctggaggcaggaggagatggccactgcatccagcgtcgcctcctggtgctgcgggcccctgacggacagaggacgctcgacccctgcccgccaccgcccagggagtcagcccg

SEQ ID NO: 122957 - DNA, 122 bp, Homo sapiens
gccccgctccgccaggtgcagcgcagcgcaggggtgggcgggggtggggctcggcgcgcacgttcacggggcggggagggggcgggtcaggggcgggaccacagccggctgggccggggttc

SEQ ID NO: 122958 - DNA, 122 bp, Homo sapiens
gccaggcaggaccctggtccagcccctcacagacagaggtcaggtggggtgggaggctggcgggagcgtggtcactgtcccggggagcggcccccacgctgagaagggcacgggtctccgtg

SEQ ID NO: 122959 - DNA, 122 bp, Homo sapiens
aactggcttctgattctgacgcagtcagtaagtgtatgacctgggcaagttgcttccctgcggcgtcccacgcccccaaaaccccccacccccccacccgtgccaggaatctatcgcagttc

SEQ ID NO: 122960 - DNA, 122 bp, Homo sapiens
tccaacaagttcagttgtaatctatcacttggcctcactgggcaggcgcccgctttcacacgttacctccatctgtttcttccttacctttcctctatttcagaaaacttcagtgcccaaaa

SEQ ID NO: 122961 - DNA, 122 bp, Homo sapiens
actcacctcctcagactgccttgaatccaggggtggccacatgactgggtaatgagtcaccggtagaagtcggcttgatggggcttttagggaaacaacggctttcctgtttttgtttttct

SEQ ID NO: 122962 - DNA, 122 bp, Homo sapiens
cttgcctttttaaagccaaaaacaggcattttaaatataaaatgttctgaaaaacatgttcgaaagcctaatgtgagtcaagcattatgtttacataaagggatgtgagtttcatcaccaca

SEQ ID NO: 122963 - DNA, 122 bp, Homo sapiens
ttggggccgttggcggctgccgcgcgctcggcctgcgcgtccctccgtccctccggcgcccggtccttgggtcggcatgccccgctgtcgggtttcctcgaagtcccattccaggtgtggtg

SEQ ID NO: 122964 - DNA, 122 bp, Homo sapiens
aacgtccaggagtccacaaaaggattcctcatgtgttgtacttctgcttctggactccttcgcctcaccctcagccctccaggcaggaagagagggacagggcaggcacacctaacatggga

SEQ ID NO: 122965 - DNA, 122 bp, Homo sapiens
ccaccaaactcagtgtgctatacattttgtctatgagtggccttcccaaagatccttagacgggtggagagctgaggggtaaggaagaacccaattcgaagtcttgatgataaaatttctca

SEQ ID NO: 122966 - DNA, 122 bp, Homo sapiens
tcggagagaggcaatccattaccagagtaaccacttgacttggaagacaagaaacagcaacgcctgagcctcttcgtccaacttctgggaaagagcctctaacagcaaggctgtcaataaaa

SEQ ID NO: 122967 - DNA, 122 bp, Homo sapiens
ctctctttcatcagctcctgtgagtgggtcttcttggtatgccgggtgaggtgatccttgcgcccaaatctctgggcacagaactggcacaggaagtccttgcatcctgtgtggaccaccag

SEQ ID NO: 122968 - DNA, 122 bp, Homo sapiens
atcttagacaacacctggttactcattacacatttattgtacattttcacaatctggatgcgccacagaattgggggcatggggtgggggaagaggggggcaggggacactgggataatatg

SEQ ID NO: 122969 - DNA, 122 bp, Homo sapiens
gaggttcaactcaacctctgtctttcatcagcatcatcatcactgttgtttttcgttgctcggcaggcttagaaaatcctctttatccgcttccctccagtccctgctctggttcaactcag

SEQ ID NO: 122970 - DNA, 122 bp, Homo sapiens
cagactctgtctcaaaaaaaaaaaaagtctgtggggacttccaatatttagaccaggtttcggcagtgcttggcactagttcttggaaattgttgcatgatttgattatttttctgggtatc

SEQ ID NO: 122971 - DNA, 122 bp, Homo sapiens
gctcaaacacactcaagccccaggacacacactggcacagacacgtacatgcatcctgagcgctgggactctcacgcatgccacctgccattgcaacgccctcccagctgagccaggggcct

SEQ ID NO: 122972 - DNA, 122 bp, Homo sapiens
tgttcgtgttgtaattgagtgcgtgcacactcagtaaatgcgaaatggtttcatcacaaccgcaccgatgcagttcctaaaagaaacacacgacagccgattttgcttctcaaaatcgctgc

SEQ ID NO: 122973 - DNA, 122 bp, Homo sapiens
gcttttaataaaagttttcttgggattcttaggttcaaatactgtatgacccaaccaaaacgaaacttatccacccacctccagaatggctttccattttatttttccaatcgtcaagagtg

SEQ ID NO: 122974 - DNA, 122 bp, Homo sapiens
ttgggccgaggacctcactttcagtcagccacagaggcgtcccgcagcccatcacccacacggagagtgcgaatggcctggcccggcctgcctgtctcattctcctgtacactccagcaaca

SEQ ID NO: 122975 - DNA, 122 bp, Homo sapiens
caagctgatcagtgagcttgtaatttcccattgccaggcccttggaaatgctggctgggtcgctttccatcctttatttgtttagctttgcctgcttctcagtggcctcaggagggtgaggg

SEQ ID NO: 122976 - DNA, 122 bp, Homo sapiens
agcatctaatgcctggacacggcccacgtgtggagcgcccagtgcctgcagcactgagctcggggctttgattcattcctctggccccatgaactggactgttcccgtgtcgctgtctcagg

SEQ ID NO: 122977 - DNA, 122 bp, Homo sapiens
taattcttaggcaaaagggtgtatttttctctttccttagaacctctttcactttctcagcgttcgtgtgccagccgccacgtcgcgtttttgtccttaaaaattacattttcaaacaggat

SEQ ID NO: 122978 - DNA, 122 bp, Homo sapiens
gcagccgccagcttgatggcggccgcgaacttggctgcagcggcagatctccgaccaaatcgcaggcgtggccgggactcttcgcttctgcagcatacagctggccgagggggagccgcggg

SEQ ID NO: 122979 - DNA, 122 bp, Homo sapiens
cttggccctgctggggcccacgagcagggctgtggctgctggtcgggaaagctctgcgctcggcccgtgactggaagctcgggcgatgtgttgggttcctggggctccggtgacacaatgcc

SEQ ID NO: 122980 - DNA, 122 bp, Homo sapiens
catgcctgctaggccatgcttcttcagaagtggccacaactctcctgacgtctccagagccggtcattccacccagggggacttcagctgccactggacacttcaattgtacgctgcgacca

SEQ ID NO: 122981 - DNA, 122 bp, Homo sapiens
acaaagctgggttcctgctgggccccgccctgctcctcgcccccgcgactgggctgggcgcgctgtcccctagcgcagctatgtcccgagcgcgcccccacctgtgcgttaatctactggga

SEQ ID NO: 122982 - DNA, 122 bp, Homo sapiens
ctggggtcaggccccgcacgggggtgggaagcagggctgtgcgttttgctttcatttccccgagaacagcaggaagctcattccacctggagatgtctggctgtctccttccggccagtccc

SEQ ID NO: 122983 - DNA, 122 bp, Homo sapiens
taacgcgtggtcgggctgctgctagcagtactggaaaggcgttctaaggcggcggcgtcgcgcggctgtggagcagccctgcgagcggcgggttatagcggcaccccggggacgcgtcagtg

SEQ ID NO: 122984 - DNA, 122 bp, Homo sapiens
gttcccgtgttccaggtcattgtgatgagagttccaggggacttgtgacacactgctggccggctctgttcaagtgtgggaggtcaggagcagccagttcctcctgggaatgcaacccatct

SEQ ID NO: 122985 - DNA, 122 bp, Homo sapiens
ggaggccgggcagggggcgctgcctgcacgtgcggcccagcccgcccgcggcccgccccgcgcctgtcatggctgcgggctgctgcccccgccccccggcccacagcccccggggtcgggac

SEQ ID NO: 122986 - DNA, 122 bp, Homo sapiens
aatgcccgacttttgggggcggggctcctggcaacagcactctaggcgcaggcgcagaggcgacctccaggcagggccaggtgggagggacggtggggggtagggtcgcgcggcgccctctg

SEQ ID NO: 122987 - DNA, 122 bp, Homo sapiens
ggaagggacaggaaactgaagctgtttccggggctgaccccggccagagagagcagggctcgggagagtcggcgcgtcccggaggcggcgccccctggaggccggtgtgctttggctctgca

SEQ ID NO: 122988 - DNA, 122 bp, Homo sapiens
tcttttatccagaccaacaaacacaccataggagctttgtggattcaaaggatttgctttcgcttctgaaagagccgctattctttgatgattgggtagcggcaaacttcaaagccataaat

SEQ ID NO: 122989 - DNA, 122 bp, Homo sapiens
gggaccctgcgtacctgccccaggtcctctgggaatgggctctgggtgccaggcaggtcccggtgcgtgctgctcctagtgcccagggcctcggcagtgagaccccaacccgacagctggat

SEQ ID NO: 122990 - DNA, 122 bp, Homo sapiens
tcctggctccgaagacaactttgccaggtagtcaggtttcctgagtcctgcagacaggcacggggctgccgtgccccctgacttctggtgtggccgcggccagctggacagaggtgggcagc

SEQ ID NO: 122991 - DNA, 122 bp, Homo sapiens
tggccgcgggggaagggagcggacacagagggggcacgttctgtcacttggcggggtgcgcgctcttctggtccttaggaggtctctggggagactcctttcctacagacctcttcaccttg

SEQ ID NO: 122992 - DNA, 122 bp, Homo sapiens
aactgcagccctaaccaacaacacgtcttctttttcgcgcccaatagtgtttataaaaagcgccgcctttcccgttcactttgtggttgctcgtagtgagttgcgctcgctatgtctggacg

SEQ ID NO: 122993 - DNA, 122 bp, Homo sapiens
cgcgcatgcgcagcggggcctggcccacgagggcgtcgcgggtgtgtcccgtcgccgcgccggggccacctggacccccagacctgcccctgccgcccgcttaggtggtggttcgggggccg

SEQ ID NO: 122994 - DNA, 122 bp, Homo sapiens
gacgccgcgccgagcacccaagctcaggactggacaaggggtcccggccggggactgggacggggaccgggccggggcgggccgggggcggggcccgctggggcgagggagccgattggccg

SEQ ID NO: 122995 - DNA, 122 bp, Homo sapiens
ccatgcttcccggccggagggcgagagccaagtgagcagctcgaggctgccgggggctgacgtcaggggggcgggggagggggcccggagcgcccgggcccgccccgccccgcgcagccccc

SEQ ID NO: 122996 - DNA, 122 bp, Homo sapiens
cctgggagctggccccgctcccgcgttccccaccctgccgcaccccgttgctgcggcagacgcgaccccgccccccgcaacggactaagcacccccacttcgccccgcctcggcccagtgcg

SEQ ID NO: 122997 - DNA, 122 bp, Homo sapiens
gtgtggcaaatgtcccctcctcccacagcgaccccctggcattttggtgagatgaaccgccgccctgagggaacacccagtaacgattccttcagtgatcccggttctccaaactcttgcct

SEQ ID NO: 122998 - DNA, 122 bp, Homo sapiens
aaagaaggtgttgacttgtgaaagaaccagttcctcatctcttatagtgtttaaaaagaacgccataatagaactccataatcctagagactcctttaactggtcacaccagctaacctcca

SEQ ID NO: 122999 - DNA, 122 bp, Homo sapiens
cgcgatgcagctcctgaaggcgctctgggcactggcaggggccgcgctctgctgcttcctcgtcctagtgatccacgcgcagttcctcaaagaaggtaattgtccccgggcgcgcggaccgg

SEQ ID NO: 123000 - DNA, 122 bp, Homo sapiens
cgagggaccctgatctctgcgcgcttcggcggcgcccgggtggcagccggtgtcccgccgcgtccctgagaggcttcggcctcgtccgaccccaggctgaagatcaggtggctcggggccgg

SEQ ID NO: 123001 - DNA, 122 bp, Homo sapiens
ttttttttttgagctggagtcctgctctgtcgcctggggatggattgcaatggcaacatccgcctcccgggctcaagcaattctcctgcctcagcctcccgagtagttgggattacaggcgc

SEQ ID NO: 123002 - DNA, 122 bp, Homo sapiens
gtgctcccccagagcagcctcccagtccccgctgccgtccatcttggagccgggcaaagacgccacgtggggcctacccttgctccgctccacgaggaggccgccaaccgcagggccgcgac

SEQ ID NO: 123003 - DNA, 122 bp, Homo sapiens
gaacgattgcctcagcgcgtgccagactctccaaacataataacagatgacgtttggggccggctccaggctgtgacgtgctggccccagagaatattgtctctgctattacaacagatgct

SEQ ID NO: 123004 - DNA, 122 bp, Homo sapiens
acgtgatagctacggcatgaccccgttgctcccggccagcgtgacgggccacaccaacatcgtggagtacctcatccaggagcagcccggccaggagcagctcataggggtagaggctcagc

SEQ ID NO: 123005 - DNA, 122 bp, Homo sapiens
tcccagggcccactgctggtctccggacaagtactggactctatttcccatgagcctatgcgcctcacaagtttaggggcggttttaaatgtctctaccccgcctagaggataagaaactcc

SEQ ID NO: 123006 - DNA, 122 bp, Homo sapiens
aacccagaggggactccatccaggcgggattggcggtgctaggtgagggcgagacggcggcgacttagcaggcggggcgcatgctgcggagggcaagagtccactcgtactcgccggtcgcc

SEQ ID NO: 123007 - DNA, 122 bp, Homo sapiens
cacaggacatacaacactatttcattctgccctggggtgatcattggcctaaacgttgagcgcccaatcctgcattcaatcccacagccccgccccgcccccccgtcatagtcaaggccgat

SEQ ID NO: 123008 - DNA, 122 bp, Homo sapiens
agtgggaattctgactccttccaattcccctgcaacaaagtttgtaccaggagcatttggcgagtgtccagcaagatgtgcccgtggatgtggatctccccaggccctgcccttcccgcacc

SEQ ID NO: 123009 - DNA, 122 bp, Homo sapiens
gtaggttttccagccaacagcccaaagcatcagccaacagccggcatcaactgtgacatgcgagaaagtaagcctccagatcagtccagctcccactatcaagcagcccaggtgaccccaca

SEQ ID NO: 123010 - DNA, 122 bp, Homo sapiens
ccggccacgccctccctaaccctggcggagctgatgggtggctgtagcctgattagaccgcgtcagtccggagggtgggtcttgggagggggcgcagggcagtccacgtttccactgcagtt

SEQ ID NO: 123011 - DNA, 122 bp, Homo sapiens
agtccaaggcccgcctgggcgcggagcccgcctttccgccgctgggttcgctcccggagccggatttctcctatcagctgcaccctgcggggcccgaattcgctggtcacagcccgggcgag

SEQ ID NO: 123012 - DNA, 122 bp, Homo sapiens
cagaataaaaaattactaaaaaaaaatcttctcaaaattacggaaatcgagcggcggcggcggcggcggctccccccgcccgccggcccgcccgccccctccccggctccccggccccgggc

SEQ ID NO: 123013 - DNA, 122 bp, Homo sapiens
taaaaggggagctcagcaagctgggcagtcccgcttccaacccagagagggcgagggtagcgcttggaattttgagattgggctgtctggcgcggcttccaattccagtcttttccgccagg

SEQ ID NO: 123014 - DNA, 122 bp, Homo sapiens
tcctggcgtcaacacccctcgcctttcctctctgcctttacacaccacgagggaaaccagcgggaagggtggccccgcaacaccactaaccgatagatggcgtacgttgattggacagtgcc

SEQ ID NO: 123015 - DNA, 122 bp, Homo sapiens
gtggtcacttatgactactgctggcccacggggactcccagctcccctggcagcgcctggcgcccactggcaccttggcaatcctctgccggtgtgatgcgtctgtgctccggggctggtgt

SEQ ID NO: 123016 - DNA, 122 bp, Homo sapiens
tgtcaggtgaagccccgcccactggctcgggcggctccgccccgtccgtcttctctcccgcgctccgctcttgaagggttccagtgtgtggtgtttccaactttctcatgtcccctcgggaa

SEQ ID NO: 123017 - DNA, 122 bp, Homo sapiens
ttgtgccattctctccactcacagccgtaccacaggtataaaccttgtagaggcggacaccgtcgtgttttatgacaatgacctgaatccagtgatggatgccaaagctcaggagtggtgcg

SEQ ID NO: 123018 - DNA, 122 bp, Homo sapiens
caggtggcagctgcaggcagcggggcgagaacaaccagggcagccggccacccccgcctgcggaagctggagccctgtgagctgacccagcagctgtcccaggaacccacagggcaccagca

SEQ ID NO: 123019 - DNA, 122 bp, Homo sapiens
tctcgggcgtggtcattcagcagttcctctggagatgttcttttcacgttcctcctgtagcgaaccactagtatggtcgaggactcagatgttttcatttttttaggagcaggttgcgggtc

SEQ ID NO: 123020 - DNA, 122 bp, Homo sapiens
cgttttcccgcaggtgcatgcaggcccgcgttcatctgtgcagcccttcctgctgccctgcgggccccatgcactgcagaccccgctgcctcagacctgtgcctgcgtggctggcacacctg

SEQ ID NO: 123021 - DNA, 122 bp, Homo sapiens
gtctgtctgactccagagcctctgcctgaaacttcacaacctgtttgagtttctgatggacgttctcaatgtgggcccaagaggttgaactataggatcactatagtcttttccagctccag

SEQ ID NO: 123022 - DNA, 122 bp, Homo sapiens
gcggtggctgaaccctgcggacctctcccatctgctccaccccgaccgcctgcggttccgcgcccaaggctggacagaaggcaggagaaatttataagaaacagacaagcaaaaaccctggc

SEQ ID NO: 123023 - DNA, 122 bp, Homo sapiens
ttgatgtagggcaagttcaaaacccccaaagccttgcacgctggtaggtcggattacactcgcaagctgggggaaaatacaacacgtaaaatgtgaaaaagacctctgaccctgaaagtctc

SEQ ID NO: 123024 - DNA, 122 bp, Homo sapiens
cggactccggggaggcttggtctgcgccgcgcagagacagcagccgccgggggcggggcgcgagccagcgaatttgcagaacttccctcaattgggctttgtctgtctcatctcgactggat

SEQ ID NO: 123025 - DNA, 122 bp, Homo sapiens
cgcagccgagccccgccacgcgcgccttgcccgcccgccggccgcccccgccgcccccgccgcccccgggccctgatggactgaatgaaggctgcctacaccgcctatcgatgcctcaccaa

SEQ ID NO: 123026 - DNA, 122 bp, Homo sapiens
tctttccctcctctctccttccttagtgcaaaggagggcagcgacttgaatgcggtaggccgccctctgggccctctcctgtctgggttgcagctggcgtttcgtgtcttggcagtaacact

SEQ ID NO: 123027 - DNA, 122 bp, Homo sapiens
agggaggcggcggatgcggtctgggagggctccaggcgtgagaaggcggcccttgcctggcgcaggggagcagggagcttccagggtgggtgcggggaggaaggaggagtaaggggttagag

SEQ ID NO: 123028 - DNA, 122 bp, Homo sapiens
ttaaaaacgcagacccctggcaccaaagcacctgagagaaccagtagacctggagacaaccgtctgcaccctagacacagggatctggaggcctccaccctccccacaaggcccaagggtct

SEQ ID NO: 123029 - DNA, 122 bp, Homo sapiens
aacaccggcctcctgcccctgggtcttcctgctatttcttcctgcccctcgctcccgcctcgagccaccccctcgtgctccccaacgcccgctcctgtgctggtcactgggggcagtgagag

SEQ ID NO: 123030 - DNA, 122 bp, Homo sapiens
gtctggaaagactgtttttccacctattattggaaaaattcacaagaggagatcacaccacgctttggagaagccattccgtagaagacgtgttaactggttaactatagtttgcacactag

SEQ ID NO: 123031 - DNA, 122 bp, Homo sapiens
ttgccaggggccagatcataaccctgaggtgacacagggtaggacgcgcaaaaccaccggcgccagggcgtttccgcagggtttcccaaaactcaaacgcagcggctcacggtttgccacgt

SEQ ID NO: 123032 - DNA, 122 bp, Homo sapiens
gccagagagaaagagcctgaggagctggaccaggggttggggggcggcctttagaagcagcgtctcatgcagccttcccagcgatcctgaggtaggtgggagaatcttcaggccacggctga

SEQ ID NO: 123033 - DNA, 122 bp, Homo sapiens
gtaaacgcccaaagtcctgaggtttaagaggaatcgtgcccttcccaggcccgcgacctccggtgcccaaggcctcaagcggtcacagctaggagggcggaagctccccttccccgccccgc

SEQ ID NO: 123034 - DNA, 122 bp, Homo sapiens
gcaagacttcccgatcactgggcaactccagagccctgcttcgggcctctgaccaggcgacggagcttggctcactctcaatgcctgaatcagatatgatggatgaagatctcttgatgacc

SEQ ID NO: 123035 - DNA, 122 bp, Homo sapiens
cttttgaaaaatgagagaaactaagtgccagaagtcaatgactttgtttcacgctcaattcgctcccaggcaccggatctgagagcaaaccttttaaatctcccctcctgctcccaaacttg

SEQ ID NO: 123036 - DNA, 122 bp, Homo sapiens
gttcagcagaggctgcagtgtgcagcggcggaggctgcgcgcggatttctcaatcagggccgcgcgctgaggtcttaaaggcaccggcgccagccgagcggagggcgtgtccgcgaggaggc

SEQ ID NO: 123037 - DNA, 122 bp, Homo sapiens
gaagcacctcatctgactacagaaaacaacgacatctggagaagttatttcctgcataatcgggaaaaagaaatgaatcaatcacttttaaaacaggttcttccttttctactgtcatctat

SEQ ID NO: 123038 - DNA, 122 bp, Homo sapiens
cactccccggctgttgttgtgttgttggcagggcagagggtctaggatgccagcctgctccgggctgcgctgtgcgcctagcccagggcggggggatgcggggcgacacccgcctcccggtg

SEQ ID NO: 123039 - DNA, 122 bp, Homo sapiens
gactaggcggtaactgccgtccttctctaatatctgcccctgtgaccaggcgataactgccgtccttctctaatatctgcccctgtgactaggcgataactgccgtccttctcttccatctg

SEQ ID NO: 123040 - DNA, 122 bp, Homo sapiens
ctctaccaaaaaaaaaaaaaaaaattagcctggcacagtggttcatgcctatagtctcagcgactaaggaggctgatgtaggaggatcacttgaacccaggaggccaaagttgcagtgagtc

SEQ ID NO: 123041 - DNA, 122 bp, Homo sapiens
ggactacaaatcccagcatcccctgcactcggttcctctgtaacttagactccagtgtgccgcgcagtgtgcgcaaattcacaaacccgcccgctgagttggtcgtttcggaatcccgagac

SEQ ID NO: 123042 - DNA, 122 bp, Homo sapiens
tgtgtgtgtgattagcacctcggcatttgtttgatagactacgatgcaaacctttaccagcgtctatttttttttaatctctgcactggcttcggctttaaagttttcaattcctatgtgat

SEQ ID NO: 123043 - DNA, 122 bp, Homo sapiens
agcccacaggaatacaaagtgagaggtgacagcatgctggcagccctcgcagccctcactcgttatccgcgccttctcggccttggcgcccactctggccgcgcttgaggaacccttcagcc

SEQ ID NO: 123044 - DNA, 122 bp, Homo sapiens
agctgggaagagagagagagagagagagacaggcagacagacagagcaagctttttcacacgcagtatgtcagtactaaaagaagaggtgtgacagttccacaaggctcccccaaaaaaagt

SEQ ID NO: 123045 - DNA, 122 bp, Homo sapiens
cggcggaaaaggcgcgtccgcggcttgggggacggaggcggggtcgggggcgaagggaggcggctcctggggcccagaaagctggcgaggatgaggaacctccccccacctccactcccagc

SEQ ID NO: 123046 - DNA, 122 bp, Homo sapiens
gggtcggaggcggcctctcccagaccgggagtgcccaggaggacagcccgcacccctcctcgccatcctcctcaggtaggttagctgagaagcggggagaagcagcttgtacagcagccctg

SEQ ID NO: 123047 - DNA, 122 bp, Homo sapiens
gtccccgcaagctggcaatttacctgaagccgcagccccagccgcgcccgcacccgagcccgccccctcgaagtccggggactgattatcaaggccttcgccctaactgacggccacgccag

SEQ ID NO: 123048 - DNA, 122 bp, Homo sapiens
ggaaaacgtgatacttgcaagagtttaaaacaacttgtaacaactggcagtgaggcggggcgcgtggagagagcaggataccaaaaaagctgtgtgtggcaatgcggggtggaggctgacct

SEQ ID NO: 123049 - DNA, 122 bp, Homo sapiens
tcctggctaaacgtctcaaaaaagtggatacactttctgtcaactcctaaacactcctcacgctcatttggcctctgctcctcccttcctcctcccacttcattggaactacttctgccaaa

SEQ ID NO: 123050 - DNA, 122 bp, Homo sapiens
gcagaaaggcggaggaaatccaggaggcagaagtgaggaccctggcgcctggcgccgctgcgttgttcgtataagaagaggcatcccggaaggggcttcaaaccacttaggaccgactgctg

SEQ ID NO: 123051 - DNA, 122 bp, Homo sapiens
gcctttctcctccaggcccaggcttgggcaggggcctccaggggctgagtccagcatccccgggtttgagccccagctgagtctcttgtgctctgcaaagaattcacttgatcttttcatgg

SEQ ID NO: 123052 - DNA, 122 bp, Homo sapiens
cccctcctaagacgcaggatctgcctgtaaacgcccaaagtcctgaggtttaagaggaatcgtgcccttcccaggcccgcgacctccggtgcccaaggcctcaagcggtcacagctaggagg

SEQ ID NO: 123053 - DNA, 122 bp, Homo sapiens
tctgtcgcgggacgggctggccagctggggcgcggagcctggaggaggaggcagcggcagcggcagcagcagccctccgagcagcagcagctgcagcagcagaaacaagtaccagccacaaa

SEQ ID NO: 123054 - DNA, 122 bp, Homo sapiens
aaactggcaatatcaacgtgtgctcacctcacaaatctgacaacagtatctctacactgccgttctttaaacatcattaaaagatattgtgaatagtttaaatattaaaaatgtggaatata

SEQ ID NO: 123055 - DNA, 122 bp, Homo sapiens
ccacccctctgcggactctgcagctccgcggccccggcgcagggagagggagggcacgggcgcgggccgggcctcaagggtgagtgtgaaataaacaaatcctgcagtgtttctgcgtccta

SEQ ID NO: 123056 - DNA, 122 bp, Homo sapiens
ctgggtccacgtggctttttggtgctgtccccgcagcttgaggcaaggaaggtggagaggcgccgcctgccccgcctgtgtctgcaaggaaccgtgctgactccatgatggctctggcccag

SEQ ID NO: 123057 - DNA, 122 bp, Homo sapiens
tcgggcagtctcaggaaggaccagtcaacgcggtcctggaaggaaggaatctgagacctgcgtgggtgaggcctgggcatttagactcacaggagatttcacagccaagactatccctcctg

SEQ ID NO: 123058 - DNA, 122 bp, Homo sapiens
ccagacctgaggacaaagccggcccattattggggtgtttcccctgtgctacacactaggcgtggaagcatttggactggcattgtgtccagaattggttcccgcccgtggcttcctggtct

SEQ ID NO: 123059 - DNA, 122 bp, Homo sapiens
cgaggacatctcggggaacaacggctacgtggagctctccttccgggccaggaagctggacgacaaggtgagtgcaggtgccgggcacgcctggctcaggctgaggtccgggaaccggttcg

SEQ ID NO: 123060 - DNA, 122 bp, Homo sapiens
taaagaaaatctgtggctccagaacttttatgttcttgcttaaatcttccaaactgaaaacgatcctgaggttccctacaccataccccgccccaccacatccttcatctagacacatcctg

SEQ ID NO: 123061 - DNA, 122 bp, Homo sapiens
gttttcaggctccgcccgctccactcgcgctcccgccccttccttcctctcgaggtgacccggcagctggcgcctttctcaccaggtacccagccccctggccgcctctctcagttctctgg

SEQ ID NO: 123062 - DNA, 122 bp, Homo sapiens
ctcaggcaggggatggagttgggagcaagaaggcgggcacccacctaccccagcatctgccgtgtggacgggaagtgcacgctgtctgccatggggatggtgggtgtagcgatttgcagtgc

SEQ ID NO: 123063 - DNA, 122 bp, Homo sapiens
gcttcctgcgatcgagaatgggttgggaccgggacggccaagccgatgctgtcggggacacgctgggaggaagaagtacggggaggaggggcgggggcgcagcctacccgggctcgggctcg

SEQ ID NO: 123064 - DNA, 122 bp, Homo sapiens
ctttcttctgacaagaattgaggttgctgcagccccctgcagattcactaccactaacaacgggaaggctagagggggctggaatcttctaattgccctttccctagaacagataaggctct

SEQ ID NO: 123065 - DNA, 122 bp, Homo sapiens
ccgccgctggtccttggcgcgcaaatagcgggcgaagtcaaagggtcccgtaggcgtgggcggcgccggtgtgtccccttcgtaggccggcggggctgcacccgcgtcgggtaactggaacg

SEQ ID NO: 123066 - DNA, 122 bp, Homo sapiens
cggcgtccagtctccgttccacccccacgggaggaacacccatcttcaagtcacagaacacggtcttcagcgaacacccttcctgcatgacctccactgttgcccggccctgcagcagcagc

SEQ ID NO: 123067 - DNA, 122 bp, Homo sapiens
tagcgccgccgggcgatccgaccaaatatccttgaacgcctgccttcgcgagacaggatacgataacacaaagctgggttctcaggcaaggccgactccaggttctgcctagaaacgcagag

SEQ ID NO: 123068 - DNA, 122 bp, Homo sapiens
ggtcaagagcaggaaggtgtaagcaccggcgggtttcactgccgcccaagggaggggtcccggaggtgggggagcatcctggggaccccaagcccatgagcctgcgaatgttggggtcccat

SEQ ID NO: 123069 - DNA, 122 bp, Homo sapiens
agtcgcagacacccacccctggatgctgctgtggggctggagcccaggggcactcatccccgctcctgcacctgcccgtctctgtgctccccctcctgtaaggggtttgaacatgcatggcg

SEQ ID NO: 123070 - DNA, 122 bp, Homo sapiens
tgtgattagcagctgtgcaggagcagccgtgatttatgtccccagtcgtctaattatccccggccctggaggaggagaaatgaggcgctttgcagggctgggagcctgaaatctcagcaggg

SEQ ID NO: 123071 - DNA, 122 bp, Homo sapiens
gagcagctgctggcagcatttccatcttctctgtggtcagttcagggtgagggagcctcccgcccctgtggttccgaggcatgactgagctggcctcagcccccaggtccttccttggctct

SEQ ID NO: 123072 - DNA, 122 bp, Homo sapiens
gtcttcctttccttgagcattgatgcagcccaagttcctacactgggcctgtacaacttccgaggggtaccggttggggtcccaagtgacactgcaggaggagcaagccaaagcacaatggt

SEQ ID NO: 123073 - DNA, 122 bp, Homo sapiens
agtggttaccagagactggggaggaaagagaggaggtgagaatgggcagcagttgatcaacgggtacaaagttaccatgagataggagaaacaagtgctggtgctctgctccaagtagggtg

SEQ ID NO: 123074 - DNA, 122 bp, Homo sapiens
atataaacaccatagcccaccacctagatgctatgaacattctgccattcttgtttatcacgttatttatccgtcctcctccccatcggcaatcctccccataactgtggggtcagggttag

SEQ ID NO: 123075 - DNA, 122 bp, Homo sapiens
gatgcctctctcagggaactggttttgcctggcagcacgttacctgcctctgcagcgaggcggcagggaagggtgcgtgccctttcatgaccttcatgagcagcgtgatccactgcggggag

SEQ ID NO: 123076 - DNA, 122 bp, Homo sapiens
attataacttcttttgtgatgttcttgtatttcgcttgtaactctttctccatgcgagtacgtccaccatgtccaatgctgagatgtgtattatgcagaatgtcaaataagtcctcactgtg

SEQ ID NO: 123077 - DNA, 122 bp, Homo sapiens
gtttgaaaagcaggatcttgtcgtaaaggccgtagaagccacactcagggaactgaggggcgggagagggatgtggcgacggaaaagctcagagccgccttcagcagcgggcggactgtgac

SEQ ID NO: 123078 - DNA, 122 bp, Homo sapiens
gggactgcagggccgggtccaggcggccactggggaagctcacctgcgccaaggcccacccgggatgaccccaccgccagcacttccaaggggaagcccccgtcatgaagtgttggccagag

SEQ ID NO: 123079 - DNA, 122 bp, Homo sapiens
aggcacaactgagagtagaaatgaggtcatactgaaatggggaggataagctcaggacctcgtcttacttggctcccagaacgctggcaatgagtcatatatcccctgggcattaaatttaa

SEQ ID NO: 123080 - DNA, 122 bp, Homo sapiens
gaatataatccaaagatatcataattaaagtttactgagtactttctcaaccatacacagcgttaaaagtggcattgttttaagcacttatatttattaacatatttaatccctaagacaac

SEQ ID NO: 123081 - DNA, 122 bp, Homo sapiens
cccctgggtccccatcttgtggcccttcagcttcttttgggatagcacagcctgtcccctcgttgcctcccccaactccgtgaaggccacagtcatatttcaccccagccctggcttggggc

SEQ ID NO: 123082 - DNA, 122 bp, Homo sapiens
aaaaaaatgagtaagacattttatatttatccggggctagttgtcaataactctcacttgcgtaaggtctttagttgaattttttctatgagtccagaatcctcagcagaaaaaagctccca

SEQ ID NO: 123083 - DNA, 122 bp, Homo sapiens
aaggtatagtaccaagcaggagagaaatgcatggagagtagagaaatatacacagagaaacgccagcgaatttcagaggattcctgacaaggagtcttcagctgagtactgcttgctccatg

SEQ ID NO: 123084 - DNA, 122 bp, Homo sapiens
tatgtttatcctgccaagtactcagacatcaagtcagaggatgagcggtggaaggaggagcgggaccgcaaattgaaggaggaaaggagtcggagtaaggactctgtccccaaggaagatgg

SEQ ID NO: 123085 - DNA, 122 bp, Homo sapiens
gtgtgagtgcgtcggtggccgcgggattaccccgggggcaggtggagcagagtgcaccgtcggctaggctggcagaatggggcatggtggggcacagtggggtgcagtggggaatggtgggg

SEQ ID NO: 123086 - DNA, 122 bp, Homo sapiens
ggctccagtgggtcagcctccgcgtcccctgcgccctctcgcttggcgatagtggtccttcgaaaaccccatgttttcctgaactctttgctggtgggtttgatggccttaggtgcctcctc

SEQ ID NO: 123087 - DNA, 122 bp, Homo sapiens
gccacctgttcctggcttctcatttaatgaagttgcgatcccagttctcattattcttctcgcttgtgtttcgttgtctttcccaccctcgtggcgtagagagctttggagtcaaccccatg

SEQ ID NO: 123088 - DNA, 122 bp, Homo sapiens
caggaagcccctttgttcctccttggggccccagagcacctgagtgaaagagtctgagaccggaggggcagccagagggggccctggagggaggcggagggaccccctccctgggccagcca

SEQ ID NO: 123089 - DNA, 122 bp, Homo sapiens
ccaatccaggatcaaatcaatgttcacatattattgactgtgttgacttctttgaaggtccggggaattgtggagtataatgctccacaatctggatttgtctggtggattctgtatgattc

SEQ ID NO: 123090 - DNA, 122 bp, Homo sapiens
ctttcccggtctgctaagtagcgggtgttttcccttggcactgacgctaccgttagaccacggtccacttggcaatgggcatcttcccagacgctggcattactgctagaccaaggagccct

SEQ ID NO: 123091 - DNA, 122 bp, Homo sapiens
ttttcattttgcgccaggcctctcaaactgtggtcctgggtgccaggactcctgctgcctcgggatcccgccactttacttcccagaaatgcgctgagcccgtccctttcctgccgttgctc

SEQ ID NO: 123092 - DNA, 122 bp, Homo sapiens
cccataccggagcctatatgcatgtgcattaactcgcaggtgcacgaacccacggtcacacgtgctgtcatgcattgtacacctgtgcttgttcatgcgtgttcacagacgcatacgtgggg

SEQ ID NO: 123093 - DNA, 122 bp, Homo sapiens
cagcatagagctttttcagatgagattcttttgcttagccatatgcatacaggtttcctgcgtatattgtcatagcttgatagcttatttttctttaatgttaaataatactccattgtata

SEQ ID NO: 123094 - DNA, 122 bp, Homo sapiens
gaacgcccccgtgcacagcctcagccggccgcgcctcgagcagccagctggcccgcgtcccgtcacccgcccggtccatgtccctgcagaccgtcccgcccgcgcacagcggcgggaacccc

SEQ ID NO: 123095 - DNA, 122 bp, Homo sapiens
acatacaatattttgttcttctggtgctaacgactaatggaggcaaatctttctccctttcgtaaagggctaaaactttgcattttaaggaagttccaagagcagggtcggaggggagggtc

SEQ ID NO: 123096 - DNA, 122 bp, Homo sapiens
agcatgcgcgctagcccttcccaattttttttttaagattgtgtacgtggaacaagaaatcgtttgtttattgtgtctgccagagaggatgaactgtacaatttcaggaatggaaggggctg

SEQ ID NO: 123097 - DNA, 122 bp, Homo sapiens
cgggcgctgtcctcggtgctgctcagctcagcgttcctccagagttctctccctacaccccgcacccagttctcagtatttatcccgacggccccaagccgggccacgcctcctccagcctc

SEQ ID NO: 123098 - DNA, 122 bp, Homo sapiens
cttttggcccacctaccatgaggcagggagccccctcctcaaaccaggagcctcccagatcgggatggggactgtcagacacctgttggagggtccagcagcccatgagatctaagccccta

SEQ ID NO: 123099 - DNA, 122 bp, Homo sapiens
caccagcaagtgctgctttactaactgacgtgttggaccaccccaccgcttaatggggcacgcacggtgcatcaagtcttgggcagggcatggagaaacaaatgtcttgttattattctttg

SEQ ID NO: 123100 - DNA, 122 bp, Homo sapiens
cccttccagcgctgccggcggcggggcgggtgccgggcgcgcctgctgcgcggggcgggacgcggactcccaggctctgcggagagcggctgccactcgcctctgtttttttcttgagacct

SEQ ID NO: 123101 - DNA, 122 bp, Homo sapiens
aatccagtctaattcagtagtatatagcttattcccagtgatgtctcacattcgcaagcccgttacacgttggttttacctgtcaccaaaacctttgtatcactcttataaaaaaccacatc

SEQ ID NO: 123102 - DNA, 122 bp, Homo sapiens
ccaggtgaaggaggaggaattggcttagtttaagagcaaacttagtctgctgaagtcatccgttcctgtcaagcttctcgctgctctgctctgtacctcacagtaagtaggataactagggt

SEQ ID NO: 123103 - DNA, 122 bp, Homo sapiens
cctctgtcggagccccgcccccgtcccgaggtcctgtgggaagtgaggatctcacccgcgcgtctgcgctaaagcgcaggcaccgctgagcccagtgaaactacaactcccagtgacgccac

SEQ ID NO: 123104 - DNA, 122 bp, Homo sapiens
gaggggccagggacactttcccagggtagatttgttctctttgtcccttagccaaggcgccgttatggagaggacgatggtggttgttcggcttgtttgtcggaatccctcccctccccatc

SEQ ID NO: 123105 - DNA, 122 bp, Homo sapiens
caccccctgccccggtttgggagtcggcttcctgcgaagcgctgactgaaggcgtcagaccgaggccccgggaggaaacagacttcgggaacaaggctagcaccagaggctgcgcgccccgg

SEQ ID NO: 123106 - DNA, 122 bp, Homo sapiens
gtcctctcactagagtcgaggtcccctcactccaagtcgaagttctctcgctcacgcacgcgctcgggcactcgctcttgcagccgctcttgcactcactctccatcaacctctggatctgg

SEQ ID NO: 123107 - DNA, 122 bp, Homo sapiens
tttaaatttttgcaaaacatgctcttctaatttgatcaaaacattgaggattggtaatggcgtcttctatcagaaggggccgaggggcctggacacggctgctctcgcttctgctcctcgca

SEQ ID NO: 123108 - DNA, 122 bp, Homo sapiens
aagctggcaaaacaagcctgtaagtgcgcgtgcgcacctgacggtcagacgtaggcggaacgccccgaggtcataggcggggtcacgcggaaggccgggcagcgcagggcgaaaggaggctg

SEQ ID NO: 123109 - DNA, 122 bp, Homo sapiens
gccgtctgagtggcctaaaagggaggctctggggccgctgctcgcgacggagagcggggacgcggcccaggaacagctaacgtgccgcttgctgcttgccaggtatggaggatgcctatcct

SEQ ID NO: 123110 - DNA, 122 bp, Homo sapiens
gacgcagctaccttctttctctccaggcgctcttgctcttctctctggaaatgcttctctcgttcctgccggaccctctctgcttcttcacgaacgcgagcttcttcttctttctgaaaaca

SEQ ID NO: 123111 - DNA, 122 bp, Homo sapiens
ggagcagggggtggttttcctgtgccggctgtgcgggagacaaggccgggagccggtgctcgggtgcccgcagcctccaagggagtgccttcggcagggtcacgtgcaacacgagaggagtt

SEQ ID NO: 123112 - DNA, 122 bp, Homo sapiens
gcacttactttacctggcccagtcttgcctgacaattaaaaaaagacgctttagactgggcgcggtggctcacgcctgtaatcctagcactttgggaggctgaggcgggcggatcacgaggc

SEQ ID NO: 123113 - DNA, 122 bp, Homo sapiens
ggctcctgctcgccgagaatttgaagacaaacccgccagggtcacttccggtgccggggacgacctcggcgactctggcgcacgcggggcgtcgccccgggagcgaggtcgctgggcgggag

SEQ ID NO: 123114 - DNA, 122 bp, Homo sapiens
gctgaggaagggaagagctggggcaatgaccagaaagcatcggtggaatttgacattgaacgtgagggtgagaaacacagactcaaaaagggccccacttccggattgagcagtttcacagg

SEQ ID NO: 123115 - DNA, 122 bp, Homo sapiens
ctgccgcaatgacaacaaattgctctgcaccttctgcaagttctctttccacaatggccacgacaccattagcctcatcgacgcctgctccgagagggccgcctcactcttcagcgccatcg

SEQ ID NO: 123116 - DNA, 122 bp, Homo sapiens
aactctaaacctactggggacacagagtcgcgcttttcctaggtcatgcctgtaacgtgtcggcgggcagctgagaaagaccgaagcgtggacattcagcaatacagcaaaggggaaaatga

SEQ ID NO: 123117 - DNA, 122 bp, Homo sapiens
tgtgagaattttcagcgttctagcttatcttccttcttaccttttgtaccttggcacccacgctgacaagtgtgggaaaaggtcatggtcttgattctgcactacagaggagaggcacctca

SEQ ID NO: 123118 - DNA, 122 bp, Homo sapiens
cactaggctgaccgcaaccggctgaccacacacagtcctcactcccctggccctggtgggcggcaggcaccatggcgcagacagtgccgccctgcgagctgccctgcaaagagtacgacgtg

SEQ ID NO: 123119 - DNA, 122 bp, Homo sapiens
ccccctcagttttgctctctccccattgaagcatatttatttacttcgtcaggaaagggacgtgatgaggcaggtgaagactatagaatggtccttctgggcttgatcacaggcctgatgga

SEQ ID NO: 123120 - DNA, 122 bp, Homo sapiens
ctcttggatcgaattaatgcattggctcttcccttcgcaacagctttgatgaccgtttcccgcctttgtgcaaagcgttagaacaaaccctaccttcctccaaacgaaggagaaaaatctca

SEQ ID NO: 123121 - DNA, 122 bp, Homo sapiens
cccgtcacctggggccccagcacctctccttggctttgcagacgatgttccacaggagcccgtgcccacgctgtggaacgagccggccgagctgccgtcgggagaaggccccgtggagagca

SEQ ID NO: 123122 - DNA, 122 bp, Homo sapiens
ccttcgccagcacctaccgccagcagccctcctacccgcagcagttcccctacccgcaggcgcccttcgtcagccagtacgagaactacgaccccgcgtcgcggacctacgaccagggtttc

SEQ ID NO: 123123 - DNA, 122 bp, Homo sapiens
ccctgctgctcacctcctgctgtgcagcgcagttcctaccaggccatgatgggtacgggtcggacaacctgggagttagggacccctgctccaagtgacccactgaaaggcaacctgaacta

SEQ ID NO: 123124 - DNA, 122 bp, Homo sapiens
aggcatgagataaattgttgacgagggtatggagaaaagggaaccctagtacactgctggcggagtcattatggaaagcagtatagaggttcctaaagaaattaaaagggaaactactacat

SEQ ID NO: 123125 - DNA, 122 bp, Homo sapiens
gctcatcctcagggaacctgccatgggaagcctgcatgagagctccgggtgtgttcatctcgactctgaagcgtgaaccgtggtaaagctttgctgctgcaggaccggctaattggcagctt

SEQ ID NO: 123126 - DNA, 122 bp, Homo sapiens
tccggtgagaagtgatcaagcttgggctgacaagaggctcagggagccctcacgttctttcgcttttttacctgccaatcaaactgctacaagacaacaccctgatctggcatggacatgta

SEQ ID NO: 123127 - DNA, 122 bp, Homo sapiens
gacacctaacgcccttggaaagggagtgaattggtaggatatcatcgctccggttagttccgcgggagctgcccttcagaaaaaaaactttccagagccaaaagttactttccaagcgcctt

SEQ ID NO: 123128 - DNA, 122 bp, Homo sapiens
atggataacggatgaattcccagaaacaaatgtcgcggagcagatgtgtataacagcaatcgtctgtcagcgtcttccgtcggcagagacctgcttggagacaatgctgaattaaatgaggg

SEQ ID NO: 123129 - DNA, 122 bp, Homo sapiens
caggaatagatgttactgaattgtcttgttcagggacaagtggtgtctctcccagcttctcgtcgaccctgattggccatgttctctgcggcacggggctggttgcagtggccggcgggcgc

SEQ ID NO: 123130 - DNA, 122 bp, Homo sapiens
tgttgactgtaggtcgaaccagccttgccgggaggggaaccgaagctgagttctgtttggcgactatcccagtcatggtggctttggcttatgttgggacagcgtttttctatatgatgctg

SEQ ID NO: 123131 - DNA, 122 bp, Homo sapiens
aactagaactataaggcaatagttgagtcacagtgcggtaacatccgtgcctttgtagggcgcttctcataagctggaggctgtccgcctctgtacttcaataaatcaaagtcagaccaact

SEQ ID NO: 123132 - DNA, 122 bp, Homo sapiens
cgggatcgctgtggggccggatggcttctagacttccgggtgattccgggagatgggggacgccttgcagtaagcgtctttgcttctggaaacatctcggatgttccctagagtctagccta

SEQ ID NO: 123133 - DNA, 122 bp, Homo sapiens
aattactatacctacaacattcccttgctgaataaatgccatctgtagaaaatggtaggccgagaaattggacttgagttgtgacgttgctttggttccaatgatttagaacaaaatttagg

SEQ ID NO: 123134 - DNA, 122 bp, Homo sapiens
gctgtaaccactaacaatctagagaaattagttttctcccatgaattttacactggcctccgtcttttcaaaacctatgctctgcttcaagttatctgccttcttcacccctctatgagtag

SEQ ID NO: 123135 - DNA, 122 bp, Homo sapiens
gggattacaggtgtgagccatcgtgcccggcctgttttaaaaaaccatattggcccaactcggtggctcatgcctgtaatcccagcactttgggaagccaaagcaggaggattggttgagct

SEQ ID NO: 123136 - DNA, 122 bp, Homo sapiens
tctcgtcactagaaggcccggcacttatgaggaccagcacctggggaaccccttcctccacgcggctgccccctgcccgggtgaagtggttctccaccacgaaatcaagggcgaggccgata

SEQ ID NO: 123137 - DNA, 122 bp, Homo sapiens
caccctcagaggcgagctgtggaagccttgactcttagggccgttttagaacccgggcctcggaccggcggggtttctgcacgtggaaccggaacatctgagatgatcgcaggccctgtgga

SEQ ID NO: 123138 - DNA, 122 bp, Homo sapiens
gttcatcagccccctcctctatcctcccaccctcacagttttccttgtatatgaaatcttcgttcttgtccttttgcccatgcgcatttcctgcctcctcagggaggtcgggacagcagacc

SEQ ID NO: 123139 - DNA, 122 bp, Homo sapiens
tgttttcattttgttgcactttgttttaaaattaatatcttgaaaggtagtgcattcacacgattcaaaagccagaaagcatgaaaagacacacactgggaatgttttcctcccatctttgt

SEQ ID NO: 123140 - DNA, 122 bp, Homo sapiens
tcccctagagttagtcctagcccacgtgcacagcccccttctttttgtaagatgcccctgcgaccaagggctccaagcacacctggtagggcctctgcatctgccggaaaacacctgcactg

SEQ ID NO: 123141 - DNA, 122 bp, Homo sapiens
gaagttccccagaaggggctgcacaagtcaggacaagaagtccaggaaatggggggtcgccgatgaccacgccccggggctctgtttgggaacccccaaaatttactgaggtggaaagattg

SEQ ID NO: 123142 - DNA, 122 bp, Homo sapiens
ccgctcagccgagaaggtgagctccctggggaaggactggcacaagttctgcctcaagtgcgagcgctgcagcaagacgctgacgcccgggggccacgccgaggtgagccccactgcgcggc

SEQ ID NO: 123143 - DNA, 122 bp, Homo sapiens
caggggcttcgcagggtctctgcgaccccaaagagtggtgggcgattcggcccatgggatcgggccccagattcaaagatcacaccacacccatggccctgaatggaaccgaccctgttaag

SEQ ID NO: 123144 - DNA, 122 bp, Homo sapiens
gaggggatagggtgcaggggcccagatagtcaaaaggcaaggaggtgctgggaggggcaccgcttgtggcccaggctccaagtcccccatgcatgcctacagtcccatcagacttcccttac

SEQ ID NO: 123145 - DNA, 122 bp, Homo sapiens
agagctgtcattcatctgcggcacgtgcgggaaggcgctcagctgccacagccggctgctcgctcaccagacggtgcacacgggaaccaaggccttcgagtgccccgagtgcggccagacct

SEQ ID NO: 123146 - DNA, 122 bp, Homo sapiens
ctttattcgagtttccttgcccctaccctagccccgaccctgacgttggccagctaggtgcggctgcagggattcatggcagtacccagcttgcggcagtagcagaaggcattgaagaagcg

SEQ ID NO: 123147 - DNA, 122 bp, Homo sapiens
tgtctctgagacataggacaaagtacagtcagctgtccatgtttacaggttccccatctacggattgaagcaactgtgggtggttaatatttgtgggggaaaacagtaaaaaataacagttc

SEQ ID NO: 123148 - DNA, 122 bp, Homo sapiens
cgccccagcccctccctgggggcactcagaaaggtctggcagcctttgaccaggactgagcgtgggggaagacccttggccagcatgctgtccccacagctgtgactgtacctgctccactt

SEQ ID NO: 123149 - DNA, 122 bp, Homo sapiens
ccccacccagggcctgactcatagctccattcactccctcaatagttgctgaatgaatgacgggcatgagcaaataagcaaatgaataggtgaatgaatcacctagagctgaggtcaaaacc

SEQ ID NO: 123150 - DNA, 122 bp, Homo sapiens
tcctgtttttattttaagggcttcaggagccatggattctcatgttttaattgagaaagacgtgtccattcatggtaatgccaaaaggtgggtggactatggctacttcacaagcatattta

SEQ ID NO: 123151 - DNA, 122 bp, Homo sapiens
ggggcctgcgcagggggcgggtcgggcgggggtcccggaacgcgtgggtctgggtgtgcgcgcagtgtcagcgaagctcttcaggccaggaaacccccaagctgtttaccagctctattaaa

SEQ ID NO: 123152 - DNA, 122 bp, Homo sapiens
gagcaaacaagctcagaaggtaggaggggaagggcaggattaaggtgccaaaatcagattcgagatcagagaatgtttcactctgatgtcagcctgttcttaggaggggcttagggaggggt

SEQ ID NO: 123153 - DNA, 122 bp, Homo sapiens
ctgaccagccgtcccctttacaaagcggtgcagccggggatggcagagctggggtgggcgcggggacagggtggagaaaacccaggccgcagggggcgtctcggggctgcctcctgggtagg

SEQ ID NO: 123154 - DNA, 122 bp, Homo sapiens
aggcggcggcggcggtgagtgagctccgggctggagcggggcggggtgtgcgccggcagccgggtttcggggtgctaggggccgcccagggcggcgggacccccaggggttcgggctcagcc

SEQ ID NO: 123155 - DNA, 122 bp, Homo sapiens
gacccaggtcctgccctaaggggcaccgcacagattacaggatggtgtgataactggtgacggttataactcgaactcaactggggctggtgtctgagaagcttgaactcagtgtaggggca

SEQ ID NO: 123156 - DNA, 122 bp, Homo sapiens
ctttcttctcccatgttcgcgacccccgcgcgggttcccgggacgcgaagggagcggccgcgcggccgagcccgcagcctgcaccgtggctcgcgaccacctattgtttaccgggccgggag

SEQ ID NO: 123157 - DNA, 122 bp, Homo sapiens
acagtttgaaagctggggttgtactcaccctctcaggacaacactcccaatctcttttctcgtaagcagtagcctgctgcctttgcacacacttcgaccattttccctgctgctttgtgcta

SEQ ID NO: 123158 - DNA, 122 bp, Homo sapiens
ggtcggcgggggcgtggggggaggtgaaaaggtaacagggagctgccccctctcaagagccggtagttgggagtctgagaagtcaccaccatgaagttgttcggcttcaggagccgcagggg

SEQ ID NO: 123159 - DNA, 122 bp, Homo sapiens
aaaagctcactctcccttcatcccttccactccccccgcaacccccaccaagcatccattcgtactttctggtggattcttccagtctgcaaatatagcaattacaaatgtatactcttatt

SEQ ID NO: 123160 - DNA, 122 bp, Homo sapiens
ggggctccggcgctgggcgaggaggggccgcgggggtctcggggggtctccaggcggcggcgcagacccaggtccccctcgtcccccccgcgccgggctcagcaggatcctggcgatccgca

SEQ ID NO: 123161 - DNA, 122 bp, Homo sapiens
gattgtatagattactttttaacagatttacttgggttcccaaacaaatgattggctgcacgaataaagcatggcagtttcccacagacttgctctggaggtgttgtactctcagtcaaggc

SEQ ID NO: 123162 - DNA, 122 bp, Homo sapiens
gaggttttctattttgtttagggctgtctactcagagcctggcacaaagcatgtgctcaacgaaaatttcctgaatgagtaaattggggtgaaattcttgggagaggggctcagggggctgg

SEQ ID NO: 123163 - DNA, 122 bp, Homo sapiens
gcggtgacactgcagccactctccatggccccggggtgagtctcagcacgtccaggcgtccgcggtgacactgcagccactcttggtttctcagctgccgcaatcggtccttccagtgtccg

SEQ ID NO: 123164 - DNA, 122 bp, Homo sapiens
cggcgcggcctttatagctgcccctccccgccccgcccctccccgccccgccccggccctcgggccaccccgcccgcctgagccccgcgcgccccgggccataccctccccaagcccagccg

SEQ ID NO: 123165 - DNA, 122 bp, Homo sapiens
aaatatatgactctcacttccttgctcctgtgactgtaagaatgcctaccattcattaaacgttaaactctccgcaggaatgagactagagtgcccttaatattattaccggcatctcattg

SEQ ID NO: 123166 - DNA, 122 bp, Homo sapiens
cctcacctcccagatggggtggcggcagggcagacactcctgggttcccagacggggtggcggccgggcagaggcactcttcacatctcagacggggcggcggggcagaggccctccccaca

SEQ ID NO: 123167 - DNA, 122 bp, Homo sapiens
ggggtctctccagttactcacacgctgttgggggagttttgatgtttaaattgtataaatcggacctctgacacgcccctaggcccagggtaggctgaaggaaaagggtttggagcgagttg

SEQ ID NO: 123168 - DNA, 122 bp, Homo sapiens
cagcatctacaggacgtggacattgagccctacgtcagcaagatgctaggtgaggggccacgccagatggggtggtggggtgctcaaggccagccaccctgaccgctctcccccacaggcac

SEQ ID NO: 123169 - DNA, 122 bp, Homo sapiens
ccgcttgcatccgggtttctgggggtggggcccaaggttttgttccggccccaggctcagcgtccgccatcttgtgtcggcggctcggctgtaaggaggtggcagggacaaccacaaccaca

SEQ ID NO: 123170 - DNA, 122 bp, Homo sapiens
aggctgccaaccagcggcaaaccctcctgtgtctgcaaatggctgccaaaagcccctccgcgctacacacttctgtggcagatgcctctgagcagccttctttatgagtcagtgctaaagcc

SEQ ID NO: 123171 - DNA, 122 bp, Homo sapiens
ccagccaccttggcaggaaaggctggacctgccatcaaaaagaaagagaggccaggtgagcgctttccaggctctcgcgcagaagcccacggtggaaaaagctaggggagggaggctgggga

SEQ ID NO: 123172 - DNA, 122 bp, Homo sapiens
ttgtttgcagcctgagggaggaggagactgataaagtgcgggggctggggggagggccggcggcccctctggtgccctggtttgttctggtttgttctccaaggcgacacacgtcccaagct

SEQ ID NO: 123173 - DNA, 122 bp, Homo sapiens
aaatggtagaaacgtaactggagactctaaaggcgaaataaaactttgttacatattcggcggtttggccagaggttgcgcggttggagctgaaatgcagtctttctgggcagatttcattc

SEQ ID NO: 123174 - DNA, 122 bp, Homo sapiens
caggaatagccaggagacacgtagctgaagcaagctggcaacagggcagatagcggaagacggggtcagagaggtggaggtggtgcagacttgtggggtcttataggcctttgtaggaactt

SEQ ID NO: 123175 - DNA, 122 bp, Homo sapiens
catctctactcactttgtcacctatccggcagaggtactcggcctttgccatcattgcatcgcgaatttcgctctctcctagattcttctctgcatcttccagctcctcatccaaacgcttc

SEQ ID NO: 123176 - DNA, 122 bp, Homo sapiens
tcccccgctgacaccccggacgcccaggcctgtgggacaaaaggcagtcgcggcgtcccgcgggcttcctagcccgggagtcggccccaggggccccaaagcgtgaccccaggccgacaact

SEQ ID NO: 123177 - DNA, 122 bp, Homo sapiens
cggattttccccccttcaggtttaaatgttcctgtttttctacctttccctcgcagtatacgctcaacggcaagaaagtggaagttgccgtcaaacagatcatcgctggaaaagccgtggag

SEQ ID NO: 123178 - DNA, 122 bp, Homo sapiens
tagtgacttttggaaaaggctcaatacatcattttaatgagacgtgcaaactcatcattacgatatactaggagaaatgctttgacagacgaagtgggaacaactgggagagtgaatgatgg

SEQ ID NO: 123179 - DNA, 122 bp, Homo sapiens
gcttgcctgctcatgcctcccctgacctcagacgcatcgcccagagggcaggaggagccccggggtgtccttggtgacgactccaccccccatgagaggaatcggcctgctggcctgaagcc

SEQ ID NO: 123180 - DNA, 122 bp, Homo sapiens
gccaatcggaagtgaaggcggggcttctgggtcttcctggagtgcgcatacatgggccagcggccacaagaattacgatttaccccatcgtcctctgagctttggggatgatggatgaataa

SEQ ID NO: 123181 - DNA, 122 bp, Homo sapiens
ctcgcgccctccgggtgggggcggggacgggtccggggaggtccggcggaggagtctgagcgccctggggtgcagccagagccctgagaaatagtgtctgagagtgtcaggatccccaagga

SEQ ID NO: 123182 - DNA, 122 bp, Homo sapiens
ataaagactccttttctcagtttttcacgacatgaagcactgttgcttatattctggcaacgctttaaatgctttgctcacaactccttccctccttctccactcatttcccttttatgaac

SEQ ID NO: 123183 - DNA, 122 bp, Homo sapiens
ggagtacgcgctccacgtttccaggttaagtcaggttagtgtgaagtttccagccactctcggctctgggaactgaactttcccgggacttgcacttcctcctcggcgctggggttggaaaa

SEQ ID NO: 123184 - DNA, 122 bp, Homo sapiens
ggcagcttgagtctagggccagggccacgacatcctctccaggacctccaaggcagaccccggaatcccacggctgccacccagcaaagggggcgtccctccagggcctcttctgttgggtg

SEQ ID NO: 123185 - DNA, 122 bp, Homo sapiens
tctgcatgttactggggactaagacaacgggtaagcaaactatttataggcctcaatttacgaaataacggaattgcaaagtccggagtggataggaccgtgaggacggtcttttttcttgg

SEQ ID NO: 123186 - DNA, 122 bp, Homo sapiens
gaaccaaggagccttgggtctttaacatctctgggcctcatgtattcgcctatgtaaagtcggtataatctcgcatctcaggttggttgtgagaacccagagactgcctccgtgaaggcttg

SEQ ID NO: 123187 - DNA, 122 bp, Homo sapiens
gggcggggccgcggggcgggaggcgcgagcccggagcggcccgggtgcgggggacaggggcgcatcgccgtctctgcacccccgccgaccgctccgggatgacaggctccggtgccgaccca

SEQ ID NO: 123188 - DNA, 122 bp, Homo sapiens
cccttcttcaccgtataaactcccttcacatttatctaactgtatgcccgtgtctagttacgtgccttcttagaggttccagacgctaatcttgagacagacagaccaagcctggagattct

SEQ ID NO: 123189 - DNA, 122 bp, Homo sapiens
acggtggtgaaagctgaagatttcacaccagttttcatggccccacctgtgcactatccccggggagatggggaagagcaacgagtggttatctttgaacagactcagtatgacgtgccctc

SEQ ID NO: 123190 - DNA, 122 bp, Homo sapiens
gaaacaggagtaagtggagaggtagagggcagaagaaaaggggtcaagaaggcaggaccccgtgaagcacacctttcctaaggattttgacgaatgagaatgaagataaactgtgagttgaa

SEQ ID NO: 123191 - DNA, 122 bp, Homo sapiens
gcgaggccgcaggccgcgcccgctccttcagccccgccgccggggaggggtttcccgggacgatccggcccctttcatccaggaagtgaaatcgacgtcggggtcaatgaaaacaaacgggg

SEQ ID NO: 123192 - DNA, 122 bp, Homo sapiens
cttgtaagcaagagcaggcgctgtgcggtattgtttctgagttggttcacttgggataagcgcctccagctccatcgcgttgctgcccaggtcaagatttcattcttttttatagctgggag

SEQ ID NO: 123193 - DNA, 122 bp, Homo sapiens
gcgggtgacggggactggggagtaaggccttggagctgtcactcaccttgacacctggctcgccctggatccctggagatcctgactctcctggttccccctgcaaagagattagagtcaaa

SEQ ID NO: 123194 - DNA, 122 bp, Homo sapiens
ccccgttgcttttgcttcagcaagtggttggggacgcgggaggctggctccagagtcacccggctcctcgactgcctctgccgctccagcactgcctctgggagtccactgccccaggcact

SEQ ID NO: 123195 - DNA, 122 bp, Homo sapiens
tctgtgattagctttcccctctaccctttattgatctccgtgacggaaatggttgggtctcgttttgctcagttgggcaaggcgcgtggtattgagttaaggctggatgagtatctgttgag

SEQ ID NO: 123196 - DNA, 122 bp, Homo sapiens
cctggggcaccgtccccggcccgcccggccccgccatggcccggccgcagaggactccggcgcgcagtcccgatagcatcgtcgaggtgaagagcaaagtaagggctcctccggcctcggcc

SEQ ID NO: 123197 - DNA, 122 bp, Homo sapiens
acacggggggaggggcgggggagagttgatctaggtctcctttcaaaaccgacctggtttcgatttgcagttgtgtaaagacaggcgagagggcccccccaaccccccacctggagcagcgg

SEQ ID NO: 123198 - DNA, 122 bp, Homo sapiens
cctaagtgctgggctctgtggagatgggcgctgcgtacgtgccctgaggcagcatgctcacgccatgctgttgaaaggacgggccacagcccagtgacaggagccccttggagtcagaaatc

SEQ ID NO: 123199 - DNA, 122 bp, Homo sapiens
gtccgtcccctccgcgccgctggcgcgcgccttctgaatgccaagcattgccataaactccggggacaaaagcctgggtcacaaaagccccctctagaagttcacaccctgaggcttccctg

SEQ ID NO: 123200 - DNA, 122 bp, Homo sapiens
aagaggaggtttcaaaaaacagcaatgtgcttaaagcctggaggcaacagctgtgacacacgtaggaattgcagggtttgatgtggcagctgcagtggggagacagggcctagggtataaca

SEQ ID NO: 123201 - DNA, 122 bp, Homo sapiens
cctccttcccttcccagccgcgggcctcgctccgtgctcggctactctgccgggaggcggcggcggctgccagtctgtggcgagccctgctgccctccagccgggctcctccagccgggctc

SEQ ID NO: 123202 - DNA, 122 bp, Homo sapiens
ggtgcaacagtccctggaccctatggtccacagagcccggagctcagggctggtgcttcccgtggacactgaagcaaattaaaacaccagaaatgccttgtgagtgtggggcttgcctgtga

SEQ ID NO: 123203 - DNA, 122 bp, Homo sapiens
agacatcggagcgggcgctgccgagggcaatttggtgattggctggtctcaccacgtgaccggcgctgagccttccgtgcgaccggattggctgtcgcggacgctgacggacaaggccgggg

SEQ ID NO: 123204 - DNA, 122 bp, Homo sapiens
gacagggagggaagtgttcgccgctagacatgacacaccatactgcttttccaaaacacacgggacatgaaagcgaggtggtgccttctagacgagaggacagctgtagtgtggacctcccc

SEQ ID NO: 123205 - DNA, 122 bp, Homo sapiens
cctgtgggtaaggatgccggatttaataaatgaaaataccaggccgggtgcagtggctcacgcctgtaatcccagcactttgggaggccaaggtcggtggatcacgaagtcaggagatggag

SEQ ID NO: 123206 - DNA, 122 bp, Homo sapiens
gggcctacctgcaggggcatcctccggagttacgggccgggaaggaggggtcatttagggcgtgaggattccccgtagagagggatttcagcagaagcttctctggcaaaggaacaacagta

SEQ ID NO: 123207 - DNA, 122 bp, Homo sapiens
ccatttccaacccaaacattctcagggagggaactggcagccagtgccccagcaaactctcgcacatggttctacactcaggcccccctgagctaagcttcctaaagagccaggtggcagct

SEQ ID NO: 123208 - DNA, 122 bp, Homo sapiens
gccaagccagcaaccacgcagcacgcgcatctgcagaggctgacagagccggagcaccaccgcacagggaaggagctgctcacagtgggcatctttggcccctgccttcatgctagcttggg

SEQ ID NO: 123209 - DNA, 122 bp, Homo sapiens
agaggaggtcccgcttctcggcagaaagcagggaagaggcaggatctgggctaaaacactcgttgggatcatggcctcacctgatcgagggcttcacctgggcctgggatgacggccacaca

SEQ ID NO: 123210 - DNA, 122 bp, Homo sapiens
ggaggatggcttgagcccaggctttcgagacagcctgggcaacatggggatccgtccctacgaaatatttaaaaattagccaaacatcgtggcacctgtgggcccaggtgcccaggaggctc

SEQ ID NO: 123211 - DNA, 122 bp, Homo sapiens
gcggggctgccgggggagcccggaccactgcactgccccgcgctccggccagagggcgcccggccccaagccttccccgccccgaggccgcccagggctccgggagtaaccgcgccagcgat

SEQ ID NO: 123212 - DNA, 122 bp, Homo sapiens
ggggccagtgggtgctctgagagtgtaaagaccaaactctggtgggacctggctccattgcggagcctcaaaagctccaacatggtggaggaagttggcagtaccttctctagatctttctt

SEQ ID NO: 123213 - DNA, 122 bp, Homo sapiens
cactcggtttccttggggttgagggacgcactcaccttccccgagcgctgcgccatggtgcgccccgccccttccgcgggtccccgtttacaccgggcagcgccctgctggctcagcgccgc

SEQ ID NO: 123214 - DNA, 122 bp, Homo sapiens
tcatcaatcagggtaaggcgcgtcgctggtgtggagccagtaacctcttcaccctccttccgccccacacacattcctaacactccctcccgctctgtccctaggcccctacgagaaccgct

SEQ ID NO: 123215 - DNA, 122 bp, Homo sapiens
gtctgcctttttggcctctgctgtaacccctaaaactttgggtacttcccaagccaccgccgaaagtccccactctaatgaggcatggtgatggtaataggatgatctggtggcgtcatttc

SEQ ID NO: 123216 - DNA, 122 bp, Homo sapiens
tgtcctgggaggaaactgaggctttgagaaacggagaacttgccgggccatttgactctacgtcatcccctcccccatcaatgccctgaacagcctcctgtacacccttaaggaacttactt

SEQ ID NO: 123217 - DNA, 122 bp, Homo sapiens
gggaactggggctgcgcgggttgcttgtgggccagtgcaagttccgggtgggcatgcgctcggctggccccgctggccccgggcagtgaggggcttagcacccaggccagcagctgcggaga

SEQ ID NO: 123218 - DNA, 122 bp, Homo sapiens
gccatctttcaacccccatgccttacctaatgctactcttccatttggctattcctgagtcgtattctttaaaataaactagtaatattaagtaaagtgccttcctgagttctgtgagccat

SEQ ID NO: 123219 - DNA, 122 bp, Homo sapiens
gaaccgtgccacatttccgttccctctggcctcgccctcaggggtcgaccggcggcggagcgcggggcctcctgtgctgaaggcagctccctggcctccagaaactcacagtcagtggtggg

SEQ ID NO: 123220 - DNA, 122 bp, Homo sapiens
gtgcggtggactgagtggcagtccccacgatggatgtccgcgtcctagtgtcttggcgcccggggatgtcacctgatatggctgaagtgaatttcatcttgtatggtaacaagtggaattag

SEQ ID NO: 123221 - DNA, 122 bp, Homo sapiens
gatgctatgcaaatggcatagacatcaacgctacatcttccaaatgaagaaactcaaccccggaaagaaaagggagcaatttctacaaggtcacccaactagttgtgacaacgggtcaaaag

SEQ ID NO: 123222 - DNA, 122 bp, Homo sapiens
gtggtatcggacccccatcgtccctgacacctggcgtctccgccccccgcccccgtcccccgccccgccgtccctggcccctgcagtccctggcccgcgctgcggacctccggctctggctt

SEQ ID NO: 123223 - DNA, 122 bp, Homo sapiens
aggagagtgaacaggagctcatctgtgtgccgtgagggcggcagccccactccacgagaccgagctcctgcctggggacccctccacagctccctctgtgtatcccctcactcggcggttta

SEQ ID NO: 123224 - DNA, 122 bp, Homo sapiens
gcacctggacgcgcgggagagggggcagaccccgcgttaggggtggcagcagctgtcgcccggccacacctggtggtgtcattctgaaccctgttgcaatataaagggatttttttttaacc

SEQ ID NO: 123225 - DNA, 122 bp, Homo sapiens
ttataactaaattacgttctgacccagggcaggaggtgggagaagagaatgagagaagggcggaatcctcaagacagcagcattctgcgctccgccctggaacacccagcgcagctacccca

SEQ ID NO: 123226 - DNA, 122 bp, Homo sapiens
gagaaaggacatgaggaaggcgagcccaggaaggctaaaagtcccggacgggagagaaggcggatacagggagacaaacacccacacccactgcacagacccggcggcacacacaccctcac

SEQ ID NO: 123227 - DNA, 122 bp, Homo sapiens
atattatgaataatatcacaggttgcacacctactgcgatattaggagtaaaatctccctcggatattataaataatatcacagtgtgtactcccactgtgatattaggagtaaaatctcct

SEQ ID NO: 123228 - DNA, 122 bp, Homo sapiens
ggtattggaatgaatacatatttcatagtgatcattgcacacctatcatggggcagctagcgctgggtcagcctgcctagttgggcaaatgccactgtggccaagcctggcacacagtcagt

SEQ ID NO: 123229 - DNA, 122 bp, Homo sapiens
cgcacagccctgcgaatacggcaaaggcccctcgagctgcgtgcttccgtggctgggtggcgtgctgtgtgaatcacatctcagtagagctgttaggtaaagaatgtaagcatctcattcat

SEQ ID NO: 123230 - DNA, 122 bp, Homo sapiens
tctgttgactatggggtagaggcaggataaggtgttccagaccctgcctgacacctgatccgaagaggttgctcatgtttgctcaggaggtgaggttcacacaataaagggcaggaggaggg

SEQ ID NO: 123231 - DNA, 122 bp, Homo sapiens
ctttgcaggttgaccgtgtgtgacttggctaacgcaagagtgagtgacagatgtaagcatcggaaagggcatcatttctttgactgcttgttctcaagtctggaagagatcggcgtcgtaat

SEQ ID NO: 123232 - DNA, 122 bp, Homo sapiens
ctagagggcggggggcgggcggggctccacagccggctcctctcagccactgggccgccccgtccctgttttacacctaggggaactgaggcactgaggtgaagggagccccctcgcacgcg

SEQ ID NO: 123233 - DNA, 122 bp, Homo sapiens
taggagagagcctatggaaaagagtaagtgcagcagttctcatgcaaatgtgtaggtattcgattcagcctatagaagcacactggtctgttgcctatgtattgggataaggacaacagaag

SEQ ID NO: 123234 - DNA, 122 bp, Homo sapiens
cgctgacgttggctcctgagccgggcgctgcctcgcgcctgattggcgggtcctcggggccgccctccccagcgcaccacccctgggttccctcccgggtccgcagtggaaacactgccctc

SEQ ID NO: 123235 - DNA, 122 bp, Homo sapiens
tagggtaacccatggacctgcctggctgggtctttgctgacatttacaaggagcctctcccgcagccctccaaggggtccctctcccctgcaggctgcatgcccagttctccctggacctcc

SEQ ID NO: 123236 - DNA, 122 bp, Homo sapiens
gcactgctctgtctgactcaaccttgctgtttaaaaaaaaaaaaattatgtaaatgaacgcgccccacgctatctgaataaacagctgtgtgagaataacttctctgagacgtggtcaacac

SEQ ID NO: 123237 - DNA, 122 bp, Homo sapiens
cagctgaaaagagagctttgaacttttccccaagttgctgcagggtcattgctaccaccacgcctacaccaatgatgcctgacttcaggatccagaggccagaaacggacagctttctggaa

SEQ ID NO: 123238 - DNA, 122 bp, Homo sapiens
gcttcacaggacatctcttgtcctctcccctattcatgtagaatctcagcctctaacatccgtaagagtctctagggctggatgtttatgttcactaacaggctggctcgggtctggggcaa

SEQ ID NO: 123239 - DNA, 122 bp, Homo sapiens
ctctcacttccctggacacgtccaccttttcaaccttagggcttctgtaccagctgttctcggaagcattctttacctcctgtcacccatccctcagatattagttaaaatgtcacttccac

SEQ ID NO: 123240 - DNA, 122 bp, Homo sapiens
tcctccccaattaacgatttctattagctgctggctttgtcttctctcctttttgtggcacgctccaggtgaccggcttatctctcagcgcccaggttgggatatgccgtggacagactcaa

SEQ ID NO: 123241 - DNA, 122 bp, Homo sapiens
tgcgtataatcaccattttgggctttagctgtgtcgtattatccccatgtcccagccggccgtactcgccgaggccccaggtgtacagttctccgctggatgtgagggctgcgctgtgcgag

SEQ ID NO: 123242 - DNA, 122 bp, Homo sapiens
agcccccgacacgcccgccacgtgagtgcctgggctcccgccagtcaggtccgcgcgacccggtccccatccctggggcctggccagagtcgctcacacccttcctgccccgcgggctggcg

SEQ ID NO: 123243 - DNA, 122 bp, Homo sapiens
ccactaacactctcagcaagcaacactcaccacagagccatgcaagcctctctgcatcatcgcacacattcttcccaagggtggaggaacggctaggcttgtatgtttcaggtgtgtaaaaa

SEQ ID NO: 123244 - DNA, 122 bp, Homo sapiens
agggcaaagcttagtgatgggcacttaaggatggcgagaagctgaaacagtctcccaggccggaaacagccgtggaataatggggttggccacaagcaggacttttcctggtcccctccttc

SEQ ID NO: 123245 - DNA, 122 bp, Homo sapiens
ttttgttgttgatgtgctgttgtttttcttttcctgggtgtgtagtaggagttgcaaatgcgggctgcagattagcaacgggaaccatctgggtgagcctagcagggaccagccctcccatg

SEQ ID NO: 123246 - DNA, 122 bp, Homo sapiens
attccttgaccaagacaataaagcctgaaagaggaacggactgagggggaagatcaagttcggctttgagaagttaagtttgaaatgtcggggcaacatgcaggcagagagggtgagtaggc

SEQ ID NO: 123247 - DNA, 122 bp, Homo sapiens
acggaagcggcagtcctggccgggctggctgcggtcctcggggaaggcggccagcttgtccgtctggttgctggggctcatgcggtaccagtttagcacgaagctctccgatgtgttggaga

SEQ ID NO: 123248 - DNA, 122 bp, Homo sapiens
aaaagggaccagtaggagtggcggcccaggtctgagctgcgctgccattgggcgcggcgacgagagggggcggggagcccgtgaggctggttacgccgagggaagccccgactccgtagtcg

SEQ ID NO: 123249 - DNA, 122 bp, Homo sapiens
tgcccgacagcgggtgcagccaatggacgggaggcgcccgtcctcctcgcgctgccgccccgtccacgtcctccacagtacacaatggccccagaggaaggcccgctcgcagcacgtcagaa

SEQ ID NO: 123250 - DNA, 122 bp, Homo sapiens
actcatgattttctctttctaaagacatcattaacagcagtgtttgttgaaatgaatgaccgagggctaaaattgtattccagagctgcataaacagcaatcctactaaaaactgtcttgct

SEQ ID NO: 123251 - DNA, 122 bp, Homo sapiens
cagccggtgaaccacagccatgagatgacatgcgaggaaggatcagggccactaagatcacgtgggcagaggaggaggactcctgaatcgtggctgatgtcgggaccaagccggcggcgagc

SEQ ID NO: 123252 - DNA, 122 bp, Homo sapiens
cctcagcggtcgccactctcttctctgttgttgggtccgcatcgtattcccggaatcagacggtgccccatagatggccagctttcccccgagggtcaacgagaaagagatcggtgaggatt

SEQ ID NO: 123253 - DNA, 122 bp, Homo sapiens
cccgctgcgaggtgcgaggaccaaatagaggcgtaacaagccaagggtcggagtgggcaacggaacagttaaaggcatttcacaacagcgatttaggtctgcaagcagtttatggagtacca

SEQ ID NO: 123254 - DNA, 122 bp, Homo sapiens
tttcttccagctcctgagatacagtatccaagggccttttgcacctgaaatggctcttcccggtagttcagcatcactccctctctagctcccttttttgtctgtgaagccgtttagagctt

SEQ ID NO: 123255 - DNA, 122 bp, Homo sapiens
aacaagaggcccagtttgagaagctgacccgggcgctggaggaggaacggcgccacgtctcggcgcagctggaacgcgtccgggtctcaccacaagatgccaacccactcatggccaacggc

SEQ ID NO: 123256 - DNA, 122 bp, Homo sapiens
gttcttatccccattttagaaatgatgaaattgaaacccaaacagatgaagtcacttgtccggagttacatctgattagcagcaaggggttgctgaagcacaaagcttggtctctagggtag

SEQ ID NO: 123257 - DNA, 122 bp, Homo sapiens
tttgctttggtcaatgataataataaccccagccccataacttcagcaccttctttggtgcgcggaatacctagggcctcggaaggccggctgggggcggggagaatcggcagtcactatgg

SEQ ID NO: 123258 - DNA, 122 bp, Homo sapiens
gcagacaccaccgcatgaacccatttgcctgagcgatgagctgcccccccagagcagccccgcccccaccacagatcgaggcacctccaccaacagcccacgctgctggagctggtgagcct

SEQ ID NO: 123259 - DNA, 122 bp, Homo sapiens
aaggtcttagtacttcctagtctctgataccaacatccccaggttcactcagtacctaagcgcatgggctactccagtgtggcacagagttaggagttgcaagcttcccaaatgtggcattt

SEQ ID NO: 123260 - DNA, 122 bp, Homo sapiens
tgagccctgatgatcctgctgctgcactccagcctgggcaacacagcaaaaccatctctacgaaaaaaaagttcccactgactggcaaggaaagccaggaaggggggctcaggtgccctctc

SEQ ID NO: 123261 - DNA, 122 bp, Homo sapiens
cgcctcactcctccccgccccgttccttccctttagagcacctctccggcttcctgggtgcgtccccgccgctgccgtctggagcattcctagccaatcagacaccttctcctcccgcacta

SEQ ID NO: 123262 - DNA, 122 bp, Homo sapiens
tgacaggtgtgtggggggaggaggcagcggtaccagatgggccacaggacgcacaggcagcgctcggtgctcatggcactcagaaagctcaggcctgtaaagtatagaaaggtcatcacagg

SEQ ID NO: 123263 - DNA, 122 bp, Homo sapiens
cttcgttgctcgaactccctgggtgcccgccgcggtggttacaaagggggtcaagagtgccggacccagccgcgcggagcccaccattgcggcccgagggggacccgacgggggcccgacgg

SEQ ID NO: 123264 - DNA, 122 bp, Homo sapiens
cgccccctctcgctcccaatcccggggcggccgggcgggggtgggcagggggcgtgaggccgcccctgcgtcccgggggccccccgaaaacgcgctccgggtgcccggtccctccgctgcgc

SEQ ID NO: 123265 - DNA, 122 bp, Homo sapiens
gacgaagcacacggagatcaccaccaggcagttgcccgcgatcgtcagcagcgtgatgagcgtcaggatggagccgatcacaactttctcgactctgccgtagttgatctgttccccacagc

SEQ ID NO: 123266 - DNA, 122 bp, Homo sapiens
tatctaaacatagaaaagagattgtcaaaatatgttataaaagataaaaagtggtatttccgcatagagctctgaccattaatggagcttacagggctggaggttgctctgggtgaatcagt

SEQ ID NO: 123267 - DNA, 122 bp, Homo sapiens
gccacagtggactaggtggccgcactggagagaagcctgcaggccactgagagcgagctccgggccagtcgggagaagatcagcaagatgaaggccaacaagaggaagctggagggcgacaa

SEQ ID NO: 123268 - DNA, 122 bp, Homo sapiens
accaagaaacaactcatccactgccaagacgacaaatacttttctccacccaaaagctaccgtggaagagctgtcccctttgtatataacacagagtatgggttgagagtatgcttaacatt

SEQ ID NO: 123269 - DNA, 122 bp, Homo sapiens
tctcccgtctctgcgcaggcctggtggtgaaggaccccagcatctacgacacgctggagtcggtgcgctcctgcctctacggcgcgggcctgctcccgggctcgctgcccttcgggcctctg

SEQ ID NO: 123270 - DNA, 122 bp, Homo sapiens
actgaggggtgagctagatgcatatgacctatttggatagaacaggacttactgatgactcggtgtggaaagggagtaaccaatattgataacacaaagatttctaccttgatggggtataa

SEQ ID NO: 123271 - DNA, 122 bp, Homo sapiens
gggggcaggggagtggggagagagagagaaggggttgagtcaggtgagttgaggcagagacgcaggcagcccagaggtctgtcctagggccaccggcaggatgccaggaggggtatgggccc

SEQ ID NO: 123272 - DNA, 122 bp, Homo sapiens
aggcacacaaccggcgatgacatacaaggcgaggtgacaccactgcactcccagcccgcacgtcacctataagcacagggggcttttggtgctggtttatttttgaaggctggtacttctct

SEQ ID NO: 123273 - DNA, 122 bp, Homo sapiens
tcttgcatacgctaaaatgctaatgacctagatagctcatgcaaaatgcagcagggagggcgggagcgagggaggtgggagggaggaagagagaggagtgcaggggggagggagggaggaga

SEQ ID NO: 123274 - DNA, 122 bp, Homo sapiens
agacaccagcccctcagccaaggtctcgcccagcacctccttccgaaccctgccctgccccggaggctgctggctccagtgcaggcctgactgtcacgggcacctacagcataaccctgcca

SEQ ID NO: 123275 - DNA, 122 bp, Homo sapiens
caaaaacacagtcagagaaagcaggactgaaatacaaagcgtcactttttcaccacagtccgaaggaaggtaaaagaccaacacggttagaaatgaaataaagagacaagggatgatcagat

SEQ ID NO: 123276 - DNA, 122 bp, Homo sapiens
aacttctttggtaactcccaaaggcctcctaacttcctggagctagccatgtactgggagcgcccagcgctgtaccaaggcaggtttctggcggccacaaaccgttcatccattctttcccc

SEQ ID NO: 123277 - DNA, 122 bp, Homo sapiens
gtggcggcggcggggccttttgggggcggggtccggcagaggcggggctgggcccctctgcgcgccaccctttccctccgctactcggtggctcagggtctccggtgcttattcaatacttt

SEQ ID NO: 123278 - DNA, 122 bp, Homo sapiens
gactacctcatggtctctcagctgtgagaccttgggcggtagctgcaatgctctctgcctcggtttccccttctgtcaagcagggataaaaacagaactgaacctcatagtgctggagacga

SEQ ID NO: 123279 - DNA, 122 bp, Homo sapiens
ggcagacggtaagggggctggggccactgcaaagagggagtaggggactcacacccctcccgctttcctgtagccaatgggggctgtccaacctagtgcagggactagggaaggtggggaag

SEQ ID NO: 123280 - DNA, 122 bp, Homo sapiens
tgcctacttggcatctccacttgggcacctcaaattcaccatgcctgtaacctgaactcacggtcaccttcctgtatcccatcccctcccagaattccccattgaagctcaggaccccacca

SEQ ID NO: 123281 - DNA, 122 bp, Homo sapiens
gcgcgcgttccgtctttccgtatggaaacatggcgcctaggggcgggccatccccagcttcgagccaccgccagctgagactcatcggcgggcactcggccatgcctctcgcgtttccgtac

SEQ ID NO: 123282 - DNA, 122 bp, Homo sapiens
acctgtaaggccgacaaagcccccgcaagcgccccacccctctgtcctccgtgtctctctcgttccgcctcgattccccgagccctctccaggcagcgactggagaagcgaagtcggcctcg

SEQ ID NO: 123283 - DNA, 122 bp, Homo sapiens
agcattagggttcttcactgcttgccaggattcaccgcttaaaaccccaaaaacccagcccgcagcccccatagctggctctgcagccgagatgcacgcggtttcctaggcaaccgacactt

SEQ ID NO: 123284 - DNA, 122 bp, Homo sapiens
ttgctagctgtgggacttcaggcatgtcacttaatctctctgtgcctcagtttcttcatgcgtcacttgggactaataatagggcctacctcatatggttattgtgaggactaaataaatta

SEQ ID NO: 123285 - DNA, 122 bp, Homo sapiens
tatccatcgcggaagacaataatactattttgatagtccgattcatcccctccacctttccggaactctgaggccgggaggcagcaggcaatttccgtgtgatccccaattcctttgccgtc

SEQ ID NO: 123286 - DNA, 122 bp, Homo sapiens
gcggcgccgaccccccgcccgccgtcgcctcgtcgccgcccgcgccgggtccgcgcagcacgaagaagcgcttgtggccatgcttctgcttgcgcaggtagccgcacttgcgcacgctgtgg

SEQ ID NO: 123287 - DNA, 122 bp, Homo sapiens
tcttctaaagctactattttagctttctgggttctttgtgtccactcagccgctctggagcgccccggtgctgagctggctgtgcttgctgatgtccatttttttcgacaacccttgtctcc

SEQ ID NO: 123288 - DNA, 122 bp, Homo sapiens
gggcaatgccgaaggcctctggctcatcctgcaaggactggggttgaaaccccgggatctcgctccagggatcttacacacgacaacttcacacccggcccaagagcagcgcagaggaaggt

SEQ ID NO: 123289 - DNA, 122 bp, Homo sapiens
atcttaggcctgagctgtgaacagcagggggttgtgtgtctgttctgtttctctgcttgccgaactttctcaataaaccctatttcttatttatatttacgtggtgctggtggtgtgtgtct

SEQ ID NO: 123290 - DNA, 122 bp, Homo sapiens
tcccacacctacgagtccagaggctgtgagcacctgccagccagaaaggcccacaatccccggggcggacagccgctctgcccacctttagcccctctgcccacctccagccggccgctgct

SEQ ID NO: 123291 - DNA, 122 bp, Homo sapiens
ggaactcctgagctcaagtgatccgcccgcttcagcctcccaaagtgctgggattacaggcgtgagccaccttgcctggcctcctgtttataactggcgctgtccacttcctacagatgttg

SEQ ID NO: 123292 - DNA, 122 bp, Homo sapiens
agagtggaaatcaagagattttttccacggggaagttctttttacaaagcgttgatttctcggcacccggcagggagggcaactggcagggtctctggcgcaccttctgcgcggtggagcca

SEQ ID NO: 123293 - DNA, 122 bp, Homo sapiens
cgcggcggcggggaggagggtctgggagcccgggtgcgatttgcaagcgctctgagcctgcgtccgccgagggggagggtttccccagcccggccggagttgcggctgtgcgctgcttctgg

SEQ ID NO: 123294 - DNA, 122 bp, Homo sapiens
cgctccacgaggcgcccaagttcaccgtggagaccctggagcacacggtcaacaacgactcggagatctggggtctcctgcagccctaccagcacctgatctgcgggaagaacgccagcggt

SEQ ID NO: 123295 - DNA, 122 bp, Homo sapiens
actgcccttcccaaaacacaaggctgattccccatcatgttcatgcttaaaactttccagcggctgtgtcctgcctaccaggaggtccctaatcggagctctgcagccatcccgggctctgt

SEQ ID NO: 123296 - DNA, 122 bp, Homo sapiens
agaaaaggactcgggcaggtccgacgtgtcagacattgggtcggacaactgttcactagccgatgaagagcagacaccccgggactgcctaggccaccggtccctgcgaactgccgccctgt

SEQ ID NO: 123297 - DNA, 122 bp, Homo sapiens
agctctgcagcccacgaagatagagaccagatatacgaggggtccgtgcaccccaggcggcggccggctcgctgagcgaggggccctgccagctccacgacagatgctcgcccccctcactg

SEQ ID NO: 123298 - DNA, 122 bp, Homo sapiens
tgcccaggcactgttttaagtgctgggaatgcatagtgaacaaagcccccagttccctgccgctcacattccagtgaggtgaaaagacccagagggtccctcctcagtccaggagttctggt

SEQ ID NO: 123299 - DNA, 122 bp, Homo sapiens
ttgactcacagttccacgtggctagggaggcctcacaatcatggcagaaggcaaaaggcacgtcttacatggcagcagacatgagaggatatgagaaccaagtgaaaggggtttccccttat

SEQ ID NO: 123300 - DNA, 122 bp, Homo sapiens
tggacagagtttgcttgtgaatccgccacactcactgcctgtcaccacacctgcaggcgacgactgtaagggcaagaggcacctcgacgcgcacacagccgcccactcgcagtcgccacggc

SEQ ID NO: 123301 - DNA, 122 bp, Homo sapiens
aggtttagaattcaattggtgacatttattaatgcttaactagaagcgcaggaaggttcccgtgtgctatttaagcgactgtattagacaaataggatgttaaatggcaagatatttctagt

SEQ ID NO: 123302 - DNA, 122 bp, Homo sapiens
gaaaacacaccttggaattcatgatgagacagtccaactctaccgctgccaccaatggtacgtgtccaccattccgcctctctttactgaaactaatctttcataccaagttttactccctt

SEQ ID NO: 123303 - DNA, 122 bp, Homo sapiens
ccatcgcccgcctcgtccgcccgcccgaccacttgttaaggctccgcccggcgctccccgcgcccacgccccatcccgcgcgctcctccacgccgcgcccccggacgcccacgccgcgccgg

SEQ ID NO: 123304 - DNA, 122 bp, Homo sapiens
ttaagaggtacagtgtactacgtgaaatacggctttaacaaaaagtcactgttttgagaacgcatgatgaaaaacacaagatttggagttaaaggcatctcagctaagatccaggctctgcc

SEQ ID NO: 123305 - DNA, 122 bp, Homo sapiens
ctcccacctcagcctcctgactaactgggaccataggtactgctttttaaaactcagacacggggtctcactttgttgcccaggctggtcttgaactctgggctcaagtgatcctcccgcct

SEQ ID NO: 123306 - DNA, 122 bp, Homo sapiens
ctgaggacggtacactccaaacagcactctggggcagctgcaaggactaagccacatccgcgattgcatctgctgttgtcttcctttttatgagttctcttcgggtgcttgcagagcaaagg

SEQ ID NO: 123307 - DNA, 122 bp, Homo sapiens
tattctcgcgccggggactggatttttccctacgtcagcgcagctaggcgatgtcgggagcgagctcggaccgagggctcagttgcgtcagtgccgcgcgcgtgctcgtcgggcgcgcgtgc

SEQ ID NO: 123308 - DNA, 122 bp, Homo sapiens
tgtcttcatccattggccttcattagaaatcccctattttccgccgggcatggtggctcacgcctgtaatcccagcactttgggaggccgaggcggcagatcacgaggtcgggagatcgaga

SEQ ID NO: 123309 - DNA, 122 bp, Homo sapiens
ggctttctctgctttgcggattttcctcgcagtcactagagagcaggtgatggtgaaaagcgtgggcaaacaaaagtaacagccaaaataccaccacagtctcgcactgtcgtaggtgaggg

SEQ ID NO: 123310 - DNA, 122 bp, Homo sapiens
ctacttggcaatattttacacatgttgtcataactcactgttggagaattaagcatgtctcggtgactctactggaaaggatccctggaagcttatgtctggttttccccatacttcgtccc

SEQ ID NO: 123311 - DNA, 122 bp, Homo sapiens
gttgttaggtggtgggtttactctgggattggcctgcggttgccagggaggagagtttggcggcagatggtggcacacaacatttagcgccatgcaaaggtacagaaaagattgcgcgaagc

SEQ ID NO: 123312 - DNA, 122 bp, Homo sapiens
caaccccggcccgcaggagcccggggagcactcacagtgccatccatccccccggtagcccgcggggcatacgcacaagtagctgcccaccacattgacacatgtggccagggcgtggcagt

SEQ ID NO: 123313 - DNA, 122 bp, Homo sapiens
ggaaggcaaacaccggaggctctgcacccgcctcctctaggccatggattaatgctgctgcgccagggccctttccccactgtggtgtgataagaggctgccctcacagtcacaatgctccc

SEQ ID NO: 123314 - DNA, 122 bp, Homo sapiens
accgtgctctgaaaggcctcaagacttagcttccagttttgtacatcacttctagcgtatcgtcttagagagggcagtcaagacacgtatatttcagcatttttcttttttcaagacagagt

SEQ ID NO: 123315 - DNA, 122 bp, Homo sapiens
acctggtaggcagatacaggagatacaatatagggtgtaatagaagtttgagtgatcattcggtttgtagcaatactgtatggtgaaggataaaatccgttttgtatagcagctgtagttgg

SEQ ID NO: 123316 - DNA, 122 bp, Homo sapiens
gcactgctggcatggtttcccatttcagcttcaattatgtgttgaatttcctcaagtggacgcttaatgatccttctgaacagattgtttatgctgaatgaagcccttcagagagcatttgc

SEQ ID NO: 123317 - DNA, 122 bp, Homo sapiens
tcaaatagagactgggcagagtagaccagttagttaatcagttgaagaggaaaccaagatcgatgcctagataagcatttcagaggacagcaggggagatgataattgatgcaggtggcctc

SEQ ID NO: 123318 - DNA, 122 bp, Homo sapiens
ttgtcaagagacaggaaacagtcactgatctcgcagctgcaggaaaaaagctgggaatatcgttcttggaagaccttactgatcgcaacttctcaaattccccgggtccctatgtattctgt

SEQ ID NO: 123319 - DNA, 122 bp, Homo sapiens
tttaaattaaatcagtttgcccacctcctaacacattcttagaccggtggtatatattggcgggattcttaaactttttgtaattgtgtgataaataatagcatgttcaaatatctcatgaa

SEQ ID NO: 123320 - DNA, 122 bp, Homo sapiens
gggcgcagaggtgggcggggaggtggagtctcgtcggcctgccccagcaaggggaggcggcgggccctgaggaagatggacccacatggccactctatcaacctgtgtccccatgttccctg

SEQ ID NO: 123321 - DNA, 122 bp, Homo sapiens
ctacacttatattagaaacgtactgcaaactatttagtgactccacttttaatttatggtcgtatgactaagatgttttgaatataagcctatccgtatgccagatataaatttcaggaact

SEQ ID NO: 123322 - DNA, 122 bp, Homo sapiens
ccggcgccgtgcgactgcgcgggctgaaggcgggggcggtgccatgacgcgcctcgggggcggtcctcgggcgcgcaccgctctcttacactcgggcctcagaagtccgtgccagtgaccgg

SEQ ID NO: 123323 - DNA, 122 bp, Homo sapiens
tctggacccggggccccgccacctcccagcagcgggcgcagagagccttctggttacccccgaagctgaggattgcagtgttctagcaatggatgaaatcctttttaaccgactgtaataaa

SEQ ID NO: 123324 - DNA, 122 bp, Homo sapiens
caatctgggtaggaaatgggcagtggcgggtgtggaaacgaggcagagtgttcggggggacgactgctttgctctctgaccagctgaaaacctagagtgaattttgggcaagccagctggga

SEQ ID NO: 123325 - DNA, 122 bp, Homo sapiens
tcctccacccccaaatcctcctggtacctggatgtagcctaagaagaattgtcctatgaacgaagaataaattaagattgggtttgcaattgacgccagcagaagcagaaatgggctaggtt

SEQ ID NO: 123326 - DNA, 122 bp, Homo sapiens
tggttggtctggggccccgcggagccaggttgataccctcacctcccaaccccaggccctcggatgcccagaacctgtaggccgcaccgtggacttgttcttaatcgagggggtgagtgagg

SEQ ID NO: 123327 - DNA, 122 bp, Homo sapiens
gtccttaccatgtcctttagggctctggtgccttgcaggacccagaaggcaaacatttagcggaagacattctcctctctgtcctctgcctctttttatgacgttgatttcttgtttaaaaa

SEQ ID NO: 123328 - DNA, 122 bp, Homo sapiens
gtgacagtcacaggctgttcccgatcacgctggggtcacacgctctggtgagcacccagccggccagagctgtgctattggtttggcacaggtagaaagttgaccccgcacgtgccgtagaa

SEQ ID NO: 123329 - DNA, 122 bp, Homo sapiens
agttccccactcctctactggtgtttcctgggattcgcaccctaaggaagaactggcagtcgaattactatcctagagttatctccaaatagaatttttgtatttgaatatgtgcctcagga

SEQ ID NO: 123330 - DNA, 122 bp, Homo sapiens
cagcttgacagtggcagaacccagacccggggacccttgactctctgtccagtgctctcccggcctgtcctggatgcgtactccagcatcgtcacctctgaaaagggcctggatggagctgc

SEQ ID NO: 123331 - DNA, 122 bp, Homo sapiens
gaactctcttcagctgttcggctctcccggctcagagcgaggggaatcgaggagactgggcgcaggatgggggtggacacccggccgctgctcctccgcgcgggtaagtgtgagccccgggg

SEQ ID NO: 123332 - DNA, 122 bp, Homo sapiens
ttagtgaatacagacttaattctgactgattatccacactggtcctcttctttggttaatcgctaaccaccaactttgttttctgccatggtggtcccaaccaaaaagttatcagaaagagt

SEQ ID NO: 123333 - DNA, 122 bp, Homo sapiens
aagtaacctgctgtgagcagagttgagcctttggtttggaaaccatgtagccacaggtagcgaggaaattgaagagcgcttgggtggcttgatggcacaaggtttctgaatgggcggccaaa

SEQ ID NO: 123334 - DNA, 122 bp, Homo sapiens
tcctgccgcggtgttcaccctggccgggcgtcttctcggagccgctcaggaggtgagacgcggtgggtgccagcctgtagtgctgccagccaatcagcgttgagaccaaggcgagcccgcca

SEQ ID NO: 123335 - DNA, 122 bp, Homo sapiens
gacgtcgatgggcagcgggcacgctgggcaccgcccaagcttttccttttggagctgcttcgtgatgccgtcttcatttggaacaagggggggttcatgccaaaattaggaaaaacagcctt

SEQ ID NO: 123336 - DNA, 122 bp, Homo sapiens
ccgtgctactggattttcttcttcggcttcttcaaatcagttaagctgcaccagaaagaacgaaagactctgcagtctttcctctccctgcttgtgacctgcaccaggtggttgctaatgac

SEQ ID NO: 123337 - DNA, 122 bp, Homo sapiens
gcggtcggatttggggggtcggtgtgctttggcttttttagatacctgtcctggccggggcggtgcggcctcgcgggccttccaggctggcgcgcctgtggggctctccccgagcgcaggcc

SEQ ID NO: 123338 - DNA, 122 bp, Homo sapiens
ttcctgggctcgtagtgccctcgcggcgccccacgccgcgccactctcttccgaaatgcccgcctcgcgcttccaggcctagacccggcactctggcccaaggctggactctcacacacagg

SEQ ID NO: 123339 - DNA, 122 bp, Homo sapiens
cctctcgaggggctctggccccgaccctgcgccttccggccacttctcggacccctccttcggacttggcgaccccgattttgccccgctacctcgggttccactttctgccgccaggccct

SEQ ID NO: 123340 - DNA, 122 bp, Homo sapiens
tgaagacagagcaagcactccccgcaccacgacgatgacgttcacttgttttgtgtttttcgatctcttcaacgccttgacctgccgctctcaggtgagacccgggctgaccctcctcgctg

SEQ ID NO: 123341 - DNA, 122 bp, Homo sapiens
gagcgcggtggctgggcccgtagcgccacctggcggcggatcagggcccccgcgcccttgcgtcctcggaagggggaggggaagggactccaccctgcaccccccacagcgcgctcccgagg

SEQ ID NO: 123342 - DNA, 122 bp, Homo sapiens
tttaattcagcaagccacaaccaagacttgattttatcaacaaaaacccctaaatataaacggcaaaaaagatagatataattattccagtttttttaaaacttaaaagatattccattgcc

SEQ ID NO: 123343 - DNA, 122 bp, Homo sapiens
tcagtccccttccatctcctcgtcgtcctccggagccgagacgtccgcatccggcggcagcggaagcccaggagcctgccctgccctggggacgaagagctgcagctcctcctgtgcggttc

SEQ ID NO: 123344 - DNA, 122 bp, Homo sapiens
tggagaaatccaggcacagctgacctggaagcctgggtcccctgacaggcaggacctgcccgtggccctggtgctgctgggaccccaagtcccttctgtcaccaaccaggatatggcaggaa

SEQ ID NO: 123345 - DNA, 122 bp, Homo sapiens
gccgttgtaaagctttagcatcctgtgcgccttccgccgacgctccgtgagcctccacatcgggcccatctggggagtcccccggtccacaccctgggctaggccctgtgacagctgccgcc

SEQ ID NO: 123346 - DNA, 122 bp, Homo sapiens
cgagccctgccctgacagttggaggggcagcaggaaacagctatctgtacttgctgttcccggttcctgactcactagccttgctccctcatctaacgcctggggacataagagatgcgcag

SEQ ID NO: 123347 - DNA, 122 bp, Homo sapiens
tggtgagcttatctcgctgcagttgggagtgtcggtggttgcaattgtacatgttttatacgccatgtgctggtgtgttcgcacagtggatggctctatgctatgtgctccagggataaaac

SEQ ID NO: 123348 - DNA, 122 bp, Homo sapiens
ccgcagccgagcaggaagagcgagccgggggattgagactgtccgatccaacctagggcacgagcctggtataaatcgcggactaacagagactatctgatgaagagactaacggagagaga

SEQ ID NO: 123349 - DNA, 122 bp, Homo sapiens
tgtcgccacacgggccgggcccccacctgtctacctcacacctggcgctccggtcccaggcgcagcaccagctccacgcggccatgtttgccgcacccccgacactgcccccgcccccggcg

SEQ ID NO: 123350 - DNA, 122 bp, Homo sapiens
aaagaccccttcgtggtgggaacccgcggtggaaagcagcttctgtcttgtttcttgggccgttgctggacattggtttagctggggcagcatttcgaggtcgacatttgtgttctggccat

SEQ ID NO: 123351 - DNA, 122 bp, Homo sapiens
aattcgtacagggcaccagcctggccaacatggagaaacccttctctagtaaaaattatccgggtatggtggtgcatgcctgtaatcccagctacttgggaggctgaagcaggagaatccct

SEQ ID NO: 123352 - DNA, 122 bp, Homo sapiens
cccctatagtggggctgcccagcagccaaattcttctctgacctcccaggccaaactccacgtcgttccgctggtcgacaccagtgcctgtcgctgtgctcttccgctcctctcgacatcca

SEQ ID NO: 123353 - DNA, 122 bp, Homo sapiens
ggggtccctacacttcctgtcatgttcctgtcaaataataggttcccgcactactgcagtcgcccacttatcaggcccaaggtcctaaaaaaagcctggtctcgcccgcaactcaaaccaca

SEQ ID NO: 123354 - DNA, 122 bp, Homo sapiens
tctacaaatttaaagctttgaaaagctactacttttacttctaatacatccagatgaacacgatgtagcaatatcagcttgtattccagagaaatctcattagtttttctggtgatggaacc

SEQ ID NO: 123355 - DNA, 122 bp, Homo sapiens
ttaccgcgccattctcgctgctcttcatcagacagccggcaagcgacgaaaagatgtagccgtggcgggtgtaggtgccgctgcccgggctgccctcctccaagttacacagacgttcgcct

SEQ ID NO: 123356 - DNA, 122 bp, Homo sapiens
cagagacagcttttcatttaaacatcacacttctgtaataaacacttacaaaggtaagaacgttttaattaaatggatttatttaaaaagactataaaatctgacatcaagagagataaaaa

SEQ ID NO: 123357 - DNA, 122 bp, Homo sapiens
agtagggagaggtttgactgactgactgacaccatccaccacaaagtcatcaggcacctgcgggcctggaccctgcaggaggtggctgggtgtattcctgctgactgataggataactatgc

SEQ ID NO: 123358 - DNA, 122 bp, Homo sapiens
ggattcatagttcctctccttgtccaagaatctagggatgcagacaccttcctgaactgacgttacacatgggaactgttgtcttccttcagccttttagcttattctaagttattttgaga

SEQ ID NO: 123359 - DNA, 122 bp, Homo sapiens
gccactttcctcctggaggcgcgcgttaaagatctgcctgggagcgcccggcgggcggctcggcttgcgctctgatgaggaggctggggcccatcgattcccaccccctacccactccccct

SEQ ID NO: 123360 - DNA, 122 bp, Homo sapiens
cccttggaaactcgctggttgccagcagcattcttcagagtccgccgggcttccttcaggcgtttggaggaacacgcctttgatctttgggtctgggcaggctgcgcgggcccaccctcctt

SEQ ID NO: 123361 - DNA, 122 bp, Homo sapiens
cacccaccgctcgagccccggagacttctgggagtggccgccttgcctcgagtgcgcatgcgcagatcggccactactgggcccctggcctgaggcttagggtggagttagtgcgttcttag

SEQ ID NO: 123362 - DNA, 122 bp, Homo sapiens
gaggagacagagggtggccggtccccagatgccaggcccggggccggggacttggcttttcggctgctgggtctgccagagaccttggccttcccgccgccacctgcagggggacaagatgg

SEQ ID NO: 123363 - DNA, 122 bp, Homo sapiens
tgaaaatgatgcgcacgtagatttgtagagcgtattcttgagaatttccctgggatgaatcgggaggagcggtggagactccggagacaggtgccgcgctggtctgggctgccggctaaaag

SEQ ID NO: 123364 - DNA, 122 bp, Homo sapiens
tgcgacccctcccagacgtacggttttcactgaggagacttggggggagtgctctgctctcggctgagacgcttccccatggccgagggcgagggccggccccccgccggccgcctctggtc

SEQ ID NO: 123365 - DNA, 122 bp, Homo sapiens
tgacaaagttattagcaaactcaaaaccaaaaataaacaaggcattgaggtgctgtctgccgaccctttccccttaacgtctcccaaattcagatttaagaaacggttcaagacttgtaaag

SEQ ID NO: 123366 - DNA, 122 bp, Homo sapiens
gcatattcatgtcttggtggtgaatggttcctgagctgcaggtgcccctgaaaagtctttcgtatcaacagtctttagttatggaaactcaactttccaaatagctgcagccactaagattg

SEQ ID NO: 123367 - DNA, 122 bp, Homo sapiens
ttgttcttaccacctggaacgggtacatgttgccgctctcttcgtgcctgcacatgttgccgctcttttcgtgcctgcaatctggcaggttacaggttcttgtcctgtgaccaagagaaatg

SEQ ID NO: 123368 - DNA, 122 bp, Homo sapiens
ctggcctctggtgctgccctcactgaatccgtgaatgttcagtgagttagttggtcacttcgcccacagtgaacctatgtgtcaagtcctggctgggtgctggacctctggagctgcacaag

SEQ ID NO: 123369 - DNA, 122 bp, Homo sapiens
ttggaaactgagggcagaggtgagtgggcgccagggcctgagcagcgtggacagggggtccggccatggccctctgcagcgcctcctgccgggtagggcctgtgtgtggaagggggctggcc

SEQ ID NO: 123370 - DNA, 122 bp, Homo sapiens
ttcaggaaaactatttgaattttagactaaattcaaggcaattaagaagcctaactgggccgggcgcggtggctcacgcctgtaatcccagcactttgggagttcgaggcgggcggatcacg

SEQ ID NO: 123371 - DNA, 122 bp, Homo sapiens
tggtcctcgtccacccagatggtcttgcgctgctcctcgccgatcttgtccttgacaacgcggagcagctcctctacgctgccccacatgtcaggttccaccgtggcgtacaggcacggcag

SEQ ID NO: 123372 - DNA, 122 bp, Homo sapiens
tcactgggaaacagtttggcagcttcttaaaaaactaaacgtgtgctcaccatgtgaccccgtgtccacatgcgctcaccacatgaccccgcatccaccctcctgggtgctcatcccaggaa

SEQ ID NO: 123373 - DNA, 122 bp, Homo sapiens
ttagccttgcctttgagcttgcggatgacaggaggtgtcaatgtaaaataatcaaaagcgcgaagtttgaggatagcctacctagaaacaccgactccaaggaaggagtcagcgttccgaag

SEQ ID NO: 123374 - DNA, 122 bp, Homo sapiens
ggggtttcactatgttggccaggctggtctccaactcctgatctcgtgatccgtccgccccgacctcccaaagtgctaggattataggcataagccgccacgcccggccttttgtttttctt

SEQ ID NO: 123375 - DNA, 122 bp, Homo sapiens
cagaggtacttcagcagatattttggggtatgttttgtgggggctatttgtagttccatacgttatgctgtgtaggtggctatcaattctgctgcttggtaatcttggccccaaagttatac

SEQ ID NO: 123376 - DNA, 122 bp, Homo sapiens
acagtatagaggttcctcaaaaaattaaaaacaaaactgccatatgatcccacaatcccacgcctgggtatatatctgaaggaagtaaaatcagtatgttgcagagatatctgcactctcat

SEQ ID NO: 123377 - DNA, 122 bp, Homo sapiens
ggtcggaatcctgcacaggaaagtctgggagactcacagaccagggagggagggaggagacgccaggacaaaaccgggtcccagaacggaacaggcacgggtggaaaagccatagagtctgc

SEQ ID NO: 123378 - DNA, 122 bp, Homo sapiens
atatctctaccgtaatgttcctgataaacacgcatccggtttctgttgggccaggtccaacgttgctaagactccactatggcggctccacttgcccggagcttttcctcttaagcgtcacc

SEQ ID NO: 123379 - DNA, 122 bp, Homo sapiens
cccctggaggggggtgggctgcatggcatctggccgtgtaggggacgtgggaatagtgtccgggcagagggcgcagcctgcaacaaggcgcggaggcaggaacaccacagcatggggagtcc

SEQ ID NO: 123380 - DNA, 122 bp, Homo sapiens
catggagcaagaggagggtgagaagggcccccctctgcccagcgctgccctactgtcctgcgtagtccagctggagcccaggcctgcaccacacccaaggatgacggcctttgctgacaggc

SEQ ID NO: 123381 - DNA, 122 bp, Homo sapiens
gaagccttttaaaaatgcagaagcaagtagcttttgtcattgaatagaaatcaaatagcccgctaatcacatggcactttttaaggactgtatatgcaatagatgagttcgcagaagaatga

SEQ ID NO: 123382 - DNA, 122 bp, Homo sapiens
aacaaaagtgtgtaattggattgtttgtacctcaatggataaatgctgggatggacgccccgttctccatcacgtgcttatttcacactgcgtgcctgtatccaaacatctcatgtacccca

SEQ ID NO: 123383 - DNA, 122 bp, Homo sapiens
cagacacaaacgggctggttagcatccagctggatacagtgcagactcccagccatgacgcgaccctcggctcaggcaccagcgggtgtaagggacctcctcgcaccgcggctgaccggctt

SEQ ID NO: 123384 - DNA, 122 bp, Homo sapiens
aagtgtgtggaacgggagagagaccatctctgcctctgagattggattcgggtttcagttcgttgtcggtaaagtagtgaagtgtggcaggggttctctgaagcctcagggtctacacaggc

SEQ ID NO: 123385 - DNA, 122 bp, Homo sapiens
cgacgcgcatcgacccgacccactcgggagcacacctggctccgggcacacctggctctccggtcttgcctctgtgctgggtgcagctcgtgtctcccaccctcggctccacggagtttttt

SEQ ID NO: 123386 - DNA, 122 bp, Homo sapiens
cccgacccccacggctggccttggcgtcgcagcaatattccggatgcctgtgcccattgccgtaccagggctcccgagcgtactcctccatggcgctggcgtctggccgcgcagtcaggcca

SEQ ID NO: 123387 - DNA, 122 bp, Homo sapiens
gccgccatgccacatactgcgcccgtccccccactgtggagtctgtggtcagctagttagcgtggtttgctggaaaaacaggcggccacgggacgagtcgaggggctcggggagcaacagta

SEQ ID NO: 123388 - DNA, 122 bp, Homo sapiens
ggaagaagaagaagaagaacaattgcaatcctccctggctctagaatgtcatttaaaagtcgagtgtcttcttccttccctgttttgaagcagcccttctcatgacaggcttgcttgccaag

SEQ ID NO: 123389 - DNA, 122 bp, Homo sapiens
agaaggccttcccctcccgtcggctcattcagccgcggaagcccctgggagaccccgccccgccccgtcccgcggtgccccccgcgcactcaccctcgctcacccacgcggccttcctggcg

SEQ ID NO: 123390 - DNA, 122 bp, Homo sapiens
ccaaggctaaggaacagcttcactctctaatctttccacgaaatagctgtcaccttgctccggtgctgaagttcgggatgcggaactagctgagcatgcgtacttcctccctgccggccctc

SEQ ID NO: 123391 - DNA, 122 bp, Homo sapiens
ttctaacaggaattttatcttttaatgattcaggttcttccatttataggaagtaacctgcgactctcagtgttcctttggggtctcagcaactcaacttcccttattaacagaatctttcc

SEQ ID NO: 123392 - DNA, 122 bp, Homo sapiens
cccctactattcctttctccactgctgtagatttccagggctctgagaaaaggaggaggacgcagactctgctcttcagatccacatgctgatccccactacaatcagtgacctgaactcag

SEQ ID NO: 123393 - DNA, 122 bp, Homo sapiens
attccttccacctcctgttctaggtctgttgtgacaatggtcaggttgtctaaggtccttcggaggccctcgacttcaatttccaagtctttcttaaaggagtgttcattttcatacctttg

SEQ ID NO: 123394 - DNA, 122 bp, Homo sapiens
atccagtttcctggccgcctcctggctcaggtcaggatctggcagaggaggtttctcagccggttatgttggggcctgcttaagggcgggggtgagaaaggtccccaggctactgtggatcc

SEQ ID NO: 123395 - DNA, 122 bp, Homo sapiens
ccccgcgatatggggagtaatatcaccgccctctcccccctcagatattagcaaccacatcgcagaggggtgaacactttctgagaactggggagtaatatcacccccctctccctccctgg

SEQ ID NO: 123396 - DNA, 122 bp, Homo sapiens
agagtcagggcatagggagagccccagagccgcgggcatccacccgggtagggcaggaggcgtggaggcaggcacaggctatcctttcgttatgaccagattcagagaaaacgagatgttta

SEQ ID NO: 123397 - DNA, 122 bp, Homo sapiens
gcccactggactgcaggtggaagaactacagttcccagcagctattgcaagctcaacctccgtgcacactcaccccaggcctcacatccggcatgcgccgtgctcgctcacagaactacact

SEQ ID NO: 123398 - DNA, 122 bp, Homo sapiens
tcaatcccaacagggcagatgcagaggctgctggtcagtgctgctggctgggcacagaggcgggaagagccaggaccacagagcaggggaaggagatgaggattaaccctgcatggcctggg

SEQ ID NO: 123399 - DNA, 122 bp, Homo sapiens
gctttgagatgagagcggagagcgccggagactccccccacagaaccctctcccctcccccgttcccgcctttggggaatttccaacaccggggtgaggacccacccccacccaggtcgggg

SEQ ID NO: 123400 - DNA, 122 bp, Homo sapiens
cctagtctcctgcactgagctgtgctgagcacatctggcttccactggaagttttttttgcgaggaggggcttccctgggttgggtcaatgatgagaaccttatattgtcctgaagagaggt

SEQ ID NO: 123401 - DNA, 122 bp, Homo sapiens
gggggccggggaagctcaggagggtatttggcgtggcttcctgtttccttaaccttcctgcgcggtgacagccgcttgccctgtaactttctgtttcggggcaagtcgcgctttcagcctgg

SEQ ID NO: 123402 - DNA, 122 bp, Homo sapiens
cgcagggcggagccggaggggatttcgatccctgaaaagaagcctcagaatttcacaaggcgtggccccaggagtctcactcaccggtccggaagggagcgccgggagaggcctgagagcca

SEQ ID NO: 123403 - DNA, 122 bp, Homo sapiens
gttctccctggggtaggacagagaattggaaagttgtgggaaaagtacaagacagggtatcgtaatagaagtgttgccagccctgaaccagcctttcttggctgcacgtacatgtagaattc

SEQ ID NO: 123404 - DNA, 122 bp, Homo sapiens
tgcgcccgtgcaggatgcccgctgccggcgagtgggtcgcgagcaggacacttcggagagcggctctgcagacccttcagggttcctgccttggggctcagagaatctggacttgggctgag

SEQ ID NO: 123405 - DNA, 122 bp, Homo sapiens
atgagatgacatgtgtagtgcagggcacaatgcctcaaaaaactcatgttcggccgggcgcggtggctcacgcctgtaatcccagcactttgggaggccgaggcgggcggatcacgaggtca

SEQ ID NO: 123406 - DNA, 122 bp, Homo sapiens
tagtttttatctaaataaatctctacaattacattattacctttgtgcaaacaggcatttcggaaatggaaaaacatgttgagctatggaaggggaggaagatgtccttctcaaagggagag

SEQ ID NO: 123407 - DNA, 122 bp, Homo sapiens
aagaagctatcagaagtttacagggcatcggagggagacactccctttggccactttctccgccaaaactatcctggttttagcccaacagtttcccacgcccgcccccacccccacaacct

SEQ ID NO: 123408 - DNA, 122 bp, Homo sapiens
aatcacattctcatccagctgaaatctgatgggctagagttcgtaagattcaggaagtaacgaaccaggaactctcttattccatggactgtggtctgggtcagtaggctgggagagcttgg

SEQ ID NO: 123409 - DNA, 122 bp, Homo sapiens
caaacactgcttcaaatccggtatccgagcccttcccatttgcaactgaaggccgcccctcgtcccctcccagggagagatttccaagaggcttgctggggccttgcccctcctcccccgcc

SEQ ID NO: 123410 - DNA, 122 bp, Homo sapiens
acgcgcgggaacccactggctgctgggcggtgctctctgccctactcaagccaggaacaacggggcggagctggctcgaagggccacgcctcagactctccgcccgcggctcaggtcaaggg

SEQ ID NO: 123411 - DNA, 122 bp, Homo sapiens
ggcgcttgcattttgcgcaggcgcagggccttgggcggattctgtgagacgccaatgcagcggagaaggcggcagggggcgccggtccctaacatgcgccggtttagctcggtgttaagggt

SEQ ID NO: 123412 - DNA, 122 bp, Homo sapiens
cgaagggctcccggggtaggggtggctcccggctctggggttgtgtctgatgaaataggccgggcccgggctacactcggtggtggtggaccggcgggaggacgagcgctacctcagtacta

SEQ ID NO: 123413 - DNA, 122 bp, Homo sapiens
tttaatatggagcatttgtcacaatttaaatctggtttgagaaacatccaacttcagaagcggcatatttcaggagtctgtaataagccaaatgactgtagaggtggaaagtgctctcatga

SEQ ID NO: 123414 - DNA, 122 bp, Homo sapiens
gctgtccgcccagtttcggaggcggccacgcgaggatcaactgtgcaacgggtggggccgcggctgaccgtggtggtcgcgggggctgagggccagaggctgcggggggggggcggcgggat

SEQ ID NO: 123415 - DNA, 122 bp, Homo sapiens
ggctgccacctacagaacagagggcagcgaggactgcgcagcagcgggagggaccggtggcgttgggcgcggggagggtctgcgcggggagggtccgcacccgggagcgggggcggctgctc

SEQ ID NO: 123416 - DNA, 122 bp, Homo sapiens
cccttctcctgagtccaggccttgggcggagtccccctacaccgactctgcgctgggccacgggattcgcttcagccagcgggacaatagctgtcatgaggcaagcagcttcaaaagcattt

SEQ ID NO: 123417 - DNA, 122 bp, Homo sapiens
ggagactcgaagaggaggacagctgactgcagcccccgccgtctgcaccccagccctccccgctccccagggctgcagcccccgccgtctgcaccccagcacaaccccctccccagggctgc

SEQ ID NO: 123418 - DNA, 122 bp, Homo sapiens
gaggtggagggggaagccggaggtggaaagttctaacaagaagtttcttgccccagcagccgtttcggctggggaattctcaggtaatgtttacagactgacagaggagtttagggagggga

SEQ ID NO: 123419 - DNA, 122 bp, Homo sapiens
gccgcgcggccggagctgggcgggggtgcggggccagcagggcgggggcggcgctcaccacggcgcagcctctgacccacgtcgaccagcagctctgcgcccacccccaggcggagcggctc

SEQ ID NO: 123420 - DNA, 122 bp, Homo sapiens
cggcgccttgcgttcaaattagccgggcgggccggaccgtgcttcctattggtcagcgtccgtatcgctgattggctgtttcctaagtaacaaagtgttgcgagagccgttcacagtgggct

SEQ ID NO: 123421 - DNA, 122 bp, Homo sapiens
cacacatgacaccccatccacaccgcaaggcggaggcagtcagtgagtgctggcgggcgacgctgtcagaaccactggaacatgccagaagccaaaggtgccccctagcaacccaggcaaat

SEQ ID NO: 123422 - DNA, 122 bp, Homo sapiens
ttacagcccttaaggcagcgcgtctggagttgtccattcctcccagtgggctcgtggtctcgctgggctcagcagtgaagctgcagatctttgcggtgagcgttacagctcataaaagcagc

SEQ ID NO: 123423 - DNA, 122 bp, Homo sapiens
atcctcctcctcttccgcctcggaaccctccaggggggacgcctggccggcgcctgggcccgcagcatctaggggagaaggggtcggtgaacagaagcctctccaggtccccaaacctcgtc

SEQ ID NO: 123424 - DNA, 122 bp, Homo sapiens
acttgggcctaggctcagctggatttgaggatttgagacttagactgggtcagggtcccccgcgtcgccagggggcgctgcaggccgctccccggaaggcctcatcctgcgcggctggacag

SEQ ID NO: 123425 - DNA, 122 bp, Homo sapiens
agcccacctgccaacaaaaggcgccctccgactgcaacccagccctccacagacaggacccgccctttcccgaagtcataagacaaagagagtgcatcactgctgaaacagtgggcgcacac

SEQ ID NO: 123426 - DNA, 122 bp, Homo sapiens
acgtgcacacccatgttcccggcagcatcactcaccagaggcaacaggtggaaacgaccccggcatgcaccaaccacgaaaacgacgagcccaggccgggcatggtgtctcacgcctataat

SEQ ID NO: 123427 - DNA, 122 bp, Homo sapiens
ttggctctttcacatcatcctaaattccagctgctgattccaacagctcttctcagtgctcgttttctatttgttttacagcatttaaaactattgattcatattcctttttgacattcttt

SEQ ID NO: 123428 - DNA, 122 bp, Homo sapiens
cagaaaagcgctggctgccgtcggctgcaggttcctgcatcttttttccaatgtgcacttcgttttaataaaaaatgggaccattttgtatacactgtttttgtatcttccttttctcactg

SEQ ID NO: 123429 - DNA, 122 bp, Homo sapiens
gcggcctgcgcggaattcctgcattgtcattgccggcccacccactgttcaggctgagagcggtcccccgcccaaaccggcgcttcgccggcgccaagatagaaatgggtcgcccggctggt

SEQ ID NO: 123430 - DNA, 122 bp, Homo sapiens
gggtacatttctccacctgtgccccctcatgttcacagaggatttcagcagctgcaactgcgcacgccaggtggggaagggtgggggtgggcctggttgccccatgttaggaaatcactacc

SEQ ID NO: 123431 - DNA, 122 bp, Homo sapiens
ggggcctgcggcggaagcagcactccctgctgaagtgcctgcgcaaggccaagaaggaggcgctgcccatggagaagccggaagtggtgaagacgcacctgcgtgacgtgatcatcctgccc

SEQ ID NO: 123432 - DNA, 122 bp, Homo sapiens
tgcgttgcttcggtgcctgggcttggggaggcttaaccatcagggcttcgggactccaagcgcatgttctcacttcacttggcccagcatctgctaagtgaccaggtccgcgctttctgtgt

SEQ ID NO: 123433 - DNA, 122 bp, Homo sapiens
gtcagggcccctcccgcaccgccccatgtcaaaccatttcctgcagcgatggggctgtgacgccactgccgaagaggccagcgtgaggaaggccttttgaactaaaaccactccccgcagtg

SEQ ID NO: 123434 - DNA, 122 bp, Homo sapiens
agagacgctcctcactttccagactgggcagccaggcagtggggctcctcacgtcccagacgatgggcggccaggcagagacgctcctcacttcccagacggggtggcagccgggcagaggc

SEQ ID NO: 123435 - DNA, 122 bp, Homo sapiens
gagctctcatttcttcccacaaataaaccctgtgaccctccaccctctactcagagaacccgccctcaggtagttccctgtttgtgacatacacacacttagccctgaggctggactgacag

SEQ ID NO: 123436 - DNA, 122 bp, Homo sapiens
tggaccagattctaaaataattggctttaggactgaagaagccaggtgtcccgagcggggcgaggcctcctccagcgaggctgggtcggggtggcctcctttcctcacatcagggagggagg

SEQ ID NO: 123437 - DNA, 122 bp, Homo sapiens
atggaggggtgcggagatggaggggtgcagggacggtgtggggaacggtggcgccacctgcgggtaccacgctccgtgcccacttcctttaggtgatgccagcacccggctaggagcgagtc

SEQ ID NO: 123438 - DNA, 122 bp, Homo sapiens
gatgtccatgcccatgaagccgctcaggcagagggtcttcccggcctgcgacacctgggacggccctggtggtcagtacccaggcctagcaccacccgcccccccacctgttgcccgctcac

SEQ ID NO: 123439 - DNA, 122 bp, Homo sapiens
gacggattgtgaattcagagctgaataaggattccaaagaggggacaccggcatgggggccgttaagtgctgggagagttcggatacgatgttccctcccaaagcccatgtgacggaggaac

SEQ ID NO: 123440 - DNA, 122 bp, Homo sapiens
accagtgtacttgtttgcacaggtggaacctgacagcaccttgcatgggttgcagtgagccgagatcacaacactacaatccagcttgggtaacagagcaagactccatctcaaaaaaaaaa

SEQ ID NO: 123441 - DNA, 122 bp, Homo sapiens
gcctctgaactggggttgcccgttcctagggaacgcggcacgccctctttgcaggggagccgccagccctcacggtgtgggaaagaaggctgcttatctccagtgtgatctgaaaaattagg

SEQ ID NO: 123442 - DNA, 122 bp, Homo sapiens
actcacattcctcggggatctggataagcaggcaggggctgcagaggaggagaggccacacgtaccgcagcgccacgaccatctttcccggcggcaccgcgcagcacagccagccgggctcg

SEQ ID NO: 123443 - DNA, 122 bp, Homo sapiens
cccacagctggcaccaaaggcagtgtctgtggggagcgatgcgtgccccagccctgtgagcgtgatgttctctggcctctcccatgcaggtggagcgggagatcgcgatcctgaagctcatt

SEQ ID NO: 123444 - DNA, 122 bp, Homo sapiens
gctgtgtagctgggatggaaataatttggggacactgcatggtgattttgtttccattttcggtagaagctggcatcacagtagggattgcctgaatgactgcctttggagaggtggctgtt

SEQ ID NO: 123445 - DNA, 122 bp, Homo sapiens
gtgcaatgctctctactaagctgagagcaaagagtaagagaaaatgaaatttctgccctgcgagagctcacacagtatggagttgtgtggctgtcttaaaggctgttcggggagggcaggta

SEQ ID NO: 123446 - DNA, 122 bp, Homo sapiens
gtctgtcccacgtggtaaggcgggaaccgctgctgcctgtactgggggcgatactgggggcggcgcagccgattccgggccccagagaactgcctatcagtggtaggggggtcaaatccttc

SEQ ID NO: 123447 - DNA, 122 bp, Homo sapiens
cacgcgccggaggttccggggcagccgggttacacgcgagagccccacgcgccggaggtccggtttgtgcacctgcacacgggtcctgtctgtgctcccctgcagcccgggggagtcctggc

SEQ ID NO: 123448 - DNA, 122 bp, Homo sapiens
caccagtaccatgacaatttcaggaacactcagatttggcgcataaatgggtgacaccaccgctccaagaaatctctaccttttcccaggaattttcatgaatattccacctcttggttgaa

SEQ ID NO: 123449 - DNA, 122 bp, Homo sapiens
gctattaggagttttgaataaagatactgaagtgaaagtctctaccacacagtaggcgttcgaaaattgtttcctctttctccattcaacactgaggactcaggttcagctgctgatgaagc

SEQ ID NO: 123450 - DNA, 122 bp, Homo sapiens
ggggagaggccattcatgtgcaatgcgtgcggacggacattcaccgacaagtccactcttcggcggcacacctcagtaagcagtgggttggcttatttgagaaacaagctgctgcccttaga

SEQ ID NO: 123451 - DNA, 122 bp, Homo sapiens
cccctcatcaaaggtggccgagagattttaaagcaggaatgaggctgagttctctgcggccggagcctcagttttcgactcgctacaaagttatgaacacactggcagccaagaagtattta

SEQ ID NO: 123452 - DNA, 122 bp, Homo sapiens
gccccgccccaggaggaggctgaacattagtcctgcatgagggtgtctgggaactgggtgcgccacgggggccctacctcactcctccctctcacattgccgatcgagtcagccccacggcg

SEQ ID NO: 123453 - DNA, 122 bp, Homo sapiens
tagcgctttgaagcaaacaccgtgagactactcagcattgggagaagctgtccacgcggacgcccaggaagcagcccggaggatagggtgccccagcagtactgcagaatcccaactactga

SEQ ID NO: 123454 - DNA, 122 bp, Homo sapiens
gcgggtgcaagaactcccaggtcactgctttattcagaggacctaaggaattgggttgagcggaagcgcacagagctgcagattttctttgatgaatgaaagcttcaatccacaggtttcta

SEQ ID NO: 123455 - DNA, 122 bp, Homo sapiens
tcagccggcagctctttaaagcggcaggcagatggaaattcgaggccagcccagccccggcgactgcgctgcggacggccagaggccatcctttgagaaacacccgtggattcttaccctga

SEQ ID NO: 123456 - DNA, 122 bp, Homo sapiens
cgtccctatattatagcaacgccagaaatgtggtggtggtggtcgccacgttagggtccgcgggggtcctcctgaggcagcctggtgccaacccgcaggcccaggctggggctcgtcatggc

SEQ ID NO: 123457 - DNA, 122 bp, Homo sapiens
cggcttctctgcgtctcagcccgccccgggggtgcggtctttgcggccaggctttcagcgcggaaaaagattggagggtcctagtcaccccaaagaggacaggcattagcagagccgcgggc

SEQ ID NO: 123458 - DNA, 122 bp, Homo sapiens
cttataacattgttttataacctcccagctgactggctcctcaagcactgagtggcatcccgtaataggagaggacgaggccgtgcgtccacacttcaggagcggggcgcccttccttgagc

SEQ ID NO: 123459 - DNA, 122 bp, Homo sapiens
gctctgccactcttccttctctgtatattcttgagacttcccctgcttgcccaggaaggacggaaggtatcttctcagggagctgttggccattcccacttctctggggacttgcctctctc

SEQ ID NO: 123460 - DNA, 122 bp, Homo sapiens
tgactggtcatccaagagaggttaggtaccaagtattcaggtaagcctttccaatcgaaacgcattgtaatttccctggagcttaagcctacttaaagttttacagtttttaaactgctttt

SEQ ID NO: 123461 - DNA, 122 bp, Homo sapiens
gaaacccttgaaagggaacgaggagttctaaaatgggtcagaggtcataggtagggatctcggagcctcacctgtttgaggcccatgagctcagcatagtcaaagacgagaaggatgctaaa

SEQ ID NO: 123462 - DNA, 122 bp, Homo sapiens
taagatgaacagctctgaaaagctccttgatagactagttctatcccctagaaggacaaacgaaaagtactaaagaaattgcaaagcaacactgttgtgggatagggatggtagatgcgcta

SEQ ID NO: 123463 - DNA, 122 bp, Homo sapiens
aatttacctccccagatctcagtttccacatcatgcgctgaagcaggctgtccaaatgaacgtgtttctaaaaccctttgctgcatgtatttatctagcacggtgttttccaaccagggacg

SEQ ID NO: 123464 - DNA, 122 bp, Homo sapiens
atagcagattgtggctgatgatggaaaggtaatggcatcacatatcacaaaaatgcaactcggaaaataggcatatagaaggagcatataatttaaatttatagacaaacacacaagaaaaa

SEQ ID NO: 123465 - DNA, 122 bp, Homo sapiens
tttagcatcttttttactaaggcttcttttttcaatttatttgttcaaaggttcctggatcgtgggttccattttacagagatatgaaagccaatccgatagtgttgcaggtatttacactg

SEQ ID NO: 123466 - DNA, 122 bp, Homo sapiens
ctggctctacagaaaagtttgctgatctcggctttcttacactgacagttggcaaactaacgttggcaaactagcactgtattatctgctaagtcagtttaaatgtcttagattggaattct

SEQ ID NO: 123467 - DNA, 122 bp, Homo sapiens
tatttacagctgctcttcgccggctcttgctcccccgcgtgtcgacaaccgaaactgcagcgaggcccagaggcctctgcccactcccctcggagttccaggaggacgctaagcgcgagaag

SEQ ID NO: 123468 - DNA, 122 bp, Homo sapiens
gcctggggaaagaagcagtgcagggtggcttctgccggggcacgggacgaaattggggttcgtcccctcgtgatcccgagcttggagggcatctgaaagagacttgggcctcggagtcgtcc

SEQ ID NO: 123469 - DNA, 122 bp, Homo sapiens
accagtttgaaggctgatgctgtggtccaggcaaaaagtaatggcggctgggatgaagggcgaggtggtaaaaagccagtggattctggatatattatattttgaaggtggagtggacagga

SEQ ID NO: 123470 - DNA, 122 bp, Homo sapiens
gacacaatctggcccaaggtcgttcaaatcggggccggcctacccctcagagagagcctccgcccatggtccagtggcagggaagcctcaggctacggcctagatggagcattcacaagggc

SEQ ID NO: 123471 - DNA, 122 bp, Homo sapiens
acgacccagtttcccaaatgtgtaaagggtcctttagacctcgccctaaaaggtcaggggcgtggcttaaagaggaccgcgcttcccgggccccgaccccagaccctacatcgtgtgtgacg

SEQ ID NO: 123472 - DNA, 122 bp, Homo sapiens
ggggtgaaaatcaatccatgtgtgtatgcgtatgtgcatggtacccctcagacacgcacacgttcttatccagaatcgacgtcggattcatctgtgcatctccctcttttctaaggctcatt

SEQ ID NO: 123473 - DNA, 122 bp, Homo sapiens
ggtgcgctgctcgacctttgccttccatggtgtatttggcagttctctctgtagctgagacgtctgacggtttattccatttgggcacaaactccttcctgatatttgaagtggcgttgcta

SEQ ID NO: 123474 - DNA, 122 bp, Homo sapiens
cagcttgtattatagagcaagactcagtctcaaaataaataaataaaaagtatttgcatacgatacactgttattgcaagtgttgtgacactgtggtcttaaacccttgctctcttttcacc

SEQ ID NO: 123475 - DNA, 122 bp, Homo sapiens
agccggggtcctaggagcttctccacgactttcacagtgttggctgcatcagtcactctacgccatgtgagtagaacacattcttaaaattcttaatttttttttttttttgagatgcagtc

SEQ ID NO: 123476 - DNA, 122 bp, Homo sapiens
ccccgccgttctctcttccggctccacggccccaccccttcgcagcgggtctactctgcccgccccaagaaccaccacttccacagccaggcaccccagctcgggctgaggtcttctttggc

SEQ ID NO: 123477 - DNA, 122 bp, Homo sapiens
cctcctccgagttgatgtgctggggtttcgcctgcttgcgcctcgacatggtgcgagcatcggggcgccgggagagccgcagttatttgccctctccgccacaaattcctggagttgggaaa

SEQ ID NO: 123478 - DNA, 122 bp, Homo sapiens
gtcgatttctgtgaaaacgccccggtttctgccaaagggcaggagtcgctgctcttgtgccgggtgctgctggttgtgtagggcgctgttgcttttttaaggacgctctgcactgaattagg

SEQ ID NO: 123479 - DNA, 122 bp, Homo sapiens
tgccaagggccggctccatgtctcttctccccggcgcctgcaagtcctgcgccccgtccccgctctcatgaagccgtgacagagccggccgtctccaccccgctgtagccgcacagactgac

SEQ ID NO: 123480 - DNA, 122 bp, Homo sapiens
agagatgttgaccacaaaagagatcctgaccctcgcctggctttttgtgaaggaaggcgtcgaaaagatctggctcatgggcggagagccgctcatccagccggacgaggtggacattgtgg

SEQ ID NO: 123481 - DNA, 122 bp, Homo sapiens
ttttccaacaccttttacagaaagaaaggatggacttgggtttccacggtaacacaagtgcgataattgaaggtatctggctataggtgagataactccctttcagatttagtggagagagg

SEQ ID NO: 123482 - DNA, 122 bp, Homo sapiens
ggggcgcccgcagaaccctactcttcagttttgcagatgtgctgtcctcaaagacatcgtcgtctcccatctcgtcagagcagaagcccatactccctgccagcccgctggaggacttggca

SEQ ID NO: 123483 - DNA, 122 bp, Homo sapiens
ccccccgagctcggccctggacacgcctctagtttttacacccctccaggtcccaggtctcgccccgatggtgcccagagactgctgctctccgctggttgggccctaaatccacccttcag

SEQ ID NO: 123484 - DNA, 122 bp, Homo sapiens
catgctcccaccctgagatacccgcgcctgtgccctctgccggctgaactgctgcccgcacggccctgcccctaatgtcccacccagaagctctttaaccaggctctcctctagacccacga

SEQ ID NO: 123485 - DNA, 122 bp, Homo sapiens
cgagtgtttacaagactctattagtaatgacacagacaccaatggttggagacgtcgaggcgcagcgcgcactctacgcacaacccctcgaaacataatttgcattttaaaagataaagggg

SEQ ID NO: 123486 - DNA, 122 bp, Homo sapiens
tagtaattaattgagggccaaggaagagtttgttggacagataaagtcatctgtgaaagacggaatgatgatgatgaacagcaagagccaacaggatagaatctgcattactttgctgaagt

SEQ ID NO: 123487 - DNA, 122 bp, Homo sapiens
gcgtccatcggccagaggagaggctgccgccgccggggctgctgctgctgcagctgccgccgccgccgctggaacctggcgcccgcctgcatcctacatccccgcgctgacggcggcggcgg

SEQ ID NO: 123488 - DNA, 122 bp, Homo sapiens
gtgtccctctgtgttctctcagtgaatcaactgtctagtgatcacctactatgtgctgggcgctgctttaggtgccagagatagaattgtgagctaaaaaaacaaaattcctggcttgagag

SEQ ID NO: 123489 - DNA, 122 bp, Homo sapiens
tttccctcctcgtcagtgcggctgcgaggcgcccaagtcatcttattctccttcttgaggcgccggcgcgcgttggcgaaccaggtggacacctgggtgagggtcatcttggtgatgatggc

SEQ ID NO: 123490 - DNA, 122 bp, Homo sapiens
gccttggaaaacctgcatgtagagcggaaaagcccaagtagaaatcgctggtgcttcggccgccgtttctgcggctgtcgtggcttctagggggatattttgcagggggaattggctgtttt

SEQ ID NO: 123491 - DNA, 122 bp, Homo sapiens
gcccagggagtatgtgcccagatgataggcctggcccacgccgccgcccccgctgagtgacgcaatcgcaccacggggctgcgctccccactctgatgctcaggcccgtggcctcactggga

SEQ ID NO: 123492 - DNA, 122 bp, Homo sapiens
acaaaacaaaacaagtgaacaaaataaatacccaaagaattttttgagtacttctatgcccgctctcacaaagctccttgtttggtaggaaaattccttatctccctcctcagcttgggcgc

SEQ ID NO: 123493 - DNA, 122 bp, Homo sapiens
tctcctcctctctcaggaccatgtctctttattccttttcaggcctggcctctccagccccggggggaggggtccgcattcctctcctttcttaaggccacggctccctcccccacccgctc

SEQ ID NO: 123494 - DNA, 122 bp, Homo sapiens
cagactataggtaaacccatagagaacaacatatgataggatgtcttctgtcttgggacccgtaagacccaagtatattaaatcctggtctgccaacaacagtgaagcaaacacacttttag

SEQ ID NO: 123495 - DNA, 122 bp, Homo sapiens
gtcgccgccacagtctgcgacgggacccggcgtgcccatgtgtcaggtgggcgaggactacggggagccggcgcctgaggagccgcccccggcgccgcggcccaggtaagagctggcggccg

SEQ ID NO: 123496 - DNA, 122 bp, Homo sapiens
tcaatccccgttagcgtctccaccacctgggtggggcacggcacccattccactgaaagacgcgtggcccttgggccctgcagctcagcgttgtccccaagaccccgcctcctttcgcaggc

SEQ ID NO: 123497 - DNA, 122 bp, Homo sapiens
cgctgcccagaacgcttctgcaaataaacaggctgctgtgtttgctcgctttcataaacacgggaacatcctgcgcacagacaaggctgggagacaaaccccacacacctcggagggccctg

SEQ ID NO: 123498 - DNA, 122 bp, Homo sapiens
ccttatcctgcctttgtgcttgaccctgacccatctctatagtcgcagaattgctagagtcggatttctaaaatggagatgtggggaagggctaaggagagacagagtttgcaagcttttaa

SEQ ID NO: 123499 - DNA, 122 bp, Homo sapiens
atcggcgcaggacagaagcgggacctgggccagatccccgagaggtgggcggggcctgggcgaggccggggcggggtgcaaaggacaaggggcccggcgcggaagagaagagtcttgggctg

SEQ ID NO: 123500 - DNA, 122 bp, Homo sapiens
catgaccggcctcccgcacaaccgaaagtgcttcgactgcgaccagcgcggccccacctacgttaacatgacggtcggctccttcgtgtgtacctcctgctccggcagcctgtgagtgcggg

SEQ ID NO: 123501 - DNA, 122 bp, Homo sapiens
gacaggctcagctctacacgatgcatggggaggatctgcagctactgttacctctgcagtcgccaccgcccagcccgagccccaggccgcccaggatggtctcggactggccgtcgctgtac

SEQ ID NO: 123502 - DNA, 122 bp, Homo sapiens
tgacgattatcattttaaaatcagtccttttactttagagaatgccgcaaggttttgtggcgtgctggagcctggagcgttgggctgctggcgctggggaacccgcgtgcccctggtgatta

SEQ ID NO: 123503 - DNA, 122 bp, Homo sapiens
cttactaaatcaggattttcttgctggtcctccagtaactgggaggagccactgggatgccgtgcttgttggctgcttctggccttggcttcctgttctccacagcagaggggaggaaatcc

SEQ ID NO: 123504 - DNA, 122 bp, Homo sapiens
agccgggggaaaggggcggctggtgggaattactcggagcaactggtaattggtggggcacgcgcgtgccctggtgttcagagttctgaatcgttgcgagtcagttacaagctgaaccacta

SEQ ID NO: 123505 - DNA, 122 bp, Homo sapiens
tgagcaggagatgggaattgaaacctgcgcagaggcggctgtgcagggtgagagtggagccgaaaccacagaaagtgaagtttgcttcaacgtcttgtcccggcaggccactcagatgtgag

SEQ ID NO: 123506 - DNA, 122 bp, Homo sapiens
agtagagacggggtttcaccatgttagccaggacggtctggatttcctgacctattgatccgcccgcctcggcctcccaaagtgctgggattacaggcgtgagccactgcacccagttggga

SEQ ID NO: 123507 - DNA, 122 bp, Homo sapiens
tggaaaccagtgtggtgggaggctcctcaaaacattaaacagacaattaccaaacaatctcgcaatcccgcttccgggtatatgccccaaacaactgaaagcagagtctcagagcagtattt

SEQ ID NO: 123508 - DNA, 122 bp, Homo sapiens
aggcagattcgttcttctacaacttccatgacttcagtgcccaagcctctcaaatttctgcgtccacactatggcaaactgaaggaaatctatgagaacatggcccctggggagaataaggt

SEQ ID NO: 123509 - DNA, 122 bp, Homo sapiens
cgaaagtcagcggccaggtcgcacaaacgcagcctcggtgggatcccgggcgtcaggttccggcaggcaggcagggaaagtgtgcgctgatttttagtttctggcttgaaattatggaaaac

SEQ ID NO: 123510 - DNA, 122 bp, Homo sapiens
tgctttggtattgtaaattttcttatgattgatctgacacacctcttttcttcttgatggcggttttcatttggaaaatctataaggaataaagtcttcccacatgctacatgaagtggaat

SEQ ID NO: 123511 - DNA, 122 bp, Homo sapiens
ttcagagccctgcaggcctcagtctctcgccgcgcccagaactcgtttcttccttctcttcgcacaaggggtttaagagggcagacatgaagtgaaaagacctcaattccctcctttctccc

SEQ ID NO: 123512 - DNA, 122 bp, Homo sapiens
gtgagcagcattggcccccgaggaaagatctaggtgagtgtctagattcacatgattccacgtcaaggcagaggctgtgcttggcaaactgtttagtttctttccagctcccctctgtttgg

SEQ ID NO: 123513 - DNA, 122 bp, Homo sapiens
aaactctgaaatgatctgatgttttatttttctgtctgcaccacttacataaaaccatgacggcaggccccctgcttgtctaaattttttgcctagaacagcccctggcatgaggtggtagg

SEQ ID NO: 123514 - DNA, 122 bp, Homo sapiens
ggacagaaagctgttaggctgtgggtttaaaataggatatccatgtaaactgaaataatgcgcttacatgtttaaacagctaagtgccagttcaaaagcagtttgatattagttattttcat

SEQ ID NO: 123515 - DNA, 122 bp, Homo sapiens
gaagatgttgatgtaactgatctcattgaataagagcctcacacccatccgctccccatccggccccgcacttgattggtggatctcagagaaagacagaacagtcttgtgcattcggaccc

SEQ ID NO: 123516 - DNA, 122 bp, Homo sapiens
tctttgcagagcattttaaggaactttacccactggatgtgctcagcactaagcagtaaccgataggattgcttcctttttatcagtgggaagcagccacaggaagaactgaagtagcaaaa

SEQ ID NO: 123517 - DNA, 122 bp, Homo sapiens
cagccagaggtggcccttaccacttggctcctccctcagtgcccttggacctctttggctcgtaactgcttctgctgaaggtcatccttttggctccatgatcttcatggctgaggttgctt

SEQ ID NO: 123518 - DNA, 122 bp, Homo sapiens
gcaggagacagaggtgtgagcctggttggaaaccagagcctctcctcctctttgcagctccgctccgccacttgctttctctgtgactttggtgaaagtagctaaatgcctctgagttccct

SEQ ID NO: 123519 - DNA, 122 bp, Homo sapiens
aaagggagaaaagaaggaagaggaagggaaggtacaggaagggtttcggacagggtcggtcgggcacacagcagctgcgtaacgatatctcttgcccactcccgagtggctttgctttctct

SEQ ID NO: 123520 - DNA, 122 bp, Homo sapiens
tctgggcgggggcggtctaggagacgggggcggtacgggaggcggggctgcgccgggttccgtgtgtctatgtcaatgtgtctgtccttcactcctccattgtctgccgccactgctgctgc

SEQ ID NO: 123521 - DNA, 122 bp, Homo sapiens
aaagctctccgctgctgcaccactaggggaagcgacgtcaggaaagcgcgggatgcctggcgagtgaagctccaagatgtggggagtcttggaatatcagttccctcattcgatccctccac

SEQ ID NO: 123522 - DNA, 122 bp, Homo sapiens
cacacacacacacacacacacacacacacacacacacacacacacagcgggatggccgagcgccgcacgcgtagcacgccgggactagctatccagcctcccagcagcctctgcgacgggcg

SEQ ID NO: 123523 - DNA, 122 bp, Homo sapiens
gcctctggactctcgatggcctgccttcctgaggatcagggctaagtcacagggagtcagcgtccaggcgaggcccgcggagcagcctcacagcaactaatcgagcgaaagcaaaagcccca

SEQ ID NO: 123524 - DNA, 122 bp, Homo sapiens
gggaggttcagcagacccatgcagtgtgctgccagggctggaagaagcggcacccgggggcgctcacctgtgaaggtgaggctgggtcttccgggccttgcgggaggcgcgccccacggagc

SEQ ID NO: 123525 - DNA, 122 bp, Homo sapiens
aggggagcagcggcagtggcggcgacggcgaggaggtgttcggtttgcgcagcgtagaaacgcccgcagcttcagagaaggagttcttgtgggaccaaattaggcattctgaacccacgccg

SEQ ID NO: 123526 - DNA, 122 bp, Homo sapiens
aaaaggggcaaggtaaagagtgcgagtcatctccggtgattggtaaggtcacgtgggtcacgtgtccactggacagggggcccttccctgttaggtagccgaagcggagagagagaggacag

SEQ ID NO: 123527 - DNA, 122 bp, Homo sapiens
gtgttcctggcaggcgcccagcgccaggagactgtactgttaccgcctgcgatggtatcgcggagacgcccttgggtggtgaaaaatgatcattctgagaacaaaaattagactccacttac

SEQ ID NO: 123528 - DNA, 122 bp, Homo sapiens
caatctttttctccccatctctccatctctctcttatctcttcaggaagagcctaaaaggcggcaacaccaacacctcttgacatggaaatacactgatacaataggcaaaaggaaacactc

SEQ ID NO: 123529 - DNA, 122 bp, Homo sapiens
cgccgctggcacacacgccgtcccccacgcaggcgtcaccgccgccactgccgggccacacggtgggcagctcgcacactactcagagcttcccggccaaactgcactcatcgcctcccgtc

SEQ ID NO: 123530 - DNA, 122 bp, Homo sapiens
cgcttgccctggatctccagcgtcttcatggtgaagtcgacgccgatggtgcttccctggcgctccgagaaggcgccggtcttgaagcgctgcaccacgcacatcttgcccacgcttgcgtc

SEQ ID NO: 123531 - DNA, 122 bp, Homo sapiens
tcagtcagggggagggggcccctcctgcacagccgggacacccggtgtctcgtgcccatccgctctagccctgccctgcctcctgttccgggtccatgtgttggagctgacggctgatgtgt

SEQ ID NO: 123532 - DNA, 122 bp, Homo sapiens
ccctccctgtccagccacgttgtctggaggccacctggcagtctcatctgggttgggaggcgtggggtctcagagcgggaggagagaacctcgtggtggggggagctagcagtgagggagtg

SEQ ID NO: 123533 - DNA, 122 bp, Homo sapiens
aacaggaaaccatcgatcccgtgcaggaaatgaccttgtttgaaggcaacgaaggtgtcgcggatttccctcgttttccttcagttcctttctaaactcatttccgtgtttcaatcagtttg

SEQ ID NO: 123534 - DNA, 122 bp, Homo sapiens
atgaaaggtaacatgagccaagtccccacagggaggaggctgcagctcgggggcacagtgcgtcagaggccagatggacagattccaagttccaaaacaaatgtccttttaaaaaagtgtcc

SEQ ID NO: 123535 - DNA, 122 bp, Homo sapiens
tcttttaagagtatataaaccaccagagtacatcagaatacttttaactgaggaagatgacgggcaaggagtcccatatgacaggagcagagggagcaagaagaagaggggatataaggaag

SEQ ID NO: 123536 - DNA, 122 bp, Homo sapiens
taactagaacactcccatgagccactggtatgagcaagttgggaagtaccaaggccacagcgtggaggacatgggaatctgggccccccacttcagcaccttgcatttaccctccagttctg

SEQ ID NO: 123537 - DNA, 122 bp, Homo sapiens
gcccccgccccggccccgcctccagacctctgcagcgaggccgcccccctccgagacagtcggaaccccaggggccctgatcccagcctgtagggaaactgaggccagggttccttcgtcct

SEQ ID NO: 123538 - DNA, 122 bp, Homo sapiens
tcccttgtcggagggtgaattctgtggccatttggattttccagttcatcagtatgtaagcgggccttctaggtgggcttaccaaattaaaaaaaaaaaaaaaagtgtcttgcaaatatttt

SEQ ID NO: 123539 - DNA, 122 bp, Homo sapiens
atctcagctctctgtaacctctgcctcctgggtgcaagcgattctcccacttcagcctgacgaatagctggaaccaaaggcataggccaccacgcccggctaaattttgtgtttttggtaga

SEQ ID NO: 123540 - DNA, 122 bp, Homo sapiens
tctactacctcatcccacagagcaccagtgtccatcttcagcctatgtgggccagctactcggaactatcaggataaagaagcaaccaattgattagtaagaagggagaaagggaaggagag

SEQ ID NO: 123541 - DNA, 122 bp, Homo sapiens
gtataaattatatactcagtacacatcaatgaactgtgagaaactctgaggactgtgggacgttagtgcagaaaaagatcatgattctgaaacttagaatatggaaccagggaggaagggat

SEQ ID NO: 123542 - DNA, 122 bp, Homo sapiens
tggaggggggaacaggagaagatgctcaaggactacctctctgtggcacaggatgccctccggacacagaaggaactgtaccatgtgaaggagcagaggctggcgctggccctggatgaata

SEQ ID NO: 123543 - DNA, 122 bp, Homo sapiens
gggcagcggtcccaggagcagcctcagacctccctgagggacagtcttggtgccagtaggcgtcagtccctgtgaagtcatccattgatcgggcgggagcgccagctcagcctcgggtcctc

SEQ ID NO: 123544 - DNA, 122 bp, Homo sapiens
tatgaaacatcggcatgtatcttctaagaaaaagtgtcttctcctacctgaccacagcaccgtgactgcacctagggctgccagcagttttacatcctcacctaacggcccttcctattcac

SEQ ID NO: 123545 - DNA, 122 bp, Homo sapiens
ctgaaggaaggggaggttcgggtatcccctggatgggggggcatctctagggcgccgccccgctggcgtgagctggggacgttgcgggcacacgacggggcgggtgcgggatcttggggagg

SEQ ID NO: 123546 - DNA, 122 bp, Homo sapiens
ggaaagggtttaagaaaaacaactcctctttcccatagtcagagttgaatttgtcaggcacgcctgaaatgtgctcatagccaaaacattttactctctcctcctagaatgctgcccttgac

SEQ ID NO: 123547 - DNA, 122 bp, Homo sapiens
cctgccctggggttcaagcgattttcatgcctctgcctcccaattagctgggattatagacgcccaccatcacacccggctaacttttgcatttttagtagagactaacatggtttcgccac

SEQ ID NO: 123548 - DNA, 122 bp, Homo sapiens
gagacctgcgaggactacgactgacttccaaggaggccatggcggaactgagccagatgccggaagcggaattacgtaatgtggcgcggaaaaggacgggtcggaccgtaccaaattcggaa

SEQ ID NO: 123549 - DNA, 122 bp, Homo sapiens
gctctcgtacccgcagtgctcccgtaccctcccatacccacggtgctcccgtacccgcggcgctcttgtacctgcggcactcccgtacccgtggtgctctcatagccgcagtgctcccgtac

SEQ ID NO: 123550 - DNA, 122 bp, Homo sapiens
gagctctcggtaggtttgtaaatacttaactgatggtaaaatgtcatgaacccctacccccgatggatctgaaccgttcacttgacccactttaaactgaccagacttctccaaataagctc

SEQ ID NO: 123551 - DNA, 122 bp, Homo sapiens
cgccggaaaccagggtgagggctgagccggagtcgtcaccgggaacgtcagcagttgccccgcccttaccctcgccgctctccctcccgcctccgccccctggcgttgtaaaggcgacaatt

SEQ ID NO: 123552 - DNA, 122 bp, Homo sapiens
tggacagcagtttgaaggccctatgctcgctcactgcactaaggattcttgagcgatgggcgacttggtcgacacacaacccgggcccactgtgcggaattgcgtcgaataagcttctccct

SEQ ID NO: 123553 - DNA, 122 bp, Homo sapiens
caaggcttcacagaaaaagaaaatcaacacagcacattgcactgaaaaacaatcttcagccggtccagattatggagtactaggaggactccatatttgaaatgtttgcccttcaaagagaa

SEQ ID NO: 123554 - DNA, 122 bp, Homo sapiens
tacaattttgtagagggtaaagtatgggaggctgtccggaaagtggcaacaatttcagagcgccccctgccgaaggttaccgaaaactatatacaaaggttctagtgtcggaaatttcatag

SEQ ID NO: 123555 - DNA, 122 bp, Homo sapiens
ggagggccgatgctgagatgatactggaagtgcccatcatcccacatctccagggcctggcgcggcgtcccagctgcgctccctgaagggctgggcaggaaggcgacggcctcccgttgttc

SEQ ID NO: 123556 - DNA, 122 bp, Homo sapiens
agagggcacagagaaagctctcaatactcatggccaccaggagacagagacccactgtgtcggagaaataggagacaggatccagaaacacagccacctgcaatgccgcctggtgatacagc

SEQ ID NO: 123557 - DNA, 122 bp, Homo sapiens
tccttccccatagctgcagagcaggcacagggctgtttttgcccgccagtatgtccccaccgtctagcccagagcggggccagcggccggctcctacccacacttgctggcaggaagactgg

SEQ ID NO: 123558 - DNA, 122 bp, Homo sapiens
ctctggccctagagagcactcagacacccggactcagggaaaggcagacgccctcatgagcggcagctcccccacacctggcaccttgggaatcctcagcccagcacccctgcctgctccac

SEQ ID NO: 123559 - DNA, 122 bp, Homo sapiens
aatgggagccttatttgggggaaaacaaaatggaagaaatatgcaagtaaaagttctggtcgcgtctatcacatgtatatgactgtgatgtgctacagcttgatagctgtcaagaaaggttt

SEQ ID NO: 123560 - DNA, 122 bp, Homo sapiens
ctcccaataccttattagggagatattttaatcccaggtcacagagaagggaagtgtggccgattgtacacagcgattacagacagagccaggcctcggagccgttctgcacagctgtgccc

SEQ ID NO: 123561 - DNA, 122 bp, Homo sapiens
gctccgaggagcacctcatttctgttgcccatcaccactcctcttagctccattgctgagcggccggatgggacgaacgaggggaacgtgtagggcaggacaggctcctcttggccttggca

SEQ ID NO: 123562 - DNA, 122 bp, Homo sapiens
cctcgcctgctctgtccaggggtattttagtgacgcctggaacacgtttgactccctcatcgtaatcggcagcattatagacgtggccctcagcgaagcagacgtgagtatgcacctggcgt

SEQ ID NO: 123563 - DNA, 122 bp, Homo sapiens
agccccgtgcccctccgtctgcctccgcacggctggcagagggcaggctgcatgcagtggcggctactgggccctgcccagccccggaactctgcgcgatatcaatactggctattttctct

SEQ ID NO: 123564 - DNA, 122 bp, Homo sapiens
cagtgggcaggccacctccggggcttcctctccggggagcagagtgggggaaggggaaaccgtcagagacccagagacaggcaagagatgacagagaccagggcagaggggactggatccaa

SEQ ID NO: 123565 - DNA, 122 bp, Homo sapiens
gctgtgcaccggagataagtgcggcctggagatttctgcgtgacttgctctgggtgtcgccgctgggcgaggtccgccttcctcacccctccgcctgggatcccggcgcagtttccagggca

SEQ ID NO: 123566 - DNA, 122 bp, Homo sapiens
ataaagcatatcctttacggataaagcaactgaggttaagtagtttacccaaggtcagcacgtggtggagctgtagtctgaagccagagcctgaattcttaaagattaccatgttcttaaga

SEQ ID NO: 123567 - DNA, 122 bp, Homo sapiens
actcaatactccttcaactcacctctcaaactgtgtccctggtaaacatttattcgtgcacgtactcatgaatttaacaaatgtacacttattaaccatatgtattatgcatatgtaagaca

SEQ ID NO: 123568 - DNA, 122 bp, Homo sapiens
agtgcagtccagcttcacattgtctcttcactcagtgtcctggacacaccacgctccttccgcctctgatctgagctgtgtctttgcacaggctatttgctctgctgaaaacactgtgttcc

SEQ ID NO: 123569 - DNA, 122 bp, Homo sapiens
gcgtctaccccacaggccactcccagccctgtgctgcccccactccagagctgagtcttccggtctccccagatcacacccaacgcccagcacctgggccccggagggaggccaccccatct

SEQ ID NO: 123570 - DNA, 122 bp, Homo sapiens
aaatcagagccccgtggactccgccggagaactacattacccagcggccttcgcgcccttcgcaggaaggacgtctgcgcactaagatactcagttccaagtttggagcttttagctgccag

SEQ ID NO: 123571 - DNA, 122 bp, Homo sapiens
ctttcactcaaaaaaagtagaccctcattgtttccataagtctccgagcaaattctcttccggccacagactttggatgtagaaaataagcttatctgggcaggtggatatgcagagtttgc

SEQ ID NO: 123572 - DNA, 122 bp, Homo sapiens
tgcccgaggtcccaggccgcggcggcggcgcggtgggttcattagcgggcgcgccgggcccgcgcagcgctgtctgcagccgcgtcgccgcatccatcatcattacatcagcgcggggaagt

SEQ ID NO: 123573 - DNA, 122 bp, Homo sapiens
gcgggacctgccctggcgttggggtgtggggtcccctagcctggagcgggctcgtcctggcgggcctggatccaagcacaatctcagcttttggagccagcagccggaccgaattcagtttt

SEQ ID NO: 123574 - DNA, 122 bp, Homo sapiens
tgttcatcacgacggcaggttccacgtctaacggcacaaggttctctgccaggtgacagtcgttgagggtgtgggagaggcgtcatctgggcctcccccggggtccaggggccaaggcaggg

SEQ ID NO: 123575 - DNA, 122 bp, Homo sapiens
tagctaggaaactgcggagtggccaaggagttcctggcgcgaggcacgccacacaaccctcggatgcgaagacggtgaccatccatttctcaatacgccagtggccctgccgtgctactgag

SEQ ID NO: 123576 - DNA, 122 bp, Homo sapiens
tcaccgagaccctgatgggccagtgtctcgggtggggtctgtgcagcatactgaacacagcggcgatcctgagggacccgtgatgcttctagcccaaacctgccccgctgggtcttggccga

SEQ ID NO: 123577 - DNA, 122 bp, Homo sapiens
gtggctggaggctccggcctcctcaccctcccacagggtcccagggccgatccaggcctgcgggccaggaatgtgctaacggggcaacttgggccttgctggtccacgcaggcacctgtgga

SEQ ID NO: 123578 - DNA, 122 bp, Homo sapiens
cagtcttcgatatttaggtcctcctcttcttcacccttccctacacatgggggattctgacgtaaacagtctggtctgctgagtggcttccccattttgcagatagttaaaacaaatattgc

SEQ ID NO: 123579 - DNA, 122 bp, Homo sapiens
gcggggctccatcgagattcccctccgggacactgacgaggtaagtgtcgtgtatggaggcgggtgggggccatgaacttgtacgatcgcccccaccgacttcgctcgacttcgtttctgaa

SEQ ID NO: 123580 - DNA, 122 bp, Homo sapiens
tttcctgcttcacatgtgggacagaggccgtaagcgggcacagatgaggctgattcgactcgccagccccgctctgcggccccctccagtctgcccccatcctccagacccttctgggaaca

SEQ ID NO: 123581 - DNA, 122 bp, Homo sapiens
tccagccgtaaggaggacggaagctctgacgggctacgacgtaggtgagccttgagaatacggcgctgagtgaaagaagccagacacaaacggccacctagtgtatgaccccgtttctatga

SEQ ID NO: 123582 - DNA, 122 bp, Homo sapiens
ttctcaacattattgaataaagtaatgacataataaaaaaatagtattgtaatatcaatccgttccaaactctatggttagaaaagcggggaacataactggcgacacacgtagggaaggct

SEQ ID NO: 123583 - DNA, 122 bp, Homo sapiens
caccgcgtatgtgaaggccgtctcgcggctgcctgtgggtgaggacaagggatcactggccgcctgcctcacgcgctgggccgggatgctgccgggggtgggggtgggggcaaggtagggaa

SEQ ID NO: 123584 - DNA, 122 bp, Homo sapiens
tatttgtaattacttatttaaggcttgttttcctctttacctccaagaagaaagggaccacgcccatcttatgttggcaggctgtggatgtcttgagaagaacacaggttctagagccagca

SEQ ID NO: 123585 - DNA, 122 bp, Homo sapiens
tcgggaacccgcgtgggctgccccgcatggcatcccaggaacagtggggtcagaggctcccgcaggaaccggcacaggctgcacagcatggtgtcccatcgtcagtgcaattagaggttccc

SEQ ID NO: 123586 - DNA, 122 bp, Homo sapiens
ctgcccctcagtggtacacaggaagcagggtccaggaaaactgagatggcaaaataggcccgggctctggaaagcaacgtgaggtcatgcagatctcactaggcagacctcgtcgcgtggaa

SEQ ID NO: 123587 - DNA, 122 bp, Homo sapiens
cgggaccagagctctgggctgagcctgcccaatcccccggccatgtgcacactgaccctgcggtcacctttgagtccggtagtactaaccaagtggacctgcctggtggccccagcgctcct

SEQ ID NO: 123588 - DNA, 122 bp, Homo sapiens
aagcacttacagcccccattccacagagcctgctgggaaacagaggcccgaggggaggcccggcctacaagacccagaagccttagcgccggcaaggcggccagaagtagctctgctctctc

SEQ ID NO: 123589 - DNA, 122 bp, Homo sapiens
ccgtgtttgttacagctcgagctgagctttcgctcgccgtccaccactgctgtttgccggcgtagcagacccgccgctgacttggaccctccggatccggcagggtgtctgctgtgctcctg

SEQ ID NO: 123590 - DNA, 122 bp, Homo sapiens
ttatagcctattttatcacagagccgtcaacattacggactcgaataacccagataccagcggcatccccttgcacgagctcatctgcggagtacaaggaatacagatttggaagaaacctc

SEQ ID NO: 123591 - DNA, 122 bp, Homo sapiens
gtctgtgcccggcaaccatgttctcctttcaggccttctgactgacttctcaacgaagcacggactgccaatgccagcaccaccaagcggtagagttgcaacaccaccacgaggaagttctt

SEQ ID NO: 123592 - DNA, 122 bp, Homo sapiens
gtgtgcttggctctgggcatgatgggtttgtactcatttgcttctttgtaggtcttctatcgcctttctccttatgagcctgtttcatattttaaaagataagggagggggagcacattttc

SEQ ID NO: 123593 - DNA, 122 bp, Homo sapiens
ggaggggcggatctactcggggggcgggtctgctgggaaggccggatctgctgtgaggggcgggtcttctggaggggccgatctgctgagggggccggatctgctgcctgacagggcttcct

SEQ ID NO: 123594 - DNA, 122 bp, Homo sapiens
cagccggggcgcgtatccccactgctggccccgctgcccttcaggcgctgccgagcccctcgactagccatggcaagcctggggaaaaaagaattcggcaccctatgaagtcggtgagcgcg

SEQ ID NO: 123595 - DNA, 122 bp, Homo sapiens
ggtgagtgttaccgttcttaaaagcagcgtgtctggagtttgttccttctgatgttcagacgtgttcggagtttcttccttctggtggggttcgtggtcttgctggctcaggagtgaagttg

SEQ ID NO: 123596 - DNA, 122 bp, Homo sapiens
tctgtctgattctgcctgggtgtcccgaataagagctcagacagcctgaaagacttggaccgagtttctcctgcattttgcttcgatcccgttgcaccaggaattcttttgttgtgctgcag

SEQ ID NO: 123597 - DNA, 122 bp, Homo sapiens
gaaggggcggggcgtggaatttcctttaggcagctcgtggagacccagcctgggtggacccgggagtgtgtgtgtagaagcagggagggggacgcctgggccggagagggtcctagggccag

SEQ ID NO: 123598 - DNA, 122 bp, Homo sapiens
tcggatcttaactaagaattgaacttaaataatccagaaatgtttacaataatgaaaggtcggctggagttgaggctaaaagttttcacatattcaagacttgactccagaatattcttttg

SEQ ID NO: 123599 - DNA, 122 bp, Homo sapiens
gcccgagaggaagtggccgtggcaggtcagcgtgcactacgcaggcctccacgtctgcggcggctccatcctcaatgagtactgggtgctgtcagctgcgcactgctttcacaggtaagcgg

SEQ ID NO: 123600 - DNA, 122 bp, Homo sapiens
atggggcggacatgggggcctgaggctcacagtcaggccggatccgggtgaggttgtagtcggcccgcagggagcgcacggctcgcgtgatgcttagcgccagctcaagggcggcttctgcc

SEQ ID NO: 123601 - DNA, 122 bp, Homo sapiens
aggacccagcagaaggcgacatgcgaggtttgtttacttgtggcatcaaaggctgggagccggcgagctaaggagggagcgaaagagcgagcggtggggacagccaccgctaaatgccagcc

SEQ ID NO: 123602 - DNA, 122 bp, Homo sapiens
aaagcctggcagagaaacaaatgccagcgttttggaagaactgagagtcacgtcgttaggcgctgaggctttcttttccttccccgccccctgcccaacctcggcccgacttggccaaagaa

SEQ ID NO: 123603 - DNA, 122 bp, Homo sapiens
tgaattggaaagattgatatttttaaaagtttagatcacacaagctaaataaatatattgcgtttgctattgcaatgcagctttaatgagtttcctaggttgctacccgtcagttcccttct

SEQ ID NO: 123604 - DNA, 122 bp, Homo sapiens
gcagtgccattacaccggcgctgcgctcgaattctcactgggcctcagctgcctccccgccgggcagggcttgcgacctgcagtctgctatgcccaagcctccccccgcctctgtgggctcc

SEQ ID NO: 123605 - DNA, 122 bp, Homo sapiens
aggtcgggctgaggacagggtttggggcagcgggagagtcggggaccccagcagtggcagcggcagcgatgggcgagacttacatgacttcggtttgggcgcagtggggtccgggggacttc

SEQ ID NO: 123606 - DNA, 122 bp, Homo sapiens
gataagaatgcaccatggaatcaccagggtgtctggttaaaatgccgatgtggcttccatcggtctgggaggtggcctaggattttacgtttccaagaagcttccaggtgatgacaatgttc

SEQ ID NO: 123607 - DNA, 122 bp, Homo sapiens
agatcacaaaagcaattgcctctctgaaagcgtggtggttttgaataggagcagaggaagcgcaaggacactggcagcctggtgtgttccctcgggctgcccccctttcggcctcgggcccc

SEQ ID NO: 123608 - DNA, 122 bp, Homo sapiens
ctgcagacattgtgctcaaatctgcaattgtgcagctcatgagtgaaagagaaaaatacacgaggtagattttgtggcaacatcctatgttcagcggatcctgtggagtaactaaaaagaaa

SEQ ID NO: 123609 - DNA, 122 bp, Homo sapiens
gtatgggaatggtgaatgagaccctgtgtttgagtattaagcaattctaagcaactaggtcgggaagtatgaagagggatttaggtaagttcagccaagtttgctctatgctggcaactaca

SEQ ID NO: 123610 - DNA, 122 bp, Homo sapiens
gcccccgcgtcaacgccggaggagtgaccttgcaaacccgcgccccgcgggcggcagagccggccgctcactgcccggtccccggccaccacggaagagcgaagatctctgccagggcagga

SEQ ID NO: 123611 - DNA, 122 bp, Homo sapiens
ctgaccccagcggctccggtgtcctccacgtggctgccctggggagcaatcccagcggatcgctccgggccaccaagccgcacctgtgcctgagactccggatggacgacacagtcgtcacg

SEQ ID NO: 123612 - DNA, 122 bp, Homo sapiens
tcacaaagcactgcggttctaggtatgaaagcttctcactcttaactgacgtgggctgtgcgtttataagagagccgggtcaatgctggtgtaactgacacgggctgtgggtttgtaagaga

SEQ ID NO: 123613 - DNA, 122 bp, Homo sapiens
tgccttcccacaatccctaagattactttgaagtcacagtcgacttcgcgccggggcaggcgattggctgcagaggttagtgggcgggcatcaaggaccattgtgcgctctaattggcaggc

SEQ ID NO: 123614 - DNA, 122 bp, Homo sapiens
ccacatacctgggtctcccttcaaagctgacattgaaatgccctttgacccctctaaagtcgtggcatcggggccaggtctcgagcacgggaaggtgggtgaagctggcctccttagcgtcg

SEQ ID NO: 123615 - DNA, 122 bp, Homo sapiens
atcgaggacggcgccttctcgggccagttcaacctgcaggtgctgcagctgggctacaaccggctgcgcaacctcacggagggcatgctgcgcggcctgggcaagctggagtacctgtacct

SEQ ID NO: 123616 - DNA, 122 bp, Homo sapiens
gaacttgaaccacgtcccagattgctgtagatctttaggaagcaggcatctctcttagagcgtgctccagctcattctaccacgggggccttccttcacagtcaccagtccacgctgcctcg

SEQ ID NO: 123617 - DNA, 122 bp, Homo sapiens
accgtcactgctgctggattttttatgggtccatttcccgcaggcgttttttactgattgcgtgggtttgtacacctgtttcccccacctgcttcacagcggcaacttctcattaataagga

SEQ ID NO: 123618 - DNA, 122 bp, Homo sapiens
gaaaaccgtccctgtgcacttggattttcattgccaccgacttcgtgtaaaatccagtctcggggacacgagagagacccaggtcttgagccctgtaagcacgctcggcgttatggctccgg

SEQ ID NO: 123619 - DNA, 122 bp, Homo sapiens
ggagtggggcaaggcaaggggccttgcagcccagctggccttgagactgagtgtctgtctcgtggttccaggtcagccctgtattatgtggacctcatcggggggaagtgtggtaagtggct

SEQ ID NO: 123620 - DNA, 122 bp, Homo sapiens
tctgttcttcacgtttcactgcagtctcaatggggctttacagccccagaataaataggccgtgtgctttccagcctctctgagctacccttatccacctccctgacagagaatatcagcag

SEQ ID NO: 123621 - DNA, 122 bp, Homo sapiens
tgtcccatatcaatgccagggtggtgtgctacctgccctgagtccatcatgtccctcctgcggccaactgacttagagtcaaaagagttacagccaattaaacgttctaggtcagatgggaa

SEQ ID NO: 123622 - DNA, 122 bp, Homo sapiens
cagcgctgattaattacctccaacacacacactgagggacactgaagctgcaggaaagagcgttggcccgaaatccgaaaggagaacatccctctcctgcacagactgcccggctgaatggt

SEQ ID NO: 123623 - DNA, 122 bp, Homo sapiens
ggtagggacaggaatagagtttggcgtgggggtagcctcagctttcccttaggttcctgacgttgtttcctggcagagcctgggagctgtcctctcctaaccagtcctgccctggtcatacc

SEQ ID NO: 123624 - DNA, 122 bp, Homo sapiens
tgggaaggagcccctggagcttctattagatggaaggacttggtccacagcaagtcactacggcatttggttcaaacccagttttctctatctgtcaacccggtgtgtatgcatgcacacgt

SEQ ID NO: 123625 - DNA, 122 bp, Homo sapiens
cctggtaattttgtttcaaaacacaattagtattggtgaaaataggtttgatgacaattccggtagagacgagttactgggcagccatctggggtcatgactctttcttctcaggctgtgtc

SEQ ID NO: 123626 - DNA, 122 bp, Homo sapiens
gtattggccccaagtcccggggctagccctcccatgtactaaaccctccctctggcgtggcgtcgccccaggagccagcctgggtatgggctcccgccctgggattgttgagctcgggcagg

SEQ ID NO: 123627 - DNA, 122 bp, Homo sapiens
gggtgcaacggcgggcctctccggggaggtgacactgccgctgagacccgaatggaagggcgcgcccggcgggggaacagcaggcgccgaggttcgctggaagcagggaagggaggcccggg

SEQ ID NO: 123628 - DNA, 122 bp, Homo sapiens
gcggcagcgggcagggcgttcactgggctcaggctggtctcactgactgtgcggcgcaaccggggtggaggagagctccgggcatcccccagggccggggtcggggttcccttcgcgcgact

SEQ ID NO: 123629 - DNA, 122 bp, Homo sapiens
accgcggcttctcctccgggctgcagggtgtgcagcccccgcccgcagtcccccctccttcgccctgtgtgactcctggggctccgtgtgaccactctgtgtggtttgtgtgtttgcttctc

SEQ ID NO: 123630 - DNA, 122 bp, Homo sapiens
cgaactccagttcctcctcctccatcattccgccacccggccccctgccgacccccgccgcgagcccaactcaggcctccagccgccacccaggccccagcacagcaactccctcgcggcag

SEQ ID NO: 123631 - DNA, 122 bp, Homo sapiens
ttggatgagaatgcccggctccagcccggggatgggacggtcttttccttgctaggagtccgctgtggagggggcgatgcgctctgtccaggacctaggagtccctttctccctccaccctc

SEQ ID NO: 123632 - DNA, 122 bp, Homo sapiens
tggggcgggcggggtctgtacctgagaccgctctcaacgcggcttccgtgtcaggatgctcgctcacaggaatgctcatcacaggcttgaaagcctttgccatccacgctctccggagcccc

SEQ ID NO: 123633 - DNA, 122 bp, Homo sapiens
gtgtcatatataggacggagtaatctgtttacattctgttcttctcgatgcactcacaagcgggtaactaggtgacaagaaaacaaagatcttattcaaaagaggtcttacagcaacccaac

SEQ ID NO: 123634 - DNA, 122 bp, Homo sapiens
gacagaacggagactaggttccgtaagaggggacagattacgggaaagatcacgaccagccgtcaaccgcaccgccagaatgagcagagtccccagcggagcacctcggggtaccccctcca

SEQ ID NO: 123635 - DNA, 122 bp, Homo sapiens
gaggaggctggagggctccgggagaggggctgaggcctggcgccccaccccctccggaatcgtcagttgccctggctcagcgaccacccttcaggctccccaactcccgttggtcccgaact

SEQ ID NO: 123636 - DNA, 122 bp, Homo sapiens
aggcgccggcagcgcccgccagacccgccagcccagcggcccgggctctggggaaaccggcgctcccgacaggggagcaccgggcctctgagctccctcgggagcctttcacgaggtcagct

SEQ ID NO: 123637 - DNA, 122 bp, Homo sapiens
cagcagcagcaagtcaggtttcagctgctctaagcattttgctattattataatcgaccacgggtgatcaagtggatgggcaagtagagcaatattataaaacaacacacataatgaggagc

SEQ ID NO: 123638 - DNA, 122 bp, Homo sapiens
taaacgcaaatttataaagactatatgtagaaagatgtttattgcagcattatttgtaatcgtagaaactgcaaaaaaaatctgcaatgtttctcaagagagaaatggttcgataaacaatg

SEQ ID NO: 123639 - DNA, 122 bp, Homo sapiens
gcccgctttcccaaaccaacagacccaaagtttccccggagccagagggcaccgggcgcacggctgagcctgcaccaatgtctgtgggccctgcctcgcccacctcctcgccctcccctctg

SEQ ID NO: 123640 - DNA, 122 bp, Homo sapiens
tccgcttccctccgggcgcgagaagaggggagccaggccgagccccggccctaccgccgccgccgccatgtggcccccagaccccgaccccgacccggaccccgagcctgccggcggctccc

SEQ ID NO: 123641 - DNA, 122 bp, Homo sapiens
acgcttaccaggctcatggcacatctttttggagatggtaagtgctcaaacacaggttgacgatctcttatctgaaatacttgggacagaagtgttttggatttgggttttttttttttttt

SEQ ID NO: 123642 - DNA, 122 bp, Homo sapiens
ccccattctacccactctgcagcatcacagtcccatacatgatgattcccaatgaccattcgccaggactagatggtctcccacaaaaatcttgccagtaatgggaaaaacaaactgctctt

SEQ ID NO: 123643 - DNA, 122 bp, Homo sapiens
agtagcctttattcttcacacctcattacacagcacccaggccttttattcaggagggcgcggccggcctcaccccgacagccaccctggcttgttgaccttgatctgtgacagctcccctg

SEQ ID NO: 123644 - DNA, 122 bp, Homo sapiens
gtggcactgttgaaattctttcctttttgaaactctcaccttcactgattttggggaacacgcagtcccctggtctttctcccacttctaagtttcttctgccaggtccttttcctctgact

SEQ ID NO: 123645 - DNA, 122 bp, Homo sapiens
cctggtgtatcctgcctgttccacagtggtcaatggatttgtgcttactctaagatctctcgctatattgtaaccattactttccatttctgccttcacactcacccacctccaggactgga

SEQ ID NO: 123646 - DNA, 122 bp, Homo sapiens
ggccctgcaccatggcctcgtccgtggccacccttatggaggctgccgtgtggcaatcagcgacggtgtagacttggaataaaaccaccactggacactcccactgtcgccactgtcacctc

SEQ ID NO: 123647 - DNA, 122 bp, Homo sapiens
ttcttcatgaggagggcatggggtatctggcagggagtagtgggcaggaatcaagcccaccgtgtactcacatgcagtgaaacccatgtagaaagggataggccctgggggctgtagatgcg

SEQ ID NO: 123648 - DNA, 122 bp, Homo sapiens
tgtttaggtaaaagacttcagtggcagacaaaggaggagtaataagatcgctagggggcccgtgcccagcccacccacgcacaatctcagtcctcgcaatacccacaaggtaggtgctagga

SEQ ID NO: 123649 - DNA, 122 bp, Homo sapiens
gtccaattgagatggttttttaaaaaaattggaattaattaattaaagaaggcagctgcacgggcctggtagttggtgccaagctctgtaaccctaaaccagccaaccaacccaactggcct

SEQ ID NO: 123650 - DNA, 122 bp, Homo sapiens
tgggcgcctgagcctggagcccccgtcttactgggaggtgttcccttatgacggagcccacggggtctgcccaggtcacagtcccctcccacaggccacgcttcaggaggatcatcgcaggt

SEQ ID NO: 123651 - DNA, 122 bp, Homo sapiens
gggtgggaaacttctgctcttggcagtcatttaaatcctgtgctctggccaggtggctcacgcctgtagtcccagcactttgggaggctgaggcgggtggatctcttgaggtcaggagttcg

SEQ ID NO: 123652 - DNA, 122 bp, Homo sapiens
gctgagagaacaggcggagagccctctgacatctgtcaagcaaaagccaggcatgcacagcgagaagggaggtagtatttgggcagggtttgaatcatcattgttgttgttttactcctcaa

SEQ ID NO: 123653 - DNA, 122 bp, Homo sapiens
cgcgggtcatcgtgccgcagccaatcacagagcctctggcagctgaagttagggaaacaacggctcttgaggggtagctgagggcgcgggaccgctccccgcccggcagccgcccccagccc

SEQ ID NO: 123654 - DNA, 122 bp, Homo sapiens
gcctggccgcccccccttacctgttgtctagcattgctgtgtacacggcctggggggacacggagaagaaccgaagcagccgctcctcccaggtctccagcgtttcctggggagagcggccc

SEQ ID NO: 123655 - DNA, 122 bp, Homo sapiens
ggccttgctggagggggcatttgtaattatgagtgaatccaaaacaaggttttttccttccgcagccccccgcccggctgtggggcccagccactgcacttcaccggatgccgtctggttgg

SEQ ID NO: 123656 - DNA, 122 bp, Homo sapiens
gccttgattgaactccttagtcatttataacgtggttgggccggaaggcctgagaagatacgtaggtacaatcctcttttaaaaagaccacagaattagccaataatacattataaccagta

SEQ ID NO: 123657 - DNA, 122 bp, Homo sapiens
ccccgtgggtgaaaccggccccagaagggtgaggggccagcaggacccctttcgggagggcgccactcaggagtcctaccctgggagagcctgtggcccaccttggccttgcccctccctga

SEQ ID NO: 123658 - DNA, 122 bp, Homo sapiens
ggcgccgcacccagcgttcgcgctgcgctaactccgaaagggttgggaggctttaagaggcggggctagattccgctaactccctgtccccgcccaccgccgcttccgtgtcgcctacgtca

SEQ ID NO: 123659 - DNA, 122 bp, Homo sapiens
tgtgtgtgggggtctgactccagctcctctgagtcccttggcctccactcaggtcagaaccggaggtccctgctcccccgctcagagactagaactttccaaggaataggagattatcccag

SEQ ID NO: 123660 - DNA, 122 bp, Homo sapiens
atagcccctgggagtgcatgtgtgaccatcctgggctcaagtcctgggttgactgcaaagcggtgtgaccttgagcaagttacttctccatgtctcattttcctcttccaaaggcttgaggc

SEQ ID NO: 123661 - DNA, 122 bp, Homo sapiens
ggaccgggagaggagggggcagcgctgcccgcggcggggtgggcggcggtgggtggtctccgctccgcctccgggaggccgcgtggggggcgtgggggcctcctcgcggggtctccacaggc

SEQ ID NO: 123662 - DNA, 122 bp, Homo sapiens
ggcatggagacagggaaggcagaggccatgcatatttaacgtggcggctccacgaggctgcgtgtgagcggacgtgtgggcaaaccaccctgaagcatcgtggcgaggcgggcaggggtgca

SEQ ID NO: 123663 - DNA, 122 bp, Homo sapiens
gggcgcgagggccggggcggaggcggaggccggcggggcagctagcgcagtgaagtttggcggcggaggggccgggcgtcccggggtcgcgaggaggcggcggcggcgcggggaccggggcc

SEQ ID NO: 123664 - DNA, 122 bp, Homo sapiens
tttaatcatgtaatataaaatttaccattgtagcctctttttttttttttttttttgagacggagtctcgctctgtcgccaggttttttgagatggagtctcgctctgtcgcccaggctgga

SEQ ID NO: 123665 - DNA, 122 bp, Homo sapiens
gacatcgcatgtgtctgtaggttcgtaaacaccgtacttgtgagctaagacaacactgcacgcgactgtagatttgtaaacaccgtacttgtaagctaagacatcaccgcacgcggctgtag

SEQ ID NO: 123666 - DNA, 122 bp, Homo sapiens
ccgcccagctctgggctggtggtaaatctcggaactggtccgggctgggcgagttctggacggaggggcacgtttgggaatcctcttggaagaatttacgtaatcgaatgggctgggactgg

SEQ ID NO: 123667 - DNA, 122 bp, Homo sapiens
ttcgccttctcctcggctgtggagccctggtggggggtctgcgcccggtcaccatgacgacgccggcgaatgcccagaatgccagcaaaacgtgggaactgagtctgtatgagctgcaccgg

SEQ ID NO: 123668 - DNA, 122 bp, Homo sapiens
gcggggccgaagggcggggacacgtggaggggcggggccattgggtaatgggcggggatgcgagtggaggggcaaaaccatcaggtaaaaggaccaatagaggttcaggagcgagtgggcgg

SEQ ID NO: 123669 - DNA, 122 bp, Homo sapiens
tccaattaccgcgagtagcatttcatttggccccatggagcattcacttataacttcccccgaaaatttcaataatccctaccaaggctccacgctggccctatcctaaagagttttcctag

SEQ ID NO: 123670 - DNA, 122 bp, Homo sapiens
ggacggacttccttctgagtttttggttgtcgtctgtggggatcgaagagtcccagagaccgtgctcctcccgtggctaacactaattcaccgaggagctatgcacattccttcccctcttc

SEQ ID NO: 123671 - DNA, 122 bp, Homo sapiens
aagatgacgtaagtacggcacaaagtggccggtacgcggcaggtgcatgggaagaaactgcggaatgaaacaaccgcgagctaagagatggggcagcgggagaaatgaattcgagttccgcc

SEQ ID NO: 123672 - DNA, 122 bp, Homo sapiens
agctcacagccctcccggcagaggggcctcagacccagcacgctctgtgggtgtcccacgcgctgctgggagcccagcccctgggcaggcagggtccccggacatagccatagcatccggcc

SEQ ID NO: 123673 - DNA, 122 bp, Homo sapiens
aacagggtttcaccatcttggccaggctggtcttgaactcctgacctcatgatccatctgcgctggcctcccaaaagaactgtaactttttattagttaggaagaaaataaacaagggtctg

SEQ ID NO: 123674 - DNA, 122 bp, Homo sapiens
gtaccatctgtattcaaggagcatcttgggtaattaagcacctacccatgtccaaggccacgtagaggctttatagaattaaaatacctgctctcaaggagcttgaaatctgataacatgca

SEQ ID NO: 123675 - DNA, 122 bp, Homo sapiens
aaaagactccagggctgcagagtgctccgaggaagcctgcattccaccaccttcaggagccggtcccgaggcggctccgattcactgcatgccccccgccccccaaagcaaaagttgcacgg

SEQ ID NO: 123676 - DNA, 122 bp, Homo sapiens
taaaagcctcaaatcctaaggtccgactgtgccggggagggagggggtcttgagctggatcgacccctgagtcttcatctggagagtcctctgcacaagctcagagagcaggactaggcgca

SEQ ID NO: 123677 - DNA, 122 bp, Homo sapiens
cctcagatgccatattctgcacctcactcaggtggtgctcctggaactccactgggacagcggcagccttcagagacaggttcccaaaacatcacagtcaaggccaagtcctttccaacaca

SEQ ID NO: 123678 - DNA, 122 bp, Homo sapiens
gttttattcggtttgggccgggaaggagctgtgctggatccgcgccccctgccttggcgccgcctctggccccctgagccgtggcccatcccatgcagaatcaatcggggctcctcactccc

SEQ ID NO: 123679 - DNA, 122 bp, Homo sapiens
cgggacggcaggaggactgcgcatgctccataacggggatgggcctgcgctgggaggggccgtagccgggagctgcgcatgctcgctttttgggggcggagcttaagcagcctggctaggag

SEQ ID NO: 123680 - DNA, 122 bp, Homo sapiens
ctgcctggcagcctcagcctgagcctccacttcttcccctggggtcagatatcaaggcatcgtgcccggcaaaattcaagggacagatccaccagcattctttgtggccattcttcagtgtg

SEQ ID NO: 123681 - DNA, 122 bp, Homo sapiens
caaaaagaacaaattgattcattttgtaccacgaactcaactcaaagtaaagccctacttcgctttttaagatatattttgtaaggttttcattttttgttttatgttattatcctgttatg

SEQ ID NO: 123682 - DNA, 122 bp, Homo sapiens
tgagaggtcaaagataagaaggcaatttctttgatggaagggaggagcgctgtgtgggagcgaaggattccagacacagggaacagcacacacagactcggaggagccacactacccttcct

SEQ ID NO: 123683 - DNA, 122 bp, Homo sapiens
tcagggcaaccacctcaccttgtagtcaaggaaactgaggcatggagaggacaaggaccacgcccgcagcccaggacactgaactagaatccagctctcccagctgacctgtgccctcacac

SEQ ID NO: 123684 - DNA, 122 bp, Homo sapiens
aaaatcccttgggcttctgtgaacttggaatcgtcacaacttgtgattgctcttcccaggcgcttttaaaatctcttagtacacaccttgcctattagactaacaaaggaaagagagaaaat

SEQ ID NO: 123685 - DNA, 122 bp, Homo sapiens
tattatatacgaaaactacaattctgacaaagtgctttctagcgtcagaccctggtggagcgcttcccaggagttatctcattcaattctcgcaactccgagaggcgccttctatttcacag

SEQ ID NO: 123686 - DNA, 122 bp, Homo sapiens
acagaaaggttttaaaacttgcgtaaggcagcctagctccagagttcatgcttttaaccacgatgctagcttaatagagtcactaagctactcatttgtcccttcatttcctttgatgtttc

SEQ ID NO: 123687 - DNA, 122 bp, Homo sapiens
tgcactcctgcatttttctgttataaattaagtcctcagtattataattctgcactcaatcgcagtcaaccaagaaattgcctttataaaggcaactgagcaccctgccctttctgggatgg

SEQ ID NO: 123688 - DNA, 122 bp, Homo sapiens
ctttcagagagggtccaagcccgtcaggcactctctctctcgcccggccaaggtgaagcccgtccgtgaaccatgaactcacgaactcagtgtccagccctcatcacagcaacctgctcacc

SEQ ID NO: 123689 - DNA, 122 bp, Homo sapiens
ccaggactccaaagggcccctcgcgtcctctcccgggaatgtacccacaggccccctctacgcgcttgggttgcccaggaaaccccaacggtgaccccacaatgcccagcagagccctcgcc

SEQ ID NO: 123690 - DNA, 122 bp, Homo sapiens
ccacagccccagttaccaacagctcatccggatgctcggcctgaagccttggcatgggctcgactcctctctgtctcacaccccagcccgtctgtcgggaaatcctgcaggctcttccttca

SEQ ID NO: 123691 - DNA, 122 bp, Homo sapiens
gggaagtatggacggccgggccgggccgggccgggcggagcgtgaagccgggttagggcccgccgggtttgggcccaccggctctcatcggtcatcaagaacttgcagaaagccgggcacgg

SEQ ID NO: 123692 - DNA, 122 bp, Homo sapiens
ttcctgttcccagactgacatctgctggggatgtcaggctgaccggctccccgccaggcccgcagccggctgccactcgcgcccacgaagggcagcggagggacgcgcccggggcgcaaccc

SEQ ID NO: 123693 - DNA, 122 bp, Homo sapiens
cgccagattgtgggaacatctgtcttgaatctaaagagacaaaacagatgggcttggtttcggagttccgcccactccccagtgtgctgttgttagtgaccacaggagtgggagcagtccag

SEQ ID NO: 123694 - DNA, 122 bp, Homo sapiens
taaaaggctgccgctgcagcgttggcggcgcccatcgaaatcaacggaggcggtggcgaacgcagcccaccgcagccgagacctgggagcccgcctgggcctcacactccctcgggtcgcgg

SEQ ID NO: 123695 - DNA, 122 bp, Homo sapiens
tggtgcccgaggttttcctaaagctatggaattccatcattttataaatgactccaatgacgaatcctactggcataacatctatggtttcaccaactcttagcagtgatctttggttccag

SEQ ID NO: 123696 - DNA, 122 bp, Homo sapiens
ctgcttgactaggccacagccgccatggcgatgaattttggggaccatgccagcggcttccgccacaatgatgtgatcaggttcattaacaatgaagtcctcatggacggcagcggcccagc

SEQ ID NO: 123697 - DNA, 122 bp, Homo sapiens
tccaagcactttgactagcccaagagcctcatttaaactttagccccactctctcctcctcgccccgccccgaagctaatccctgattggatgaggcaccactcctcgtggggctgcttagg

SEQ ID NO: 123698 - DNA, 122 bp, Homo sapiens
gcacctgtggtggcgttcccatggtaaccctgggggtcagcaggcaggggcatcagccgtcgctgggaggctgcagcaggagacagggcggtgccagccaggttgctccacgccaccaatct

SEQ ID NO: 123699 - DNA, 122 bp, Homo sapiens
ccagatacgaagtgggagaggcgaagaggcccagttccagggccgggggcgaggggtgggcggtccaaagggcaccgcccctgcgggtcacgtgctcgccgaccaccaatggccgcctccga

SEQ ID NO: 123700 - DNA, 122 bp, Homo sapiens
gcaaatctccaccaaagtgcaggaaacagcatcaactattactgcaaagttttggtttggcgcagcgggtagacgttccagcgctgaaatgcgcaagaaagtttttgctgcgcatgtaggcg

SEQ ID NO: 123701 - DNA, 122 bp, Homo sapiens
gtaaactgaggctcattaaagagcttgtgaccaaacaacacaggtgccccagagaaaggtcgggcctggaaactacaaaggattgtgttaattttgtgtttaggaagaaagaggtaatgggt

SEQ ID NO: 123702 - DNA, 122 bp, Homo sapiens
tggacgagctcctcggtaagaaccaatgaggatgtggtatgcaaataagcaagtggaggccgccagccgacttcctcgcactgtgcagctgctccagtgagggcgcagactgtactggcctg

SEQ ID NO: 123703 - DNA, 122 bp, Homo sapiens
ccacaacaggacatggagatcagtccagacccacagtagaaccaatcgagcggaggaaaccgcggcgttagcgtgacccggatgcgcatcgctaggaaccggaagtaagcggccagagtcac

SEQ ID NO: 123704 - DNA, 122 bp, Homo sapiens
cctgccagcaaggaggacctggcgctccttcaggcagctggccagtcaatcacctgtgcgcgccactgccgccgcgcccgcccgcgcccgacccgcacgaccggccgcaaagcgccgccgtc

SEQ ID NO: 123705 - DNA, 122 bp, Homo sapiens
cacccatctcattgatcggcacaaaaacagaccaattgacagccttagtcccgccccctacgcaagaacggccagacaagttagacagagagcgcacgacgaaggcactgggagggcacagg

SEQ ID NO: 123706 - DNA, 122 bp, Homo sapiens
gacctggatgtaggcactgcccgcccgaagcgcgcggaggggccctggccttgatgacaccgcccccctaccagggccctggagcaggagaaagggcgccacctctacctggccggccttcc

SEQ ID NO: 123707 - DNA, 122 bp, Homo sapiens
gctcttactccggagctgcccagagtcccagcaagatctggtggggtcggtagcagaccacgtgtcctgcctttcctcagctcagtgcctgttctggggagtcctcccagcggggttctggc

SEQ ID NO: 123708 - DNA, 122 bp, Homo sapiens
ccaaaccacgtttgccttctttctgccgttttcagcctcttctaaactatgcagaagctgcggacatttgactatctatattcggcaattcctttccaaagcaatcctaccgaaaacagatc

SEQ ID NO: 123709 - DNA, 122 bp, Homo sapiens
tgagaccaggtgagattctaaaggatttgaccaactaggcctagatgaactcagcgcccccgtggtgctaggctggagtggatcagacacctggtttgggaggctgggccccctgctctggg

SEQ ID NO: 123710 - DNA, 122 bp, Homo sapiens
ttgtcttattgtatgccttagattcattggattgggtttcaactttctcctgaatctccacgatctatgttcctatccatattctgaattatatttctgtcatttcagtctggttaagaaca

SEQ ID NO: 123711 - DNA, 122 bp, Homo sapiens
gccgcgctcgggccgataaggacgggcggggtgcccggaggctctataaggaggccagggcggcgggcgcggcccccagagcacgtcaggcggcgccatgctcagcgcccaggagcgcgccc

SEQ ID NO: 123712 - DNA, 122 bp, Homo sapiens
atctgagtaagggcgaggatgcattttgtttaactgtattagagagtcactattcacagacgcatcgtttgctgaagcccagtacttcagcttaaatgaatgaaagcagaataatagatttg

SEQ ID NO: 123713 - DNA, 122 bp, Homo sapiens
tctgggcccttggtctggcatccccggccagtgcagccccttcaaccgtggggtaggtggcgggcggaggggccagcctggctgcctggcatccccatggttcctgtaataaataacaagcc

SEQ ID NO: 123714 - DNA, 122 bp, Homo sapiens
ggcttgaccccgggagaccctgctttgaggcgggtatcggttgccctggcccaggcctcccggccctcaggttgtgtgactgtgacgggcagcctggggccaaaggcggttgaaggggaagg

SEQ ID NO: 123715 - DNA, 122 bp, Homo sapiens
ctcaatcacacaggcgttaactttagtcggcttcacgcgcagttgtagtttccgagtctgcgtcgcagctgcaggctccggggctgcccgccctaggggctcccgggcctccctgaagcagc

SEQ ID NO: 123716 - DNA, 122 bp, Homo sapiens
cgacttcttccccaccgtgtttgtgaaggagaagcactacctcactgccttctacatcgtcgagtgcatcgccatgagcaacagcatgatcaacactctgtgcttcgtgaccgtcaagaacg

SEQ ID NO: 123717 - DNA, 122 bp, Homo sapiens
tgtccccacagagcagcttctgcaacacgcatgtcgtcaggcgccgcaacctcgggaccccggtgaccaggaaaaaggagacttggacataaacagaaccagcattttccagaggaactcca

SEQ ID NO: 123718 - DNA, 122 bp, Homo sapiens
ggttctctctgctttcttcaccagttccttttattccattccactcctttcattgctttgcgctaaatgaaatttggattgcaacaacaactttttaaaaatgacattgtaatattggctaa

SEQ ID NO: 123719 - DNA, 122 bp, Homo sapiens
tggcagacatcttcagtctcagctactgccactggacgatgcaagatcctcatccagaaacgtccagtttgttaagtcaccaagaagctgctttacaaacttcacagtcactcgtcaccctc

SEQ ID NO: 123720 - DNA, 122 bp, Homo sapiens
tggtggcagtgggctcaccatgggagtcaggctgcctataggaactgcccctcctgctcccgcagcactccctccagggccctccccaccgtgggtcaggcagctgtcagatgatagggcct

SEQ ID NO: 123721 - DNA, 122 bp, Homo sapiens
tcgctggcgagtagcggagccagcacccagactggatctgcttcccccctcacgtgcacccggctcccaggctagggtctggctctcaccgaggtttaaggaagagggctttggagtcagac

SEQ ID NO: 123722 - DNA, 122 bp, Homo sapiens
ctcatttgcctgctgcctcctgccgcttgtgcggacaagggacggggcctggggtgatgccgggagagggcagggcctctcctcaccaccccctctgcatgccaggtgcctgcaggccctgc

SEQ ID NO: 123723 - DNA, 122 bp, Homo sapiens
ccagctgacccgctggcacccgcgcttcaacgtggatgaagtacccgacatcgagccggccgcgctgccccagccacccgccacggagaagctcaccactgctcaggaggtgctggcccggg

SEQ ID NO: 123724 - DNA, 122 bp, Homo sapiens
catgggtaggtggctgggtcatgcctttggggggctctgagcaatactaacaagaacctgcgtgcctgggcttggctgtcggggatggtgctgacatggggctggttcctggggttggggtg

SEQ ID NO: 123725 - DNA, 122 bp, Homo sapiens
ggctggctctctgcacctctgtccaatttggcccgggtcgggcggcagcctcccaagccgcgtctgcagaggcctcagcaggctggaagtgcggccctgcataaacacgcactgtttttctt

SEQ ID NO: 123726 - DNA, 122 bp, Homo sapiens
actcccgacgccgttcccctcggctctgcctccctccccagtctcttctcctccgcgcgccgggaaagtttggcccctgcccgccggcctggaaccccgcactcaccgcacagggagcggag

SEQ ID NO: 123727 - DNA, 122 bp, Homo sapiens
ctggaacgctgttaatcgtgccggtcaggatctcagcggaaaacgcatggcacctgccaccgtgcatcagaggcactgttcacaacggcgtggacagagtgcaaggaacaaagcaggatgat

SEQ ID NO: 123728 - DNA, 122 bp, Homo sapiens
ttcaatacagctcaccatttagggaagtgtgtcccgccggtcagcttctcttgagagatccgagactgccagggcccggaaaacttggcgagctgtggtgccagcactcttgtttccttcat

SEQ ID NO: 123729 - DNA, 122 bp, Homo sapiens
gaagggagtgatgatgaccccaggtaactcttgagtgtgtcgctgatgccatcaccgcagcgctctgaccgccccctcggtccagcatttctcaggctcaacgagttcatggccaagattcc

SEQ ID NO: 123730 - DNA, 122 bp, Homo sapiens
ggcctccatgtgctgagagtgcccttgattccccattttccacgaccttcttctgtgcatcgccgagcaccctggatacctcccgcattggaaagggtggtcctggggtccggagcgcccca

SEQ ID NO: 123731 - DNA, 122 bp, Homo sapiens
ggagttgtagtttccgcaaatgtgaagcttggacaacaccagctccctgaatcctcagcccgacagcactgccctgagccagcctcgcgtccagccagctcgtgtttatcctcttactttta

SEQ ID NO: 123732 - DNA, 122 bp, Homo sapiens
cactgtggggagaggaggagaggtggagggggtgggtgccccaggggaagttggtgtggccgggaggagcgtggtaatcagcccggtgcatctgcctactcagcagcagcagtggctgcagt

SEQ ID NO: 123733 - DNA, 122 bp, Homo sapiens
actttgtgcagtgcacaaaccacaccactgtatgcagcagatcttttcaaatgcctgatccgttggccttgaaaactcagtggtgggatctcccagcagccacgcagttatgtttcctcaga

SEQ ID NO: 123734 - DNA, 122 bp, Homo sapiens
acgagtgcgacatcgcggagacctgcaccggggactctagccaggtccgcccggccccgccgtcttgtggagccctgggcgaggcaacccctacccttgtcgatttggttttcccggacgag

SEQ ID NO: 123735 - DNA, 122 bp, Homo sapiens
ggccagcctgagggatgggatccaaagagcgctcccaggtaggaaatggccctggttgaacgcctcgccagagcagtgatccccgcggaggattaacacagtggctgaacaccaggaaggaa

SEQ ID NO: 123736 - DNA, 122 bp, Homo sapiens
ctctgggacaaaatcacaggcggaggggctccgaaacaggccctagccgctctgggggtgcgggtctcctgccctaggactctcaggctagaaagtcctcaggactcaggactgcgcaaggg

SEQ ID NO: 123737 - DNA, 122 bp, Homo sapiens
gaactgctgggctcaagtgatcctcccgcctcagcctctcaaaagtgctgggattacaggcgtgagccaccgcacctggcctgcatccccatttctgacccttgaccatgttcaagtgggaa

SEQ ID NO: 123738 - DNA, 122 bp, Homo sapiens
tcggtgttcagccatttatcatcaatacgtcgttaggcaggagcaggggcaggtggctgacgggtgtgccggcggctggcggggtcttgggaggcgccctgcacacgcctcttctttctgaa

SEQ ID NO: 123739 - DNA, 122 bp, Homo sapiens
gggaccttggaaggcagtaagccctgggaaaactttgtctcttgtctttggcatcacctccgcgaagcctggtgggacgcggctgcccctgcgctgtctgtgcacctcctaagaaccaggaa

SEQ ID NO: 123740 - DNA, 122 bp, Homo sapiens
agaattccgctcgccggatcccaccgcactgaagggactgcgcgtgcgcgagtcaggtgacgacccgcccctacaggccccagaacccccgagattccccgcgcttgcctcccgccctcttc

SEQ ID NO: 123741 - DNA, 122 bp, Homo sapiens
caaatgagggaaagacttctccctgctacccacacagcaacgtgaaatgccatcacatcacgtcttgggactggctcagttctcaggcatgaagagctgcactccggcagaaagggtcgcac

SEQ ID NO: 123742 - DNA, 122 bp, Homo sapiens
ctaccctcctgccccagctcaaacgcatcttctcctggaagcctacagagggttctgccccgttcctgcctcatcttccccactgaacttggaactcctagagggcagggttgggtcctact

SEQ ID NO: 123743 - DNA, 122 bp, Homo sapiens
agccctgtccggactccactgcgcctctgaggggctcaaatacgaattcaaggtaagctgcgcggctttgcgaccggctctgcacttgccctctcacacatgcccgggctatgtcatctgct

SEQ ID NO: 123744 - DNA, 122 bp, Homo sapiens
tgggaaatagcaaagaaaagaaatggggctgtaatattagtccctgttcttgggatattacgtagttttgcccctggacaggcaaagattgatcaaggggctaacagaggtaggggcttggg

SEQ ID NO: 123745 - DNA, 122 bp, Homo sapiens
taacttttccacaactcttccagataagtattgacaccaccattttccagatgaggaaatcgaggctgacaggtgacatggcttgctcagggccagtctatggccagagctgtcatttttcc

SEQ ID NO: 123746 - DNA, 122 bp, Homo sapiens
tacggaaacaactgtgggaaagggttacccacatcccccccgcccccatccccaccccgccgcttaactaagagggctttgcctgaagggcctggactgccttatacgtctgtttagaaaat

SEQ ID NO: 123747 - DNA, 122 bp, Homo sapiens
tgaactcctgacctcaggtgatctgccagcctcagcttcccaaactgctgggattacgggcgtgagccaccaaacccagcctagtcattcttttaagataggtctgctggcagcaaagtctt

SEQ ID NO: 123748 - DNA, 122 bp, Homo sapiens
ctggcgagggacccaagggtcacctggcttacatgcatgtcttccccaggcactgaccagcgcacgacagtgatctgagcgggcactatttgtcacttgtttctgcgcacacagtcactcct

SEQ ID NO: 123749 - DNA, 122 bp, Homo sapiens
gctaagaaactcagttccgagctgtgacctctacaacggaagaataataggttggttacccgaggcggaatctggaactgaaattctcactcatttgacttcccgctgtttatcaccgcaga

SEQ ID NO: 123750 - DNA, 122 bp, Homo sapiens
tgccaagtccaagagcctgggcgacctcactgctgatgactttgcccctagctttgagggcggctcccgcagactgagccacagcctgggcctcccgggagggacacggcgggtgtcggggc

SEQ ID NO: 123751 - DNA, 122 bp, Homo sapiens
gaacttctaaaggggccatgccgggcgagtgctgggcttggcagagaggaagaaggacgtcggtttttaccttacgcccgtctatgagaatgcaccactttgatcattcaagaaaattagct

SEQ ID NO: 123752 - DNA, 122 bp, Homo sapiens
tccctgatttttgtaaagtccggttcggtctgcacggttatcccgaacgcagctggctcccgccacagagtatttataataataggatttggaaatagaggctgcctgcacatcaaaacgtt

SEQ ID NO: 123753 - DNA, 122 bp, Homo sapiens
cactgaggcagagccgaagatttgacccttcttcccccaactcctagatccaaatgacttcgggtcccgcttcttcacccacgaggctccccaaggccctccaccccacgcctcggcctcag

SEQ ID NO: 123754 - DNA, 122 bp, Homo sapiens
gggatacatgagcctagatagtgagcttttcttctttcttcctcgacggttctatagtctcgtcctctcccttactcccacccccccagccccgccccacccccgaccagcctccctgcctc

SEQ ID NO: 123755 - DNA, 122 bp, Homo sapiens
tcaacacatacttagcctttttagatccataaagtccagaaggcagtagggatcccaagacgacctcacccaaagggctccctggctctcctctgatggaggggcactgcttgcttggcccg

SEQ ID NO: 123756 - DNA, 122 bp, Homo sapiens
caaatccaaacccaacatggcactagatttgacccagttttcacctagaacataattatacggtcattagcatgctaaatcacacacccatgggcaccatgacagttctgaatatgcccagg

SEQ ID NO: 123757 - DNA, 122 bp, Homo sapiens
ctgcgggcggtgcagcctggagcacctgcgtggaacggggcgggttggcagaggaggtcgcggtcagcgccagggccacgacaggaacagtggctctcacagcagccaggacacggacacag

SEQ ID NO: 123758 - DNA, 122 bp, Homo sapiens
ccgctccagcccgtttcacgtggtcttgagctgcgctggggttggagtggccgcaacgggcggggcggggcggggccgggcaagtttgttccccgagttcggagcctaggagccccccgcgg

SEQ ID NO: 123759 - DNA, 122 bp, Homo sapiens
atggcttttaaaggaagtgtcctgtgtgtcgaatctttcagctgaaagtggacaaagtagcgggcagttccaagggcggccctcggaagtctggtcgcagtggcaaagccagcaccatggcc

SEQ ID NO: 123760 - DNA, 122 bp, Homo sapiens
gaggagggacggcgctgaggggccgcagggcctggcaggcctggttcctggctttctctccgcgtttcctgagcaggaccggccgggggatgggacccagcgcaaacctcctaccccgggag

SEQ ID NO: 123761 - DNA, 122 bp, Homo sapiens
tgggattacaggtgtgagccaccacgcccagcatgaagtcactcttaagaagttagggcacggataatccttttgatagataaggaacccctgtcccagagaggccaagcaacatgattaca

SEQ ID NO: 123762 - DNA, 122 bp, Homo sapiens
gggcctagcagaggacgtagggagcgcgggcagcgaagtcctttttgaggtaacaggtgtcggtgctaggcgaggcgggttggggcggaaggggcgaaggaccgcgcggcgcggggagagtc

SEQ ID NO: 123763 - DNA, 122 bp, Homo sapiens
ttgtactaaacaaaatgcaacacggcaagcctcgcagcagtactttatatagtaataaatcggacctgattgggaactctccacaccagctgcatccggtcggccgattcacagaccttgcg

SEQ ID NO: 123764 - DNA, 122 bp, Homo sapiens
ggggctcacattcttgtgcagaaaacagaaatgaacaaataaacacacaagatcatttcccgtggtagtgagagctgggatgaaaataaaacagcgtggcagggaggaggcaagtgttgtga

SEQ ID NO: 123765 - DNA, 122 bp, Homo sapiens
tctagggatttatttactgactttcagaaaagtaccgtaaagactgaagagttaatcactcgactcttaggatgtaaatgccatagaaacacccggcttcaggtcttcataaacatatctgt

SEQ ID NO: 123766 - DNA, 122 bp, Homo sapiens
tcgtcccagaaagtcagcatcaagtatctaataagcttcgaaatctcaaaatgtaacccacgcgggcaccccgggagaggcggcgggtaccacccaaagcaccccctcagaacacccggaat

SEQ ID NO: 123767 - DNA, 122 bp, Homo sapiens
ccatccagtcactaccagcctcacttccagcagatgatgatgttggggtcattttcaagccgctcatccagctcatggtagctcatgcctgggtggggtggtggaggagaggtcagtggcct

SEQ ID NO: 123768 - DNA, 122 bp, Homo sapiens
taacttctcaaagtttaataggcaagaccagcaaccatgcaacaaggtaaattgtcctcacgagaactccaaagactatttttctctctctttttttgaggcagggtctcgctatgttaccc

SEQ ID NO: 123769 - DNA, 122 bp, Homo sapiens
atccacacagtgcctgttatttggccagaaaaaggaaagcagcaccgatgcgtgctgcaccgtgggtgaactttggaaacatacctagacacagaaggtcacctgttgtgcaattccatgta

SEQ ID NO: 123770 - DNA, 122 bp, Homo sapiens
caagtgcctcagccatggcccctgcgtgaccctagacctcttctgctcggtgcagagctacggggactgggacagaacagctacaccttaccagcaactgaggcactgacttcacttcccac

SEQ ID NO: 123771 - DNA, 122 bp, Homo sapiens
ctgagggcggctgttctcacgcatgctcagtggcgctccctgagtgctgagagccacggtcggtgagagaggagcttcctgatgagcctcagacggtgctgaaaccagccgactctgcccag

SEQ ID NO: 123772 - DNA, 122 bp, Homo sapiens
acgcaaagcatagttagagatacacagtgaaattcagagcgatgtacacacagaactatacgcaatcacccagggctacccagaaacatacaagtacaggcacaaacattccgagtaggcac

SEQ ID NO: 123773 - DNA, 122 bp, Homo sapiens
gagagaggcagtggcaaaaatctggattcgagacgaggtcacttccctgccttcagggctcggtgcaggccccgctttgtacaccctccacccaggccccatgaccgctgggccgggcccta

SEQ ID NO: 123774 - DNA, 122 bp, Homo sapiens
acatcaggtgatctgcccatctcggcctcccaaagtgctgagattacaggcgtgagccaccgtgcctggccagttgtgttacttttagaaacccattgatatacaaataaataaacaaaaaa

SEQ ID NO: 123775 - DNA, 122 bp, Homo sapiens
ctgattagaatcccagctctgctccttttgagttgtgagaatctgggtaaattccatgaccgctcttagcctcaatttccttatctgtaaaatggggataagaacagtacttccctcagaag

SEQ ID NO: 123776 - DNA, 122 bp, Homo sapiens
catgcacccgcgtccccaagacacacaggcaaccgcgtctccgtgacacatgtgcacccgcgtccccaagacacatccccaagacacacaggcaaccatgtccccgtgacacgcgtccaaca

SEQ ID NO: 123777 - DNA, 122 bp, Homo sapiens
tcctcccatcctcttttctctccatccccacctcccactccttcccacgccccatctccccgacccccagcaccccgcgccgcccccaaccctgggccgggcaggtgcaattcctcaggcgg

SEQ ID NO: 123778 - DNA, 122 bp, Homo sapiens
tttggcatccactctcccatgtgcgctgtgtggggtctctcctggggggccctgccctgtcgtccctgctggctgcaagttcttggaccctcactgatgcctggtactggacagtgtgctgc

SEQ ID NO: 123779 - DNA, 122 bp, Homo sapiens
ggcactagcaggtggctgcggcagggccgcagatcaaagtggtaactggggatctgagttcggcagtgacgcgcgtccctcacgtgaccaggagcctctatgtgcccaagtccctctcgtcc

SEQ ID NO: 123780 - DNA, 122 bp, Homo sapiens
tggtgccataggcctctctgcacacccctccgcacaccgcacaccgcacacccggccccgcgttacccgacggcccctcctgttgtgcaggttgcacgctgtgcagtcgcgggtggccgttt

SEQ ID NO: 123781 - DNA, 122 bp, Homo sapiens
gggcggcaacgcccccggggcggggctgcgctctcggtcctgcggctcccgcgccaggcacggcagccgcagcccggccttcccagttcagcccgctccgcgccccagcctgcaagcagaag

SEQ ID NO: 123782 - DNA, 122 bp, Homo sapiens
tcgggcgagccgcctggctagcttcggccctgctccgctgtctgtgaggggcagatgcagcggggcagggcctgtcacccccatttcatggagttggcagagcctcagagagggctcggggt

SEQ ID NO: 123783 - DNA, 122 bp, Homo sapiens
aacaaacaccgagttgatacggatagtccccgttcccctgagggccgaccccgtgactcccgatgagcgtccagttgcgccgggcatcctggcctcccagcgtctttcccggaggttcatcg

SEQ ID NO: 123784 - DNA, 122 bp, Homo sapiens
gggaccccagctgctctaagcccaggatctctttccccaaggacccagccctcgcctctgcgagaatgaacatatttgatagatttttcttaacaagttagaaaattcagctcctttctgtc

SEQ ID NO: 123785 - DNA, 122 bp, Homo sapiens
cctccaccagccagggcccaggcacagcccctgaggcagggtgtacatccctggaggctgcggttggggaggtggtgggatgagctgccctgtaccatggctgcgtgtgggaaacagcagga

SEQ ID NO: 123786 - DNA, 122 bp, Homo sapiens
aaccggcattaaaccccaaccaaaatcccctttaacccttccctagaacagcaggacctgcgaaactctgaggccgctttgtgaggtcctcctctgcgcagcacgccccccacccctctctt

SEQ ID NO: 123787 - DNA, 122 bp, Homo sapiens
gccaccgatgatccagtggagaagctgtgttggaggtcaagggatggaggcgaaactgcgcgttctcgtccctgcagaaaccggaatatccgagacacatgacgaacatgaaactttctcct

SEQ ID NO: 123788 - DNA, 122 bp, Homo sapiens
cagggcataactctttgtgcagcagcagtagcactcccctgccccatgtgtatgcaccggcgcaggaatccatttcctctggattcttctctgtccttcccagaaccttcatctttagagag

SEQ ID NO: 123789 - DNA, 122 bp, Homo sapiens
tgtggcccttcctggtctgtggcctatttttcatgggtgccaacccggcatcagttcccacgctgggtgtgggtacaggaggccccacccagaggcagaaggccgggaaagccatgcgtctg

SEQ ID NO: 123790 - DNA, 122 bp, Homo sapiens
aggaggagaccggagaacgtggagcccgcgggaggaggccggagcgcgggcagggactggcgcgggatcgattcccgggtggcggtggagggccggcccgggaggagcggcggaggggccgg

SEQ ID NO: 123791 - DNA, 122 bp, Homo sapiens
agccagaggaaactgtaacagtgattctcttactggccatgctctccccaccttactcaccgtgactccctcaggctgcactgagcttctcaaactctttgcctgccccaccactactttcc

SEQ ID NO: 123792 - DNA, 122 bp, Homo sapiens
gtatcctgaaattgaacgggctcattcttgaaatgtcagtgtggccggcagcctctgagacggcccagggcctccgtcctcctggaattctctttcctgagcgccactggacctggtgactc

SEQ ID NO: 123793 - DNA, 122 bp, Homo sapiens
gtagaataacccctctgcctgaacagaagtgcctgcacaccagttatccctcagcccaggcgcctgcacatccacatcagcctcaccctaggctcccaggcacccctctgaactccctccct

SEQ ID NO: 123794 - DNA, 122 bp, Homo sapiens
catgatgggtggcagcagctgtatctgtagcctccatagccacagccatagcccagtctgcggaagctgccacatccacagctatagccatagcccaggccaccgaatcctccacagccgta

SEQ ID NO: 123795 - DNA, 122 bp, Homo sapiens
cctatgaggggagctgcacggtgtctgtccttttccatccctaggaacgtgactaccctacgtacttcctatgaggggagccgcacggcgtctgtccttttccatccctaggaacgtgacta

SEQ ID NO: 123796 - DNA, 122 bp, Homo sapiens
tgtgactctaagaacacacttgcccctggctgcgtctgaaaatggaggctctggggtgcacgcggcgttactatctaataagccgtgagctgcgcagcaacatcagttgactcactttgcag

SEQ ID NO: 123797 - DNA, 122 bp, Homo sapiens
tgttctgcttagcctaagacacgcaactttttccagcttttactcttcgctgaattctcacggtggggttggggggatgttcaggctcaggagcgaggttgggggcccggcccgctgggcgc

SEQ ID NO: 123798 - DNA, 122 bp, Homo sapiens
attaacaaagagtggttattaaaggagaactgagttgggagtcagacctggaggcccacacgcttggttaagacattataccaccttgaatctggcatgctgactgagggtgagccactcca

SEQ ID NO: 123799 - DNA, 122 bp, Homo sapiens
gtacgttttgacaaaagactgctcctcccctgcctcgcccttccaggtgctggtgaagaacgacgcccgccggacacgctccttctcgtggaccaagtcggtggagctggtgctgggcgaga

SEQ ID NO: 123800 - DNA, 122 bp, Homo sapiens
tcccccgcctttccagctgccagccccctccctgctggcagacaagcccaggcagacagccggccaagcctgcccccgcagccgcgccagctctgccaagcccggcagagctgggggcccag

SEQ ID NO: 123801 - DNA, 122 bp, Homo sapiens
caaacaaccgggcttgctgtagccaagcttaccaagtggacacttaccttgcctcttccccgattatttcatatccttctgtaactctcaccctgagacccagcctggccttcccctagctg

SEQ ID NO: 123802 - DNA, 122 bp, Homo sapiens
ccccaacccccttcctaattgaaaccaaatgtgcaatatattggatgctgggatccctggcgctttcccaggaatcctcagaatgtgaggtttctctcaaaggcatcttgcatcagcctgtg

SEQ ID NO: 123803 - DNA, 122 bp, Homo sapiens
cgcaaaagcagtcccccactaccacaagttatgcagccgagttttctcattcggggaaatcgcgggagcaaacacatagtaaaaaccctcccccaagaaaaacactttatcaggaccaacag

SEQ ID NO: 123804 - DNA, 122 bp, Homo sapiens
gcgcgagccttctgttacgcccagacagggccaccagagggctccttggtctaggggtaacgccagcgtgtgggaagacgcccgttgccaagtggaccgtggtctagcggtagcgttagtgt

SEQ ID NO: 123805 - DNA, 122 bp, Homo sapiens
cttactctggagctggtccaactcagtttcatggcacagaactagattaggtctccactgcgcagtctgttttactgcttagggaaagccagcttttctacccacacacgtttagtttgaag

SEQ ID NO: 123806 - DNA, 122 bp, Homo sapiens
gctctgcccagcttccctctgtctgtcctccggcaggaaggcctccagagataaccaaggcgtggacacgccaggcacccaggtctcagccaggcacacggttcccgtgtctcacagccgtg

SEQ ID NO: 123807 - DNA, 122 bp, Homo sapiens
ggccaggatgcaggtccggagccaagagcaggggcattgcaccttcctggctctgggtgacgctggcaggggaggggacagcacctgggaagatggcagcagctaggaggggcccaacctga

SEQ ID NO: 123808 - DNA, 122 bp, Homo sapiens
gctctcatcagggcagcccgagtcctgccattgggagttgcccaatccgaaagttttgcacgcaggccctcaaagaagctgaagacaccagtgaccgccccactcctggccctctccccagg

SEQ ID NO: 123809 - DNA, 122 bp, Homo sapiens
gagccgggccattcgaatcacctctccttccaaagctaaatggctactgaatgctgccctcggagccttgccccacgcggagagggcagccggagaggggcgcggtgcgggaggcgggggta

SEQ ID NO: 123810 - DNA, 122 bp, Homo sapiens
ccacgtctgttttcctttcagccaaacgcgagcaagggtccttggcacccaggcctgtgccggcttcacgtggtgggaagaccctctgcaaggggtataggcaggcccctccaggcccacca

SEQ ID NO: 123811 - DNA, 122 bp, Homo sapiens
caatggaccgacttgctcgcgaccacagacccggttagtggaagagcggatataaaatcccgagcatgctgggcctggccggcctccgtctgcgcttccgtgctcctctcctcattgcgtcg

SEQ ID NO: 123812 - DNA, 122 bp, Homo sapiens
tgttttcattctagctactacagacaatgccaccttccaaggagattgtatcaattaacacgttcatcagggatgtatgggagtgcatttcctcacatcctcagccacaaggtatattatcc

SEQ ID NO: 123813 - DNA, 122 bp, Homo sapiens
ttgtaaacctatatcttcatacagggaatatgcttaatcttgctacagtatacatgaatgcgggaatgtatcttcctctgggctgcctttcgttaccacttggctgggtggaacacctgttc

SEQ ID NO: 123814 - DNA, 122 bp, Homo sapiens
gtgccgcatccctcctctttgtaaatgctggggctgccaccattatggttttatcatcagcgacattccagggggtgaagactggtcccaacctctcttctcctctcctcttctgatgagag

SEQ ID NO: 123815 - DNA, 122 bp, Homo sapiens
ctcaggggacatggtgggcagggggctccagatcccacggtgggcagaaaaggcgggggtcggactgacgccgtcctggaccatgtccacgtctggggtctgcaggttccatctccctttcc

SEQ ID NO: 123816 - DNA, 122 bp, Homo sapiens
ggtcataatgcccttctcccctgggagttccttgaccttctgcccttttgggtggtggcccgtttgttagccctgcaaggtctcatgctgtgagggactttccttcacgtgcaaccaaagtg

SEQ ID NO: 123817 - DNA, 122 bp, Homo sapiens
gacagcctgactttccattctcacacagtaattagataccagctgtcagtgcaggggggacggctccgcggctgcagcccggctgggagtgggggggggggggcgcaccaacggggcggggg

SEQ ID NO: 123818 - DNA, 122 bp, Homo sapiens
tcaggctttggccctgcaagcaaacccacatatctgctctgtatgtaataaatgtcttaacgtcgtagctgcctgttcctgggcccaaatcgaaacgaaaacgaggactttattataaaaaa

SEQ ID NO: 123819 - DNA, 122 bp, Homo sapiens
ttgaaactttgaattaaaataaaacacatttactccacatattttttaacaaaaagaaaacgtcacatcaggaaactctgattttgtggtagctgacatagtgttttcttgtacgtgaatag

SEQ ID NO: 123820 - DNA, 122 bp, Homo sapiens
gtaattcaaaacaaaacaggtgagctctgtcccaggacccgtggaaactcctgccccctccggacgtcgggacacccacacacaagcggtggtcgccttttccgctgccagtcacagggcat

SEQ ID NO: 123821 - DNA, 122 bp, Homo sapiens
agttgcccgtgggacccattctgtgcccagggctcctcacagaccagacagaagcggccgcggcagcctttcgggtggattttgttgttgcagtgccacctggccaaggctgtgcacgggtg

SEQ ID NO: 123822 - DNA, 122 bp, Homo sapiens
atgcacggtctgcatttcggcccctgcgggacaatggaggcctctctctccctttgtgcccgggcccgggcctctgcagacagacctccatacccagaggtgagaaatcagatataaccaga

SEQ ID NO: 123823 - DNA, 122 bp, Homo sapiens
aagtgaggcgaggctgctgcatccaggtccggaggcctggcccatgaggccctgtggctacggagcttggccatcctggggcagggcctacagggtaaggtgcagactcgcagcacacatcc

SEQ ID NO: 123824 - DNA, 122 bp, Homo sapiens
tgggcatgccgtggtgtcggcccctggcgccagcctgcactgccacgctcacacaggcgccggcgccaccttcgcaggctggcagcatcgcggctttgaggacaccctctttgtgcgctgag

SEQ ID NO: 123825 - DNA, 122 bp, Homo sapiens
tttcttggccggggagtcatgctgagggagcagtggctgcggctgcagctccggcaggagcgggaggcgctggggcgccgcgtcgctgccgcccactggaccccggctgcagacgtgcggcg

SEQ ID NO: 123826 - DNA, 122 bp, Homo sapiens
cggcgacccgcgggtgggcgggctcatgggcgccctctggtgcttcgctccctggctttgcgctcggagctttgacttgagaatccatatccttcgttcagcacaaagtttctgagcgccta

SEQ ID NO: 123827 - DNA, 122 bp, Homo sapiens
tcagccggcctgggtgcagaggtcccgtctgtcacagaagtgctgctgaaccgtagcagacgaaaatctcacaaactccctccgggccccggcccagggcttcccgttggaaggtgcacagg

SEQ ID NO: 123828 - DNA, 122 bp, Homo sapiens
ggctaggactgtcctcaccactttgtacattgccaaagtaaatataacgtagaggtcaagcgcaggcgctttgtgggcagacatgactgagctccactcgcgactcctctaatggcgtgcca

SEQ ID NO: 123829 - DNA, 122 bp, Homo sapiens
ccaccgctgtcgccgctgctgcaattcaaggcgcacactatcccactttcccgctggaggcgcagaggatgccccttgagccagacctggagaaatagccccagggcccggcaggaggagcc

SEQ ID NO: 123830 - DNA, 122 bp, Homo sapiens
ctcgcactggcacacgtgctcatgcgttccctgaaggctctcacaaaacaggcctgcacacgggctggcacacacgaggcagcccacacagccccacacctggtgagccatgcgtacttttg

SEQ ID NO: 123831 - DNA, 122 bp, Homo sapiens
agagggcgggggccttggcgaatggctttcttgctggccacttgcggagtgagtagaccccgagggtctgggagaggggccggcccctacccctgagtccccggggtcccggccgccaggcc

SEQ ID NO: 123832 - DNA, 122 bp, Homo sapiens
ttagttggggtttgaagcgcctccaaacgcttgctttttctgtggaaatgtgcgggctgccgagggttttctgcaggactttccgctctgcagcgatcttcctgaagttgcaggaaatccct

SEQ ID NO: 123833 - DNA, 122 bp, Homo sapiens
acctcctcacagttttcatccagccacgggccagcatgtctgggggcaaatacgtagactcggaggtaggcatccgtgggggggcgccggctcgggcgtgcggggagtgtccgcttctgcta

SEQ ID NO: 123834 - DNA, 122 bp, Homo sapiens
gcccacagcccgctgcccgcctcggacctcggagaggaggagagggccgggaggagcgagcggggctgacctccaaggggccgccccaagtctcaggaccgccgactctgcccttcctctcc

SEQ ID NO: 123835 - DNA, 122 bp, Homo sapiens
ggctcttttgtggctaatctagcgagggacctagggctgggggtggaggagctgtcttcacgtgaagcccgggtagtgtctgatgataataaaaagtatttgcaccttgatttgctgactgg

SEQ ID NO: 123836 - DNA, 122 bp, Homo sapiens
ctggggaaagacgaggcagagagcaaaggggggagggggaggccaagccgacaagcagcccgagctacagctagaagatgaaaaaagattttaaagcctctgatccagcaagaagagtttaa

SEQ ID NO: 123837 - DNA, 122 bp, Homo sapiens
ggcaagagaagggagatgacccactattttgatttcaggcagcagacaccggcagcctttcggttagagttgcggatagggcagtggccttgggggcggggctataaacctgggcgggcatt

SEQ ID NO: 123838 - DNA, 122 bp, Homo sapiens
acgcgccagtaatccgagctcttgattatccagattcggatcaaacggggcggcggcggccggccccctcctgggaatgattagatgattaatgtaatgctgtttgaagggtctctgttttc

SEQ ID NO: 123839 - DNA, 122 bp, Homo sapiens
aagccaggactggacttcggaccaccagttccaaacccacaccccttcccttgcaccacacgcttttgtgtggatgagcctccccaaccctgtcaacaacaaactgtcactttgtcactttt

SEQ ID NO: 123840 - DNA, 122 bp, Homo sapiens
ctccctcactccccatgttcatcttttactgagtcctgtgcattctaccgcctacacatccggcggtcgtgcccggatctctatccccacttaccaccactgccccccacccacccgtagat

SEQ ID NO: 123841 - DNA, 122 bp, Homo sapiens
caagggatacaatagacacaatgtagccacctcctccgggcttggggctatgagcctgtgcggtaggggcttggagaggcctgggagctgtagtccggagcttcagggccagccaggaagcc

SEQ ID NO: 123842 - DNA, 122 bp, Homo sapiens
tggagccctggaacagcacccaactcagttttctctgctagttctttatttttccatttgcgtgttgcagctcattaaaaaaatattggaatagcatatatttacattgtgacttcactcta

SEQ ID NO: 123843 - DNA, 122 bp, Homo sapiens
gaacgcgagacaccgccgccgcagcttccactggcgcctctggaactcgctgggcgtgcgcgctgcgctctggcgggagggcgcttctctcggctttttatagcttcatggcggaccacgtt

SEQ ID NO: 123844 - DNA, 122 bp, Homo sapiens
tgtccattcgcgggaggcggggctgaagggggccggtccaggccagcgaccaatcggaagcggtggcaacgtgggcggctgcgtgacagacaggcggcaggacgctgtcgccgcagcttctt

SEQ ID NO: 123845 - DNA, 122 bp, Homo sapiens
ccaactgtcattctgccattgccctggaagcaggcggtctggtcctggtgacactggactcgtcgggacctgccgatagcgcagtcatcctggtggaccccgatacaggcgtagcactcggc

SEQ ID NO: 123846 - DNA, 122 bp, Homo sapiens
ttaacgggaaaggtgagtgtctagggagctgctcaggctccgtggtgatcccagagggctcgggtccttctctagagatcaggccttgagctgggcagagtccggggcttctcacggcatct

SEQ ID NO: 123847 - DNA, 122 bp, Homo sapiens
gaggacttaccttggggtagtggggggcaggtggggggcagtgcgtggccgccaaaccgacgttccccagacactcagagatgctaacagaaacaatttaaagaactctcaaagtcctttta

SEQ ID NO: 123848 - DNA, 122 bp, Homo sapiens
gattctccaagaggcaggctcctgttccaatgcctgggaaagggctgcctctccctgctccgctctccctcctgggaaccccgtcctcatgacgcccctttcgccctagtttccccagtcct

SEQ ID NO: 123849 - DNA, 122 bp, Homo sapiens
ggccaggggcttttttagtagtcctgagtgacatttaagaattctgctaaaggccaggcgcgttggctcatgcctgtaatcccagcacactgggaggccaagaggggcagatcacgagatca

SEQ ID NO: 123850 - DNA, 122 bp, Homo sapiens
tcatcttggacctctccattgggcttaagggcaatccctcatgcctggctgagacaagaacgggaagtgtcaatgcttcttagatgcgccctgctatgttgatcagtcacccaaatctctta

SEQ ID NO: 123851 - DNA, 122 bp, Homo sapiens
gccccaattgggcggccggtttccaattggaagggcttctgagcctcagtcttcgggcggcgctgaccattggcgggcaggatggaggcggagccttgggttgtcgcccgccgccgggggtt

SEQ ID NO: 123852 - DNA, 122 bp, Homo sapiens
ccaggccccgcaccgtggggccctgcagggagcggcgtccagctcaccgtgtgattgatccgccgctcctcctccaggaacagctggttctcactgttgtcatagtccaagctctgcaggcc

SEQ ID NO: 123853 - DNA, 122 bp, Homo sapiens
tgggaatttgaggcaagaggattgctagaggccaggattttgagaccagcttcggcaatacggtgagaccttgtctctaccaaaagaaaagaaaaaaaaaagccagctgtggtggcatgcac

SEQ ID NO: 123854 - DNA, 122 bp, Homo sapiens
atgaagtggtgagagtcagaagctgctcaggaggactgctgtatttcccggcagcctctgcgtgggcagcagcggggtaggcggccgagtctcccaggccacggacctgtatttcccggcag

SEQ ID NO: 123855 - DNA, 122 bp, Homo sapiens
cgtgttctgagccaggcatggggccccatctgctccctggcagcccccagccgcggcgtccgccttccctggagcccgtccccagccgctcacctcaggtgcagctccagctgcgtgtagag

SEQ ID NO: 123856 - DNA, 122 bp, Homo sapiens
acatctgaggtcgtgcgaatatgcgaccttttgtgtgaccatggtcgcgttttatattctcgtggctgtttgattctgaccttgcagttttgtcagagacaatgtgcatgtatttgttcttt

SEQ ID NO: 123857 - DNA, 122 bp, Homo sapiens
ggttgcagaagggcactgagcggttttgcctttacttatcttggggacccaagggtttcacggggcttggatcagtttcaaccttgatatttcgtcttggctttcctgggccacgtggggag

SEQ ID NO: 123858 - DNA, 122 bp, Homo sapiens
gggcccaggaatacagcctgggcctggcagtgtctgctgccaaagaggccagttctgctccgggatcgggaagagagggaaaagaaggaaagcgaggaaagagagctcagggttccttggaa

SEQ ID NO: 123859 - DNA, 122 bp, Homo sapiens
gtgtgcctggtgcccgggcgtccccggcaccctccggcccgcgagggatgcagcagccgccgccgccgccccagccaccgcccccgccccaagccggcctaccccagatcatccaaaagtaa

SEQ ID NO: 123860 - DNA, 122 bp, Homo sapiens
gccgagcggcttccctaggcttggtgggcccgcgtccgggacggcccgggccgtggttctcgacctgggctgtaatgtctccagagtttctgggcttttcctgggacttactcaggccggct

SEQ ID NO: 123861 - DNA, 122 bp, Homo sapiens
atgtatgacatccgcttcccagcccccttccttaatgctctgggttctggagacagaccacgtctgttgggagtcctctgtgcccacgcctggcacagagcctggcaaagagtaagcgctca

SEQ ID NO: 123862 - DNA, 122 bp, Homo sapiens
cctgtaggcgcctgcgcagagcgaccctccccgtcactcggagcgggaggcgggggcagccgggagaaaggaaagctgcgggggaaaagggccaaaccctgaaattacccggatgtggtccc

SEQ ID NO: 123863 - DNA, 122 bp, Homo sapiens
gcggggccacggcatcgatcactcggcgctcctccaggcactgcgtcgtgatcagacgagcggtgagcgatcgatactcctatgctagcctctggctcctcaggggacacagccgagtggtc

SEQ ID NO: 123864 - DNA, 122 bp, Homo sapiens
ggatggggccgagacccccgctgtccctgtacataaagagaccgatgggtgggagggggtcggctgctccccgagatccccctggcagagtcattcttccagccccaaccctgagttcctaa

SEQ ID NO: 123865 - DNA, 122 bp, Homo sapiens
aagttctctgctcaaaaacccaaaaacctatattgtacatgctgaagttgccacatgacccgattctctattactgctttaacttcatcttctagtactttcacttcctctgctcactttgt

SEQ ID NO: 123866 - DNA, 122 bp, Homo sapiens
gtccagctctgggttttcaaaccttgccccgctgaaccattactccctgtaggggagtctcgcttgcttctcttcagatgcaaaacgaaatggaccttcacacagctggggcatcctccaaa

SEQ ID NO: 123867 - DNA, 122 bp, Homo sapiens
tgtgagaactcaaatcagtaggaggtggagagcagtccagtttcccatcccactcccgcacgcttagccctcgcccccgactccaagctgggggcgacggtgcagattcccagctcatgaaa

SEQ ID NO: 123868 - DNA, 122 bp, Homo sapiens
gaccaccaccttccaaacctcagtgacggcatcaggctgggggtggtgctgggcctcctgcgtctgtgtctggagacgcagctgactccctgacaagcccagacatgcagctgttcctgcag

SEQ ID NO: 123869 - DNA, 122 bp, Homo sapiens
tcctacggggcggccagaggccgccgaaggcctctcgcgctgcagcagtctcctcaggagcgccgccatgtgggatggaatagcacacgtgggcttctccctgcgtcacttccggggactgc

SEQ ID NO: 123870 - DNA, 122 bp, Homo sapiens
tgacgaggacgggccagtgcacctccttcccgcccagccctccacaccatcccctttggacgcgaggctgctcctttgctgagggctacggtcggatctccccacaggaggagacagagagc

SEQ ID NO: 123871 - DNA, 122 bp, Homo sapiens
cccaggccctgtcaccccctcccgctccccatcaatccccctgcacaatggggccgccgccgatgactgatgtccgtgaaaacaacttgcggggaagtcgagctgacaaacgcccattaaag

SEQ ID NO: 123872 - DNA, 122 bp, Homo sapiens
tgtgatccactcgcctcggcctcccaaagtgctgggatcacaggcgtgagccacgacacccggcccactgatggagttataaaggtgaagaactagtctagtgaagaatgcagactgagagt

SEQ ID NO: 123873 - DNA, 122 bp, Homo sapiens
accggaactttgcgagccgagaaagttctgatttttttccgcagtgttctgatctttgcccgcagtgtaccggggattgagctgggggccgggctcgggtaggaatagggatgagaggggct

SEQ ID NO: 123874 - DNA, 122 bp, Homo sapiens
tactaaaaacacaaaagcacttatcagacaccctatggcatttgttgctgaaatgtctaccggctggagattagccttgagccgaagcagcctcagagccaacactggcttcctcctgtaaa

SEQ ID NO: 123875 - DNA, 122 bp, Homo sapiens
cacacgcgtagttagccctgctcacttcagccaataactgtaggttatcagaaaacatcccgcccctctctcccgattggagggaaaagcaaagggggtggagtgcggaggctactagtcaa

SEQ ID NO: 123876 - DNA, 122 bp, Homo sapiens
atacactcgccagccaggcaccacgtgccaggccctgtgctggccaggaggtgggcccttcgatcatcccattctcacagagacagcccgggtgctgcaggtgtgagtaacgcaccccgggg

SEQ ID NO: 123877 - DNA, 122 bp, Homo sapiens
gttccataagtgtccgctagggggctaccgaggatacaccagctgggtcgccttggtaaccgcggagctgcgaatgtgttgtccccacgcggtggcggggaggtaccaagatcgccccaggc

SEQ ID NO: 123878 - DNA, 122 bp, Homo sapiens
actaagaatagtagcatctcccctcgctcccactgctttctgtggctctcaaaatgctttcgcatgcattttctcactacagcctcagaacaatctttaggagtagtgttatcttccccatt

SEQ ID NO: 123879 - DNA, 122 bp, Homo sapiens
tccaacttttcctggccctgattccccttgggcatccctgagggggcagagcttcccttccggggactttagagggttcctcaggtcatctaactgggagacacaggaggcccgaagcgccc

SEQ ID NO: 123880 - DNA, 122 bp, Homo sapiens
ccgggtcacaggccagcttgcccatcttcttcttcagggtttgggcgtccacagacatgacgtcactgcaggtcttgctgctcttccggctgcagagaaaaaggaatcatcacctacttcat

SEQ ID NO: 123881 - DNA, 122 bp, Homo sapiens
gaggcactgccctcctcaggtctgcccaagcagcttgtagctagcactgggccccgtgcgcgcccctgccggccgctggccctgccctctctcctctgcaggcacggggcctgtgctctctg

SEQ ID NO: 123882 - DNA, 122 bp, Homo sapiens
ggtccgggggcggggcttggcctggggcggggcttggctggggtgctcagcccaattttccgtgtagggagcgggcggcggcgggggaggcagaggcggaggcggagtcaagagcgcaccgc

SEQ ID NO: 123883 - DNA, 122 bp, Homo sapiens
ctacagcatgaagtgctcattgagctctgtgccaggtgctgctctgagtgctggggaccccggtgcgagtgacaggttagcgtgggagcacccggcacaccaaggagtgggaaggactgggc

SEQ ID NO: 123884 - DNA, 122 bp, Homo sapiens
actgtggatgccaacacctgccccccatcaggagctgatctcagtgcactttggagaggacggcgcctcctacgaggcagaaatcagggagctggaggccctgcggcaggtgtgtggttccc

SEQ ID NO: 123885 - DNA, 122 bp, Homo sapiens
cctggcccactccacaggactctgcctggcgttcagatgttctgggaggctttttagccacgtcgaggttcatgcctgagagctggaggtgaaactgctccctgtggacggcctttctgagc

SEQ ID NO: 123886 - DNA, 122 bp, Homo sapiens
tgcccgcaggctccacccagctgcctctgtgccctggcctctttccctgtggtgtggctccggggctgtgcctgacccctgagcagctctgtgatgggatcccagactgtccccagggcgag

SEQ ID NO: 123887 - DNA, 122 bp, Homo sapiens
atccaggatcctgcgtatgctgttgatgtccgactccaccaacagcctcagggactgctccgtctggtacctgcacgtgtcggagtgggaggataagtcaggaaagaaaaccaccttcccct

SEQ ID NO: 123888 - DNA, 122 bp, Homo sapiens
gacagggagtatgcaggactgcttcaccacatgtccctgcaggacagtgggggccagagccgggccatcagccctgacagccccatcagtcaggtgggtctctatgggactctggtgggtgc

SEQ ID NO: 123889 - DNA, 122 bp, Homo sapiens
gtggaagctgaaggccgggtggttggaggccatggtgaacagcagcaggaactcatcgcccgtgcggccctcgttaagctgcagcccgtagttgtggatgatggagtcgatgtgcgtgagcg

SEQ ID NO: 123890 - DNA, 122 bp, Homo sapiens
agaatgaattagggacaaactcttcctcagagtctgagtccggggttggctgggccacaccgttgcctagcaaccgcctctggctctcattggccggaggggaggggggcggggagggggac

SEQ ID NO: 123891 - DNA, 122 bp, Homo sapiens
ctagtcgcccccggcaaccaggtgaccctgaggatgacgacggatgagggcacaggaggacgaggcttcctgctctggtacagcgggcgggccacctcgggcactggtgagaactccctcac

SEQ ID NO: 123892 - DNA, 122 bp, Homo sapiens
ggaggaggacacagtggccacttgatattttccaatacggggttcaggcgggtcggcccacgggctggcagaggctctccgtgtccttgccaagtgactcattccagatgggaacatttatt

SEQ ID NO: 123893 - DNA, 122 bp, Homo sapiens
tacccctggttcagaagcaattgagtctttagaagcacaagtccagcctatctggggtcccggcaggttttgaagatggagactcgggtataggaggagacacacccatgcaccagactctt

SEQ ID NO: 123894 - DNA, 122 bp, Homo sapiens
gagcgcgacgcagccaagcacaggctggtggtgcttgtcaaggacaatggcgagcctcctcgctcggccaccgccacgctgcacgtgctcctggtggacggcttctcccagccctacctgcc

SEQ ID NO: 123895 - DNA, 122 bp, Homo sapiens
taggtgctgaggatacagcggtgaaggagtcagacttagtccctgacctcacagaatctacgtatgatgtgggagagataatcaaataacctgtttaagtaaaaaaagatacggaataaatg

SEQ ID NO: 123896 - DNA, 122 bp, Homo sapiens
tgctactgttccctggccccgaggtagaggaagatttaagtaaaagcttcctggaggaggcgcaagtgaaccgcaggagctttcccggacgcccgagaaagggagaaaccccgaaggaattc

SEQ ID NO: 123897 - DNA, 122 bp, Homo sapiens
ctccctccggttcccacgctccgagatcgtatcacccacagaaaaacaataactaaaaagcggtctccatccctgaagccaagctgggagagtagccgaaggtcgcgcttcctggccgccaa

SEQ ID NO: 123898 - DNA, 122 bp, Homo sapiens
gctctggaagctgaccggcgggtgcccgcgggagacagagcgaacgcagtgctggcactgcgtccctggcctgcgcctctcccagaatgggaagacgacccccaaccccttgactagtgtgc

SEQ ID NO: 123899 - DNA, 122 bp, Homo sapiens
cggccgcagtgctcctttcggctccagggaagcgcggactcgcccctgctgcccgcccggcgttgcctcagcacatccctgaccgtcggaggagcccctagaagtggcagtgggcgcaatgg

SEQ ID NO: 123900 - DNA, 122 bp, Homo sapiens
ctcctcctggaggtgggagggaaagtgggcaacaccccccgggatcccagggatgggagacgtggcagaggcctgggccccggacgcagcctgtctactccctgcccaccccctcctcccgc

SEQ ID NO: 123901 - DNA, 122 bp, Homo sapiens
agccaatgatttctgcataaagaagtatccgttcctggcagtgccaggtgcccactcttgcgtttctttgcacgtcggctcacagctctagaagtactcacggacaaatgtggaggcgcccc

SEQ ID NO: 123902 - DNA, 122 bp, Homo sapiens
cgctttccctcctttccctccaccattcctcgcccactcctgcccttcccgggtgggacacgtgagctgctttgctgcccggatggaggctctagggctccgcagctcccaaggcgcttctg

SEQ ID NO: 123903 - DNA, 122 bp, Homo sapiens
ctttgagattgaatccagggaggaaaaagcaggtgtgccacgccgcacctccaggtcccgcggacaccacaggctctgcaagcccagccgcccgggtcacgtaagccccaccccgccgctcc

SEQ ID NO: 123904 - DNA, 122 bp, Homo sapiens
aggttgcagtcttgcggtataacaaaacccttcagtagtgatcccacttgaacgtgttctcgggcctcatctggcccatacctcagtgtcttcaacatctccctgtgtgctatgctggggct

SEQ ID NO: 123905 - DNA, 122 bp, Homo sapiens
atttcgcccttcctcagtgctggaaatagttgttttaacttagaaaccgttttaatgttacgatctctcacaactgtgcagctgattggctccctatgtgagtgggccgatgtgaggctata

SEQ ID NO: 123906 - DNA, 122 bp, Homo sapiens
ttctagaacggttaatactgccccgagtgaatgcgtttggcatggtacgaatgaggctcccgtctgtggaatccgtcccgtgtctgctgtggagacagcggaagctgctgtcctggcttctc

SEQ ID NO: 123907 - DNA, 122 bp, Homo sapiens
ttagacgtgaggacacactccggtgaatgtaggacctgggttagacgtgaggggacactccggtggatgtcggacctgggttagacgtgaggacacactccggtggatgtcggacctgggtt

SEQ ID NO: 123908 - DNA, 122 bp, Homo sapiens
tttccctgggcagatagaattcatcccatttgccccctgccttttgcctattcctaagaccggtgaccccagccgaaggcctcagccctgttttctcaccattcgtccatggctgacctgag

SEQ ID NO: 123909 - DNA, 122 bp, Homo sapiens
ccagggccggagctttctcctcggccatcactgccgggctcctacgggctccttccccgccgccacgtccaccagccatgcttatcctgtgtccagccagccagagctccctgctcagagaa

SEQ ID NO: 123910 - DNA, 122 bp, Homo sapiens
gcagacaccactcgattggtaaaccaactctctcatctcccagatagagaaaccgaggcccggggaggcctgggacttgtccagaatcaggcggagcctgtgaactcagtctcccgccctgt

SEQ ID NO: 123911 - DNA, 122 bp, Homo sapiens
tgaacgcccacgccaccttctcccaccaaaggtggatccagctaacaggagactggatcgcgaccatagcgcgtttgtgcccagttctggggaaagcctcatgttagcgagtggccctcggc

SEQ ID NO: 123912 - DNA, 122 bp, Homo sapiens
caagagccacagtccagcttccccttttagagatcagaaaatcctaagtgcagggcctgccgggtcattcgagaaggcacaagctgcggaggccagtctggggcctctcgcagaacctcggg

SEQ ID NO: 123913 - DNA, 122 bp, Homo sapiens
gtgcgggaagtacaacgccatggtgctggagctgctggggcccagcctggaggacctgttcgacctgtgcgaccggaccttcacgctcaagacggtgctgatgatcgccatccagctggtgc

SEQ ID NO: 123914 - DNA, 122 bp, Homo sapiens
cagcacagaacgcgcgcaaccgtggctggaagtgaaaatgtaaaaaccctcccacggcctcgctgggagtcactgctctgcattggaaaacccgggtgtttgattcaactaaatcatctcaa

SEQ ID NO: 123915 - DNA, 122 bp, Homo sapiens
cagacactggtgtgatgcagccatgaccaaaatgcctgcagccccaggaagacagaaacacggcggggaggatcaagtgaaaatggggagcccgggccagcgtctgggggtcttggagcctg

SEQ ID NO: 123916 - DNA, 122 bp, Homo sapiens
ctggccgtagccacataggtatgcctggtgttgcggttcccaggccaggagcagctgtcacgcttgggcttggcctccagcagctccagcggggacgccggtgccaccacaaggaggccgcg

SEQ ID NO: 123917 - DNA, 122 bp, Homo sapiens
cagagtcctccaaggtgagccgggttattctcagcacactcacgccgtttgacccgtaggcggtgtttacggtgacacggcgcttccgagcaccgtcccacagctgtctgaaagactctgcc

SEQ ID NO: 123918 - DNA, 122 bp, Homo sapiens
gacccagcccctgagaaggctgctggttaagcctgcggatatgatgggtcacagactccccgtccgaggtgtcggtctgttcctctcgccgctcccggctcccgctgcggctgttggaactg

SEQ ID NO: 123919 - DNA, 122 bp, Homo sapiens
aggcatattcgtgtggattcagtacgagggcaggtggtctgtggagctggtcaacgaccgcggggcgcaggtgagtggcaggcgcagctctgccagtgaagggctgcggggtagaggactcc

SEQ ID NO: 123920 - DNA, 122 bp, Homo sapiens
caccgcgggcatcccagccccccgccgacgggctccaccgcgggcatcccagccccccgccgacgggctccaccgcgggcatcccagccaccccccccgacgggctccaccgcaggcatccc

SEQ ID NO: 123921 - DNA, 122 bp, Homo sapiens
attttatgtgacatatcacacaacccagtgcatggtttacacaggtattattattattctcgagattcagagatgcagaaagatccaaaaacagcccaaggtcactgagccattgctgacag

SEQ ID NO: 123922 - DNA, 122 bp, Homo sapiens
cttcaagtgtgtattattagtgctaatgctatccatgttccttctctattttctatgatacgaggaaatcacatgaagctgccttaagtggtgaaaataaatggattctatttttgcagtat

SEQ ID NO: 123923 - DNA, 122 bp, Homo sapiens
tcacgccgcctgggagcaaccctgggcctatgcactcttccctccatccctccgaggccgcggtaattatgaaaggaagtacggcccgctcgttctctgtgtggtttgaggagccaggaaga

SEQ ID NO: 123924 - DNA, 122 bp, Homo sapiens
cgccctatgcccttccttcaggggaggggcctggcctagggcttcccggccgctggcccgcgcccgccctcacctgtgcacgaaattgttgcgatgaaggtgcaggacgccacaggccacct

SEQ ID NO: 123925 - DNA, 122 bp, Homo sapiens
aggcggcaatgctggaagtagggccaagcttccaacgccattccccgcgctttcagcagacgcagcccattcaggaggtaaaaggagtaaagatccttccttcggaggatgtagctatactt

SEQ ID NO: 123926 - DNA, 122 bp, Homo sapiens
aggtcccccacgttcattgcccaggtctcccgctagctgtttatttcatcttggtcatgccgtctcacttctccctaccccagttttctcatctggagaagacaggactcatcgtcgccacg

SEQ ID NO: 123927 - DNA, 122 bp, Homo sapiens
tatggggtgtttccactttttgacagttatgcagactgctgctatggacattcatgcacacgtttttgcagtcgtgttttcctttctctcggggatatactgaggagtggcgctgctggctc

SEQ ID NO: 123928 - DNA, 122 bp, Homo sapiens
caaattctaggatagctctgaagcctgctggaaacttggtggcatccaacctgcctcattcggcctgaccggtagaggcaggtggcctgtggacagaagtaatcctctttctgctcacccca

SEQ ID NO: 123929 - DNA, 122 bp, Homo sapiens
taagactaggtccccggccccagcagctggtgggggcgccgcaggttagagacgtgaggccgcgaggctgagggctgtgaaggcggtgggcacgcacggcgtgccggggccgcctggcttcg

SEQ ID NO: 123930 - DNA, 122 bp, Homo sapiens
catcagatggctgactggaggcagggtcccagcccaaggatggggttggggtggaggtggcgaacctgggttggtccccactggatgctggtcctcactctcatggcagacggctttctttg

SEQ ID NO: 123931 - DNA, 122 bp, Homo sapiens
cacgcggtagaggcagagcagcagcagcaccaagacgatgccggtggccaggcccagcgccgccaccctgcacgggagggcggactgctgtgagacacacctcacagcctgtcccctcccct

SEQ ID NO: 123932 - DNA, 122 bp, Homo sapiens
ccccgctcccgcgtgggcacaggcattgggctcccgggggttctccgcgcccgcccctgccggccctgaccagcctgtagtaactggcccctaggccgcagttctttgtccttagcaggagg

SEQ ID NO: 123933 - DNA, 122 bp, Homo sapiens
agtcctccaccctcaccctaaaaacaatattgtgactgcgtgatgcacagtcagctgcttcgtggtcacagtgaacttagaaccaagactgcatttggcagagcaagcaacaaagatactct

SEQ ID NO: 123934 - DNA, 122 bp, Homo sapiens
gttcaaagacttcttgaataatttcctcagtagcattttctggtaatcctccgacaaacacggtcttacacccaggaggtcgttctcttgtggaaggaggtggaagatctaataatcacaac

SEQ ID NO: 123935 - DNA, 122 bp, Homo sapiens
ctgcgctatttcctctgagtcatattgtctgtttattttggtccctatctttcatggagacgatccttcaagtatctgatctttagctgtcttttcagtttagtgaggagctaaacaaacta

SEQ ID NO: 123936 - DNA, 122 bp, Homo sapiens
gagaccgaaggctggcggctggtcgcgttgcaggtgaggttgtgacgcgcggtgtggagccgcggcccgggtgcgtccctgtctggttcctgggcggggttcctggagagggcgtgtcgcga

SEQ ID NO: 123937 - DNA, 122 bp, Homo sapiens
aaaggcagtcccgggccctcggcctccccactcaccccgtgcccatcgccggacacagtccgtcggcataaactttccgtcggcataaactttccgtccgcgcgccacagccggaactataa

SEQ ID NO: 123938 - DNA, 122 bp, Homo sapiens
atattgggagtcagatccttttgtggagcgagggaccccgaagtgtcaccaagggctagccgaaaccaggggcccaagaggggacagggctaacaccccagccaaggccggagcgcaagcgc

SEQ ID NO: 123939 - DNA, 122 bp, Homo sapiens
ctatacccaaagattcttttaaaagtagctaggtcccctcccctcaatgcatcccaacagcggcagcctccagtgttctgttaaaaagaaagctgtgtggtgaaccggcggtgttacttgaa

SEQ ID NO: 123940 - DNA, 122 bp, Homo sapiens
gtcatgtttcatggaaagttctaaaggtcactgctgcacttgactctgagatcgccacgtcgcctcactggggcctccacgccctgccccaggaggtgtttatgagctggcacctctgcgga

SEQ ID NO: 123941 - DNA, 122 bp, Homo sapiens
gaagtccgggcaaccaatcggaaacaaccaaggaacagttgcatggcgacactctggttccgccttcgggcatgctcgaacagcattctgggaattgtagttcggggggggaatctaacact

SEQ ID NO: 123942 - DNA, 122 bp, Homo sapiens
actgggtaggcagagagaagactcccaaagaatgctgtcatggaaaccagaggaagagaacgatttaaggagcgaatactactggtaaactaatggaagaaatctgctgcaccactggttag

SEQ ID NO: 123943 - DNA, 122 bp, Homo sapiens
aggtaagtgcccctttgccctgctggtgtgggagctgctagagatggatgagtcacgtcgcgtccagacgcttcctggttgtgttgcagtaacggtgattgtactcccgccatgtctcctct

SEQ ID NO: 123944 - DNA, 122 bp, Homo sapiens
cgccggcctcccagccgtggggtgcccggagtcccgcgctcacaggctgtgatgatgtcccgcgcacggagcagctgcaggtgcgtgaggatgtgcacgaggtcggccacacgggcgttgcg

SEQ ID NO: 123945 - DNA, 122 bp, Homo sapiens
tccaaggggaagagagccagatcccgagcagaaacttttgcagagctgcgcagcttggggcgcgctgttgtggcgcgcgtctgagtgcgcgagcgagcgagtgggcagcgcgggcgctcggc

SEQ ID NO: 123946 - DNA, 122 bp, Homo sapiens
ggaagaggggacgtgtgtttgcagactggctgggcccgtgacccagcttcctgagtcctccgtgcaggtggcagctgtaccaggctggcaggtcactgagagtgggcagctgggccccaggt

SEQ ID NO: 123947 - DNA, 122 bp, Homo sapiens
actttttctaaagggtccttttctcccacgccaagacatccctggagctggggtctggctcggccttccctgcgcaccccctgggggcgagtaagcgccgaacgcggggaggaaaatcctcc

SEQ ID NO: 123948 - DNA, 122 bp, Homo sapiens
ttcccgcgaaggagaagcgcgcttttttccctggcgggggatttggctagaaggctgggccggcagcggttgtgaggagttagctcgcggcattgcaggctctgagaggaggggacccggtt

SEQ ID NO: 123949 - DNA, 122 bp, Homo sapiens
ctgaaaccctattggccacacggaacctcttttagatgctgtttgtggacctgccgaaatcgaatgccactcaggctttctgaaaccctatgggggtgggaagaggcagtagctgacacctc

SEQ ID NO: 123950 - DNA, 122 bp, Homo sapiens
tgtaggctgcgcacgcgggccccgcacagctgtggggtgaagggtctccgccagtggacccggccaaccacatcccacagtgaggcgcaggcttcacttgcagatgaggttccggagctgcc

SEQ ID NO: 123951 - DNA, 122 bp, Homo sapiens
gcttgcagaagtagcaggccgagggccccggggtcctcagcctccgcgagtccaggagaacggctggaaagtgcttacttttatggtagttccaaatccagagggtttgtggtgacaactat

SEQ ID NO: 123952 - DNA, 122 bp, Homo sapiens
tttggcgtcacgttcaaaacaatcctttgactacaactcccagaaggccgagcggcttagcgagtgcacccgctctcggctgctccggcaaactacacatcccaaagggcagcgcgcgaccg

SEQ ID NO: 123953 - DNA, 122 bp, Homo sapiens
accttgggaaatgcatccaaattaacgtgtgttttaaggaccccatctgcagagcagatacggtatttctctgtctcccaaaaggtagaagactaggatcactgatttcataaggtactaaa

SEQ ID NO: 123954 - DNA, 122 bp, Homo sapiens
gagccccgttccggggtgtaggaagggccttggaccagcccagctctgccctaaacactacgtctcatctggaagacaggctggcacttgagaaggacaagcagatttgcccattcctctgt

SEQ ID NO: 123955 - DNA, 122 bp, Homo sapiens
actcacctccacagcaacttccttgatccctgccacgcacgactgaacacagacagcagccgcctcgccatgaagctgctgatggtcctcatgctggcggccctcctcctgcactgctatgc

SEQ ID NO: 123956 - DNA, 122 bp, Homo sapiens
agggaatcttcgcgacctgcgcaggcggtcgctctgataaccgcatcccggtttccgggacgacagcggaagtcacttctcacacgcctttcttattggataccggcttttcatggggccga

SEQ ID NO: 123957 - DNA, 122 bp, Homo sapiens
ccctgtttgacctcagcgcggatgctccggtctttcagggcctgagcctggtgagccacgcgcctggggaggctctggcccgggctccgcgtacttcctgttcaggtatcctggaaggtttc

SEQ ID NO: 123958 - DNA, 122 bp, Homo sapiens
gtatgctagcaatttcaaccgagcaggaccttctctccctcctctttcattttcctggcgcgtaaactgctggatttgcctcacagtggaaagttgggtccagcaaagtgagcaaagggaaa

SEQ ID NO: 123959 - DNA, 122 bp, Homo sapiens
catcgtccctcctgacgctcagaaggatgccctgggctgctgcgtggtacaggtgagcaccggggtgcgggcggcgacgcggacctcggcgccacgtccagctccggcgagcgcggcgagtc

SEQ ID NO: 123960 - DNA, 122 bp, Homo sapiens
ccacggggcgcgggccgctgggcccccaggctccgccctcgccccgccccggcgccgcggcgggagacacgcccccgagctccacgccctcgagctccacgcacctccccgtagcagacacc

SEQ ID NO: 123961 - DNA, 122 bp, Homo sapiens
aggctgagccgcagaagcgaagcgcgcagccccaatcggactacaatttccgacgggccccgaggccccgccccgcactacgggttgcaatgagggccaactccactttgggctccctatcc

SEQ ID NO: 123962 - DNA, 122 bp, Homo sapiens
cggcggccgccgaggcagctggggcgccagaccgcggtaggtgctggctctgcctttcctcgccgtgttgctcccgcaccgagccgggtgagtgcgcggtgtggatcgggctctggtctcgc

SEQ ID NO: 123963 - DNA, 122 bp, Homo sapiens
gaagaatgcatggaaataattatcattatcactgtatgaaaagtggtgctcttggcccaacggagcctctgggatagacagtaatgcctgcactgagaggacacctgtggtccagaccggcc

SEQ ID NO: 123964 - DNA, 122 bp, Homo sapiens
cttcgggcagcagcccaggtcgccttgctcaccccaggcggtctcatggcacgggcctctcgaaactgtgggcaagaaagggtcctcgtgagaactaggctcagaagaagagcgggggcggc

SEQ ID NO: 123965 - DNA, 122 bp, Homo sapiens
cctccgcggcttttttcccgacctttttgcccccccgccgccgtggctttttgcccgtcgcggctttttcacccccgccgccgcggctttttgtcgccgctggctttttgcccccccgcccc

SEQ ID NO: 123966 - DNA, 122 bp, Homo sapiens
gcgccggcggaggcggaggcggaggcggcggctggggcgtctacgggggccagctgctagcgcgcggcgctgcctgctcacctgcccgccggtgcgagcgcgtgggggcggcgcggtgcccg

SEQ ID NO: 123967 - DNA, 122 bp, Homo sapiens
gtctctcggctgccccttggcagccaggtcctcagtgacctcttcacagtgagctgagaccgaacctcttcacagccgcgcgtgggtgcggctttggggcgtggtgggagggaaggataggg

SEQ ID NO: 123968 - DNA, 122 bp, Homo sapiens
tccactcccatcctggcaatgcggtggctaaatacaaggcacaaaagatacctttagtggcgctccctcttgcttcccggtgacccagactttggtcagaagagtaccacagcccaacgggg

SEQ ID NO: 123969 - DNA, 122 bp, Homo sapiens
cagtccgctgaccaaagccgcagtgttcaggccccggggtttcccagccgtagtggccgccgccacagctgcgcgctttattgtctgctttcagtcgcaggtgacctcgagcgatctcgaca

SEQ ID NO: 123970 - DNA, 122 bp, Homo sapiens
ccctaattttttgtttgagacagggtctccctctgtcactcaggctggagtgcagtggtacgatcataagtcaatgcagccttgaactcctggacacaagtgatcctcagttctcagcccca

SEQ ID NO: 123971 - DNA, 122 bp, Homo sapiens
ggcatttagaatacttcaggccaaaaacactttgagccagggggctcgctcaaaggcatgcgcaaaagccatcaggcctgtacctggagaactcaggtgagacgttgccactcgttgtaatc

SEQ ID NO: 123972 - DNA, 122 bp, Homo sapiens
gggaaagatgccctgagaaagccatttcagaggctcctgatcctcaaacccgggatcccgcggtgggagaaaggtgctgacgcctcagccccgatgtcctccgacccacgcactctttagag

SEQ ID NO: 123973 - DNA, 122 bp, Homo sapiens
agagaggatgtaagatgggccctgcttgcccgtcctgtccctgcctgatggcgagacagccgccacccctcatcgcccctcctctgcggtgggcggctgcaggtgggcgaagctcaggaaga

SEQ ID NO: 123974 - DNA, 122 bp, Homo sapiens
ggatcggcaaaggatccagatcattcggcctgcggaagtctaaagggtcatttagacacccgcctaagaacctgaaactaccaggactgaccgcggtcaaaatccctcgggagcagtgaaga

SEQ ID NO: 123975 - DNA, 122 bp, Homo sapiens
cgcccccatctcagcccttgtcctcagtgcacccctgctaaggggcaaggagaaggctgacgggtggctctctgcagtacctgaagctgcgggagcgaatgcagatacagaaggagatggag

SEQ ID NO: 123976 - DNA, 122 bp, Homo sapiens
aaaggaaaattggaaatgatacctgacatgcaggtgaaacctagaggagaaggccacagacgctggaagaacttggtcttgctgtctcttccactgacagaggcactagaagcttcactgaa

SEQ ID NO: 123977 - DNA, 122 bp, Homo sapiens
cacttctgataattgaccagatatagttgggttcagtgccctgattatagatatgtaacccggtatcttgcttatagatcttgtgaatgttaaattcaacctgttcagagttgttactacat

SEQ ID NO: 123978 - DNA, 122 bp, Homo sapiens
ccgcccccaggaccttcgccccgctctgggaggtcttccgcgtctcctcggacaagctggcgctgtgccacctggaactgacacggaagttacaggatctcatcaaggacgttctccgctac

SEQ ID NO: 123979 - DNA, 122 bp, Homo sapiens
tgtttttcttttgttttgttttgttttgttttgttttgttttagagactggggtcttgctcgattgcccaggctgtagtgcagcggtgggacaatagctcactgcagactccaactcctggg

SEQ ID NO: 123980 - DNA, 122 bp, Homo sapiens
gctggctgtcctgtcttcccagttgggggggcctggattgcttcacactcagcttaaagtcgaagctcaggtgtctgcagccatagctgacaattcgactcatggtattttctacccggaga

SEQ ID NO: 123981 - DNA, 122 bp, Homo sapiens
ggagtgggcaggagtggggtgggggcgtgcttttagaagcgtttcgggggaacgacaaggcgcgggtcgtagaggtctaccctctctgcagtcccagcatggctcctggagctctctgggcg

SEQ ID NO: 123982 - DNA, 122 bp, Homo sapiens
accctgaagacctgacaacagccgttactctggctgacaagtcattggatttctggcgcacgcgcggcgcggcacgggcagcttccggtttccagccttgcccccgcccctaccttccgccc

SEQ ID NO: 123983 - DNA, 122 bp, Homo sapiens
cggccggtagcagccggaagtgccagaccggaggtgcgtcattcaccggcgacgccgatacggttcctccaccgaggcccatgcgaagctttccactatggcttccagcactgtcccggtga

SEQ ID NO: 123984 - DNA, 122 bp, Homo sapiens
ggttcatctcactagggagtgccagacagtgggcgcaggccagcgtgtgcgcgcaccgtgcgcgagccgaagcagggcgaggcattgcctcacctgggaagcgcaaggggtcagggagttcc

SEQ ID NO: 123985 - DNA, 122 bp, Homo sapiens
ctcctcctcctcaggacctactcgggagacgccgctggctctctaggaacacctggggaccgtggccagggacgacccagcctccttctcctcagctcctcaggaacgactggggaagctgt

SEQ ID NO: 123986 - DNA, 122 bp, Homo sapiens
tgccatacctgccagcttcagacatttagggaaaaggggcagcatgtggggaatgccccccgccttccacaaatccttttgctgacccaggaagttctgggagttgccgtttttcatcaaaa

SEQ ID NO: 123987 - DNA, 122 bp, Homo sapiens
acgcctcgctgtgctgtctgccctccatcacccgcaccagcggcccgcacactcacacctcgctgtgctgtctgcgctctgcagattcttcaagggttccggagctttccgcaggaagaggc

SEQ ID NO: 123988 - DNA, 122 bp, Homo sapiens
accaactggggagtctgtcaaacagcccagatgaatgtctttccaaacacgcggtgcctgcgtttccagggacagggacacgtcttatcaatttctatatattacagctttgtaaacataat

SEQ ID NO: 123989 - DNA, 122 bp, Homo sapiens
agagggtacgcgcatgcccatttatgtcgcacacatgaaatgaagaaacctcatttcaagcgcggctccgccacactgcgctagtctctgtcgacaacttcaagtggctagcctcacgcaca

SEQ ID NO: 123990 - DNA, 122 bp, Homo sapiens
atctgagtgtgcaattcgatgagttttgtaaagtgtacacctgtgtacccagttctcccacgtcggctgggtgccagggtaagtctatgtttagctttataggaaaccgccacctgttgtcc

SEQ ID NO: 123991 - DNA, 122 bp, Homo sapiens
ttgtccagggttaatggaagaaacagaaatgaattagtttgagtatgaagtgttgtttaacgttcactcacaaattatgagtgggccttatacttgggcacaagaaatgccacctttactgt

SEQ ID NO: 123992 - DNA, 122 bp, Homo sapiens
acagtctaccctactttgttctgggctctgtccccacatcttaggagttgcattctctttcgggctgcacagccctatgggacgtcaaaccttgcctttcttgacaactgatgggaggtccc

SEQ ID NO: 123993 - DNA, 122 bp, Homo sapiens
ggaagtcagatgtgccttgttatacttcctctcttttgcaatttagacatgacaactgaccggtattaatgttaagatagagattataagactgacagaacatattctttgtgacaataaga

SEQ ID NO: 123994 - DNA, 122 bp, Homo sapiens
gtgcaggctcggccccagcgctgagggagcactgagccgacccaaggtctgcaaggagttcgcggcacccgcccgcccacgccggacccggagggcacgtccgccgggaggggcagttccca

SEQ ID NO: 123995 - DNA, 122 bp, Homo sapiens
accaaaggacagacactgtgtggggttccactcgtacgagacacctagagcaattaaacccgtagaggcagaaagaatggaggtcgccagcagccaggggaggggtgaatggggaattaatt

SEQ ID NO: 123996 - DNA, 122 bp, Homo sapiens
gggcaatcagtgtagctagcattaagggctctggccaggcctcccttccccaaactgccacggtctccaaccatgtcttgacctcccagagtttgttagggaagatgggaccttatgggatc

SEQ ID NO: 123997 - DNA, 122 bp, Homo sapiens
ctgagacttcttcctctgagccttgaggtccttggccttggtgaacacaccaagaggccccgccccgcagggagctgccgccacgcgtgttctggctcaatctgcaccacctgcgtcaccac

SEQ ID NO: 123998 - DNA, 122 bp, Homo sapiens
gggcagccgtggccttgggggacagtgcgaaggcggcgcggggccagcgggactgacttccggctgtgggaaggcgccgtcccgggcggccagaggcggcggcagccgcgtagaaggacggc

SEQ ID NO: 123999 - DNA, 122 bp, Homo sapiens
acccgaagtcccccgcaaacccgcactggcgcattcttacggctctggcatcaacctgtccgtgtgagtaagttaatatctcagctaatctgttagaaaactagagttcattccctgggcgt

SEQ ID NO: 124000 - DNA, 122 bp, Homo sapiens
acagtgactgtggcgggaggaggcgcctgagccttcgcgccagaggcggcagtgctgctccgattcctgcttgtccctagcgagccagcgagccacacagccagctagcgcgcggagcaggg

SEQ ID NO: 124001 - DNA, 122 bp, Homo sapiens
ttgagaaccgctgcccgtgcgcgctgccacttactgcctgagcgtaggcgccgtaggccccgaaagggatggccatggggttgaacatgcccatctggccagccatctgctgcattcgccgc

SEQ ID NO: 124002 - DNA, 122 bp, Homo sapiens
cagcctcaagctccccccatgtttcagcgagtgtcagcactcacttcctcttcaaggctgcgtactattccatcatgtggatggaccacgtttcacttgtccattcgcccatcagtggacac

SEQ ID NO: 124003 - DNA, 122 bp, Homo sapiens
ggaattgtgtagtgaactgcggtgttcaagtgccaaggaggtaaactaaagcagagtaaacgtgacaaaaatgcccagcgggcattatgtgggccaggcactgtggaggaagattttcaagt

SEQ ID NO: 124004 - DNA, 122 bp, Homo sapiens
cgcctaccatcaggaggagatcgacgtgtggaccgaggagcggaagggcaccctcaaccgcgacctgctcttcgacccgctggggggtgttaagcgcggcagcctcaccatcgccaagctcc

SEQ ID NO: 124005 - DNA, 122 bp, Homo sapiens
cctcccgagcggacgctgcggagttgcagccgccgcccccggcacctgcgccaggacactcgtggtctgcgcgttcgccttgcgcccgcaccctgcctggtccctgcccactgcactttgcc

SEQ ID NO: 124006 - DNA, 122 bp, Homo sapiens
agagacagaaagtaaagtggtggtttccagggacgggggaagagggaactggggagatagcggctgatgggtacagagtttcgcaagacgaaaggcgttctagaaactaatggtggcggtga

SEQ ID NO: 124007 - DNA, 122 bp, Homo sapiens
gtaccatgtgacccagatccattccgtagtggtaacaaaagggcatgtggtagacacatgcggttatggcataattttcatttgttaatttattcaacctattgagcccatgctctatgcct

SEQ ID NO: 124008 - DNA, 122 bp, Homo sapiens
gcaggcgaggtggtgagctcgggagcctcaccttgctgcacttgatgcacttgtaggagccgccgcccagcagcaggcgggtgcacagcagctccgactccaccttgacgccagcgcccttg

SEQ ID NO: 124009 - DNA, 122 bp, Homo sapiens
aggccagccgcgggcaggctcccaccttctccagggccaggaagctcttctgcaggaagccgcacagcttggcctccctcttcaggaagcgcaggctcacctcttcgccgagcttggtcacc

SEQ ID NO: 124010 - DNA, 122 bp, Homo sapiens
atatcacctagaaatgaaagaatcattgcaaacggcttagtggttaaaagctctgcccttcgctggctgtgtgaccttgaagaaattacttaacatctctgtggctcaatttcctcatctct

SEQ ID NO: 124011 - DNA, 122 bp, Homo sapiens
aaagcccagcccagaacttgcatactgtcattctacactattctattggccaaaacaggtcgtatagtcaaactcaacgccaggaagacatattccatcaccttacagggagaaactgacac

SEQ ID NO: 124012 - DNA, 122 bp, Homo sapiens
cagcaagttcgaggatctggatgcggagccgagtaaggcgcaacccagcgggcctcgggccgccctttcaatggctcgttcattaacacctgtgggtgcctccagactgtgatcattgcagg

SEQ ID NO: 124013 - DNA, 122 bp, Homo sapiens
cctggaaatgcaaagatattagaggaacattacttaaaatctaatttttcacagggacaacgttatagattcagtcagagagctctggagaataccaaaatggattaaagtaagtccaagta

SEQ ID NO: 124014 - DNA, 122 bp, Homo sapiens
gggaccgaagacggggagggtattaaggccctatttctcctccgggccgggtcttccaaccgcggcgggacccatgggccttggaaacggacgacgagtagaggccggggatccacgaccgc

SEQ ID NO: 124015 - DNA, 122 bp, Homo sapiens
cttctcggcggcaactcagggcttgagcatttgatgtaggggagttgctatggcctcactcggtgtttcttgggcaggtgactttctcttaacttccagctgggggcttgagcatttgatgt

SEQ ID NO: 124016 - DNA, 122 bp, Homo sapiens
cagtctctgttctcagcaagtttgcaccaaagcgtctgagtctatttactcacaatttgccgatgttttgacatttccttgctgatttgcctcatgaatgagtgcctggtgatactttcctg

SEQ ID NO: 124017 - DNA, 122 bp, Homo sapiens
ttcccaaaggatgaacattcccggtgctgtcgtgccatccttagagacgtccatcactgccgcctcatccccagccctggccacgcggacacagatccctcaccaccagcccttccgctgcc

SEQ ID NO: 124018 - DNA, 122 bp, Homo sapiens
cggagctccgagatctcgctcttgccgctctgcaccagctcgctgttggtggccacctcgcggttcagctcctctgtctgcaaaaaagagaatgccattcacaccagaaggccccagaaggc

SEQ ID NO: 124019 - DNA, 122 bp, Homo sapiens
ggagaggagctggcggccgggtggccgggcgggggttagctcactggcgagggggcgggccggggcggggccagggcggccacgcccgcggagggctgcgcgctccctcgcagaggggcctg

SEQ ID NO: 124020 - DNA, 122 bp, Homo sapiens
agattttatgagtgtaataaaaatacaatgatctagaccataaactaatcatccggcactcggctccgtgccacccaagtgtgacattacagagccccgtcgactggggggacccggacggc

SEQ ID NO: 124021 - DNA, 122 bp, Homo sapiens
cattcggttcggtttgggttgccaaggaggctctaactggagccctttctcctggtttttcggcgtggttgccttgggtatttttgaatcacattaagttttaagagaccttaaagccccga

SEQ ID NO: 124022 - DNA, 122 bp, Homo sapiens
ccactgcagggggctcccgagctgcgcccagccgggagcggccccaccctcgttcccgcgcgctccgctggcctcctctcagtcactgggactgtgcattttgcccgctcagaccatggcta

SEQ ID NO: 124023 - DNA, 122 bp, Homo sapiens
gtgtgttgagaggcaagcaaatgcggtgggtgggcctgggctgtagggcccctgccatttcgggaggggcctcctggtgtttagctctgggatgtgtgaaaatgtgttggtgaaaagcgaga

SEQ ID NO: 124024 - DNA, 122 bp, Homo sapiens
ctcccgccctcccacatgcacccccaaaccacccctgccaactccccaagccaagccctgcggcaccaggaatgtgaacccagagagcccctcccagcccagccagggaacttacccagctc

SEQ ID NO: 124025 - DNA, 122 bp, Homo sapiens
ttgcagcgcccaggcgtcagaggcggaggcccgaggccgctatacagattgcggggctggcgggcgcggcccggcgctctgcatagcggccggcagggtgcaggcggccgggcggcgcagag

SEQ ID NO: 124026 - DNA, 122 bp, Homo sapiens
ggttccctcttaccccccggactaagccgggacggaaaaaaaatgtgaagggggcgttcccgatcgatttggccccgccccatagtgtgcccagagccttctgccacacttaacatggcggc

SEQ ID NO: 124027 - DNA, 122 bp, Homo sapiens
caggaatttcgccttcctgggcatccgttggaccccattgtactgtaaattctgctaacgcgacgctcgttctcccgccctgccgtcccccctacatggccgccagcactcgagtttggggt

SEQ ID NO: 124028 - DNA, 122 bp, Homo sapiens
actctaacctatgtgcctggaggatggagagagagattgataaaactgagttttggcaaacgtgaggaaaaggagtttcacttttttgaatgttgtatgttccttgctggtattaactggca

SEQ ID NO: 124029 - DNA, 122 bp, Homo sapiens
cattggctccgacggccgtccttcagggcgccccctcggtggggtggccgaagagctgtccgtcaggtgcgggccacacccgcggccctgcagttccactcccgcctgccagccctcaactc

SEQ ID NO: 124030 - DNA, 122 bp, Homo sapiens
tccttctttccttctctttgcttcgttctctccttccttcttttctttctttttttgagacggagtcttgctctgtcgcccaggctggagtttggtggcacgatatcagctcactgcaacgt

SEQ ID NO: 124031 - DNA, 122 bp, Homo sapiens
gaaatgtgactattggggtggagcttctggaacactgcccttcacaggtgactgtgaaggcggagctgctcaagacagcatcaaacctcactgtctctgtcctggaagcagaaggagtcttt

SEQ ID NO: 124032 - DNA, 122 bp, Homo sapiens
acgcgtgaggacgcctgagccccagcgggagacctgtccttggctcttcctcccaatgcccgtcaggctgaactcgcctcccccgtgactctgcctcgggcctcgcagaggccgctggtcac

SEQ ID NO: 124033 - DNA, 122 bp, Homo sapiens
acattacatgctcccagtcgccggctttataccgccgccgccgcctcgggcccgaaggcccggcccggcccgttgctccccaatcccgcagctcgccgcacccgctaacccggacgctccac

SEQ ID NO: 124034 - DNA, 122 bp, Homo sapiens
tggctatttccacctggagcctctttgtcacatccggtgaattccctcatctacagaaagcggctgctgaaaaagacatcaccagctacaacgccttgagtactacagcgctccctgcgcaa

SEQ ID NO: 124035 - DNA, 122 bp, Homo sapiens
ggggccagctctgcacgggccagggtggactctcaggagcgcctgggcacagggccaggccgtgggtgacagtgctctggacacctgccttgcccgggagctggggtggcagctgacacacg

SEQ ID NO: 124036 - DNA, 122 bp, Homo sapiens
acatcccatcaagggtccacaccatcaacaggactcatcacagtggatgctgacatcgaccgcctggctgaggtcgtgtctgacagtttctcttcagctctatgttctcacagatattgaca

SEQ ID NO: 124037 - DNA, 122 bp, Homo sapiens
ccagggccctttgagctctgtcacagagacacaggcgtggggtccttggagctctagctccgactgcagactctgtggttctcacaaccacccgtttcctctgacggcatcacagaccgtcg

SEQ ID NO: 124038 - DNA, 122 bp, Homo sapiens
tccagtattcattagggccaggtggaatctcaggactcttcaaatgaccctaaatcaccccgagggttcttggtacaaaatctggatgctatttctctagccacacttaagaattccccatt

SEQ ID NO: 124039 - DNA, 122 bp, Homo sapiens
ggaaacccgcacacgttttcagatccctccaggtgaactcctccaccctgtccccgcccccgcccccacccccaaccaaaacaagcattcgttgtgggtggggactgcgactcctcccagat

SEQ ID NO: 124040 - DNA, 122 bp, Homo sapiens
gcggggagaggcagagagcccctgtgactccagcctggagcgaggccctgcggggagacccgggacctctgcagacctggcccagaccacatctgcatcccacaggcttgggccgttggcct

SEQ ID NO: 124041 - DNA, 122 bp, Homo sapiens
ttcgcccggcttcgccttctctcataagggtggccgggggcccacgaacttgcagggtggcggccctgcgccctccagccccggcggggacgggcacgattgctcgtagtctggggtgctgc

SEQ ID NO: 124042 - DNA, 122 bp, Homo sapiens
tttcaatttgctgttgctatggtgaaaacaaatcaatatcacatggctaccagccagtcccgcgctcagggagtgccatagaaattcaagatcaggtactcaagattccaagcaagaattgg

SEQ ID NO: 124043 - DNA, 122 bp, Homo sapiens
gctttaggtcgtctatgtctaacagctaacatagctctcataagtatcttcaaggtctgtcgcctcccaccgcttccctccaaccgccccccaccctgcccccgattatttaatactccgct

SEQ ID NO: 124044 - DNA, 122 bp, Homo sapiens
tgtccaaggcagtttggaagagaagttggtgaccgtcgggataccacagccgccccaggacggcctggttgagacattcactggagggtctgggtgcagcccgctgcctggccggtaggcgg

SEQ ID NO: 124045 - DNA, 122 bp, Homo sapiens
ggctgggtgccccccgtgcctctgcacgccatggcctcctgaggacacacccaggaccctcgtccaccccacacaactaggccagccaaacggcagagactctgctggcgctgccctggcag

SEQ ID NO: 124046 - DNA, 122 bp, Homo sapiens
ggggtggcggcggtgagcacaaactccagctgtcaccttcgaccttgcaggatgccctgacggcggtgggatggatgagcatggtttcgccagcagccgcagcctgttgcgtggccctgcgc

SEQ ID NO: 124047 - DNA, 122 bp, Homo sapiens
atttctcgaaaggtccactggtgtggacactccgggccccctgaggctcaggtgggggcacgcggctccaaaacccacagccccatgggggcaccagcccctttctagtagttctttcccca

SEQ ID NO: 124048 - DNA, 122 bp, Homo sapiens
gcttcctctgatggctttgctgtccaggtccctctgattgccttttactctaagtttttccgtgggttttaaagtcggagcctggcctacgtagacgcacggggttttgcgtctcccaggag

SEQ ID NO: 124049 - DNA, 122 bp, Homo sapiens
ccattctgacgactcagggaaacttggaaacggatgctttggggccactggatgtgtgtccgtaagagtggggagaggtctggagttatttcatttcgggagactggttgagtttgagcgtt

SEQ ID NO: 124050 - DNA, 122 bp, Homo sapiens
acgctgcaacaatggaaggaagaaaggtttgggttggaggggattggtcccttgtgttagcggtcaaggagaggtttacaacaaacagctaagagttcagaaagttttcttcggggctgaga

SEQ ID NO: 124051 - DNA, 122 bp, Homo sapiens
cattttgtctcgaacttagttttgtctttgacagatgtaaccatgacttaaagcaatacccggcttgtagaagaagtatttacttattcaacaaatatctactaagtacctactaagtgcca

SEQ ID NO: 124052 - DNA, 122 bp, Homo sapiens
ggcgcgcggctgtcacccagggcggggcggcgcgggcgttgccacgacgcgggccgcgcgcgtccctggcagccaacccgtccacgtcaaggtttgtttaataatcgccagggtatctatgg

SEQ ID NO: 124053 - DNA, 122 bp, Homo sapiens
gccggacctgtgagcggggccagaatggggcgcgggcttcagacttcacaaagcagaccacgcggcagcctggggctttagtatccaaatgtcctgccctccaggtttcattccttgccgta

SEQ ID NO: 124054 - DNA, 122 bp, Homo sapiens
ctgtctctttaagatcgtgttcctactaacactgacggtgagtaacctggccctgggtcccgggagacatcccgaggtaggatgggcccttggcctcctacggataggcgggtgagagtaca

SEQ ID NO: 124055 - DNA, 122 bp, Homo sapiens
tgctgggaagtctctctaatggctcttttttttttttaatcttttttctttgttttgagacggagtcttgctgtcgcccaagctgaagtgcagtagcgcaatctcggctcgctgcaacctcc

SEQ ID NO: 124056 - DNA, 122 bp, Homo sapiens
tgagggccccaagctggaagcagcccagaaatccttttaccagaggacaactccctaatccgctgggcaggggcggggtgtcacacgcaggattccgcgacgactgtcactgcctcctgggc

SEQ ID NO: 124057 - DNA, 122 bp, Homo sapiens
aggaaaagcatggtcgtgctctaatcattacagtctaagggacgacacgtcgagacggcgcgcgcctctgcgtgcgtggagatggcacaaaggccgcgccgcccccggcggcccccgccctc

SEQ ID NO: 124058 - DNA, 122 bp, Homo sapiens
cacttggacttctgagtagaggaaaaacgcattgagactcagctgtccgagcggaaggagcgggagcccaactggaaactcctctcgccattcattgcccctaggcttccgctttgcttcct

SEQ ID NO: 124059 - DNA, 122 bp, Homo sapiens
tcttgtcccccgggggcggtcagcctgggccttggcggccaaggggaaacttgggagcctcgggactgttggccaccggcccgtgggaggagtaaaggcggccctggctggcaggccgaggg

SEQ ID NO: 124060 - DNA, 122 bp, Homo sapiens
cacctgagcttctgcaccaagacaggcaaagcactttctctgtggtcctcctgtctcctccgcctccccatgaaggagtttctttggggggaagagcagcagactccagtcccaggacctgg

SEQ ID NO: 124061 - DNA, 122 bp, Homo sapiens
ggcctctggctctacggcaaccgcttcgaggagttcccgcccgcgctgctgcgcatgggccgcctgcacatcctcgacctcgaccgcaaccgcctgggcggcttccccgacctgcacccgct

SEQ ID NO: 124062 - DNA, 122 bp, Homo sapiens
aacctaagtgtttttttttaaatatagttatttattttgggctccagcttcctgcagttgcggtttctgtcagactagtttgttaaaaaaagcacttagaacacataccagaggacaggaag

SEQ ID NO: 124063 - DNA, 122 bp, Homo sapiens
cgggagccctccaagggtgagctgggcaacttgtagagcaaggaatatgccctccgctgccggcgccccggccgcttttgtctgggctcccagccgggcttccgaggctttgtaccatggat

SEQ ID NO: 124064 - DNA, 122 bp, Homo sapiens
cattggaggacgggtatcattctttttggggggtcgtcgtgtgcactgcagggtgctgagcggcatgtctggtctggacccactcgatgccagcagcaccccgcactcaagttgtgacaacc

SEQ ID NO: 124065 - DNA, 122 bp, Homo sapiens
gtggcgaagggcgactgtcgtgcgtccgtgaagcccaggaaggggtccttcatgaagtgccgcgacgccgcgtagcccaccagccactgcgagtacacgttctcggacgggatgagcgcggc

SEQ ID NO: 124066 - DNA, 122 bp, Homo sapiens
aggagactaaagaatcatgaactcgaggcggtgccggggcaggcgcagagctggcaagcacgtggtggggcccctgaggtgtgcagagggtcgcgcacctagaagcctgtcgctggcgcggt

SEQ ID NO: 124067 - DNA, 122 bp, Homo sapiens
tgctctggcagccacaggccactgctgaatatcccgtttgttctccggcggcaggaggggcggctccgaggccagagccgccccctctcgtggggcgggcgaacgtctcctcccggcacccc

SEQ ID NO: 124068 - DNA, 122 bp, Homo sapiens
ttggagaaaactagagttgggggcggtacagccagggtgtacccttgcggtgggtcggctcggcgcacccacagctcccagctgctagcccaggcgctggggccgcagggactgaaccccgc

SEQ ID NO: 124069 - DNA, 122 bp, Homo sapiens
gggcgagcgcgggggcggctgcccgggggtggtgggaacaccataccttggcgcctcgtccgggacccacgaatcctgccctctgcgttagtgagaagcagtggtcagggaggacccggctc

SEQ ID NO: 124070 - DNA, 122 bp, Homo sapiens
gctccgcctgcttctgccggggatggagactgggaactggggatgcggccctctgcgctccgagctctcccgccgctgtgctgccccgcgcgggacggtggcctctctgggcctcgttcgcc

SEQ ID NO: 124071 - DNA, 122 bp, Homo sapiens
cgcctggcacagggacccagggactcgagcaggtggtccctggggaacggggagtgaggccggaaggagagaaagccaagaccaggtgcgttttggaaattgctgctgtgagccgcaagacg

SEQ ID NO: 124072 - DNA, 122 bp, Homo sapiens
gttgactatgtccattctttttatgaatgttgtcaaagcttcagtaatcttgcccctgtgcgtttcttgtctgccctgcaggcagaatgaactgtgagtgggttatcaggaaaggtcaaaga

SEQ ID NO: 124073 - DNA, 122 bp, Homo sapiens
ccccggcagggggatgtggcgatgggtgagggtcatggggtgtgagcatccctgagccatcgatccgggagggccgcgggttcccttgctttgccgccgggagcggcgcacgcagccccgca

SEQ ID NO: 124074 - DNA, 122 bp, Homo sapiens
tcctcccagaagagttctgcccaaacagcctgagttaaagaggctgggctctctctgccccgtcacacgctctcgatttccggactgcaggcagaggtctgggggccaagcccccaccccct

SEQ ID NO: 124075 - DNA, 122 bp, Homo sapiens
gcccccggcgcgtttatgacgtacgagtgtgttttgtggaaaccactgagtagtgctccgcgtgtcaaagaaaaatattcccctaatgagaaaactgagaaacgagtgcagagaattaattc

SEQ ID NO: 124076 - DNA, 122 bp, Homo sapiens
agagggggaagccccggtgcagttagggcgggggcaagcggggagcctcggtggggggagcggttgtgcccctggctgcaaatgccccccaccccaccaggcagcaggcagcccggggatga

SEQ ID NO: 124077 - DNA, 122 bp, Homo sapiens
cccagtgtagcgagctggagagaggactgtcctgagggcagcaggcctggttgcagctggcgtgggggtctcagaatggagccctcagccctgaggaaagctggctcggagcaggaggaggg

SEQ ID NO: 124078 - DNA, 122 bp, Homo sapiens
agtggggcaaggtggggaataggtctccatattctggatgtctgggttctattctgccaccgctcaaacactgtgtaatcttgggcaagacaattagtctctctatcagtttccccatctgt

SEQ ID NO: 124079 - DNA, 122 bp, Homo sapiens
ctaccttttccatgcccgactccttcacggccttgtccacgatgttgcggacctcatcctcgtaactgtggaggttcagctgcagtaaatctgccagggtcgtctcttctgacattttaaat

SEQ ID NO: 124080 - DNA, 122 bp, Homo sapiens
ttagggtggcctaggaagggagtttttctacctctgtccccagctgggtctctggcgaggcgggaagcacccggaatcttcctggccctagagcctgcaggctccaggccggccccttgaat

SEQ ID NO: 124081 - DNA, 122 bp, Homo sapiens
cgccgcaagctcccgctgcaggctcccgccccaggcgcctaatgtctggatcccgggcttcgtttcagcccctggcgatgggaactaatgtggaaaccccgttttcagcctgagagccgcga

SEQ ID NO: 124082 - DNA, 122 bp, Homo sapiens
tatgtgtcaactgtaatcctacccccttctcacacactcaagaaaacactttaggctgggcgcggtggctcacgcctgtaatcccagcactttgggaggccgaggcaggcagatcacctgag

SEQ ID NO: 124083 - DNA, 122 bp, Homo sapiens
catgaaggctagatggtttccagggcccactaccatgccacagccctcctgcaccgtttccggcaggaaacagcgtaagtattattggtgttcccacagcaaaagggacccagatctaggac

SEQ ID NO: 124084 - DNA, 122 bp, Homo sapiens
cggcacatcacagccgagccagccagctgtgctacacatgtccattgccacgcggtcacccgtccttctgtgagaggcatttgagtcatgtcccacacttggccatcatacgagcacctatc

SEQ ID NO: 124085 - DNA, 122 bp, Homo sapiens
tgcagtcctaattatgccagtgaatactaaagaccgccatcaagttttctcagaaaaggacgaggtccaactcgtgaaggatttagaatataatttcctgggaaaagttgcaagtgtcttcc

SEQ ID NO: 124086 - DNA, 122 bp, Homo sapiens
acggggcggccgggcagagatgctcctcaccttccagatggggtcgcggccgggcagaggcgctcctcacatcccagacggggcggcagggcagaggcgctccccacagctcagacgagaga

SEQ ID NO: 124087 - DNA, 122 bp, Homo sapiens
gcggcccggggcatccctggaaggctgccgagggggcagcgccttctctggggacggcttcgtggagagtccgggacgggcgagacagaaaaccgagccctatttgttattagtattttttt

SEQ ID NO: 124088 - DNA, 122 bp, Homo sapiens
cagacgttgcagcaccagataactcccccaacctgccccctgccgtgggccatgcagccacggattggacccccaaccaactccctcgccgctggcagtgacgccccagaaagcgctgcaac

SEQ ID NO: 124089 - DNA, 122 bp, Homo sapiens
ctgtccgctcccgggagccttctctgtctcaggacggttccttatctcccaaaccatgctcgtcctccacttcggacccacagccacccccaaatcccggctatccccgcttagcaccgcgg

SEQ ID NO: 124090 - DNA, 122 bp, Homo sapiens
ggaaagctaattcctgcctttgaggcttcccttgttcactgtgcccagtgtgctttcgtccgccctctgcctggccaatccttctcatttattgggactcatttgttactttttcctgagag

SEQ ID NO: 124091 - DNA, 122 bp, Homo sapiens
ttcgaccttccaaacattctgggagttttcctcctttaggccaactacagcgcagaggagcgctttctcctgctgggtttctccgactggccttccctgcagccggtcctcttcgcccttgt

SEQ ID NO: 124092 - DNA, 122 bp, Homo sapiens
aacccctcgtacatcagcctcagagctcctgggtgaccaggtgcaccgtcaatgagcagtcgtattttgaaaggaatctccttttctgagcactgggcctaacggtgggcttacactattcc

SEQ ID NO: 124093 - DNA, 122 bp, Homo sapiens
ctgacgcctgccttgcccaccccctgggttcgaagcaccttggccttcccagcacccccacgtgcacccctcagggccttggcacaggtggtgcccacgccgggcgcccttcccaggtctct

SEQ ID NO: 124094 - DNA, 122 bp, Homo sapiens
tggctgcgtgtgtagctgctgtgtcttctagctgtttctggagaccagaatgtgcctccccgaaatatgaagaattgttgggctgaagacaattaagaagcaagtgcaagagagctcctttc

SEQ ID NO: 124095 - DNA, 122 bp, Homo sapiens
ggtccgcgaggccctgtgggctcccaggtgcttccccgctctggggtcaagaggtggcaccggggtcgggaagtcggggagccctagctcccatcgcctgcacctgtacctgcaccgtggct

SEQ ID NO: 124096 - DNA, 122 bp, Homo sapiens
gaggctgaggcaggagggttgcttgagtgcgggagtttgagactagcctgggaaagatggcgagaccctgtctctacaaaaattagctgaaggtgctggtgcatacctgtggtcccagctac

SEQ ID NO: 124097 - DNA, 122 bp, Homo sapiens
atccatttcccacatccccttccccagcaactgattcaggatcagagccagatctttagacgtgatggattcccaagtttcgttcttaaaatagacaaactgaggccaagagtgcaccagcc

SEQ ID NO: 124098 - DNA, 122 bp, Homo sapiens
cgcgggagggcgcgcggcgccaaacttgcttcccgtcagcccccgcccgtcccgcgggagcgcgcacgctcgcgcacccggatcccggctcctgcatccagtcgccattcgggaggccgctg

SEQ ID NO: 124099 - DNA, 122 bp, Homo sapiens
acctcagatgatccacccacctcggtctcccaaagtgctgggattacaggcgtgaaccaccgcgcctggccatataatgttattattgaaggcacaaatgatcagggaagacttcatgaagg

SEQ ID NO: 124100 - DNA, 122 bp, Homo sapiens
taagcgaggtcgaagctcctccgcgcgtgccgcggcaccactcccgcctaacccaccctccggcaacactcgcccaccagctccccagtccaccggtctaaggaagacgtgcgcgcgccccg

SEQ ID NO: 124101 - DNA, 122 bp, Homo sapiens
ttcctgggtgggcaaaatcagccacactggcctggagggaagctggggaggggggaattgcggctgtgtatcacagaggaagacagcagcactgccactggggctgacctggaaggtgcgtg

SEQ ID NO: 124102 - DNA, 122 bp, Homo sapiens
caatctacaactatggtagatatccgatgctccatcccatctcactcgaaaaagctggcacggagaaaatgtcaaaaaggccagtttaacttagagtggcagctgcttctaatttagagggt

SEQ ID NO: 124103 - DNA, 122 bp, Homo sapiens
acaccgctgcgcatcactgtccacacgcggcagggtgactgcttctgttttctctacgatcgcatcacacagtggtgaagaagccagggtcctgacagcagcccttgccccgtctcccaggg

SEQ ID NO: 124104 - DNA, 122 bp, Homo sapiens
ggctccagtgtgcgactccaaccaaggccaggccccggtatcatccaagtgcggccttcccgccaggctttggaaaccttggtcagtttgaacttacttccatggccctggaaacggcaggc

SEQ ID NO: 124105 - DNA, 122 bp, Homo sapiens
ggatggtggggcagctgcctagctggagcctgggactcacgtgcccccaaccccctctctcgcagagttatgtcatgcccaggccagcagggggctccatgaggattcatagaagatgcccc

SEQ ID NO: 124106 - DNA, 122 bp, Homo sapiens
cctgccagccccagccccagccccagcccccggcgctcacctcgccctgaatcagcggcacggccccgatggccttctgcagctcgcgcacctcatccaccgggcccaccatgagggaagtg

SEQ ID NO: 124107 - DNA, 122 bp, Homo sapiens
acattcaaccacgtccttacaccgataacgtacacccattggttgtctagcacagaatagcgaggttctgcacggcgagtctacctaacaacactcttcagagcaaaccccgtttcggcgat

SEQ ID NO: 124108 - DNA, 122 bp, Homo sapiens
tgtcctggactcacagaaactcagggctatggaataaaggtaaatttaaaacaccacaagcgggagtcacagataccttgtttgcaaaagtgaaacttaggagctttgtgagtcctgttgta

SEQ ID NO: 124109 - DNA, 122 bp, Homo sapiens
ccgtccaatgtgctcctggatgccaactgcacagtgaagctgtgtgactttggcctggcccgctccctgggcgacctccccgaggggcctgaggaccaggccgtgacagagtacgtggccac

SEQ ID NO: 124110 - DNA, 122 bp, Homo sapiens
tctttggaccaaacaatacaatcccacgacatttttaggagggttactgcttttcgtaaccgactggagggcataaacagtgttgtagagctcagagaaatcttactgtgttggaagaacag

SEQ ID NO: 124111 - DNA, 122 bp, Homo sapiens
gctcggctccccacgccaccaggcagctgtgttggaatatttcacagattatctgttctgcggccctctggtatgtgggaatttttttttccctgggatttttgcaggtcgtcattgtctct

SEQ ID NO: 124112 - DNA, 122 bp, Homo sapiens
gatcacctgcacggaaagtcctttgctcattttgtggatctgagttgctgccaacttttccgggtgttcatgttcagaaggagaagcaagatggccctgttaaaaagtcctacatggcattt

SEQ ID NO: 124113 - DNA, 122 bp, Homo sapiens
cacaaggatgggtcagcgctgcgcagcgagggccgcctcctcctccgggctgagggtgagcggcacaccctgctgctcagggaggccagggcagcagatgccgggagctatatggccaccgc

SEQ ID NO: 124114 - DNA, 122 bp, Homo sapiens
cacagacaatattgacagtattcataggcaaagaaattatatggtgacaacactactgcacgtacccataatcaaacctaaagtgttttactcaaccaatacaatagataaatctacaggaa

SEQ ID NO: 124115 - DNA, 122 bp, Homo sapiens
gccgtcgtttttctgaaactcgagctgcgagggggagaccgcttccgcccgccgaccaggcgccctgacacatcctaggcaggcctggggctgcgtcccgcgacctcctctccttcccaggc

SEQ ID NO: 124116 - DNA, 122 bp, Homo sapiens
aaataaaaaaaaagaaccccaaacagcccactgtgagccatggtgaccccaaatctccagcgtccctgcggggtcccaggccggctcagtgcaggtattctcgcacagtgagctccttcagg

SEQ ID NO: 124117 - DNA, 122 bp, Homo sapiens
aaaaatgttccctttctcctgctttgtggtgtccaaactgttggaagaatgaatgagtcacgctgactcgaagacttgacatcttgaaggctgacagctgtggtgtcactcaaaaccaggaa

SEQ ID NO: 124118 - DNA, 122 bp, Homo sapiens
cggaatcgcgccctctgctggagactccggtgcagcccgggaagcctcgaatccggattccggagctttcttgctgcgctgccgagtccgctgtccgaagctgtttaattccctctagtggc

SEQ ID NO: 124119 - DNA, 122 bp, Homo sapiens
ctggcctgattcccgcatgagtattagggtgatcttaaagagtttgctcacgtaaacgcccgtgctgggccctgtgaagccagcatgttcaccactggtcgttcagcagccacgacagcacc

SEQ ID NO: 124120 - DNA, 122 bp, Homo sapiens
tccattggaaggtcagttgcagtgcagcccttttccggggtaataagtttttaatgtagacgcaattagtgaataagcagttgattagttcattacgaaaatagtgaaaacaacaccatttg

SEQ ID NO: 124121 - DNA, 122 bp, Homo sapiens
cagcagcccccactgggccaggtgggagccgcagcccacgcctcacagacctctgggtcccgcggttgcccccacagaccctttcagcagaccgagcacctttgggggcctgggcagcctga

SEQ ID NO: 124122 - DNA, 122 bp, Homo sapiens
tagtgattctggccagggtctccatcatcaacctggattaatgactgatccgtggcgccccgtacctgctctgggctctggatgacattgaatccaggaatagactccagcttatccaaggt

SEQ ID NO: 124123 - DNA, 122 bp, Homo sapiens
tctaagtggtcaatgagccagaccagtccatgggccagcaactgtgtcctacacctgacccggagctagggtgtgtgggcacacacccatcatcttcatgggcccctcttctttcgcaggtg

SEQ ID NO: 124124 - DNA, 122 bp, Homo sapiens
ctcagacactcccagccctctctgtctcacaggtgcggaagccaaagcagggccggaagccgctgctttgtctttgtcctggggcgacttggggcccaggaaacagactcagaattcagggc

SEQ ID NO: 124125 - DNA, 122 bp, Homo sapiens
aactccaatttgggggtttaccctgtgacacgtgtactactgctaatgggcattgtgtcccggggtcaagcacccacacctcccctctcttctcacgtacaaaatgagagagttgaatctct

SEQ ID NO: 124126 - DNA, 122 bp, Homo sapiens
gtgtgtgttccccgcccccggccggctccctcatggaaggcaccctcccttcttggctgccggctcccagggtcacgaccccaggccccaccctggagtggcagccccggcttggccccttc

SEQ ID NO: 124127 - DNA, 122 bp, Homo sapiens
agggggaggggaagtggccagcttggggaggacgggggaggggcaggaaaatgatggcaccgaccagacaccgagaaaccggacctgcagcggcgtctccccatgcagctctgagccacagc

SEQ ID NO: 124128 - DNA, 122 bp, Homo sapiens
gttatagcgcccaggtgccacgtttcagggcctaccagtaataagtgactgtgcaggccgcgcacacccgctcggctggggcttcgcacacctcacagcagagtctgcgccccttggggact

SEQ ID NO: 124129 - DNA, 122 bp, Homo sapiens
cagtactctataccactacaaaaacagtcataaagagcttaacatactcagcataacgatcgtggtttactttttgcaagccatgtatctttcagttacattctcccagttgattacattcc

SEQ ID NO: 124130 - DNA, 122 bp, Homo sapiens
cacttgcacgcgtatttttctggcgtaaatcggtgctgatgtgggatttgcgcgtcccaacgctggcaaggtacgccgcggtggtggtattggctgtgccccggtagccctcacccttcccg

SEQ ID NO: 124131 - DNA, 122 bp, Homo sapiens
ccgccctttgctgatgagttcgcttctctcgtcatctgcctcgtcccccttgctctctgccgcggattgcacctcagggctcagtcgactggagtccaggctagtcaagtatgcagcagacg

SEQ ID NO: 124132 - DNA, 122 bp, Homo sapiens
tcacacaccatgaaaatcgatcctctcctctacgcagttaccccatcatgaaaggttgctcgtagacactcgacattttctcacacaccatgaaaatggaacctccccctctacgcagttac

SEQ ID NO: 124133 - DNA, 122 bp, Homo sapiens
aggcaactgaggcacaaggctggcatttctgaaccttgcccctctgcaaacacaagggggcgatggtggcactccaagcaaaggggcgtgtgggtgctgcaggaggagcacagagcactggc

SEQ ID NO: 124134 - DNA, 122 bp, Homo sapiens
aaccccatacatatcttatcaatcctctagatatgtctgcatgaagactcagatgtgtgccgggctgggtgacattgtcagaggtcatcctcagcagggattaagtttgtatatctccactt

SEQ ID NO: 124135 - DNA, 122 bp, Homo sapiens
ccccgtccggtgtgccatgtgtatcctcagcccacagagcccctgctgctgtcctgtgaccgggaatttgtacacagggtgcgcactcacatgacctcatcctagttcctgctgttgcccaa

SEQ ID NO: 124136 - DNA, 122 bp, Homo sapiens
gttggcctggctggtgctgagctccagcggccggttagggagttagagccctagaacccccgcttggcaggacttctgaagacccgggatgaggttctgcctttataggatgctcagtgtgc

SEQ ID NO: 124137 - DNA, 122 bp, Homo sapiens
ggggaggctccgggaggccgggcttgggtgggcctccaagattgttcccacacccctgcccgctgcaaacccaatgcctggaggaggagaccgaggtccaagctaggaggttgagactggct

SEQ ID NO: 124138 - DNA, 122 bp, Homo sapiens
ctcttgtttccttcatctcctccccagctcaggccttgttaccattgttcaagtggacagcgaatttcaaaccatttgaatttgaatatcacctaattcacaagatttgtgtaaagaattct

SEQ ID NO: 124139 - DNA, 122 bp, Homo sapiens
ggcgcccttagatgctgggcatcccagcatgcgttgcgagatcccaggtcccagcaagcgcgatctgaccagctgggacagctcccaccgaggaaagtggtggccgtgagtcctcccggtct

SEQ ID NO: 124140 - DNA, 122 bp, Homo sapiens
cgggtactgcccacgcgaacatatgctgccctgcccgctggccgcactggcttcgcgccgcgaggaccccaggtgtgggcagcctcggcccagccggcttgaccttgacctgcccggctgcc

SEQ ID NO: 124141 - DNA, 122 bp, Homo sapiens
agcttcggtagatcctgccggttttcccatgcgctgtgcctgtctgcactccaccaacggcgagcggaccttccggtagttaaacatcttcacgaactcttggactttcctgcacacacaga

SEQ ID NO: 124142 - DNA, 122 bp, Homo sapiens
cagcagttgggatgtgtcccttctgttatctggcttccagatcccatattgaaaacagcacgcattgcaaaggctctaacctcctaacgctacagaacacctgcacctcagcacaccagcat

SEQ ID NO: 124143 - DNA, 122 bp, Homo sapiens
tcacagccaaggagagacaggagttgtccttccaaggagacaaggtgtggatgcctgattcgtgtctaacttttactttgcagagcacgcccactctctcgtctcacctgacccagcagcag

SEQ ID NO: 124144 - DNA, 122 bp, Homo sapiens
tccctttccttccctccccgcgggccagcggctttggcgctgccctgctgcgcggcggggcgacgcggcgacacctataggattgcttccgggcactcctcagccaggaggtgctggcctgg

SEQ ID NO: 124145 - DNA, 122 bp, Homo sapiens
aaatttttctcactgcgacctacagaaacacactgtagaacacctcctagtacactcacacgtgtgtgtacacctgaagtgtcaagaaacaataccctaagtgcaacaccctctgatatttt

SEQ ID NO: 124146 - DNA, 122 bp, Homo sapiens
ccagccctgggatccaatccccgggacaaaaagaggctctgaactgtgggcatctggccccgcctcaaatgtgtgcggggtgcccacctgctaggcctaggccagggagaaggaggaagctg

SEQ ID NO: 124147 - DNA, 122 bp, Homo sapiens
gaaggaaagaaaagcatcagaaataagagtagttgactaagaagagaatgtgggtaggagcgggcagtttgtaggagacagtaacacaatgagacaactgataaaaaggaagagaatattta

SEQ ID NO: 124148 - DNA, 122 bp, Homo sapiens
cagacgggccgggctgaggctggggcccggccggagtcggggctgggcggacgggcgggtcggtgagctcctcgcacccctcacaggttcccgaagtcgctcgcggccgcttgtcctcctct

SEQ ID NO: 124149 - DNA, 122 bp, Homo sapiens
agagaggagagttcagagatagctggtgcagcttctcatcaacaacagaattgactccctcgctgctcctttcccatcatctaagccagtcatcgattttccccaggagtgtttctaggtat

SEQ ID NO: 124150 - DNA, 122 bp, Homo sapiens
gcttccgcactttaggtgcataaaggggacactcaagggagtcctcatggggtgggcctgcgtcgcattcccatggctgcgagatgccgcagggtcaccgagagggcaaacgaggcaaagcg

SEQ ID NO: 124151 - DNA, 122 bp, Homo sapiens
gctggctccgccccagaactgcgcaacctccccgcccacatccgcgtcctaaccaatgagcgctcgaaatttgggtccacacccccgtcacgccccgccccagactcgcgcgcccgtgacgt

SEQ ID NO: 124152 - DNA, 122 bp, Homo sapiens
agcatccctgcttgggtcactgcatcccagtggccccagcccaggcctcagaacccaccccggcctgttgtgacttgttcagcctcctgcctgccccgggtgaagccacgctggccctgccc

SEQ ID NO: 124153 - DNA, 122 bp, Homo sapiens
actcacaggtgaccagaaactggtgcctgccccaaggactcctggcacagcaaagtagcacggatcccgggtctcctgagctctctggattcattcagcaaacacactaaagatcctctgag

SEQ ID NO: 124154 - DNA, 122 bp, Homo sapiens
agactgcctggccaaatcctagcttttctacttatcagctgtgtgactttgaataagttgcgtaaactctgtatgcctccactgtaaaatggagttgaaaatagtgtccacatcttggggta

SEQ ID NO: 124155 - DNA, 122 bp, Homo sapiens
aaagttaatgaaaattatttcaaagtctcccactgcatctctcaaacctttggaggcaggcgcatagtcggaggaacttccccattgcctcgtcctctcccacccgcctccctctcactttg

SEQ ID NO: 124156 - DNA, 122 bp, Homo sapiens
gggggtggactgcgccttacctggggcggggtggggcttaaggagtggtcgagactgaggcggggtgggaggttcaggttcccggggcgccttccccaacccgccccgctttccccgtccct

SEQ ID NO: 124157 - DNA, 122 bp, Homo sapiens
gcaccaaataaacccttggattggcttgatccaatgccatgtttccaaaacctacttgcccgtgggacaccttagtccataacacaggttggcatttcttctagagagtgtgctgtgaaaaa

SEQ ID NO: 124158 - DNA, 122 bp, Homo sapiens
gcggccggcaggcgcggcactttggactctgcggtgtgcgcctggggtcccggaccggggcgatcctgctgcacactcgggtaggagctttgagtccagctttctgtcaggcagttcttaca

SEQ ID NO: 124159 - DNA, 122 bp, Homo sapiens
gggacacagccacagacagggagaaggcctctgagaaatccagacagcggtcccagaactcgagcattcggccagaaaaacggccactcagggcagtgctgacctgtgctgcaaggaaaggt

SEQ ID NO: 124160 - DNA, 122 bp, Homo sapiens
aaagcagtccgcgctccaagcaacaacttgcactttttcttttcttccacagaaaccccgcgagatgtagatacattgtttgaggggcaactgcattttcaggaactcctcaaggatgaaat

SEQ ID NO: 124161 - DNA, 122 bp, Homo sapiens
ggaaagcgtgtactctcgaatccacccaggagtgcctgactacagtcctcctgcagagggcgctgtggagtcccagacacgagtgttaggtggaatcgggctgattgcccatcacgtcttgc

SEQ ID NO: 124162 - DNA, 122 bp, Homo sapiens
cgggggtggggttgcgggggtgctttgggtgacaacggtcaataatgaaggtggctgcggcgcggcggcaggctcagctgcgccgggcgggggcggcgccggggccgcgcctgtaggactcg

SEQ ID NO: 124163 - DNA, 122 bp, Homo sapiens
ttttagaaatatccccaaatatcaaggacatctgaatgagtgaaccatcagaataaggagcgattcccacagagttccatcccacagggaagggacgggaccagcggggcaggcctgaagcc

SEQ ID NO: 124164 - DNA, 122 bp, Homo sapiens
ccgtctgctgttttactaggtggacgtgcaagtcagagaaatggtgaaactcctgttttccgaagatcagcaaggcggttctctggaacagctgctgcagaggttctcatcacagtttgtga

SEQ ID NO: 124165 - DNA, 122 bp, Homo sapiens
caattttagggacaacttaaaaagtgtattcaacagcaatccaacgaaaagcacatgtaacgaatgtggccctgggagtttttctccacagctgcctctgatgcacagatacagctttaggc

SEQ ID NO: 124166 - DNA, 122 bp, Homo sapiens
tttccccgaagacatttggtgtcagtataaggacggcttttcctcgcacgcagcgcggctcggtctcgccgccgccgcacgtccccgcaccgccaggcgctcgggctcctccgcagcccccg

SEQ ID NO: 124167 - DNA, 122 bp, Homo sapiens
atgtctgtcctgaacattcactctcagccttgcgctccagcaccgtgtgctcctgccccccgccaatctcatgtggcctggaggaaagcagattttggacctgtcaccagctgtgtgacttt

SEQ ID NO: 124168 - DNA, 122 bp, Homo sapiens
cgtgaagccatcttcccgttggagctctcaagcctccagtccgggggccctcgctcgctccgcccgctctcccaggactcctctctggatgcccgctctctggagaacctgggaaatgggaa

SEQ ID NO: 124169 - DNA, 122 bp, Homo sapiens
agcagtggcccaacccgccctcaaccggaagtcttttgggctccggcttcgccgtcgccccgccccctggcctttgccccggtcgggcgggacttcctgtgtcgtatttccaaggactccaa

SEQ ID NO: 124170 - DNA, 122 bp, Homo sapiens
gcaggctcccgtagcctcctgggaaatgtagttctccttggactctagcctgtttgctcgcggggtagcggactacgctcttccagctgtcggacctgggaaattctcctgtgctaaatccc

SEQ ID NO: 124171 - DNA, 122 bp, Homo sapiens
tcatgtgacagatggggaaactgaggccttgagaaggaaaaaggctaatctaagttcctgcgggcagtggcatgactggagcacagcctcctgcctcccagcccggacccaatgcactttct

SEQ ID NO: 124172 - DNA, 122 bp, Homo sapiens
ccgtcctccccgccctggcccggccccgccccccagctcgtgcgcgcgcgcgcgggagagcggccgctcgcccggaagtgacgtaactctacggcctagcaaccgttgccaaggagctcgac

SEQ ID NO: 124173 - DNA, 122 bp, Homo sapiens
acactgcctcctcgccccgcccccgaacccaagccattggttgccgggcaccgccccattcgtctattgggccaaagaagatgccgttcggtcacctagaatggcatatgtggtttttattg

SEQ ID NO: 124174 - DNA, 122 bp, Homo sapiens
gtgatcctcccatctaaacctcctgagtagctgggattacagggcaagtgctcccacacccggcgagacataaatctgttcttcatgagttactgcgtcttaagtactgtgttacaacagca

SEQ ID NO: 124175 - DNA, 122 bp, Homo sapiens
gtagctgggacggggctgtcactccccaggggccaggagccccgtgtgtgggcagccagccgaggcagcagcgggcagagacatgcagggaagtggccctgcggccatgactcatctcagcg

SEQ ID NO: 124176 - DNA, 122 bp, Homo sapiens
ggacgctttggagaataaaagtgagtttgaacttggttgaagtgctgcgatgtgtgcactcgtgtgaacctgttcctccagcaggggtgtctgcacagaaggacctggaaggtccaccaggg

SEQ ID NO: 124177 - DNA, 122 bp, Homo sapiens
cctcccccaacccagtctccctctcgccgacttccctcgtccctccgccctcccggccgccgatgacgctactgatttcagccaatcatgaggcaagaaagtagtcacgctcacgtaagcaa

SEQ ID NO: 124178 - DNA, 122 bp, Homo sapiens
gactgtttccaagctaaaagaaatgtaactaacttaggaaaccatttaaataaacataaacggacaatcttagtgggttttggccctgtgtataccagcagtgtcagcagctcctaaaccac

SEQ ID NO: 124179 - DNA, 122 bp, Homo sapiens
tgacttgccccaaatctctgatcattttctagacattgccctaccctggtgacttagggtcgtgactgcaccccgggctcgcctctctcggctctggctggccacgaccttccttttgaagg

SEQ ID NO: 124180 - DNA, 122 bp, Homo sapiens
ttgaacagtccgattttcagtgcggtcccacacagatgggacgcggcttaggaggaatcccgggctgcgggcattccttggcccagtggccagatttccggcacgtgtagcaagctcctgtg

SEQ ID NO: 124181 - DNA, 122 bp, Homo sapiens
gtcggctgcactcccgggctcctggctttgcctctgggatcccgaggtgtccacatcagacgcatgttgactgagacctagagtcatggatgtatgcgtccgtcttgccctgtggctcctct

SEQ ID NO: 124182 - DNA, 122 bp, Homo sapiens
gagcagccggcacctcgattccctagacgccctcccgcgcgcctctctctccccttcctccgcaagcgtcacgtgcagggttgcctgtggcactacatttcccagctttcctcgcggtaaag

SEQ ID NO: 124183 - DNA, 122 bp, Homo sapiens
gtcccgctgggcccacccgatgaaacccacctgggaggggcgggacctgtgtggtgggagcgctcttggtagaggatgcgatgagccccagctgagagcgaccagcctcggcggcacctttc

SEQ ID NO: 124184 - DNA, 122 bp, Homo sapiens
ggggtttagtgtgctgtccaaggccccagatgagattaggggtgggggctgcgtaacacccgggctccagaccagggctgagctcacctccgccgctttcccctcactcccactcttgaaat

SEQ ID NO: 124185 - DNA, 122 bp, Homo sapiens
taggaaataaactaaaaacgtccttatgccttaaacttatgagtaaggaaaataacgattcggggtgacgcccgaatcctcactgctaatgtgagacgaatttttgagcgggtaaaggtcgc

SEQ ID NO: 124186 - DNA, 122 bp, Homo sapiens
ctggtgaggagactcccttctaatggataggaccgtgcagacgataaagcccacagaaagcgtctctttctacgctcggccagcctgggttttgtggcgccagcagcaggcgctgtggttcc

SEQ ID NO: 124187 - DNA, 122 bp, Homo sapiens
tcaatttgccccagtggtaccattttgtgtaactatagtatggtatcagttgtcaaccttcgatttttatttagcagaaattgactgagcagctattatatgctagctctttgaggtataaa

SEQ ID NO: 124188 - DNA, 122 bp, Homo sapiens
ggatcaacctcccagacaaaaacgtccctcctccctcgatagagcctttgactcctccaccgcagtatgatgaagtccaggagaaggcccccgacacccggccgcccgactgaatggcccca

SEQ ID NO: 124189 - DNA, 122 bp, Homo sapiens
tccatgggatacatagatgtggagcctcaggagggcaggggtagtgtgatcagtgtcaggcgccccaaagcatttattctgtgccaggccctgtgctggatgctgaaagtacggaagtggat

SEQ ID NO: 124190 - DNA, 122 bp, Homo sapiens
aggctgatgggaagagccagacgaggcctgggaagatggatccgtcccagtgtggccgcgcggctgtcaggagggcacggggactgggcgcggccgtcaggaaggttcggggactgggctgc

SEQ ID NO: 124191 - DNA, 122 bp, Homo sapiens
gagaccagacttcattctacgtgttcctcatcagccagagccaggggataagactctggccggtaacgacaagacatgagccagagccacccacacatgcacacacaacactctcagcaaat

SEQ ID NO: 124192 - DNA, 122 bp, Homo sapiens
gaccaagggcacaggagagtcagtggcagattcaaacttcaaggctctgtcgacctgccccggaccccatcctcctgacaccacacagaacctcctctcaggaaatgggggtaaggctgatg

SEQ ID NO: 124193 - DNA, 122 bp, Homo sapiens
cccctgtccctgctggtcggcgcagtgcgtagcttaggagcctcgaggacagctgggacccgacgggcaagggcgggcctcgcgggcaggctgggcagccctcagggaacaggtccgtgcgg

SEQ ID NO: 124194 - DNA, 122 bp, Homo sapiens
tgacctcgtgatccacccgccttggcctcccaaagtgctgagattacaggcgtgagccaccgcgcccggccgaccaggaattatcttaaacagaaaaagaatactctaaggaggggtatacc

SEQ ID NO: 124195 - DNA, 122 bp, Homo sapiens
tggcctcatctccctcaggctccatgcaaacgttcaatttcactcctgtattatgtggagcgcttttgctctctgaaacctattcaataactggccttgtttgcctcttcaaagatgcttta

SEQ ID NO: 124196 - DNA, 122 bp, Homo sapiens
cgagcctgtacacttggaggagccctaagcgttaggatctgctgcgagggctgcctggaacggaggtgagaggatacaagtggcccggggcaagcatagtgaatcactggctaatctggcct

SEQ ID NO: 124197 - DNA, 122 bp, Homo sapiens
aagaaaacctcatttggctcgctgaaggatgaagaccggattttcaccaacctgtacggccgccatgactggaggtgagacagtgcccttagtgtgttgggtcccggagcaaggtgtcccct

SEQ ID NO: 124198 - DNA, 122 bp, Homo sapiens
ttctgcccccacccacgctgcctccgtagttaggaactgagagcggcgagtgacaggtaacggggcccagccccggtgtcccgtgctgtcccagcccaaggagggccccgtgtgcggcacag

SEQ ID NO: 124199 - DNA, 122 bp, Homo sapiens
ccccagacagcggcaaggacgaggtggcggagtggggcgggaggcatggtctccacctaccgggtggccgtgctgggggcgcgaggtgtgggcaagagtgccatcgtgcgccagttcttgta

SEQ ID NO: 124200 - DNA, 122 bp, Homo sapiens
ctggccattgtatttaggaaaaaccagacatcacctcatggacgtctcattgaaggggaccgtcagttattccattcattctggcaaattttctttttagctttggttgcagcaggaagaga

SEQ ID NO: 124201 - DNA, 122 bp, Homo sapiens
gcaaaagccaatcagaagttggacctctttggtgagttcaaactgtggttttaggggatacggaggctggcttagttcagtccaggatcttagaacagccccaatgctccaggcccctcagc

SEQ ID NO: 124202 - DNA, 122 bp, Homo sapiens
gcccgccgagcggccgcaccatataagggcacgcggcgggcgccgggctgagctggtgcgcgctcattggcccgcgcgtctctcggcaaccggctctcacgagtggaaaccagccagccgcc

SEQ ID NO: 124203 - DNA, 122 bp, Homo sapiens
gacgggctgaaggggaaactttgcgactggttcagggctctttgggggagccgaggctgccgaggttacccgggtttctttccccttttaggtttccctggcgagtcgtctggggtgggcag

SEQ ID NO: 124204 - DNA, 122 bp, Homo sapiens
gcgtggtgcagagcaccggccagatgcagtgcaaggtgtacgactcgctgctggcactgccgcaggacctgcaggcggcccgcgccctcgtcatcatcagcatcatcgtggctgctctgggc

SEQ ID NO: 124205 - DNA, 122 bp, Homo sapiens
ccgctgtgacccgaaagtattaatagcacccgaagggctcgcccacgacaagtcatttatcggcttcaaataaaggtttctggaacaaatacagatattgacctttaatcgtatcttttgca

SEQ ID NO: 124206 - DNA, 122 bp, Homo sapiens
ccacacgcggctctgggctcggccttcaggtcgctcatggggcggcaaggctgtggcggacggcagtgtgtgatgctcacgcggggagcagcactgggtcacctgcacctctgaggcagagc

SEQ ID NO: 124207 - DNA, 122 bp, Homo sapiens
cggcgcttctttgcccccatgggatattgggaaatgtagtcttgagggggcactgcatgacgtgtggttttcatcttccgcaggcgtggcggtgtttactggcgccttgatctatgccattc

SEQ ID NO: 124208 - DNA, 122 bp, Homo sapiens
acccgccggctccaggtaggctactcctcaggtaagccccgccgccagccgcgacgtcgtcgcagacaggcaccgcccccactcgtgcggcgcgagtagtcctgcccctccgcgttgtctcc

SEQ ID NO: 124209 - DNA, 122 bp, Homo sapiens
gttggcaggtggggggcgggaacaaaacaaagttgttaccctagcaacggagagacgccacgctctgcacagtctattttcggagcctagccagagacgggaaaactgaccaaggtgaggaa

SEQ ID NO: 124210 - DNA, 122 bp, Homo sapiens
tattgacttcagccaaagatcattggtatttcctgagaccggaaagatttgggccttgtgcgtaaacaacatcttggatcaggcacggaaatttcaacagtacttggcaatttcctagcagc

SEQ ID NO: 124211 - DNA, 122 bp, Homo sapiens
gcacgcggaggatgcctcggctgtgcaagtgcaggaagttgaagatctcagagggcatggcgtggaagccgggacgcggcttgacgttgtcatagtagtggtgagtgatgtagaggcccgag

SEQ ID NO: 124212 - DNA, 122 bp, Homo sapiens
aggaaaaggcaggaaaagccccaaccagctgctgcctgtcttggtcccctcatcaagtgccgccaatgctgtaaaagtaaataaacactggaggagccgagcattcatctagcgaggtttga

SEQ ID NO: 124213 - DNA, 122 bp, Homo sapiens
ataaatgacagcatttgcaggctaatctcttattaagatgcttttcaggttttacagaaacgtccactttctcaatgaatattcaagtacatcgattaaaaagtcaaaacatgcatggtata

SEQ ID NO: 124214 - DNA, 122 bp, Homo sapiens
cactgcactccagcctgggcgaaagagtgagactctgtcttggctgggcgcggtggctcacgcctgtaatcccagcactttgggaggccgaggcaggtggatcacaaggtcaggagatcaag

SEQ ID NO: 124215 - DNA, 122 bp, Homo sapiens
tgctcctctggaggagaggcctggctgggtgtggggctgggtggggcctggctgggacggcgcagagagcatgggctctgaattaggaggatctggtggacctttccttgtgcctttacccc

SEQ ID NO: 124216 - DNA, 122 bp, Homo sapiens
gccccaattccccgcccggcgcctggggcttggctgcggggctcggctcccagccgagggcgcagggctggccaggcctgctttggctgaggtggagatctcgctctcagggattgttgggc

SEQ ID NO: 124217 - DNA, 122 bp, Homo sapiens
gcttatcaggaactttgaaaataaaatactccattaactttctcgtcactcctatttacacgctgctttagctgatgcattcgcggtatttgggttgcactgtataagagtatttttgttct

SEQ ID NO: 124218 - DNA, 122 bp, Homo sapiens
agcagcacagtgggcgggaggccgctgagcaaccagcagcctagggcatttgggtggggacgtgcgacccccacacagaacagagccgtctttctctctgcgttgtgccgaggccccgcagc

SEQ ID NO: 124219 - DNA, 122 bp, Homo sapiens
tccagttggaaatgaccctctcattgttgacagcacactagaacaagtttgtccaacttgcggcctgcggcccaaggtgagttcagggttccaacaatcaagtcaaagatgcctggagggag

SEQ ID NO: 124220 - DNA, 122 bp, Homo sapiens
ccatgagtctgagcttctgctaaatgccttttctaatttagttttttcaaagtttttgagcgttcttttgggttattcaataacatggggtttcctgatattgtcttattctctatttgttt

SEQ ID NO: 124221 - DNA, 122 bp, Homo sapiens
ctgctccccccgccggcctctatcgcctgcagtaagtggagccggacttgcgagctggggcgcgttaggggcccagggtcaggatgggggaggcgaacctggagatcagaggcaaccccagc

SEQ ID NO: 124222 - DNA, 122 bp, Homo sapiens
tttgaagaagacagaataccctagaacacagcttttaattcacaagatgctattttacatcgagaattccacacccaaccaggcagcagtggctgacatagatctgatgacccttggaggtt

SEQ ID NO: 124223 - DNA, 122 bp, Homo sapiens
ccagcgcggtccctgcgcagccgccccgcgcccactaggtggcgcctgcgctctagtgggcgcttcacaggcgcagcgacagcgacagcgacagctcgaacctgagtcccaggattccgggg

SEQ ID NO: 124224 - DNA, 122 bp, Homo sapiens
cctgccgcggccccgcttctccctctatctctcagcccaacttcagatcggtgtgatccgcgtctattctcaacaatgccagtacctcgtgggtaaggctgggaaccctcaaaggtggggcg

SEQ ID NO: 124225 - DNA, 122 bp, Homo sapiens
atggcagaggaagacggatccctggtctcttttggctgtcctgggagccccagtcccatccgacctacaggcccaaagacacccaaccacaggccagatactgggttacaaagaggtaggag

SEQ ID NO: 124226 - DNA, 122 bp, Homo sapiens
aggcacaggaaatctacacaggccacagaataatttgatttgggctttctacggagtgcgcgccgtctctgagctttcgtgatttcatcttccggaaggcgaaaatcatccctctgctgaat

SEQ ID NO: 124227 - DNA, 122 bp, Homo sapiens
tcacagctctcagcgggggcgcggtcagtcggccacagcggtggagatggcgttgaaagccggggatgatgactgctgcgctgggatgactgacggctgagccaggccctgctgctgtgctt

SEQ ID NO: 124228 - DNA, 122 bp, Homo sapiens
cttcaatcgtcttggcaagtaactgtgtgtgaggaaaattatacttgtatacttcattagcgacagtgttgacatcaatggcagccaccacttgtgcaggtatacagctttctgtaatgata

SEQ ID NO: 124229 - DNA, 122 bp, Homo sapiens
cgatttctgggaatgccgtcttcctcttaaagcagcagctgacgcaggctgatgccagcgcggattctgctgtgctggaagcaagcacgttccagtaaaggcggcaagcgctcctcagcctg

SEQ ID NO: 124230 - DNA, 122 bp, Homo sapiens
ttctaattcccagtgtagtgatattgatctcacaccactgatgcagtgaaagtaataaaccgagagaccgctataaactgaggtcacagctgtcccttcttctcaatgcactgaagaaagcc

SEQ ID NO: 124231 - DNA, 122 bp, Homo sapiens
atatccaattatccaaaactaattaaagattgtcttaggctcaatctcaaggaaacacctcggtagtctctggatttactggaagaggtgtgtatttacaaagacaacaattttgttgaaac

SEQ ID NO: 124232 - DNA, 122 bp, Homo sapiens
tacaaacgcctcatgccctgtttcccctatttaccaagacctagcattcctgggactcaccgttcccccaattccccctgagctcaaaccttcctggtccctcaccccatcctcgacccctg

SEQ ID NO: 124233 - DNA, 122 bp, Homo sapiens
attgtgtagttttccgaattgtgcagaaaaagaaaaaacaaaacaaaacaaaacaggtgccgtttttttgggggagtggggacctgtaaggtttaaaccacttacggtctcataggcctcac

SEQ ID NO: 124234 - DNA, 122 bp, Homo sapiens
caccggccgaccctgggaaagccggggtccccggagttgcagctcccggagctccggcggcggctccaccggcgaaagagatcccggaggtcctagtggacccacgcagccggcggcgctat

SEQ ID NO: 124235 - DNA, 122 bp, Homo sapiens
cttcttgctcctgggcgcgaggagccgggcagcttgggaccttagccctaatcgtcaccccgtacttgggatgggaagtaccgggaagttaccttaggtagcgtagtttcctcttgctgaaa

SEQ ID NO: 124236 - DNA, 122 bp, Homo sapiens
gctagtaagtggagcagctgaagttggactgtgtgaccttctgcagccaggtccctgaaacggcttcaggacaccacttacgtctgtcgggctggcctcctctctcctgggagaccctagaa

SEQ ID NO: 124237 - DNA, 122 bp, Homo sapiens
agggttctggaaacgtcctgccctgagggcctgcgactttctgtatggagccttggatcgcgtccctggaaagggacaccaaagatttccaattccggagagcgggcccgaggaagggtcac

SEQ ID NO: 124238 - DNA, 122 bp, Homo sapiens
ggcacccccacctgcccggccgccctccgcgttcgcggtcggacaccgccgccaggcgctcggcaccgagcgagagctttttgtgtcactgagactccggcaccaaagggggtggggggaga

SEQ ID NO: 124239 - DNA, 122 bp, Homo sapiens
ggcagggggctgcggagagcagcacagtcacggacactgcctccttctccatgccacccgcggtttccacagttaaatactggtccacatgacatgtgaacacatggctcctataatggtta

SEQ ID NO: 124240 - DNA, 122 bp, Homo sapiens
ccaggcattcagagggtcaagggacttgctgctattaggtggtcaaggcagggtggaggacgggcctgtctgactccaagcctaggtctcgttcctagtgcaatagcatctaggacatgcct

SEQ ID NO: 124241 - DNA, 122 bp, Homo sapiens
aaggacaaggtcctgcctttggctccacattgccacatgacccttaaggcaagcaggtagcgtgtccatagtacttggttgcgacatttgcactacatccactttagttacttgatgagctg

SEQ ID NO: 124242 - DNA, 122 bp, Homo sapiens
ctagcgggcttggctgggctgggtcggtggacccctgggctggcggcgggagcagagcatcgagcggcttttagctggggttcgggcggaggacctgggacaaccgcgggcctcgctcctcc

SEQ ID NO: 124243 - DNA, 122 bp, Homo sapiens
cctcgcagagatgcctgtgtgggcctgcattgtatatttctgcgaaatagcgaatggacacgtttgctcagggtttttatggttgccaaagggggtaaaattacccagtcccccaaatctgt

SEQ ID NO: 124244 - DNA, 122 bp, Homo sapiens
ggcccccgggctccaggctcgcgcagcggcgtttcattagagccccgggcccgggccgcgcgccaggaacttccccgcacgcggcgagatcgacgatcccccgcccccagccccagcccggc

SEQ ID NO: 124245 - DNA, 122 bp, Homo sapiens
acggcaccgcttgtctaacaacaccgaacgctgggcccatccccagacgttccgattcagcgggtccaaggtggggctgggaatttgcatctctaacgagttcccaggtgattgtgatgccc

SEQ ID NO: 124246 - DNA, 122 bp, Homo sapiens
cgccgggttgtgcctcagactgtcagataaatcggcgggccgggccggcgggtcggtgagcgcggcccgggccggacatggcggcgctctacgcctgcaccaagtgccaccagcgcttcccc

SEQ ID NO: 124247 - DNA, 122 bp, Homo sapiens
cttcttggaaaacgtcatccaggctggaaggctcaggatctgggacatcctgcagggcggcggcagcctcctcttctaggacctgggtctgccagttacggctctgacggagccaggcccgc

SEQ ID NO: 124248 - DNA, 122 bp, Homo sapiens
ggccggggcgagagtgggcgagtctggcggtgcccgccgtggaggcggaggcggcggcgacgtggtcctcccccgccagcaccccctgcagggctcaccactgctccagctggttccagtgc

SEQ ID NO: 124249 - DNA, 122 bp, Homo sapiens
agggcggtccttccacccgatccggctgttctgcgacctcgtggcctctgagtgggagctcggactcaggagtgctgttgccagcgcctgcccagacgccctccgtagttttgcaacttgtg

SEQ ID NO: 124250 - DNA, 122 bp, Homo sapiens
ttccccggccccagtacctgggggagcctgaggcgcggtccggcagggcgatggccgcaacgaggctgggctccgagtagcgcgcgggcgggcccgtcctcctggctggctgccggcgcccg

SEQ ID NO: 124251 - DNA, 122 bp, Homo sapiens
ggagaagtttacagaactgagaaccatttagggttcagacgtatgcacacacttcctaaccgcgttctgggcacaggacactttgttgcaggtttagcttttctttcctgttccccttccct

SEQ ID NO: 124252 - DNA, 122 bp, Homo sapiens
aactggccaaaacctaccaaaaccaagatggcaacaagagtgacctctggtggtcttcaacgctatactcctaccacatgctgtgtcgacatcagggagttaactgtatatggtctacaaag

SEQ ID NO: 124253 - DNA, 122 bp, Homo sapiens
aagtgcagggttatctcagtacttgatttaaggctcctgcagctgaaaagctgccccacacggcggaccgggtggaggaagtcagctgtgctgcttaaccgtggagtctccgtcccggtcct

SEQ ID NO: 124254 - DNA, 122 bp, Homo sapiens
aacaattcaagggttttttagagaggatggtgtagagcataagataggagatctagagtgcggtaatctggattcaggctttgactcttggcctactagttttggaattttggaaaatcact

SEQ ID NO: 124255 - DNA, 122 bp, Homo sapiens
ggcggctcagcccgaaggcgggcgaagaaaggatgctgaagggcttcacccaaggtcagccgcttagctggttcatactctagcatgctttcaatcagatcgaagagctggtggtgttcctc

SEQ ID NO: 124256 - DNA, 122 bp, Homo sapiens
cagaatataaagaggtactcaaataatgatgaggacatcaccaaaggacataggagctagcgtgaagaggctcccactggagatttgggacaatctgagcaccaaaataatgacaggaaagg

SEQ ID NO: 124257 - DNA, 122 bp, Homo sapiens
cgccaccgcacctggctaatttttgtatttttagtagagatggggtttcaccacattggccgggctagtattgaactccagcctcaagtaatctgcctgccttggtcttccaaagtgttggg

SEQ ID NO: 124258 - DNA, 122 bp, Homo sapiens
tgtgcctgcatctctccctttttacgaaatggtgactcacacccataagccatcagagagcggacagacatttcaggagtttccaggtattggaaacaaatccgtgctggtccccagttttc

SEQ ID NO: 124259 - DNA, 122 bp, Homo sapiens
gccaaccgtttgtcagttcactttttctgccctcttttccggggtaatgccgggcggcttcgctgcctggctagatgaaggttaattcgggtcattggagaggatccgggagtgacagacgc

SEQ ID NO: 124260 - DNA, 122 bp, Homo sapiens
ttttcttgagaaccacaggcaggccactactccataagatctggttgctgctaacactttcgtataacttcattattcacaaactcataaatatgcacacaaatatacacatgtgcacacca

SEQ ID NO: 124261 - DNA, 122 bp, Homo sapiens
cagtacctattgcacgacaccccacgtccgcctcctgccattgccagcaagtgccttgtgcgagtacctggctgtgcttattaatccattatggtcgctctgtcactggtgccattatgtgc

SEQ ID NO: 124262 - DNA, 122 bp, Homo sapiens
aagccagctcactttatgtcctccaaactcaccctaacttctcgtttgggtctcatcccgcggggctgctgggaaataagctccgccaccacagtggttcctccgccctgtgggagtggggg

SEQ ID NO: 124263 - DNA, 122 bp, Homo sapiens
tgattgggtaatatctagaaaataggtgtttttatgctgaaatgtaggcgaaacaagagtcgtctataaaaagtattttaaaactgaaatgtagaagagttgactgataaaaagcagtggag

SEQ ID NO: 124264 - DNA, 122 bp, Homo sapiens
ccaaatccactaccggcaccacctccaaagccatagccgcctccagcaccagcaccaaaccggttcctgaagctgccaccactagtgctgatggatatcctcttggagccccccaggttgta

SEQ ID NO: 124265 - DNA, 122 bp, Homo sapiens
cccgccgccgctttcagttcgaccgcagccagactgcagcagacgcccataagagaagcgcgccggctgagggtgcaggagaggcgagagcgcgccccgcgccgcgcggtcccaggctggct

SEQ ID NO: 124266 - DNA, 122 bp, Homo sapiens
gcttggctggattgaaacataaagaacagaaagtgtccaaaatggagtttcctagaacttcgggaaaatggagcaggggttgtcagcagcgccctggccttatctctgaagtgtgcacggga

SEQ ID NO: 124267 - DNA, 122 bp, Homo sapiens
aaatcaccctgtcctcctgggtataaagcgcctgtccatctcggcgtgggagagaggagacgctcgccgtcccctgacccccagctcagcgccggctccaagcccagccaggtgggtgcccc

SEQ ID NO: 124268 - DNA, 122 bp, Homo sapiens
agacgcagccgaatcctccctcagagtccgccaggtgggcgtctcaggggtgggagtggccgcgtcgtgaagcggagagaggatttctctcctggtcctggagaaggcccccggcggccggc

SEQ ID NO: 124269 - DNA, 122 bp, Homo sapiens
ctggtctagcagcaggacacccaggactgtgggcattgtagtgaatgtcatcccaaggtccgtgtctgccagcatagccaggaagtagtacatgggctcatggaggctgtgatcattccaaa

SEQ ID NO: 124270 - DNA, 122 bp, Homo sapiens
ggcatcctttggtagtcttggtcttaattttcagagttttgtcgtctttgggctgaaattcggcttctttttgagcttccatgagctcagctgggctttcggctttccacacccagagccta

SEQ ID NO: 124271 - DNA, 122 bp, Homo sapiens
cccgggcttggccacctgcccaagaaacttgttggttgttgccctcaggtcgctcccgggcggggacacggaacccggccatggaagatccgtcgggggctcgcgagccccgggcccggccg

SEQ ID NO: 124272 - DNA, 122 bp, Homo sapiens
aggccagtgagttacagacgtggtggcatccctcccgcgttctggccttggagctggggtcggaatggtggcttgtgcaaggaattttattttaggtgagtgctgctcagggttcaaggtca

SEQ ID NO: 124273 - DNA, 122 bp, Homo sapiens
tggtgcacacctgctggcagcacgggctgtctgcacagtcgtcgacatctgtggagcacacgccacgggccccctggtaccaggcacctgcacgtgcacacgcccccacccacacacaactg

SEQ ID NO: 124274 - DNA, 122 bp, Homo sapiens
aaaaattgttttaatgtaggtacaatttctagcagctaacatttattgaggaaaaccatgcgcctagcatgtactttacatgggagtttggtccttgtaactgtgttaagtggatactggtt

SEQ ID NO: 124275 - DNA, 122 bp, Homo sapiens
caccagagagtggatttccggatcgcgcaatgcatgcgtggaagtgcgtccccggaagtacggaggccgacaggaagagaaggaaaaaagagaaggcgctgtcccgctcttgctacggtggc

SEQ ID NO: 124276 - DNA, 122 bp, Homo sapiens
gtatctgaggccatctggtggagagcagtggcatggtaaccgagggctcaaagtcgggctcgcatcccggggactcgcagagactggactgcgcctgcggcaaggaaggacggagcagagcc

SEQ ID NO: 124277 - DNA, 122 bp, Homo sapiens
tatgcaaaagggccgaagtgacatttggtttctcttcagcactacttactcaaagaagaccgatgcgtcctccctcagcttagcgagtgcaactgcaagtcagaggacggtgcacgggagaa

SEQ ID NO: 124278 - DNA, 122 bp, Homo sapiens
gtttacattaggaatgcttccacattctctcaaacaaattttagtcacagttttgaataacgtactctggctcagccattgcaggtctcaagccgttaggtttcattttcctcctcccaacg

SEQ ID NO: 124279 - DNA, 122 bp, Homo sapiens
tagcatgtggaagccagtgtttatgatcaaaagcaaattaaggctgggtgcggtggctcacgcctgtaatcccagcactttgggaggctgaggtgggtggatcacctgaggccaggagttca

SEQ ID NO: 124280 - DNA, 122 bp, Homo sapiens
gagaaagaactggacttcactacgtgtgctttggggtctgcactgctcctgaatcttgtccgtgactagggcacacagggagcgactcattggcgataatttgggagtcactgtggacccac

SEQ ID NO: 124281 - DNA, 122 bp, Homo sapiens
ccagagagactggggaggaccgagcggttcgcatttgcaaagctcttaatcagtgaactgcgttggaggcattgctgctccgctcctccgacgaggagagggccccaggggcaggagccact

SEQ ID NO: 124282 - DNA, 122 bp, Homo sapiens
cacatgaaagaatctgatggatgtctgaggagctttgggaaccctaatcaccaccctacacgggcgccactagtactcacggcccagcttcaccccgggcggcgggaagctagtgcctgcgc

SEQ ID NO: 124283 - DNA, 122 bp, Homo sapiens
gcggggagggagcacacaagatgggcagttctagttgggggaggctcgatgccctccagtcgccacagacctatttgcgcagtgttgggggagggaagaagacatgggaaggggcggaggaa

SEQ ID NO: 124284 - DNA, 122 bp, Homo sapiens
gcggcccgtcgggcggagcagctgagagcctacctggagggcgagttcgtggagtggctccgcagatacctggagaacgggaaggagacgctgcagcgcgcgggtaccaggggccacagggc

SEQ ID NO: 124285 - DNA, 122 bp, Homo sapiens
tatttaaaatgcccgtggaggtggttagcgccccattcttctgctgtagttatttcaccccgggagggtgtgggccttagccatgtggccgtgatggtcgtatctgaagtgtgaatacttcc

SEQ ID NO: 124286 - DNA, 122 bp, Homo sapiens
ggaagaacagctctggggattggcaaggactggtggccaccgccagagagggttgatgcccggacaggctatgtctgatccccgggctggtactgtggttcagcggaggtgaagtagtcctc

SEQ ID NO: 124287 - DNA, 122 bp, Homo sapiens
ctcatctgtacaatacagtcaataacattaccattgtcattttgtgtagctctgggatgtcgtgcctggcctgtgacaagtcagtacatagtatttatcgttaaatggcagctgcgcacacc

SEQ ID NO: 124288 - DNA, 122 bp, Homo sapiens
agtttctacttctagggacctggcaagatggaactatcttagcattgactcttcctccagcgccttaggctcttagtcacacccttcccaacttggttttcaggctgcaaagcttcctccat

SEQ ID NO: 124289 - DNA, 122 bp, Homo sapiens
ctttagaactgaaaacaccctgacagggcccaaggtgcccctcagctaaagcacaggacacgcgggcagatgcacgggcgccatggcagggcagggcctcagcccctcagctaaagcacagg

SEQ ID NO: 124290 - DNA, 122 bp, Homo sapiens
tgctgccccagtgcctttggctgcgacatctcagagcacccaggactgctgcctctgactcggctctcggtagccatgcccgggagaggtccctgaagctggctcaggcagatgcgccgcgg

SEQ ID NO: 124291 - DNA, 122 bp, Homo sapiens
gtgagtgaggaggaggtctccctgctcttggctgatgtggtgcccaccaccagcaggcttcggcctcgagcaggtaggacccgggcgatagccaggacacggcagagtgagagagtgagagc

SEQ ID NO: 124292 - DNA, 122 bp, Homo sapiens
gtgctgcgctgcccttgccctgcgagcatgtacactcgccaggcagtcccggatgaatcacgccccacaccgagtagttagcccaactcgcaacagaggccctgtgtgctgcttttgtgtgt

SEQ ID NO: 124293 - DNA, 122 bp, Homo sapiens
cccgagccctgagccccagcgggaatgcagccgcaccctgggggaatgaaggcgggtacgcgaggaagagggcccgaagaggaaaggggctcccgctcagaccacagcaccaccaagtccca

SEQ ID NO: 124294 - DNA, 122 bp, Homo sapiens
ctggaaaatcgggtcactcccacccgaatactgcgcttttccgatgggcttaaaaaaccgcgcaccagtagattacatcccgcacctgacttggaaggtcctacgcccacggagtctcgctg

SEQ ID NO: 124295 - DNA, 122 bp, Homo sapiens
tttgatttacatgtttattgtctgtcccggcccccaattccctctacaatgtagatacctcgagggcaaggacttccaggtagggtgtgtgtgggtagggtgtgtagggtgtgtgtgtgtgt

SEQ ID NO: 124296 - DNA, 122 bp, Homo sapiens
gcgcctggcggccgagctgctgctgctgctggggctgctgctgctcacgctgcacatcaccgtgctgcgcggctcgggagccgccgacgggcccgacgcggccgcgggcaacgccagccaag

SEQ ID NO: 124297 - DNA, 122 bp, Homo sapiens
tttctgggactttctctcacccaggccctcaacctcctcacctggaacttttcagtagcccgcagccgctcctgccagcggccctccaacctctgttccaacgctgccctgcgctccaggag

SEQ ID NO: 124298 - DNA, 122 bp, Homo sapiens
gtgcatctgaagagctgaccagcctcaagagtcccacaggcaaagcgctcaccgcagagtcgcagcagctcccatggattcttctttatgggtattgtgacccattgttcacccaccaccca

SEQ ID NO: 124299 - DNA, 122 bp, Homo sapiens
tcactccgggatgaaaggggaagctgtgaacagctgttctgctgtggattcacaggtgctcgtgacctgaccaaggacgaaggcatcgccagcctcctcggaccctcgctggcacccacatg

SEQ ID NO: 124300 - DNA, 122 bp, Homo sapiens
atattctttgttctgaggaaataaaataggccatttagttacacaaatagaacgcagagccgattggacagatgtttgcgatgccgttcaagagggaaacatgctttgctgagaatgtcaaa

SEQ ID NO: 124301 - DNA, 122 bp, Homo sapiens
cccgcgggagtgtcgcagtttccacaccgtgacctgctgagatggcacctgcgtgagtgtcgcagtttccacaccgtgagctgctgagacggcacccgcgtgagtgtcgcagtttccacacc

SEQ ID NO: 124302 - DNA, 122 bp, Homo sapiens
ccctccacagaggaggcacccacagccggtgacccccatcatgtgcccatgatcagaaggcgcggcctccggaggccgacatcacaacgtttgcaagggccggctggggtcggcacatgatt

SEQ ID NO: 124303 - DNA, 122 bp, Homo sapiens
tcctaacgcccctgctccctggtttcatttggaaccaactgagagacacaagtccctcttcgttgatcagggtcagttgaaagatgtagctgtcggcctggtagccaggtgggcttgctaat

SEQ ID NO: 124304 - DNA, 122 bp, Homo sapiens
aggcctcggggagggcaccccctaagaccacagtggccaagatcacagtggccacggccacggccacagtcatggtggccacggccacagccactaatcaggaggccaggccaccctgcctc

SEQ ID NO: 124305 - DNA, 122 bp, Homo sapiens
cttagtccgccagcgcgtgcggcggaggccgagcgtctctatgatcctggcttctggcaacgtcatcgtcacgcgccggatccaacccccaaccactttagccagctctagaggcgcgcgtg

SEQ ID NO: 124306 - DNA, 122 bp, Homo sapiens
tactggggacactttacttaatttgttgccgagctcatgacctaaacggaaacattgaaccggccacctgaaggtctagaagttttagactgtggaatcagcgctgtggaaggcccggctac

SEQ ID NO: 124307 - DNA, 122 bp, Homo sapiens
ccgagaccctgtgagcctgggcctcgggtgccaaataaacaacaaagccctcgagagtcgcgcgcctcaggagtggggctctcgttgctgtcgggcggcgtccagcagctgtttctttggaa

SEQ ID NO: 124308 - DNA, 122 bp, Homo sapiens
tgcccgcaacaagacacaacagacacaccgaaagcaggaagcgaatgtggcgaagagacgcgcagagatgagtttttatagacgactcacccacgcagtcgtagcagagcagggctacgggt

SEQ ID NO: 124309 - DNA, 122 bp, Homo sapiens
ctttctgcaggctgtgcctgaaatatgaagattacttaaaactcatactatgccaggacacggacaccacaataaactgggtaatgagtgtcaactcaaagactatttaagattagttgctg

SEQ ID NO: 124310 - DNA, 122 bp, Homo sapiens
agggttgccgggcaggcctgggcagcctgtcctcccaacccaccctgaatgagggcagctcggatgctggccttagtgctaagttgtggagcctggaacccaactacacttttgtgtcaagg

SEQ ID NO: 124311 - DNA, 122 bp, Homo sapiens
cttcgcccgggaggcggtgggtgcgggtgcagctcgggccctgctgcctggagatgaggacgctggtcgagctcgggccctgggctggggactttgggcctgacctgctgctcaccctgctc

SEQ ID NO: 124312 - DNA, 122 bp, Homo sapiens
acatggtgaaacctcttttctaccaaaaatacaaaaaagttagccaggcatggtggtctgcgctggtagtcccagctacttgttggggagctgaggtgagatgactgatgggcctgggaggt

SEQ ID NO: 124313 - DNA, 122 bp, Homo sapiens
caaaagtctgcgaaggcactttcattgattaatgatctgagtatggcccttcctccaaatcgcatctgagaggggagagcatacatctgtattctctagttatcatgcggttttagttttgt

SEQ ID NO: 124314 - DNA, 122 bp, Homo sapiens
ctgttttgtaggatctggccaaggctgctgcctttacttgctttaggaggttatgaagtgcgcaaagaattaggactgaatctaccctagtgtgacactgccatcaatatttggagttcctg

SEQ ID NO: 124315 - DNA, 122 bp, Homo sapiens
tcactgtgtctcgggccatgccttccaggtggcccagacagcccaagccctgcactggatcgtgaggacgctgcgggccagcggcttcagctcggaggcggacgtccccactctgggtgagt

SEQ ID NO: 124316 - DNA, 122 bp, Homo sapiens
aggccttgacgtgggctgaggaggggcagcgagtgttggcagagctggagcaggaacgcccgggggttgtgttgcagcagctgcagctgcactggaccaggcaccctgacttgcctcctgcc

SEQ ID NO: 124317 - DNA, 122 bp, Homo sapiens
cccacaagggggcggttaccgttgaggcttcttagtccttccctcccacttcctgatctccgcggaagcccctgcctagcgtctccccatggcccttggtacatcctccccttctccacccg

SEQ ID NO: 124318 - DNA, 122 bp, Homo sapiens
agaggcccagagagggagagaggactagacttcaggggctgggggagggttaaggggcttcggtcttacctataacaggataaatatttgtgttaagtcgaatgtattcagctattccttat

SEQ ID NO: 124319 - DNA, 122 bp, Homo sapiens
ttcagaggaagcagtggagcggcaggagccaggtaaaggcagtgggtcactggcggcaaccgggtccccatggtaacttggtccccaccctgtggcatctgtgaggtcaccctgcttctccc

SEQ ID NO: 124320 - DNA, 122 bp, Homo sapiens
aaaaaggttggaagcccctagtgtagatatcctctaaaggccttatcagctgccatcctccgcagccacctgggagaaaggactttgggccaccagggggcgctgcagcccttgtgcaacgt

SEQ ID NO: 124321 - DNA, 122 bp, Homo sapiens
agggttcttggagggaagcagcaaattgctttaagatcaagctggagctctttggaggaccgctgtgggccaacctctattctcggttttctcctcaagctctgagatctgggaagttggag

SEQ ID NO: 124322 - DNA, 122 bp, Homo sapiens
ggttataggcaacgtctacaccaagcgcggggctgcgtggggaggcggctggctggggtgcgtggccctgcggggcctttgcacactgggcaccagacgaggctgaagctggtcctctcccc

SEQ ID NO: 124323 - DNA, 122 bp, Homo sapiens
ggcagaggggaggcccagaggagagggaagctgggcaaaggggatggaaggcgtccagcccgaccttaccaaaccccttgggcctcgtgggaaggggcctcttggagagggggactgaggct

SEQ ID NO: 124324 - DNA, 122 bp, Homo sapiens
aattagaaaacaaaaatcaaacactcatatttcagtgagaggtcacaaaatatgtatccccgagtcttctagtttctcccagtaaaaaaagctcctccctttgaaggcccgcactagcttat

SEQ ID NO: 124325 - DNA, 122 bp, Homo sapiens
cgtccgggcgcgcaggcgccgcccgccccgctggtctgattagcataggaccccgggccccgccccctgctttgcatgcgcacggccggccccacccccgctgtcagctggaggaagcggag

SEQ ID NO: 124326 - DNA, 122 bp, Homo sapiens
agaaaaacatctgtcccttcctccctccatcacacagaccaaacacacacccagagccctcgggctaagagttggtatataaaagccttacaataaagctgcttcccctcttgcaataaaag

SEQ ID NO: 124327 - DNA, 122 bp, Homo sapiens
tgcagacgcctcccagggccctgctcccacccctcgctcaccctcactcttctcagctgacggcgtggagactcgaacctgctgcttctccatccgctcccggaactgctgctgcagctgct

SEQ ID NO: 124328 - DNA, 122 bp, Homo sapiens
gtagttcatttaaatttcattcattctttatggaggcgaggaccagtgtcagctgacaggcggctgaaaagcagattttagggggataaaggggtctctacttttgcaaattgtcttaagac

SEQ ID NO: 124329 - DNA, 122 bp, Homo sapiens
aagagcaacttcatcttcgacaagctgcacaaggtgggcatcaagacgcgccggcagtggcgccgctcgcagttctgcgacatcaacatcctggccatgttctgcaacgagaaccgcgacca

SEQ ID NO: 124330 - DNA, 122 bp, Homo sapiens
gtcttgacaggccaagaagaacaaatgactcagaatggattaacatgaaagttatccaggcgcagagttgaagaagcataagcaagacaaaaacagagagaccgcagaaggaggaagatact

SEQ ID NO: 124331 - DNA, 122 bp, Homo sapiens
ttatgggtcggcagccagagtgagagtgtccctgctgccagaggactacggcgggctgggcgcggggtccccgcctctcgctcaccacacagaccccgcgcctcctctggcagccgcggtgg

SEQ ID NO: 124332 - DNA, 122 bp, Homo sapiens
ggagaaattgaaggtcataaattcacaaatgggccgcaacccagcctgtaaaatcaaaaacgtggatgttaaaaagactagaaacagcaacaaacagtagcaaacaaatcactccaagtctt

SEQ ID NO: 124333 - DNA, 122 bp, Homo sapiens
cattgtcacctgcaagactgtcattccggacatagacgtgccacatatagtcttgttcttcgacagaagctctagtgcctttggatgagtgctccacgatcagttgattcgtgaaggtcatg

SEQ ID NO: 124334 - DNA, 122 bp, Homo sapiens
ggctggagttggagcttctggaatgtgaggatcagtgcgctgaggctaagcaggcagtggcgccctgggcctggcccttgaaaacattctttcttcctaggcttctgggcctgtgatgggag

SEQ ID NO: 124335 - DNA, 122 bp, Homo sapiens
tgaggagtggtgtccactttaaggaatgggtgccttctttcaaacggcatggaagcactgcgtggactagtgtggctctgcctccaaccacaaaccagagcagcagggagcttcagaaagag

SEQ ID NO: 124336 - DNA, 122 bp, Homo sapiens
aggaagctctgcgcaggcgggcggagcatccagaactccgcaggccctgaggtgttgggtcgtttcccagggccccaatgtccagggagaaagaggctccactctcagcaccaagctcccgg

SEQ ID NO: 124337 - DNA, 122 bp, Homo sapiens
agccagggggaggggtgaaagtccacagttgaacaaacagacacggtgcaaaggaaacgccgcacacttccacctttccttcccgccagcgccccaccaaacaacctgatcggccacggcgc

SEQ ID NO: 124338 - DNA, 122 bp, Homo sapiens
gaccagcagcccaggaagcagcacacgcggccgtggggaggcaggcaccgggcatgtcggcgcctctggtcaaaccacctacactgcctggggtgggtctcaaggaggcccggggcggaggg

SEQ ID NO: 124339 - DNA, 122 bp, Homo sapiens
cacagctggccctggcaggtaagcctgtgtagggctgggaggtacagatagagagggtggcggggtgagggtcccagggacctgcaggctgacacacagccctccccaccctcctgcagatc

SEQ ID NO: 124340 - DNA, 122 bp, Homo sapiens
cccagcaccctgcgccagacacagccgccccaggggaagaggaggacgctgctgtcctcccgcaggagtcaccagccaggtaaagaaaaaggtaaagtaagacaaagaaaagtgaaagtcgg

SEQ ID NO: 124341 - DNA, 122 bp, Homo sapiens
tttaatccggtccagggactccgggatagtgaacttgaagggctggcctgcagcctggtgcggcgtctgggggcgaccagcgagggggaccgagggacgggaatgcgggcggatgaataaag

SEQ ID NO: 124342 - DNA, 122 bp, Homo sapiens
ggatagtacataagattttcttttttttttttaaattttttttaatagtcacattcagctcgcttgctcaaaccagactcccacattgggtgagcaagatgagcccataggattccagagtt

SEQ ID NO: 124343 - DNA, 122 bp, Homo sapiens
cgtcttgtatcttcccccgtttcctgggacattggtggtgtagcccattccacagactttcgctccctagcagcgggtcggagatcgaaggaacgggccaattgcggctgaaacgtctttgg

SEQ ID NO: 124344 - DNA, 122 bp, Homo sapiens
aaatgtggagtgaagttgaaattttgtgccccagaacatgagtttcagccactagggtcccgctcagggtcgggtctgatcacagggaagggtacggggagccaaacaggtaatatcacggg

SEQ ID NO: 124345 - DNA, 122 bp, Homo sapiens
ggccttaatgagataatcaatacttgttctcggcttaatttccatctaattgctctttaacgacgccggataatgggccgcctcctgtgaggagggagctggctgggaatccgacccgcctc

SEQ ID NO: 124346 - DNA, 122 bp, Homo sapiens
gagaagcagcccagcccagtgtgtccctggcctcagagtgcccagaggagctggcactgacgtgcccgtgccccaaccccacactgttccccccagcggtgccaggccaagggcttcgtgtg

SEQ ID NO: 124347 - DNA, 122 bp, Homo sapiens
ctgggacctcccgggttcccacgtgcggctgccggggcgtgcacagtctgggacccgtggcggtgctggcaacacaagcaccagctgcggggactccaacagcatctgcccggccccctcca

SEQ ID NO: 124348 - DNA, 122 bp, Homo sapiens
ttgtccgttccgcatgtaatttttttccttgcatttttaatctctgccatgccaagaacacgtgaggaggtaacaagcgaagggaggggtagctttgcccgggggcagacctggcgtgaacc

SEQ ID NO: 124349 - DNA, 122 bp, Homo sapiens
cgcctccgggccgcgcgggcgccctcccgggatcaggcccgctccaaggagggaggctgacgggttccctgtgggcccagacccccagtactctagcatcggggaatcgtccccaggaagcc

SEQ ID NO: 124350 - DNA, 122 bp, Homo sapiens
tctctagagcctttatctccagctcaacctatatatgtcatagagcctcaaatgttatagcgctgaataaatacatgttggattaataaatgagtctctcaaacaccataaccacacacagg

SEQ ID NO: 124351 - DNA, 122 bp, Homo sapiens
caccgtccgctctgcacctttccagctaccacgtctgcaggggcgcggcaggaattatgacgatttttattttacgggcgccaactcgaggctcagacagacacggaaatgtggggtggaaa

SEQ ID NO: 124352 - DNA, 122 bp, Homo sapiens
ttcaactacttgctgcagggtacagaaagaaacacaggcttcactgattgtgctcgtaagcgatgagtccgcagaacagggtacagcttgaggaaaaataaacttgctgtaatattccaaaa

SEQ ID NO: 124353 - DNA, 122 bp, Homo sapiens
cacctcccagggtgctggagttcaatgagggacaaccctgccccctgccaggcgggcaaccgagcagcatggactcggcaccagcagctggggttcgggagccatgatggcatgctgggtga

SEQ ID NO: 124354 - DNA, 122 bp, Homo sapiens
tactcttgccaatagagtaagggtccttatctgcacgtgttgcaaataaagcacattcgtcgttttgccacagttaggacgtgaagttctctgaatcgaagtacggtgtcagtggatgggac

SEQ ID NO: 124355 - DNA, 122 bp, Homo sapiens
gagggcgtcgggcggcgcagggcaggccagggggcgggggcgtctggggccctggcgtggcgcccggaacaccccgtgccggaagctccatgtgaccgtgactccgcagaagccgcgagcgc

SEQ ID NO: 124356 - DNA, 122 bp, Homo sapiens
agcaccagggcagggcctgccaatccagaggtccccgaggaacagattcaggcctgggaacgggcccacggcagggctttcctggaaatgcctggcagagtgggcaggggacgtcattgtga

SEQ ID NO: 124357 - DNA, 122 bp, Homo sapiens
cagttttggagggaatttctgcttccaaggtcaagtttctcctaaatgcccactagagttcgtggggtggagtgaggaaggatccgcgacaccggatacaaacagaagctctccttctcccg

SEQ ID NO: 124358 - DNA, 122 bp, Homo sapiens
cgtgtggtcggtgcttttctcgttgggtattttctgcttttaaaagaagttgtggatgcgcggagcccctgggctcctgaggcaaaggcttacccatgtagcatagtgttgcctcgtttctt

SEQ ID NO: 124359 - DNA, 122 bp, Homo sapiens
aggaggcggccctggctgggtgtgccccgtctccatggttaccccggtgcaggcggcgggcgcgggagggagggagggaggctgcagcttctccccgacagacggagggagctgccgagagc

SEQ ID NO: 124360 - DNA, 122 bp, Homo sapiens
atggccctcccgaccctcgcccctacctccttgtgggcagccgagttggactcccagaagcgctgtactttgctgaaggtgacgtttgtgcagtcggaaaggccactcaggaaggtacccga

SEQ ID NO: 124361 - DNA, 122 bp, Homo sapiens
ctagtattatcctcatcctcctcgtccggatcttctactgcctcctcggggcgccaaggccgcttggcatggaactccaaaggctccttgactgcggccatggcgggcaaagcatacgcgcg

SEQ ID NO: 124362 - DNA, 122 bp, Homo sapiens
ctcgatttctcactgagccttagctgccttcccgcggggcagggctccggacctgcagcccgccatgcctgagcctcccacccactccgtgggttcctctgcagcccgagcctccctgacga

SEQ ID NO: 124363 - DNA, 122 bp, Homo sapiens
caggaagccatggtgtaattcatttaagctattggttttcaaagtgtggtcctggaccagcggcatcaacatcactttggaaacttgttagaaaggcaaattcggccaggcgcggtggctta

SEQ ID NO: 124364 - DNA, 122 bp, Homo sapiens
gctcctacttggccccaggaagggaggtgtgctggtgttgctagcccgaaccaaggttgccgggaaagtggaggacagttgggtttagttacccccgggaagccaccatggccacggtgccc

SEQ ID NO: 124365 - DNA, 122 bp, Homo sapiens
tctccccagactggctgcccagcctttggtcccttgatctggtgtcgggaatctgccctccgggtaatgagctttctgagcagctcagagcactgcggtgggttggagaggggtcgggaagg

SEQ ID NO: 124366 - DNA, 122 bp, Homo sapiens
cctgtggtgactaactctgccattaaccagcactccagttaggagggaaaagatgcatcccgctgcgctgcatgtgtgttcccgagaagccccagtgccttagtggtctgatctcagaacct

SEQ ID NO: 124367 - DNA, 122 bp, Homo sapiens
ctagatcctccaaaagctaaacatttttcagaggtatttgggaggccctgctaggtgtcacgtgaggtgccaggcactttaatggctattacctcatcaaattctgataacagccttatggg

SEQ ID NO: 124368 - DNA, 122 bp, Homo sapiens
atggcctcctcaccccccgactcccacccgcgtccttgtctctggccacagaactccatccggcacaacctgtcgctgcacacccgtttcatccgcgtgcagaacgagggcaccggcaagag

SEQ ID NO: 124369 - DNA, 122 bp, Homo sapiens
ctctgtaggaacaatgaggaggcaaatggttagcatctggtgctctgggacttttggttacgaagaagtgggccaaagtgcagcctgattaatgcttaattacaactatatttctgtccaga

SEQ ID NO: 124370 - DNA, 122 bp, Homo sapiens
ccagtctcggacaaaccctcaggtcctggacactggcctgacagcccaggacatgcattacgcccagtgcctctcgcctgtcgactgggacaagcctgacagcagcggcacagagcaggatg

SEQ ID NO: 124371 - DNA, 122 bp, Homo sapiens
ttttacctgccctactaagccactcatcccttcacagattttgtttgagcacttaccatacgccaagacctgtatcagcttctaaagacgcagaaaaggatcaaactaacaagagaatgagc

SEQ ID NO: 124372 - DNA, 122 bp, Homo sapiens
gctcttgaacacaccccagagggcaacagttctccatttccaggcctgagctgacagcaccgcgcccacaaacctcgctgacctctgactgctccgagagggggctgtggcccgggcgctgt

SEQ ID NO: 124373 - DNA, 122 bp, Homo sapiens
aaaacccataaggggaaggatatggtagcttacgcctgtaagcccagcacttcgggaggccgagacgggtggatcatctgaggtcaggagttagagaccagcctggccaatgtggtgaaacc

SEQ ID NO: 124374 - DNA, 122 bp, Homo sapiens
atatgttgaaatgacagcaattctaacatatagaacttttttattgataaagctagataacgctaacatactaatagtatcttagttcatttcctgttgcttatgatagaaatcttctgggt

SEQ ID NO: 124375 - DNA, 122 bp, Homo sapiens
gctggtggtgttcggcctgatcttcgcgctgggtgtgctgggcaacagcctagtgatcaccgtgctggcgcgcagcaagccgggcaagccgcggagcaccaccaacctgttcatcctcaacc

SEQ ID NO: 124376 - DNA, 122 bp, Homo sapiens
gaatccctggcaaagggatcttggttgggggtggggctgggccaacagtggcccctcccacgctgtcagcactagggcagggctttgtggccttacctaggctggaggaggtgggcaggggc

SEQ ID NO: 124377 - DNA, 122 bp, Homo sapiens
agactcagttgaataatacaaaactgtttaatactaccaaaaatataattgtatgttgtgcggctctccctggctatcatgggaggactgcaggctgcctctgaactgtagtccaacaggag

SEQ ID NO: 124378 - DNA, 122 bp, Homo sapiens
acctggattctccctagtatcctccgaccgcccactaccccactcccccaggctccgccccgatcccccaggcccagttccaggatgactttggattgcccgccctcgccctatccctgtcc

SEQ ID NO: 124379 - DNA, 122 bp, Homo sapiens
gtttgtgccatgtttacgtgtctgagtgggggagcgggtgctaaggcagactcaacaagtcgggttgcttcgctgttctcagcacaaaagtcacccaggctgtctggccacaatgtttcaca

SEQ ID NO: 124380 - DNA, 122 bp, Homo sapiens
ctgtgtagtggagaaagggcaggcagcgagcaagcgtgtgcagggtacatacgtgctgcacgctgctgtgtagtggagaaagggcaggcagccagtaagtgtgtgcagggtacatacgtgct

SEQ ID NO: 124381 - DNA, 122 bp, Homo sapiens
taaagtgcttagaagaactcaggggatagaggaagtactatataaaagttgtaaatcaaacggccctcgtatgcctgccctggtctccctagaacatgtgctgagtcgtgcggggtggtggc

SEQ ID NO: 124382 - DNA, 122 bp, Homo sapiens
aggtggcagagggtaccgggatgggacaggaacagagaagtccccatgggactgagcacccgatactccacctgggtccgcttctgtcggacacttcgccacctccggatcctgggcagccg

SEQ ID NO: 124383 - DNA, 122 bp, Homo sapiens
gtccctgcccacataaagcttctgtttaggggaagttaagacctgggttgagagtgaaggcgtcaaatattacataagcaaacaagtaagatggtttaggtcatagtaaatgtttcatgggc

SEQ ID NO: 124384 - DNA, 122 bp, Homo sapiens
aacaactggtaaaacagtggacgcaaatcccaccttttcagtgatcacattcagtggaatcgcggccagaaagcaaagggcggcagaacaggaagcagcgcagcccagagatgggcttcccg

SEQ ID NO: 124385 - DNA, 122 bp, Homo sapiens
gccatcgatagattgaaaacgggagtattatttgtaacctcagttgctgttccatgcaggcgtaggagagaataatgcttccttgctccatatctattgctgaacagttctccatgatctct

SEQ ID NO: 124386 - DNA, 122 bp, Homo sapiens
tgtgaggagacagttgtgtagggacaactgaggtggtgggataagaataagaaagtgcttcgaggactctgctgacagccatcttgaaccactgccacacttgtaaaggtgtttgtttccta

SEQ ID NO: 124387 - DNA, 122 bp, Homo sapiens
gtggagagcagccggttacgcgagggtagggcgtggagagcagccggttacgcggttacacgagggcggagggcgtgtgccgggagcacaatccgggccgaggctcctggtaagggagcaga

SEQ ID NO: 124388 - DNA, 122 bp, Homo sapiens
cttgctctgccactcaccggttgagggcaaaagtgtagtggaagcagacattatgctgctcggccacatcacaggtgggcaaggcctgcagcgtctccaccagctcaatgatggccgagtag

SEQ ID NO: 124389 - DNA, 122 bp, Homo sapiens
atccgcgaacaggggctggggaaatgatccagatctggcattgccgcggagacccccatacgtagctgtaccgccacctctccacctgctcccatcctgacctgaaggaggcctcacctgga

SEQ ID NO: 124390 - DNA, 122 bp, Homo sapiens
ggtcagcgttccgcgggggagacttcccagcgtcagctccgacctcctctttctctaccacgatcccggccagcatccccgcccagcagcggctcagccacaaacccaagggtctccacctg

SEQ ID NO: 124391 - DNA, 122 bp, Homo sapiens
gaaaagaggcagccagagagaaggcatatatgaatttatatgaattctgtgggtgagactcgggttagatctacttactaaattccactataaagaggaatgggcttctttttcagatgcta

SEQ ID NO: 124392 - DNA, 122 bp, Homo sapiens
agaaaactttagcactcaagtccaaaggggactgcccaactcagtctcaggcttcaatttcgcatctggggaaaaaagaaacacaaaagggagatgctgcctccttggctctgggggtggtg

SEQ ID NO: 124393 - DNA, 122 bp, Homo sapiens
tgatcgccctaggcctgcttgacagccccgcccgcttccttcctgccttctccacgtggccgcagccctggctcctgggagtgcacagttcagccccgcttgcatcagggcgcttcttgccc

SEQ ID NO: 124394 - DNA, 122 bp, Homo sapiens
ctgcccccggggcatggacccgacgcgccgcccgcactccgccacaggctgtccagggcccgcgggcagatagcagtccaggaggaagccgcatccagacaaaagctgccgcatccctgccc

SEQ ID NO: 124395 - DNA, 122 bp, Homo sapiens
acctcacccagcaggagatacggaccctggaggtaagtgggtcggggaccaggctgggctcgaggagcgggcccggacacctccctccgggccccagtactcctggccgagttgcatccttg

SEQ ID NO: 124396 - DNA, 122 bp, Homo sapiens
gggcaagaccctgcagcaggccacgcagcgcaccccgtagttggtggtgaccagccagtccggcggctcccgcagctcctgcaggcagcactccagcaggtctatgtcctcgggctcggggc

SEQ ID NO: 124397 - DNA, 122 bp, Homo sapiens
ctggcgctgaccgatggaccagccgctccgtggggaggactccggaccctggtgggggggcgggggggttctttcgcccccgtggcggagggcccctgagaggcggatacgggtgtgccttt

SEQ ID NO: 124398 - DNA, 122 bp, Homo sapiens
agcagccgtgggagctgcggactcctttaaccctggcacatttctaaccgccggcataatcgctgactttcagctgtgcaccgacatgttccccagctcagcccacatcaatgacacccttg

SEQ ID NO: 124399 - DNA, 122 bp, Homo sapiens
gccgcgcaccgccgttcccgccaccctggacagacgggtccggaaggcccgcgacccaggcgccctcctagggtcccgacgccccaggcctccgctcagaggcggctcctcggccccggcat

SEQ ID NO: 124400 - DNA, 122 bp, Homo sapiens
cttccggcggcgtgacctgaccgcaagaggccaatggagtgtgggagctgaaagggtcttcgctggcggccggtaactggcggcggttgggaacggccgagtgtggctcttctggtgtttca

SEQ ID NO: 124401 - DNA, 122 bp, Homo sapiens
cccgtggctctgctgggtccaggtgcaagcaggcacagaggtgctggcgtcagctcgattcgcaggccctggactcctgtctaaacaggacaggcccgggcaaccgcagggcaggggcgtct

SEQ ID NO: 124402 - DNA, 122 bp, Homo sapiens
ttttcttcacagttattttccttccttttaagccaaggttcactctctactccctcgtcacgcgtcccaacttctcatccagaacccacccctcttgcagcccgctcagctccactggcttc

SEQ ID NO: 124403 - DNA, 122 bp, Homo sapiens
tcctgagtgggtaaggaacaggagggggcttaggggaacctggcagcctccctgagcgttcgttatgcaaacgaaggaaatgagccctaaaaatgaaactgagaagccccaaggggccacag

SEQ ID NO: 124404 - DNA, 122 bp, Homo sapiens
cagaggtcatttttatgaggtttagtactgccacagcctcagctactaaaggcacttcatcgatgacttggattcttaggctgggagggtggtggtctggctcttcagttaaacctttagag

SEQ ID NO: 124405 - DNA, 122 bp, Homo sapiens
cacaatggctgggagatgacatgggcaacctctctgggagatacctgcgcagagaattgacggataagaagtactggccggatgaagagaggtaaggtaaaacaggaaagggcttggtgaga

SEQ ID NO: 124406 - DNA, 122 bp, Homo sapiens
ggctgagaagtgggagcctggcagtatatatcacagatcaagaattcagaaggaggaacccgggtcctggggagtcagagctaccatttactgcgcatttattacatgtcatcctcacaatg

SEQ ID NO: 124407 - DNA, 122 bp, Homo sapiens
tctgcagggactccggtcctccgccttccaccagcataggaggacgggcttctggcccaccggacataaggaattcagagaaaaggctctgcaggtacccaaggccccccagcctgcagcac

SEQ ID NO: 124408 - DNA, 122 bp, Homo sapiens
gggaacgtgagacaggagtgcgagctgggagtcggcacacggagaggcagagacactcctcggaggcagaagctggttccttatagagatggaaagaaagaaatggactctggggagactgg

SEQ ID NO: 124409 - DNA, 122 bp, Homo sapiens
acggaaagaaatagggtagcttttgggatccgaggaaaggcgtcagtgtccctcctgtcccgtggttttggatctagcgatgttaacgcacagacatgactataggttggtgagttacatgc

SEQ ID NO: 124410 - DNA, 122 bp, Homo sapiens
ctgtcttgaatttgggagcccgcgatcagaagccagcatggtcggcagctccctacaccacgtccgggcttcccgggcctccagctgccccctgcgccgccgccgcctcccgcacctgcacg

SEQ ID NO: 124411 - DNA, 122 bp, Homo sapiens
gcttggcttttcctcagctttctgtgggaggtccctgtggcccacggacacacacctggacgtcactgtctttctcggcatcgccccatatggcctcagagacacacgctcattctgtctgc

SEQ ID NO: 124412 - DNA, 122 bp, Homo sapiens
gatgcctggaaatgatgtcagacgcagccactcctctgttagaactacagccaaacaatgcgcaggcaatccacagcagctgcccctgcaaatgtcagcgccagcccagtcaaaagagcttg

SEQ ID NO: 124413 - DNA, 122 bp, Homo sapiens
agagtaaacctgccgctctgtctgataacttcaagtaagagcagcggcttcctgggttggcgttcgcggtggaaggttcctaggatgaaaggtgagcctggatccgccggccgcagacatcg

SEQ ID NO: 124414 - DNA, 122 bp, Homo sapiens
gccatcatctcttttaatattctctttcccccatgttctcagtcctcacattctggacctcgaattagttactagaaagaggtttctctcttctgtcctccatttctctcaccttcttttca

SEQ ID NO: 124415 - DNA, 122 bp, Homo sapiens
ggaggccaggttttgcacagcgaggaagtgcctcttctgtacttgggccgggtgcactggcgcgtgaacccctctcggacaccggggggcaggcaccgcgtatcagaggagcagtggcctca

SEQ ID NO: 124416 - DNA, 122 bp, Homo sapiens
tccagttaatttctgacctttactcctgccctttgagtttgatgatgctgagtgtacaagcgttttctccctaaagggtgcagctgagctaggcagcagcaagcattcctggggtggcatag

SEQ ID NO: 124417 - DNA, 122 bp, Homo sapiens
cccacctccaccacccatcgcgacaggggtgccggcctctgcaggtgaccggcaagcccgcggcgccacatctgtgtgtgggtccatttaccctccaggaagcagcgagacagcgcggcgcg

SEQ ID NO: 124418 - DNA, 122 bp, Homo sapiens
ggagaagaaagagaaaattcagaattgtggttacacagcatagaggatctctgactgaaacggaatattctttttttctgtttttttttttttttttttttgagacagggtctagctctttc

SEQ ID NO: 124419 - DNA, 122 bp, Homo sapiens
ggcctgcagccttactttcatgcccttcttcacaggtgagcggatggcttggggtcctcccgcatttcccgcagcgtcgctctctgcattcccgcattcccaggttcctgctgcattcgtga

SEQ ID NO: 124420 - DNA, 122 bp, Homo sapiens
gaggacctgggggatactgatgttacccagcccttcgcagtggggtcacccaaaagtagacgcggctaatgccgctctttatgcccggcagggccaggaccagagtccccgcacgagggttc

SEQ ID NO: 124421 - DNA, 122 bp, Homo sapiens
atttaactcagtaaaataactaaaaacctcctaccgactgcaatgatagcacctcctcagcgggtgacttttcaccccttcttgagctctgagaattattctgtcaagaaacaaatgacaga

SEQ ID NO: 124422 - DNA, 122 bp, Homo sapiens
aaacagaacgcacgactcggtcatatcctagcccggcccatcccaaacttcacctaggcacggcgagaagcaggacggcatcaggaattcctaggaaatggtctcaccccatcagagaacat

SEQ ID NO: 124423 - DNA, 122 bp, Homo sapiens
attccgcgcggtgaaagcagccagtgcccagggtcttttcctgagtgcacctgggcctgccgcccggcgatgccatggggtcgtgcgctgcttttctacttgccgcgctctcactgctcggt

SEQ ID NO: 124424 - DNA, 122 bp, Homo sapiens
gatcatgaggaacaaaggcagagggagagcagagtgctgacagggccagaggccagaggccgcagggctataaagaggagggccacagagcaagtggtaccagatggagacccaggctgagc

SEQ ID NO: 124425 - DNA, 122 bp, Homo sapiens
cactattctgtgaatccgggatccgggtgggggccctgcagagcgcgcaggagcagaggacgctggcttccgggggatcctgttttcaggccccccgtccccattcctagcggcaaacgtgg

SEQ ID NO: 124426 - DNA, 122 bp, Homo sapiens
tctggcagttgctggaatgatgggatctgggttctacaggattcctcccctcccatctcccgccacacacacacacgtcgtaaggtgtatatggccgcggagtctcaggttggttctaggag

SEQ ID NO: 124427 - DNA, 122 bp, Homo sapiens
aggcccctgcactccagcctgggcgacagagcaggactccttctccaacaccaccaccaacgacctggaagcagttgaatgttttgggaatactggccttttccacattcatcaaagacatg

SEQ ID NO: 124428 - DNA, 122 bp, Homo sapiens
tccctgcagggattgggccttgcagcaccgcccaggctcggattggtccgaggtgagacccgcccctctgcccattgggccttcgggacagcagaggagcagtgtccggccatggccggagc

SEQ ID NO: 124429 - DNA, 122 bp, Homo sapiens
aaattgcctgaaatttcagagttggacttcatcacttgtctgtgagccgacgcaggcaggcgtattctatatcaacgacagactctcctctgccatttcctttcctgaatctagttaacatt

SEQ ID NO: 124430 - DNA, 122 bp, Homo sapiens
cgtaattctgtttcctctcactttgaactgtaattgaaacatttttcaatgggtcttcggcgtttagaaagggagatgccaggaactctgttcacctgtctatcttttaaatactctggaac

SEQ ID NO: 124431 - DNA, 122 bp, Homo sapiens
aactgcagtggtctgttagctggactctatctccagcttctgtatcgaatccatgcacctcgctgccaattcgtcttccggacgctcgttgtcagtcctctgtgatctctaattaaggctct

SEQ ID NO: 124432 - DNA, 122 bp, Homo sapiens
gactggatcatgggggtggtttctcacagtttcctagtgtgttctgtgatagagatctgacgaaatctggctgtttagagtgtggcccctcccgcttcgctctctcttcctcctgctccggc

SEQ ID NO: 124433 - DNA, 122 bp, Homo sapiens
ccgcaagcctgccaggccgggtcgcaggacagccgccgccgccgccaccgccaccgccaccgccccccgaagctagatgacggagtcttgaaagactttcaccaaatatgggccggggctgg

SEQ ID NO: 124434 - DNA, 122 bp, Homo sapiens
aggaagtaggtattacatccttaattccttgatatacatccttttattatgtggtactcccgggatgtggtttttcagatttggagaagaatagttaaaaaaaaaaaatgcagaaaggatca

SEQ ID NO: 124435 - DNA, 122 bp, Homo sapiens
cctgcctggggcgtgcctcgggcactttcagggtggtatgaccctagaggccagcagtggcgcctggctgccccaacagcccgcggtgctgcagcggcagacctccacgaagaggtcccggg

SEQ ID NO: 124436 - DNA, 122 bp, Homo sapiens
tctccctgtgcatggcaggtcattcctccgggacagccgagctgggccgaccaggagtaccggggctccttcacctgtcgcatttggcagtttggacgctgggtggaggtgaccacagatga

SEQ ID NO: 124437 - DNA, 122 bp, Homo sapiens
agggagggggctgggaagaggaggaggaaggggaggggggtctgcgctaatcgactctggcgcccacataaggactggccacggactgaaggagaggacagggaagtaggggggaactgggg

SEQ ID NO: 124438 - DNA, 122 bp, Homo sapiens
gatattctcctgactgagtcctcccactgactcaaaaggagggttaggttgaggctggggcggagctagacctcaagaagaagccaacaaagtcacacacagcgctccccacctgcgcttgc

SEQ ID NO: 124439 - DNA, 122 bp, Homo sapiens
gggcgtcctctggtcgccaccccgccggccggcggcgcgaggggcaggcccgggactcaccgggtggaggtgcccttccgcacatcgcacatcatgcacttgaaggcctcggcgctgttccg

SEQ ID NO: 124440 - DNA, 122 bp, Homo sapiens
gcgttcgcggggcaagtgaccgtgcgtgtaaagggtgaagcgtgtgaggctgtggcggggcggaggtgcaaaagctcatacttacctggaaggggagataccatgatcacgaaggtggtttt

SEQ ID NO: 124441 - DNA, 122 bp, Homo sapiens
atttttaatttttttcacatggccactgtgccaaaaggagtcacttttaaacttagtagccgttggctgtatcagatggctttcccagttcctctggattcttctgcaatatcatccccact

SEQ ID NO: 124442 - DNA, 122 bp, Homo sapiens
attaaacatcccataaatgctgacagaagataaaggatatttattatatgaaattgtctacgccctcagactacaattcctgaatagttagatggtgaccatgttcatccttctggattaat

SEQ ID NO: 124443 - DNA, 122 bp, Homo sapiens
cctcggcaacaccggcttcctcggaaagcagctgcgactgctcctccgctcctttgtcagcgtctctaggctgcactgcctgctgggataccggaggactcaaatgccacctctctccgccc

SEQ ID NO: 124444 - DNA, 122 bp, Homo sapiens
tctgcaccacctctgtcatctatagaccacctccttctgctttcctgctacaatgctttgcgtacctaagtatttcgcattctccagctctgcagtcattgggaagattttctgtttttctt

SEQ ID NO: 124445 - DNA, 122 bp, Homo sapiens
cccagccactcccaggcactcgagagtaagcgcattagcccgagaaagcgttctgtggaacggaacttccttatcctatcgtttccacacggaaagattttaattcaccggaatcgactggc

SEQ ID NO: 124446 - DNA, 122 bp, Homo sapiens
ctcctgctctgtagcagggacggtttctgtggcttcgcccggcattttgtgcagggaacgcggaagcaagatggcggcagaaagagcgcgagcgagagcgtgacccacgcttgttgcagcgg

SEQ ID NO: 124447 - DNA, 122 bp, Homo sapiens
agagatctggcacgacagtgacgggtcagctgagtcggagacggaaaacctgttggtctgcgcaccgtttttgcagctgcccggcagactggaggcctctccccaaccctgctcaccctgaa

SEQ ID NO: 124448 - DNA, 122 bp, Homo sapiens
gatgaggcaggcccggcgcgggtcttgctccgcccgccgcagagtcacgtggcaggacggcgcaccttgataacgcaatgcccggcccctcggcgccgctcccgccccgccccgccgccacc

SEQ ID NO: 124449 - DNA, 122 bp, Homo sapiens
tatatcatggtccactggagagcacccctcaattgtggggaggccatgtatcatttctgccgtccctaagtatgaagaaaaacaagaagaagcacgccaggaactctctgaaccagaaaaaa

SEQ ID NO: 124450 - DNA, 122 bp, Homo sapiens
ggttcatcttgaggttgacatttctccttgacctttttgtttagtccccacccgcaaggtcgcattagctgcctgctgagtttaatcaaatctcttcctgtcctggcaatgcccgggaatga

SEQ ID NO: 124451 - DNA, 122 bp, Homo sapiens
cctcaggcgatccacctgcctcagcctcccaaagtggtgggattacagtgtgagccaccacgcccagccagtgctgttctttaacagcatcctcaactggacctcagggctgggaaaatgcg

SEQ ID NO: 124452 - DNA, 122 bp, Homo sapiens
ccgttagggctgggagccggctgggcgcgggggtagtgagggtgcctctcgccgtggctgcgcggcggcctcgtccgagaggccggcgccggggcagtgaccggcccgtgcccagccgccgc

SEQ ID NO: 124453 - DNA, 122 bp, Homo sapiens
tcagagggcgggcgggagcaggcgggcggcgagggcgggcagcagcagcgggagcaggggcgccccgggcgccggggccgctggggacgaacgcggcgggtcaggccccgaagcccgggccg

SEQ ID NO: 124454 - DNA, 122 bp, Homo sapiens
tggggctctcctattggtcctcggggggatgtggtaagaactgctcacccagaaagtgcccgggtgcctgtttccccagagctccctggtgacagtctgtggctgagcatggccctcccagc

SEQ ID NO: 124455 - DNA, 122 bp, Homo sapiens
gctcccactgagaagaaagaaaacggcaagttaatcctaaaccggcaactgaggttctctcgttgggactgactagacagcgcaacatatggacagcggagaaaaagcagagcgagttatgg

SEQ ID NO: 124456 - DNA, 122 bp, Homo sapiens
gaggtggaggctgtagcgagcccagatcatgccactgcactccagcaaagaccagtcaggcgtggcggcacgcgcctgcagtcccgggcgatcggcaggctgaggcaggagagtcgggcagg

SEQ ID NO: 124457 - DNA, 122 bp, Homo sapiens
atgaccacggatccgccggcaggcgcgaggcgagccagggatccgcgtggggacgcactgcgcggcggatcaaaggaatggaggggtcaccgaccctcctcacagcaaccagccggtgcgcg

SEQ ID NO: 124458 - DNA, 122 bp, Homo sapiens
tctccgcagaactatgtgtcattaagtaaggtgataatcaatattcaatatcaaaagatgcgtctatttctcgatgaggagaagcaactgcatctgcaggcactggacagagaagcaaaagg

SEQ ID NO: 124459 - DNA, 122 bp, Homo sapiens
ggtgggcgggggaggggggagcgtgggtagaagcggtgacgcggctggatctcatttagacgttaaattttaggaggaacacccccagtgtgattgtaaattagatgtgatcaccggtccac

SEQ ID NO: 124460 - DNA, 122 bp, Homo sapiens
cagatagtggccacccaggtttgctgggttggggcctgatacaggctctgcatgcccattcgggctgcctgtggagagagaatggagtcactgtttaaccatgctacctgcctcagccccag

SEQ ID NO: 124461 - DNA, 122 bp, Homo sapiens
ttttgtggctgttgactttgcctccatgaggaaattaactcctatggagggcacctagctcggcgtagacccggtcgctaccacctgcgatgccttggaaatgcagccggcggggcccacct

SEQ ID NO: 124462 - DNA, 122 bp, Homo sapiens
ctgccacgcggggccggggctgctgggtcccgaggcccgcaccgggcgcgggagccgccgcgcgatcggttcgctccaggatctgtggcgtctcctttcaacagccccatttcccagatgag

SEQ ID NO: 124463 - DNA, 122 bp, Homo sapiens
gtgagggccccccacttgacctctcccttgcagagacaccccaggctgggtcgtgctgggcgggtgtcggaggcggcgttggagagatgagccagagggtggccctggacgccaaaccgccc

SEQ ID NO: 124464 - DNA, 122 bp, Homo sapiens
ccttcgcgccgaaggcggtagggcgccacggagaggaaccgctctaggcacgtaaggcctcgtgaggttgcgtcgcgcgcggagcactctgggacttgtagttctggagatggagcgagctg

SEQ ID NO: 124465 - DNA, 122 bp, Homo sapiens
caaagctgatgagctatttctgaaactcgtgcagaattgtggtttgtgtggtctatgtcacggcacccttgagggagagtgggcaattgcctgaacttggaggctgtgtcctgtccccaggc

SEQ ID NO: 124466 - DNA, 122 bp, Homo sapiens
gcgatgctcaccggcccccagttccttgcttattctttgtgtcttccagtgaccttgtgtcgttgttcatattgtatctcccggagcctggcagtaggaacttaattagtatttgatgaatt

SEQ ID NO: 124467 - DNA, 122 bp, Homo sapiens
actgcctccgcttccatcgaagccgggcactgtcaggcgctgacacacaggcagaggagccggatctcatcctgcacggatgggacatctcaacagccacatcttaggacaggagtacaact

SEQ ID NO: 124468 - DNA, 122 bp, Homo sapiens
ctttgtgttcgccgttcagtgactcttggaataagagccggtgaggtatccccgagcccccggcctgtactgctggcagagctgcactgttagaaacctccagaaggcaactgagacatagt

SEQ ID NO: 124469 - DNA, 122 bp, Homo sapiens
tctgaggcgggggaaggcgtggtggggggtcccctgcggtgggaaccctgcgaggacacccgggcccaggcgcgcggagcggggcgagggcggcagctggagggcgtcgaggccggagcgat

SEQ ID NO: 124470 - DNA, 122 bp, Homo sapiens
cacggctccatttctttgattcctttcactgcaaagcttctggaagaacaactgtctcaccgctcacctgcccattctcttcggacactcctcagccctgcattacaaacccctcacgaatg

SEQ ID NO: 124471 - DNA, 122 bp, Homo sapiens
ggctgcgccagccgtcgggtagaagtcgggcgtcggtctgtctgcggggccgcctgtgtccgtctttccgtccgattgtcggcaggactcgctttcaggaggacctggctgcattcaggacg

SEQ ID NO: 124472 - DNA, 122 bp, Homo sapiens
cggcatcttccgccctccccggcagggtgggcaggggagccggggaagggggtccctgtccgctggaagcccctcagcgctggcacccagttcccagagacagcagcaagcggaggagcaga

SEQ ID NO: 124473 - DNA, 122 bp, Homo sapiens
tctcatccacgaagacggttggggtggtttttccccaggaagtaagagggctatctttagcgagatgcgggctgaggcagccctgggggagtcactaccattgcagccctacccagaggtcc

SEQ ID NO: 124474 - DNA, 122 bp, Homo sapiens
tacatctgtcaaaagagaatttctgctggcccttgcttgagttgtaataaatccataaagcgtccgaaggcagggctgctcgccagggcccatgcctgccatgcacgaagagctgctttagg

SEQ ID NO: 124475 - DNA, 122 bp, Homo sapiens
ccctttcccacctcctctaatggctcagccccagccccgcccccttccctgaacaggggtcgttggacttccgagaggaggcagagggctcagacatgcacaaaagccctgtccctgcatca

SEQ ID NO: 124476 - DNA, 122 bp, Homo sapiens
ttgtttcacagaagacattgggccaaacgcaaacagtgcaggaaacccctgcagatacaacgtctctttttttctttttttttttttagacagagttttgctcttgtcacccaggctggagt

SEQ ID NO: 124477 - DNA, 122 bp, Homo sapiens
attcattccataaacaaattgagcacctactgagtgctagataccgacagttccattctccgtttctcactcgatccctacctctcaactctccaaaccctcttttccccgtttccacaccg

SEQ ID NO: 124478 - DNA, 122 bp, Homo sapiens
gccagttcactggaggactgctggggtggtgcggcaagactgtttcaacgcactacgtcccgagcacgcagcattcatcttgtgcatatccttcatgacaaaacaagtatgcacaaagcact

SEQ ID NO: 124479 - DNA, 122 bp, Homo sapiens
ggcaggccccgcgcctggggcggaggtgcggggagggcgtccagcagcagcaacaccccgcgcgccccgagcacccactgggggtccactcgccgcatcccctgctccaccctctctacttt

SEQ ID NO: 124480 - DNA, 122 bp, Homo sapiens
ggcagcagcgcctgaggctgctccagtggcctcatgatgatggtgacaacgccgcggggacggtggggaccggctcgcacgcatatggcttcttatggctgacgcgccctttcacacacaca

SEQ ID NO: 124481 - DNA, 122 bp, Homo sapiens
cgttgggtcttggccgtctgccgggtgcttactgaaactttgattttccctggggctagacgaccaagttctaaaatgtcccttttctggtgtacagaaataactagtgacccctcgcagct

SEQ ID NO: 124482 - DNA, 122 bp, Homo sapiens
tgggcacggtgctgtccctgtctcccagctaccggaaggccacgctgtttgaggatggcgcggccaccgtgggccactatacggccgtacagaacagcaagaacgccaaggacaagaacctg

SEQ ID NO: 124483 - DNA, 122 bp, Homo sapiens
gtgctggaccccttttgcagcctgggctctgccttgcactatttccccttcctggcctgacggctcctccccctccttaaaaggggcaggttcaggggcccggtgctcttcctcccttccat

SEQ ID NO: 124484 - DNA, 122 bp, Homo sapiens
tttgctcttgtctactgctggagctgctaataaagtttcattcgaatacttgagctgccgcgccctgcgtttccctcatgagcttcttccgcccgcaacacgagactcagcaccacacaatc

SEQ ID NO: 124485 - DNA, 122 bp, Homo sapiens
cagcatttccgaggaaaggggcgctcaggagatatccccacccccgatgaggggcactgtcgtggatgagtttaaaccacgccataggcagccaagaactgagctcccgatggccctgtaca

SEQ ID NO: 124486 - DNA, 122 bp, Homo sapiens
ctcaaagtaatccttgaacggtaccggttatcaatcacatagactgaaaagagagtggagcgccctctagtgactacatgagggctaatgatggcacagagagataatcacagcagctttta

SEQ ID NO: 124487 - DNA, 122 bp, Homo sapiens
taaaaacacgtagacacgaattaagaaaaggaggtccaagcttgagcaagcgatgacagccggtggtgtgtgagtcatggaggatgaatactaagtgcctggaactctgaggttcaatataa

SEQ ID NO: 124488 - DNA, 122 bp, Homo sapiens
tagctctccagcctcttagcagctgcttctgtttggtttctgggcattgcattgttcacacgcacagcttagacatcaggaaatggtttgaagagaaatcgcacgaagacacaattttccct

SEQ ID NO: 124489 - DNA, 122 bp, Homo sapiens
cagtatcatcgttaataccttcaaatataaagcgtgtccagttcctctttttttttgagacggagttttgctcttgtcgcccaggctggagtgcagtggcgcgatctcggctcactgcaacc

SEQ ID NO: 124490 - DNA, 122 bp, Homo sapiens
actcagtctcaacctgcttatgccaggactcctggtgagcccacagcctgggagggcatacgagtaggtcctgtcccataatagattactcagtcctgactcatatagggggcttatgagag

SEQ ID NO: 124491 - DNA, 122 bp, Homo sapiens
agcgatccacccgcctcggcctcccaaagtgctgggattacagacgcgaaccaccgcgcccgactgtcctgtgttttaatgcttgaaaataatctgaatatggaaaatgagtgcacatatcc

SEQ ID NO: 124492 - DNA, 122 bp, Homo sapiens
ggggtgctgcccgttagtggaagctcctcctaacttagaactgaatgtggactctgcccccgggccactggagcccgaactgtcctagagcccatgcccctctggatacagtttcctcagtg

SEQ ID NO: 124493 - DNA, 122 bp, Homo sapiens
tacacgagtttggagggagtctaaggaaaaggaggcaaaggaccccggaggttatatcctcggtggcctcagcttttacacgatctaagtccatcctacggcggatacgctctcctttcact

SEQ ID NO: 124494 - DNA, 122 bp, Homo sapiens
atccacaggtcaaattgccagcatccagcgaggcaccactagcgagaaagtagattatgacggacaggggaggatcgtgtctcgggtctttgctgatggtaaaacatggagttacacatatt

SEQ ID NO: 124495 - DNA, 122 bp, Homo sapiens
gcgacgcacggagggggcgggtcagaaacaaccgggcggaggcgcaccccagggcgcatgcgtgctgtgcggcgcggtctcagggaaggtggggctatggcagctgctagggaccctccgga

SEQ ID NO: 124496 - DNA, 122 bp, Homo sapiens
tacacctgcttcaagattccaatccaccagcgctacctatagacaagaggagaggaatcgcgggcctgcgcagctcacgaaatagacggacaaacaataaacacacaagaggctcccctcct

SEQ ID NO: 124497 - DNA, 122 bp, Homo sapiens
ctccacttcccactagagtgtaagctgcttccacgcatgctactgcgtgctccgagccatcgcagcggagtctcttctcacccagctttgatggtggggcgactcccgtgtctgcagctgtg

SEQ ID NO: 124498 - DNA, 122 bp, Homo sapiens
gatccgcaaacagatgaggctgcagccctggctccctctggtaaatgaggctgcggatgtcgcagagctacgtgactcctccgggggcgtggcctgcatgccccgccctgaccacaccccct

SEQ ID NO: 124499 - DNA, 122 bp, Homo sapiens
tttctcaaaagacggcgaaggagcgcttcggctctcaccagcaaacacacacacacaacacgctcgaaagtgctcagggaaaagtttattggaaacttggccccagagccggggagggttct

SEQ ID NO: 124500 - DNA, 122 bp, Homo sapiens
gagcaaatgcccctcaggcttgtcccacgtcagactgaaatggccaaggctttatcccctcgcctttctcagtcactggctcagaaggggagtacctggggcaaaggagttcacagctgcag

SEQ ID NO: 124501 - DNA, 122 bp, Homo sapiens
cccactttctaactgctagagaaacaagagattagtgcagatggatggaaatattttttccgcttcagcacttgctgtcagaaccaagtactaagaaggttctcagacagtgtctcaggcaa

SEQ ID NO: 124502 - DNA, 122 bp, Homo sapiens
gcccagccctcaggcagcgtggggatctttgtccccagggccagcgccggccccgccccccgccccgttaactccgggactccgccgccctccaggttccaacctcccagcttcaccgccgc

SEQ ID NO: 124503 - DNA, 122 bp, Homo sapiens
gtttggctccatcacctaccagctgtgtgaccttcaacaagtcatacagtatctctgagacgtagtttccttgtctgtaaaatcaggatgaaaataaagctgtactacaccttaaataagtt

SEQ ID NO: 124504 - DNA, 122 bp, Homo sapiens
gctgggaagggttggcgggttgtgcgcagtgactgtggctccggtgggggcttctgtggccgctggtaaccaccttggagggggcacgatggggcacgggcagtgggcactctgtacacggt

SEQ ID NO: 124505 - DNA, 122 bp, Homo sapiens
tgtagggtgctcctgagtcaccccgaatcacccccagccagttagacaggaagccattagcgagaggacaggacagtgactaaggggaaaactgacccccttctttctaggagtctggagct

SEQ ID NO: 124506 - DNA, 122 bp, Homo sapiens
atattttctaagctgagttgttatctcttgacagagtggaatttactttgaaagaaaactcgaataatatgagggttttgtgctattttggtattatttatgcccttgttatgcaaagtgtg

SEQ ID NO: 124507 - DNA, 122 bp, Homo sapiens
ctgggagctgcaagggagaattcctgtcattcctggcctcagttctgcagggaccgagggcgagacacgcctgggcccaggtgtggcgtctctgtccccatctggttttaggtaacaagcgg

SEQ ID NO: 124508 - DNA, 122 bp, Homo sapiens
gtaaagtggagaaatgaaaaaggacctgaacttcctcggtggttgttgagagttaaggcacggggttgatgttttcagatgaaattctcaaagcaagtcagggtggggatggatggtttcat

SEQ ID NO: 124509 - DNA, 122 bp, Homo sapiens
ggagctaattggtctgggtggtggaccgtcccggggggattggtccgagccagaggccggcgcggcgttgggcgcggctggggagctgtgcttctgagagtaggtttccctcgaaagggcga

SEQ ID NO: 124510 - DNA, 122 bp, Homo sapiens
agcatgatgtagagctgtagcaccagttggggcgcgctctccaggaaggtctccaggaggcgcagcatgttgacgtctgcatattcatacatcatagcccagtagaagcgtcgctggtgttc

SEQ ID NO: 124511 - DNA, 122 bp, Homo sapiens
gtaaccatgaataaatgaattttacagataatccccaaaccttatctaaactcttatcttcgccaatagcttcctcttcggccttttaccagagccgttgacaagaggcaaatggactgtga

SEQ ID NO: 124512 - DNA, 122 bp, Homo sapiens
caagaaagcagaatgtgaaaatgctttatatgggggggtggggaatggtggggggtgattcgtggtgatccttaagcaaagtgaaaatttacaggctgcacatccccatacagtggggaaag

SEQ ID NO: 124513 - DNA, 122 bp, Homo sapiens
tctcagaaaatcgcgcccatcactgagggtggacgccccggggctggtgtctttgctccacgtctcctgttcacctgaacccctaggagcagttcctgcaggagcaaagccccagggccagc

SEQ ID NO: 124514 - DNA, 122 bp, Homo sapiens
gtccggcccccgcaggctcggggctgcgtccccaccagaaggcgcttggagtgaggctggcggtcccgcggtcccgggccggtcgccgagcgctcccagcggggacaggcccctccaccgct

SEQ ID NO: 124515 - DNA, 122 bp, Homo sapiens
ggtctgccgccgcccctccggcctcccgcacgcccgatcccgggtcagccccggaggcctcggctgcctcatttgtttgggtcttttgtgccgtggctcccagttggccaagcactcctgcg

SEQ ID NO: 124516 - DNA, 122 bp, Homo sapiens
ggtgaggtgcatagcggtgcttgtcgggaggtgggggctgccaatagtccatgtctgacccggccgggctggcgggcgataaagtgcagctgtagggggaggtggaattggaggacacggag

SEQ ID NO: 124517 - DNA, 122 bp, Homo sapiens
gctcagatgatctatttttcctggtttcagactagaatcatagctggggtctgtccctcgcggaataagctgtgttactgtattccctgttgatacaattccatttggcagagcaggaggtt

SEQ ID NO: 124518 - DNA, 122 bp, Homo sapiens
aatggtggaaggctatgataactgcttctagtcctgcactcccacccctggcaaatgctccgctggctgcccccttctccctcccttttgcttctcccagtcagccctccaggaggcagctt

SEQ ID NO: 124519 - DNA, 122 bp, Homo sapiens
acccaggggaggaggcacgcacgagccgacaccagcaggtggggcaggaaacgcagccagcgcggaaccggacgcccaggagccggccccgggctgcccacgacggggccgccggagaggac

SEQ ID NO: 124520 - DNA, 122 bp, Homo sapiens
gcgaaaacgcagaatgcaaaccgtactttgcaccattatttgcaacttgacagtgaccgccgccgtcactgcatgtttaagggaacccggagctgtttccaacccaggtctgacgtccttca

SEQ ID NO: 124521 - DNA, 122 bp, Homo sapiens
gcggcacacgctcacacccacacacaagtcttcccgggggtgcgccccgggccggtgatgcgtcctcttgttgtgtccggagcccaggcgtggggtctgagcctccatccgccgactgacag

SEQ ID NO: 124522 - DNA, 122 bp, Homo sapiens
gaaagtttccgttcttgttacttgtcgggtttctcccacttccacttagccatgtttctgcgatctgggtaatccctttcaagcccaggaggaattctcccgggtccataattgagggtcgg

SEQ ID NO: 124523 - DNA, 122 bp, Homo sapiens
gagacgtcccggggccaggctacggacttgcggacgagccccccagtcctgggagccggccgccctcggtctggtgtaagcacacatgcacgattaaagaggagacgccgggaccccctgcc

SEQ ID NO: 124524 - DNA, 122 bp, Homo sapiens
tctgctgccatgtaaagtgctgcacatttaatcagggaacagaaatcaattagccacttacgaggctggctttagttaccgagtcggcagggcctgcgctgcagtttgacgctgacagaagc

SEQ ID NO: 124525 - DNA, 122 bp, Homo sapiens
gccgctataagagcgcacggggcagacgctcggttccccgccgtgcctcctcgctggccgcgctccctcccggtgccggcttctctgagtcaccaacctgaggctgccccggccgcctgcgc

SEQ ID NO: 124526 - DNA, 122 bp, Homo sapiens
aagcttctgcagggcataacatttcataattctatgaaataaaataatagctatttcacacggaaattggggagaataaataagcacgactgtccagattttacagacagaagaacatgaac

SEQ ID NO: 124527 - DNA, 122 bp, Homo sapiens
cccatctgtgtgtgtgtctctctccccgtctgtgtctctgtctgtgtctctctctctctccgtctgtgtctctctctctccccgtgtctctctctctctccccgtctgtgtctctctctctc

SEQ ID NO: 124528 - DNA, 122 bp, Homo sapiens
attccaaaaggttctgcacactcggtggagaagattgaattcagagcaagcggatgcccccgaaagcaggctctgtccctttaaatgggttgtagtggtgggggaggggaactggccggagc

SEQ ID NO: 124529 - DNA, 122 bp, Homo sapiens
gtgggggccgcctctgtcccggccggctcggcgggaggctgttgctggcgggaagatagccgcgggcttttctgccgcgtctcgcgggtgggggcaggaagaggacgacccattccctgggg

SEQ ID NO: 124530 - DNA, 122 bp, Homo sapiens
tgtccgcttggatgtcccaccgctgtcaggcatttaatcaccggccagtgtcccctgacccgcgcgacacatggcgcatcaaccgcatcgcagaggaagtctgccccttcctcagcccctac

SEQ ID NO: 124531 - DNA, 122 bp, Homo sapiens
ccacttagcattgtttggggattttctgttgtttccgagattgttaagataatttttcaccgctgctgttttaacaaaactaaatgtgtagacatttgtgagtctttgtcatcagactcatc

SEQ ID NO: 124532 - DNA, 122 bp, Homo sapiens
cggcgcgcgcggctgtctcagaactcatgcagctgttcccgcgaggcctgtttgaggacgcgctgccgcccatcgtgctgaggagccaggtgtacagccttgtgcctgacaggaccgtggcc

SEQ ID NO: 124533 - DNA, 122 bp, Homo sapiens
tgcatcctctgtaatggcagaagtgttctcgatcagcagccttggaaatgtcctagtcagcggcagcgtcggtgctctggaccggcagccatgggaatgtcctagtcggcagcagtgtcggt

SEQ ID NO: 124534 - DNA, 122 bp, Homo sapiens
atttggcggaaacgtggcatggtgaataacgctgagagctgtgcctcgagagttcagacccgaccctccgccctcctcgggccttttgtccacaatttttccatcctccagcccatacaagg

SEQ ID NO: 124535 - DNA, 122 bp, Homo sapiens
ttcaagtttagaatgcgggaggcaactattagtaagatttctctctgaaacaggaaagtccgtttttgactgaaaaaaacaataagaaaaacaagaacaaaattaggagagtgggcaaatct

SEQ ID NO: 124536 - DNA, 122 bp, Homo sapiens
gtgggctgcctgaacagagtctgaggggagggtcactgtccctgggtgcagcctggcctgcggccgcctcgccactcctggtctctggatgctgcgccccgcagtccctccctctcccgccc

SEQ ID NO: 124537 - DNA, 122 bp, Homo sapiens
cctctctcgtccacctggccattctgtgtccctcatcctctgtctccaccgtggttttcccgaatattctctctgtgaaaggcagcaggcccagagcttcccagagcatttccccctctccg

SEQ ID NO: 124538 - DNA, 122 bp, Homo sapiens
catgatcatttctcattgatgagtgcgatacgtctttgcccgtggaaagtgctttaccatcggcagagccttccacgtttacacatgcgcagcacagcaaagggcatctctttttaaaaggg

SEQ ID NO: 124539 - DNA, 122 bp, Homo sapiens
ttgtgaagggagcttccccctcccgcgctttcaggggaatggggaagctgggccgggacgcgcggcagggactttgcaaactctgcaaaagtcccgagtagaccgcagaggctcgcggccgc

SEQ ID NO: 124540 - DNA, 122 bp, Homo sapiens
ccgggagacttcggccccgtggctgctttggctcctctggtaccaagcttagaagtagctcggtggctctctgatctgcaacatcgcagacactgagatagttgagacgcttcttggaggat

SEQ ID NO: 124541 - DNA, 122 bp, Homo sapiens
atgagaaacctggaagaaacgttttactgcgagatggaatattcacctcaaatctcacaacgttaacagaaaatgccatggaaatggaacttcttgactacctactttacaaaaagactttc

SEQ ID NO: 124542 - DNA, 122 bp, Homo sapiens
aacctcataaaattttggaataggaaacagtcttaagtatcatctcattcaaaaaccaaacggtatccctgacaagtggttttctcaaatccgtggaaatacaaccagtggcagggacaccc

SEQ ID NO: 124543 - DNA, 122 bp, Homo sapiens
ctggagaaaacagagaagcagctggaggccatagaccatctgcacctggagtatgccaagcgcgtggcccccttcaacaactggatggagagcgccatggaggacctccaggacatgttcat

SEQ ID NO: 124544 - DNA, 122 bp, Homo sapiens
ggcccaacactgactcaaaaaagatcctttatttaacgcagtgtttttagtgcatgctctcgtttggcgaaagagaaggttttacgttcagaatattaaaagggaccccgaggacaaagcag

SEQ ID NO: 124545 - DNA, 122 bp, Homo sapiens
gaggccgttgcaggggaccagggaggcatctggaccttctggctaggccagcttcaagctcgagttgcggggaggcctctcctaccagcagctaagcatggctatcaacatcctgcgtgccc

SEQ ID NO: 124546 - DNA, 122 bp, Homo sapiens
ctcacattcactcttaccctgtatatttggatgtgtttcctaaaaataccctcttgtcaacgtccccgttggattttccacggactggagaggagaagactgacttttcttttttgaagaat

SEQ ID NO: 124547 - DNA, 122 bp, Homo sapiens
aactgattttcaggacagctaaatcactggccccggctcacacagagcaggaagttgagacgcagtgaggccagcagggtgcgctctcacaaagagctttaccggcagggaagtgaccgcat

SEQ ID NO: 124548 - DNA, 122 bp, Homo sapiens
gcacctgggccacaggagggactcaataaatatttgttgaatgaatggatggctgctgcacgaaatactgacctctgggacagggagctttgaatatgcctctgtagtgatttgtatcattt

SEQ ID NO: 124549 - DNA, 122 bp, Homo sapiens
tcctgggctcaagtgatacctccctacctagcctccccaaatgctgggattataggcatgcgccactgcgctgggcctcctagtccactatttccattcctctttcaccagacggttgtttt

SEQ ID NO: 124550 - DNA, 122 bp, Homo sapiens
gacgcccgagcagaacaattcgttttccatgaccagtgccgcctgccagggctgcgagtgcgggctgcagtcctcgccgtttatgatttggctgcagctaccagagacgagcgatcctgagg

SEQ ID NO: 124551 - DNA, 122 bp, Homo sapiens
ggcactggacagggtccccgcgtgttccggggtcagaggaggcggtggacagggtccccacgtgttctggggtcagaggaggtgctggacagggtccccgcgtgttccggggtcagaggagg

SEQ ID NO: 124552 - DNA, 122 bp, Homo sapiens
tcacatcctggctgatgctcagccagagctccctgactgtgacatgagatggtagagcagcgcaggcccccaaagagcatgacagagtcagtacttgtttgtttttcttttgagttggagtc

SEQ ID NO: 124553 - DNA, 122 bp, Homo sapiens
cggggcccgggaactcgctcacaaaggtttcagtgctcctccctgcggacaccagaagggcgcgctgaggagttcccgggcttcccttcctggaagaccaggttaaaatcccctcctccatc

SEQ ID NO: 124554 - DNA, 122 bp, Homo sapiens
tacgtgtgtccacactcaaatatgtgcgtgtccacactgaccgcccacactaaatatgagcgtgtccacactgaccgtccacactcaaacatgcgtgtgtccacactgaccgtccacactca

SEQ ID NO: 124555 - DNA, 122 bp, Homo sapiens
cttgggggcggggcatcctggtcctgcttgggggcggggcatcctggtcctgcttgggggcggagcatcctggttccgcttggtggggcggggcatactgatcctgcttagggtggagcatc

SEQ ID NO: 124556 - DNA, 122 bp, Homo sapiens
attaccagaacatttactaactacctcatctttccctacactggtaatgtctgtaaaggccgcttacataccaagaaggaataagagctgacaatagtgagctcttactgaatgtcaggcat

SEQ ID NO: 124557 - DNA, 122 bp, Homo sapiens
cggcgggtgagtcctcgcgcagctcccgaacgaagattccctctttgccgccgcccgctacgttgatgccgctgaccccggtctgcgcctccgtctccacgataatttccaccaactccgcc

SEQ ID NO: 124558 - DNA, 122 bp, Homo sapiens
ctagctccgcacgaatgggaaatcccgggctccgctcgccaacctgttactgctgcagaacgccaggaagctcagcctgatcccacagattagggtaaaatatcccggggggccgaagtgga

SEQ ID NO: 124559 - DNA, 122 bp, Homo sapiens
gccttataaggctaaaaggggagatgtaatattctaatgagagcagtagggatgtgcatacgaatcctaaggactggggattcgcaggtgagtaacactgcagacacaatctaccatatgcc

SEQ ID NO: 124560 - DNA, 122 bp, Homo sapiens
gggtggggggtgtcacagagctgggaactcgctcagagccagggtctctgctggggtcagcgtctgtacgctaaagccagggcgcaaagtgcgtgggcactgcggacactagaggcttatgg

SEQ ID NO: 124561 - DNA, 122 bp, Homo sapiens
tctccccagaaacaaactcgcattcctaaccggcatcttggccttgcgctgggggtgacccgcccaagccaccatgaagggacgctcgcacaaagtgaagtccacatacaaacagcccgacg

SEQ ID NO: 124562 - DNA, 122 bp, Homo sapiens
tgcaaggcccttattggttctccatggcaacagggaaacagccctgatgcttcttactaacgtggtcccagggcctctgcttgcattcttctttttccatacactctgccgagcctggatat

SEQ ID NO: 124563 - DNA, 122 bp, Homo sapiens
ttgccatggtcaggaaggcaggaagcaaaaaatgcagctcaccatccagacgccctgcctcgtgctcccgcggactggctgcgccccagactcgggtttcagtagaatcaggatgagcctgc

SEQ ID NO: 124564 - DNA, 122 bp, Homo sapiens
cgccgtgcggggcgcgcaggaggtacccggcctgcccggcggcccagcccggcgccacagcggtcagaccagtcccacagcttcgcccccgccacccccaaccccggcccggcctcagcccg

SEQ ID NO: 124565 - DNA, 122 bp, Homo sapiens
tgacacatcctaccacagccagcagaaacagagtggtgataatgggtcaggtggtcacttcgcacacccaagagaagacagggaagatcggggccccaggtatgtgggcatactcctaatta

SEQ ID NO: 124566 - DNA, 122 bp, Homo sapiens
gacatgcgccgggtgctcgtctctgccccccacccgcccccaaaacccaaacctgcaagtcgatgttgtccggtgaccccgggaaaggagaactttctgagctagttccctctggtcccgaa

SEQ ID NO: 124567 - DNA, 122 bp, Homo sapiens
ggagcatgaatggtgcacctactgcatgctgggcactgttcatccgtgtgtgtgcatgagcgcatgtgtggacaggcatgaatgaatgaatgaatgatatcaaacacatatgtgtgcatgaa

SEQ ID NO: 124568 - DNA, 122 bp, Homo sapiens
cccgtcatctgcttcatcctcttcaaagctcttatcagcgcctacattgatattgtttatcggtagattatctcccttctcccatgtcattccattccaagggggcagattttatttttgtc

SEQ ID NO: 124569 - DNA, 122 bp, Homo sapiens
tttaaatcctcctcccatcgagcttttgaaaaaatcatgatccaggaaaaacagcaactgcgtctgctccattagcaagcgagggagacgcagcctcctcagccttagggctcttttagctg

SEQ ID NO: 124570 - DNA, 122 bp, Homo sapiens
ccatgatgtgtataaatacatgtatgtatgtgtatactgcattttctttatccattcttccgctaagggacacagattaattctatatctttgctattgagaatagtgctgcaataaacata

SEQ ID NO: 124571 - DNA, 122 bp, Homo sapiens
cacaagatagtggagatggcccaccatggcatccggccctgtgtcatctcccgacagctgcgtgtctcccacggctgcgtctccaagattctttgccgctaccaggagaccgggtccatccg

SEQ ID NO: 124572 - DNA, 122 bp, Homo sapiens
cgaagaagatctggtcagctatgggaccgggctggagcctctggaagaaggtgcgggccgcgtgggccggcggagcctgtggaaaacaggccaagggcccaggattcgggccacaaaagcac

SEQ ID NO: 124573 - DNA, 122 bp, Homo sapiens
aagcaggagagagaagtgggccctgggagttcaggctgcgcgggccgcagcccggactcacgtagagggaatcacggagagaggagccaagggggaagccagtcgccggcttgaagagtggg

SEQ ID NO: 124574 - DNA, 122 bp, Homo sapiens
ggaccagcctatagccccaccccctctatctacatgccagcctagccgagggccactgaccgatcaaagatggctcctactcctgctgaatgggctgagttgcggtgcacgtgaagacctgt

SEQ ID NO: 124575 - DNA, 122 bp, Homo sapiens
caagcatttaagggttattttgggggtaatagtgttcaaaaacctaatgctactgctgaacggtctacaccccaccaccaccagcagtgtttccaaaagggaagaagaaaaacacaaaagag

SEQ ID NO: 124576 - DNA, 122 bp, Homo sapiens
cttcactcctgaggcggcgagaccacgaacccaccagaaggaagaaactctgaacacatccgaacatcagaaggaataaactcccgacgcaccaccttaagagctgtaacactcaccgcgag

SEQ ID NO: 124577 - DNA, 122 bp, Homo sapiens
ctgctgaggcaccaggaaggaggccctcagagccacacttagaaagtgggtggcaggagccgggccctgaagggcatgtgccactcttgctgctgggagttcacccacgctgggtgggatca

SEQ ID NO: 124578 - DNA, 122 bp, Homo sapiens
acctgggaggtcagccatgcctgtgtgaccaacccaataaaaaccctggacactgaggtacggagggcttccctggctgctgacatgctgtgctcattgtcacacctcagtgctgggaggtt

SEQ ID NO: 124579 - DNA, 122 bp, Homo sapiens
agcagccagttaaaatcccaccctgtgggcaatgaggttcaagccaccctggttctgctccggttatcaatgctggggaaagcacactccacataatgccagtgctccggagcagcgtcgtt

SEQ ID NO: 124580 - DNA, 122 bp, Homo sapiens
cctgacctctgactgttctagatccacaatccagcttcttcccgtctcgatctcgcatgacgctcgcactgcacacaggagccgtcagcctctcgagtccctgctgtagtttcaagtctgtt

SEQ ID NO: 124581 - DNA, 122 bp, Homo sapiens
gcggcgggctgtgggtggcggctgaggcggtggggtaacctctgcatcagttacaggcggcggcggcgtcacgcgccgcctgtgcaaacactatcgcgaggctcctgcgcctccggtagcgg

SEQ ID NO: 124582 - DNA, 122 bp, Homo sapiens
gtcctgtgcacaggccaggggttcgagtgggcatcagcaatgctcacttcagagcccctccgccacgacgtggccatgtgcacacagctccgtggccagcgctggaaactgcgtctcctgcc

SEQ ID NO: 124583 - DNA, 122 bp, Homo sapiens
gaacggccggaaacgccacacgtgcctccaggtggcaagccagctcctcatagacgcacacgaacccttctgcaagtggggtgcatgtgtatatttacacctatagggattgggggcctcag

SEQ ID NO: 124584 - DNA, 122 bp, Homo sapiens
ccctgcacaagccagtagatttgtgctcaaggcacacgtgtgcacatgcgcacacacacacgcagcattccaaacacagtttgcagactgaaatgtgggacaccctcttgctacttcttggg

SEQ ID NO: 124585 - DNA, 122 bp, Homo sapiens
agtgcttgtgaggatgaatccatactcattccctttgttttcatcaaacctccctgagcccgtgtgctaggccctgcacacaatcctggagaggtgccccctcacaggccactgggggaggc

SEQ ID NO: 124586 - DNA, 122 bp, Homo sapiens
tccagcacagcctggcctgcagcggatgcgggcgtgagagggacgcaggagcagcgggggcggggatgctgctgaccgtggagaaagcaacctccttccctgaggggcttcccctctctgcg

SEQ ID NO: 124587 - DNA, 122 bp, Homo sapiens
ttctagttttccttactaatacctactctagtaaacctggcctccaataattcctgccgtcgtgggtccaggctatgcaattcttccatcatttctggctggcagagcgtctcccgagacta

SEQ ID NO: 124588 - DNA, 122 bp, Homo sapiens
agtgcacccagggatcttatgcccctattgcaggggtgaggggcccaggacagcatgagccgggagaatggccaagggctagtggcacgcaccctggcctttcccaggccctaaacacagag

SEQ ID NO: 124589 - DNA, 122 bp, Homo sapiens
cgggtgggtatcgccgtccatccattcgatggcctcgctgatgagcatagaagatgaacccgggaggactgtcccttcctggctgcgaaacctgaccgatataggggagattctagaagaaa

SEQ ID NO: 124590 - DNA, 122 bp, Homo sapiens
gggagctctcaccgtccggaggtgcagagggctggggatgctgccctggctgccctgcgccgagccaactctgcatcaggaggcaggtgccgttatcatcccattatttacagatggggaaa

SEQ ID NO: 124591 - DNA, 122 bp, Homo sapiens
ggggtcctggaccacacgcattctcactctgtgattttgcttatcccccaggtgaggctccggggctgcctagaccctaggaagaagctgtcctgtagaactttctgccctgatggaaatgt

SEQ ID NO: 124592 - DNA, 122 bp, Homo sapiens
gacagactgatggggggggccgcgggggtggaggggtgatgggggtgggggggtggggggcggagggtgtctctcgggtggcctggagcaccagcagtcaattccttcacttgcaaattgcc

SEQ ID NO: 124593 - DNA, 122 bp, Homo sapiens
agtgcccttctttagggcagcagctgccctctgaagatttggatgaattccaagaaagaccgtccttcgtgtctttcacctccgcgcctgctccctgcccctcagccttgtcccgttgcgtg

SEQ ID NO: 124594 - DNA, 122 bp, Homo sapiens
caaggctcctccctcctggtgaaagacagactacggggcgcctggaaaccggtccgagggcgcgcgaggcagaggagagggagcgagttgagggattgacacaaatggtcaggcggcggcgg

SEQ ID NO: 124595 - DNA, 122 bp, Homo sapiens
gttttgcaagaacccaatttaatggtttcagtagaagcacttgagggttattgtgggccacgcactgttgggtctgggagtgatgagcttctagggagcagtctggtgggagggctggagga

SEQ ID NO: 124596 - DNA, 122 bp, Homo sapiens
catcaataaaacaacaattaaaaaaaacacaatgataatatatcataccttcccatattgcgatgttaaacctcttggtttcttgagcaataattcttaccttaacttcacgttaaaattag

SEQ ID NO: 124597 - DNA, 122 bp, Homo sapiens
tcagtgaaggggggcgcgctaagtagtttaaaacgaccctcgcacaatgggcgtgccatacgaaacatagcaggttagggcagcgctttcagcctccattgtcccccactcggcccccggcc

SEQ ID NO: 124598 - DNA, 122 bp, Homo sapiens
tcctgggcaagcctctttcctcttcctctgaaactccgacttcttccggagggcttcgctcgttccgagggtcctgcgactggaggaggcacatccctgagcagccactccctccccgcagc

SEQ ID NO: 124599 - DNA, 122 bp, Homo sapiens
ggctgcgaggacgtcagaggaggctggacccgcagccacgtcaaccggcaaccccctccccgccaacacgtgaccggacccccaccccaacaggagccggagccttccaggtggaaggagcc

SEQ ID NO: 124600 - DNA, 122 bp, Homo sapiens
gggctgcagagttgaaagtgcacctgaggcgaatgggccattaaacacccaatactgagacggtttcggggaggatgcggagggaggagcttcacctagttgagcattcagaactttgggtg

SEQ ID NO: 124601 - DNA, 122 bp, Homo sapiens
tgctctgccatcctcaagaggctgcatcatgtgatgaccctgagctgctccagttcccaccgtcaagttcccatccagccatcaggaaaggaggagtgatggaagtgaaatgcaacaccttt

SEQ ID NO: 124602 - DNA, 122 bp, Homo sapiens
aatgtgctatgagacacctctgaggggactcctgatctggcactacctcctcctcttcagcgtccaggggaaggaagaccagggtctcccaaaccctctgctgccaggcagagtgcagtaaa

SEQ ID NO: 124603 - DNA, 122 bp, Homo sapiens
aaagcctctggcacatggcaggcgctaaataaaaatgggggcctctctcctcgggaaaagcgaacaggcggagacgatgaagggtgccagtgggaaagggagacggggtgggtcggcggcgc

SEQ ID NO: 124604 - DNA, 122 bp, Homo sapiens
gggagagaggaagtcctgtgattggccagatctctggagcttgccgacgcggtgtgaggacgctcccacggaggccgggtaagcggccgctgcgttttgggtcggcccagtggctccggact

SEQ ID NO: 124605 - DNA, 122 bp, Homo sapiens
gcacacttgttcctgccgacacagggaagtcttcttagcagctaaagagggcagcctctgcgtactgcctgggaacatggcaaaaccattttaggctttaaaaaaaaggtggagaacaagtt

SEQ ID NO: 124606 - DNA, 122 bp, Homo sapiens
gaacttctatccaccatttattttgcctcatcagtgcaaatgtcaacatagcgaaaatgacgaataacactttagtataattatgaaaattataactgcacaaccactccaaacaggccctg

SEQ ID NO: 124607 - DNA, 122 bp, Homo sapiens
tgtgtgattgtgtctgttctgaccaacgtgctcgtgggtggaaacaccccaaggaaggtacgtacggctggttcctgggagtgtgacgtagtccttctgctcaggttgttcttgttatttca

SEQ ID NO: 124608 - DNA, 122 bp, Homo sapiens
agccgccgccgaactggctaagtttaggggcatttattattcatgttcctgccagatcctcgcctgcccaaaatagaaaccgaggttctccgtgacctacatctgctcggagaagggctccc

SEQ ID NO: 124609 - DNA, 122 bp, Homo sapiens
atgaactaggcccttaaaactcctcatggctccctacccaccacactagtgttaacggctcgattagggctctgtaggaaagggaaagaagtttgaatcaaaaattttctttttttttttaa

SEQ ID NO: 124610 - DNA, 122 bp, Homo sapiens
tgcgggactggccaggcgccgccagccgcggcttcgccccgcgtcgccagctgccaacagcgcccgagtccccgccttcgctaggggagaaaaaaaagactcctgacgcggcgcggactttg

SEQ ID NO: 124611 - DNA, 122 bp, Homo sapiens
actctgtgactgaaacgctgtctgcttttctctaaccgtgacaggaagtcaaggggaaaccgtgggattcaaaggtttgaagtacttcctcgcgtactgctaaaggagtcgaccacaccaaa

SEQ ID NO: 124612 - DNA, 122 bp, Homo sapiens
cacctccagcctgagataaccagcagttggttcttcttccggctgttctgccctccagagcgaaactacaaacctctctctgatgtttctgagaccctagcacaaagctgggcgtggagaag

SEQ ID NO: 124613 - DNA, 122 bp, Homo sapiens
gacagtgtccatcttggctacagaaagggattttcataagccctctcttgtagagcttgccgtttaaaagcagcccacatctctgttgaagaatgggagacttgtattctgtgaaacagctt

SEQ ID NO: 124614 - DNA, 122 bp, Homo sapiens
cccgcaaagggacctggcaacccctgagctggaatctggaggcaggaggaagacctgggacgggattcctctcatgcctggaacggactatgtggcacctattggggagagacagcaggcag

SEQ ID NO: 124615 - DNA, 122 bp, Homo sapiens
agactctaaatgtctagagtctattatttcatgccctggactcctaggttgacctccttccgtctccgaaatgtccaatgggaaaaaacttgtggtatctcctggacccaccccctgcatcc

SEQ ID NO: 124616 - DNA, 122 bp, Homo sapiens
aatatcccacacttcaggaacactatgaactgagctaagcaaagcagcaggcatccctagcgcaggaaggaaaagccacagggtggaggggggtgggtcattaatctgccctaaggcctaga

SEQ ID NO: 124617 - DNA, 122 bp, Homo sapiens
gagtcctggccccagggcaggccccgctccaagaacctgatcctttggctggggcagggccgtagaggtgggcgcagagcttcggggagctggctgtggggtccgcgcatgcagcccgcagg

SEQ ID NO: 124618 - DNA, 122 bp, Homo sapiens
cgatctttctaagatcactttttaaaagaaacaaaaactttcaagactccaactggtccccggggacagacccccactgttctgtaaggcagaatgccatgttacaaaccagtgaaccgtct

SEQ ID NO: 124619 - DNA, 122 bp, Homo sapiens
tccccaccccggcagcacctcttgtaaaaagcagaaatagcctctacatttgccagagagcgtgggtgcagggaggggaggctaaggtggagtcgttagggtctctaacgaggcttggttcc

SEQ ID NO: 124620 - DNA, 122 bp, Homo sapiens
aggtggggcctgctggcaccggggtccctccaccctgctgaaagggtctcctggctgcatcgcagctaacatcccttccttcctgtcgggcagccagagcagctgagttccagataaaaact

SEQ ID NO: 124621 - DNA, 122 bp, Homo sapiens
tggaggagtggatggaatacgagctgcagatgcaggccttcaacgccgtcggggctgggccgtggagcgaggtggtgcggggccggacgcgggagtcaggtgaggggaaggcgattcccatc

SEQ ID NO: 124622 - DNA, 122 bp, Homo sapiens
tttcatatatacatttatcctattcactatgtccctctagagaacctaaggctctaacagcgacgttcagaggatctacagatatctgcggtagacacgcccacgaagtcgcctctgtgcct

SEQ ID NO: 124623 - DNA, 122 bp, Homo sapiens
tactttcatacccattaggaaggctattatcaaaaaggaagaatggaaaagaaatgctggcgaggatatggagaactcagaacactcccgcagtgctggtgggaatgtaagatggtgcagcc

SEQ ID NO: 124624 - DNA, 122 bp, Homo sapiens
aaggcctgaggaacaggatacagaaagtggcagcgccgccaggtgatccaggaggtcccgcgagggggcaacggacacttcagggcaccagagtttgctcttcggcctgaattccctaggga

SEQ ID NO: 124625 - DNA, 122 bp, Homo sapiens
gtgttcttgaaactctcacagtgatggtcacaagaatagaaacattccataacttttgttcgtttctctcctctctcttcataagatctagctgatctgtatagtttctcttgaatttgctg

SEQ ID NO: 124626 - DNA, 122 bp, Homo sapiens
ttcccagccgcgggggccaatcagaatgtaggggttggctcccggcttcattcagtgctccggctcccattcataaaaaaataaaactcgcggctggagttcattcataaagaaccgagaga

SEQ ID NO: 124627 - DNA, 122 bp, Homo sapiens
ccggctaatttttgtagttttagtagagacggggtttttccatgttgactaggctggtctcgaactcctgacctcgtgatccaccagcctcggcccccgaaagtgccaagattgcagaagtg

SEQ ID NO: 124628 - DNA, 122 bp, Homo sapiens
ggaagaaactcccttccttcaatttctcagtgacattgatgaggggtcctcaaaagacctcgagtttcccaaaccgaatcaccttaagaaggacagggctagggcatttggccaggatggcc

SEQ ID NO: 124629 - DNA, 122 bp, Homo sapiens
gtaatcccctaggtttgcagtatacagccaagatcagcaagctaaaaatagcagttcttacgtaaggtagtgtgggcagcccttctcaggacacttgtgatctgcaggggcaagtggaacgg

SEQ ID NO: 124630 - DNA, 122 bp, Homo sapiens
ccacccctccctttatcccaggacttctgaggttcccacttcagccttggtggtggggagcgggtagaggaacatctgtcaccttcttttggagcctgctcctaggtcagtggggccagaaa

SEQ ID NO: 124631 - DNA, 122 bp, Homo sapiens
ctggctccagccggaagacctgccgttacattccttccctgccagaccgtatcctggatgcgcctgaaatccgaaatgactattgtaagtgcatccttatcctcgcctcatgcatggagaaa

SEQ ID NO: 124632 - DNA, 122 bp, Homo sapiens
aaggtttctttgtagaatgtgggaaagtccttgaagagacacccggagcagtgtcaggggcgcttccaggagcccctgcctccaggagcaggtcctagggtctggagagccggcctcagggc

SEQ ID NO: 124633 - DNA, 122 bp, Homo sapiens
ggcctcgtgaggttgcgtcgcgcgcggagcactctgggacttgtagttctggagatggagcgagctgtgccgctcgcggtgcctctgggtcaggtgagacggacgtggtgcgcgttgccttc

SEQ ID NO: 124634 - DNA, 122 bp, Homo sapiens
ggcgtccactaatgagatgaacctgggcgcgcagcggctggacctcagctgctagggcgccgccaaggccctgctggacaccttctggtacctgggcctcgtgtattacacctgtggctgcc

SEQ ID NO: 124635 - DNA, 122 bp, Homo sapiens
gcgtgccctggtgttcagagttctgaatcgttgcgagtcagttacaagctgaaccactagcgtctgaaccctatacatctgaagccgggatgaaattcaggagttctattcccccttctcct

SEQ ID NO: 124636 - DNA, 122 bp, Homo sapiens
ctgaagaaagttctgtccaaatcctaaaagcaaaacaaatttcctgaaccccatcaggtccgctgcctgcatgtagaaagaggagagtaaaaccgatgcacactggactcacccaaaggcgg

SEQ ID NO: 124637 - DNA, 122 bp, Homo sapiens
tgcagtcctgcagaatgtcgagtggtaagtctcatcaaagcaggagctgtgtgaaggacgcgcaagggtttctgatggggttttagaaagtccttggaaacagttcttatctcagatatgga

SEQ ID NO: 124638 - DNA, 122 bp, Homo sapiens
ggggcgggggggggggtccgggggccgggggagcgtcgcgctgacggcagccagagcctgcgatgacggggctgctataaataacttcttggaggctcccacacccaagctcccctcccgct

SEQ ID NO: 124639 - DNA, 122 bp, Homo sapiens
ggaagaggaagggtgtggttcagagttgagaagagcacattagtaaactactggagatcacgatagaattgatagatcacaaagaaaggaagacatggaaaagcaagacgttgcttcctcaa

SEQ ID NO: 124640 - DNA, 122 bp, Homo sapiens
ggaagagtgaggggcagaacggaggtggctgggacttgggtcgctggcatccgagaagggcgcgagatgctcacagtgtggctaaagcacaaagccgtggaatcagccagagagaggctggc

SEQ ID NO: 124641 - DNA, 122 bp, Homo sapiens
catacacacaagcacacagatgccagcacgtacacacctgccctcccacacatggtcacacgcttacactccattgttgcatgaccttctccagatcagcacctgccatgtcctgcctgcca

SEQ ID NO: 124642 - DNA, 122 bp, Homo sapiens
ctggctcgcccctcactggtcacgtatcgcatcctggctcgcccctcactggtcacgtatcgaatcctggctcgcccctcactggtcacgtattgaatcctggctcacccctcacttgtcac

SEQ ID NO: 124643 - DNA, 122 bp, Homo sapiens
ccggccctaccaggcctggagccaccaaagccacgagagaggtgggcgccgtcggccaggcgccctctcggtgcgcacacacgcgcgtccccaggcgccgctgtgcccccgccgcccaccac

SEQ ID NO: 124644 - DNA, 122 bp, Homo sapiens
gtgcttgagtgtgtggccatggccgtggagggaagttcatgccagtgagctgggctgtcccgagacgcctttaatgtcaggacgcacggggtctgtagctcacccgttacccactccacatg

SEQ ID NO: 124645 - DNA, 122 bp, Homo sapiens
ctgcacggcagaagcaggacagggggtcagcggtggcatttggtggtggaaatgtgtgtgcgcctgttcacatgtgttgtacgtgtgcacatgtgcactgtgtgcacgtgtgtacacacgtg

SEQ ID NO: 124646 - DNA, 122 bp, Homo sapiens
tgggggtcttctggcaggagatcccctccaagcctgcccaaacctaacatggggggttggcgagcagagcaccagaagggccctgagtcctgaacctccattcttaaaaggccttaaaccat

SEQ ID NO: 124647 - DNA, 122 bp, Homo sapiens
ccccaagacctcagagtgccaacagtacccattatagactccctctggggctgcgcagaacgcaccaagcagagggggggaaaaaccccacgaaaacaaaaacaaacaaaaaaaaaacagga

SEQ ID NO: 124648 - DNA, 122 bp, Homo sapiens
acagtttatgaagcactttcatacgcaggcatctcttgttacctacatctaagctgttcccgaaagagtgttacagaacacaacagtattgtacaatattcgataagcatatcttcactgca

SEQ ID NO: 124649 - DNA, 122 bp, Homo sapiens
gggcaacatggtgagagcctagctctacaaaaaaatttaaaaaatagccaggcatggtggcgcatgcctgggatcccaactacttgagaggttgagatgggaggatcacttgagcccaggag

SEQ ID NO: 124650 - DNA, 122 bp, Homo sapiens
aaaatcaatcaatcaatctcgcttgctcagtgggcctcttggttctgtttctctggagaacgtaacacagatttttggtacggggaatagggtactgctgtaacaaatacctaacaatgggg

SEQ ID NO: 124651 - DNA, 122 bp, Homo sapiens
ggcggatgggggggcagtcgtgacggttgggcgggagtgaagctcctggccccctccccgcgggctcttgcctctgcagggcagccagatcctcccacccggatcgccctagggctccaggg

SEQ ID NO: 124652 - DNA, 122 bp, Homo sapiens
ctctgtctcattaaaaaacaaaaacaaaaacaaaaagcgggtacatcaatgatagataatcgacagacgcagactgagtggccagtagtcaaaagcgcaaccgagggccagtggcgcaatgg

SEQ ID NO: 124653 - DNA, 122 bp, Homo sapiens
ctaattacaggtaaaaggcatttttcatcctcactcacagagccacagaactattacagccgtctcccagctggtccctccatctttggcctgcacctccccctctcccatccactcctcac

SEQ ID NO: 124654 - DNA, 122 bp, Homo sapiens
ttatcccagctgaggagctgtagcattcggtcacagggaagcgctgctaaaaataaacgccggaccggattttcctctgcaaactagaaaatggattggactagtactgcgtgcatcaggac

SEQ ID NO: 124655 - DNA, 122 bp, Homo sapiens
cgtcatcctcgccagctggtctggacggttcacagcagggtgcggtccctgggctggggccgaagcctggctgcacagaccttggcactggtcccaagctcagccccaccagtcttgtccat

SEQ ID NO: 124656 - DNA, 122 bp, Homo sapiens
cacctgtaatcccagcactttggtggacggaggtggatggatcacttcagcccaggagctcgagaccagcctgggcaacacagtgagaccccatctctacaaaaaatttaaaaattatctgg

SEQ ID NO: 124657 - DNA, 122 bp, Homo sapiens
agacccagcataccagctccctccacggggcctgacagtaagtgctcaagaaatgctagccgccatggttataattacgagtacaattgtgattacgagactccattgttttcttttctttt

SEQ ID NO: 124658 - DNA, 122 bp, Homo sapiens
tccccaaagttgtcaaccggccccgcccccacccgcccttcgtcccctccgcctctttgtcggaaaaggccaccttaggtgagtgacagtggagctccccggtgcctgccagggccgcctag

SEQ ID NO: 124659 - DNA, 122 bp, Homo sapiens
cggcgggcggcggcgttcaggatgagctctccggctcggacgcgtgcagtaggaggccgccgccgccgccgctgctggacttgtgcttcttcaacagctgcgtgattttctcgtcgtccgag

SEQ ID NO: 124660 - DNA, 122 bp, Homo sapiens
aacttccctctcaggcctccactcccccctcctttgtactgtgcatcctactctgacttccgtggctggggcagatcaaatgtacattctcagtgtcccctggtaacaacctctcccttgcc

SEQ ID NO: 124661 - DNA, 122 bp, Homo sapiens
aggctcagcctgccccgggtcctgcagctccctggaggcgacctgtcctgcccctggtctcggagcaggcttggccggcctctgcccaaaggtgcacagcccccgcttccttgggggcaacc

SEQ ID NO: 124662 - DNA, 122 bp, Homo sapiens
caatcctgtattttttgtgataatcaacaaggacaaaacttctccatatgtaaataacagcgttatgagcagcaattcatccctgctggtggctgtgcagctgtgctacgcgaacgtgaatg

SEQ ID NO: 124663 - DNA, 122 bp, Homo sapiens
caaatgtatttatgctattaccagcatttacatcaacaaatgtggacagagtgctcaccacgtgcttgtgcccctaaggaccccacctgggaagcctccctacctgaaatgtggacctccct

SEQ ID NO: 124664 - DNA, 122 bp, Homo sapiens
gaatgaaaatgcttggcattggagtgaagaggaggggaacataggagccatctggggccacggaggtctctcgcaggccactagggactacaccagcatccacctaaatgatttctctctcc

SEQ ID NO: 124665 - DNA, 122 bp, Homo sapiens
aagaaaaaatggccaggcgcagtggtggctcacgtctgtaatcccagcactttgggaggccgagtcaggcagatcacgagatgaggagttccagaccagcctggccaatatggtgaaaccag

SEQ ID NO: 124666 - DNA, 122 bp, Homo sapiens
gcccgcgaagttctgcagcactccgtagaagtaggaggcggccgagagcaggtcggccagcgacaggaagagcagcaggcgccgtgcccggctgcgcaggtcgggccacagggcgtgcgtgg

SEQ ID NO: 124667 - DNA, 122 bp, Homo sapiens
tgaaagatcctcttcagaggacgcaggtttagtgtcaccacataagtttcatgctagttgcgcctgacagggcccctcagtcaggctatgtggtttctgcttccctggagcagctccgaagg

SEQ ID NO: 124668 - DNA, 122 bp, Homo sapiens
ggtggtcgcgagggaaaggcttgtggcatcagagcctccctcacagcgtctacagagctccgagcagggctggtttttctttcagtgaatcgctgtcagctgcagaggggacgcctttgggg

SEQ ID NO: 124669 - DNA, 122 bp, Homo sapiens
gccctgcctcgtggttcagatcttggcccaggcacgaactgtcagagactgtcagtttgtcgtctcggcttgtgggctccagtgctgtgtttggcacctcagccatgggtctgaattgatgc

SEQ ID NO: 124670 - DNA, 122 bp, Homo sapiens
ctgtccaatatggtagcaaccagctacatgtggctattgagcccttgaatatggctagtccgaactgacatgtgctgtaagtgtaaaatacacactggatttcaaaacaaaaatgtaaaata

SEQ ID NO: 124671 - DNA, 122 bp, Homo sapiens
gccatctccactgccacctcgtgcgaggcccaggccgggatcccccgccagagctgctcccgtaaatgctcatcacctcctgcagagcccggggtcgtctgttatgcaggcagtgaacgccc

SEQ ID NO: 124672 - DNA, 122 bp, Homo sapiens
cagcgcgacctcaagccaggacttctgcgaggtctcaggtccgagggccaggtcgggcgccggttgcaccgcccaccgcgcgcctccccttcgtccccaggccctggtccggggctcttgct

SEQ ID NO: 124673 - DNA, 122 bp, Homo sapiens
gaattattggctcaggactaggctggcactgctggtagccaatcttttttgcatgtttgccgggcctgctgcttgtccactcattgcacccccacataccctgccccctcatgctcttctcc

SEQ ID NO: 124674 - DNA, 122 bp, Homo sapiens
taatgtttgaaattaaagctatcctctgcttgaaatctacacagtcacaaccaacatgtacgtgatgatgtatacatttctatggtacttttcaaatgcatcttctcatgtaacaatagtgc

SEQ ID NO: 124675 - DNA, 122 bp, Homo sapiens
cgcttgcagcgggtggagtacttgcggagccggcaatccaggctcccctcccagcccccgcgcagaattagcctctctgtgccgccgggaaatcggcaattagaacgctccttgcgcgcggc

SEQ ID NO: 124676 - DNA, 122 bp, Homo sapiens
gaaacatacctcaagacaacatattttgcagaatagcctcacctgtgggtggtgctgaaacgttttaattttttttaacttgacttccctaaatcctacatttgagaggcctacaacagctc

SEQ ID NO: 124677 - DNA, 122 bp, Homo sapiens
aggcccccacttgacttcctgtgatctgggccccctcacaggaaattgtgggcaggaggtcgcagcgcagaagacggggagggggctggggactcaatctccgcctctcccggctggggtaa

SEQ ID NO: 124678 - DNA, 122 bp, Homo sapiens
gactgacctcaggtcttcctactactacctccaaccccctacttaattggcccaaatctccggccacctggtggactctgggctgctctctaggtcgaggctcctcttctagcagcctgctc

SEQ ID NO: 124679 - DNA, 122 bp, Homo sapiens
ccactcagaactatcaggcgtatacataggtcatatcatacaattcccttgcgcaaacttcgtaccatgtttccctttacatgtgggatagaaatcacaacatttaaatgttcctcaagtcc

SEQ ID NO: 124680 - DNA, 122 bp, Homo sapiens
cagttatgaagaaagcgacgaaaacatgccgaaaacctggctcacgcactgtgttcatggcgtgtggagggggcgcttcgaccatcaaaggaagtttggaaggaggcagagttcggtggcct

SEQ ID NO: 124681 - DNA, 122 bp, Homo sapiens
gtctgcagcttagaggcgcagggtcatcatcctcaggcagtgacaagccctgtggctctgcggttctggcgctggtcttgcggcggttctggctccggtcttgcggtggttctggctctggt

SEQ ID NO: 124682 - DNA, 122 bp, Homo sapiens
tgaactacatctcccagggttccccggggcggaggacgcccacccggattggccagggttcgctgacgctcagtgttttggcccggacggtcacatgtttcctttgttgtgagctgcggcag

SEQ ID NO: 124683 - DNA, 122 bp, Homo sapiens
ccagtaaagaggccataatacaggccagaataatagtggtttggggcagggtggtggcctcgcaggcatcacgcatgctcagaggtgcaagtcagctccagggggactcacatgcacatagg

SEQ ID NO: 124684 - DNA, 122 bp, Homo sapiens
ggatagcagaggagttccgggtgatcttgcctaacgagcaggaaactgtgcatggtttctcgagtccttggagagtgaaggcccccggggtcgctcccgggcacggagagacgattggttca

SEQ ID NO: 124685 - DNA, 122 bp, Homo sapiens
ttacctgcctcaacaaggaagtctcatggaagatactagcatcaactgagattcagttcgcgaggaagatacttttcgttcttttttttttttttttttttttttttgagatggagtttcgc

SEQ ID NO: 124686 - DNA, 122 bp, Homo sapiens
cgcgtgggagggacgcagggctggcgcgcagagggtggtgtgagtgcgcggaacgcggcgcgcctgagggctatagctagcgcaggccgacgcgcaggtgaatgggagccctgtgggtctcg

SEQ ID NO: 124687 - DNA, 122 bp, Homo sapiens
ctttccagcgcccgggttcccaaaccatcgctaaaggcggacggggggcgccaggagtaacggctgctccccggagaccccaccgagcccagcgcccgcccccgccccctgggcgccctgcc

SEQ ID NO: 124688 - DNA, 122 bp, Homo sapiens
gtagctctcagcagatggatggggagccagaagagggagtgggaaggtgtccctggagtccggctgctcggcggctggactgtcctcccaccatcccagccaaattcctgtcggcgtctatg

SEQ ID NO: 124689 - DNA, 122 bp, Homo sapiens
caatgcacctttcagtgcaataggagctatccaatctccagccgcgtccatccgcccactcgagcccacctgtttgcggaccacagagcggcagcacatccctacacggggctgtcaggcaa

SEQ ID NO: 124690 - DNA, 122 bp, Homo sapiens
atatatatgtcattcacctcttccttttggcttctcactgccaaagttccaaatggcatgcggtttaacaagacaatgctgaggaaagcagcatttctgatcatctgaattggcagctcaaa

SEQ ID NO: 124691 - DNA, 122 bp, Homo sapiens
agctcccctctgccagagagatctgagcatttcatcactggcttaaaaccctccagcctccgccttgctccctcatcctgtgaataaactccaaatcccttcccgggtcacactggcctctc

SEQ ID NO: 124692 - DNA, 122 bp, Homo sapiens
taggtgaaaagtcaatgtttacgaacaccaacactttttgcttcccctggtcctgttctgcggatgtcagaccccaaagctgaaaaagaaatgttcctgcataatcacccccttcccccaaa

SEQ ID NO: 124693 - DNA, 122 bp, Homo sapiens
ttcgatttgaattcactttctgccgggaaagctgctgcataggcaaagtgtcctttccaacgcttagggccttgggccccaagaccccgaagtcaaagcgatcccggctgtgttgggataat

SEQ ID NO: 124694 - DNA, 122 bp, Homo sapiens
ccccgcagatccccagtggagaaagagggctcttccgatgcgatcgagtgtgcgcctccccgcaaagcaatgcagaccctaaatcactcaaggcctggagctccagtctcaaaggtggcaga

SEQ ID NO: 124695 - DNA, 122 bp, Homo sapiens
ccagatcccacgaacaaagctcgctccggagcgcccctccaccatgacggctggggccctcggtgccaggggaagtgagacgatgcaaacctctggtcctcaggcccctccggagatgagta

SEQ ID NO: 124696 - DNA, 122 bp, Homo sapiens
cgccctccaggtaggtgtcctagctgcaaagggattgcttggggcgggcgccaaggtgcccgcatcgcggcccgggggcattgtgcgcctccggcgggccgaggaccccgagggacgcgtgg

SEQ ID NO: 124697 - DNA, 122 bp, Homo sapiens
aagtccctctcgtcccggtcttttttttgcctgtccaccatctccctattaccctttggtcgagagggaaagcagaagaagtaagttccctctaccctcttaaatcggtgtgagtgtcggcg

SEQ ID NO: 124698 - DNA, 122 bp, Homo sapiens
gtgtggttgtgggagcacttgatgtcgcggaagaacttctgggtctcgcgcaggttctgtcgcagccgtcccaggtagcggcggtagcggccgaagccccggcacagctcgcggatcattcc

SEQ ID NO: 124699 - DNA, 122 bp, Homo sapiens
ggcgagccaggcctgggagaatccggggcagctctggttccgaacggcttcttctcggtccgcatccaatgacattgtcctgagatttcagctgcttttcgtgtccgggaggccccggaaat

SEQ ID NO: 124700 - DNA, 122 bp, Homo sapiens
cacggccgtggttgactgtctttgcctccccttttcagaggaaaggttatcaggacaggacgcagggagccagaagaccatctgaaggaagcctgcttccaacgggcccagcctccagccac

SEQ ID NO: 124701 - DNA, 122 bp, Homo sapiens
ggttaatgaaactgctggcagcctcacattcaggacctgaatgtgtgatcccgacagtgccgctattttgctaaattgatcttgggaggaattatccctcttagcttatttccccatatgat

SEQ ID NO: 124702 - DNA, 122 bp, Homo sapiens
ctatgaccttctagccttttatattcataaatgaacatttacaaacaatatcaaactgcacgtatggctttgtaccctgtccttttttgcatatatatagtgagctgtattttcccatgcca

SEQ ID NO: 124703 - DNA, 122 bp, Homo sapiens
tgggcaacataataagaccttgtctctaccaaaacaatatttaaaaaacctttagctggccgggtgcggtggctcatgcctataatcccagcactttgggaggccgaggcggatggatcatg

SEQ ID NO: 124704 - DNA, 122 bp, Homo sapiens
ggtgcacggggcggccagtctcaccactgaccagtttgtctgtctgtgtgtgtccatgtgcgagggcagaggaggaccccacatggaccgcagcagcgcccgaggccaggtatacggacatc

SEQ ID NO: 124705 - DNA, 122 bp, Homo sapiens
caaacgactcggaacgcggttccgcagatgtgattggctgaaaggggacctgccgcgcggcgctctgtaaaagcgcctgcttcctccaaggaggtggagctgaagctggcagggccagggca

SEQ ID NO: 124706 - DNA, 122 bp, Homo sapiens
gtgggacaggccagggctatttctgcgctcgcttggagaggactgacagctctatggcgccgagtcatggtccctggaaacaagagaggtcttttcatggactcaaagcttttgttcgtttc

SEQ ID NO: 124707 - DNA, 122 bp, Homo sapiens
ctgtaacacctacctggcaggaacaactgtgagctcccaaatgtggaccagagctccatccgcgcccgcccggtggccaggccccgggtgtaaggcggcacttcgaaggctggtctctgaga

SEQ ID NO: 124708 - DNA, 122 bp, Homo sapiens
tgcacaggcggaacagcggggacacaggagccaccactttaccgcgagcccagcagggggcggaggactgctgtccactcttcacacagtcaggcccttcccaagggcgcacctccagggaa

SEQ ID NO: 124709 - DNA, 122 bp, Homo sapiens
tgttaattaccggagcgacagactagggagctccgcccgggatttgcccatcggcggaggcgccaggctcccgtttctccccatccctctcgctgccgtccaggtgcaccgcctgcctctca

SEQ ID NO: 124710 - DNA, 122 bp, Homo sapiens
cccgggcagcagccccaggccgcgaagtccccgtctccagttcagggcaagaagagtccgcgactcctgtgagtaacagtctttcaggcggtgggaaagacccccctctgtccgtacgcaac

SEQ ID NO: 124711 - DNA, 122 bp, Homo sapiens
ttctgagaatccaggcaagggagcctcagaagtaggaggaacagaacacccacaacacctcgcagtgaggccagtgctcaggatcaggaccagagatattgctgaagaggcagctaattcac

SEQ ID NO: 124712 - DNA, 122 bp, Homo sapiens
ctctgcagtgagagaggggtggagcctgagagaaagtgaaccgtgaagaaaccaacaatccgaagccacagggctgaagaacaaataatttcttagattaagttcctcatttatgagctacc

SEQ ID NO: 124713 - DNA, 122 bp, Homo sapiens
ttcccgggcagcttacctgctcggcctgggtctttctggacagcaggcgctggaggtgcgcgtcactgtccgccgccgtgtccgcggctgcgccagacagtgtagaacctgcggcctcgatg

SEQ ID NO: 124714 - DNA, 122 bp, Homo sapiens
gtgcagagacgggagcacgcactgggccctgcacccacttcgtagcgccctggcctgggacgccccaccacgcagcttccagagcaaggatcgccacttcaccctgcccggagacccagagg

SEQ ID NO: 124715 - DNA, 122 bp, Homo sapiens
tttaacaacattgcaatgacaaagttagtagaatgtcccgtagtggaaagagttcctttacgttcacttgtcttgtagaggggacagacataggcatccgactttataatccgagatttttg

SEQ ID NO: 124716 - DNA, 122 bp, Homo sapiens
aagaaccccaccgggctggctgctgcgtgaattcctcccctgacctaacctggctaatggcgcagcgctaaccggcacccttacttttcattttctgggtgccccgggctggcgggtgtgag

SEQ ID NO: 124717 - DNA, 122 bp, Homo sapiens
tgcctagatccccaataccactcttgtctttattgggtccttattacaaagcaccattggcgaaggtatggaagagaagcagtctcctacaattgtgggtaagagtggatttttaaagctat

SEQ ID NO: 124718 - DNA, 122 bp, Homo sapiens
cagggagagcttccgccggcggctcggtgacgatgtcttggtgatggacagaggtggcggcgaggagaacttgcgggtggcgcgcggggacttggggggttcaccgtacaggagcttattgt

SEQ ID NO: 124719 - DNA, 122 bp, Homo sapiens
ttagtagagatggggtttcaccgttggtcaggctggtcttgaacccctgacctcgtgatccgaccacctcagcctccaagtgctaggactacaggcgtgagccaccacactgggcatgacac

SEQ ID NO: 124720 - DNA, 122 bp, Homo sapiens
aggggaaggagaaaaggtcctcgggcagaaggaggcggctagtggagaggaactcagcagcgggtgcagtgtggcgcctgctaacgcatcaagcctccgctggaagttccaccataacgtct

SEQ ID NO: 124721 - DNA, 122 bp, Homo sapiens
actgagggccgccggggccgagcgcggaggggggaccgagccagtgccgtgccctcgggccgcgccaacatgccccgcggcttcctggtgaagcgcagcaagaagtccacgcccgtttccta

SEQ ID NO: 124722 - DNA, 122 bp, Homo sapiens
agataaggggcagcaggggttcgggggatcaaggactggactccttgagtgtgaagtgcccgttaaacattccagtggcaacatcaggtagaccattggtatgattctggggtctgggggtg

SEQ ID NO: 124723 - DNA, 122 bp, Homo sapiens
tggagtgcgagctgctcagggccggccacagtgacaaacttctcttggtgtacaggcaggcggacactcggcaggactggcaaagcagactatctgtgtcagtgtacgtttcattcatccat

SEQ ID NO: 124724 - DNA, 122 bp, Homo sapiens
acggggagactgaggcggtgccgggttctgggcggcggggggggcaggggtagtgaggggcgaatgagaccatagggctgagatctgcggccgcctcggtgcctccccagccacctccgccc

SEQ ID NO: 124725 - DNA, 122 bp, Homo sapiens
acagggcaggttatagaccaggtgagagggcgccgcgcccagaaccaaggagcacaagtccgcagtgcccatgagatcctcatgctggccggcgcaggagccatcctcggcctctgcaggtc

SEQ ID NO: 124726 - DNA, 122 bp, Homo sapiens
aaaggctggcaatctcataaccgattggtttggttcccatctattgctcaaaaatatgtacgtgaaatatcctgtcccaggaccagggcttgttgcttaccagctgggacagtcagaggctg

SEQ ID NO: 124727 - DNA, 122 bp, Homo sapiens
agactggctaggctagcccaggaatgtgagaggttttccctgacagagagtgtcccggcccgcagggaggggcctggcaggtggggccccctggctggcacctgctgtccctgacccaggac

SEQ ID NO: 124728 - DNA, 122 bp, Homo sapiens
ggagggaggtgtgaagcggcggctggtgcttgggtctacgggaatacgcataacagcggccgtcagggcgccgggcaggcggagacggcgcggcttcccccgggggcggccggcgcgggcgc

SEQ ID NO: 124729 - DNA, 122 bp, Homo sapiens
gctcttttcttgaacctaaacgagaatgaatgaatcaaaaggaaaatgacaaggaagctgcggggcgtgcatttatttccagctctgctgcccgtagagtcccccggcccactgcctgagaa

SEQ ID NO: 124730 - DNA, 122 bp, Homo sapiens
tacttaacatggggcgtgtgtgataacgattgcggtgactgtttaaatcctcctcgctaacggatgggacgtgtgtgataacggtggcagtgactgtttaaatcctcctcgctaactgcacc

SEQ ID NO: 124731 - DNA, 122 bp, Homo sapiens
cccttgacaggagagcgaagaccacggtcgcctgagggggctcagcccgcagtccacacgcggggaccgacccaccagcccctccgagtcggccaggctctcggaaagcctatgggcggggt

SEQ ID NO: 124732 - DNA, 122 bp, Homo sapiens
agtgccgtgacaccatccctggggcaacacggtagtggggaaatggagatatgcgctatgcgtcagacatgaagggtaagggaagaatgccgtcaactcacaggcactgcttgggtgacaaa

SEQ ID NO: 124733 - DNA, 122 bp, Homo sapiens
aagtaagtgtaaaattgccacctggtaagacctgtgtgaggaaggtactagagtctgtaccgggtcacctggcctagtttgagaagccaagaaggtttcccccagaaagtgacatttgagct

SEQ ID NO: 124734 - DNA, 122 bp, Homo sapiens
taacccctccgctgccctctgctggtgaacgttccgcgtgccgcttgctgcctgaagccgcggaatccactggggagaagagagttaaggccaccacctcctggcactgaggaatcagcaca

SEQ ID NO: 124735 - DNA, 122 bp, Homo sapiens
ctgtctgcacagggggagctgcctactcacagtaggggtgccaagtgccccagggctgtgcggggctgcaactccctgccctaaggagcaccttgtccttggtaccagaaggttctttaagg

SEQ ID NO: 124736 - DNA, 122 bp, Homo sapiens
ccagatgtccggggagcctatgccttcgtccttgtcctctgcccgccgtcgcttgggggacgagccgctcagctcctggggaccccaaggagtcggtcagtgtgcctgacacctcggtacca

SEQ ID NO: 124737 - DNA, 122 bp, Homo sapiens
cacacctgtaatcccagcactttgggaggctgagccatgggatcacttgagcccagagttcgagaccagcctaggcaacatagcaaaatccagtctctactaaaagtagaaaaattagctgg

SEQ ID NO: 124738 - DNA, 122 bp, Homo sapiens
ccggagttttgtcccggtgcggctccggtacccagacgcttcaccacgccccccgccctccgcccgctcaccccggttcccgccgccccggagcacgctcctaaattgcggcgccgtcgcta

SEQ ID NO: 124739 - DNA, 122 bp, Homo sapiens
agtgagcagtaaggcgttgtttaatgacctcaaaggacatattcaggttaatcactgtgtcggtctgatcagctttatctagggcttctgcctgtggaagtgtccttggaaaactatccaac

SEQ ID NO: 124740 - DNA, 122 bp, Homo sapiens
agtgagtgctataagagaaggggtagagaaaatgcccacagaaatggcacgagcctgagacgtctgccaaggcaagctttgcttattttaaatttaggcatatcctgggaatgcatatgcta

SEQ ID NO: 124741 - DNA, 122 bp, Homo sapiens
ttggtaacatagtttaagatgctgaataaacagtagaatcatggaatttgtgaaagtgatcgagcatggcattttatggaagaggaaactgaggcccagagaagtcattgctgaagtgacgt

SEQ ID NO: 124742 - DNA, 122 bp, Homo sapiens
gggtgggggttgctagcagccgcaggtctttggggaagcccgtgtagggtctaagaccaccgagctggcgaccgagtcctggcccctccgctcctggtgctgcgcggccttccctgctcccg

SEQ ID NO: 124743 - DNA, 122 bp, Homo sapiens
gttctttgcttttatgatacatttgtaactcacagctgttagcatgacctcacatcactgcgtaggacccggaaatcacatctcctggtcaggtcacgaaaaagaacacaggcttgactatt

SEQ ID NO: 124744 - DNA, 122 bp, Homo sapiens
aggcaaacctccgcctacagccctaggctgatgagccagtgccccagctctgagaaatctcgccaaaaggagtgaaatgctccttttcaataagcctgcctcaactcccaaagctcgactgt

SEQ ID NO: 124745 - DNA, 122 bp, Homo sapiens
tatgtagccaagaaactggcaatcatttataaattatcacctatgactccatctgctctacgcacttattttttaaattttattcatttatttattatttttatttgttgtagagatgggat

SEQ ID NO: 124746 - DNA, 122 bp, Homo sapiens
cccatctagataaggatgatattgattaacttgcataacttctccctggacttcagataacgtcagtaaagtgagatgattgggctacattatgtctgttcttaaaatagcaattgaggagt

SEQ ID NO: 124747 - DNA, 122 bp, Homo sapiens
cacacgcagctcccagccccgggtggtgggaatagttggatgaagcagtgcacacacacacgtatgcacacacgcagctcccagccccgggtggtaggaacagctgaagcagtgcgcgcatg

SEQ ID NO: 124748 - DNA, 122 bp, Homo sapiens
tcccaccttgtacctgagagtgacagcagcacgttgttcacgcagtagagccaggagcagcgatgtgaaatcagctggaggccacagagggacagatggtcagcaccccaggcccccacaag

SEQ ID NO: 124749 - DNA, 122 bp, Homo sapiens
tagtgggcggggctctggggtggcggccgttgccgggctacgggagagcgcggagccctgcgctgggaggtgcacggtgtgcacgctggactggacccccatgcaaccccgcgccctgcgcc

SEQ ID NO: 124750 - DNA, 122 bp, Homo sapiens
acagcgccaagccggggtgcctgtccaggatccggttggggcttgttccctcggctgcgacgtcggaacccccggctccccctcccagtctgcgccgccgcagctccggaaaccgctgaatt

SEQ ID NO: 124751 - DNA, 122 bp, Homo sapiens
tgctggccaatcaggccttggctgacaggaggcccaccaatgagggactgccaggtattccgttccgctgcaacaaattcccccctattttttcagaaattaaaaccctccgagaccctcaa

SEQ ID NO: 124752 - DNA, 122 bp, Homo sapiens
ttaaaacgagcctgaagccctgctgagaactgggaggcacagaagagcccacaccagacccgcctcggcgagaggtgtggaagtggcgctgcctcggaaagggcgctgtgtttaaaccgtgt

SEQ ID NO: 124753 - DNA, 122 bp, Homo sapiens
tgagggaactagagagacttgtttggcgagtggtggcaaccagtgttctgtggatgtggacggttcctggtcatcaaagttatggtcagctctggttcctgttcgcctggacccagacttac

SEQ ID NO: 124754 - DNA, 122 bp, Homo sapiens
ccgtggcccgagctgtctgttgcatgcggttcagcggaggccggaggagggcggtgggcacgtgtgggtcccacctgacagccgtctgcctgttctacggctcggccatctacacctacctg

SEQ ID NO: 124755 - DNA, 122 bp, Homo sapiens
gattggctgggaggtgcggcctatgaaccggaacgcgtcgcgattggttggcgctcaggccgatcttccagacgcggaggcctgggccgatgtggcccaactctctgccagccaatcagcgc

SEQ ID NO: 124756 - DNA, 122 bp, Homo sapiens
ctttctcctctcagtaaagtcccaaaccagggctcactaagatacattctgtagcctgtccgaccccctaaaaggaacctgcagcctgctgtccttcggcagtctaagaaagagagggtccc

SEQ ID NO: 124757 - DNA, 122 bp, Homo sapiens
gccgcactgcccctcatgaccccggcatgggctttgctttctgcggaccctcttatttgtcgaagatctcgggagtccacacacccactcccgtgtctgggaacactccaagcttatcaaga

SEQ ID NO: 124758 - DNA, 122 bp, Homo sapiens
tgccagtgcgcgggcatggactggaccggagcgcgctgctgtcgtgtgcagccctgaggtcgcgcgcagcgcgtgcacagcgcgggcggaggcggctccaggtccggaggggttgcggggga

SEQ ID NO: 124759 - DNA, 122 bp, Homo sapiens
tcctatgatttttaggcctcaaaatgtctcttggactcaaaattgccttagggcagaggacgtgtgtacccccagtatagaatctgggacagtgaatgtgagtaaacattcggcagaaaagc

SEQ ID NO: 124760 - DNA, 122 bp, Homo sapiens
ggagagaaaccttctgggatccatttgtggcaccaaacagcaagctgagcccccctggggcggcgccagaactccagagccctaagcgcctctgcgtacgtggcctctttgctgactttttg

SEQ ID NO: 124761 - DNA, 122 bp, Homo sapiens
aattagcattttgtaataggcaaatgtcatttagtgcttttcaccaatcccactcacccccggtgctccgccttgcctaagaaaaagaaattaaggagaagtaaactttatttcctaatata

SEQ ID NO: 124762 - DNA, 122 bp, Homo sapiens
caggatgaaaatcctttattagccattttataggttaaaacaaaaaattgactacacagccgacttccctcagataactatgaagtctattatgagtactgaatgaccaaagaacatggaaa

SEQ ID NO: 124763 - DNA, 122 bp, Homo sapiens
ggttttctgtgcgcgccagaggggcggggcctgggccgggaaggggcagaagtagaccgacggctgggccgccattcaccaatagaaaagagagatcgagagccacgtgctcataagatatc

SEQ ID NO: 124764 - DNA, 122 bp, Homo sapiens
tctcagcctgaaagtgcggggaatttccagatgctgcctgagtgacggttattcagcagacgagccctctggggtgaagtcccgcgtggagggggtttccgggagcgcaatgctcgctggct

SEQ ID NO: 124765 - DNA, 122 bp, Homo sapiens
aagtgttgatttagggcagagggaagactagaattaaattcaaaaggttatttgatatatcggaacagatgtttactgcccatcttatatgtgaacagtaccaattatcctgcttaaaaccc

SEQ ID NO: 124766 - DNA, 122 bp, Homo sapiens
tacaagcgctgggtgtgctccctgccctttggccatgttcaattctcagagaagattcagcgcttcacacccttctccctcggctttgagttcttacctggagagacttactactacatctg

SEQ ID NO: 124767 - DNA, 122 bp, Homo sapiens
aaagaaaaatgcaacttactcctgggcaccgggacaaccggtggaacctcaggcgtgggacggctgccggaaagcagggcccaatcagagacagctgccttgctgtgtggcctatcagaaga

SEQ ID NO: 124768 - DNA, 122 bp, Homo sapiens
ttcgggtgtgatgtggtgttggcgtcgtgttgttgcgaaggccctgtgtgaaagtcgcctcggttttcgggtgtgatgtggtgttggtgtcgtgttgttgcgaaggccctgtgtgaaagtcg

SEQ ID NO: 124769 - DNA, 122 bp, Homo sapiens
tcatccttggcttccagatcacatgcttatgctagtttgtatcctacctttctgaacactcgttcagcaactcgtgtttcctctaatcctgaaacgtgggtccaccctgaaagtatggttct

SEQ ID NO: 124770 - DNA, 122 bp, Homo sapiens
acttaccaggctggaacccttacgggctcatgaccacgccttttctttctggaactgccacggacatttttgggtttcatgtactctcaggatgaattctccaccaccaccccgagaggaaa

SEQ ID NO: 124771 - DNA, 122 bp, Homo sapiens
ggggcgctggctggggcctctccaccctgaagcggatgtgccagggagggccacggggcacgggccaggcaccaggacaggatggacatgggggccaatgaggcccatgacaagctgcaggc

SEQ ID NO: 124772 - DNA, 122 bp, Homo sapiens
taaatgtgattcaccaactattagcaggcattaacccaagttgcaatttcctctctgatacgacaagaagtaaaagagctttaacaccccacaacaataatactgctaataatactattatt

SEQ ID NO: 124773 - DNA, 122 bp, Homo sapiens
tggtctgggtgtgtcccggagagggcgcgcaggcgcctatgtctgtcgcggggcggtcggcgggttcctgcataggtatggctttctgttcatctatgtgttcgtctgtatgtccctggatg

SEQ ID NO: 124774 - DNA, 122 bp, Homo sapiens
tattatttaacttggggaaaattggaaataatgtatagcaaccatccatgtgatggttcacgctgcattgttacccatggggcactagtggcattgtttgcaagaaagttcttttatcaaag

SEQ ID NO: 124775 - DNA, 122 bp, Homo sapiens
cgtcttcgggggttatttttgcacatgcaggcagcgttcccccccagccctactcccaggcgcagaatccagtgcctgcctgggaatcgtgaagtgatttgacaacaaatgtaggaggggtt

SEQ ID NO: 124776 - DNA, 122 bp, Homo sapiens
cctatattaattactatgttgggtacttttttttatttttttatttttttgagacagtctcgctctgtcgctaatgctggagtgcagtggcttactcggctcactgcaagctccgcctcccg

SEQ ID NO: 124777 - DNA, 122 bp, Homo sapiens
aaacatccttgactggaagctgtaaggtgttcagaggagctttcagtcggatgtttacagcggcaggctgccacggtcgtccccagctacgcaccggctttgaaacattgcaggtttgtgcc

SEQ ID NO: 124778 - DNA, 122 bp, Homo sapiens
ccatcctccatactaaccccaacaaatccaagggccgggggcgacggcccctttaagacgcggcccagttgtcgcccgcagagaggggcgcaacaagacctacacaacccccactccgttcg

SEQ ID NO: 124779 - DNA, 122 bp, Homo sapiens
ggaggcgtccctcagctactgtgtatcggacatctgctggagggctcacagccggcctcccggctgtggtcaaatgagcctgactcctacctcgatatgactagcggccacgctgccgaagg

SEQ ID NO: 124780 - DNA, 122 bp, Homo sapiens
gttttgccaaagcctctccactcaccagcaggcggtctctgtcttcagggattgtgcctgcgtccctcgggcacctgggcccccccgcttggctccctgggggaatggcccaggcgggccgc

SEQ ID NO: 124781 - DNA, 122 bp, Homo sapiens
ccccgcgccctgtggttttctgaggcccccgaggaggaagtgcgggctcccggcatgcctcgcatccggccccagccctgagccacctcaggccgcccctggccagccctgaggcccgcccc

SEQ ID NO: 124782 - DNA, 122 bp, Homo sapiens
cgaggcggcgcccacagcactcgggactcagctgccggagggacaaactaacttcctgagcgcgggacctgaggctggcgcggccgggagccacctgcagcctgcggtgaggcgaccctggc

SEQ ID NO: 124783 - DNA, 122 bp, Homo sapiens
ctgggccggtgacatgaggatcactgggacaggcacgggtgtggtgggaccacagggccccgagggcagcaggcagcccccagcctcctccgaggtctgtcctggaggctggccgcccaccc

SEQ ID NO: 124784 - DNA, 122 bp, Homo sapiens
tttctaaccgtggtgaaatacacaacatacaatgtgcaattttagccactttgcagtgtacgtttcagcggcattcagtacattcacggtgttgcgcagctgccaccgctgtccatctccgg

SEQ ID NO: 124785 - DNA, 122 bp, Homo sapiens
atgccgagcacttctgttctccttgtgtcctgggcgctgctgcaggggagacttctgcctcgattgaagtccgactaggcctcccagagcaggggctgcaggtgccttgggctgagggagct

SEQ ID NO: 124786 - DNA, 122 bp, Homo sapiens
gggagcggagggagagatgaagctgggcggggcgcaggcggaggcgggggcagcgaggcgcgtcagccagtcggccagtccgatgggcggccggccgaacccgggcccgccggagtggagga

SEQ ID NO: 124787 - DNA, 122 bp, Homo sapiens
tgcccagagacctgctgcacgccggggcgcaaggccgagtcatcccaggcgtccgtgggccgtgattcccactcacgccgggggcccaggcaggcagagaagagttaatgagcgcgcaagtg

SEQ ID NO: 124788 - DNA, 122 bp, Homo sapiens
gtcatctttagggtaataaactcctgattctaagaggccttcttctaagtctcaaagtatcgggacccacctctaagttactgaggacttgacccttcctacagcccattctctttttcatg

SEQ ID NO: 124789 - DNA, 122 bp, Homo sapiens
tggagtatcctcaatgaatcatctcttcccccatccccagttccctaaagagaatgccggcgttttagcactgccttgtatcttttttttttttttttttggagacggagtctcgctctgtc

SEQ ID NO: 124790 - DNA, 122 bp, Homo sapiens
aggcgcctcccgggggctgggggcccggagtcactgggaggcgccaccggcggggaattccgcacacgcctgcgcggggccggcggcggcggcgggcagggcggggccggcggcggcggcgg

SEQ ID NO: 124791 - DNA, 122 bp, Homo sapiens
caccattcccgggctcaaaaaaataaattaaaaattaggcgggggggggggggggtggtgcgcgcctgtgttcccagctgctcaagagactgaggtaggaagatccttaagcccaggaggtc

SEQ ID NO: 124792 - DNA, 122 bp, Homo sapiens
catgcgtgctcacagcctcagtcatgacagccagacagtggaaacaaggcaggtgggcctcggctgctgagggagcaacagcagaacggtgctcagccctggagaggaaggacgcctggacc

SEQ ID NO: 124793 - DNA, 122 bp, Homo sapiens
aaacgcttccagctgctccgccaccccaggaaggcagcgcctgcctctgggcggttctgacggaaactggctcctccgcctgcaggaaaactcacaactaaggggccaggagaaagcctctc

SEQ ID NO: 124794 - DNA, 122 bp, Homo sapiens
agggaccacccagcagtgtcttcttttgatctcctgatgctctctgctgccctgaaatctcgctcttctgacaatagcaagtgggaggagagtgagaaactggttccccgctcccttcttcc

SEQ ID NO: 124795 - DNA, 122 bp, Homo sapiens
cactctcggccttgaatttctgtatttccatcgaaaaattctgcccgagcttggccttcacgatgaccatgtgcttgaagatcaagctaaagaaagggaaggtgagaaaccaacgtcaggat

SEQ ID NO: 124796 - DNA, 122 bp, Homo sapiens
cgtcaatccgctccggttctgccccgccctcctcttgccgttccctcacgctggcctcggcgcggcccgttgttatgacgacatggtcgtaaatccgccatcttcctgcggcgcgttgcgac

SEQ ID NO: 124797 - DNA, 122 bp, Homo sapiens
ggctgcaggtcctgagccctgccccgcgagaaggcagccaaggcctagtgagaaatcgagcgtagcgccggtgggctggcactgctgggggacccagtacaccctccgcagccgctggcctg

SEQ ID NO: 124798 - DNA, 122 bp, Homo sapiens
tatcaagcgctatatttactatttgggttacaggatcattagaagccacaacctcagcatcgtgcaatatacttatgtaacaaacctgcacatgtacccccgaatctaaaataaaaagtgag

SEQ ID NO: 124799 - DNA, 122 bp, Homo sapiens
gcggtacccagcggggagaggtggtgcggtcggccggggctccagtctgggaggtaccaccgagccgcgcccgagcacaagagggagggcaggaggccgggcgggcgaaacggcgccccgac

SEQ ID NO: 124800 - DNA, 122 bp, Homo sapiens
tgggggagccagaggctgcaggacaggctacaggactgtcaaggggaatttctacatgcccgtaaggaatgaggaggtctgggtgcgcgctgtccccggatccccgcccccagccccggtgc

SEQ ID NO: 124801 - DNA, 122 bp, Homo sapiens
atgctgacgatattctcagtgccccacacggcaggtgttgctgctgatgctcagcgcagtcggggggcctcgggctgggcggttgggctcgagggtcaggctcgggggtcaggctaggggct

SEQ ID NO: 124802 - DNA, 122 bp, Homo sapiens
atgttgttcactctcttcagctctgtgtgtttgtgtcagtcagtgagagcatgagtgagtcgtgtgtcttttgccctgcacctccctttcacctgtggcttaagaactctgtactatgcggc

SEQ ID NO: 124803 - DNA, 122 bp, Homo sapiens
ccttcctgcagctgtaactatggaaagggctgttggcttggctccatgctggggagttgccgtgtgatttggggacttctcatggatgatgggctcacccagtgacttggggacaaaggaca

SEQ ID NO: 124804 - DNA, 122 bp, Homo sapiens
tccggggcacagcagctggggggaaggagggagaacggctggcgttggagatgctctgcgcgcagctctgcagggccctctggcaggccaggcccggctcctttgtctgcctcagccggggg

SEQ ID NO: 124805 - DNA, 122 bp, Homo sapiens
cctccacggggcctacacttccacggggcctacaactcccaaacacccttgggccactgacgtcttccggaaacgtgcacttgcaagctgcccgcaatacgtcatggcgaccaaacgccttt

SEQ ID NO: 124806 - DNA, 122 bp, Homo sapiens
gccccacctactcccagcgttcagtgcggtgccctggccgccattgtttgaatttgaaaacggtaacatcgcagtgctgctcgcgggtctggctagtcaggcgaagtttgcaggtgaggagg

SEQ ID NO: 124807 - DNA, 122 bp, Homo sapiens
ctgcacggccgcgtaccagtcggccaggggtgtgtcccggaacagctcccgcaggtccagcgggagcatctggacattcgggaagcagctcagaagtgagatgcccaggtgccggggcagag

SEQ ID NO: 124808 - DNA, 122 bp, Homo sapiens
gctggctttgaatgttgaggggcggggctacacagaggggcggtctcggaacgtgaggggcggtctcggaacgtgaggggcggggctacacagatgggcttagcacgtgggggcggggctac

SEQ ID NO: 124809 - DNA, 122 bp, Homo sapiens
ttccccgcctccccaactttcctttctgaatcttccaattccgccccagctggaggcgtgcgggtcctcttgcaaaccagaccaaggatgtcgccccgatccccagatggtggaggctggtt

SEQ ID NO: 124810 - DNA, 122 bp, Homo sapiens
cgcaggagccaatgtttaaattggaaatccagtaactcactctcctgcctaatcctgctccgggattccctttgtagaataaaatctgaactccttatcttggcccttggaacactatgatg

SEQ ID NO: 124811 - DNA, 122 bp, Homo sapiens
tgctgtggctctcccctgctgtcgtccattcatttctgcttcaccatcccctgcagaggccggcacacagtaggtgctcagctctgcagatgcttatgaacaagtgaacaggaaagaggtgt

SEQ ID NO: 124812 - DNA, 122 bp, Homo sapiens
tcagcccccaggcccccagccacacagaaacccgtttctaaaacagcggtcctcataatgcgatctggggtcccagagggtccccgagacctttacaagaggtgtgtgaagtcaaatttttg

SEQ ID NO: 124813 - DNA, 122 bp, Homo sapiens
acctgcgctcctggaccgccgcggataccgcggctcagattacccagcgcaagtatgaggcggccaatgtggctgagcaaaggagagcctacctggagggcacctgcatggagtggctccgc

SEQ ID NO: 124814 - DNA, 122 bp, Homo sapiens
cctgcccctctggctctgcccggggacccagacccagcaggggaaggcgccctcaagcagcgagcagagattcagcaattcaccccagctccctgcctagggggctgacagctgtcactcag

SEQ ID NO: 124815 - DNA, 122 bp, Homo sapiens
ggtcaggggaacacaggggagggctgagaagagggaggttcaatgtccctggaaaaaggacggtaaagtgggataacgctcatggatttagaacaattgcagccgtcgcttttactgaccat

SEQ ID NO: 124816 - DNA, 122 bp, Homo sapiens
gggagccctgaggctgcggacaaagccctttcatctgaggactttcatctgtgcatatcacggccccccagggcagttcctgctggaccagactctctggcagaggaggtggagttcttcca

SEQ ID NO: 124817 - DNA, 122 bp, Homo sapiens
atttccacgcctcctacctctctacagggcagtccctccatattaggaaacccactggcacgctccgccgttatcttcgcaagacttccgttgttgcctcaagttgcagattgccttttaac

SEQ ID NO: 124818 - DNA, 122 bp, Homo sapiens
tgggacgtcgcacctgccgccccgtgagttattggcctcttaaatgtctacagcccaccccgtcatcgagcccctgtatttacccttaaggcacttcacagctgctgaatggctgtctatgg

SEQ ID NO: 124819 - DNA, 122 bp, Homo sapiens
tcggtggctgtggggagtagagttgacttgggaatctcgttcctgccatgtggagacacgcgcgttatgtaccctgtggagtctgttgcctggcgaggtgttctgggtccccgcctgtaatc

SEQ ID NO: 124820 - DNA, 122 bp, Homo sapiens
ccacgcctcaacttcgaggctggcgatccagaaagagcacctcacgccctgggctgcaagcgcagccggacgcgcgcgaccagtgatcgccagccaatggcaagccgggacccggtcccact

SEQ ID NO: 124821 - DNA, 122 bp, Homo sapiens
agcaaggaactctagatgcccatttctctgaatctgtgctagctgggcacccctagggggcgctccgtctctcaaaatacaaggggctgacagcagcgtgcctctgggtgaggctcactcta

SEQ ID NO: 124822 - DNA, 122 bp, Homo sapiens
cgggtcaacaaaggtcgggcgattgtgtctggaggcaaatccgacgtagacggcggcaggcggagcccaaagccggtgatgcagggtgcgcagggatcccacctggagagtcggggcggcac

SEQ ID NO: 124823 - DNA, 122 bp, Homo sapiens
gctgacaatggcttttcaatggagcatacggacaccgcccgtttccagagaaatcatggccgcatcagtgaaatccttagtgacagtgtggtgccagacattccgtccgctgtcacaacagc

SEQ ID NO: 124824 - DNA, 122 bp, Homo sapiens
gtctgggccgccatctgttctcctcctaattgcacccgagctggggcctgaggggaccagcgagtgccccaaggtctcagcgggaaggagcgcctagccttcggggcggggcctataagaag

SEQ ID NO: 124825 - DNA, 122 bp, Homo sapiens
aaaagccacccactggcccgtacggggttcgaacccgcgaccttggcgttattagcaccacgctctaaccaactgagctaaccggccactaactttccgggtctacttcaaatcttaatata

SEQ ID NO: 124826 - DNA, 122 bp, Homo sapiens
cgccgagcgctcgccgctgccgcccggcgccgccgaggacgccaagcccaaggacctgtccgattccagctggatcgagacgccctcctcgatcaagtccatcgactccagcgactcgggga

SEQ ID NO: 124827 - DNA, 122 bp, Homo sapiens
aagagcccggctggggagcgggtcacattcttggccagcgctagggctgaggcggacgcacggcaacaaacagcgcggggggcggggccggcgcggggcggagcgggcggcgcggggcgggg

SEQ ID NO: 124828 - DNA, 122 bp, Homo sapiens
taatcgcggcgctgcgtacctttgtaagggtccttaaccttttcacccttttggtggtggcggtggtgggctcctcgtagctctttgaaaatctaatgggagctatggaccgtctgcctgga

SEQ ID NO: 124829 - DNA, 122 bp, Homo sapiens
agactaggtaaatttcacagtgcatatccccaggcattctgtaactgaggagccagtttccgtgcaatttatattccaccttcactgttatatttaattgtgtcccagaggcagtagatcct

SEQ ID NO: 124830 - DNA, 122 bp, Homo sapiens
gtcgctcttcgccctgcagaatctgcagccgtggtctgacgactcgaccaaaatcactagcgtcacgtcggtggcgtcggcctgcgagtgagcctgcccattctgccctgtgggaccccagg

SEQ ID NO: 124831 - DNA, 122 bp, Homo sapiens
tgcagggagaggactctgagtgatttgggactaccacaggaggcgcttttctcacctcaccggccttggagtcacagcgggggcctcagccgcggcggccctgagccagtggctgggttccc

SEQ ID NO: 124832 - DNA, 122 bp, Homo sapiens
cctcgcggaaatgaaaattccctcttgggggagtggaccgctgaaaagtcttcctgtccacgtgtacctactgcaggctaataaatattgtactcttatgacacttaccatgtagtaattaa

SEQ ID NO: 124833 - DNA, 122 bp, Homo sapiens
tctcccattgcatctcttagtcttctgatgggtatgtttgatttttatttagattttggacgtaggtagtattgcacttgagtatctttgtactgttgtataaaaaatcttaaggttactct

SEQ ID NO: 124834 - DNA, 122 bp, Homo sapiens
gccggagagcgcctgcgcgtcggagcctctttgttgctggggcgctggggtccagctgcgcgtgcgcagtaggccggcaccgacaagtgcgctgcaccagtggcaccggctgggggcgagcc

SEQ ID NO: 124835 - DNA, 122 bp, Homo sapiens
gtccagtccttgcgtttgtttggtcgttcgtcctctttccaggcaggagagtgtcacctccgcgttttctcccttgtgtagtcggaatccatctattgcagggtgccggtggagtctgcagt

SEQ ID NO: 124836 - DNA, 122 bp, Homo sapiens
ggatgaaactgttccgcctcagatcattaggtattagattctcataaggagtgtgcaacccggatcccttgcatgcagttcacaatagggtttatgctccatgacccagggttggggacccc

SEQ ID NO: 124837 - DNA, 122 bp, Homo sapiens
tgacgaggtaaaggttcggtaactcttctaagggactcacagcttctcatctgtctttgtcgtggcctgagccccactcttcctaagagcctttttaaagagtaagttgcttctccctcctg

SEQ ID NO: 124838 - DNA, 122 bp, Homo sapiens
ggctggccccaggatcctctaagtgacaggaacccttggccactgttgattgccccgaggcggggacagggatggtggggctggggctgcctggccctttaagagggcagttctgcccacca

SEQ ID NO: 124839 - DNA, 122 bp, Homo sapiens
cgggtaagggcccctcgggcccgtggtcgggcatcgattggccccgcctggcgcagcccccgcccctgcagcggactgcggtgctcatcagacctgagcagttgctccggcggcgctcgggg

SEQ ID NO: 124840 - DNA, 122 bp, Homo sapiens
tctctggcccactccgaggacctagctcccagctccacgcacgcgcactgcacgccgaggcgagccagccgccctgcaccgcctctgcgctccccgcacccagcggcctttctgagtgagag

SEQ ID NO: 124841 - DNA, 122 bp, Homo sapiens
caggtaggagcacagggtttactctaggccctgcatgtgaatgactgacattcaaagaaccgattaatttggaagagaagcggcagaaccgagagttagaggtgtggactctggagctgcgc

SEQ ID NO: 124842 - DNA, 122 bp, Homo sapiens
agctgccccatgtgacctccagcttctggacggtgtccacagaggccgttgtgtaaccgccgtgtccaggagcggggcgggcctgggcggtgggtggggtcccaccagcaagcctggtctgc

SEQ ID NO: 124843 - DNA, 122 bp, Homo sapiens
tgtagtatccttaggcctgcggccacaccaacagacataaaagagtattcaagctgctcccgattcacagttccctcaggaactggtcgtaggagagaaactgagaaggcatcacctcttca

SEQ ID NO: 124844 - DNA, 122 bp, Homo sapiens
taagcgttgctggtgggatcacactcagcacttcataggcaaagaaaatcccaggagtgccgaggaaacgctgtcaagatgtcaaaaatacgcggtaagacgtcagcccggtgagcatcctc

SEQ ID NO: 124845 - DNA, 122 bp, Homo sapiens
cggcggcggcggcgggcggactggggagtccgcagcacctgcgagctggtgttgggtccccgcggcgaggctgcctggaggaggagcgagcggatgctgccctcgcccgccgccgccggtgc

SEQ ID NO: 124846 - DNA, 122 bp, Homo sapiens
aaaggctggacgtgtttgctcacacctgttatttgacagaatcatttaagtccaggagttcgagaccagcctggacaacatggcaagaccccatctctaaaaaaaaaaaaattaaaattagc

SEQ ID NO: 124847 - DNA, 122 bp, Homo sapiens
gagcacccgcttggccctgcggccgccgtcaggcctcagatgtcttacatattaatttcccgctgcagaacatttgccgagcgcagctcaaacccagttagctggattgatgaaggtggcaa

SEQ ID NO: 124848 - DNA, 122 bp, Homo sapiens
gaagccagggttgaaatagaggcctctttctgtttggtcaatcagcagctgcaaaggatgcgtaggatggagctaaatttatttgttcctttctttctcagcaacagcgacgaggcccgagg

SEQ ID NO: 124849 - DNA, 122 bp, Homo sapiens
aaacttcactcggaagtgcttcgttaaacttcactcggaagtgcttcgttaaacttcactcggaagtgcttcagcgcctcctctgttttccccggtgccagggagtccttgagataccggat

SEQ ID NO: 124850 - DNA, 122 bp, Homo sapiens
tgggggaccctgggagggtcccagcctgcccttgcctccctcccccattcccaggactcacgcccagtcccagccctgcttcttcagaagtggctctaagttctgggtcatgctggccagac

SEQ ID NO: 124851 - DNA, 122 bp, Homo sapiens
gcgtgttcgcgcgtgcgtgctcgcacatgcgcgccacctccgcactgccctcgcttcctgcgcctcttcaggtcaccgcttgctctagttcccaggctttggcctctagtggatgagaatca

SEQ ID NO: 124852 - DNA, 122 bp, Homo sapiens
gcttgccagacatactttctcttgtattcaccacctcttcaagcctaggatggagccccacggggcaccaaagatgtctgaccccagcactgtttatctggctgcaaacccactaataacat

SEQ ID NO: 124853 - DNA, 122 bp, Homo sapiens
ctttgggccttactttcttcaactgaaaaactggttcaacatttattcattcttttattccgtaagccaaaaataaaattcaaagccctctgaccatatgaatggatctctcctcttggcta

SEQ ID NO: 124854 - DNA, 122 bp, Homo sapiens
tgcattttgtggctgtttatactaagagctcccccggagcctgccccttcctctaagtcccgcctcctcgagctggcaatcgcccgtccctgttttatgttgtatcgctcttctttcgatag

SEQ ID NO: 124855 - DNA, 122 bp, Homo sapiens
actgagacgcagacagggatacggtactgtccatggacctctgagctgccctttccacatcgctggtgagttacttaaacctcctgtgtgtttccccctttcgtatgtcaaaataataacat

SEQ ID NO: 124856 - DNA, 122 bp, Homo sapiens
gaggcaggcgtgggcatgggcgtgagtgttgcaggcagggctcagggtgagcgcagggcacgacatcggctgcaaggtctagagcctgcacctttcccacagggccgggcctggccttcatc

SEQ ID NO: 124857 - DNA, 122 bp, Homo sapiens
tgccgagctcggtgtctcggtgcagtatgccacgctgggcgactacttccgtgccctgcacgctctcaatgtcacctggcgtgtccgcgaccaccacgacttcctgccctattccacaggta

SEQ ID NO: 124858 - DNA, 122 bp, Homo sapiens
ggggggagttaaatctgttcagctgttattaaactgtcatttctcccgctaaatgaaaaccgtgttgttataaagcttaatgcaacctgattaatgagtttcgatggtgtgtttgtgttgat

SEQ ID NO: 124859 - DNA, 122 bp, Homo sapiens
atttcaaaattggacgaaagccggtcggttttactaacggaccggaaggactctagagaacgctctgcactatggctggtcccgtgagcttgcgagaccttctaatgggagcatcagcctgg

SEQ ID NO: 124860 - DNA, 122 bp, Homo sapiens
aagctatctagggaattccaaccaccagtcattaacatataaaagaaactcttatcactccggagattccaaccgtgttaggagctaagtgtcaggaaatggggacaaaaaccaaatatata

SEQ ID NO: 124861 - DNA, 122 bp, Homo sapiens
accccgggagtgcgctgtgagaccctcaggcgtcccgggccccgaggcttaagaccaccgcgaatctgctcgcccccaacctctgtgggcaggacccctggggccggggtgacagctgcgct

SEQ ID NO: 124862 - DNA, 122 bp, Homo sapiens
tgatacaggaggggaggagtgcggctcgagcaggctggaggtcaccatccccatcaggtgcgccgtctggggcatccccctctcaggggtccaccgcgcccccagtactgcccgaaaggctc

SEQ ID NO: 124863 - DNA, 122 bp, Homo sapiens
atgcatgcgacccatgatggcggcgatcaggcaacgaaaggagagcgagagtggaaacgccgcaggaagccacccaacacgcaggaagtgacctcacacgtccccgcttcctctcacgcagg

SEQ ID NO: 124864 - DNA, 122 bp, Homo sapiens
ctccctgcatgggacactgagtgagaggcacttgaaaatgtgaaagcaaggctgcaatgacggccgagccagagagcagcacctccctagcacaccctgcacccagcggaggtggctgaaca

SEQ ID NO: 124865 - DNA, 122 bp, Homo sapiens
atgtatgcggccaaatatggggggggggttggaaggggggtggggggcgttagggaatcacgtgcttttgttgaccagtcgtaaattctcgctgatgacctcaagaggtaattcatgctcta

SEQ ID NO: 124866 - DNA, 122 bp, Homo sapiens
gagcgggcggaaatctccattcatcatgcctgggctgcctgaactggcactggacaaaatcgtgtctattccaaaactcgacccgctggccccttccattgtcattgctacatgaggtccac

SEQ ID NO: 124867 - DNA, 122 bp, Homo sapiens
gagcactgcagcggtgtccccagcgcttcgctcgctggccgtctacctccctgttggtggcggccacccctcagccacgttgggctgccaccagtccctgatgcagtggctgtagtctctgc

SEQ ID NO: 124868 - DNA, 122 bp, Homo sapiens
ttggaaaaaaaaaaacatcagaaaacgcaggagtcggataggcagccccgaagccagccccgccctcaggccccagcggccccgccttttctccccccgccccccccccgcactccccacct

SEQ ID NO: 124869 - DNA, 122 bp, Homo sapiens
gcggtggggggttcctcgcggcctctggcgatcgttgccctccactccgggctgctttggcgcctggggtttggattcctgcactgggatttcccctgggacaaggcgttcctccctcgaga

SEQ ID NO: 124870 - DNA, 122 bp, Homo sapiens
cgcgcgccttgctccccgctgggcgctaggcacgctcaagggacccctcctcacctggcacgggagtttctggcacccacttgagtccgggctgcagtctctggaagaaggagcggacttgg

SEQ ID NO: 124871 - DNA, 122 bp, Homo sapiens
ctgttgtgcgaagagagtccatgcccctgcctcctggccgggcccggccgtagaaagcgccgttcttcctgggagacgtccccgccccacccccaggatcaggcggggagggggcgagggtt

SEQ ID NO: 124872 - DNA, 122 bp, Homo sapiens
ccgttggaaccctctttctggctcttggaacgctcggctctgagaggctccaggtttctccgccagagctcctgtcgctctgtcagttgcgctgtgttcctctctagtcacaagagccttgg

SEQ ID NO: 124873 - DNA, 122 bp, Homo sapiens
tactctctccttccaaacaaaccatggaaaagcaagctgaacaccagttctcttgcctgacgcaacatgaactgatttaggcagtctggcaaaaaggagatgaaaaaatcagcctccttatt

SEQ ID NO: 124874 - DNA, 122 bp, Homo sapiens
gggactcgtggcagctgctcaacccggcaagttctttcttgcaaattgagatccaggctgcgatctgggctggctctgcacattctgggtgcccggtatctgctggttggagctgcctggac

SEQ ID NO: 124875 - DNA, 122 bp, Homo sapiens
aactacttccggggcgaaggcaacaccatagagcacgaggagcagtctagagcgcccccgcgcggctgagcggcagccgaaccagccacggtgcccggacgactggctggcgcccttctgtc

SEQ ID NO: 124876 - DNA, 122 bp, Homo sapiens
ctgcacctggccttccatgttctttagacatgtcttcattttttgagcattctggccaggcgcagtggctcacacctgtagtcccagcactttgggaggccgaggatgtggatcacgacccg

SEQ ID NO: 124877 - DNA, 122 bp, Homo sapiens
cgtgatccacctgcctcagcctcccaaagtgctgggattacaggcatgagtcaacgcacccggccctaggtaagggtttttaaaggcagagaggcagaggttacaggcaaagtcagaaattg

SEQ ID NO: 124878 - DNA, 122 bp, Homo sapiens
ccttgcggtgagctgagcccaggccctgccggccccacactttgttgatggctgtgaggccgaaccataggtctgtgggcagaaaagtcacatcatgtgtcccgggtgagcgctgagtccag

SEQ ID NO: 124879 - DNA, 122 bp, Homo sapiens
ggtggggcttgtccaaccccacaaacatcagggctcaccctggatgtggaagagaaggagcgacccccaaaacgaagcggctggatctgaccttccaaggcctgttggcgacgcagggcccc

SEQ ID NO: 124880 - DNA, 122 bp, Homo sapiens
agagaaatatgaaattctctcagccctcaagggaccctcgatctagaagggggaagggggcggggaattataaccaaagaatgccagtaaatttggtgcactgaaagaagttgttgcacata

SEQ ID NO: 124881 - DNA, 122 bp, Homo sapiens
tatttgtaattgttcgtcagttcaaatctcttggttttaaaaaaatactttccctctgcgcgactggcgcgtcacgtcgcgcgcgaccagtccgcagggctcctcccgcgctgctgataggc

SEQ ID NO: 124882 - DNA, 122 bp, Homo sapiens
ttattcctaagcgaatctcgcacaaatctcgaggcatattttgtacaaggggacactggccgcgcgcatcgcaatcgcatctcagcgacagaagcggtcacgtgccttggcgcgcttccgca

SEQ ID NO: 124883 - DNA, 122 bp, Homo sapiens
gccaagagtgatacctgatcctgggggattgtgaaatgacctcatgtggcagcccgcccgcggtgcccgcaaagccctccaccctccccttccccgctcggctccacccctaccccacgccc

SEQ ID NO: 124884 - DNA, 122 bp, Homo sapiens
tgtattctatgctctcacctcctatgttttagctgtttggggcgagggttcatatcctcacgttccagcagcactcctgcatgtactggataattctgatgttttcctagggagggactgag

SEQ ID NO: 124885 - DNA, 122 bp, Homo sapiens
atgggcccggaagtgcacactctcatccccttccctacgatcttccaactcaggccaggccggggacgcatgccccagcccaccccagacttgtcctaccatccggttatcccggctgtgct

SEQ ID NO: 124886 - DNA, 122 bp, Homo sapiens
gcggttccccatcccagggccaccagggcccccgggcccccccgctgcaccggcgtcatccgccatttgctgggaaaagcgacaagaaggaactagtcagtgtggcctacgcatctggcagc

SEQ ID NO: 124887 - DNA, 122 bp, Homo sapiens
agaggtggaggcacaaaaattgattgaacctgtgaggcagaggttgccatgagctgagatcgtgtcactgcactccagccagagccagagcgagactctgtctcaaagaaaaaataaaataa

SEQ ID NO: 124888 - DNA, 122 bp, Homo sapiens
atgtccaggtacacgtcgtcctgggggtcccagcggcgcgggtcctgcagcgtggagctgcgcatcttcttcacaccctgcaaggtcaaagagcagcgctgccagcagaggggcgcggcggc

SEQ ID NO: 124889 - DNA, 122 bp, Homo sapiens
acaaaggtgggggggcccctggaaccctctgtgggctggcagtgtgcttcctgcacccagcgccagcccgccctggggaggggctgaacccgccctgctcgtgataaggcacaagcaagggc

SEQ ID NO: 124890 - DNA, 122 bp, Homo sapiens
agccccgccccgccccggcaggcgcgggccaatcaccgcgcagctcaccgcccacgccgccgccacccggcccggcaggcaagtcccagtgggccccagactcccgcagcgcgtcagcctgg

SEQ ID NO: 124891 - DNA, 122 bp, Homo sapiens
aactgaaagttaagtaagactgagctgtcggcacctttgcaattgagacatccatttatacgccagtggaaaatattcagttgttattagttttaagtaaaaaaaagggggataaagccaat

SEQ ID NO: 124892 - DNA, 122 bp, Homo sapiens
gtggcaagggtgagaaactttgtactatgtgaacaaacagaactgggctgcatagacatacgcaaaatgcacacatgcaacacacttcaaacatcagattaccctgtgttatgagccctacc

SEQ ID NO: 124893 - DNA, 122 bp, Homo sapiens
accatgacaacgggccatctcacaatctctcagaatggcacagacgcctccctggagctgcgagtcccttgctcacatccatccccaggctgaatcactgggagacggaaatcaagggtgag

SEQ ID NO: 124894 - DNA, 122 bp, Homo sapiens
gactcaccggctgcgaggagccgcgtcttcaccaactgttcacgctcactctccgcggctcggagactcagccgcccttccctgggcactcattggtaagtcctcggaagcgtggaccaatc

SEQ ID NO: 124895 - DNA, 122 bp, Homo sapiens
gggaggcagactgctcatgcgccctgcatggccggaaagatgggtttcattgccctctgccggccatgaggtggcagcacaggacgtttggccttagcggtagacctgagtctgaatcactg

SEQ ID NO: 124896 - DNA, 122 bp, Homo sapiens
tacaaatgcactcacagagcagagtgcctgccccccgagacggcctggtagcggctcctacggagtccgaggtggcctttctgcctgtgcctccccaccagggccctccgtaagcactgact

SEQ ID NO: 124897 - DNA, 122 bp, Homo sapiens
cccatttgtgcctccctccgttccttctgccacccggggcagggctctggacttgggccccgagaaggcaccacccacagcccccaacccctgcgtggaaaggggtgctttagccccgaaac

SEQ ID NO: 124898 - DNA, 122 bp, Homo sapiens
gccacagctgcccaccctgaggggtcacccatggtactcacttgttgaagaggttcaggccgatgcggtagtgcctcttgcggatgacatcgttgctaaaggcaggcgagtcccagctgttg

SEQ ID NO: 124899 - DNA, 122 bp, Homo sapiens
taactactgtctacacctcaaacagaaaactaacaccacgtgtcacctaaaaggtaaacccgcctcagcaagtggatcaaaaagtcattctggtgtcttgttaagtattactttcatcacta

SEQ ID NO: 124900 - DNA, 122 bp, Homo sapiens
aacacccggactaccgatcccagtgtgcaaagcctccaggcttaccttcccggaaactggcgcggtgccctctgggacttgttctgggacttgtagtcttgtactggcgctggcccgccttt

SEQ ID NO: 124901 - DNA, 122 bp, Homo sapiens
catagttgacgctgacgatacagtgtggcctggaggagcgactgttgtgcacgatggtcgcgtagctctgcacccatacccagccgccgtgtttcgccaggaacctgtagtacttggtggtc

SEQ ID NO: 124902 - DNA, 122 bp, Homo sapiens
agcggccaagagtgagacccgccttgaggactactatgtatcccacagacctcgcggggccgcgtgacgccatcaggatgcgcgaggctcggggagggggcgggattagagtccaagagctc

SEQ ID NO: 124903 - DNA, 122 bp, Homo sapiens
acacgacacccaaggagagggcgggcgcgagtcccaccgggtgacccgctccctggggggcgtgaagcccccagacctgccctgcccctgcctggagattgcgccttgcagggagtgacaac

SEQ ID NO: 124904 - DNA, 122 bp, Homo sapiens
gccaccacagtcttaaatcccttgcccaagacaggagcctttgctttttgtgagagtccgcgtctgtcacctggtgtgactcatccattctccagtgcattgcccctcccactgcaggagct

SEQ ID NO: 124905 - DNA, 122 bp, Homo sapiens
cggccgcccagcgctcagacaatgacggcgcggggacccgcctggccgtcccgggccccgcggggacgccaaccacaaagtaacttgccgccgcgctccccgcccaactccgtacctgccgc

SEQ ID NO: 124906 - DNA, 122 bp, Homo sapiens
aggtgcccggtttcccgtggatcttggaacttgctaactgggtggctccatgctgaagggcgctggagagactcattcacattttcctactcggcactcacgccctccattcagcactttcc

SEQ ID NO: 124907 - DNA, 122 bp, Homo sapiens
atgatcctctgcagcagcgtgtcctccaggtggggctcaaactccaggagcagctgctggcgccggggcagggcggcctgagtaggggaggcggctccccgggccccgagcgcggccccgca

SEQ ID NO: 124908 - DNA, 122 bp, Homo sapiens
gccgctggggtgcccttggaggccagcggggagcaggtgcggctgcagaggcagatcaagcgggacccccaggagctactacataaccagcaggcctttgtcatcgagttcttcgacgagga

SEQ ID NO: 124909 - DNA, 122 bp, Homo sapiens
gcaccccggtcaccccaccagggacctgagagtgtgaggcctgctccgggggtgcacgcccgggtgggctccacgggcaccctgtgactcagccctccaaagggggccatttctgaggacgc

SEQ ID NO: 124910 - DNA, 122 bp, Homo sapiens
cttaattaacggcattgagtagacaagtgaggtcccgccccctaggaggagctaacaccgcggaccgaatcaggcggatggtcgttaacaaatgaacccttaatcttttcagaggaggaaac

SEQ ID NO: 124911 - DNA, 122 bp, Homo sapiens
tctggggacctcgtgtgtggggagtcacacagtgtttgtccttttgtggcttgtgcccctcggtgtgacgtcctcgaggttcctccacgctgcggcgggtgtgggagcccttccttcctgag

SEQ ID NO: 124912 - DNA, 122 bp, Homo sapiens
tggaggggaattcagcccccataaaagatcacggattaggaattacgtaagcataggtctcgggcccttttatcttggacgcgatccttccacgggatcgcctccggatggatgtggcgctg

SEQ ID NO: 124913 - DNA, 122 bp, Homo sapiens
tggcctagtgactctgccttggtttccccacttgaaggaagcagatagaacagtatcctccgaggagtggaggctggggatcggtgaattattgataaaaggagagctcttaacctagcctg

SEQ ID NO: 124914 - DNA, 122 bp, Homo sapiens
ggaacctgggggcggtaatggggcgtgaacaagaccctgggactctggcttatctggccccgcccaattgccctacacggagccctgcccctggagtcctggaccttccctagcccggcccc

SEQ ID NO: 124915 - DNA, 122 bp, Homo sapiens
gggcatcctaccgagaatttccggaaccacgtgcgagatgatgccagtcatgaacgtctccgcgcttcctttcgctttggaaatatccttaagtagaaattttctgagctttgcctaaaact

SEQ ID NO: 124916 - DNA, 122 bp, Homo sapiens
ccactgtccggggagcgatggccaggcccaggcgactggcggccaggtgtcctcagcacacgctgtacgtgctcgtccaggatgctctcagggttctcctcgtgtgcatcccggagcccggc

SEQ ID NO: 124917 - DNA, 122 bp, Homo sapiens
gtgtggcgggtctggggcccggggtctccggccagagcagctgtggagccacgtgcaacacgcgcgttgccctcagcccgggcggggaccggacgcatccggagctgcggggaggagccggg

SEQ ID NO: 124918 - DNA, 122 bp, Homo sapiens
tgcactgcggttcaccaacagagactggacaatgcacctgctgattgggcacgcagcccacgggacgatcgtttgcgacggactcctcaagtcttacagcagcagctcattaaaagggccag

SEQ ID NO: 124919 - DNA, 122 bp, Homo sapiens
ctcagcttcatcccagatgcctggtactgtctcaagactgcaggcactgaaacgtgaccccggtgtctcaggctgaaacagcaaactcccaaccgagttttaaattctcaacaatttgtgga

SEQ ID NO: 124920 - DNA, 122 bp, Homo sapiens
aaagggtctgggggccgggcgcggggctgggtccagcagtcctgggcaggtccagccccgcgcatgctccgtcaggcttctctgctaaccagggagactggttgctaggagaccatgctaat

SEQ ID NO: 124921 - DNA, 122 bp, Homo sapiens
cagagagtgaggagcacccaagtggggccagaggaacgttgtgtgtggcagcaaggagcccgcagaggtatgaggggaggggctgctcggcctgctccttgggtaggagaggaggagggagc

SEQ ID NO: 124922 - DNA, 122 bp, Homo sapiens
gccgtaccaggggccctggcagggtcagctgcaagaacatcaaaccagagtgcccaaccccggcctgtgggcagccgcgccagctgccgggacactgctgccagacctgcccccagggtaag

SEQ ID NO: 124923 - DNA, 122 bp, Homo sapiens
cagctgccagctgaccgcgggagataatgccttgtgcgcacgcgcttgctcagaaggcgccgttcgccggctacctgttggtgtgtatgcagagcatccctgtgccccgcggatatagactg

SEQ ID NO: 124924 - DNA, 122 bp, Homo sapiens
gttgcagccagaacagagaacgatataataaaaactcttttagagacattaatatgaccccgtctcaagactggtgggaacagagactgaaggcagaaaggtcatttaagtatcactaaggc

SEQ ID NO: 124925 - DNA, 122 bp, Homo sapiens
ctttggaaatgccagctgctgtggccgcaggggcactcaggggttctatgagtgaccacccggcagagggaagcgcccaggcttcacccatccctgctttaagaaccacctcagtgctcagg

SEQ ID NO: 124926 - DNA, 122 bp, Homo sapiens
ttttaaaacctttactcctttagcaaaagcacccaacataaagccttgcacacagacacacgtaataaatgtcattttgaaaatcttttaaaatagatatccctttatgaacttcaaagatc

SEQ ID NO: 124927 - DNA, 122 bp, Homo sapiens
gccgaggctgatcacgtgctcagaattagtgtgaggctatgaggttcctctttgctcccccgtttgtgggcaaagccgatgtgtattattaagtgattctgtatccaggtatcagagacccc

SEQ ID NO: 124928 - DNA, 122 bp, Homo sapiens
aagtgcatcctgatcccacaggtttcgcagctttgaccctgaaacaggaaaggccaatgacggcggagctggtgcacacctccatgttctgcaaacctccggggaagccacaagggaaatgg

SEQ ID NO: 124929 - DNA, 122 bp, Homo sapiens
tgaatgacaatattggaaaacatacatttcctcccctccccatcatagtccctctgcttccgtgttaactccatagagaggccagcacaaccagccttgcagcctgagataaggcctttggc

SEQ ID NO: 124930 - DNA, 122 bp, Homo sapiens
cagctgctcctcaaactcattagggcaaaatgaaagcacaggtgcggcagcatctgagggcggtggatgacagggcggcagccccttcccgctccaagagtcgccaaccttcccttgcaggg

SEQ ID NO: 124931 - DNA, 122 bp, Homo sapiens
actctgaggcgaatgtaaaataggatttgatacccacctccagctagaagaagtgcatttcgggcgcacgcctcgagaagggctgtggcggcttctcgctgagagagctgcaggactctttg

SEQ ID NO: 124932 - DNA, 122 bp, Homo sapiens
ggcaaagcaaagagccagcacccctgagtgtcactgaagttcctggatggggtgtgagtgcgcgcgttccgtccgagacctcagtctcgcccagctatagagccgataaagggatgtcttgt

SEQ ID NO: 124933 - DNA, 122 bp, Homo sapiens
ggcgagctgagcgagggggtggagccagccatgggcccgcccctaaacgcccggaagtgacgttggcggacaaaggcagcgcgcgccgcgagctgtcgcgtctggtcgtggtctggcggagc

SEQ ID NO: 124934 - DNA, 122 bp, Homo sapiens
ggccgcggggagcggacgagggccacagccccccacccgccagggagcccaggtgctcggcgtctgaacgtctcaaagggccacagcgacaatgacagctgacaaggagaagaaaaggtaag

SEQ ID NO: 124935 - DNA, 122 bp, Homo sapiens
gccagaggatgggcatcccaaaggcagctagcacagccctgccctgccagccggggggggcgcccagagccacctgcccccagtccagccatgcccctgccctgtcacccacaccaggcttc

SEQ ID NO: 124936 - DNA, 122 bp, Homo sapiens
gtcctctcagaactcctgtgtgtggaaggcacccgccctttccttgccttctttactcggcgtgctccttttctctttgggtttcttgtttaccaaagaagagtttacagacaataaaatgg

SEQ ID NO: 124937 - DNA, 122 bp, Homo sapiens
gggccatccttgcagctgcagacagaaagcccaaagctcactgggactcacagaagccctcgcaggtgctgctccgcactgtaacctactgtggcgtgcatctagttgttccctttccatta

SEQ ID NO: 124938 - DNA, 122 bp, Homo sapiens
aagcaagtcacatcccggttggatagagtcatcctggcatgcagtttttagcaatatttccggagagcagggagtgggttaccaagtggctgtctcctcctcctcactctttcagtcaaaga

SEQ ID NO: 124939 - DNA, 122 bp, Homo sapiens
cccctctccccgctgccaagcaacgctcatgtgctccaggaagccccacgcacgttcccacggctcatgcgggcagcctgtgtctcggctcagccctcaagggtgccatgctccccgtgtga

SEQ ID NO: 124940 - DNA, 122 bp, Homo sapiens
ctggcggcggaggaggacggtgcagctgcgagggtctcagttgcccgcagggcggctccacgctagctgcggccgggcggggcggcagggcgtgccgggtgggagggggcgcggcgcgcggg

SEQ ID NO: 124941 - DNA, 122 bp, Homo sapiens
atgtgtttttaagctgagccttacttcttcatgagaggtttttgcctgctgaccctgttccggtagcttagatgcaggcggtgatgaaaggtcatttcacaacttcacatgttccagatggt

SEQ ID NO: 124942 - DNA, 122 bp, Homo sapiens
cgcttctgtctctacctggcctcacctccccccgccccgagcgggcgtctcagacgaagacggaccctgccactgtagagtggcaatgtgtgtgccgtgccacacctcctttctcaaaactg

SEQ ID NO: 124943 - DNA, 122 bp, Homo sapiens
gctggagccgggttggaaaccccgtgcccttctcttggccgaaagagcaaaagcccgagccgctcggtttcctgggggggctgccgaggtctgaggggtcaaagggactcgagtcgggtttg

SEQ ID NO: 124944 - DNA, 122 bp, Homo sapiens
cagctcttccacttggcccgggcacacgctttcatgtgaaaccttcaaagtgtgcttttccgtggcctgttttgtagcctggcttcttaaatacgtctggattttgttgcagaatctagatg

SEQ ID NO: 124945 - DNA, 122 bp, Homo sapiens
tgattagcttagaacctgtcttgtctcatcttcaaaaggtaacttattaaaagtcctttgcgtctgaagcctttctccttttctgtcacttgcaaattccaaattatagctaataaagatga

SEQ ID NO: 124946 - DNA, 122 bp, Homo sapiens
tctacgcgttaagagccaaggacaggtgaagttgccagagagcaatggctctcttcactccgtggaagttgtcctctcagaagctgggctttttcctggtgacttttggcttcatttggggt

SEQ ID NO: 124947 - DNA, 122 bp, Homo sapiens
tgctcgtagccaatgggagcagtggagcggctcgagcgcggctgacgctgcaccaatgggcgatcgtggggggcgggggcagcagaggagacactattgttgatgaggagcggcggcggcgg

SEQ ID NO: 124948 - DNA, 122 bp, Homo sapiens
ttctgacctcacaggtttggtagagtgagcaggcagagcgccagctctgcgcctggcacccgggaagtgctccgtgagcaggagtttaagagggtgaggctcgaggttctgaaaggtttgga

SEQ ID NO: 124949 - DNA, 122 bp, Homo sapiens
atcacccaaagctactaccgcagtgcccacgcagccatcatcgcctatgacctcacccggcggtccacgttcgagtccatccctcactggattcatgagatagagaaatatggagctgcaaa

SEQ ID NO: 124950 - DNA, 122 bp, Homo sapiens
ttatagagtgaagactcatcatgcaggacgttggctgaaacgaaaggacaccacccgaggcgtgaaacatcgccatggatgttcttggaaagacatctgctgctctggcacgcaaatgctgt

SEQ ID NO: 124951 - DNA, 122 bp, Homo sapiens
cccagagctctgcacacgcagtcagccactctccagatcagattggaggggcgcagtccgcgattccacacccaagccgataaagaaaaacccagcaccaccctcctggctaagccattgtt

SEQ ID NO: 124952 - DNA, 122 bp, Homo sapiens
cacctgtcccacctcctgtccctcctcctgcacttggtgtcagaactgcctcctgctgaacggttctcccagggtttccaccaatgaagtccccttatgaatcctgtgtaggcgtctgcttc

SEQ ID NO: 124953 - DNA, 122 bp, Homo sapiens
gtagtcttcgccaccaacgacccctgcggccagcagacagcccgtcacttcccgggaccccgggacgacaataggaggaacaggcctgccgtcaaggccacacccggccaatgctcaggcct

SEQ ID NO: 124954 - DNA, 122 bp, Homo sapiens
cgtgtttttcaaatccaccaatgggcacacagcttaggctcgaaccagccaatcggaatgcggagtcaccgggaaatttaaatcgcgccggccggctgcacgagccacacggtctttgagct

SEQ ID NO: 124955 - DNA, 122 bp, Homo sapiens
agttgactgcttctcctgctgtttaccaagagaataatcttaactctacattgtggagatcggatttgttctcacttgacagaaagccagtcccacgagcagcttggtacccaaataccagt

SEQ ID NO: 124956 - DNA, 122 bp, Homo sapiens
gagtagagcctgtagcccctgcgagagcagagccgggtggtgcactgcacagaaggtcaccgcgggaggccaaatccccggggaggggaaaggacctgggcgtcgggaagcccgtctccttt

SEQ ID NO: 124957 - DNA, 122 bp, Homo sapiens
gcctgctgggggccaggggcctgctgccgtctccgctggaagtaggggcggtttcgtgggcgctggggctcaggccgggaaccatcagcgggaccttggctgggcttggtctcaccatcccc

SEQ ID NO: 124958 - DNA, 122 bp, Homo sapiens
accaggggcgcgccctccgcggggagaactcggggcggcggccagacccgacgcgacccccggctcggaccctgcagttaactgctcccagacgctttcccagtgcgcccgcccgccggccc

SEQ ID NO: 124959 - DNA, 122 bp, Homo sapiens
gtccctctccccagcctggagagggctggcctggtcactagaagggaggattgtctcaggcgagtcttggcctgagaggaaagccccctcccaagctcccaagaggctcctgaggaactcgg

SEQ ID NO: 124960 - DNA, 122 bp, Homo sapiens
gactgaattttcagggacttcaagagggcttaggcattccaattctgatgtaatcacctgcgcctcagtcagagcagcatcaattcctgcttttacagctaagactgcagggaagtgctgag

SEQ ID NO: 124961 - DNA, 122 bp, Homo sapiens
cccacaaaaagcttccccagccctgctggcagcccggcagccaacagcctcccaaggccccggcttggcgggcactggcccgggctattttatcagtgtgacaattgcccgggttggtgtga

SEQ ID NO: 124962 - DNA, 122 bp, Homo sapiens
tgatcacagcttgttggtggcaaactccgctagggccttctctgctaccctaaggaggtccgaccgtatgttttggaccccttaactcgggataccgataaacgaaaattaatagggtgttg

SEQ ID NO: 124963 - DNA, 122 bp, Homo sapiens
gtctcttcgggggcgtgggttcgaatcccaccgctgccagggttgctgtctttttgtccccgctgcatacactcctggctcagttttgcgcgtgccatcagcgccccctgctgcagggcggg

SEQ ID NO: 124964 - DNA, 122 bp, Homo sapiens
ggtctggaagctccccctagcctgggggacttctttctttcactgggcattcccaacccccgagacctgcccagcacttaggactgaagccgacttggggcttgggtcatcatatctgagag

SEQ ID NO: 124965 - DNA, 122 bp, Homo sapiens
cctgcgggcgcccccagccccacacccccccaccttcccggggggtgggggggtgcgggccgccggatccgggggccccgccgccccagcagcccaggacagccccctctccccgcccccag

SEQ ID NO: 124966 - DNA, 122 bp, Homo sapiens
accacacggcatagtaccacattgttacgtcaagcacagccagtctaccacagagcctgtcgtcccattgaccaaagtcacaaaaatcacagccccgggtatttactgtggttttctccagt

SEQ ID NO: 124967 - DNA, 122 bp, Homo sapiens
ccggcgacaagaccccaagcaccctcggccggtggcccgggcccgaccaccccagctgcgcgtcgttactggccacaagtttgctctgggccagccaagttggcaacttggaagcttctccc

SEQ ID NO: 124968 - DNA, 122 bp, Homo sapiens
ggggtggagttaggaccgggccgggggcggcggtggaggagagggcgggatggagaatcccggctagcagcgtgggagctggcagggcttctgcaagccctctgctcccaccctggccccat

SEQ ID NO: 124969 - DNA, 122 bp, Homo sapiens
aagcattcgcctgcctcaacctcccaaagtgctgacattacaggtgtgaaccaccacgcccgggcatggttatgtttcttaagactcttattcttggccgggcacggtggctcaagcctgta

SEQ ID NO: 124970 - DNA, 122 bp, Homo sapiens
ccctagcctggaacctctgggctgccctctaaactgccttggttcttatcagatccatatcgtacagaaacctaaaacccctgcaactcatgttttattaaaacatgtttagcattcttttt

SEQ ID NO: 124971 - DNA, 122 bp, Homo sapiens
acaaggggctgtcagaacggagccaggcagtcggcgcggtgctcagcctgctgctggtggcgctcacctgctgcctgctggccctgttgctctacaagaaggagaggaggtaagcgggtggc

SEQ ID NO: 124972 - DNA, 122 bp, Homo sapiens
gtccccgagccgccgcggcttctcgcctttcccggccaccagccccctgccccgggcccgcgtatgaatctcctggaccccttcatgaagatgaccgacgagcaggagaagggcctgtccgg

SEQ ID NO: 124973 - DNA, 122 bp, Homo sapiens
tgcggcgctggacagcgggagctccagccacggaggccgctccttcagggaaggatagcccgggctcctccgtgcccctaaaccctgcagaccacgaagtgaacccgtgttggaaccaggtg

SEQ ID NO: 124974 - DNA, 122 bp, Homo sapiens
cgttcgatctcagtatttgtggaaagagcaagaagagaaagccggtttgcactgaaaatccgcacctgcgcaggctccaggaggagtgtgtcctgtgctcagcctgggctctctttctgcac

SEQ ID NO: 124975 - DNA, 122 bp, Homo sapiens
gttggccatgggagcggttctctgaggggaggccggggtcggcccgggggtgggggtccccgcacaggcccagcctcaccgtccgccagggcttcactgcactcgaagctgatctcgaaccg

SEQ ID NO: 124976 - DNA, 122 bp, Homo sapiens
gctactctccgtgtaggggcgctgctcgcctttctctgcaagccgagctaattcagtcttcgtcctcctggaaccggcccagctcccaggggcaaggcggacgtggagtaccccagagacag

SEQ ID NO: 124977 - DNA, 122 bp, Homo sapiens
gagcttcagagaactgagtcctaagagctagggtgcctaggaggagcagcctctgagctccggtgaccacagctcaatgaagcccccagctaggtcatgcctcacccacccgtccaccctgc

SEQ ID NO: 124978 - DNA, 122 bp, Homo sapiens
ccttgtactcttggccttgcctcctagcatctcagacccaatgaaatggtttattttctacgcttttgtatttcacaaaaattcttcagtaaccatgtattacttttataattagaattgtt

SEQ ID NO: 124979 - DNA, 122 bp, Homo sapiens
tttttgcttctttctgtagccattgtaatgcctcctggctaagtgctgagaaccaagtcccggcatgtgcacatggtaactggttaatgatattattctgcatgcccaaggcagtggtcagg

SEQ ID NO: 124980 - DNA, 122 bp, Homo sapiens
gtcataaaatgtgcctctcctggcaacacaaaaatgtcttcctgttgcttttaagaccaccgactgatgctgctgcctggatatccacttgcaagcattcccgagcctcagaacgtgaactc

SEQ ID NO: 124981 - DNA, 122 bp, Homo sapiens
ttgtgacgtgtgggcggggcaggcgggacgggctctcccttgggtgcttagccccgcccccgtcccactctgccctgttgctgtcgcgccgctgctggttgctgtccctggtgagtgcctca

SEQ ID NO: 124982 - DNA, 122 bp, Homo sapiens
gggagctcctggcatgccgatgtgagaaccgaccctccatagcaaggctgccccacatggcgtgggctggcctggcctctgagcttcctaagggctaaacctatagttacaagaattttcct

SEQ ID NO: 124983 - DNA, 122 bp, Homo sapiens
gcaggctgggctcgggatgcgctcagccaatcagtgggggagcggcgcgcgcgggggtggcgcgcggaagggcagcccgcgcgctcccggccgcagggagtaaccgctttgtgtgctgcttc

SEQ ID NO: 124984 - DNA, 122 bp, Homo sapiens
gccgagaggtttcaggaactgtcagtcctaatccaacgttcctattggtcagttcccaagcggttggagacaaagctcgcgcgcacattggacccgggtgggaggtggtaccgcaggccgcg

SEQ ID NO: 124985 - DNA, 122 bp, Homo sapiens
cttttaaataccttcatctgcccaatttcttaacctttcaggacaaggagggagaccctccgcgatcctgcgccttgccaccctttgggaaggataggaccatcatctagggcgtctctcgg

SEQ ID NO: 124986 - DNA, 122 bp, Homo sapiens
ggtgaccgaagaaggggagggaagcaggcccgatggagccgacctgtacccgacgcaacccgctgtgggccgaaacgggagctaagccagatggaacaaacgacccccaacccgagcccggc

SEQ ID NO: 124987 - DNA, 122 bp, Homo sapiens
actcagtggtcagcggaaacttgatgatagcgtagtggtcaagcttgtatctcctgggagcgctcttccaaagatatttgggctgcctcgggagttgcagcgtcttgggccgccggaaggtg

SEQ ID NO: 124988 - DNA, 122 bp, Homo sapiens
tatttgggatatctctgaagacgttgtgacgtggctgctacagaacttctcagacagcctcgcgcagctgacgactgcattgccatctgcacatacagaaaacccagccccagtaagttccg

SEQ ID NO: 124989 - DNA, 122 bp, Homo sapiens
cctcggagtcttcctcaggaatgctttcgcagctggaggccttcagccggctccacctgtcgccactcagtaaccgattccggggatagccctgcgcctgccacatgccgtccaccatagag

SEQ ID NO: 124990 - DNA, 122 bp, Homo sapiens
ccagaggttcgacctccagggcagcgcagggtaccccggcttcggagcgggaagggagcgcgccccgtcctggagctccgactcccaccccatctgcgctgagccggaggcgctggtttggg

SEQ ID NO: 124991 - DNA, 122 bp, Homo sapiens
ggagtctgcaatcgccgcgacgtcccctggcatttcttggccaggctgcaactttggtgacggtgtatgtagttacatcccctgtagtgcagctggtatttagggtcctcattggcaaagtt

SEQ ID NO: 124992 - DNA, 122 bp, Homo sapiens
gtaagtgcagacttgtgaagagtgggaactggaccatggcatattggagaaccagtgagacgactgggtgatagaagaatgctgaatgctgtgttcgtatcctgcttcatgcccagagtttt

SEQ ID NO: 124993 - DNA, 122 bp, Homo sapiens
cgcaacgcctgtacttttccagctccctctttccctcttgaaattgaaagttattgaggtcgctcagggttgttgctccagcagtttccttccccgcccccgagctcccccccgccccccac

SEQ ID NO: 124994 - DNA, 122 bp, Homo sapiens
gaaagggggggttcttgggggacagagtcgccccacacatcagagtgggcaggtggggatcgtggcaggggagagaaaataacggggatttggctcccctggggagagggggggcactgtct

SEQ ID NO: 124995 - DNA, 122 bp, Homo sapiens
gatcttcgccgacttcaaagccgagaacatgcagcacttctggaacaagaaggtcacggccgcggtggccgagaccttcttcctgggctggatcgacgagcaggtcctgctgatccagggca

SEQ ID NO: 124996 - DNA, 122 bp, Homo sapiens
tgcgaacaggacgggaagctgcagctgcgtacttttccaggccttcaggaccacagcgtccggcatgccccgcggcgcgcctccctgcgcggacctgtgggtgcctgagaaggggtctgcgg

SEQ ID NO: 124997 - DNA, 122 bp, Homo sapiens
gaacaaagggcctcccttgatgggccctacttatcacaaagcatccatgggctgctactccggcaggtctgcccagcatgatgccagcctctgagaagaggtctcgtggtcagtgcatctcc

SEQ ID NO: 124998 - DNA, 122 bp, Homo sapiens
acttatagcctaacaaatacaactgcctccaatccttggcctataaacatgttgaagtctcgtctacctcaacttctcccttgaccccatgtttctctctaatttactttcagtctttctct

SEQ ID NO: 124999 - DNA, 122 bp, Homo sapiens
ttcggagcccgccctttctgagcttcctgggccggctctagaacaattcaggcttcgctgcgactcagacctcagctccaacatatgcattctgaagaaagatggctgagatggacagaatg

SEQ ID NO: 125000 - DNA, 122 bp, Homo sapiens
tcctcacaatgccccaggctagtaccatgattattagttccattggacagaggaggaaaccgtagcctgaaaggctaagtgacttgcccgggtcctccagctaggaagagagagagccagga

SEQ ID NO: 125001 - DNA, 122 bp, Homo sapiens
acactgttctttctcttgtgcaattgtacccaggagcctctggacaagggagccccggaacgtccagaatgtggcttcgtgctctgcttccaggctgcgcggcatccccagcaaggctgttc

SEQ ID NO: 125002 - DNA, 122 bp, Homo sapiens
tctgtaacaagatgatgcaatctcccaaggttattgggaagattagagatatggggtacacgaaacttgtgtacctggtgcaaagaaatgcttggtgcaaaacagctatgcaattaataggt

SEQ ID NO: 125003 - DNA, 122 bp, Homo sapiens
catacataggccctgtgacaccccaccagctcctttgctccctttctgcctttctcatgccgtcccagagtcttgcacactaccaagatggtggtgagtcaggacagtgaaacaggtcggct

SEQ ID NO: 125004 - DNA, 122 bp, Homo sapiens
tggaaaacaacactatattttgcttatgggtacctgtggtaagcacaaccccaaatattgcggccgagggggacctagaaggtcaaagtgcgcctcagcattttctctcgccctgcacaagc

SEQ ID NO: 125005 - DNA, 122 bp, Homo sapiens
aaaagacaaataaaaggcagtgagacaagtagtgaggttgttgggactgtcactcttaaccgcagaggtgcctgtcgaggggctgggagacggtcgtatcccaagtcctcgggcctatcgaa

SEQ ID NO: 125006 - DNA, 122 bp, Homo sapiens
ccaaatttataaggcagaaagagattaagcctcttgtcgctggcaacacagccaagaaaacgatttgaactgaaatgtattggatttcagggtttctactcttgactaggtcgttagatcat

SEQ ID NO: 125007 - DNA, 122 bp, Homo sapiens
aggcaccgaggtgcgactcgctgagtctcaggctcaagctttaatctctgcgaagttgggcggctccacgggctcgcccccgcccccccccgccccccaatatataaaggcatatccatagt

SEQ ID NO: 125008 - DNA, 122 bp, Homo sapiens
tgcccggacctgctgcccgactggccgctggagcgcttgggccgtgtgttccgcagccggcgccagaaagtggagctcaacaaggaggacccgacctacaccgtgtggtacctgggcaacgc

SEQ ID NO: 125009 - DNA, 122 bp, Homo sapiens
agaggctgggaggcctcaggtgggaacatacctttggccaaaggcaccaggtaacccgaacgccccggggaggacccctgcctgcatcgccgcggccgtccccccctaccccgtccccagca

SEQ ID NO: 125010 - DNA, 122 bp, Homo sapiens
ccctacagtctcactaacatttcagcggcggtgtcgtcaggactggagatctcacggtatcgcgagaacttgctgagcccgggattggttccgccgctccctgccagccaaccggattctct

SEQ ID NO: 125011 - DNA, 122 bp, Homo sapiens
cagaagttaccacaatcacatgatttataaggcactgagtaaagttttaccaaattaatacgctggttttgtggtactaggtaaaaagcatacacatcatggcaagggagaattcgaccttc

SEQ ID NO: 125012 - DNA, 122 bp, Homo sapiens
tgctttcccgggattccagtcacaggtggggacagacacgcacagaaatcagcatagcctcgagataaatgcagttgtttctcttcgtggacaaaggcgttcgattttccagaggaggccaa

SEQ ID NO: 125013 - DNA, 122 bp, Homo sapiens
ggggtgagagtgtgtgcgggagagtggtgtggagactgtcctctctcaccgcgtctcctgcgcctctccccgccatcccgagcgggcctagagagtcattcatgaatcttaacctgagggca

SEQ ID NO: 125014 - DNA, 122 bp, Homo sapiens
ggggtgctcagccgaaagcggggcctcgagaggctctaaagacagcagcacacggctgggcgcggtggctcacgcctgtaatcccagcactttgggaggctgaggcaggcagatcacctgag

SEQ ID NO: 125015 - DNA, 122 bp, Homo sapiens
agtggctagagctgcaacttgaacagagtcagagacaggcaaaaagaagcaggtagcccacgggcaggcagcgaaagctgacattctctctggacagggctatgtcacaggagagctcacgg

SEQ ID NO: 125016 - DNA, 122 bp, Homo sapiens
tcctgtgagaggaagctgctgtgattcagagaagagacttcaagctgtgtgtgaccctggcgtccggttcctctcacaggctggagcttttcggaagtggcatgcaaagagtccaggtttgg

SEQ ID NO: 125017 - DNA, 122 bp, Homo sapiens
ctgacccttgcctctgatttagaaaatggatgcgctttggacaatggtgtgttcaggctgcgttaagggaagctgcactaattgttcacagtggcgagaatggtttaggagatcacggcgtt

SEQ ID NO: 125018 - DNA, 122 bp, Homo sapiens
cagtggagtcattttggctcatagcaacctctgcctgtttctcattacaaccaaaaactccgaatgaatattttttaaaaactactcgagaaccttgaaaagtaaacaatagcaggtagatt

SEQ ID NO: 125019 - DNA, 122 bp, Homo sapiens
aagccacagcctctctgtccatttccttgcctcttcaaaggggatggagatgaggccgtgcgcagcaggggggtccagcactctccgccatcactcgaaatggtggctattattatcctcct

SEQ ID NO: 125020 - DNA, 122 bp, Homo sapiens
ttgggccaggggtggagggctcaagggcacagggcccaggctgaggcagggcgggcaaagcgcctggcaggatgaagggcaagtggccccccaaacacagaggccctggccatggaccctgg

SEQ ID NO: 125021 - DNA, 122 bp, Homo sapiens
taagctacaaacctctaaagcatgttactatattgaatattgtgggcaactgcaacacaacggtatgtatctttgtatcaaacatatagacacgtagaaaagacacagaaaaaatagaatat

SEQ ID NO: 125022 - DNA, 122 bp, Homo sapiens
gccagaagctggctcctggcccccggcacccccaggcctcgaaaccccgcgtcccgcccacgaccccgccctgcgcccctcgcagacccacgcaccccttgtgccttccttgactccgtggc

SEQ ID NO: 125023 - DNA, 122 bp, Homo sapiens
tcccttgccagcttccctggtgaccagccaggacccaaatcacctgggtcccctcccctacgccctcctgcaaagaggaagtgctcatgaacttcggccctgccagggccttatcagagccc

SEQ ID NO: 125024 - DNA, 122 bp, Homo sapiens
accggcctccccgcagggacctcggcctctctgccgagctgtattctcacggtggcaccgcggatccctggacctccttcaaagatcttgggatatgactcggtgcgcccttgagcgactcg

SEQ ID NO: 125025 - DNA, 122 bp, Homo sapiens
caactgtgctagaaaaaaagactgcacccaccccagctccagatgcacacattagctggtcggtgagatgcagcagcctggcttcctccctctacccactccttgggggcggggctggaaga

SEQ ID NO: 125026 - DNA, 122 bp, Homo sapiens
gattttctttctcagatcttcattgcagctggtgattgctgaaaatgatgatctcagagtcgcctgttcctgccagagagcctgcacacagagagatgcctttgtgaagccagccatagaaa

SEQ ID NO: 125027 - DNA, 122 bp, Homo sapiens
cccaaagagaaacgctggcgctgggggctcatgtccaggagacgaccaggtcccctgcggcgaaaacccagcaggcaggggcaccgggttgaaatggggctccgtcacctccgagggagcag

SEQ ID NO: 125028 - DNA, 122 bp, Homo sapiens
gaaataagatgtggtaaaatttttcaagatcccatcttacctctctttattctgccatctcgtgcaaggcagccatggggtggcacactggtcacaaagatgggcagctcaccactcttact

SEQ ID NO: 125029 - DNA, 122 bp, Homo sapiens
aggcttgctccccgccctacccgccagcttctccgccacattccactgccgcagcagaaccggtgtccttcacctgcctgcgtcttctgcagttcgttaagcagcgcccttagctcctgtga

SEQ ID NO: 125030 - DNA, 122 bp, Homo sapiens
ctcggccgcccctgtctccatgtcgcctcccgccctaggtacgcttcacacacacagcgccgcctcagacctgccgactggccacttccggcgtccgcagccaacggctccgccggacggcg

SEQ ID NO: 125031 - DNA, 122 bp, Homo sapiens
ccgtcctgcagtcatgagggtcaattgctgaggcttcacagttcccttctctcttacactcggaccgtcacgctcctcacctactaccccgatgcagaggtagactcaggatccctgcactt

SEQ ID NO: 125032 - DNA, 122 bp, Homo sapiens
acggagcatgtgtactgggcagagtcttgagccaagccacatgataggaagctagtttcccgtatgaccacgttacacaagttcacgctggtctcttatggctcaggcccaagtctcacaca

SEQ ID NO: 125033 - DNA, 122 bp, Homo sapiens
gggtggaagagctgggcaaggaggtgtcccggctgcttctgctgtggacagctgcatggccggagaggagcagtgaggcaggcaaagcccccctgcaggggtctccttgactcaggaacatg

SEQ ID NO: 125034 - DNA, 122 bp, Homo sapiens
cttcttgacactgggggagggaggagagggagggaagggagagcccagtcgccggagaggcggagacaaagaaggcagctgcacaaagcgcccaaagatgagagcgaaaaggacgggaatgg

SEQ ID NO: 125035 - DNA, 122 bp, Homo sapiens
gctttggtctgtggggttctgagtctctcttttctcttattaaaaatatacagaagtcaccgcaaaaatattaaagaatttaattaaagagtgattcaaaaatccgggcgcggtggcacacg

SEQ ID NO: 125036 - DNA, 122 bp, Homo sapiens
gtctgccctgggagccctcgcataataagtcacttgcttgtgaatccttgttgcttgttgcggtgtctgcttctgggaaacctgaccttaggcaccacctcacatattttcttaacggtggt

SEQ ID NO: 125037 - DNA, 122 bp, Homo sapiens
cgccgtgctcggccacgcccggggatgcgcgggtggggctgggctgcagggaggggttggcgggaagtggccccgggagcttaccctaccaaaggttctgcggaaggacaacgtgggggcca

SEQ ID NO: 125038 - DNA, 122 bp, Homo sapiens
tctgccgctggcacgctgggagccatgtccgccgaagtctctcactgccaccagttcgcacgcctcacaggtccagtgcttcccaggtcaacgcacgcacgccacgcacgtcccactcgccg

SEQ ID NO: 125039 - DNA, 122 bp, Homo sapiens
cactccataattcaaacctatttctccaagctgaccctcttgcaatgggcagaacacccccgcactttcttcctggcactcatttggaggagccctgtagaaaaacaaccaggcaaccagac

SEQ ID NO: 125040 - DNA, 122 bp, Homo sapiens
agggacgtccgaagtcagggcgcctgcgtcaggctgctgggggcgggctgcggagctaagcgcccctctcatggacccaggtacgaccactactctgtgctgtgcgagctgctgcccgcagg

SEQ ID NO: 125041 - DNA, 122 bp, Homo sapiens
ttccgtggggccacttccttttttgtctcctagcaacggcgggtagcgttgttgacatcccgggaggctgtgccgccggcctgagcccagagtttcgcggcctccgcgatggtaaatctggg

SEQ ID NO: 125042 - DNA, 122 bp, Homo sapiens
accgcacgagggccctgggcaggtgggggtgggtcaccctgcactggtaggtctccccttcgatccagtctcgggtgcccaccggcagggtggacgtgacggttaacgtgccattgcgctgc

SEQ ID NO: 125043 - DNA, 122 bp, Homo sapiens
gcaggtgagcccgggagatgggggtgtgctgtcctctgcatgtgcccaggccaccaggcacggccaccacgcctgagctggaggtggctggcggctcagccccgtcccccgcccgcagctcc

SEQ ID NO: 125044 - DNA, 122 bp, Homo sapiens
agcaagccagataagactaatcagatgagacaggggcatacccagaaccctggtgatccccggaggatgggggccacataacaaacctgctgaccgagcatcggaacaacggttcatagagg

SEQ ID NO: 125045 - DNA, 122 bp, Homo sapiens
gccaagctgcccgagcttcactcacactggctgctcaacgaccgcatctggctggctcaccgctggagaagccgagctgagagcagccactacttccagagcctcgaggtcaccacccacat

SEQ ID NO: 125046 - DNA, 122 bp, Homo sapiens
ccgtccgttcaccaatcagaactcgatcttgcgctttcaggccgcgggacgggaaggctccgccctggcgccccgcaggccaatcgactgcgcgtccgcgtcgcgggggcggggtcagggcg

SEQ ID NO: 125047 - DNA, 122 bp, Homo sapiens
caaaacacgccagcccgggcccgggctttgttacctttgcgcctctcgcctcctctcgcccgaactctgcagatcccattcatgacgaagggcttcttccaaactgagagaaaaaagttttc

SEQ ID NO: 125048 - DNA, 122 bp, Homo sapiens
taagcattcctctcggcgctttgatactcacgctacacacaagcctacaccaaagccggccgctgtctttgcaggtaacgcattggacggttcctgccgtaccttttcccttcaagttgtgc

SEQ ID NO: 125049 - DNA, 122 bp, Homo sapiens
tcggtccgctcggcacagcagtacggggaagacggtctgagccagaaccgacccagggctcgcgagttggcccacaattcccagtctgcattcgagcactgagctgcgacctgcgggctggc

SEQ ID NO: 125050 - DNA, 122 bp, Homo sapiens
acagagatagttagatctgtataaacaagagtctgagtctgaccttccttggagggaagccggaggcaaaaaacacttagaacagaaagtgaggtggatgctctagttaatagagagttact

SEQ ID NO: 125051 - DNA, 122 bp, Homo sapiens
aggtttctttcaacttgtctccaggtgatgaaaccagtagcctgaccaaggatgaaagagcgtatctcacttattctggcctctccaactcgggctgaaatccttcggttcccaagttagaa

SEQ ID NO: 125052 - DNA, 122 bp, Homo sapiens
actccagcctgggcaacaagagtgaaactctgtctcaaaaaaaaagaaaagaaaaaacagcgtagattgccttgaagagatggtcaacagaaatatgagtgttaaaggcagtctgatgaggc

SEQ ID NO: 125053 - DNA, 122 bp, Homo sapiens
caagactcagagaggggaagtacttgcctgaggtcacacagcaagtcagtgtcaggggcacgttccagatcataccatctgtgaggctacctgggaagttgcgggggcatggggtggcccag

SEQ ID NO: 125054 - DNA, 122 bp, Homo sapiens
cctcttctgtagtctcagactcactgaactcagactcttcttcactgtattcagtatagtcgctggaggattcctcctctgattctacagtgctttctgttgcttcctcttggtccagagtg

SEQ ID NO: 125055 - DNA, 122 bp, Homo sapiens
ggaggctccgccactctcctttggactggtcgcgctgaagctctatcctagggcactggtcgcaagagcagatggtgccacacgctccgggcctacaaacttcagcggctgccgggcccggg

SEQ ID NO: 125056 - DNA, 122 bp, Homo sapiens
tatcccacaataattgagcagagccacgggtccaggatgccaaaaccaggtcagcgtgcacggacctccgggagggctccacgacctggccgtgaaacactcggcggccgcggttcctctgc

SEQ ID NO: 125057 - DNA, 122 bp, Homo sapiens
gtggaaaggaggtcaacaaactagaggccaaggcattccaagactcggcatgggtgtgaacggccgcagatgcagtgcttcaaagagagcgcaggcacctgtccctcagggactacgggtga

SEQ ID NO: 125058 - DNA, 122 bp, Homo sapiens
cacgctaagcagaagtaggagcaggtgcctcgggctgtgtggatgcaggtgttcccgctccgcaccacatgcgtggcctcaaaagaagaaagctctgtgcttagtcatgtcctgtccccaac

SEQ ID NO: 125059 - DNA, 122 bp, Homo sapiens
atcgggtcactcccacccgaatattgcgcttttcagaccggcttaagaaacggcgcaccacgagactatatcccacacacacctggctcagagggtcctacgcccacagaatctcgctgatt

SEQ ID NO: 125060 - DNA, 122 bp, Homo sapiens
ctgctgggcgcgggtggggtttgtgggtttttttccacctcttttctcccaatcggactccggccaaactcccctagacagatgggtgacctgtctcctttgagaggatgctgaggcatctg

SEQ ID NO: 125061 - DNA, 122 bp, Homo sapiens
tccagatcagtgttgctccaaaacctgttaaatcacacaatccctatcatcttgtgcattcgtttgcttctgaattgttagtcaaggaatttttaactgccaacaacatgatgaaaacaatg

SEQ ID NO: 125062 - DNA, 122 bp, Homo sapiens
ccttcaaggcctgcagcttctgctggtcaggcttgtggtagctctccatggtgcggcaggcggggaccgggcgcacacgcggacacacagagatagcggctgctcccgcggcgacaggcggc

SEQ ID NO: 125063 - DNA, 122 bp, Homo sapiens
tgtttgatcttatctaatgctaattacctcccaaaggcctcacctcatcaacatactggacgttgggaatggtaggtgcaaggaaggaataggagagatttgttaaaagacacaaagttaca

SEQ ID NO: 125064 - DNA, 122 bp, Homo sapiens
caggcggccggcgccgggcccggcgctggggtcatccccaggatgcccagaaaggggggtcgggacaccgcctgccaagccccccaacacaatcctagggccaggattggctgcgcccggat

SEQ ID NO: 125065 - DNA, 122 bp, Homo sapiens
aaggcgaggtctgggacgcgagcgggttcgggtttaccgctgcagtttccgagttgaattcgcttatttcaaagcatgttaactttcagaatggaaaaagggtgtgttgcgggggggggggg

SEQ ID NO: 125066 - DNA, 122 bp, Homo sapiens
gctttgggctgcggggccaggagcgcagaaagcgctttgatttacaagctgaggctgagccgccgtcgccgtctgcgagggtgactcaccgggggtgcgggtgggaggtagatccggagagg

SEQ ID NO: 125067 - DNA, 122 bp, Homo sapiens
caagtgcatcattcgctactaattacccctagacttgggttgtctcctgagtggagacgacggcttgtgaaggagttgatccaggcacctctcgcaccctaagcgaagatcatacccctaga

SEQ ID NO: 125068 - DNA, 122 bp, Homo sapiens
agcccgagccgccccgtccgcccgcgcgtcccgccccgcgggctcccggtggctgcttcccgtccgctgtcctctgctgccagtcccctgccccgggcaaagcccatctggtccgccgagca

SEQ ID NO: 125069 - DNA, 122 bp, Homo sapiens
gtgatctcagccacccccatgctggctgggcacagctcgccctgagccttcgttagccgacgccctgcagtgggtcctaggcacaccctgggtggtctgtctgcagaggggagataccatct

SEQ ID NO: 125070 - DNA, 122 bp, Homo sapiens
gtaaacacctccaccagagggagggcaagggaaaggaaagggggccaaacttcagtcacgcggctacgtgttagtttcagtgagagatttggtgaaacaataggttttggggccattgtaac

SEQ ID NO: 125071 - DNA, 122 bp, Homo sapiens
gcaggattacaggtgtgagccaccgcactcagccgagatctgttaacagactccaaatctcgacttagtctcattgctgcaagcggtctactcattctctcctccagatcttcgggaacaga

SEQ ID NO: 125072 - DNA, 122 bp, Homo sapiens
tctgacccacaccccctcacgcagaaccaggtttctagaaggtcaagagaactcagaacacgagggagcccagggtcccccaaacacccagcgtgcatgcacacacgtgcacgccagtgcag

SEQ ID NO: 125073 - DNA, 122 bp, Homo sapiens
tttattttttgcaaaacccattagttgacaaagtgccataaactttgtacaaaatggcctcgttcagcaaatattttattcaaactatgctcctatcagcagtaccacacatgtcataaagt

SEQ ID NO: 125074 - DNA, 122 bp, Homo sapiens
gctaagcaattccatggtgtcctgccgcagacacacagcaatcaaactccaagaagaaagcgatgaggatgggcgggcgtggaagtcaagggttcagcaaaaacatccaacagcaagtgtgg

SEQ ID NO: 125075 - DNA, 122 bp, Homo sapiens
gcaattataactgtaggcccctagagcctgaaccacttttcccaggaattttttgtggtgcgccttaggagcaagcaaagtttcagggcaggagaaggccgacagggcttccagcatttgaa

SEQ ID NO: 125076 - DNA, 122 bp, Homo sapiens
cttttttggcgaaaacccccagtttaaggaggccttccccctggcttcacgttgtggagtcgaaaggaaccttgaagcggagaatgagctcgtgacgtggacccgaggaaaaaacctgccaa

SEQ ID NO: 125077 - DNA, 122 bp, Homo sapiens
ccgagttcccgactttccaattacccaaatgatacattctcttcatggcttaagcaagttcgggttgggtttctgtcatttacaatggaaagagccttgaccagtacagatgttcatgatat

SEQ ID NO: 125078 - DNA, 122 bp, Homo sapiens
gagaaacaattttatggagagatttatattcagtgaggttttgacaacacactttttctgcgtgattgggaagtttctacagacagaaatcaatcaagctgaaacagtttaaaatgcctaaa

SEQ ID NO: 125079 - DNA, 122 bp, Homo sapiens
aggggcgcactcacgctggcgagctggggactgggcattgaagtccggcggtggcgggagcgaggaggcgcctctctcctcagtcacctcggcggcggcggcggcggcggtagcggtggcgg

SEQ ID NO: 125080 - DNA, 122 bp, Homo sapiens
gtggtgagtgttacagctcttaaggcttaaggcggcgcgtctggagttgttcgttcctcccggtgggctcgtggtctcgctggcttcaggagtgaagctgcagacgtttgcggtgagtgtta

SEQ ID NO: 125081 - DNA, 122 bp, Homo sapiens
ctagctcagaatgggtgtttcttggagcctctgggactgttttctttccaggaaccggcgcgtatttctgcagtgagaccacaggacggacatcggcgccttcggcttcgatggagttgcga

SEQ ID NO: 125082 - DNA, 122 bp, Homo sapiens
gagcatgcatgtaaatgtctacgtgtctatctgcaagtatttgtaaagcatatcaatgggcgtttatggccttcctgctcgagaaacctctaggtaatctagttctctatgtcggcaccggc

SEQ ID NO: 125083 - DNA, 122 bp, Homo sapiens
tagctgtctctgtgctgccccaacctgggctgtgccctgctggggagtgggcatctgccccgtggttatgggggcggggggatggaggggaggtggggcctggggttgggagttgggggtgt

SEQ ID NO: 125084 - DNA, 122 bp, Homo sapiens
ccggctaggcgcatcatgaccaccaccttacaggtgggcaggcagagaggcagagcgggacgcaaacggtgcagtagggaatgtaagtgctggtgttgtatccacagaaatccactgctcaa

SEQ ID NO: 125085 - DNA, 122 bp, Homo sapiens
ggaggccccgcccattctcggaggccccgcccattctcggaggccccgcctctccctggccggccctgcccacggccgaaggccccacccacaccccgggaggccccgctcacagtcccgga

SEQ ID NO: 125086 - DNA, 122 bp, Homo sapiens
cagcacctgcgacatgtagctcacggccaggatcacgtggtccacgcctgcctgtcagaacgcaggccgacgggcgggctcagtcagaaggtacgggagcccctgacccctagtcgctggcc

SEQ ID NO: 125087 - DNA, 122 bp, Homo sapiens
gtaatgggtaggaatcaatgtaaacttattcataggccacaccaaaccaggaattcttgtcgtgattgcacttggtagagttaacacacgtgcacattacggaaacgttggtgaccaacagg

SEQ ID NO: 125088 - DNA, 122 bp, Homo sapiens
agcagaacttctagaagggaagatgagcacccaggatccctcagatctgtggagcagatccgatggagaggctgagctgctccaggacttggggtaaggcagcagatctcctttcaaagtac

SEQ ID NO: 125089 - DNA, 122 bp, Homo sapiens
gggggcttagtgactgaggagctctgaggtgcggggcgtgggaggacctgtagccggcttcggctgaagggcctgggagagcagggtgcagaatgttctggcacctgtccagggtactctgt

SEQ ID NO: 125090 - DNA, 122 bp, Homo sapiens
ggggtaggtggtgggagactgtttaaattatcggccttccctgggccactaggtggttgccggcgcagggctaggcaggcggtcatcggcacgtgtgcaactccacgagccgctggcactgc

SEQ ID NO: 125091 - DNA, 122 bp, Homo sapiens
ggaccctgatgtggcaccaaatgaaatgaacaaagctccacagtccacaggccccccacccgccccatcccccggactcccacaggtaattagggaggaattagcaggggtgggggtggggg

SEQ ID NO: 125092 - DNA, 122 bp, Homo sapiens
gttcccgattttggctgcgtggtggaggcaggtggaaccgtcctcctcctgagggagacacgggcaaatgagcctttgggctggcaccccaaacctggtccctgactccgggggccacgccc

SEQ ID NO: 125093 - DNA, 122 bp, Homo sapiens
atttgtgagaaggtccacagcactaatctgcgcctcagtgttgccttgctagtgagaaaacgtgagcatgtactcaggacacatgtacttgatgatgaacttccaggggcacgtttatctgt

SEQ ID NO: 125094 - DNA, 122 bp, Homo sapiens
ggattccagaaggcaggaagcatacctgcaggtaggaaatcacagaaggcaggacacatgcgtgcaggtggcaaattctagaaggcaggacgcatgcgtgcaggtgggaaattccagaggat

SEQ ID NO: 125095 - DNA, 122 bp, Homo sapiens
aggcatcacccaggacagcatcgaggccgcccgggccgtgccagaactgcgcatgctggacgacatccggagccggctgcaggccggggcagacctccatgcccccctggaccacggggcca

SEQ ID NO: 125096 - DNA, 122 bp, Homo sapiens
acaatatgagtgtgggtgctttaaatttacttcttttcactcaagttatctaacatagagcgaggataaaaaagaagaaatatgagtcaaatgcctggtagtacactgatgttggggattag

SEQ ID NO: 125097 - DNA, 122 bp, Homo sapiens
ctgggccaccttctctcaagcagaacacacagaatcgtagccacctttcatagaaaacaacggaaatgaagagcttaaaggagctgaggacagtgcagggtgcatgaaaggaagtggcacag

SEQ ID NO: 125098 - DNA, 122 bp, Homo sapiens
gcagggagcgagggagggatctgcgaggcaacagcgaccccttcgagggtcaggctggcgcgggcagccgcggcccgggctccctcctcctccgctccgccgcctcctcccctgcccgctcg

SEQ ID NO: 125099 - DNA, 122 bp, Homo sapiens
aaagacaaattaaccacttgcctgtctctaccttgtcagttttactaccttagtctccaccggttctcaaaaagccctcctgcccactcagtccttcatccctgcctgctctctgttgaagt

SEQ ID NO: 125100 - DNA, 122 bp, Homo sapiens
ccaagtagttaaacaaactatgataatattaatgtatctgtgcaaaaacatgattatgtacgatgtgaacaaatatagaaagatgcttatgagacaatattaagtgaaaaaaaaaaatgagt

SEQ ID NO: 125101 - DNA, 122 bp, Homo sapiens
cccaccctccactgttctctggaaacatgctgctctcagatcgaatccccagacccgagccgctcgaggggcctgtgtggcttcctcggggccctaccaaactcctctaactgagctcagag

SEQ ID NO: 125102 - DNA, 122 bp, Homo sapiens
aggtgctggctgaaccaaaatgcacccatgttggaggatgcaccctaggatgggcagcagcgggaggtctccctgcccaacaactggtagtggtacctgagaacaaaggaggagaaggaggc

SEQ ID NO: 125103 - DNA, 122 bp, Homo sapiens
cccagccccctcctcatgcttctcctcttttctgtctggaagtcctagttctcctcctcacgctgagacccaggtagggtgattgtccatgtttcttcatttatctgttttttttctgttgc

SEQ ID NO: 125104 - DNA, 122 bp, Homo sapiens
ccaccagcgctgcagagggcggccctaacgtccccgcccccgcgtgcgcgcccccgcgcccgttcattccggcctccgcgcgccgccggctcccctcgcgcccacccccagcacacctcggc

SEQ ID NO: 125105 - DNA, 122 bp, Homo sapiens
agcttcaccatgttgcccaggcttgtctggaactcttgagctcaagtgatcctctcacttcggcgtcctgaagtgctggggttagagatgtgagccaccgcacccaacaggtacttgtgtat

SEQ ID NO: 125106 - DNA, 122 bp, Homo sapiens
ggcataaccgaatttgtcgtaaaactggacgtagtaagtgggcatgaatagtcacaagcccggcagtcagaagctttgagcaacatccttaaaggccaacctgagcccctgagaaggagctg

SEQ ID NO: 125107 - DNA, 122 bp, Homo sapiens
acgtcctgcgggtgcccggtcctcagttggctcgagccggatcccggcgcgccaacggctcgaccttgccccccacgaggcagggcttcctgcccggcaggaaggactcggccggcgcctgc

SEQ ID NO: 125108 - DNA, 122 bp, Homo sapiens
ccagacgaggggaaacccaatccgtgacacatggagatcatttgcagaaggaacaaaatccgtgaccaactccaaacggatgcaaaggggaggggagcggggctgggtaaggagttctcagg

SEQ ID NO: 125109 - DNA, 122 bp, Homo sapiens
cagcatttgaagaacaaggagctcttgaaggcctggaagcccagcacccccggccgctctcgtccttggggctatgcgcccgccagacgctcatgatcacagcacgaggacgacttgctttt

SEQ ID NO: 125110 - DNA, 122 bp, Homo sapiens
taaaataggaagatgaaccgcgccggcagccgccagaatggcccgggcgcttggggccctcgggggcccttgaaatagccactaggatcgggaaatccaactttcccagcggtgcagcgagg

SEQ ID NO: 125111 - DNA, 122 bp, Homo sapiens
ggagcagagagctgaggactgccagatggagtccagcttaggggaccctgcccccaaccccgctcccgtatccctcccatttttaagcacccctacgcctgggacctctgttccacgagaag

SEQ ID NO: 125112 - DNA, 122 bp, Homo sapiens
ccgcgaagatctgcagcttcactcctgagcccagcgagaccacgagcccaccgggaggaacgaacaactccagacatgctgccttaagagctgtaacgcacaccgcgaaggtctgcagcttc

SEQ ID NO: 125113 - DNA, 122 bp, Homo sapiens
agggggaagagcggggtgagggtcggtcatcggctgtgtgttgtacggggggagtctggacgtgcttcccagaggagacgtaggtgccatagaagaactcccaagtatgagggtcgacaggc

SEQ ID NO: 125114 - DNA, 122 bp, Homo sapiens
agccgagcagccgctgggcgctcccgcggcgcaggaggatgggctgcggcgggagccgggcggatgccatcgagccccgctactacgagagctggacccgggagacagaatccacctggctc

SEQ ID NO: 125115 - DNA, 122 bp, Homo sapiens
aggcctctcctctacaatggtggcccagtcaccatccagaccttgccaggtctagtgccccgtggtccccaccctgctgcctgctcagcctggcagccttcctttacagcctcctgccaaca

SEQ ID NO: 125116 - DNA, 122 bp, Homo sapiens
ctccttgcctgtcctaagcctctgtcccattggggcaccccatgggatgagcccatgtgccgaagggcaggcggctcctgactccatcgctttgatgtccccttctgtctccccggtgctcc

SEQ ID NO: 125117 - DNA, 122 bp, Homo sapiens
gctcccggactggaggcgcccgcggcctcgggtgcgtccgctgcgccaggtaagtggctgcgcccctgccccacccctgttcccgccctgcgcaggctcctggcctgcagagacgccaggaa

SEQ ID NO: 125118 - DNA, 122 bp, Homo sapiens
gttctgatcttctcattctggttgagtacctgggcttgccagtgcaccccccaggaacaccgcctagtccagggctcccacaggtctcagactgacaggagactgggtcatatgaccagcac

SEQ ID NO: 125119 - DNA, 122 bp, Homo sapiens
cagctgtgagagcagcagtggtggcggtgggtcccctgtaccccgcgtccccgaggcagccgactgcaccacccccaccctcgcacggccgggcagcacctgctctcgcgcccggcctccac

SEQ ID NO: 125120 - DNA, 122 bp, Homo sapiens
tctgggaagccccaacaagaccccggggaccggtcgtccggggaagcctcgcggcaccggcggctcccttcacgggggccgccagtatctgggccccgagtgcagaccccacccggccggcc

SEQ ID NO: 125121 - DNA, 122 bp, Homo sapiens
ggccactctgggtggttctaagccaggagccgagatggaaatttagacaacttggccagccgtggtggctcacgtctgtaatcccagcactttgggaggctgaggcaggcagatcacctgat

SEQ ID NO: 125122 - DNA, 122 bp, Homo sapiens
tgccagcagactggggatccccaggggccccatcagcccagggctgctcctcaggatggccgcggggccgtgccggccggggcacaccaggccagggtgggcggctgttcctggaccccagc

SEQ ID NO: 125123 - DNA, 122 bp, Homo sapiens
acactgcttcagagcactgctttattggtaccacttctgagaagcagcaaagcagacatacgtctttctctatcatcttctctgtctctcaatccctctcaatgacaatgactcattctctc

SEQ ID NO: 125124 - DNA, 122 bp, Homo sapiens
gggtggggaggtggttagtaccggcttccctcttaaaagtctcccagttaggatgacacacggtcaccctaaagagagaccctacagggtaggggaagaaaagtgaatctaaggcagcaccc

SEQ ID NO: 125125 - DNA, 122 bp, Homo sapiens
ctctgatcagattttctcttcaaaccccagtgggaagaggactaacttggagtactcagccgtataaactgtatgtgtagtgacacccatgggtagatatacttatggatatataatagata

SEQ ID NO: 125126 - DNA, 122 bp, Homo sapiens
ccggaccttttttctccgcccactacgcatgcgcaaagctaggacaaactcccgccaacacgcaggcgccgtaggttcactgcctactcctgcccgccatttcacgtgttctcagaggcagg

SEQ ID NO: 125127 - DNA, 122 bp, Homo sapiens
tctttttaatatctggggctgccagagccacaaatgctaaatgaagagcacggctattttcgggagctgccgggtcaaaagggatgtaaatccaataagcctcctggaggcgctctaaaaac

SEQ ID NO: 125128 - DNA, 122 bp, Homo sapiens
aagataacgataacgatgacaatgctggtaatagtgatgacaaaagttagaaccttctgacgcagcttttgacttatgtgctacatccagtgttggagcttggtttttatgggctgggtaag

SEQ ID NO: 125129 - DNA, 122 bp, Homo sapiens
tgatcaccatagtagtcaacacaatgacccaggagagcaccaagacaccccgctgtcaaccggtttgcaggatgtagcctcagcaaagtgaagagctccaaacacccctgtgctcactggct

SEQ ID NO: 125130 - DNA, 122 bp, Homo sapiens
ttcacaggggcctctgtaaggagacttggagtcgctgcagccaaggctggagccatgagacggccccctggcaatggagaggcggccagcgaaggtccaggtggctggggtctatggggagt

SEQ ID NO: 125131 - DNA, 122 bp, Homo sapiens
gtgctccgacccctgccttgggggtgaggccccttagggagccaccagtgcagtctcccccgtcccagcccccagccaggcttggccacccgcagaaattgggcggaggaagggaggggagc

SEQ ID NO: 125132 - DNA, 122 bp, Homo sapiens
tttttcctggcttgttattttgtacatttcttattcttcctgttttagatggccctgattcgtctcttctagggactcttgaagatggggacccaagtggttatgagattcaataactcctt

SEQ ID NO: 125133 - DNA, 122 bp, Homo sapiens
gccgcgcctgttgcttccacaaggaacccactgcaaaaccatctagggcaggggcagccccgggtctccagagcacacgccagactcccgaaacccaggccaggaccgcgccccacaggaat

SEQ ID NO: 125134 - DNA, 122 bp, Homo sapiens
gctcgccacccccaccccatccccctgctgctgggagccccaggcagtccccggccaaggcgctccaaaaggtcccctctgttgaggactgggaagcagaccccgccccagtgccccccaaa

SEQ ID NO: 125135 - DNA, 122 bp, Homo sapiens
aactcctggctatttctgcattttgcccaaatccatccttgaattatatcacctgaacctcgtgaccacctggagaaggcaatgaggctcaagccagggaggggtggtgtctaatcctacct

SEQ ID NO: 125136 - DNA, 122 bp, Homo sapiens
ggccaaccatgtccaattggcctgtgcaagcagtcgaggaggggactgtgatggcggccccgctctagccagtctgctctccacgttttcatcctgagagcgcagctggtagatctatttcc

SEQ ID NO: 125137 - DNA, 122 bp, Homo sapiens
tgcagtctaattgtggagccagacatggaagtgaggaattcaagtatcttgtgagaagtgcgagaacaacagtatctgtaggatgctgtgggaattcacagtccaaagcagccacctctgcc

SEQ ID NO: 125138 - DNA, 122 bp, Homo sapiens
tactacatccactatatgagcattcagatgtgagcagacacaaacacacagtaacaccagcgtctttgagatggcttatttaagcattggctatcagggaaataaacaaagattataggaca

SEQ ID NO: 125139 - DNA, 122 bp, Homo sapiens
cccacctacaacccataaaggggctgtcagtggagacgctcgggaagctcaaccccggctcgctcgagcccaggggaggagaacggtgttcgctttgaagagtgcacactctgctggggtgt

SEQ ID NO: 125140 - DNA, 122 bp, Homo sapiens
tatcaattcacatcccaatgtatacctctcatctgtccattttagtacacattgttcactcgatacgtatgttgtcaatgtgaatgtctttcacatctttttaaaactcttcctgcaatcaa

SEQ ID NO: 125141 - DNA, 122 bp, Homo sapiens
gtgagaaatctcattcaaagggaataaaacaagagagggacctcacagagaccccctgatcgtgacctaccatgtactgcggagtgtgcttaactcaccctctgcatcagaggcttccaccc

SEQ ID NO: 125142 - DNA, 122 bp, Homo sapiens
gcaggcagcctctccggcgtgggcttcaccgcggggttgcaggggggccaagatgaggcgcgggatttgcaggtgcagtggacgccccccccctcccccgcttgccctggtgcagcctccgg

SEQ ID NO: 125143 - DNA, 122 bp, Homo sapiens
ccctcgtccccctcgccctccgcccctaatgtatctgtacagtttcagggaacttttctccgttgcgtctcggatacaccctaccctcagtgaactacggcgctgcggaagggtccgtactg

SEQ ID NO: 125144 - DNA, 122 bp, Homo sapiens
ctcccggattgtccccatctgtaaatcctggacggcctccggcctgaggctgggctcctgcggggagggcctggctgccctcgcccgttccccaacccgggactcaggctccagcaggggct

SEQ ID NO: 125145 - DNA, 122 bp, Homo sapiens
ccagtcccagctcttccagctgcacttgtttaatggtatgaacgtgacttggcttggtcccggcgccatggctgggagcacaggctgcccagagcgtacactgcaggttggaagcgagaccc

SEQ ID NO: 125146 - DNA, 122 bp, Homo sapiens
aacatagaaaagcagcggagttcattctgctgtccggttgctgcacgggctccagcgcttcgcaactttggtttttttccacagatccagtggggtccggacactgggccccgcaggcgaaa

SEQ ID NO: 125147 - DNA, 122 bp, Homo sapiens
ccttggggtcctgggcggatggagccggctattccggggctcccaggattctgcctactccgcggcacggcgcagagacggggacttggggaaacagcaggccttcccgacgcatgggtgtg

SEQ ID NO: 125148 - DNA, 122 bp, Homo sapiens
ccgcggccgcttccctgcccggcagccccgcgcctagccagcgctgtttcaagccctacccgctcatcaccccctgctacatcaagaccaccacccggcagctcagctcgcccaatcactcc

SEQ ID NO: 125149 - DNA, 122 bp, Homo sapiens
tccatggaaggcaactacagcagcgctgggaagacaaccagcagggcacagaggtgactgcgaggctggaatgaagcaacctgaattacaggcaaatcaatactattaatgattatgtatgg

SEQ ID NO: 125150 - DNA, 122 bp, Homo sapiens
gagagcagggccagaggagcctcttctcaaagcaaaataaatacgggactgacccagctccgcccacagcccgctctcggcatcagccttcatcgtaagagagaaaagctggttccgaggcc

SEQ ID NO: 125151 - DNA, 122 bp, Homo sapiens
cccagggcacaactagggctgcggggtcacttgccccctggctcagaggaactcagacttcgctatccgcggcgtctaggcgtctccggcctcagtccccatccctctcccaacgcggggac

SEQ ID NO: 125152 - DNA, 122 bp, Homo sapiens
gctggtagctgaggcagtgcttcaccgcggatggcacattccccatggcggagcctggggcggcagtcggcgaggggagggagactggaggaggatgaggggcgggcaccgcgctgggaaac

SEQ ID NO: 125153 - DNA, 122 bp, Homo sapiens
gacagagatttccataacgagagtcacgcacttgcaggccatctttgccattatccaagacggtgagccgtgcagcctcatcgtttccaggtttcaatatggctccccgcgtcaccgaaaag

SEQ ID NO: 125154 - DNA, 122 bp, Homo sapiens
ggggttccggggacacaggcgggcctcagttttcccggcggtgtgaccggaggcggagcccggggatccatcatagcttctgtaataacgctaagtgctgcagtttgttgaggtctttccca

SEQ ID NO: 125155 - DNA, 122 bp, Homo sapiens
tttgccacttgtcagcgtgtgtaaaaatggttgtggtggctttatacagttgtgttctatcgcgccttttgcagcaacatggatgcatctggaggccatgatcctaaaagaattaacgcaga

SEQ ID NO: 125156 - DNA, 122 bp, Homo sapiens
tctgggttgcggtttgagcagcttttttctaacctttctttgctacctactgtgtgttcccgagcagtgacccacgtcgtccactgtgtcccctgggtgtgaactaaggtcacccttagggg

SEQ ID NO: 125157 - DNA, 122 bp, Homo sapiens
gagcagctgcagaaattcagagtcattaaataaatgaatagcccagctcttccgtgaagccgctttggctaccggcgggtgaaccacaggcccgggtcagcacccataggctgcgcagctgc

SEQ ID NO: 125158 - DNA, 122 bp, Homo sapiens
cgcagacacagccggggatttaggagctgggtagggactcctgggccggatgcctcatcccggcatgcacctcaagccccggtgaccacgccttccggcgagcgccagggagcgcgtgtgcg

SEQ ID NO: 125159 - DNA, 122 bp, Homo sapiens
ctgagtgaggctgaagtgttcacccaagacaagccagagaggcaggtgcaatccatggtgcgtttttaattagatcccagccactgagctgcccatacttcaaggacacagcaggcaggaaa

SEQ ID NO: 125160 - DNA, 122 bp, Homo sapiens
caggcggccgccttctcgtccccaggggtgggcgcgcgacgcgggcagggaccgggcgcccggaggaccaagcgagcgcatcccgcctactcgtgctgggacatcacccagcctggacgccg

SEQ ID NO: 125161 - DNA, 122 bp, Homo sapiens
gggtcccccatcgggaagactgaggtggccttgtatttctaggtggagcaccatggaaggcgactgtctgagctgcatgaagtatctgatgtttgtattcaatttcttcatatttgtaagta

SEQ ID NO: 125162 - DNA, 122 bp, Homo sapiens
ccacagtgatcaatgcaggcacaacctccacccttgccggcttcccactgccttcctccacgccagcgaggctggggcatcaccctctgtctcatcacctggcctcactcccattgccactg

SEQ ID NO: 125163 - DNA, 122 bp, Homo sapiens
caaagccatgaggatccgggtgagagcccagtgctggacgagcccggggcccaggggtcccggccgaaatccctgctgtctttcaggtcaaacgtcataatccccgaaccccagaaaggccg

SEQ ID NO: 125164 - DNA, 122 bp, Homo sapiens
ggctttagcacaatattccttcttcaaagtcttcttaattacattgagagaaagaacaagcgacaaacagaagagctgccttctaaattcagtgcccctcaatgaagggttcaggttcacag

SEQ ID NO: 125165 - DNA, 122 bp, Homo sapiens
ccaccatacttggtgtacaaagtactagaggcgcctggagtctgtggccggcagcgggtccgcctgtccctccggaggaagcagctctgtcctcagcactccagggacctaaagccaagaac

SEQ ID NO: 125166 - DNA, 122 bp, Homo sapiens
aggcaagaaccaaaaaaaaaaaaagaaaaaaaaattccgaagcgcccgcagcactgagcccgaaccggctcagtcccgccgtctctagaaagttctgcaccccgccccctctgtctgcgctc

SEQ ID NO: 125167 - DNA, 122 bp, Homo sapiens
tcctgatccttgggcaccggggatgtttgcttccgggttctgttgtgggaaacagcactgcgggggagaggaggcgacccaaggaggaattataaaggttttcgttctccttcattatcttt

SEQ ID NO: 125168 - DNA, 122 bp, Homo sapiens
gtgcttgccggcgaacgccaccattttttgcagcatatctcatagcttgttggaaacccacgttgagttggggctttgttcatccacaggtgctgtcacgcatccgttttcaggagacagag

SEQ ID NO: 125169 - DNA, 122 bp, Homo sapiens
aagaggggcgagggtggggacgatggaagacaagccacatgccgaatggggacctgaggccgcgcgcgataggatgggcggacggtgaagagaactagggtggaagggccggacaggggcga

SEQ ID NO: 125170 - DNA, 122 bp, Homo sapiens
gtaacaaataacctttaatatcttagtgggttaccagcacagaggactatttctcagccccgttccagtccaccacccatcagctgctgttcatttgcacatcttcatctcaggaccaaagc

SEQ ID NO: 125171 - DNA, 122 bp, Homo sapiens
cggtcgccgttcgtgaatcttagagatgagagtcgtcagtacatgaccaaaagccgtgttcggctcctagtgatgttagcttggtagtttggacgtggccgacagcctcctagagctcgtac

SEQ ID NO: 125172 - DNA, 122 bp, Homo sapiens
cccattgcccgccccactggccagtccccacgcccacacacccaaggctgccccatctggcgctgattatcctgctgctgccgccaccgctgctgctgctctgcaaaattcagctgctgcct

SEQ ID NO: 125173 - DNA, 122 bp, Homo sapiens
cccagctcactgcagcctcagactcttgggctcaagtgatcctgctgtctcagccttctgcgtagccatgatcacaggtttgagccacagcacttggcctgtgatgtattgcagagggaaaa

SEQ ID NO: 125174 - DNA, 122 bp, Homo sapiens
gagccaaccaggtggcgcctgaagagctgtccatggtgtcgacagcccagcaaacggcaccgagttcctagtctgagtgtctggataggtagcagaagaaaaactaatgcctgctctgggac

SEQ ID NO: 125175 - DNA, 122 bp, Homo sapiens
actcagaacagcacgggcgtttcttgcccctgttgcgtgtctgttggtgggggccctacccggaggcgtggctgagggctgcgccttccccagtgtgccggctgctgggcgaggaaacgagc

SEQ ID NO: 125176 - DNA, 122 bp, Homo sapiens
tgcctttcttcaccactgagctccttcaagggcagggactgtctttatctttgcatcccccgctgcaccctgtgcctgcccactgggcactcggtggatggtgtgcgggcggatgggtgagt

SEQ ID NO: 125177 - DNA, 122 bp, Homo sapiens
ccgtctcggccgggccccggcgctgctggcggcgccgacatccgcgcgacgggcccacgccgcaaaggcgagcacacaccgccatgccgcccagtgacggccactgctgccgcctgtgcgca

SEQ ID NO: 125178 - DNA, 122 bp, Homo sapiens
gctggcggacaaattgcagcgcacagctgagcagggcggctggcccagcaggaggggctccgcggggcaattgcacccggcctcccacccctgggtgtgcaactccagagcttctgttcgga

SEQ ID NO: 125179 - DNA, 122 bp, Homo sapiens
cggcaaggccgacatcctgggttacaacctccggccgggcctggacaaccagacgctgggcgtgtgccagaggcttgtgatgcctgagctccagtacatggcccgcctgtacgccctgcagt

SEQ ID NO: 125180 - DNA, 122 bp, Homo sapiens
gccactgtccttggtgctgcccttccgcgccggcctctggggctggaaggtgggcgtgggcgccttgctgaatagcctattatgaacagtatcacagggtgtacacacatagagaacatctg

SEQ ID NO: 125181 - DNA, 122 bp, Homo sapiens
gctccgccccctaggtgacgtcactggccaggccagccggcgccattttgaaagtggagtcgcctgcccctgccgctgccgccgccgccgtcgctgtcgtagtcgccgccgccgctgccgga

SEQ ID NO: 125182 - DNA, 122 bp, Homo sapiens
cgaaacgcccaccaaactataaattaaggcgaagatctcaggagcaatgtgcctggtgcccggcgtcgctggcctttggtcccctttcagggagcctgaccctgctcccagagacgcttttc

SEQ ID NO: 125183 - DNA, 122 bp, Homo sapiens
cccctgcccgctccctcccgctcgtgcagctccggcatcagtttcggggatcgtgtaatccgatcccttctgactcacaagccctgagtgacagttctgatttggttcaaccgcgggaggga

SEQ ID NO: 125184 - DNA, 122 bp, Homo sapiens
caatcctggccaactccaacgtatgcacgcagcaccgaataggcccccggggggcgagagcgcccctcgtcttcagctggaaacttagcaggcgacgcgcccccctatctccccacgccggc

SEQ ID NO: 125185 - DNA, 122 bp, Homo sapiens
ggggtgtagctgctgtttctgctccgccacaagtccgaggcggttgtctggggcaggcaccgaagttgcgtcgcctccctccctgggagctgtgatacggcacacaaagcgggcacattagc

SEQ ID NO: 125186 - DNA, 122 bp, Homo sapiens
agttccttgacagtcaaggggagtgacaaggccactgcctacctgggtagcactattccccgcctctcatttggcgatgtcatttccctcttgtttccttcgaggactcctattctccaccc

SEQ ID NO: 125187 - DNA, 122 bp, Homo sapiens
tggttgtttgtaatctggttcttcttcatgggaacattgaagtctactctcatgatgactcgcttccctctaacatccagtttgtctaaagtcaacttcttagaaagagacatcttgacaat

SEQ ID NO: 125188 - DNA, 122 bp, Homo sapiens
attacccaggaaagggtctagcacctagtgggttctcaatcaatgcttactgaatgaagacggagatgcaaagtaaatatcatcaaccctcttttacagagcacacaactgaggcttaatga

SEQ ID NO: 125189 - DNA, 122 bp, Homo sapiens
acgcaggctgccgtgtacctccaggcctcatggaggggctactggcagcggaagctctaccggcaccagaaacagagcatcatccgcctgcagagcctgtgtcgggggcacctgcagcgcaa

SEQ ID NO: 125190 - DNA, 122 bp, Homo sapiens
gagtctaagtccaagcaacaagacaacccaggacagtagatttaaaccagactctgacagcgagggtcaccctggcaagactgcaggcccagggttggttttcttggacttcctggctcaag

SEQ ID NO: 125191 - DNA, 122 bp, Homo sapiens
ccccgagggctgcggctgcctccacacctggctttcagggttttccaggtgggtccggagcggcctgtgcttaagggctcaggtccacccgagactctgcctggcgtgcgtatctgggcatc

SEQ ID NO: 125192 - DNA, 122 bp, Homo sapiens
ggcgccgagtcgaacggggagccgagctggagctgccgcggcgcagccaggtaaggagggcgcgcggagcgcccatccagagtctgctctccgcggccgggccagcgggatacggaccctag

SEQ ID NO: 125193 - DNA, 122 bp, Homo sapiens
ttgcccggcgcaccccggccggcctcgcagggtcctccgagcgagtccccagcgccgccccggctcccgctcaccccgcccgtccccgcagtgcctcccctgcggccccgggggcaaaggcc

SEQ ID NO: 125194 - DNA, 122 bp, Homo sapiens
ccgcgcggcggcggctgacgtcagtgctactttcagcgtctttggtgcagtcttggtgttcgctctcaaatgggctcttttcagtatcacatatcatatgcaggatgcagaggggcccggct

SEQ ID NO: 125195 - DNA, 122 bp, Homo sapiens
ctgtagcaccctgttgctccctcttggtgatccagctcttgaaagcctctccaggcctcccgctctttcggaagccgtgcctctccccctctgcttccttcatctccgagtctttgtacccc

SEQ ID NO: 125196 - DNA, 122 bp, Homo sapiens
gcgctggatggcagcagctcactattggcctcggcccaggcaagggcccctagtgtgatgcggctctgggacttccagaccgggcggtgcttgtgcctgttccggagcccaatgcacgttgt

SEQ ID NO: 125197 - DNA, 122 bp, Homo sapiens
cactcctcagtgctcctgatgcctggccctgcgttgcagcgaagcctggccagccccacacgcagcagggaggctgtgcccaccagccaggatcccccccatgccagtctgagacaccagcc

SEQ ID NO: 125198 - DNA, 122 bp, Homo sapiens
ttccctttgaactccccttttctgtgaaagatgactataaatacatctgctttcattccacgactcagatatctctaaattagtcactaggaggaggaaaaaagagggagcggggaaggctg

SEQ ID NO: 125199 - DNA, 122 bp, Homo sapiens
cggccgcgtagcagctgttgagagcatccaggttctccttggactgggagatgctgaagccgctgaaggaacgctccagctcctcgtggtccacggacgggatggagatggacgtgtcgctg

SEQ ID NO: 125200 - DNA, 122 bp, Homo sapiens
cacttgttcagagcaggaagcaaatcctgtccctggctctccctgactgcacagaaggctcggtccctctgattgtagtttattcagtgtgtgattcatctcatcattcagtcagaaaggag

SEQ ID NO: 125201 - DNA, 122 bp, Homo sapiens
ttcacgaagaagggacagatgttccctgacttaacgatccatgccggccacttcccctcgcgatggcacagctggctgggactgctgctccctgccaccgctcagtactgcaggagggcact

SEQ ID NO: 125202 - DNA, 122 bp, Homo sapiens
tactttgttctcgcactgggaaccacagagtgtgtcctactggtggtgatgtcctatgaccgttatgcagctgtgtgtagacctttgcattacactgtcctcatgcaccctcgtttctgcca

SEQ ID NO: 125203 - DNA, 122 bp, Homo sapiens
gccggcgcagctagttttcgctctgagagccctttcccgatattccataccgaaagctggcgtttctcctcagccgccggccggcgcctccacggcctttcccaggagggtagcgcggcggg

SEQ ID NO: 125204 - DNA, 122 bp, Homo sapiens
ttctgcagttgctaccgctggccgggaaggtgtagattccgctttccctctgcgcacgcgcggctcccggcacaaaattctcttgaatcgaacttatttgcatacgggcgcgcgcacgttgc

SEQ ID NO: 125205 - DNA, 122 bp, Homo sapiens
agtttcactcctcgcagggctgtgtcaggctcgggtgtgtggaggacctaaagttcccaacgcagccctcagccggtctcgggcccgggcagatcagggccgcaggtaccccggtctcctgc

SEQ ID NO: 125206 - DNA, 122 bp, Homo sapiens
tgtggacccggtgggcctctgccctcgccaccggctggcttctctgtccagccgctgggtcgaccagatgtcagccccaaggttagggtttggcctccagcttgagatgtttaagacggact

SEQ ID NO: 125207 - DNA, 122 bp, Homo sapiens
tacaagttggttggatccccagggcgaaggcgcctggaaggtgggggctggctcactgggcggtcttccgcggggcaggcgggtggtggggggacaggaaaccgaggcggatccaagagagg

SEQ ID NO: 125208 - DNA, 122 bp, Homo sapiens
aggatctttcttaattccaggactcctgagttgggggcagggcagccgattcttgctgcccgctcccggggaacgggcgccctgcaaaagaggtggaaacggtagggtccgtatcccctggc

SEQ ID NO: 125209 - DNA, 122 bp, Homo sapiens
cagcctagctcacggtcaagggcgggagcctgctgggaagcacggccgcgggggctcgctcggggccacctgcctggaactcagcgcgaggtccagagttccctccggctgcgcagcggcgc

SEQ ID NO: 125210 - DNA, 122 bp, Homo sapiens
agccaccgcgcccgcccggatgaattttcaaatagaaacaatccagtttcccacatcacacggagattgtgtggatgggtaatccatgaaaagcctggtgctggcactcagtcccaataaat

SEQ ID NO: 125211 - DNA, 122 bp, Homo sapiens
ctatcaagggaaaagggaacatctccaaatcaagtgcagaatataaaaaggcaccgagtacgcctgccaaaagcagcaaacagagagaacccctgctgcccagctttctgtccttttcctgt

SEQ ID NO: 125212 - DNA, 122 bp, Homo sapiens
ggcataacaattttgaagccaagtttggtgtttagatgggccagttggtcttacttttcacgtcagatgaaatgaacatataaatccccattgtggaccagaccaaagtatgcagatggctc

SEQ ID NO: 125213 - DNA, 122 bp, Homo sapiens
gttggccatcagaattcagtccatccacttgtcgtcttccaaaggttccgtggtatgaaacgcctagtgcagggaatgcttcccgggaactttccagttctcctgccgcattggctttacac

SEQ ID NO: 125214 - DNA, 122 bp, Homo sapiens
ctatctaatttcaaaatgttttcatcactccaaaaaataaccccatatgggaggccgaggcgggcaggtcactcgagaccagcctggccaacatattgaaaccccgtctccactaaagatac

SEQ ID NO: 125215 - DNA, 122 bp, Homo sapiens
gaaggaagaaactccggacatgctgtctttaagaactgtaacactcaccgtgagggtctgcggcttcattcaagtcagtgggaccaagaacccacgaattccggacacagaagttccctctg

SEQ ID NO: 125216 - DNA, 122 bp, Homo sapiens
tgcgttgcttaacagcagggatacattctgagaaatgcattgttaggcaattccgttgtgcgaacatcctagtgtacttacacaaacctaggtggcatagcccacaacgtacccaggctata

SEQ ID NO: 125217 - DNA, 122 bp, Homo sapiens
cgaaagcggagtgaaagagggaggcagggagccggagagccggaaccggagtcgcagcggcggtaatagtgcgagactcctctaagtcaccgtccttagcgcgggaccgcggggttcgacgg

SEQ ID NO: 125218 - DNA, 122 bp, Homo sapiens
aagatgtatctttagctaagtggccatgtgtgcagctaaagattctaatttggccaagtgcggtggctcatgcctgtaattccagcactctgggaagccgaggtgggaggatcacttgagcc

SEQ ID NO: 125219 - DNA, 122 bp, Homo sapiens
gaatccttccacacatccttctcatcttgggggcctgtgagggtgatgtcgggcccacctcggagctctgctgtctcctcggggttgcagggcctggagaagggcttcccatttagatggac

SEQ ID NO: 125220 - DNA, 122 bp, Homo sapiens
gtgcaggccctgggtgcggggccgcgctgcaggagtgaatggactgaggggccagggctgcggggtggccgcaggaagggtgggcggggccggggttgaggtttttccgtgcacgaggctgc

SEQ ID NO: 125221 - DNA, 122 bp, Homo sapiens
cggcctagccggtggttcaggtggccggtcgggctggaagggcggggatgagggatgggacgcatccccgggggatgctcctccaaagcttttatcgggcgagcgcagtggctcacgcctgt

SEQ ID NO: 125222 - DNA, 122 bp, Homo sapiens
tactattagctagagtccatacagctgaggtcccctttctgtcccaggatcccaccgggtcgccgtctgctcacgctccttggcggcagcatttctcagactctccttgtctctggtgatcg

SEQ ID NO: 125223 - DNA, 122 bp, Homo sapiens
ccacctgaggactttcctgtgccaaggtttccagtcggcccacaggctggaccaattttgcggagggcctcagacataattttttctttgtaagctgcccagggcatgagagtgtgcagctg

SEQ ID NO: 125224 - DNA, 122 bp, Homo sapiens
acacggtcgcctcaagagagacggctcctgtaatggcgcctgcgtcagacactaacatggcggacatagtcgtgcgcggcgcaaacgtcagcacctctaccccagccgctcagaaacagcag

SEQ ID NO: 125225 - DNA, 122 bp, Homo sapiens
gtgtggctggaggctggagcggatcagcgtgacggccggttacagcgagagtgattgagacgaggctccgaacccccgggacttaccctcccgccgcccgctggactcggggtccgcagctc

SEQ ID NO: 125226 - DNA, 122 bp, Homo sapiens
ccatgggtctctgtgcccctttgtctcctgtggtcttggtcgtcccgtgccctccaggctcgcgttggacgacgccattcgacacaagccgctgaacatgtcatcccgtttttcacccaggg

SEQ ID NO: 125227 - DNA, 122 bp, Homo sapiens
ggagagtgggatagatattgtatttcaaggagagtaacacagtatatcatttctacttatcgtagagcttctgtgtgtctacaaagtgtgattatgggtgtccaatcatttatggtatttgt

SEQ ID NO: 125228 - DNA, 122 bp, Homo sapiens
tgagccccgcggggcagcgtgcggccgtggcttctcaccgtgctgcggggctgcgggtcccgggtgggcccattgcccggtcacactcggatcttggaataaaatgtgggcgtccatgtgag

SEQ ID NO: 125229 - DNA, 122 bp, Homo sapiens
ggctgcttcttcaagcagtctccctcacgcataaggtgggatggaaggagttgaaaatatcgcaggttgctatttggttcatgtttattctagccagctaaagaaaggagagcctgaggtgt

SEQ ID NO: 125230 - DNA, 122 bp, Homo sapiens
tgtcagagccccagctggtgtccagggactgaccgtgagcctgggtgaaagtgagttccccgttggaggcaacagacgaggagaggatggaaggcctggcccccaagaatgagccctgaggt

SEQ ID NO: 125231 - DNA, 122 bp, Homo sapiens
gttaccgtggggcaagggaactcggaccccagggtagcttggccccctaccagggaaaggcgagcagggcgggtccgggggcggagacgcggcgggcggggctccggcagaccccgcccccg

SEQ ID NO: 125232 - DNA, 122 bp, Homo sapiens
acagtgcatggcagttatcagctgagcacagacccccaaccctgccccacgaccgccggccgcccagcccagcccggcacacgcatgcatgcaggccggccagcatgaccgtgctcggcccc

SEQ ID NO: 125233 - DNA, 122 bp, Homo sapiens
ctgtgtgttcctggacttcctaactctagttctggagaccagaagggaaatcaagaggcccgccgagccgtactccctctggaggctctgggcccttccatctgtactccctctgggggctc

SEQ ID NO: 125234 - DNA, 122 bp, Homo sapiens
gggcatatatatatatatagaatcatctaatatttgtctggcttctctcacttagcctaacggtttcaaggtgtatccaggttgtagcatgaatcagcccttcattccatattgtggctgat

SEQ ID NO: 125235 - DNA, 122 bp, Homo sapiens
tgtggcagtttccatgacaaacacaaagggctaagccaagccagcaagcagacagccgtgcggcctgcagagggcactagtctgcttcttaatctccctgcagaatcctcagggccaggtac

SEQ ID NO: 125236 - DNA, 122 bp, Homo sapiens
tagagggggcaatgagggcaaagaaccgtcccggactgtacccccctccttccctgaccccggcttcccaccggccctcttgaggggacagaggggccagactgagcctgtcctggatctgg

SEQ ID NO: 125237 - DNA, 122 bp, Homo sapiens
tagtatgtccaggagcagggtcttgctctgtcatctagacttgaatgcagcgagtggcatcgtcatagctcactgcaggctcaatctctcagcctcaagcaatccttgcccctcagcctcct

SEQ ID NO: 125238 - DNA, 122 bp, Homo sapiens
aggctgagaaggagcagagcagggggcagccacatggctctgccttcccggctcctcgtccgcctgatctgcaaccagtggcaaatgcagatcccagatgcactctggaagttctgcctgag

SEQ ID NO: 125239 - DNA, 122 bp, Homo sapiens
ctacttgggagactgggacaggagaatcgcttgaacctgggaagtggaggtgcagtgggccgagatcacaccatagctctccagcctgggcaggaagagtgaaactccatctcaaaaaaaaa

SEQ ID NO: 125240 - DNA, 122 bp, Homo sapiens
gggtgtcggggtctgagggggcggctcgggcctcgggcagctggggcggggtgcggtgcgcgcggggctagcgcgggtcacaaggccgccccgggagagaggacggctggttgtctccctgc

SEQ ID NO: 125241 - DNA, 122 bp, Homo sapiens
ctctccaactaggtcggaatcagtctgaattagccatgtgggggatagcaaaccacctcacgcctgtcacttcgcgccaactgtttcctctgtccggaatatcttccgttgtatgactgaca

SEQ ID NO: 125242 - DNA, 122 bp, Homo sapiens
cggtgcccagccgtggcccaatctgctgctgcagcagctgcttggccttgacccaggtggcgataagctgctgccgggtgccggtgggcaccgtctcctcgggcgcactcccattggtcagg

SEQ ID NO: 125243 - DNA, 122 bp, Homo sapiens
caccagcagcagcgaggagatgcgtcccatcaagacggagcctggcctgtcatctcactacgggcacagcagctccgtgtcccaggtacgcgccatggctggggcgccagggctgtttgtgg

SEQ ID NO: 125244 - DNA, 122 bp, Homo sapiens
ggttgcctcggcgatgggatggggctcggccctgggccaggctgagctgcctgcggagggcgcggttctcctcctccacctcgcgcatgcgcacctccaggctctcgcgctcccgctggctg

SEQ ID NO: 125245 - DNA, 122 bp, Homo sapiens
catctggttcttcctgacccagaaactccacaccttgtgggtgtcttgtggcagggtgcccggcccctctccaggacactctgctgaggttccacactcatcaaacagcttccagtaattca

SEQ ID NO: 125246 - DNA, 122 bp, Homo sapiens
cactccgcgcgctgcaggcgagagtggcagacggaggcagcccggggaagcgagccggagcggcgcccgcactgaggcggctgcagtgctgacaccactcagggcaagggtgtccgacggct

SEQ ID NO: 125247 - DNA, 122 bp, Homo sapiens
caccaacctgtacggccgccatgactggaggtgagacagtgcccttagtgtgttgggtcccggagcaaggtgtccccttcattgccttccctattctgtccaggctgaaaggttccctgagt

SEQ ID NO: 125248 - DNA, 122 bp, Homo sapiens
gctcgtcctcgggcagccgcgggaagctggtgatgctcatgtagtccactggcgagtaggcgcccagggcgctctcctggctggcctcgttctccgccgccatcctcgcccgcgccccccag

SEQ ID NO: 125249 - DNA, 122 bp, Homo sapiens
ctaccacgcttggagctgcagacagggctagctgcgggccaggctggaattcagctacagcgggagactggggagaccggggcagccacactccacagccggaattcattggaagcttagaa

SEQ ID NO: 125250 - DNA, 122 bp, Homo sapiens
tctccgctcccggccggggcgtcaggaatgggccccaatcgccgtgggccccgcaccctgcgtcgcccgtaggccccagtagccggaggccgaccggcctcccactacccctcgccctagcc

SEQ ID NO: 125251 - DNA, 122 bp, Homo sapiens
tttgagaccagcctaatcaacacggagaaaccccgtctctactacaaatacaaaatgagccgggcgtggtggcgcatgcctgtaatcccagctactcaggaggctgaggcaggagaatcact

SEQ ID NO: 125252 - DNA, 122 bp, Homo sapiens
ctatgaaggatggaagtgaaaccgagttttcttgagtaagttcctttgttacatcaaatccgttgaggaagggcttgcaccaaattcatcaatggactgcagtgctgtgctctgctaggtga

SEQ ID NO: 125253 - DNA, 122 bp, Homo sapiens
cgcacccgccgtgcgggacccctgcgtctcacccgccgcacccgccgtgcgggacccctgcgtctcacccaccgcacccgccgtgcgggatccctgcgtctcacccaccgcacccgccgtac

SEQ ID NO: 125254 - DNA, 122 bp, Homo sapiens
accctagcaacggagagacgccacgctctgcacagtctattttcggagcctagccagagacgggaaaactgaccaaggtgaggaaactcgaacctcaagacggggaaagacagggtcctcag

SEQ ID NO: 125255 - DNA, 122 bp, Homo sapiens
gtgatgagcctgcgggctgggccacgaacactgccgcttagccggagagaccggtgacggcgagagcagctcctctcgctcacctccgtccgccattgctggggactgactgactgactgag

SEQ ID NO: 125256 - DNA, 122 bp, Homo sapiens
tggcctggcccgcagcaggcagaagcatggggcatctcatcctgtgagcgtcgtcggtttcggtgttggggcgggtgtttgggtggactcgcagctgggcatgttaccaccccccaccgctg

SEQ ID NO: 125257 - DNA, 122 bp, Homo sapiens
tggagtacaacgttcatccaccttctcaggagaatttgcctttcctgctgcaaacagcttcgtccagctgccagtagaatatttggatgacattgccttagagtcaacacacaagaattcta

SEQ ID NO: 125258 - DNA, 122 bp, Homo sapiens
ggagacaagggaacacactagtgaaaataaaatctctaggcttacggagaaaaaatatgacgaggaagaaggaactgaagactagattttaattattgctttttaaacaatatatctttcat

SEQ ID NO: 125259 - DNA, 122 bp, Homo sapiens
ggctggggcggggcagttagcaaaataggctgcgcgttcgcttctgctagagggcggggccggaggtttcgattagttgtctctgccgctggggaaggtaaagcggcgacggcgtcctcagg

SEQ ID NO: 125260 - DNA, 122 bp, Homo sapiens
gggtttccttgttgggatatttgcaagtgggcttggcctgggctagaaatgatccgctgtcggaagggacttttcaggggttctccccatggccccggctctgcctgcctgtcactgtggct

SEQ ID NO: 125261 - DNA, 122 bp, Homo sapiens
gtccgctcccggttcctggctccagctaggctcggcagaaataggagcgcgcaggcgcgacgtgcggctcgcagaacggcgagtagcggagcgggacccgctgtgagtgtggcggccgcgct

SEQ ID NO: 125262 - DNA, 122 bp, Homo sapiens
cctcttcagcgtctctcactgccctttactttccattctttctctcactgcttgaagtcacgctctcatcacatcttttctagagtctcataatagcccccaactggagtcttgatccacgc

SEQ ID NO: 125263 - DNA, 122 bp, Homo sapiens
cctggaacaagatttaaaatcagtatcacttaagcacagcttccacgcgactgcatctcacgcgccttaccgacagtcaccgccgatgctgtggttcagtgggcaagcagaaacacacacag

SEQ ID NO: 125264 - DNA, 122 bp, Homo sapiens
ggcaatgccagcatgcaggtggcggggctggcaggggagccggcaggagggccggacacccggagccggggaactgtaatgttcagggaatttcaattggcattgctgtcccgttccagcca

SEQ ID NO: 125265 - DNA, 122 bp, Homo sapiens
cagcaggacccctcccgctcagctgctacagtgggcacgaagaggggcatggctttcggccgcgctccccagcctcgcggggggcagacgacggcgggcggggcgcgcagagtacactcgac

SEQ ID NO: 125266 - DNA, 122 bp, Homo sapiens
cacaagtgaattcctgtggtagtctaagccctgtaaactttatcttataattcactttatcgtcccactaaataggatataataggttaagccaagttcctctttttctgtaagacacctaa

SEQ ID NO: 125267 - DNA, 122 bp, Homo sapiens
gttcttctttctgatgctcaaattgccccatctttagccaataggaacctcctggccgggcgcggtggctcatgcctgtaaccccagcactttgggaggctgaggtgggtggatcacgaggt

SEQ ID NO: 125268 - DNA, 122 bp, Homo sapiens
gagcctggagacgttccgcccgcgctgagtccacctccgagcctggagacgttccccccgcgctgagtccacctttgagagtgaagacgttcctcctgctctgagtccacctctgagtggaa

SEQ ID NO: 125269 - DNA, 122 bp, Homo sapiens
gtctctctgaggggcggcaggctgtctctcgtcccctatggcaggaggctgtttgggagtcgcatgtgcggcatctctggcaggtgcacgggagccgagactccagcagaccagggtggggg

SEQ ID NO: 125270 - DNA, 122 bp, Homo sapiens
ctgctgctcggccgaggccgctgccttccggcccgcgcgcctgctggtgagtccgcgccccgcccctgccccgcccacgtgagacccgcgtcctccaggcagggtcctggggagacgggagt

SEQ ID NO: 125271 - DNA, 122 bp, Homo sapiens
gggtttccgcggccctgtcagaacaggcttgatagatgcccggaggttccctctgacagccgcagcagcagggctcaaaccggcggggccgtgtaccgctccaaggacaagctctgccgagg

SEQ ID NO: 125272 - DNA, 122 bp, Homo sapiens
ccccggtccagagcaggataggatgggggctccccaagggaggactgcaggaagacagaacgggatttcttcacctgcccttcatcgcctaagagggcctagactctaaccggctgtctctt

SEQ ID NO: 125273 - DNA, 122 bp, Homo sapiens
aggtcctcccactgagggtgcttgtagttcgcggagtgtcctcatcaaagactgggaatgcggcagatgctgaattttccaaacggcctgagacacatgacatctgtgagagactggatact

SEQ ID NO: 125274 - DNA, 122 bp, Homo sapiens
ttttgcagacacacatgcaccaagaaagcatctatgcgtctttgctcacctggaccacaccgggggaaaaaacagcaaggatgagataaagccagacataggcgaagatgctccaagaggca

SEQ ID NO: 125275 - DNA, 122 bp, Homo sapiens
cttatccttcaccatcaactttgggggtaggggtcagagggaacaagggtggaaaggccgcgctgaatggggccgaagctccgcccctcagcgataagtccagattcctgcggccgacgtgg

SEQ ID NO: 125276 - DNA, 122 bp, Homo sapiens
gccctgggcggggggggagtcgctgggggccgcgccctccttcgcctggcgccccgcccgcgctcgcccactcactcttgggacctgccgcaaggagcccgcaccggcctggccgaccccac

SEQ ID NO: 125277 - DNA, 122 bp, Homo sapiens
atctggttcacagcaaccagccagggtcttgtgaacaacccttcagccgtcagaagttctcgccaaagggtgcttggagagggctggcctttgagtggagtttatgttgcaattgttctttc

SEQ ID NO: 125278 - DNA, 122 bp, Homo sapiens
gcggacgctcacacacggaggacctgcggccgcgggctcggggtcagagcgggcagcagacgcccatactcagaggacctgcagccacaggcttggggccggggcaggcagcagacgcccac

SEQ ID NO: 125279 - DNA, 122 bp, Homo sapiens
tattgggaccaggagacacggaacgccaagggccacgcgcagatttaccgagtgaacctgcggaccctgctccgctattacaaccagagcgaggccggtgagtgaccctggcccggggcgca

SEQ ID NO: 125280 - DNA, 122 bp, Homo sapiens
tgggcaaattatttaatcctctaaggtccactgacttttttttttttttttttttttctgcgatagagccttgctctgtcacccacgctggagtgcgatggagtgatctctgctcaccacaa

SEQ ID NO: 125281 - DNA, 122 bp, Homo sapiens
ggagtattgtcaccaccctgtctccgaatgcagtgttgagggacagaagcagagcgcgctcgctctacaggatgaagaaaaggctggaggggctgcttctcctcggagaaactttgctagtg

SEQ ID NO: 125282 - DNA, 122 bp, Homo sapiens
cccaggtgggaggggtgactttcacgtgaagcccctgctgggggccttgctggggtaaatcggctggccgattacagcccctttcagggaactgtgcacgaaggcggtggcatctgtcatca

SEQ ID NO: 125283 - DNA, 122 bp, Homo sapiens
taacatcttgggtttctaaattacctgaattgataggaggctctatttgctatcaccttgcgtaccaccaggcaaataacacacagcactaaaaataacacccttcaaagtcattgaataag

SEQ ID NO: 125284 - DNA, 122 bp, Homo sapiens
tataaattagtgtagcctaagtgttcaatgtgaaaaatatttctgcataagttagtgtagcgtaagtgtacaatgttgacaatagaccaggtcttcatattccactcatcgacagtgagtga

SEQ ID NO: 125285 - DNA, 122 bp, Homo sapiens
gcgccctggggcggtgttggtacgaagggacacgtgagtgtaatggtctttcagaaaccacggctggcctggctttggtttcactgctgagctcccacccacagcagcccatccttgccccc

SEQ ID NO: 125286 - DNA, 122 bp, Homo sapiens
cgcgccggccgacgagccgcggatggtcccggagaggaagcccctgcccctgggcgagcgcgcttctctggcttgtcccagccgcgcggcccgcagcccagagcagctgtgcgcccccgccg

SEQ ID NO: 125287 - DNA, 122 bp, Homo sapiens
gctggacacggaatacatggtgctggagctcagtgagcccctgaaacctggtagcagctacgagctgcagcttagcttctcgggcctggtgaaggaagacctcagggagggactcttcctca

SEQ ID NO: 125288 - DNA, 122 bp, Homo sapiens
ttaatctcatgaaactgggaatcccagaccatgagaaagtcaggaaatggctttgaacaccggcaggcgctgcacagcgctgggggagggggacgagcctgggaactgtctctgctgaggat

SEQ ID NO: 125289 - DNA, 122 bp, Homo sapiens
agaccgaaagcagcaataaacttggacgaaaaaggtacctcgactcacctgggcctcgggcgtcgggggcatggacgccatttggcgggtggggaatgccttcttcaagacgccacagggac

SEQ ID NO: 125290 - DNA, 122 bp, Homo sapiens
gggccaagctgcttgctgactggtctagcagtggaattagcctgggaagaaggggggttccgggagcaaagggatctgaaactgctgagggagagcccagctatggcaacacaagagcctgg

SEQ ID NO: 125291 - DNA, 122 bp, Homo sapiens
ccgggggccgtccgggcgccacatacccgtctctgcccgcctcctttgcgggcctcggcgcgcccttcgaggacgcgggatcttacagtgtgaacctgagcctagcgcccgcaggcgtgatc

SEQ ID NO: 125292 - DNA, 122 bp, Homo sapiens
acgccaaacaactgcggtgagaccctggggtggacgctacggaggacgcgcctggggcgacggggagcggtgggagggctgcgggctcagccctcctacctctgtctccccttaggagcctg

SEQ ID NO: 125293 - DNA, 122 bp, Homo sapiens
agcataatcacaaaacgagcattcagagttcaagcgttaaacacaggatcacaaaggcctcgcaccccacaccccacacacacggcgcagccttggccctgaatgtggtgctccctctgtcg

SEQ ID NO: 125294 - DNA, 122 bp, Homo sapiens
ataggctaacctctgtaataaccaaatctcagtggcagtgtccaaccaggtgcttgtgggcgaccttccaacaggcaccgcattgcccggctgccaggccgggcctgtgtactgtccccgca

SEQ ID NO: 125295 - DNA, 122 bp, Homo sapiens
cggacgccgccggcaccatgggctgctgcaccggacgctgctcgctcatctgcctctgcgcgctgcagttggtgagtgccccgagggcccctgccccaggacaggtccctgctccaggaccg

SEQ ID NO: 125296 - DNA, 122 bp, Homo sapiens
agcccaccaacccttccgttcgtctcccaccatagtgggagcgggtgggacctagagaaccgagaggtcgtggcaggacttggatttggcgcgaaaggccatcttgcggctgttacgagcta

SEQ ID NO: 125297 - DNA, 122 bp, Homo sapiens
ggctctggtatgacatatttgagccatataaattcagcttctcctctggcatctgttagccgactcacttgcaactccacctcagcagtggtctctcagtcctctcaaagcaaggaaagagt

SEQ ID NO: 125298 - DNA, 122 bp, Homo sapiens
ttgaggctagagaatagattcccccgacatttcctcaagtgcccgatgtatcctgtcaagcgacccaaggacgacacattgagttaaaaacccccgttggttataactggagattttagatt

SEQ ID NO: 125299 - DNA, 122 bp, Homo sapiens
gttttattgttatgactgtttcttatgccaggctttggaaaacactggattgggtgctcccgaaggaccctcccaactctgacgttccacattcccacgtacaaagacaccaggtttctaca

SEQ ID NO: 125300 - DNA, 122 bp, Homo sapiens
gaggtcgcgcgcagcgcgtgcacagcgcgggcggaggcggctccaggtccggaggggttgcgggggagctggaaataaacctggagatgatgatgatgatgatgatgatgatgatggagcgg

SEQ ID NO: 125301 - DNA, 122 bp, Homo sapiens
ggtcgccgtctggcggttgccatctgggtggtcgccgtctggaggtcgccgtctggaggtcgccgtctggcggttgccatctggaggtcgccgtctgggtggtcgctgtctggaggtcgctg

SEQ ID NO: 125302 - DNA, 122 bp, Homo sapiens
atttccaagcttatcccagctggtgttctgggtcagcagccctctctgtagaaaaaagttcgttgggtggtttatcatatgagtactacaaagctagtggcaaaactagtacgcttcactag

SEQ ID NO: 125303 - DNA, 122 bp, Homo sapiens
ttgaaaccagcctgggcaacatggcgaatccccgtctccacaaaaaaataataaatcaggcggcacatgcctacagtcccagctacttaggaggctgaagtgggaggatcacttgaacctgg

SEQ ID NO: 125304 - DNA, 122 bp, Homo sapiens
ccccttatggctcctcctgcccctagggctgttgctgttctcgggttctcgattggtcagcggcagcagcacggggcggctgcgcctgtgggccgtgggggctgtgtcggagctgaggtgca

SEQ ID NO: 125305 - DNA, 122 bp, Homo sapiens
ttgctgggggaaccttctatggagaccttccttaaaagcactcatagccctgacacccgccgccttccttctctaagttctcctctcctcccctccccggggccccgcccaccacctgctct

SEQ ID NO: 125306 - DNA, 122 bp, Homo sapiens
accctgaggctcggaaggcgggcggacggctcacacagacccacaaggaccaaagaggaacgtgcaggactccaacacaaacggaggacgatggcagaacagaagagctgattaagtttctg

SEQ ID NO: 125307 - DNA, 122 bp, Homo sapiens
cgcctgggcccccgggaggtgttgtgggggggaaggggggttcagtcccccagggggacccggcccgcccgaggggcagcttaggggtcattctgaatccccacagcccacttaggagcgct

SEQ ID NO: 125308 - DNA, 122 bp, Homo sapiens
cccacctctccgtccacactctcagtggccatgcacttgtgccccgccctctcgctgatgcggtcaatcttgggtgcctccatgcggcagctgcacaggggcaactcctcaaaccctcgctc

SEQ ID NO: 125309 - DNA, 122 bp, Homo sapiens
ggcgtgtgctcgtgaggggtcgaggaaaggcgtatgtggaggcgcgcggggtgggtgagccgaggagacttgctacacagaaacctggaggagtaggggcacacaaaagagcaagggaccct

SEQ ID NO: 125310 - DNA, 122 bp, Homo sapiens
cccagccctccttttcagcccaggagtccagccaggtctgcgtttctcccatgcatttgacgaattccaacctgatggtccactcgaatgtgacctttaaactttatacaggttgtcgtcgc

SEQ ID NO: 125311 - DNA, 122 bp, Homo sapiens
tcttgcccctgttgcgtgtctgttggtgggggccctacccggaggcgtggctgagggctgcgccttccccagtgtgccggctgctgggcgaggaaacgagcacggtggagccacacggggca

SEQ ID NO: 125312 - DNA, 122 bp, Homo sapiens
gctgccaccctccagtgcgagaatctcccctagtatctctccgccccttttccagcccggcgcgcactctcgagggtgcctggcgcgcccttacctgagctgtcgcttttcctcttgccgcc

SEQ ID NO: 125313 - DNA, 122 bp, Homo sapiens
cgataatcacactcaacaggggccggcagaactgtgctgaccgttctgggtgactcgtcacgagatgcacccagcccagcctcttgcaggcggtagaaagtcaataaatattcacgagaggg

SEQ ID NO: 125314 - DNA, 122 bp, Homo sapiens
acactccccgctggctcttcctgattttcacacatacacagacctgcaggcggagacgcacggaaacgcccccacgcggaggcacacccgggcaaaatcacccagatgggagctggggacgg

SEQ ID NO: 125315 - DNA, 122 bp, Homo sapiens
agtgatccacctgcctcagcctcccaaagcactgggatgacaggcgtgagccaccatacccggccccagcagtacaatctggtaagtcgaaaaagaactggcacctcatgaaaacagagaaa

SEQ ID NO: 125316 - DNA, 122 bp, Homo sapiens
ggccagctcgaatcggacactcgcccccaaaccaaagcgcgagccccccatcctctctctcgagtccagagatgcagctcctctcagttccagggatgctggctccttccagagtgttcagt

SEQ ID NO: 125317 - DNA, 122 bp, Homo sapiens
gcgtttccggcccgtggggctccaatcaaaatgggacgcctgctggcggtaacgacaggccggggccccgccccccgaagtagggcgtgtggcgtcacttccggcttccttcagtccgctgg

SEQ ID NO: 125318 - DNA, 122 bp, Homo sapiens
ggttatttgtagacgttcttattgctggcagacaatggaatgaggtgtgaaaggttgccccgcctacgtacaataatgtgtaaggttggcagtgaagctgagctgattcagggaaacacaac

SEQ ID NO: 125319 - DNA, 122 bp, Homo sapiens
tgatgtgtatgcgagtgtcacatggattgcgtgatgtgtacacgagtgtcatatgaatcacgtgacgtgtacgtgagtgcttccacctccggctcacatgttattttcccctgcaaagctgc

SEQ ID NO: 125320 - DNA, 122 bp, Homo sapiens
aaatgccctccaaagaggctgtcaatttatactcccagcagcagcaagcatattagagtacgtttatttttgccaatctgaatctgagttgtttttttttttttttttttttttttttttga

SEQ ID NO: 125321 - DNA, 122 bp, Homo sapiens
ccgggcgcgcgctgcgcagccccgcggggccggggagacaccgctcgggagtcctccgctcggctgcagaatctttatcagctgcactttaccgcagccctggctaggacgctaggcggtgg

SEQ ID NO: 125322 - DNA, 122 bp, Homo sapiens
tgagatcgtgccactacactccagtcaccactgggtgacagctgagccagagcgaaactccgtctcaaaaaaaaaaaaaaaatttttttttctttcccttagttattccctagtgatccctt

SEQ ID NO: 125323 - DNA, 122 bp, Homo sapiens
gcgcgctctgcccgcgccgcggtgtgcctccgcttacccgcagctccgaccactggctcgcgctacccaggtctccgcacgccgcggtggcttcagcccagacctgggcagccagcggagaa

SEQ ID NO: 125324 - DNA, 122 bp, Homo sapiens
catgtgaggcattgacaataagtatctttgcaggatggattcaagacacacaggacacagcgacagacaagataccttgactcaaacccttatctcctgctgcttcccaggaggaagcaaga

SEQ ID NO: 125325 - DNA, 122 bp, Homo sapiens
gaaacaaatggccatgaagcactcatgacaaaaaccaaaaagttgatgagtagtacagagcgacatgatcaaaggcatgctggaaacaaacctattaaaaatgagcttggatcaagctttca

SEQ ID NO: 125326 - DNA, 122 bp, Homo sapiens
acttgtcagaattccttggtccaatatcccaagaacttttgtgccaacttcactctgattcgccgcccctgcccctccctgggcccctgacccggcgctgactctaggctgagcgcagtggc

SEQ ID NO: 125327 - DNA, 122 bp, Homo sapiens
ttatgaagatgggaaatgagtaatggatttagcaatcactactgacacgggtgcaggcaccgtcttctctctatgacaatactccggaagatggtgagaaatgaagtttgggaaaccttagc

SEQ ID NO: 125328 - DNA, 122 bp, Homo sapiens
cggggtgcgcggcgggccccgggctccgctgagtttcttagagaaggagctggggccccccgacctcagctccgcagaggcacagaagctggcaagaggcagagccccctccccctgcggcc

SEQ ID NO: 125329 - DNA, 122 bp, Homo sapiens
gttctccaaggagtcttctaaaatacatctgctttgccagagaacacactttcttctgcccgttcagtgctctcgggtcttttgccgcttcctttcaacaacagtccgatgactttgtcttc

SEQ ID NO: 125330 - DNA, 122 bp, Homo sapiens
tgagccaccgcgcccggccaagaaacatttttctaagaatatttagcacttctatctgggcgtggtgatgtgaacctgtaatcccagctactccggaggctgaggtaggagaatcgcttgaa

SEQ ID NO: 125331 - DNA, 122 bp, Homo sapiens
ggcacctgccggtctttccacctctgcatgcatttcacactttctatcctgttaggcgtccgcacttctatgccaatgaggactccccttcccacccctgtttttttatgtcatgtggattt

SEQ ID NO: 125332 - DNA, 122 bp, Homo sapiens
catggggaacagccactgtgctgggaaggaagcccagaggccgcggagcacaaacggtggcgctcacagaaagaggcatgtgctcagaagcggggttccttgtggaggaccggggaccttgg

SEQ ID NO: 125333 - DNA, 122 bp, Homo sapiens
ccacttcttactcctgggatttggtaaacggaagagacctctcctgttccgggagtaggccgggaccgtggatgagtgacagttcgactttccaataggcagagccctaggacctgcccacg

SEQ ID NO: 125334 - DNA, 122 bp, Homo sapiens
tcaagcagtcctgacgttcccccactcctcgccgtgttcatcgaagacgtgggcaggtggcgtatgcagcacccagtgttgttaaggtctagtaaggtcgagccctgtcttcctcacctggg

SEQ ID NO: 125335 - DNA, 122 bp, Homo sapiens
acaaaatggcattctgtaaacttcgcgagagcggaggggactgaggagctaaatggtagacgtgaaggcagccacaatgacctcacccagctctgggggtctcacgtgatcgacaaagttaa

SEQ ID NO: 125336 - DNA, 122 bp, Homo sapiens
ccccagacgtgttgtgtgaaaccgagggaagcccggaacggccagcgtcagtggggacgtcgtgatgcctgggacggggagcaaaaagagggagtcgggataacgggcccaaaaacaatcag

SEQ ID NO: 125337 - DNA, 122 bp, Homo sapiens
tactattgacacattctgaactatgagcaatggtgtggaggaagtaagttctattagagccgggtgttgtgtctctgcctatcttcacacatgcacccttgtgaacttggagactgaaagaa

SEQ ID NO: 125338 - DNA, 122 bp, Homo sapiens
atttactaccaaagcaaagagagcttactgctttaaaaaaaaccaggtggctccgccctccgggcgcgaggcccgggtgggccagagaggcaggtcctcgtccctcgggcccgtggcgctgt

SEQ ID NO: 125339 - DNA, 122 bp, Homo sapiens
acattccccctggtcttcctttccattggcctgcatggctgtctctgtcacccattgccccggagaaaggagcaagtgacctcaacctgtcatctccatggcgctgtctctgccaagccctt

SEQ ID NO: 125340 - DNA, 122 bp, Homo sapiens
aggggctgaggtcaggggtggggggcaaaggccttatttctagcagttacactggctcaacggagttgcctctttgcaggcagcgagctgtcctgtcgctcaaatcgtctgattttatgaaa

SEQ ID NO: 125341 - DNA, 122 bp, Homo sapiens
ggaacggatccttaaagcaaaggtggtgacggtgtctcaggaggcagagtgggatcaaatcgagcccttgcttagaagtgaattagaagattttccagtacttggaattgactgtgagtggg

SEQ ID NO: 125342 - DNA, 122 bp, Homo sapiens
caacccctgacctaactggttatgttatctacagattccagacattgtatggaaaagcatcgtaaaaatccctgtcctgttctgttgtgttctgattatcggtacatgcagcccccagtcac

SEQ ID NO: 125343 - DNA, 122 bp, Homo sapiens
cttaacagaccaggataaaactcagggaagcgccttcagctgcaccgcaacattccaggacgctcagaagcaattattacaggcgaggttcattcacctctcaggcctgtgggaacaacagg

SEQ ID NO: 125344 - DNA, 122 bp, Homo sapiens
ttccaccaagcccccttcactgagctgcagagacccccatgtccctgccagtgctttttccgaagccagtctcacttgttcccagcagtgtgaggggaattgaggttccccctcagtggcac

SEQ ID NO: 125345 - DNA, 122 bp, Homo sapiens
ttctcaagagtaaacccttaactagaaaaaccaggtaattttgtcaagattacaggtgaccgtgacagattattttagccttcattctgaccctattttcagacacagaagcaaatgggttt

SEQ ID NO: 125346 - DNA, 122 bp, Homo sapiens
ggcacgccccgccgcctacctcgcgccctccgccaccctcgccctcccgccgccacaggtcggactgtccaaatcgcctcaccctcgggctggcttgacttcacgccacaggagccccccct

SEQ ID NO: 125347 - DNA, 122 bp, Homo sapiens
cccattggctgaaagttactgtgggaaagaaagtttgggaagtttcacacgagccgttcgcgtgcagtcccagatatatatagaggccgccagggcctagggatcacacaggatccggagct

SEQ ID NO: 125348 - DNA, 122 bp, Homo sapiens
acccgtcagtgagtaaacaaagcacctagaatgttctgctatgtactaaacaccagagggcgaatttaaacacaaaagaacgcctctttttaaaggtagtatgcaatagaattatctaatat

SEQ ID NO: 125349 - DNA, 122 bp, Homo sapiens
ttcatcttctcacatgacttcatttattatctatgcttgacaaactcaaatttcaatctccgccctaattcgtgctgctgttctatggatttaaatgcaactggctattttacatctccact

SEQ ID NO: 125350 - DNA, 122 bp, Homo sapiens
aattacaactaccccgcctttctcctaggtttcaaggcgactgccgggtgcgaaaggaaccgcacacccctcagaggcgaaagaagcgtttcagacccgagaggcggacgggagcgcggagg

SEQ ID NO: 125351 - DNA, 122 bp, Homo sapiens
ctcgcctctctcctggacgccgtcgccctgcctccccgcggggacacagcctccctcccacgtcccgcccggcaccggagccgctcacttgggagcttcttactgtgtggggggagctgggg

SEQ ID NO: 125352 - DNA, 122 bp, Homo sapiens
caacaaggagagaacaatatgtcaaccatttgcatggggtcgatggatgagaaacatgagcgtagcaagagttacattttgcagaaaaatagcggaggcacacccagagtagaacagcagcc

SEQ ID NO: 125353 - DNA, 122 bp, Homo sapiens
gcgagcaccgttagggcagcctggcgcgcggcgcccgccaggcgcccagtcctctgccatcgcccacgcctccctggtgccagggaacaggtatcagcgcgcctccccagcggctgggagag

SEQ ID NO: 125354 - DNA, 122 bp, Homo sapiens
acagctaccaaaaggacaagtgagaggctatgtgtaagctctctgatcaacaaacagccacggggaagtaaagaattgtcactccataaacaagggccagggtaagaacaccgtgctcttgt

SEQ ID NO: 125355 - DNA, 122 bp, Homo sapiens
ctgataagccttcatttggttattatttaataccatacaacttaaagtttatcattctctcgccctgtgtcacattaataatctgcaatgataacccacaaacatgcaagaatacattaagg

SEQ ID NO: 125356 - DNA, 122 bp, Homo sapiens
ccccaagacctagaacgcagtgcccccaggccgggattgcgagaaccccctcccaagatccggtcattacaactccacacctcaagacaagaagacccagctcagaacgcccctagatcagg

SEQ ID NO: 125357 - DNA, 122 bp, Homo sapiens
ggcaccacgcacacggcatgaaggtgccctggcccggggcacggacacagccagagccaccgcgctcctggctgtcatcacgtcgttggctttgcgatctaaacctgcttgttgttttggtt

SEQ ID NO: 125358 - DNA, 122 bp, Homo sapiens
ttattctgtgataatcccaattttaaatccctttatttttctgtctcctatcacttacctcgttcacgagctctgcttgtattactcttcaaaatatttattcactggtactgaagagagac

SEQ ID NO: 125359 - DNA, 122 bp, Homo sapiens
cgcgaaaagccaggcccaaggcactggttgtcatggcaaccggggcgctggtctccctggcgacctcgtccctagggaggaggtggagctggatgccaggcgggccaatgaggtcgagggga

SEQ ID NO: 125360 - DNA, 122 bp, Homo sapiens
aaaggaggtagtcccaacccccagagtagggagcggcggcactaggggatgttgcgcatgcgccatacgcctgcgcagaatcgagtgagtgggagactagtcaaaaaggctgacgtcatcgc

SEQ ID NO: 125361 - DNA, 122 bp, Homo sapiens
agcgatctgttgtgcagcccgatcatcccccaattcaccaacagccttctcctcgcgaaacgcccgggaccatccgtctgaattacccacagggtgaggatgaaaggcgagggaatgagtgg

SEQ ID NO: 125362 - DNA, 122 bp, Homo sapiens
gccagtggtgagtgggcagccaattgcctgggacctgttaagagaagctacctggtgagacgtgatccaaaaagccgttttcccaagtgtctttctaaatactgaaagccgtcccatagaga

SEQ ID NO: 125363 - DNA, 122 bp, Homo sapiens
actcagtcaagctcccttcttggaaacagtcaaacgccatctagtgactgaatgcagaatcgcatactcctttcagccaggaagggagaccatggagggggagccaggctgggtcaggaaga

SEQ ID NO: 125364 - DNA, 122 bp, Homo sapiens
agcagcgcatcgatccgatcagtgctgggagctggagctccagatggtgggtggcctgcacggacgtgtggacaaagggaggctgtagcatgaaggcggccagcgaggcacgcgcgatgccc

SEQ ID NO: 125365 - DNA, 122 bp, Homo sapiens
aaacttttttttttttcatctgcagtcagtaactacttttcattggtgagtgaggttccccgcccagaaaaggcgggggcgctttcacccgcttggcgcgccctcccctctgcgcacacact

SEQ ID NO: 125366 - DNA, 122 bp, Homo sapiens
ccctagcccaggggtgtcaggagtccggcgggtggaactccacttggagaactccaagctcggttctcgattcagaccacgtgtagctgccctggaattgacgtgtgagcctaggagggcca

SEQ ID NO: 125367 - DNA, 122 bp, Homo sapiens
aggaagtcagaattgagatacgaatccacatctctttagttttaaagcctgggctctccacgatatcatcccttcatcttactcagggggaagatgaagattgggtgacttaaggtcattca

SEQ ID NO: 125368 - DNA, 122 bp, Homo sapiens
accctgagagctcacagtaacactgtgtgtgtcaccatataactgcacctcacccccgcacgtgtgcatgactcgcagagaatattccagcaattgtgtacccctgggccagtctctttgaa

SEQ ID NO: 125369 - DNA, 122 bp, Homo sapiens
tatcatctattcagtgggtaagcctaggtaccccaaacacaaggattttagcttttctcacgtacagaaccatacaatttctacacaactgatgaatcaataaatgcaaaaagggagatctt

SEQ ID NO: 125370 - DNA, 122 bp, Homo sapiens
tgctgcgccccctccccaggagaccgctgggtggcgggcgaggcctgggtcggggagggccgggcaggtctcaagggcatacccctgacctggctgccggtctccctgcaagcacaacccac

SEQ ID NO: 125371 - DNA, 122 bp, Homo sapiens
gtgcagcctccagctcacaggcagccatggggtcacgttgcatttgcatggcagaaccagcgggagggtccctgctggcagctcctgcctggtcccctcatcctcagcacagcatcgtcctc

SEQ ID NO: 125372 - DNA, 122 bp, Homo sapiens
ccagggagagggggtgcgggtgaatggtgtcctgcaggtgctgggccggaacctctgtgtcgctgcggtggtgtgttcagctctgacatgagtggggatgccaaccccagcagggcttctgg

SEQ ID NO: 125373 - DNA, 122 bp, Homo sapiens
tgggaggaggcctatcaaacacgaacagagaaatctcgtgaagtaacccctgtgcttcttcgtgatctgattcctagatttcgacggcctttagggatcggctcagacaacgggcctgcgtt

SEQ ID NO: 125374 - DNA, 122 bp, Homo sapiens
tggggacccaccgaaccatccactctgctcatctgtgcccaccccactgcctctgtatgacgcctcgtaaggacagagacaaaagagctcctaggagaggggagaatgcaggaggctatacg

SEQ ID NO: 125375 - DNA, 122 bp, Homo sapiens
aaaaaccttcccttggttttccattgcacttagaataaaatctgaactcttggcagggcacggtggctcacactttgggaggccaaggagagtggatcacttgaggtcaggagtttgagacc

SEQ ID NO: 125376 - DNA, 122 bp, Homo sapiens
tagtttttgggttaccttcggcagacgatggtgcctttcggatttgaatctttcggcgctcggctactctcccctagctcctctcccattttcccccagcagtctcccgggcttggggacgc

SEQ ID NO: 125377 - DNA, 122 bp, Homo sapiens
ctaaacggactcccaggtttgtccactgtctctggacagctgggctgttctacagttcatcgcccgtttaccagctcgggtgggatatggaaatgatttattcgagactcctgaatgctttt

SEQ ID NO: 125378 - DNA, 122 bp, Homo sapiens
acacagagagcgagacgcggagtccccgagtctccccggaaactgccgaaaacttacgagcgtccacaactgagaagggccggaaacactgtacaattttgtagagggtaaagtatgggagg

SEQ ID NO: 125379 - DNA, 122 bp, Homo sapiens
tgtgcgtggggggggaagcaggattttttcttcttccctcctatatgcaaactgtcacttcgggttagcgtgagcccttatctggctcattagcatgagctgtggctaacacgcttaaaccc

SEQ ID NO: 125380 - DNA, 122 bp, Homo sapiens
gcagctgatcagatgtctgtttcaaggcgggaaacagctggtgaaaactcagcactcccccggcctccttccgcggagtaaggaattgcatgtaaacaaaggactatttgcagcgccccccg

SEQ ID NO: 125381 - DNA, 122 bp, Homo sapiens
agcaactggcagatggaacgaaactcacacacgtgcgtgctgtgggtgtgcctgtgtgtacgctggcccgaggcacggctgcctggaaccggagctgtgagtgaacatctgtccattcagcg

SEQ ID NO: 125382 - DNA, 122 bp, Homo sapiens
gcaagatacagacaaggggacctactccttatacctgatccttgaccctgcctgaggtaccgggagtgatcagcccatgtctgataacaaccaaggttacaagaagctccattcccttccaa

SEQ ID NO: 125383 - DNA, 122 bp, Homo sapiens
cgggggccgcggggctgagctccgtcctgttcaggctcagcctgtacctgagctgcgcggcggccgccttcctgctggggatcctgtttgccctcgtctgccggagcccgcgcgcccagccg

SEQ ID NO: 125384 - DNA, 122 bp, Homo sapiens
ctcgttcgccatgttcacggattctggtcggcgcggggggctgacatccggggtgggccgcgcagcgacggaggcatgggcgtggcgagcgcctagcgaggggggcggggcgtggggggggc

SEQ ID NO: 125385 - DNA, 122 bp, Homo sapiens
ttttgccagaagctcaggaaatctgtatcttcacttgctggcattgacggatgatcctatcggtagggggaaaatgctatggtcatgcactgatgatgtggtaggaaagaatttactgcata

SEQ ID NO: 125386 - DNA, 122 bp, Homo sapiens
tgctttgctagtaaaacttatttaatcttcaccgtagctcgtagctcgtactgttgtgaccgtatttccccccgtgattgcccgactgcttgagcttgaacctcttgtttctaactgccttg

SEQ ID NO: 125387 - DNA, 122 bp, Homo sapiens
caaaagcctggcacactgggggtaaggaatgtcagtgctttttccgccaacgtggccgcgcgagtcagttgtaacccggcatccagaaccttctccgtaggggccttgcctgggactacaac

SEQ ID NO: 125388 - DNA, 122 bp, Homo sapiens
ctcaagcgatcttcctgctttggcctcccaaagtgctgggaatacaggcatgagccaccgcgacaggccatgttgctgaatttggaaagtggagcaaagaatcatgcaaaaaattaagaaaa

SEQ ID NO: 125389 - DNA, 122 bp, Homo sapiens
aactcagattccctggaacccccagtctgcactcttagccacgtccttgtgctgtcctgccgtgacactgggaaagccggacttgactctggagccaggcactgatccaggtgcttccctcc

SEQ ID NO: 125390 - DNA, 122 bp, Homo sapiens
ctccggccaggtatggccccctgttacggcggtaggagcaaggggcgcgcaaggtggccacggccatcctgtgaaccgccgcagtggtgcaggtgctgttcccgctgtcccacactcgtgtt

SEQ ID NO: 125391 - DNA, 122 bp, Homo sapiens
aatgggagacgtcccccctgccccccgcaacaccccaccccgttcctcacccaccaccctcgacactgggcttttctcagaatccagaaagcccagggtaccctctgcacgcgatcacctgc

SEQ ID NO: 125392 - DNA, 122 bp, Homo sapiens
ggtctccaaaactaagacccccgaatatggccaagagtcttcaggagggaaatgtagtctcgggtcagtagccctggctgctggcctaagcaataacttgcctacacatcccactctttgct

SEQ ID NO: 125393 - DNA, 122 bp, Homo sapiens
ttgccccagaggccgtggagtggcctcactttggggtcgtgggcagatcgctggctcccacgcctggacttcgggatcgcaggcaggatcccttccagcccaagcactccgcccaggcgcgc

SEQ ID NO: 125394 - DNA, 122 bp, Homo sapiens
ccccaccccctgcagccctgtccctccaggatgcatggccttgtcctgtgtgggggtggccgagagcactgccccagccctgggtaccttgggcaggaagctggcagaggccagggctgcca

SEQ ID NO: 125395 - DNA, 122 bp, Homo sapiens
ctccacctgggcccgcagctcggatagctgctgctggttcagcctgcgagggtggggggccgcttagtgcctgtgcccacttttggccccctctgtccctgctccgcgcaggtaggtcccca

SEQ ID NO: 125396 - DNA, 122 bp, Homo sapiens
ccccagggagggctctgagatacactgcaaagatgctgggcccagaactttaggtgttcccgtgacatgttgtgagacttctggggagaagctgtgagaggctgttagttccttctcacatt

SEQ ID NO: 125397 - DNA, 122 bp, Homo sapiens
gggccctcccttgcaggggctgcggggaggagtcgcccacctgtcatctgagacgccccacgtgggtcggccagggagggggtggaaaggagggagaaaaggcagaggcgtcaagggaggcc

SEQ ID NO: 125398 - DNA, 122 bp, Homo sapiens
cagtttcccctgctattctcaagacactgggttgagagaaaagacttcagttcttcactacgtctcactaatgttaccctgaaattcattatagtccaggtagttggattagttcaaactgt

SEQ ID NO: 125399 - DNA, 122 bp, Homo sapiens
cacgcctggctagtgttttttttttttttttctatagttttagtagagacggggtttcaccgtgttatccaagatggtctcaatttcctgacctgttgatccgcctgcctcggcctcccaaa

SEQ ID NO: 125400 - DNA, 122 bp, Homo sapiens
aagagaaaccagcgctcccagccggggataggaatggcatatacttacagacaaaagccccgctccctgttcactctctctcctctctacacctgaaacacaaatgtggttgaaaaagggca

SEQ ID NO: 125401 - DNA, 122 bp, Homo sapiens
ccattcctgttttgttatctttctttattgccgtttctttctgcttttctgtttatcactcgctggctacttgcctttctctctctattctctgtctctgtccctgtttcttctgtttcaag

SEQ ID NO: 125402 - DNA, 122 bp, Homo sapiens
acagaagtgtcttggagggctgacggttggggggcactcctatcccagggccttcaagaccggcccaggagctttgatctcactccgccagccatgaggatccagcgacggctggagcaggc

SEQ ID NO: 125403 - DNA, 122 bp, Homo sapiens
cctttgcaaaatgtgaaagaagaagcggctggtggaggcgggccataggcaatgagtcggcgaaggaaacatgatgacagccctagcccgaagaaaacgccgcacaaaacagtggcggcgga

SEQ ID NO: 125404 - DNA, 122 bp, Homo sapiens
caatggggacaatgccttacaggctttctttaaattccaaaatgcctggcatagtgtgggcgttcaatacaggtgattttttcctcacatctgcacagctccttgtggttaactagggaatt

SEQ ID NO: 125405 - DNA, 122 bp, Homo sapiens
tattcttgccacccttctttgcgggagccattctgccgggtccaagttggaaaggaagagcgcgagggattgagggagaaggaaagccgagaatctatgtcatttaatagatcatgctttgg

SEQ ID NO: 125406 - DNA, 122 bp, Homo sapiens
gcccctcccccgaccgccgccgccgtcgccgccgcccttactgccactgccgtgtccggccggcctgagcagagtggggtggggctctgcacaagctacgccccccacctccctggcctccg

SEQ ID NO: 125407 - DNA, 122 bp, Homo sapiens
agagtgagagcatggagagatgccgagggccggactcaggacacggggccagggagggggcgcaggactaaaggattttacaaaacagaggtttcgtctttgccacctcttaaagaattccg

SEQ ID NO: 125408 - DNA, 122 bp, Homo sapiens
tgcttcaggttttgatgcggcgttcctgtgtctttagcagaaggctcccaaaagcgaaaacggggccgcagtatggcataagcatgtccccgggactcagggggaggttgagacctgcagag

SEQ ID NO: 125409 - DNA, 122 bp, Homo sapiens
ctcctgcgtccactctgctgccgacacccgagcgtcgcctggagccctggcactgaggggcgcaggccgagttccagaccagcctgggaaacgcaaagcgaccccacctccacaaaagtggg

SEQ ID NO: 125410 - DNA, 122 bp, Homo sapiens
ccgcagcgcacctgtccacgagtctggccgcagcgcacctgtccccgagtccggccgcagcgcacctgtccacaagtgtccacctctaaggcagtgttcttcaacacgcaccacgcgcatcc

SEQ ID NO: 125411 - DNA, 122 bp, Homo sapiens
cattgtgtagctcagtgaatggtcaactcgctgctgtgtgcgctgtgacccttctgcctccgcatttagctgtattgtgacaccctcttaaccatttcctgtctccatctgaggaaggcatt

SEQ ID NO: 125412 - DNA, 122 bp, Homo sapiens
atcttctagggccatcttcctcactcacaaacactcacctgtcacacccacggtggacaccgggcccacacgccgcccctcgtggaggccgtacaggtgcatcttgtatttgcgcccgggct

SEQ ID NO: 125413 - DNA, 122 bp, Homo sapiens
agtccaaataagaaggctagccaatccgagtgcacgagcggccctttatgcaggaagtgacgccatgattcagcccttcagtgccggaagttactcctcggagctgtcaaaagctgattacc

SEQ ID NO: 125414 - DNA, 122 bp, Homo sapiens
gggcgggggagtgtcctaagggccaattcagcgtgatgtctctttcaccaccattgaaaacgaaaccagtagtaaactacgcgtgttttcatttatatgtcggagataaaaacacagggaca

SEQ ID NO: 125415 - DNA, 122 bp, Homo sapiens
gtggggcctctgcagcagctgagacgtttggcagtttcttcaagacttggagtaaaacctcgcctgagatagaatctaaatacactgggcttggatcgcccatttgactaaatttcgatccc

SEQ ID NO: 125416 - DNA, 122 bp, Homo sapiens
ggtttcaccatgttggtcaggctggtctggaacttctgacctcaggtgatccgtccgcctcggccttccaaaaggaatttaggtactttaaaatgctgttatgtatgttaacggaaaagtaa

SEQ ID NO: 125417 - DNA, 122 bp, Homo sapiens
cacagccacccgcagctatgtcttcacaggaggaaaacgggccggggactttcggcaactcggggctgtccccacactgcctgactcgcgcctactactgtgtcagggtttgataatgaggg

SEQ ID NO: 125418 - DNA, 122 bp, Homo sapiens
cgcggcgcgtgggggggggcggcggcatgaagcgggggggcccccccccggacaaaggtgcgtcgcggccgggcccccgagggtcgcgcgtgggcggcggcggcggcgcgcgtggcccgggc

SEQ ID NO: 125419 - DNA, 122 bp, Homo sapiens
gcaccggctggggatctgtggggcagcggcgggcgcaggctcgacccgggccaggaggcccggggcgctgagctcaggcccagaactggctgatttcagggatacccaggacgcgtgaaaca

SEQ ID NO: 125420 - DNA, 122 bp, Homo sapiens
aagagagtcaacggaaataagtttttattctagggcacccgctctctctcaggtaaaagccgcgccccaatcaggtactgccgcgccagggccgcgggacatctcgggatttgtggtccacc

SEQ ID NO: 125421 - DNA, 122 bp, Homo sapiens
ggggcgtggtctgcgggcgtgggggcgggacctcggggcctcgggggcggggcctgagggcgcgcgcacgcgtccggcgcgccccctcccggccgccatgttggctggtgtgtgggtgtcaa

SEQ ID NO: 125422 - DNA, 122 bp, Homo sapiens
atgtaactttatgagcttctaagcccctactcttagccattttcttacactgacttccagcggagatggtaagggcagaggtttggaaatgtttcctgggaagagtgggtaagggaggtaac

SEQ ID NO: 125423 - DNA, 122 bp, Homo sapiens
tgacaagtgtctggaagaaggaacagtgctgtacagcatggaggacccccacacaggcctcgggcagcagccgttaggctcagtgggttcacaaaccaccccccgccccgccgtggagtgga

SEQ ID NO: 125424 - DNA, 122 bp, Homo sapiens
ctctctgctctcccagttggagaaggggaggtttcatcaggtgaacggtgacagtatgcacgaggtccaggtaggcaatcaacaaatttttatcgaatgtcaagaccaaatgatgtcaccca

SEQ ID NO: 125425 - DNA, 122 bp, Homo sapiens
aaactctttccaaaagagcccagtgtgtggtcattgccgcgacgtgccggctggtggcaccgagcagcctgggcccagagcggttgtcgggccgacagatccgggcggggcaaagccgggcg

SEQ ID NO: 125426 - DNA, 122 bp, Homo sapiens
gaggctttgaatccgctccattattctcgaggcacaatattcattctctatgggagaggacggaagtctaccaaggcgggaaaagagtaatcaaagttacaccccggctttaacgcactgac

SEQ ID NO: 125427 - DNA, 122 bp, Homo sapiens
cgtgatccgcccgcctcggcctcccaaagtgctgggattacaggcgtgagccaccgcgtccggcaatactgggacattttatataagaaacttgagcatctgcagattttggcatcccgggg

SEQ ID NO: 125428 - DNA, 122 bp, Homo sapiens
ctcccagacttttccccggtcttaagagatcctgtgtccagagggggccttaggtaagtgcgactttggaccacgatacacagacagagctttgaacgtggcttttcctagctggagagaca

SEQ ID NO: 125429 - DNA, 122 bp, Homo sapiens
agtgacatgtaactgaccaacttaggtgctcctttgcccacagcagttacacactacacacggtagacaaacaacactgaactggggccagaaacagaaatttgggaatacgtgaaacacaa

SEQ ID NO: 125430 - DNA, 122 bp, Homo sapiens
gaggtgctgggggggactgggggcacccacttgagaccccaacaagggaactcagggccccggggagagggaagcccgggctgagcgccacagacctgctcagagggaggagccggcccgcg

SEQ ID NO: 125431 - DNA, 122 bp, Homo sapiens
cttttcctccagtgttcagttgctcctcttcgaaaatactcttcagagaaagtatctgtacgtctgtattagtacaaaccattccttccctatgtctcaatgcctgacattcagtgcctgac

SEQ ID NO: 125432 - DNA, 122 bp, Homo sapiens
tggttttgtatctttgtggactgtttgaaatctcagctgcagcatgatgacctggccccccgaggcaggtggtgaactgaacaggcatttgattcaggggtctggcattcaagggcatcctt

SEQ ID NO: 125433 - DNA, 122 bp, Homo sapiens
tggacccaggagcacgggtgttactaccggtggaccctggggaccctgcgagctttgtagcgtgaagcctggctcaggctggtgtcctctccgcaggtgttggaggacataagatgaggctt

SEQ ID NO: 125434 - DNA, 122 bp, Homo sapiens
tctacgtggctcctcagaagctgttaggcttaacaaacaaaaataaagtaaaatcagatacggtatggggccttgggacactgaaaccttcatccgtagaaaatcagttaagtcttcacagg

SEQ ID NO: 125435 - DNA, 122 bp, Homo sapiens
cctttgagttcagcaccagcaagtccagctctcctcctcctcgcggcgtagctctggcggcgctccatcaatgctggtggaaagagtcccaggaggatgactggggctgaggtcggccatca

SEQ ID NO: 125436 - DNA, 122 bp, Homo sapiens
gggaatgccctgaatgtgcagagcgcggggggggggggggggggcggggcggattcagggcgtgcctgtctctgattggctgtgccgcccgtcgctccgccccgtgttctataagatgcgcg

SEQ ID NO: 125437 - DNA, 122 bp, Homo sapiens
tgggcttgctgtggtccccagggagcaagcccttgccaagaacctctgagctcaccgaggcgggtatggggtaaggatggagaaggcctggggagcagaagtgtgcagatgactccctcctt

SEQ ID NO: 125438 - DNA, 122 bp, Homo sapiens
tgcgacagtacaggctccacccccccccccccccccggaaagaacgcgtcctcgaggcggcgattgcaacactagcttcgctgcttaaaggggcagccacacctgctgttggtgccgccagc

SEQ ID NO: 125439 - DNA, 122 bp, Homo sapiens
aagacctttaaaatctgcaccattctagcctcaaatgagcgaaaacgaaatgccgctgcccgctctctgacaatgctcctgaagcctgtccccatccggggctctgcaggtttccttcaggc

SEQ ID NO: 125440 - DNA, 122 bp, Homo sapiens
gctgcgtcgccgcttttgaagacagctccaagcgtggctttccaggaaggcaggcctccccgcggcgccttccagggctccccggggcctcctccctggccgcgggtccgggctgggggaca

SEQ ID NO: 125441 - DNA, 122 bp, Homo sapiens
tcagggtgctgggggaggggaccctctgcccacccaaccccgcctggccaaggaaatgtccgtgtagtgagcagtgaccacatgatgccctttcacccgcctcacatgtttaattaaaaaaa

SEQ ID NO: 125442 - DNA, 122 bp, Homo sapiens
gtccacagcagtaacaacaataaaacactagccagcagcttattggagagagggctttgccgatgcctgaccctgtgcctcactcttgacaggtgccatctccaatgtggtggtcactctta

SEQ ID NO: 125443 - DNA, 122 bp, Homo sapiens
ttttctagagatgggatctcattatgtagaccaggctggtcttaaacttctggccaccagcgatcctcctgcctcagcctcccaaagcagtgggattacaagtgtgagtcacgtcgctgggc

SEQ ID NO: 125444 - DNA, 122 bp, Homo sapiens
tcaccgtcttctccctttgtctcacattccgcccggagatgtggggggtctcactcaatgcggaacggaggtggcgggggtgcggcgccccagaggcgaaggcggaggcgccaggacgccgc

SEQ ID NO: 125445 - DNA, 122 bp, Homo sapiens
gttatgatgatcaaataaacttacaggcaaagtacttggtaaagatatgcagtaaacatccgatgcctactggtatcctgagtatttctttagaagttcctctaaaatgcaatcttcataaa

SEQ ID NO: 125446 - DNA, 122 bp, Homo sapiens
attctgaagaccagagacagcccaatcaggccgcttgccctgagccctcaggtctggacccgggctccctgccagccacacgagcgcccccacttggtcagggagaggagctgcctggacag

SEQ ID NO: 125447 - DNA, 122 bp, Homo sapiens
cgtggcccggcgtgaccgccttctctgagttccgcacctacagcttcccctgctacctcccgcagccgctcatcaaccacgcgcccaggtagcccctgcgcccgccgcccctcctgctgcgg

SEQ ID NO: 125448 - DNA, 122 bp, Homo sapiens
gttgttgacttacggtggtacctctaaaatcctttaaaaaagagtaattttctgcattgtcggtctagggtttaagaaaagtccagtgataccccagtgtcaaagctgcagaaagttctggc

SEQ ID NO: 125449 - DNA, 122 bp, Homo sapiens
ctggtccaggtggaaacagaccgcggctaccctggtgatggaccccacggggcacacccgcgccaccccgcacccagggctcgcgccgcccgaggcccccggttcctgtccccctccccgcc

SEQ ID NO: 125450 - DNA, 122 bp, Homo sapiens
ctcccaggccccgggccctggccggtttccctcccctcgggctgactggctcccgcgcagcgctgctgcccgcagggctcagccgcccgccgcccctcgcctcccgaccaggggaaggaggg

SEQ ID NO: 125451 - DNA, 122 bp, Homo sapiens
tattcagacgagctctctcaggtccttcctgattggatctctgccagagagggctgaaggcgtcagccaattgagaggaggttcttaatgaattattgatgacggagtcattctagaggact

SEQ ID NO: 125452 - DNA, 122 bp, Homo sapiens
gccttggtggaaacgctgcttcagagattgctccaatcaaaggccctaccccagatgcctcgagcacagtacccgccccagtgcctgccagacctgactggtgaggctatttctctccagag

SEQ ID NO: 125453 - DNA, 122 bp, Homo sapiens
caccgggctcacactgctgctcgcacggagcctgggcacaggggtcctcgcaactgcgcccgtctgctgccagccggaagccctcagtgcagcggcaggacacgtgaccatccacctcctcc

SEQ ID NO: 125454 - DNA, 122 bp, Homo sapiens
ctggcccgggagagagcggcggcggcggcgccgttcaactgcggcagcagaataagcgcgcgtcgttcagcgcagtgtcatcgccgaggcctctaggtccctggatcttggtctgcaggccg

SEQ ID NO: 125455 - DNA, 122 bp, Homo sapiens
gagcggggaaactgaggccagcggccccctggtcgcaaagtcctgggccctcggccctcacgatctgctgctcagacctgcaggatcacagggaggccggttctccctccccttacacaaaa

SEQ ID NO: 125456 - DNA, 122 bp, Homo sapiens
tggggggtggagggcggggccctgatgtggagtagacagtgcgcacctcaggcccacacacggccccgccctggggccttgagcgcaggcctcatctttctgtgccgcgggactctgcacct

SEQ ID NO: 125457 - DNA, 122 bp, Homo sapiens
gctaagaaccccaaggaagagtcccagcccttcctttcgcctctgggggcagtttggccccgccccggcctttgggacgggtggggctgtggatggggatgggaattggaattgagcaattg

SEQ ID NO: 125458 - DNA, 122 bp, Homo sapiens
aggctgaggcaggagaactgtttgaacccaggaggcggacgttgcagtgagctgagatcgcgccactgcactccagtctgggcaacaagcaaaactctgtcccaaaaaaaaaaagcgggggg

SEQ ID NO: 125459 - DNA, 122 bp, Homo sapiens
taagtgaggcagcgagagcccgcgagagggaagcagggcccgggagagaagggtcactgccgtggccagggagggaggaacgcacagcatggtggacggctgggagctttaggagggggcac

SEQ ID NO: 125460 - DNA, 122 bp, Homo sapiens
cacagacagcacatgccaggtgcccagcagccaatgctcagcacagagaggcaggcaccccgtgaagatctcctttggcagctcctgagttggggctcttttgcagtccttttttccctgag

SEQ ID NO: 125461 - DNA, 122 bp, Homo sapiens
agccgttaaagtgtgagttggtttctggtgagtccactggaaactgtgaggacaggctgccggtcaaggggactgaagcaaatggtaaaaaaccaagtcagcagaagaaattagaggagaga

SEQ ID NO: 125462 - DNA, 122 bp, Homo sapiens
agaagcccaggacaacagcatgggcgccgctttttagtcgggcgccgctttttggtcaggcgccacctggactacatttcccatatccaattgccgggctcctgcaggattggccagaacaa

SEQ ID NO: 125463 - DNA, 122 bp, Homo sapiens
gaggaggcggagggaggaggcgggggaccgctcagaagggcagggaaggaggagccggcgcggcgccgcgacacgtcccacagcctcagagcgccgggaccacaactcccggcatgccctgc

SEQ ID NO: 125464 - DNA, 122 bp, Homo sapiens
gccccgcagcgccaaggagatctccgcagtcctgcaggtgccagcagagcagctggagctcgagcggggccgagcggggcggcggctccgggtcccgcgaggcgctcgcccgccccgccccc

SEQ ID NO: 125465 - DNA, 122 bp, Homo sapiens
gagcacaggccaggccatcgaggggcctggttcacatcctttcctctctccctccccagacgatggtgccatcagggtctggaagaattttgctgatttggaaaagaacccagagatggtga

SEQ ID NO: 125466 - DNA, 122 bp, Homo sapiens
ctgcagaacctgcttccccttcccacttctccaccgcgacccgccgcagcccgagggtcccggcccgccctccaccgtctcccggagttcctcatgcattccccagggccctcactcgaggc

SEQ ID NO: 125467 - DNA, 122 bp, Homo sapiens
ataggagcggagtgtttctgaattgccccccttcccacaagtctacttgctgacatggagcgagaagacacgggagtctactcttgctatgcacttactctgaaaattgctctctcactgtg

SEQ ID NO: 125468 - DNA, 122 bp, Homo sapiens
cacgctccccccaggtccccttctcctttgaggccccaggccgcggagctacttgttcatcgtgtttccctccacgaaaccagtgcttcccgagtggttccttcaaccccgctctggcgggc

SEQ ID NO: 125469 - DNA, 122 bp, Homo sapiens
cgtctgctgctgtggtgacgttctgcactgtatggggggtggcgcgagggttccctcccacgacaggatatttctttctgaactcctgctgccccgggcaggttggcggggccgggggtgtg

SEQ ID NO: 125470 - DNA, 122 bp, Homo sapiens
tcctcctctcggccttcacagctgggggtgcaccctgcatcttggctgcagcctggtccacgatccactgcacggtgccctcatccagccgggggaagggtcggggcacccgtcgcaggtgg

SEQ ID NO: 125471 - DNA, 122 bp, Homo sapiens
tggagttataggaaagagggttttttagcttctcgagaggggcctcgcgggccccgctcccgccctcggctcgcctggcccagaccggaagcagcgccgcactgcctgggcctggcgcgggg

SEQ ID NO: 125472 - DNA, 122 bp, Homo sapiens
ttttcacattgcttttttctttctgtttttttttttttctgatacagggtatcattctgtcgtgcaggccggaatgcagttatttgaccttggctcactgcagcctccacttcccaggctca

SEQ ID NO: 125473 - DNA, 122 bp, Homo sapiens
gtgtaaccatgagtgcaaaggcgagaagggctctgtgtgcggggctgtggaccggctctccgtgtaccgtgtggacgagctgcagccgggctccaggaagcgtgagtgtgccagcctcttcc

SEQ ID NO: 125474 - DNA, 122 bp, Homo sapiens
cactccgtgctaacggtaaagtggagggccgggtaagcaggaggccaccagagcagctgccgcacgcggtgctgtcctgcatgcgactgaggcccaccggaagcagggagcacttcagctta

SEQ ID NO: 125475 - DNA, 122 bp, Homo sapiens
ttttgttgcatagagagtaatcttctatagtcagctggaggcttatcttcagttagatgtcgtctaagagaaaacatttcctcttttgagcagatcagcgtggagcctctgtaataactctt

SEQ ID NO: 125476 - DNA, 122 bp, Homo sapiens
cctgctgcgtgagaagccagggcacaggcctcggtgactttgaaccagacagtgacacatcggacagctgcgcgcgggagaggaaccacagtgcctgagggacacagcgctccctgggccgc

SEQ ID NO: 125477 - DNA, 122 bp, Homo sapiens
agatagaagcagaagcacagaggcccctgaggcaaacatggagacctggccagccaccagcgatgacagcaaagacgatgaggctggatttcatttcttagagaaggaagcatctatagttg

SEQ ID NO: 125478 - DNA, 122 bp, Homo sapiens
cccgaaggaagcaccatgatttcggccgcgcagttgttggatgagttaatgggccgggaccgaaacctagccccggacgagaagcgcagcaacgtgcggtgggaccacgagagcgtaagtcc

SEQ ID NO: 125479 - DNA, 122 bp, Homo sapiens
ttcatgcgtgaaaaacacattttagccttttccatcagcaccattcacattttagaagaccgactttatagggggctccccaaagtatctccttaaaccactgccaacccggggggtggtgg

SEQ ID NO: 125480 - DNA, 122 bp, Homo sapiens
gaagaccgggcccagcaggcgttggtggatgcctttcaagctgtaatcagtttccccgaacgtgtaccaggtctcggccacagcccgagcccagcgcgctcccgcggggcacctggtgaccc

SEQ ID NO: 125481 - DNA, 122 bp, Homo sapiens
ggtctctggacagccgtgatgctacggtcccctccagctccgataccgggactttctgtgcgatgtggccctggccaagaagcctcttggtggctcgtgcacagtgccacaggcggcgctcc

SEQ ID NO: 125482 - DNA, 122 bp, Homo sapiens
ccctggcaatgggtcttcctgccagtagtaaagatggcgctgagagcacgagcgcactttcgcacacccccattacccacaatgcagcgggaataagggaggctcagtttctgccaggagct

SEQ ID NO: 125483 - DNA, 122 bp, Homo sapiens
ctcccgacaggtggacggcatccagacgcggagggaagtttcctcctggggagcagcgcacgtgctgcctggagacagaagcgaagatcagattgcacgtgcgtggaatgtggccgcagcac

SEQ ID NO: 125484 - DNA, 122 bp, Homo sapiens
ctgcccgccgctccttcctctcctggcttattttccaaacaatttgcttaacgtgattcccggccaagctaaacatgactaatcgtgtttacccggtgatcccgcgcctcctggcaggcggg

SEQ ID NO: 125485 - DNA, 122 bp, Homo sapiens
gaaagcagatggggtttggaagaacgatctacaccctctggatgctgctgccgccatccccgcccgccctcagcaacctgtgcggaagcggagttgtccagacttgccggggcaaacttctt

SEQ ID NO: 125486 - DNA, 122 bp, Homo sapiens
atgacttgttatagcaaggagtggagcataggctattgcaattttaatttcctgttttagcgtcaaatagtgtgtgttccatattgagctgttgccgctgttgctgatgtggctttatgaaa

SEQ ID NO: 125487 - DNA, 122 bp, Homo sapiens
agggatgtataataaacaagaggtcggaggccccgggccgctcccgcccacctccgcggacgagcgcccccctccgaccccattccctgcggtctgggcgttcaggcccttcggtctgggcg

SEQ ID NO: 125488 - DNA, 122 bp, Homo sapiens
agcctcgcgttaaagagcccgctccgccgagcgccgggcgacggcaggtacgtcagtccgcgagggtcgccgcagcgccccttgcgccccttgcgccccttgcgccccctcagctttccggt

SEQ ID NO: 125489 - DNA, 122 bp, Homo sapiens
ccttcattgtcacatgtgctgcacaaaagagtaagtgctggcacacagggtcccaggctgcgttagcccctgtgtgcatgctgcttcccagtaatgaggcagggaacacttctacctggggc

SEQ ID NO: 125490 - DNA, 122 bp, Homo sapiens
ccaggctcacacttgctcccagccttggctcagcctacagagccggcttcaagggccatgcgtgtccgagggtgtcagggcaggggctggggatgggggtggccggggccgacctcagaggg

SEQ ID NO: 125491 - DNA, 122 bp, Homo sapiens
tttttattatttcagtcttgttggaaattataatttatgctagaggttataaaattcaaccgttaggtaatgagattattgacacaggtgctttgggaggactaaagattcagctagccatt

SEQ ID NO: 125492 - DNA, 122 bp, Homo sapiens
agtcctcaaacacaaattattttactaatttactgagcagacatttctggagagcccactcggtgctgggcactgttgcaggcatgggggtagtgatggggtgacagtggaggctgctgcgc

SEQ ID NO: 125493 - DNA, 122 bp, Homo sapiens
atgcagttgccatgcattcaccgtggttgctgcatcccgaggacattatcagtatgccaacgtggtatactgtagtagtcactttcttgaatacccatcctgcctcaatagtacttgtactg

SEQ ID NO: 125494 - DNA, 122 bp, Homo sapiens
tgagcagtgacagcagatgcatgagagcggcagtggtgccatggcctccgtcggagaacacgtgaagtgtgtgtgtgtactgcagcgctgtggcctccgtcggagaacacgtgaagtgtgtg

SEQ ID NO: 125495 - DNA, 122 bp, Homo sapiens
aacgccaccctcggaagaagccctgagccggggccatctgcggactcgggccctgcggtgcgagcctcgccggacacctgctccgtggctccctcgtgtcccgcgtctgatgggggcgcagg

SEQ ID NO: 125496 - DNA, 122 bp, Homo sapiens
taaaagaggaagctgggccggccagacagtagctctgctttccctcatgttttctctccacgtctcacggattccctagagtgtctgggcctcaggccaccgtcatcctagctcctgggccc

SEQ ID NO: 125497 - DNA, 122 bp, Homo sapiens
gcgcagtcgctccccctcgccgtcgccgctgccctcgcccgcgtccggccccggccccggcgcccccggcccacgccgacccttccagcagaagccgctgcagctctggagcaagttcgacg

SEQ ID NO: 125498 - DNA, 122 bp, Homo sapiens
ttatttttgttttgttttgttttgaggcaaggcctctctctgtcacccaggctggagtgccgtggcaagatctcactgcgacttccgcctcccggttcaagtgattctcctgcctcagcctc

SEQ ID NO: 125499 - DNA, 122 bp, Homo sapiens
gcggggcgggggactgggagacgggactctgctcgttcccaccacccccactgtgtttggcgcttaataggttggagaagaggacctgagcaactgaaatcctcccaccaacaacgcgctcc

SEQ ID NO: 125500 - DNA, 122 bp, Homo sapiens
gcccctggccaagcctctgctgtcatttctcctccctcctctcagtctgcagctgcgggacgggccgggctcctcagtttctgctgtgttgtgaccccacgaggcgctcagcacccagggaa

SEQ ID NO: 125501 - DNA, 122 bp, Homo sapiens
agcagcggcggcgttcctgggtgtggtttgtctccacagaaggatacaccacagggccaacgagggaaaagacatccagcagggtccaagactccaggtgccgtctccaaagttctcctgtc

SEQ ID NO: 125502 - DNA, 122 bp, Homo sapiens
actgggtggaggatggagtgcggtaatcagcggttgtaggccgcttaggctttaatccagcgttgttttgtgtaaagaacttaaaatggtattgtcttaagcgccgtgtcagccctgacagt

SEQ ID NO: 125503 - DNA, 122 bp, Homo sapiens
tgcttgatgcccactgcagggatgcgtgaaatccactagctccagtggccagacacatcccggttgcctccaggttgtaagcaatcctgaaatagcctcgtatgttcctaggacagagttct

SEQ ID NO: 125504 - DNA, 122 bp, Homo sapiens
cacagcctagtccatgttgagataaacacaatacagtcctgcatactttatagtcataaacgagggagaatagaaatggaaaatgaccctctaggcctctaagaccaaattataatgaaaaa

SEQ ID NO: 125505 - DNA, 122 bp, Homo sapiens
gggctgctgctgaaattcttgagactggttgacaagggatcccgtggtttcatttcgcaccgggcctctccagggatggagagggtcctgactggcagtgtcgaagccacggggtctctcct

SEQ ID NO: 125506 - DNA, 122 bp, Homo sapiens
cagccccgggccgaactggaaaactcttaactttgggctttatttaaaacactcgggtttcgaaagccgggtcccctccgcaggccaggaggcctcagtgagcatcctgtgctgcgtgggga

SEQ ID NO: 125507 - DNA, 122 bp, Homo sapiens
tctttttgaggatgcttggcatcttccccatttgctctggaccaaagacgggcatcaagacgcaggtcacttctggacacctgagcattcaacgagctgtgtcccacgggacagtcttgccc

SEQ ID NO: 125508 - DNA, 122 bp, Homo sapiens
tggactcacagagattggccccatatcctgagctgacgtttcaattctttggggaggtggcggggcagggacgggaggaaagatgaggcagaggtgaaagcacatggaacacaacagggggg

SEQ ID NO: 125509 - DNA, 122 bp, Homo sapiens
aaagattgttctattctctgccttcccatttagatagggtttaaaccagcaggaggcatccgcagtgcaaaggattcccttgcttggctctctcttgtaaaggaggagcttggagatgagtg

SEQ ID NO: 125510 - DNA, 122 bp, Homo sapiens
gctcgaggggggcctcgctgcgtttgtgggtgcgtccctgggtgcacatctgggcggcttcgtctgcgtccgtccgtctgaagctttgctgggagccgcctgtgtgcgttttcgtgtggacc

SEQ ID NO: 125511 - DNA, 122 bp, Homo sapiens
aaggaaatgattgtgttgacttcatctggaagcaggaaaatgcttctctccctccttcttcgccaagccaagaaatagatcctttaccagaaagccatgtggccacatggccaccacttgca

SEQ ID NO: 125512 - DNA, 122 bp, Homo sapiens
tcctgcggcgcgagctgtgcaagtgggccttgctgggtggggcagtgctagtggggcggacgggcaggggaagagggcgggcattcgggcagaaagaactgcttagcgaaggtaaggcacga

SEQ ID NO: 125513 - DNA, 122 bp, Homo sapiens
tgttcagtagagacgctttttcttttttctgaatatttctgatccatggttgggtaaattcgccgctacggaacccacagatatggaggaggtcccactgtactggcaaccatgatcctggg

SEQ ID NO: 125514 - DNA, 122 bp, Homo sapiens
tttgtccaggaggccctagcgtttcggatggctgagccacccctcctgcccacaggccggcgtgaaggacacggaaaaccgcgtggccctccatgccttgacacggccgccggccctgctcc

SEQ ID NO: 125515 - DNA, 122 bp, Homo sapiens
agtgcccactccagctgcagtaatgggaatcagctgtgccaccctgcggtatccctcccccggccttgggagccggctgtgctgagcccagccaaccttcccatcaccctccttcctgccac

SEQ ID NO: 125516 - DNA, 122 bp, Homo sapiens
gctgggcgcgcccagcagagcgcgcagggctgggcggagccgtggcccactaggcggaggcgccgtggacagaggcgggggcgccccccaccctctttctcgcttcccgccactgcgtcggc

SEQ ID NO: 125517 - DNA, 122 bp, Homo sapiens
ctaggccggatagagtgcgtcccaaccgattcgcggccccaccccggcatctgtgccggccggccagggggtcacccagatttttatgttttaaaagatttattcaggccgggcgccgtggc

SEQ ID NO: 125518 - DNA, 122 bp, Homo sapiens
ggctgtgagttggtcaggggcttgcgcgttgaaccgagaattgcaacacaaggccgggcacggtgactcacccctataatctcagcactttggggaggccgaggcgggtggatcacctgagg

SEQ ID NO: 125519 - DNA, 122 bp, Homo sapiens
tggaggcccttcccctactcagcctctcatagtgggtggtgggccccagacttaggcttccggtccctgctcccaggcctgcctccggcaccacatggctactccaggtgctgaggctttct

SEQ ID NO: 125520 - DNA, 122 bp, Homo sapiens
ttctgccatgcgagccttgaaagggcctccacccctgcagcctgcattctgtggaagccacgtgttgcgtgaggcctttcatgcctgggagagggaggtttgaagagcagaagcacttaggc

SEQ ID NO: 125521 - DNA, 122 bp, Homo sapiens
acaactttggaggcctgcaggtttgggggacgcggggagggcggagggtcccggacgcggcgcccccaaagggcccctgggtatcagtctagtagccgaagtatcccttagccctccgcagc

SEQ ID NO: 125522 - DNA, 122 bp, Homo sapiens
agattaaacgctgaaaaagccaaattggtgaagcaggttcaggagaaagaagaccttcttcggaggctaaaactagtcaaaatgtatagatcaaaggtgagaagaatttcaggaccattgca

SEQ ID NO: 125523 - DNA, 122 bp, Homo sapiens
ttgatccagttctatagaagtgcagggcgtgattgcgaagtcaatgctaccctcattccacgctacagaattcctgactctgcttctccttccaccatgcattggacgcgtttgcagtgcaa

SEQ ID NO: 125524 - DNA, 122 bp, Homo sapiens
gggggccgagcgtcgcggggaggggctcgcggcgcctgcgcagagcggcggcttctctcgcgaggacggacgccattatcgcatctccccgacaaacaccacgagaattccgcagcccacac

SEQ ID NO: 125525 - DNA, 122 bp, Homo sapiens
cggggctgcccagagccaaagcagggtgggctccagagcaagaagccatcgtggacgcggcgtctgcgggaggaaagcagctccttctggcttcgcgaaggccgcctagtccaggagcccca

SEQ ID NO: 125526 - DNA, 122 bp, Homo sapiens
gggccgtgctggctccgcaccggcctggaggacaggtgggttttgtttgtcttccaggagcggatttccaaggcccgccacgagactggagtctgagtcttccggtccaggagggaaccgcg

SEQ ID NO: 125527 - DNA, 122 bp, Homo sapiens
gatttaatagctggttttttttttccctccagtatgatatgaaccttagatttcaggtctcgagtgctgcttgtcttcatctatcagacagcaaagaacccactagatttctcttttaggct

SEQ ID NO: 125528 - DNA, 122 bp, Homo sapiens
aagtctgtccatgctctccacaagcacactggggctctgggcattcccacgaagcatccacgacaaaagaagctgaaggcgtcacggaggaaggcgcatcagaccgcacaggggacggcatc

SEQ ID NO: 125529 - DNA, 122 bp, Homo sapiens
gccactgcgcctggcaattttatgtttttaacctgcacacgaacagaggtagagatgaaacgaggatatagtgcaaaacgtaaaagacaaacactgcacgtggttttctcttcactcggccc

SEQ ID NO: 125530 - DNA, 122 bp, Homo sapiens
ttttttttttttttttttgagacggagtgttgcctctgtccccaggttggagtgcagtggcgtacacgtggctgacaaagaaaagggagatggagcctccatattggacatgcctgaccccc

SEQ ID NO: 125531 - DNA, 122 bp, Homo sapiens
acctttccccgccctccgccgtgaccttcccacggccctgaccccgcgtcctccccacctcgacctgccactgctaacagcccacacctgtccgcttcccgaagccctgtcccgaagccccg

SEQ ID NO: 125532 - DNA, 122 bp, Homo sapiens
gcccctgactcggccccgggccaggcggcggtggcttcggcctaccagcgcttcgagccgcgcgcctacctccgcaacaactacgcgccccctcgcggggacctgtgcaacccgaacggcgt

SEQ ID NO: 125533 - DNA, 122 bp, Homo sapiens
tgaaattgagctttcgatgttaaatcttccaagagttgtattttgtgcagtttttttttccgatggcattaaggctctagaagtaaaatacttcaaaatacggttatggtttattttctttt

SEQ ID NO: 125534 - DNA, 122 bp, Homo sapiens
ggcgtggggaccaaaccaagctgaacggcctgctccaagttccccccttttcctagagcccgggagggacctcgtcaacaggtagacctacccaccagccactcgccaccggcggcagaaag

SEQ ID NO: 125535 - DNA, 122 bp, Homo sapiens
cctgcgcccgaggctttctgaaggccgggaatgggcattgctgtatgcttggcacattgccgtttattccattagttaaaaaaggaaaaggaggccgggcgcggtggctcacgcctgtaatc

SEQ ID NO: 125536 - DNA, 122 bp, Homo sapiens
gacctagacctactgtatcagaatctctgtgctggtcctgagaatgtgcattctcaacagcgcctcacattccccaccccaattcttctgcagctaacgtttgagagcgctggtctggtgcc

SEQ ID NO: 125537 - DNA, 122 bp, Homo sapiens
aaagacagacgggccagaaagacagaagggctaaggaggagggcctttcaaggcagaagtcgctcacagtgtgaaggaacgcaaaccaagtcagacaagggctaaaaggcctagacttaggt

SEQ ID NO: 125538 - DNA, 122 bp, Homo sapiens
gctggcatcccacacacctatcatttcttcctgctcctgccatgggtccttcaattctgccggctgtgctttccctgacccctgtgaggggacaggcggccggggctgggctgggtgctggg

SEQ ID NO: 125539 - DNA, 122 bp, Homo sapiens
ggatcatagtgtagaagttaagaaacacaccccaccccccaacagctgcacagtctggagcgaatatacacgcccaccacccacacacccaagacccaatacacttttttaaactttatttt

SEQ ID NO: 125540 - DNA, 122 bp, Homo sapiens
ggggggaggggcacagaaatagaagccagttccttcaaagtcaaccttcaaagtcaagggcgtggcagcgatgctgatccaggcctgtcccatgctctcagaagacattgtgaatcaacccc

SEQ ID NO: 125541 - DNA, 122 bp, Homo sapiens
gcgcagaccctgccggcacatctgcgagggcctgcgggaggtctgccagcccgccttcgacgccattgacatggcctggccctacttccttgactgccaccgctacttcacgagagaggacg

SEQ ID NO: 125542 - DNA, 122 bp, Homo sapiens
tggccgactttccagcgtccttcttcttcttgtcgtccttaggcggctgtaggagggcagcgggaatgcaaccaggtcctcaaatagcgccaaagtcccctaatactgcgccctcagccccc

SEQ ID NO: 125543 - DNA, 122 bp, Homo sapiens
acctgcggagccgggtgaatggatgtcgcgaaggcaagggctgcccttacccctcggggccgacctcggagccctcgcccgtggttgcaacgctttcccgggaaaccggagaagccaggccg

SEQ ID NO: 125544 - DNA, 122 bp, Homo sapiens
tgctgagtgcttagtgctgggatctcgtgggtctctgtcggctttccagggctattctctcgccagtgagtcccacttcggaagcacacattgcacagtcttttgcgagcgctctgagtatc

SEQ ID NO: 125545 - DNA, 122 bp, Homo sapiens
cggcctggggccggtggcgctcggctgggggccgcagttggctcccctgggggctctgggcggcggcagctcccgcctgtggggaggagaaggagccggatgggcgggttcaggcgcgcgcg

SEQ ID NO: 125546 - DNA, 122 bp, Homo sapiens
cgataggactgaaagcttcctctcgctgtgtgatgtaactgttgtgacatcacagcgtggcggcactggtgtgaaggagccgctgcgccgcctgctgtgggagagtctggcacactcaggga

SEQ ID NO: 125547 - DNA, 122 bp, Homo sapiens
atggacgtgggcgaacttctgagctaccaggtatgaggggcagggagggccgagcgaccgcgttctcacctgggcaggggtcgcaggagccagagccctttcatctcacctcctctcgcctc

SEQ ID NO: 125548 - DNA, 122 bp, Homo sapiens
cgttcccagagcatccagggcgctaagttgatccagctgaaactcccacacttcttaaagcgcctgggccacctcttggctgtgtgaccttgagagagtcttaacccccctctgagccaagt

SEQ ID NO: 125549 - DNA, 122 bp, Homo sapiens
ctgtacttctgcagcgtatcacttgatacttcataggatcattatatatttgtggtgtgtcggatttttcctatcaagttttagaacatgtggggatacatgtatctctgggtctctatggt

SEQ ID NO: 125550 - DNA, 122 bp, Homo sapiens
atgcgccgggcccgctgcccccgggccgcggcggcgagcactacagcggcgactccgacgcgtccagcccgcgctccaactgctccgacggcatggtaaggccgggaccccaggaagtgagg

SEQ ID NO: 125551 - DNA, 122 bp, Homo sapiens
tgaagtagtagtcgtcgtcctcgtcgatgctctccaggaacagcgggatgtgctggaagacgatggcatgctggcagtgccgctgcctcgcgatgctcagctgctcgtccagccactggtcc

SEQ ID NO: 125552 - DNA, 122 bp, Homo sapiens
ttgctgcaatgttacggaaccggagaacaatgtggatacagagaaaaacagcaatggcatcgtagcagtcagctagataagaatccaggtgtttctgtgtgattggggaacaaacagaggat

SEQ ID NO: 125553 - DNA, 122 bp, Homo sapiens
tgggcaacatggcaaaaccctatctccactaaaaatacaaaaattagctgggtgtagtagcgggcacctatggtcccaggtactcatgatcgcctgagcccaggaggcggaggctacagtga

SEQ ID NO: 125554 - DNA, 122 bp, Homo sapiens
aggagagcagagcccaggtcaggcctcactgcttggacttaaccctaactatgatttttacgaaggtttcccccaagcccggaaggaaaggaaggagggaatgtttcttttggctgagccaa

SEQ ID NO: 125555 - DNA, 122 bp, Homo sapiens
atttgctgtgtgcagtttcagggatgcctgggaagaggaggaacctgcttcccagatgcacgttaaggacccaggtcctccaagaccaccagccggggccacccaggatgaggagctacagg

SEQ ID NO: 125556 - DNA, 122 bp, Homo sapiens
aagaaaagctgcggggcggtaaagcattccttggttaggacatacctaggtaagagaaaccgcaggggcggtaaagcattccttaggactgaagaaagaaaagccgccagggggcgggtcgg

SEQ ID NO: 125557 - DNA, 122 bp, Homo sapiens
gccgccgaaagttttctggaacaaacacccgcatctggggcttggcgggccaggaggtgccggacgggcgtgggagggggagagcgagttggcgcggcccaggcgcccggcggccaggcctg

SEQ ID NO: 125558 - DNA, 122 bp, Homo sapiens
cgggcctctaatccaaagtcaggctccgaaacagtttccagaatgcaccgccgcatttggcgaatgaatgaacgaccgaaccagtaatcactcctaagaccaagaaggccacatccttcccc

SEQ ID NO: 125559 - DNA, 122 bp, Homo sapiens
attcatgaatcagaaagttccctaaaccattaaaggatcagagaccctcatccagcaatgcggacaggcaatatttattgacagaaaacgaagtgacatacaggaatagcctgattagttac

SEQ ID NO: 125560 - DNA, 122 bp, Homo sapiens
ggctgcacctggagctggactgcaccaagttctcgctgcctcacttgagcagcatgagcccggagctctccatgaacggccaggctgctggctatgagctctgcggtgtgctgagccggcct

SEQ ID NO: 125561 - DNA, 122 bp, Homo sapiens
aaaatccatctccccgttcctctcagggttctttgccccaaaggactttgcccttccttacgcagtggacaccttggcaccctctgcaaacagacagtcccgcagaggccctcgacgagtgt

SEQ ID NO: 125562 - DNA, 122 bp, Homo sapiens
tgtgctcaacaacctggtggtggccagccccatcgctgcccgagacctgctgtattttgacggactccgaaagctcatcttcatcaagaagaagcgggacaggtaggggccgacccagccgt

SEQ ID NO: 125563 - DNA, 122 bp, Homo sapiens
tgtggcaaagcctttacttcacgttcacacctccttagacatcagagaatgcacactggacggaaatcttacaaatgtcatcagtgtggcaaggttttcagtctgacttcactccttgcaga

SEQ ID NO: 125564 - DNA, 122 bp, Homo sapiens
aatccaaatctcagggttgggctgaaaggaaactgctcacccaggctcaacttggagaatcgagagacaagaaggccatgcctctgctgttctttctagaatagctttgattttttttttgt

SEQ ID NO: 125565 - DNA, 122 bp, Homo sapiens
ctctcacgggggaggcagaaaggactcagcagctccaagcaggagcagagcagggaagctcgctgggcacctgcaggccactcccaggcactcggacatctccctaagctcaaattcacgga

SEQ ID NO: 125566 - DNA, 122 bp, Homo sapiens
ttcttgcaattcaaaaccgactcgaatcctgccagaaagctttatgtttgcggactttatcgttcctcgcctgtccgttttttataaaacgacgcgacacacctagccacacagcctcagat

SEQ ID NO: 125567 - DNA, 122 bp, Homo sapiens
accttggctgggaaaccaagtcccgtgagtaactagtctaaggccactcaggccagtcctcggggagcgcacgccgcccagctcgctcccaccgcacagctcccaacagctaagaagcaacg

SEQ ID NO: 125568 - DNA, 122 bp, Homo sapiens
ccctaaccttggcccccgtgctctcggccctttcccctcctcccctcgcagggcactccccgccctgttcctgcaccgcggctttgggagttcctagacccgcacctccattctctcccctc

SEQ ID NO: 125569 - DNA, 122 bp, Homo sapiens
gcccgcggagagaaagaaccctcctgtgctgaaccacagggtgccgggtgaggggacctgcgcccgccgcagactaagccagtatttgaaaccgctatcatctgggtcctgtgcagcacttc

SEQ ID NO: 125570 - DNA, 122 bp, Homo sapiens
gctggtttccatgtctttgtgcactcattctaactgactcagactctcagagacccaattcgtaattcctagaagctgagtctaactggaacagcttagtcataaaaactggcagcatggga

SEQ ID NO: 125571 - DNA, 122 bp, Homo sapiens
acacacacacacagggcctagtagagacggaggcagagacggggcaatgcttctacaggccgaggaacatggaagatttgctggcaaaccccaggagcctggagagatgcagggaacagatt

SEQ ID NO: 125572 - DNA, 122 bp, Homo sapiens
gtgcacatgccacaaccagtcattaaaggctttttctagtctaaattcctgttcttcaaacgtcaaaccgcccttctactctactgacctgaaacacacagcctcaccctccacatctctgc

SEQ ID NO: 125573 - DNA, 122 bp, Homo sapiens
cctgctgtcctggagcttccgatctctgttcggggaccctgtgagccttctggccggctgcgtgcagagcccactgggcacggtggtcggcctggtgtgaggccccccggggaccggcagtg

SEQ ID NO: 125574 - DNA, 122 bp, Homo sapiens
cgcgacccggagcccggcaagggggcgccgccccccaacatctcgggggcagggccggggcggggagagccatttgcatcctgaagctgttgcgccccttcagcgcaaggagcgggctgggc

SEQ ID NO: 125575 - DNA, 122 bp, Homo sapiens
tggtcacgacggccccgaagctggccgtgctcctcgctcgttcagccagaattctgcagacgcatcccaggcctacgctgctctgccaggacctctgacaccacccaccaggctggccctgt

SEQ ID NO: 125576 - DNA, 122 bp, Homo sapiens
gatgtggagttgcggggtcacgtggttcccgtttctagctctcccaggtctacgtgcagacgtggagttgcggggtcacgtggtccccgtttctagctctcccgggtctccgtgcagacgtg

SEQ ID NO: 125577 - DNA, 122 bp, Homo sapiens
gcggggcgggtggtggtatggagagaatgctgttgctttatccaatcagtggcgctggcgcgggaaccgcccaatcaggggcgcagccggagaggagggcgtggcttccgacattccgcggg

SEQ ID NO: 125578 - DNA, 122 bp, Homo sapiens
agcagtatgtttacctgtaggcatagttataagtggttgcataagcatcaagaaatgagccgatcccttgtaatgtgaaaggtgcaccttgtacaggcaattctgaaactcttaataagagc

SEQ ID NO: 125579 - DNA, 122 bp, Homo sapiens
aaaaaaaaaaaattgttatattttcccggcagttttcttctgaacctttttgctaattgtcggaataacttgtagaaaatgagactttggaaagcaagggttctcaaactcgttttgaaaac

SEQ ID NO: 125580 - DNA, 122 bp, Homo sapiens
ctccggcccctgccaagaggtctctattttggcgatccagttctccacatcataggtctgcgtgcgcgtgtgtgcgtgtgaccctaaagccctggccccagaagccccgggggcagtcggat

SEQ ID NO: 125581 - DNA, 122 bp, Homo sapiens
tgttaagtccaccctgccccagggtgctcctaccctcttggtctttttaaagccaaggtgcgatttgggcacctgactgtccagtttaccttaacaagtttgggaatccatgtgatgttttt

SEQ ID NO: 125582 - DNA, 122 bp, Homo sapiens
gggggcgaccgcgagccctctgaggcccctcaagggacagggcatgggtgtgaggggtcgcgtgcgccccctggcgccgggtccgctgggcggggtggtgggcggggacggtgggcggaggc

SEQ ID NO: 125583 - DNA, 122 bp, Homo sapiens
gcctggtcctcaaggacctcgggatctgggcgcgacgtcccttcccagcttcctcccgcgcgcaccggaccagatcttgctgtcgtcagctggctggtacccaaagttcctcttcgtcaggc

SEQ ID NO: 125584 - DNA, 122 bp, Homo sapiens
ggaactgtggtgattgcctggcaaaagcaaacgcaaatcaactcccattgcatcagccagcgtgagttctgttaactgtgtacatagattatgaactacttggttgatttacacttttctgc

SEQ ID NO: 125585 - DNA, 122 bp, Homo sapiens
tccaagatcaaagtgctagtagattctgtctggtgagggctagtattttggttcataaaccgttccttcttgctgtgtcctcacaggatggaaggagcaaggggtctctcttatgcatcctt

SEQ ID NO: 125586 - DNA, 122 bp, Homo sapiens
gtctacgggtctcggaggccctggggctccgccctcgggaatgtcactccactctcgctccgccctacgcctctcccaggccagcttggcggccctttggcctccctgcctctcgtgccggg

SEQ ID NO: 125587 - DNA, 122 bp, Homo sapiens
agcggccgggtggtgctgtaactggagcagcctgtgggaacagaggacaggtggtcactgcgccggctcgcagggttctcgggtttccgagtgcccgtgtggcagggcccgcccgaggagct

SEQ ID NO: 125588 - DNA, 122 bp, Homo sapiens
tactctccctctcagtgggccgcaggttgctagggctcaggctgtggctgttttccccgccgaaaaggggcggggtcagtcggtgtgttaggaaaaaaaatgtatatatatatatatgttgt

SEQ ID NO: 125589 - DNA, 122 bp, Homo sapiens
ggtctcactgtgttggccaggttggtctcaaacttgtgagttcgtgcggtcctccagcctcggactcccaaaatgcgaggattacagacgtgagccaccactcccaaccagttatttttgtt

SEQ ID NO: 125590 - DNA, 122 bp, Homo sapiens
cctaaacactaaaagtaaacatgctgtgaagtaaaggaagctagattcatgctgtccttgcggttggatgccaagattcaggagtaactgtttgttacctgtatacttacatgtacaacctt

SEQ ID NO: 125591 - DNA, 122 bp, Homo sapiens
agccagtgtatgtgtctgctccagctttgctgggtgtgggaaattgtttataagcatacccggctggctcctaataatagctgtaataataatagctgacatttcttgaatgcttagggggt

SEQ ID NO: 125592 - DNA, 122 bp, Homo sapiens
tgactcagctgtgacatgtacactttctgggcaaagattaaccctcctgccagcataagccgacagtaataagcaagtcaacttttcttttccacattgtccaatgtagacaactggtgact

SEQ ID NO: 125593 - DNA, 122 bp, Homo sapiens
tgtgtaggccgcgccactgccaggccgcctctcccaactctgtgggccatggctgtggtgcgtccaggcaggtgccccccaaacaggaaagccgaggatgacttcactttccgaccctgcag

SEQ ID NO: 125594 - DNA, 122 bp, Homo sapiens
gctggttgctaaggacgctgtgggagtcgctctgagacagacgttgctcttttacggtctcgtgaccagggcttagccaatcaggacttataagtgaatttccacctgccctgtcccgtctc

SEQ ID NO: 125595 - DNA, 122 bp, Homo sapiens
gcatgctaaaaggaaatcaaaactgcttatctgaaacatcttttatcatccatttggaaacgaagaattcagcctgctctgcttccacccctgtaggaagctacaccaagctgacttctcag

SEQ ID NO: 125596 - DNA, 122 bp, Homo sapiens
ttctccttgggcagtgacaaacccatggggtgtagggccggctccttgggggcctgaggccgaggccagaccctgacgggactcagccttggggacacatcagcccccccaagggccggccc

SEQ ID NO: 125597 - DNA, 122 bp, Homo sapiens
tctcttattcaaggactcagccagtctaacggtctaagagccttgggctccaacattcttcgatactcagccttctactctgccccagccctcatgccctggctcccagcagccaccagggg

SEQ ID NO: 125598 - DNA, 122 bp, Homo sapiens
tccccgtcccatcggtcctgagtgacagcggaagccctgggtaacaaggcccggcagaaccgaaatgacctgttccaaccacagattatctaagcgagctccctccctgcgtcttgctcttt

SEQ ID NO: 125599 - DNA, 122 bp, Homo sapiens
gccgccgcaggcacaggcccccacgccccaaggaagccactccacacctccagggtgagacggtgtccactgactcctggggccaaaggcttggctctagtgaaggctgggaaaaccagaca

SEQ ID NO: 125600 - DNA, 122 bp, Homo sapiens
cagactatggacaaggacagccctgaacagctggccctgtcacaggaactggaacatggtcggagccaaggacacaggactaacaggaaaggacacagactgctgtcaggacacatactacc

SEQ ID NO: 125601 - DNA, 122 bp, Homo sapiens
cttagttctgcaagttttgttgggattcgtgtaactttgcgtatgggggagagttaatgccgctaaagtctcaggtttccatttactattaggatatctagagagaggggtctgggaggcac

SEQ ID NO: 125602 - DNA, 122 bp, Homo sapiens
gaggctgttgagcagggctgaagttggctaatgccgtgtgctgttggctttcaacaattccggtaacctagatatgagtcctaatgctttcgtctgcataagaacaatccgaaattctgggc

SEQ ID NO: 125603 - DNA, 122 bp, Homo sapiens
aatgtgcccacctcggcctcccagagtgctgggatttcaggcgtgaaccattgtgctggccggtgtatttttatttctaattgaatactctgggcactggaagaggctgggctgtgcgtgtg

SEQ ID NO: 125604 - DNA, 122 bp, Homo sapiens
ttcaccccggtctttgtatgggacgactcagctatgccagcctgagctggcaagctctgccggcctttctgcatcaagtgtgcccacgcatttccgtgtggactgtggctgcgtggtatctg

SEQ ID NO: 125605 - DNA, 122 bp, Homo sapiens
cagtgactggcaactgcctttttccctttttttttctcttgttcgtctcaattttagcatcgttgaaaataaaacggcgattattttttaaggcagtattttcaatatttcctttttttttt

SEQ ID NO: 125606 - DNA, 122 bp, Homo sapiens
tgatttagaaattcctttatgtgcgttaggagctcatttgttatccccattttacagatgcgcagccccaggttcagcaatttgctctaaatgagactgtagaggctaattccagcccccgg

SEQ ID NO: 125607 - DNA, 122 bp, Homo sapiens
gcctgctctatgcggatctggaccatctagccctcagcaggccccgccggctgtccacagcggaccctgctgatgcctccaccatctatgcagttgtagtttgaagggaagcccttactcca

SEQ ID NO: 125608 - DNA, 122 bp, Homo sapiens
ctgccggggagacgcgataaaactgccccacgcggaaaagaaggaagggcggtgagcaggcgcacagaacagacgccacagtgcggcacgcatgcctccacgcctaaaggacaaaactagca

SEQ ID NO: 125609 - DNA, 122 bp, Homo sapiens
atcagtgttggcctggggctttgcagctaacttttagccctgaaagcacccattggtttgcgaggacttaggtggtttggccagacccaggattaaagcatctcatttattttagtcaatgt

SEQ ID NO: 125610 - DNA, 122 bp, Homo sapiens
tggtgatgtggcaccaggcccagtggcaccagcacaccaccgtctcgctggcatttccaccgtggtccctgttaaaccagaaagaacgaaagtgtgatggggaaaaataagtatgtgtttct

SEQ ID NO: 125611 - DNA, 122 bp, Homo sapiens
gaccgcggctacgattctcttggctcctgccctcgccttagtcgctctgcggggttggttcggtcccggcacttccagaggcctcagggtcctggtcttgtagagacttcctgaacggtggc

SEQ ID NO: 125612 - DNA, 122 bp, Homo sapiens
cactcagtgacccagcccagggcagtcttcctgctcgaaattacaccatcgccaaaattccggctgccgctctccgacccgtttcttctggcagcaggctggttcctcggccccaccgtgct

SEQ ID NO: 125613 - DNA, 122 bp, Homo sapiens
gtacatcccatctgatcatctgtcaccacagatcccggcatgagcagcagaccaggggcgcgtccccccttccagatggggaagggggtccaggcagcttgtgggaggagagcctccagccc

SEQ ID NO: 125614 - DNA, 122 bp, Homo sapiens
cacccacaaaagaagaagaaaatccctccgatgttccccaagtatgtgctggtgctagctcggaagctgtgcagagttttgtaatggaatgtgaattgctacggcggatctggatttcggtt

SEQ ID NO: 125615 - DNA, 122 bp, Homo sapiens
aggaccctgccctccaccagacacacagtgtgcagaggcgtgtacccgaaaagcaaagtgcggcctcacacggttctttaatctggagccggactcctgggaaacaaaccaaacagacgcag

SEQ ID NO: 125616 - DNA, 122 bp, Homo sapiens
gtgcaggcgtcagcgcctggggaatagtagcagtctacatctttagctgtcagggtatctcgttgtagcctcatcctgccctctttaggggtccttggatgagttatcagttgtagtattga

SEQ ID NO: 125617 - DNA, 122 bp, Homo sapiens
agagaaatggggaagggcgtctgtgttcgaaacccaggtctgctcaggggtcaagcaagtcggagtcagaaaaagtaaagtgtttaacatcgagttttcaatatttatttgtttacaatgcg

SEQ ID NO: 125618 - DNA, 122 bp, Homo sapiens
gcccatcccacccgcacaagaccatctgcggagaccactggtaaagacaagacatcggggcggcacccacctgctggaggaggccatccagcgcgtccttgtccgcctgcgtcaggccgtcc

SEQ ID NO: 125619 - DNA, 122 bp, Homo sapiens
agtaaggtggatggtgggcagaccacccaggtacctactctagaaacacaagagcgcacccggaaatatgcatgattgggagaggaaaaaaggcaataaataatggccgggcgcagtggctt

SEQ ID NO: 125620 - DNA, 122 bp, Homo sapiens
gcggggcatctgctaaggtggcgggaaaggtttggatttcactgcacctgggctggtcctcgccctgagtcgtagccttgcattccctgccaagccacgcccagaagcatcctgggagggac

SEQ ID NO: 125621 - DNA, 122 bp, Homo sapiens
cactttccaaggccttccaaggcaagatccctcaatcttttgggagttgcaacactaccacggtttgtttgattttctcatttccatccatcccttacactacccccctcccccgacaaaag

SEQ ID NO: 125622 - DNA, 122 bp, Homo sapiens
actaacctggctgcttagaaccaggtgcgggacctggttagcactgcatcaccagtgtcacgggaaagaggtactttcctagctccccagagacgtaagaatctctctgatctcttattctt

SEQ ID NO: 125623 - DNA, 122 bp, Homo sapiens
ggcctctggccagactggggagagaaaaggcctctggcctcaccttcctacctttcaccccgcctgggccccccagataccagtctgcagtccagaggggaattatatttattcacacaacc

SEQ ID NO: 125624 - DNA, 122 bp, Homo sapiens
acccctcccgcccgggggccaagccatggtgggggatctgggtggacctccggctctggccgccagtcctcaacctccgccccggccgtcccgcttgggggcccagggtcccaggagaggag

SEQ ID NO: 125625 - DNA, 122 bp, Homo sapiens
gaaggtcaggtacctgggaatatttggctcttcaaaagccagctgaagtactgctttctacgacaaatcttccctttaacaaaagtggtcactggtacagagtcagtgcctgtttttcaacc

SEQ ID NO: 125626 - DNA, 122 bp, Homo sapiens
gagagcctctatctccggttgactgattcagctcaacagatagagaagtccaagggtccgcgaagagcccctgaaagaactttacgtgagttccctggaatctgctgcacccacagaacaca

SEQ ID NO: 125627 - DNA, 122 bp, Homo sapiens
aaaggaaagtgattcttgtctccatgctgttactgagagagaggcctagaactaagcaaacgttcacagctgccacctgaatccttcaaaccttcaggttggagcctttttataatttaagg

SEQ ID NO: 125628 - DNA, 122 bp, Homo sapiens
cgggcgcagcgcgggggccggccagggaggggccacggactccacgggaggttcggggggcgccttctctggcgggggagggtatggcggggagtggggaggcggctggcgattcctgggga

SEQ ID NO: 125629 - DNA, 122 bp, Homo sapiens
attcatttattcatagcaaaagcacacaagcctgtgggaaaataatttggcaataagcagcgagaaccatacaaataccatgttctctagctcaagactctgattgctgggaatttaccctg

SEQ ID NO: 125630 - DNA, 122 bp, Homo sapiens
atgaatgaaggagcaatctgattatctgattttctcttctttgtttctagctcccttcagcgggagcgggggcgggggtggggggggggtctctgacctccagtgccctctttcttgcccct

SEQ ID NO: 125631 - DNA, 122 bp, Homo sapiens
ccgtgagagtcgcggcccacgctccgagcgtcaccctgtcaccgcccagctgcgcatgagcgctgcaactcctgctgactgcgcaggcgtgccgcggcctgtcctcacccccgtcccgggct

SEQ ID NO: 125632 - DNA, 122 bp, Homo sapiens
agagaaatagtagcattagagatgattcccaggcagggtgactgggcagccaagggaaagcgctggcctgtgcgggatgaggcagttgggttctggagagcacaagcaatcattcggtgctg

SEQ ID NO: 125633 - DNA, 122 bp, Homo sapiens
cttgcattcccctggtttgtcacaaaatccatgctgctcatcacatccaggcaggcagatcgctacaagcaaaggaaaaacagggtcaagccccacgccaagtacgtcccaacagggctgcc

SEQ ID NO: 125634 - DNA, 122 bp, Homo sapiens
tggggacagcagcaacatacagacttcagaaatagccctgaatcatcagtaacattctatcgtggtaacatcagaaggaatgcagctaacaaattaaatttgtaatgttgtcacattattct

SEQ ID NO: 125635 - DNA, 122 bp, Homo sapiens
ggtccgccccgtcaagttcaggaaaggcggacccctttaaggaggcggaaaagttaaccgcgatgggcaggcgctctgtccaatcgctagtgactcctggagtctctggcccaatgagcagc

SEQ ID NO: 125636 - DNA, 122 bp, Homo sapiens
ggccctgcggtgggtgcagggacagggacagggctgccccggagtggcaccagaggtgaccgagggggccaaagggctcgaggacaccgaagagccagaggaggaggaggagggagaggagc

SEQ ID NO: 125637 - DNA, 122 bp, Homo sapiens
ccgtgaagaccccagctgtcccccgggagccaggccacaccaaggcagccaaggggactacgttgggaggaggatgtggtccgggccattaagagctgtgatgagcccccaggtctgccctg

SEQ ID NO: 125638 - DNA, 122 bp, Homo sapiens
gcggcggcagaggcggagcaagcggccccgggtccgggagcggaggcccggggggccccgcgggcaggatgagcttgaccccgaaggagctctcgagcctgctgagcatcatatcggaggag

SEQ ID NO: 125639 - DNA, 122 bp, Homo sapiens
atggtcttttttcttcctaattatttacatgtggtttcaactatggcttccttccccaaccgtgatgaccacagcctcctactcctcttcccccagcaatgggtaccttcactgttgtgtcc

SEQ ID NO: 125640 - DNA, 122 bp, Homo sapiens
ttcccttcaggaggctcagcatagagtgaaggttgctagcttggtccagggtctgcagtacggatttcaccccgcgcccaaccctcactctgtgacctcgggcaagctgcttagcctctggg

SEQ ID NO: 125641 - DNA, 122 bp, Homo sapiens
atagaagaggtatttgcaagttcaatcgagccacacgtaggaccatacacggaagtgaaccgtgtgaggaatgtgtgtgggagagttcgcgtgaagtctgcgtgcacaaggcagcggcggcc

SEQ ID NO: 125642 - DNA, 122 bp, Homo sapiens
gagccctccccctcgccacacacacacattttcttctttctctgaactggagcacagatccgggagggaggaggcggcggcgaaaggaggaggaggaagaggcggaggggatgggcgcggga

SEQ ID NO: 125643 - DNA, 122 bp, Homo sapiens
ccctcactggcactcactcgggggctccagcttgaggctctagagccactgggtttaaaacgacctcctctccctgcgctccacccgctcggcccccagggcaggccgccgccgatgtgtag

SEQ ID NO: 125644 - DNA, 122 bp, Homo sapiens
tttaacaaataatttagtgattgttgtattttgcctaagagttctttttatttcaaatgccgaagttgcagaggcaaaagtgtttaataatttcgtggattcaattacatgttacaaatttt

SEQ ID NO: 125645 - DNA, 122 bp, Homo sapiens
gatggagctggccactggtggagagctctttgaccgcatcattgccaagggctccttcaccgagcgtgacgccacgcgggtgctgcagatggtgctggatggcgtccggtatctgcatgcac

SEQ ID NO: 125646 - DNA, 122 bp, Homo sapiens
ttccgaagtttgccgccctcctcttccggggtgggggaagtgcgcctcggggcggttggtcgctggggccctaactcagcgtttattgccagccaagcttgggcaggttgttggaggcatat

SEQ ID NO: 125647 - DNA, 122 bp, Homo sapiens
tgcccggcaggctccagggtccaagcccctaggagcttccagggccccgggtggcctccgcgcaactggatcttgggcaaccatagggacccccgttacccatagagggccccggtgtgtgc

SEQ ID NO: 125648 - DNA, 122 bp, Homo sapiens
gatcaccatctgattccaggagtttcactctgtccccaaccagccactccacatttacaccgtctctgcagcggcttaagtcttgttgaggtccaaggagggccttggatatctggaacaat

SEQ ID NO: 125649 - DNA, 122 bp, Homo sapiens
aggagaaactgggatagagagtctgggcagccggaccgagtatgagaggggagaggataacgcagagagagctctggagaatatccactttgctaatactctgtggagtattcatgaacaca

SEQ ID NO: 125650 - DNA, 122 bp, Homo sapiens
ccagagtcattagcgtcactctggttggaattctgccttttaaagtgaagtggtccaaatcggaggtggcacttcatggagaccttccaatttcaagtaatgggtttactgaacttccacca

SEQ ID NO: 125651 - DNA, 122 bp, Homo sapiens
agtcacattttccttaatcctaaatccgcgtaggtcataactggggaatttaaagtatggcgaaccactctagcaaagagaggaccaaatccctaatcccaaggacttttcgagccggagcc

SEQ ID NO: 125652 - DNA, 122 bp, Homo sapiens
tttctacacgttacaggcaggcctctggctggaggatgcctggcagccccaggcagggtccgggtttcgtgggatcagtgttttccacacattagaggcaggcctccggctggaggacatct

SEQ ID NO: 125653 - DNA, 122 bp, Homo sapiens
ggcttcagagaatcttctcggagacatagttagagctgtaatgcgtcccccgagctataacgcgtcccccgagctataacgcgtcccccaaggtacccgctgcctctgtttattcccggcag

SEQ ID NO: 125654 - DNA, 122 bp, Homo sapiens
ccctgagggacggccccttacccagtggccactgaggctcgccaggacttcctctcccgacgtgatctttcccgagatctggttgatgctggtgctacccccgaagaagggctgcggggcca

SEQ ID NO: 125655 - DNA, 122 bp, Homo sapiens
tgggaagcaggcatgtgctgtgcgcagaggcattccaataatagtttcagatgcagaggacgggcgggctgctgtgactcatgtccccagcgcacgcacgtctccaggcagaggggacgtgg

SEQ ID NO: 125656 - DNA, 122 bp, Homo sapiens
aggtgctccaggtcgctcagagagtcttcaggattcctgagtcgccgagtctatggcatgcgctccgggccctgactacaagctggttttcaaaggaagtttgtggtttttcttttcttctc

SEQ ID NO: 125657 - DNA, 122 bp, Homo sapiens
actcaccccagcgtcccaaacaatgtcgcccgcagcgtgcgtccagtaccacggcgcatgcgcaaggaggcctatggcctacaatccccagaaagccccgcgcgcagcagtggccattcgca

SEQ ID NO: 125658 - DNA, 122 bp, Homo sapiens
aactatctaatattccttttcctcaataaaaaattagtgatttttagcccctttttccagcggcagtgttaaaaagggattgttttcagggctttttttattcccacgagtacaaagttgag

SEQ ID NO: 125659 - DNA, 122 bp, Homo sapiens
caggaagccccgacacctccccgtttcccgacagacgcggccagaacacgcccaactccacgggagggtctgaccaaggggaccccaccttaggatctcctcggcctccctgtgggcctcag

SEQ ID NO: 125660 - DNA, 122 bp, Homo sapiens
gggggagttcccgccccgggcaagctgagctgctgcagcgacagcagcctccatgccccgcggacttgatttatgccgcctgctccacgtcaactgcaggctggcgggaggcgggcgggtcg

SEQ ID NO: 125661 - DNA, 122 bp, Homo sapiens
aaagcacatctgaataatttgaggctgggagaagcctgagcgtgtttcttcttctttagacgagggccaatttacgctacagcctcgtggactcaggcactcctccaacatcctatcacaca

SEQ ID NO: 125662 - DNA, 122 bp, Homo sapiens
tcacactgcacacgcccacaccagaatgcacacattacacacccgctctcatgcctaccacgtccactgcctcacacgtggtcagacacgcaaacatgctggtcctatgcacacacccattt

SEQ ID NO: 125663 - DNA, 122 bp, Homo sapiens
agggggcgatgaaagtaggcttgcgctccgcttgtagctgcttccgggtcagaggtcagacggtctagcgctgcgtgggccatggtgcagctccgaccgcgagcgtctcgcgccccggcgtc

SEQ ID NO: 125664 - DNA, 122 bp, Homo sapiens
gagggggatcataaaccctttaaaatatgaaaaactacaagagctccccgcagaaaaaggcgtgaaacgccggcacagtccccgagagcgctcgaccgcagcgaggggaggaatcgcctgaa

SEQ ID NO: 125665 - DNA, 122 bp, Homo sapiens
gggctagtggagtcagtggtccagacaccatccaccctgcacctgcccttctgccccgatcggcaggtggatgattttgtctgtgaggtcccagctctaattcgactctcctgtgaagacac

SEQ ID NO: 125666 - DNA, 122 bp, Homo sapiens
aaggaacttaggacctagtggaaacataagtttcaatagtcatctcactatggtagattacggatcaggtatcacccaggaccaacttggtttcagttgataagcattaagcaatagtgttt

SEQ ID NO: 125667 - DNA, 122 bp, Homo sapiens
tacatacacaaaaagaaaaaagactgaaaggaaccatccacaatgctttgatgggaaagacggagaaacaaagtgttaattttcttaactatagttttggtgtattccagattttctacaag

SEQ ID NO: 125668 - DNA, 122 bp, Homo sapiens
atgtaaggcgtgacagaacgttcaacccagggaagattgagtcaggacccgggaccttgccggaacacctgtggccgttgctgctgttaactgaggtgtaattaacatgcagccaagtgcac

SEQ ID NO: 125669 - DNA, 122 bp, Homo sapiens
acctataagaaaagtagtcttaaatggttaaaaggaatcaaaataccaaagtttagtgtgcgaagagtagatataaacaactgcgaacagagtagatcattggtgttgaatatttaacatga

SEQ ID NO: 125670 - DNA, 122 bp, Homo sapiens
tataaccaaaagagggggaaacaatttgcaagttttaccttgtcctgaaatccaggagttcggatgctctcaagttctgcttaagttggaagctggagatcaagtgaagctagcgctctttc

SEQ ID NO: 125671 - DNA, 122 bp, Homo sapiens
cagatggctggtcctgaattatactctagaaatgtggtcatagaagctgcagggcccctgcgctgggctcggcacccgctccggcctggagagcggtcagaggtcccacccacgtccctgcc

SEQ ID NO: 125672 - DNA, 122 bp, Homo sapiens
gcctacgaggttgaccacaggggcgattacgtgtcccatgaaatcatgcaccatcagcggcggagaagagcagtgcccgtgtccgaggttgagtctcttcaccttcggctgaaaggctccag

SEQ ID NO: 125673 - DNA, 122 bp, Homo sapiens
gcactggagcttgctgatggaggcccaccggaaccggaatccgggtttctgccaacagcccgcccactcctccgtcctattggttccttacgcgaaacctcagtgcgcaagcgcagcgcgac

SEQ ID NO: 125674 - DNA, 122 bp, Homo sapiens
cagcctttgtctcaatgcctaccttttttcctttttgtctgttgcagatatatcaacactcgtatactggatattacgtcctgagcaaaattcctcatgggtaagagtgttcttttctttct

SEQ ID NO: 125675 - DNA, 122 bp, Homo sapiens
cctgttcttggccctgcagagagctgtgggcggttgttaaggcgaccgttcgtgacgtagcgccgtcaggccgagcagcccccaggcgattggctagacaatcgaacgatcctctcttattg

SEQ ID NO: 125676 - DNA, 122 bp, Homo sapiens
caagaaacaaggtcattctgggccagcaagaagagggaaagggaaatgacaggcatacctcggagatactgaagatttgtttccagaccatagcaacaaagtgagtcacacaaactttttag

SEQ ID NO: 125677 - DNA, 122 bp, Homo sapiens
gggaggaaccgaatcctctatgtccctccccatccttcccagccctgccctcgtctgctccgggtgaggcccaatgcacaaactccagagattgaaaacttctggacccaaaggaaaataaa

SEQ ID NO: 125678 - DNA, 122 bp, Homo sapiens
tttcccgcctcagggctgggctgaccaaagtcaccgtctcttgagttttcccactgtccacgtgaaaaagctaggggcacagagacttgatttgcctgaggccacatggcgagtcaagagcc

SEQ ID NO: 125679 - DNA, 122 bp, Homo sapiens
ctctcgctcggccccgggcccccgggcagccgcaagtttgcccccggccgcgcggacccgcgcccgccctgcccgcagcagcccccgccgttcccgccgcccccgccgcccccgcgcctggg

SEQ ID NO: 125680 - DNA, 122 bp, Homo sapiens
ctttatgcctaaaaaggagttgggattttttttcccccttttgcttttcagacctggaatcgcatcaatattttttttcaacaaaagaatgtgtctcttgtccccaggtatggcaagggtac

SEQ ID NO: 125681 - DNA, 122 bp, Homo sapiens
cccgcggtggctggagtgggcctcagggctggaggctggcggcgggttgcaggggctcggcgctctggaaggagacgtggccttgtgatgaaaggggcacgtgtcctgcagacggcttcgcc

SEQ ID NO: 125682 - DNA, 122 bp, Homo sapiens
ctcctccgggctgggtcccaggaagacaccttgggctgagttcagggtgacattgggctccggctgcaggaaacgggccctccttgccaagagaccacctttcagtctctgcttcacaggtt

SEQ ID NO: 125683 - DNA, 122 bp, Homo sapiens
gtaaaatgggctttcttctggttgtgaacttctgtggcttccctggtggagcacagggagcgagcaggagaatggagggccaaggaaaaggcatttagagggatgagaatgggacagtttca

SEQ ID NO: 125684 - DNA, 122 bp, Homo sapiens
ggacgtggccccgccctatgcaaatgaggcctctccgtggggctcgctacttgggccagtcggagcgctggggagggtccgggctcctacaggattgggtgtcccggccgctccggaagacc

SEQ ID NO: 125685 - DNA, 122 bp, Homo sapiens
caatgagacgcgtcgcttgcatgcgcgcaccaataggagggcagtgggtgggggcgccctcgtccgcgcccaattggaggctgccgaggcggggccgagccgcgaagcccagcccccttcca

SEQ ID NO: 125686 - DNA, 122 bp, Homo sapiens
atgaagaggcggggcctcgcggggcggagctgggggtggtctgtgggtccgcgcgggcttcgggtagttcctgggtccggggagcagacgatccgctagccacattaggcgctcggtctctg

SEQ ID NO: 125687 - DNA, 122 bp, Homo sapiens
tggcctagatgcgagtttcccgccgcagaccaggcgaggccacgcgacatatcccctacccgcttactgcaggccgcagacggagacagtgcagccctgcgcactgctgaggttgcccgagg

SEQ ID NO: 125688 - DNA, 122 bp, Homo sapiens
gagatttttaggccatctagtaatgccctgcgaactgcccccagaaattccacttcaccacgcttacaggtacatccttaagttcccttaaccatgttacagaggaggctatttcgaggaaa

SEQ ID NO: 125689 - DNA, 122 bp, Homo sapiens
tgggatcagagggcagggtggagggttacacatcctctcccctccctcctgctccacgtgcgtaacccccagctgacttacagactgtggtacctgctcaactgcttcaattccagaactgg

SEQ ID NO: 125690 - DNA, 122 bp, Homo sapiens
gtttacaacatgtcctgtttgtggctggctgcagctgcaggcggcctccgcaaagcccaccgtctcccttaagaacaggcgctgcgcctcggcctccgtacttcatccaccttgtgttggtt

SEQ ID NO: 125691 - DNA, 122 bp, Homo sapiens
ctactggtacgaggcctacaacatgcgcactggtgcccggggcatctttactgcctattacgccatcgaggtcaccaaggagcccgagcacatggcagccctggctaaaaacagtgactggg

SEQ ID NO: 125692 - DNA, 122 bp, Homo sapiens
ctgcagcaccgtcacctgcacgtgggttggggaccacacggcccccaggccccggccagccgagaccattagggacatggtgacgataacactccagaagcgaggagaagatcgccgcgact

SEQ ID NO: 125693 - DNA, 122 bp, Homo sapiens
gccctgcgcgaagagcaccgggagaagcttcgccgggcagccgaggaggcagagcgccagcgccagatccagctggcccagaagctggagataatgcggcagaagaagcaggtgcagtggct

SEQ ID NO: 125694 - DNA, 122 bp, Homo sapiens
ttttgaaaaactgaatgttctttccacagtgagcccacattccttcctgacgaccatcaccgttcagctggagtagagagggctctgctcgcttcagatccggacgcgcaggtcctctgcag

SEQ ID NO: 125695 - DNA, 122 bp, Homo sapiens
ggcccagcagcagcagcattgtgggaactcagtggagtttgcagagccctctcctgttcacgcacatttggttttcattgcagccccatgagatgggtgcagcccatccatcctgaagggca

SEQ ID NO: 125696 - DNA, 122 bp, Homo sapiens
aaaagaacaaagcttccacagtgcgtacggggacccaagagggttgccaatgctggctcccgcagcctgcttttattctcttatctggccccacccacatcctgctgattggtagagctaag

SEQ ID NO: 125697 - DNA, 122 bp, Homo sapiens
aaacttggaattttaaaaatcttagattagatgagagtgacattgaccctaggaagacaccgtggaaactgttgtcatattgcagatgggacattgaagaaggcctgaatcgggcagtgaca

SEQ ID NO: 125698 - DNA, 122 bp, Homo sapiens
tcccctgcacggctgcgttccaaaccacatctcattatgcaagagggcacgggtcccctccgcgccggggagcagcaacacgccttagcacatatttgccagagctctcctgccggttgcaa

SEQ ID NO: 125699 - DNA, 122 bp, Homo sapiens
cactgtggagatgacaattccagccgctcgtcagcccacaagctggaaaacaggaaaagacggtggctattatttttgagactatgttattaatgactccgagggctttccaatggtggcag

SEQ ID NO: 125700 - DNA, 122 bp, Homo sapiens
ggcatgaccccttctttgacacccataacccaaggcactgtaaacattcgctattattaacgctgtgttggactcaaacttgaatgcctgcctgttccatttagtgtcacaggagacacgag

SEQ ID NO: 125701 - DNA, 122 bp, Homo sapiens
cctctctactaccttcaattaaaaaggtaagcagtgttgcctggaggagtcaatgcctgtcgcccggcccaagcatccatcatcaatgtcattagcttggagcacagagaagctggcaggga

SEQ ID NO: 125702 - DNA, 122 bp, Homo sapiens
aactgttgtttcaaccaacgaagagattctttgttttcttatctgtaaaatgtgaaaaatcgtacctaacctacagggtgattgtgaggagtaattgaaataaaattcgaggaattgtgtaa

SEQ ID NO: 125703 - DNA, 122 bp, Homo sapiens
ctttacattgtgctttgagaaatagagtttttgcctacactgaacacacattgcaccacacgttttacataaattttatatgaattatctcatttcattttcacgggactcccacaacaatg

SEQ ID NO: 125704 - DNA, 122 bp, Homo sapiens
gagcctgcagctgcaggagcgcatgatgagtctgctggagaggatcatcaccaagtccagcgtctaggccagcaggcggcggcggcggcggggccgggcggctggtggtactgctcaggcca

SEQ ID NO: 125705 - DNA, 122 bp, Homo sapiens
ttaactgcgaccggggttcagcgctcgggtgaggagctggtggcgtcggcaggttcgaggcgattcgaggtgagggggtcaagcggagaggctcggagtcggagaaagctgtcgcgacccag

SEQ ID NO: 125706 - DNA, 122 bp, Homo sapiens
gtcattcactggacattcagtaccaaattacttttgagaccactaaaaatagcagtggaccgttcaacttgctagactcttgtatggtacctccaagaaactctaaagtagtcacaaatcca

SEQ ID NO: 125707 - DNA, 122 bp, Homo sapiens
tcatgggttcattcttgtccacccagtcaagcctgtgtggacgggcctatatggggacaccgaaacctacatcgggctatttttctgtcttctctagtcagttctcagaagtgtctccactt

SEQ ID NO: 125708 - DNA, 122 bp, Homo sapiens
ctggaccaggacgtgaagaaagtcaacgagctcatcaccaacagccagagcgagatctcccggcgcacgatcctgatcgagaggaagcaagggctcatcaacttcctcaacaagcagctgga

SEQ ID NO: 125709 - DNA, 122 bp, Homo sapiens
ccacctcctagcctagcacagcagagttccttttctttcctccacaaagttagtttaatacgatgatataaatgggactcctaggcaccattgcagttgttttttttttctgtgcattcttc

SEQ ID NO: 125710 - DNA, 122 bp, Homo sapiens
aggtctccctgcagcctgcgggtgaggcagccagctgtgtccccgtgataatgccggggccggaggcctgcagctgcgcccgccacttccctgacaggaaccatctggggccctgccctgcg

SEQ ID NO: 125711 - DNA, 122 bp, Homo sapiens
gcttccggctctgtctggtctctgctcatctaggcaggagggacagccgccttcagacggcgagaagggaggccggagtggatccaggagggcggtggaaaccggagacacagtatcggtgc

SEQ ID NO: 125712 - DNA, 122 bp, Homo sapiens
cctaaggagtgaggggggtacacatttctgctcggtaacccctccaatgcctgaaggggacgatgccgtgacgttgctctgtcgggacacctcttccctcccccgcccgcggtcgccaggtt

SEQ ID NO: 125713 - DNA, 122 bp, Homo sapiens
tgcctccgcgcgttagcgcgcacgcgcgcctcatgtgtcgtccccatcagcgccggcttccgtctataggccagatgcactgtcactctggcgaagtcgcagacccgattggccgggacgga

SEQ ID NO: 125714 - DNA, 122 bp, Homo sapiens
ccaccaaggacaagtagggcctggttttagctgcaaatgcaacaagtctctccgctgagccgcagctgctaccctctgccttctgctcctccgccagggcacggccccccctgcgccccaaa

SEQ ID NO: 125715 - DNA, 122 bp, Homo sapiens
gctcacgatggctagggagaaggctgtgcctatcatgtccttccactgtgagaccacaggcgacaccggggtggggaacctgccgaggagccaggaaggaggcagaacccaagggtgtgagt

SEQ ID NO: 125716 - DNA, 122 bp, Homo sapiens
gctcaggcagtcaaaccaaaggatcagaatcagtcagcagaggagatgagttctctatgccgtctcacatttatccccaaagcccacggaggctgtgtaatttgttcaaggtgacacagcaa

SEQ ID NO: 125717 - DNA, 122 bp, Homo sapiens
gctccgggattggcggttgcttggcgggcggtgtcaggctctcggtggcggcggaggcggcggaggccagggaggaagatgtcgtaatgagcggtgggtcccggccgctgccggcggggtct

SEQ ID NO: 125718 - DNA, 122 bp, Homo sapiens
tgcagccaacttccattgacaaacatgattattaataataaattaataatcagaaatgcccgttagaaaaagggacttgaaagtttaggaagcaatgttgtttagcagtattctggcttgag

SEQ ID NO: 125719 - DNA, 122 bp, Homo sapiens
caccagccctgtagggtgtggagcctttcccaccagcaatgctgaagcccagccccctctcgctgcgtgccaggcaggccacgtggcgctgacggaggggcccggggctctcaggcgggagc

SEQ ID NO: 125720 - DNA, 122 bp, Homo sapiens
cagtccagcatccaggcctatagaaaacctccatcatgaagctaattagcatagcataggcgaaagacacaccccagcctgaggaatgtcaaagccttttctcttctcaggttacagaagac

SEQ ID NO: 125721 - DNA, 122 bp, Homo sapiens
cgggaacaagacaagatggcgcccgatttgtctcacccggaagtaaagaataataacatccgtttgtcatctgaagccataccatctctcatccaggtttgtgaacacgtgattgtgcggat

SEQ ID NO: 125722 - DNA, 122 bp, Homo sapiens
tcttgtcggcttcagacgcacgaccttgagggcagcaggaaccaccatccgctttcttgtcgtagagcggtgagatgccgtcaaacacctggaggtggtctaggacggcctggccccgcttg

SEQ ID NO: 125723 - DNA, 122 bp, Homo sapiens
attttgacttcttgggaaacacaatgcctctcaaattgggcctgcgagaaaggtgtgacccgggagggttgtggggtcccgggaccttggccgggtgtcggtgacgggactgcctgaggcca

SEQ ID NO: 125724 - DNA, 122 bp, Homo sapiens
catacattcagcccccgctatttactggatattaagctctggggctacatggaaggaccacgcagacactcttcatgccttcaacggcttacagttaagtttttcaaacatttgaaacataa

SEQ ID NO: 125725 - DNA, 122 bp, Homo sapiens
tggggccgggggctcagggacaggcatgtgttgccctaaactgggcatctgtggacacggcgtagttcactcagtcttccccacagttcaccccgtttaaggcattgaagcagaacttgaat

SEQ ID NO: 125726 - DNA, 122 bp, Homo sapiens
attaaatggaagtggatcatcacaaaggcctccaaccttctcacctccgtggtgatgggccgagcgggtggaggagcctccatctttctcacctccgtggtgatgggccaagcgggtggagg

SEQ ID NO: 125727 - DNA, 122 bp, Homo sapiens
ggggatccctctcccagcgtcccgcccgggaagcctttcggggcagacgtcggggcagcgcggaggacacaacaccggcttgtgtgagatggaaatttagtaatcgcttctcggccgctgtt

SEQ ID NO: 125728 - DNA, 122 bp, Homo sapiens
ggctgcagatggcttgaccaacctccctgttcccttctaggtaccaggatcatctatgaccggaaattcctgatggagtgtcggaactcacctgtgaccaaaacacccccaagggatctgcc

SEQ ID NO: 125729 - DNA, 122 bp, Homo sapiens
atgctcaaagagaagatggtcggtgtcatgcgcttctgatgctcaaagagatcggtgtcacgcgcatccgtgtgaagacaccgccaaacagggtgtgagcaataaggctgtttattttaact

SEQ ID NO: 125730 - DNA, 122 bp, Homo sapiens
actgcctggaggatgagggatggtccaggctcatctgtgttccagccagcccagggtacacgctgcctggaggatgagggtggcagtcctgggacagggcattcttccctccacccatggca

SEQ ID NO: 125731 - DNA, 122 bp, Homo sapiens
tgaggggagggtgctgatggcagagcctggtctgggagcggtctgaagtgagggagctggcgaagtctccagcccagggactcatggtgatcccagtaggctaatctcaggggtgggttgcc

SEQ ID NO: 125732 - DNA, 122 bp, Homo sapiens
cgccactgcactccagcctggcgacaaagcgagactccgtcacacacacacacacacacacgaaataataatatatgtaaagtggaattagctcctaggcatagggaaggtgcagagtattg

SEQ ID NO: 125733 - DNA, 122 bp, Homo sapiens
cggcaggaatgctacgcgtttaatgggacacagcgcttcctggagagatacatctacaaccgggaggagttcgcgcgcttcgacagcgacgtgggggagttccgggcggtgacggagctggg

SEQ ID NO: 125734 - DNA, 122 bp, Homo sapiens
ggcgggccaaggctcggatcctagttttgattggccgttgtgcaaaccacgtagtggggacgccctctgattggatgcaggattggcgggaaggcagcaggctcagagagggccctctgact

SEQ ID NO: 125735 - DNA, 122 bp, Homo sapiens
acaccttgggtgcctggccagtgagggtgctccctgcatggcctcccggtctcttccagtcgagcctagtggagcaaaggatctcccctaggagatggggcacaagagaggaaacaggtagg

SEQ ID NO: 125736 - DNA, 122 bp, Homo sapiens
caggccctttaaaggggtgattaagttaaaatgaggatgttagggtgggctggtatggaccggttcaatatgactggcatccataaaaaggggaaatttggacttacagagggaagatgatg

SEQ ID NO: 125737 - DNA, 122 bp, Homo sapiens
gcgccccacccgcgcttccttctccggccgtgacgctccctcgagccacggggagctttgcggtctcctggggtaccccccacccacgtccctgctgcaggctcccagtgtcctgccccggc

SEQ ID NO: 125738 - DNA, 122 bp, Homo sapiens
ctcgctgccacgtgggtttgccactcggggcctgcaagtctgccgatatccaccaggtggcgcagcacctgggctgggactcgccggagctgtgaggggagcttgggatgggtttgcggtcg

SEQ ID NO: 125739 - DNA, 122 bp, Homo sapiens
cacggcccggatgcctttaggatactcgggttctgccgctggcacgctgggagccatgtccgccgaagtctctcactgccaccagttcgcacgcctcacaggtccagtgcttcccaggtcaa

SEQ ID NO: 125740 - DNA, 122 bp, Homo sapiens
ggaaatgtgctcctaaaagaagaaatgaaatcatattatgaattagaaatggcaaagatccgcggagagctcagtgtcatcaagaatgaactgagaactgagaagaccctacaagcaagaaa

SEQ ID NO: 125741 - DNA, 122 bp, Homo sapiens
gagtagctgggattacaggcacccaacaccatgccaggctaatttctgtatttttagtagcgatgggttttcactatgttggccaggctggtcttgaattcctgacctcaagtgatccacct

SEQ ID NO: 125742 - DNA, 122 bp, Homo sapiens
gagtcccggctggagcgcgatctggaatctgactcgcttgaaacagcaccgcggtggattcggagccgggtgagcagggaactgcgcctcagcccctcccacgggccgcccactgattccag

SEQ ID NO: 125743 - DNA, 122 bp, Homo sapiens
cagttctgttagccccagcaactgccgttgagagcaaacaacggtcctgcagaaaaagaacgagacagtaaaagatgaggaggcaactggtataaaagctggactatgtctccctctagagg

SEQ ID NO: 125744 - DNA, 122 bp, Homo sapiens
aggctgaggcaggagaatggcatgaacctgggtggcggagctggcagtgagccgagatcgcgccactgcactccagcctgggcgaaggagcgagactccgtctcaaaaaaaaaaaaaaaaag

SEQ ID NO: 125745 - DNA, 122 bp, Homo sapiens
ttctcagtggtcaccaaaggccagggtcccctctggctgggactggagaggcgggctccacgggactgcctctactagtgcctcgctggtccaccgctccgggatgtgggtctgctggaggc

SEQ ID NO: 125746 - DNA, 122 bp, Homo sapiens
gtttcggccctcggctgacactaactcgctcggctgctccgctggttccatcgccgctgccgccacaggctcctcagccacggctgcgcagacgctgtctctgctggctcgttattcactgc

SEQ ID NO: 125747 - DNA, 122 bp, Homo sapiens
ccgcgggagcacctgtcagggaggagggtggcagctggtggctgaggccgcgctgacctgcgctggtacctgggatgggtgcacctctcacagaaccgcctggatgggccgccctaccttgg

SEQ ID NO: 125748 - DNA, 122 bp, Homo sapiens
tacgcggcttctgcttctcggccaccaggagcccgttgacggcgcagtgcgggtacttggcgccgtgcagcaccatcttgcagtaggcctgggtggtcagtttcaccccgggcatgctgacc

SEQ ID NO: 125749 - DNA, 122 bp, Homo sapiens
ggccttgcccgagatcaatgaccccattcagagagggttgatggcacaacgcggcaatgccggcagccaaggggttaaccttaggccagctggctctggggtggtgcgagggggtgggccgc

SEQ ID NO: 125750 - DNA, 122 bp, Homo sapiens
gaagctcagtcgctctctaaagctgctcccgcggatgacggacacggagacaaataggaacggtgtgtcgtgagaggtggtccacaagcacttgccctccttcgcccggctttaaccccgct

SEQ ID NO: 125751 - DNA, 122 bp, Homo sapiens
aaagctttgcttcaattgttctcccatttacattgccttttcagcccattagtgtggttccgaatagttttcctcacttaaaaatgtgaacaagattgcttaaaccatacaaatttctgatc

SEQ ID NO: 125752 - DNA, 122 bp, Homo sapiens
accagatgaccactaatgatgaaagtttctcaagggttctgaacacacaacatccaatggcgtttctgctgcttgaacagcttagcaggacatgtcagtccttcattgccccttctcacact

SEQ ID NO: 125753 - DNA, 122 bp, Homo sapiens
tgtgggaaggaacggggacaggagcctccaagaagcctggggtccgtgtgtccgtaggaacgggggacaggaggttgtgaagggcgtgtgggttccgggaggctcactatagtgatgtcctg

SEQ ID NO: 125754 - DNA, 122 bp, Homo sapiens
agaacagtggtgcaggcgggctgggagctggggaaggggcccaggccacaccattccaggcggaagacagaccctggactccaccaatgccagagctcatcctgacaccccagctgcacctc

SEQ ID NO: 125755 - DNA, 122 bp, Homo sapiens
acagaaaaagtgaaaggaaactccaaaatctgggaatgagaagaaaagcagacagcctgtcgtggtcaagaccggctgggaactggcaatgaatccctaagagagagtgagtgagtatcttt

SEQ ID NO: 125756 - DNA, 122 bp, Homo sapiens
agccagagacaagccctctccctggcacaaggccacgtgctaagatgaatcagattgggccggctggagccagtgggtggaagacagaggacgcaccaggtggagggcacaacaacgaccag

SEQ ID NO: 125757 - DNA, 122 bp, Homo sapiens
gcttctttcttggtcagcctcccggggactcagctcctcttggataggagctctggctgtcggtcaccactgtggccgcagggcctggtgcagacgggataaacgatgaagaatgccacctg

SEQ ID NO: 125758 - DNA, 122 bp, Homo sapiens
tcccggtgcagagggagtggcctgatggtgactgggcggaggcctctgcccctcacaggacgtcgtcaaagtccagcagcttcgagtgctggcggctcttccacaggcgatacaaccggaag

SEQ ID NO: 125759 - DNA, 122 bp, Homo sapiens
ccaagccctcagccccttggtcacccacaatgggggagtaaaccttccctgctaacaagacgcggacctccgcggcggccgagagtagccgcaccggttcgcaacacacagtcctcccaggc

SEQ ID NO: 125760 - DNA, 122 bp, Homo sapiens
aagagtctctgagcttttctctgaggatctttgaacccacctgatccaccttcatcctgccggcaatctcctgtaattcatgtttttatggccagttacttacatgatgaggtttaattggc

SEQ ID NO: 125761 - DNA, 122 bp, Homo sapiens
ctcgaccctggggaggacagcaacaagtcctgccccagccatttcatcaccctgctagcacgtgcagattccgggccctcggagcccggcgcggacctcgccttgcctcgcgcttccctttg

SEQ ID NO: 125762 - DNA, 122 bp, Homo sapiens
cagcccggaacgcagtgagtacagccactcaaaggaaagccaagtcgctttgcaggggagcgtctcatgatttttcagaaacgtgctcatggttaaaaagaaaaatcaaggctcggaataaa

SEQ ID NO: 125763 - DNA, 122 bp, Homo sapiens
aaaactatccccccagatccacaaaggtctgcgctcaccaaggcacatcgcaggactgtccggaagtccctgtgtaaaccagagggtcatcacaaagaacgctggtggcacagccaagtgtc

SEQ ID NO: 125764 - DNA, 122 bp, Homo sapiens
tacattgagcagggatcgggatcggtacctgtaaacattgttattccactgcatccattacggcaaaaggaatttacacaaaaacaggccacaccattcagttcagaacatctgtgctggtt

SEQ ID NO: 125765 - DNA, 122 bp, Homo sapiens
cacgtaggcagcgtcccccagcccgggacccgcaggaatgcgaggggcaagacagatcgccggaggagcaggggtcagaagtcagtgtttaaccactcactggctttcggtgaagccagaat

SEQ ID NO: 125766 - DNA, 122 bp, Homo sapiens
gaaggggcttccggactcccagtagaacatctccatttgctctgagtgaaggaagaaaggcgagaacttccaggtctatggggaccccacatcccatgtacagaagtgccggggacctggga

SEQ ID NO: 125767 - DNA, 122 bp, Homo sapiens
tgacctcatgatccgcctgcctgggcctcccaaagtgctgggattacaggcttgagccaccgtgtccggcccctggccgccttattttaaggttgctcaccacctcctcttcgtcgcattct

SEQ ID NO: 125768 - DNA, 122 bp, Homo sapiens
taatttcctgaggactaggatttttgacaccttttagtagctgctttcagtgttaaaaagcgaaaagttttagctggttagtagacatctacaattttgagcaagtgagttgaaatcttact

SEQ ID NO: 125769 - DNA, 122 bp, Homo sapiens
acctggaaggggcaggaagagcgcatgggtccccagctgatccgtgctatgaggcagggccgggccatcctgccctcagaccgggatactcgagctggccttacccaggcatctctccctct

SEQ ID NO: 125770 - DNA, 122 bp, Homo sapiens
ggtccacagaaacatgttcactgttacatcactgtctcaaaaatcaaggcaagaaaaacacgaaatgaaaacaaaactaccaatagcagaatctccacaccgtttcctgcagcctgagcctc

SEQ ID NO: 125771 - DNA, 122 bp, Homo sapiens
ccccggagcccaggtgcaagtcagcccggtgggcctgcctcccagccgccccggagcccacgtgcaagtcagcccggtgggcctgcctcccagccgccccggagcccaggtgcaagtcagcc

SEQ ID NO: 125772 - DNA, 122 bp, Homo sapiens
gtaccaggccctgcagcgtgcctacgctttgttgcaggagcaggttggagggacgctggacgcagagcgagaagttaaggtctacgtgacttccaccgcgcgttccggcccccctcgtgcct

SEQ ID NO: 125773 - DNA, 122 bp, Homo sapiens
gattggtccgtggtgctaaagcctgaaagcgaattcctcagacattggtccgagtcactgcgatgctgacgctgtggttggtgagtttggatgtcagtcagagtcggaggcagggtcaaata

SEQ ID NO: 125774 - DNA, 122 bp, Homo sapiens
ctaggcagagtttcactgatgaaagccctgtgcagtaggagcgctcctaagcttaggtttcggacacaagcaaaggaaaacctaagcagcccaactaggggattgtagtgtcctctctagac

SEQ ID NO: 125775 - DNA, 122 bp, Homo sapiens
gcagtcagcagaggggcactatccagtctagtcactcaaggatcaaggtgacaaagcctccgtcttgaaaaacctctcaccaacacagaaggaagggcacacaagctcttaatacttccctg

SEQ ID NO: 125776 - DNA, 122 bp, Homo sapiens
gtgggtatttctgggattagggctaagcttcattttcttttcagccttttcttaagcgtccgcattctccactatgcatttattacgttggtgcaaaactaattgcaccaacctatatatgt

SEQ ID NO: 125777 - DNA, 122 bp, Homo sapiens
gcccgaaccacaactcccagaatgctctgcatcgacagcgggagacgagacgcgctcgggcgtcgctttgctgccgctaggccctgtgctcctccccgcagcggaaggcctacgaatacgcg

SEQ ID NO: 125778 - DNA, 122 bp, Homo sapiens
cccctggaccatttcctagtgtataaaatcttcccactgctgttggaatcccagatgacacggggaggcaggagacactttgagggccctggcctctagaagccctaagagaatgcctgctt

SEQ ID NO: 125779 - DNA, 122 bp, Homo sapiens
agagcacaggggcatctggaggtcaagggtgctgcgtcagtatttggtgaatgtgtgggccggagccagatttcctctgttccagagcctgctctggagcctctgggtctgggggttgcaaa

SEQ ID NO: 125780 - DNA, 122 bp, Homo sapiens
acttgtcctcacagtaagcaactgcttctgactttgctgtttgaataacctctgggtgttcgatccacccacacagctcaagtttgagctccagaacaaatatttgtcccaattttgaacaa

SEQ ID NO: 125781 - DNA, 122 bp, Homo sapiens
ccctttcctcagcacagcaccatcttcaccctcctgggaaagcagcattggagcctacaccgcttgtgcttttctcaccagggtaagaaatgcaggtatttgcagaggggagtgagtctgga

SEQ ID NO: 125782 - DNA, 122 bp, Homo sapiens
cacctggaaaatcgggccactcccacccgaatactgcgcttttccgaccagcttaaaaaacggcacaccatgggattatatcccgcacctggctcggagggtcctgtgcgcacggagtcttg

SEQ ID NO: 125783 - DNA, 122 bp, Homo sapiens
tgacccctagttgcttagggatcataataatgaattcaattcagcaagtaagaacaggcccgcaataaacccttgtccatggctgttataagtttaaactctgagtctccaaaccaaaatat

SEQ ID NO: 125784 - DNA, 122 bp, Homo sapiens
cgtggactagatcttagcttgtctgcatggtgctcaaggggccgagggtggagcttggctcgctgcctgggaacctgaccatccttgcttctcggggcagatggaggacaagctggcctggg

SEQ ID NO: 125785 - DNA, 122 bp, Homo sapiens
tcaaccctgagcaaaaggctgcagtgaggctcaagctcctgggacagtatgggtgaggagcggctgggtttggcttttggtggtgtggtatgctctgtggagggacactcaaccttggctct

SEQ ID NO: 125786 - DNA, 122 bp, Homo sapiens
aatgtggcgggcccttgggaactgcatttcctccctgcttcgcccagggctcatttggagcgtaccaagcgcaccgcttggccccacactgccccacattcacggtttgcgcactgtgcgtc

SEQ ID NO: 125787 - DNA, 122 bp, Homo sapiens
gcagcaaaacaattgagatgctaacagggaggattacagtgtttacagaacaaccttcagcgccgacctggaatggtaactttttccctcctcagatgaccttacttccactgcctccacaa

SEQ ID NO: 125788 - DNA, 122 bp, Homo sapiens
cagccactttccttgagaccaagagagtgcggtggggatgggggggagagcacgggtccccgtctgacagtggccgctgccatattcaggtgtagctaattgctctggtgtgggaatgcagg

SEQ ID NO: 125789 - DNA, 122 bp, Homo sapiens
tcacccagtgtcgtttcttacccaaaacagtacatgaatattttagctacaaaatcagtacgtgaatattttaactataaatagaaactccattaaaaaatatataaatttattgaaatttg

SEQ ID NO: 125790 - DNA, 122 bp, Homo sapiens
aggggaaacgatgtatccaaaggtgcagggtgacctgctgcacacgtccagagggtttcccgaagcaaaaagcgagccggagccttaatttaggtgccctggtgccatgaagggaagtctgt

SEQ ID NO: 125791 - DNA, 122 bp, Homo sapiens
gtccccagcttccatcggctcctccctcgcgtccctccacctggcgagctctccgcctggcgcaccccctctgcctgctgtgctccctctgcctagcgcccgcctggcgcgctccttccctt

SEQ ID NO: 125792 - DNA, 122 bp, Homo sapiens
ccgaggcggcggcgggcggcagcccatgggggttctagggcggacaaggggctgtggacccgttcccacgcgccgggtaatgagagagaatgtctgatctaggggctgaggccgggagaaaa

SEQ ID NO: 125793 - DNA, 122 bp, Homo sapiens
ggcggggcttcggggctttcccctttgaggggagtatcggttaacccttgcgcggcggggcgggctggagctccgcgggccggaacccgggagtcggggctccccagccacacccctcgcgg

SEQ ID NO: 125794 - DNA, 122 bp, Homo sapiens
tcagaagtcccgagacccgatgctttcgccagcgtctcggtctccaaggaaacgcgacgccgcctaccgagcgcctaaagggactaacctctcaaggcaaaatctagttcggcccgcttttc

SEQ ID NO: 125795 - DNA, 122 bp, Homo sapiens
gcgcggggcgggccgcgaccccccccccccatgatggcgcctcccgtctgctcggaggagcgaacctgctaccacgtcttctcgcgcccagcccgccgggctcccctggtgtctttgttggg

SEQ ID NO: 125796 - DNA, 122 bp, Homo sapiens
gcaaagagacagtggaattagccccacagaattagtccgtcacggcactaatgcgaggagcggagactgcagctggcacccagactggctctgggggaatggcactgggaggaccgctgggt

SEQ ID NO: 125797 - DNA, 122 bp, Homo sapiens
caccttgtctcctggtcacttccctgcttgtttgtttcttcctaactcccaagtgtctttcgcccagttcatccccacctcagcagcccaaggctcggcggggacggtcggggttcgaagcc

SEQ ID NO: 125798 - DNA, 122 bp, Homo sapiens
acccagtaacattaacttccaccaacttacaaaagccttccgcaaccagctattaaccttcggagatatttccacggtgatagcctgaagaagaaaatgcaacgagccatggggtcaaaaat

SEQ ID NO: 125799 - DNA, 122 bp, Homo sapiens
gacagtttccatccactgtgaaatataagccaaaaaaaaaagttctgtaataacctttagcggtctcagaaatgcataatgatggcagtcgatactgaaatccaggcagtacagaattttat

SEQ ID NO: 125800 - DNA, 122 bp, Homo sapiens
ggaactcgggggatcggagaggggctcgtgtgctgggcgacagtgacacactcagcagcccggcgggagccgcggtcggtaccgtctgaagggcagccggggctgggggaccgacagctctc

SEQ ID NO: 125801 - DNA, 122 bp, Homo sapiens
actgagcgggatggctgtccttgtgaccacgccacctggattctgttcattggcgttgtccgggggagaaacaaaccgtctgtctttgtaataggaggcagcgatgcaagttgtaggaagac

SEQ ID NO: 125802 - DNA, 122 bp, Homo sapiens
cacgaacacaaattccttttaaggcaatgtgtcccgcctctcccaactatataagggcagcgtcagtaaaagagcttctgcaaaacaagccccacccagagcctaagctgactgggcctcct

SEQ ID NO: 125803 - DNA, 122 bp, Homo sapiens
tgcaggacaatactcagtgttttgatccaggaggtcctattagggcgtttcattgataaacgcacatttgaggtggagggtggccagtgtagaatgtgcctggcagctttcacagcaaagga

SEQ ID NO: 125804 - DNA, 122 bp, Homo sapiens
tgcaatgccggccaacttccaaattctgattttaaaaaaaaaaaaagccaaagcctgcatcgctaagcctaacagtcaacaaaaagaaagcagaatgaagacaagaaagcggtaagaaatgg

SEQ ID NO: 125805 - DNA, 122 bp, Homo sapiens
ccgggcctcaaggcccaggctggggtggcacggcaggggctgatggggaggtgcccaggccgccggcggatgctcccggaagatgctctaagctgccgctccaggtatcccctgggctgagg

SEQ ID NO: 125806 - DNA, 122 bp, Homo sapiens
tataattagagatgggctgagctagttctgaaataataataaaaccaaaaacctgacattcgagtatcctccaaatgggggagaatgtgctggaagcctgactgtgtgttttgcggcccatg

SEQ ID NO: 125807 - DNA, 122 bp, Homo sapiens
ccaagagcctggtactgccacggcaccagctggtaagaattaggcttttttggccgggcgcggtggcttatgcctgtaatcccagcactttgcgaggccaaggcgggcggatcacgaggtca

SEQ ID NO: 125808 - DNA, 122 bp, Homo sapiens
gctcagaggagccggaagcgccgagggcgcgagcggagaggcactcggcgcgcccggaggcgagctgccaactgaaccaaaaatgccgctgccgggagttgctcgcctagctgcgcagcaga

SEQ ID NO: 125809 - DNA, 122 bp, Homo sapiens
gagagagagagagaggtgtttttgcagcgggaaacaagcaggaagaggcacagaggccggcgcccctgctcccctcggggcctctgagagcggcacacaccgtaattcccttcccagagcct

SEQ ID NO: 125810 - DNA, 122 bp, Homo sapiens
gaggaggagcccggcgaagcagagtcagagggactggtggctccggcgagtgtgcagccccgggggagccggcgctctaggcgaggaacccgtcagcccgcctacccgcccgtcgtctttgg

SEQ ID NO: 125811 - DNA, 122 bp, Homo sapiens
caaggacagcgaaggcttttcaaacgcaaatatcggggtgctggaaggggtagcaggggccgtgagggaatttaaaacattgctgtttgagaactgagagagaggtaacggggctcttgagg

SEQ ID NO: 125812 - DNA, 122 bp, Homo sapiens
gcgccactgcccgactttggccaccgctgggtcgttttgctctgagccttactgagatcccggagggccctggcgggtccctggaagggctgtgccctgtcgccgttgcctgtgtcctggcc

SEQ ID NO: 125813 - DNA, 122 bp, Homo sapiens
attacccacaaccaagatagccctcaaacctagtgggcttcctcttgtcagttccagcagcgtcacagttgctggcaggaaacaggtctcctgagaaaagtatttgcattacagaagcagct

SEQ ID NO: 125814 - DNA, 122 bp, Homo sapiens
aggagtaaacgctggctacaaatgcctttttatactggtatcaaagagccaggccaccagcgatgccacatccgccggtctacccccaccgacccgcgaagcaccctcacagctcacggccc

SEQ ID NO: 125815 - DNA, 122 bp, Homo sapiens
ggaaggtacagaggctggggcgagtgcttttgggatcctgccccacgcagcatctaggggcggatgtccgtgcctcccgaagcccaagtgagcagtgtgttacaggctctttcaggtttgcc

SEQ ID NO: 125816 - DNA, 122 bp, Homo sapiens
aatttccacacctccagagtagatttaattttatcacgtacagagtatctactgtgtgctcgatactgggcctacccattgtcccagtttcacacaggaccaactctaaagtcctcgagctg

SEQ ID NO: 125817 - DNA, 122 bp, Homo sapiens
ttttccttgagttttgaattgttttgcctttcctcacccctagaataacatttggtgcctcgcagagtcatccctattgtatacaatcagaacagtatgtatttacaaaataataataacac

SEQ ID NO: 125818 - DNA, 122 bp, Homo sapiens
ggctcaagcgatcctcccaccttggcttcccaaagtgctgggattacaggtgtgaaccagcgcacatggccctgtgaagcacttgaaatgtggctggcttgaactgagacaggctgtgagtg

SEQ ID NO: 125819 - DNA, 122 bp, Homo sapiens
ggccggatttgcgagcagcttgtcagctgtttttgccctccccttcccatccatccactgcgaatgagtattaggaattcagaagcgttgtttgctatttgatcctaagggaaactactgta

SEQ ID NO: 125820 - DNA, 122 bp, Homo sapiens
aaagagaaacagctgcaaatgttgtgctgtctctttgaggttgtcttggggacagttccccgcaaaggtcattcctagcttttgaggtcaatgttgggtcataaggtactgcattgtgcaaa

SEQ ID NO: 125821 - DNA, 122 bp, Homo sapiens
gacaaccaggtaagggaggtggagctccgggtgtggcctggaggcacccaggcaggctcccggtaggaggcggcttcctggaggaacctgtggtggaataactcctggccctggtgttagcc

SEQ ID NO: 125822 - DNA, 122 bp, Homo sapiens
cactccttgacatttgtttcccttatgccttctatgacgctgttctttctttgtcatccccgtacttctctgatgattatctttttctttcaggtttctctccatcccatttcccgctaagt

SEQ ID NO: 125823 - DNA, 122 bp, Homo sapiens
atcgggtcactcccacccgaatattgcgcttttctgacgggcttaaaaaacggcgcaccacgagattatattccgcacctggctcagagggtccgacgcccacgtagtctcgctgattgcta

SEQ ID NO: 125824 - DNA, 122 bp, Homo sapiens
gcaataaccacttcacttggttgtgtaatcctccagggcacaataatcattttatgtgatcgtataaaatgctccactgtgaatacaccatttgctcattttccttcctgtcagtggatatt

SEQ ID NO: 125825 - DNA, 122 bp, Homo sapiens
tcagactctgacttgcccaggattgcatagctatcaggtggcttactgtggactcaagtgcgtgtcttcttaccagattcatttgctttgtcaaaacaataaaataagaaacctatcacttg

SEQ ID NO: 125826 - DNA, 122 bp, Homo sapiens
cgtgcaaaggctcccctggcattgtgctagagaaagcaggttgctcctagaaaaagtctccgttctctatgcctagttaacttccgcttacccatcagtactgtactcaaggtctccccaac

SEQ ID NO: 125827 - DNA, 122 bp, Homo sapiens
ttgcatgtacagtgcctccatcctggaggcaagagagttgggagtggctcgaatcagagccgtgcccaagatatccctgctgttgcatcgtttgaagctgacgtcctgtgtctgtacactgc

SEQ ID NO: 125828 - DNA, 122 bp, Homo sapiens
cttgatttcatgacacccagagagtctctccctggctttaatgttcaaactactgagccacggtggctgatcggagttggggtgaaaggctgggggttctaaaaggaatgaagagggtccta

SEQ ID NO: 125829 - DNA, 122 bp, Homo sapiens
gccccctggtatttgtggcaggatgtttctggcaccgtctgttgagagcccctggcctgtcgttgcaggaagccaggctttgtgataatgaccgctactcctgactgagcactgccgtgtgc

SEQ ID NO: 125830 - DNA, 122 bp, Homo sapiens
gcatgccgaacacccacatgcacacagttggtggctcagtctgatgtacctgacttctcacgccttcccccagtcctccagtaccgtgcctctacatgggctgggcagccccaaactgaaat

SEQ ID NO: 125831 - DNA, 122 bp, Homo sapiens
tgaaaaaattcaccttaatatatgtattctaatgtcagactaaccaatcagatttgcttccgaagcaccacttcttcttttggaacatatcatctgtaaaatatcatgttgacttcggctga

SEQ ID NO: 125832 - DNA, 122 bp, Homo sapiens
ggattcggacgcggggggcggagccgggacagggattgactctggggtttgcactcagtgcgcgctttggcggaggggtaggccaggatctctaggctggaagagactggatgaggggtgtt

SEQ ID NO: 125833 - DNA, 122 bp, Homo sapiens
aaaaggctctcccgtcaagtcagcggagctgcccaggagagcggaggctttccggaatcccggctccaccacgaacttcaaggcgccagcgtcccaccgcgagtcctgacacgagggctgcc

SEQ ID NO: 125834 - DNA, 122 bp, Homo sapiens
gtgtggttgagaccagagaccatgaggttaatgagatcttattttatttccacaaatctgcgatcattgtactctatttggagagcccaatatcagctccagacactgctacacctagaatt

SEQ ID NO: 125835 - DNA, 122 bp, Homo sapiens
ctgctgctgctgctgctactgctcggggtgcccccgcgaagcctggcgctgccgcccatccgctattcccacgccggcatctgccccaacgacatgaatcccaacctctgggtggacgcaca

SEQ ID NO: 125836 - DNA, 122 bp, Homo sapiens
cgtggctgtcactggccctgtaatcgacagccctgactgcgtgcccttccgtgacccagccgagtgcccacaggcccagctcactgacaatgccaaccagctgctgctggtgagcagccgcg

SEQ ID NO: 125837 - DNA, 122 bp, Homo sapiens
aatacagctagtcaccagctacaggacagctggagccagggggctattgctggtcacagtcgctggtgtgtgtgtgtgtggtgtgtctgagtgtgtgtgagggcggtcaggtagcctttggg

SEQ ID NO: 125838 - DNA, 122 bp, Homo sapiens
gggggcgtgcgcatgtgtgcgggtgtgcctgtgtgtctgcagctcacaccgcgggggtgccgggaggaggggggctgcccgatccttgggagtctgcggctttcagacgctcctgggggctc

SEQ ID NO: 125839 - DNA, 122 bp, Homo sapiens
aacccacccaggcaggacctcatgaagcagaggacagcatgcaggtagcgctggcctggccgggccctcaggaagcgacctggctctcctagccccaccggtctgtgtcccttggaaatcaa

SEQ ID NO: 125840 - DNA, 122 bp, Homo sapiens
ggaggaggcggctggggccggggagcggagttgcagctacttctctgcccgcgggagacgcggcgcaccggagtctgcgcgggtgggagcggctccggggcggtcccgccacgggacccacg

SEQ ID NO: 125841 - DNA, 122 bp, Homo sapiens
gtgctgtgtgcattcctcatgccgctgctgtccctggcaggtgacagttcaggggcacctcgcgctgtgggtgagttctcgagtgctgcggggagtgtagggaaggccggtggtgcggtatc

SEQ ID NO: 125842 - DNA, 122 bp, Homo sapiens
gtattgtgcttagcacagtccctggcacataatagatgctcagttaaaggccactgtcgtcgatctcagtgagcccccagctatttccacagtcttctggctgatacaacagcagccccagc

SEQ ID NO: 125843 - DNA, 122 bp, Homo sapiens
ggggctcacactcggacgatcagccagccgcccgggcgccccgacggccagggacggagacggggcggagacccccactgaccccggccgctgcttcttgcctcccgtccccagaccccacc

SEQ ID NO: 125844 - DNA, 122 bp, Homo sapiens
tccgggtaggaccgcgtgatcgcgcacgtgaccgcccgccccgggaggggccggagccgccgtcgccttccgcgggttcgagccccgcccctgccaggccttgcccatgccccattttacag

SEQ ID NO: 125845 - DNA, 122 bp, Homo sapiens
gattagcctggaatcccgacctaaagcaaaggaaatcacaagtatgaaggcgtcgtcagtcggataaacactagtactctgcatgtgtaaagccactctcgtctcctgaaaaaaggccatgt

SEQ ID NO: 125846 - DNA, 122 bp, Homo sapiens
ccattggcctgccctcgtcagcgtcaatcttgcagtctcagcagctggcctgggtttcagcgggagccatcctgtagctgcaggtttgctggcaggcagagggttgggctggcgggggacac

SEQ ID NO: 125847 - DNA, 122 bp, Homo sapiens
cgtcaaaggtgattcactgaaggggagacctggatgaccgggttcgacagcccttcattgcgttttaatttaaatgaacaattcgtaagcaatgatcgcctggtgctgtccagaccctgaga

SEQ ID NO: 125848 - DNA, 122 bp, Homo sapiens
cgactacgtcagttggccggtctgtttgggagagccaggcgactaatctggtatagagaccgaaaaacacaggtaaaaagacctaaaagacttagtcatctattggaacatttccccagttt

SEQ ID NO: 125849 - DNA, 122 bp, Homo sapiens
gtaccagctcagctgctgcttctgtgaaatgagaattataatgcgaaccataccggagaccgggtaggttttctaagagtccctcgggctttgctgtgaggaagaagaggcatgagaaggta

SEQ ID NO: 125850 - DNA, 122 bp, Homo sapiens
ttcccaactaagagaagtaacttagttatggtagatcttaggagattattaaatgactttcgttgcaagtttatgttccctcaagtctcaaaaataaagactagactaggggaggccaaatg

SEQ ID NO: 125851 - DNA, 122 bp, Homo sapiens
caccctcgtggagagctttgaacttttatccggaaaggtgccgggcacgtagtcagcgcccgcgatcactcgctcacaagggttcttccgagacccctcttcagcctcttccccgaaccccc

SEQ ID NO: 125852 - DNA, 122 bp, Homo sapiens
ggaggtggtgggagggggcgtagcgcaagcagtgcctgcctgcggcgccagggtgcagagcgggcacagtcgcgggacagtttgtttgtttatttgggaagcgggagccaggtgaaactgtt

SEQ ID NO: 125853 - DNA, 122 bp, Homo sapiens
gggcggcgcggcctcgggtggcgcggcggggccgtagaagcggtggtattcccgtggggccgcccactcgcccgcatgcaggctcccgggccggctgcggaagctgtgggcctggactgggg

SEQ ID NO: 125854 - DNA, 122 bp, Homo sapiens
tcagggctcggcgtgtgaggcggagactctcctggggagcctgcggtgccccgcggggagcggcgtcccccttcagctgccccggggcttgggcggggcgcgcccgggaggcccagcggccc

SEQ ID NO: 125855 - DNA, 122 bp, Homo sapiens
cacccttcacactggccacacccccgcgggggctccggcttcacctgcccaggagcggcacgctcagagaagtctctgggattttctgggcaatgaggaacaagaagacggtctgggcgagc

SEQ ID NO: 125856 - DNA, 122 bp, Homo sapiens
tcccgagccaagcctccaaagttcgaaggcgctcacagtccgacagcttctgacgcctcgcgccagggtttcccgaaggtcccgcgctggggaaccctcggaactacacttcccggcaggct

SEQ ID NO: 125857 - DNA, 122 bp, Homo sapiens
aggctgaggcaggagaatcgcttttgcccggccagtgtgctcccgaagccggctgagggccgcagctctgccgggatcaggcttcacggtggcgcggccgctgtcccggatgctgcgccggc

SEQ ID NO: 125858 - DNA, 122 bp, Homo sapiens
gtgtaaggccaaggcagggcgagcgggcgtggggcgcggggccggggcttacctgctccccgaagtcgatggctatgttggtgatgcccaggggcaccaagaaccggatcaggggccagtag

SEQ ID NO: 125859 - DNA, 122 bp, Homo sapiens
aaaaccagaccaccgcccaggagggcagttgaagcttcactggcccagggcgatttgccccgtctgagggtgacatttgggcagacacctttaggaacgagggaggaggcctcttggatatt

SEQ ID NO: 125860 - DNA, 122 bp, Homo sapiens
cacccactgctataaaagatgcaggggggcccagggcctgatcgtcaccgactgatatcccgactggagtcccacaacttgttgggcggctcagcccgaaggcgggcgaagaaaggatgctg

SEQ ID NO: 125861 - DNA, 122 bp, Homo sapiens
gcggacggcctccggaggacagccccgctccacagccgctcccccttccccacccgcccccggtgatcctctcagccccgcgtggtccgcccacctgcttcccgggtcctaccccaccccct

SEQ ID NO: 125862 - DNA, 122 bp, Homo sapiens
ccattaaccagcctgtgattcgcctagcgccagctccctgttctgagggcaccagaaaagcgggagaaccaaagacagctctaaaaaggtcagtattacaaaagagtaccaaaattgtcatc

SEQ ID NO: 125863 - DNA, 122 bp, Homo sapiens
tgcagccattagtcatgtaaggttatttcagtttaaattgtaaccaattaaaacgaatcacgtcctggttgcactcgcctcacctgagtgcttggcccctgtggctagtggctgctgcaccg

SEQ ID NO: 125864 - DNA, 122 bp, Homo sapiens
ggcgcagtgaagacaagaaaggggcactattttaacacaaccttttcccgtgatcaccaccgaaaattactgacgagtcaatcacctcagatctctcaagcagtccagcctacgcaacagta

SEQ ID NO: 125865 - DNA, 122 bp, Homo sapiens
gagaaagttagctctctggcttgggccacctgggctagggagagcggcctaggggcaagccgcccacagtgaagctgtgtctccctgtctcaatttccattccccaggaggctcacatttct

SEQ ID NO: 125866 - DNA, 122 bp, Homo sapiens
gaggagagcacggcgctgctggagctggtgcaggatatgcaggagagcatcaacatggagcgcgtggtcttcaaggtcctgcggcgcctctgcaccctcctgcaggccgaccgctgcagcct

SEQ ID NO: 125867 - DNA, 122 bp, Homo sapiens
tcaaggcatgctcctctcctaagctccccaaagtgtaatttgcctgttcccttgctgactcgagggactaggtttgtcctggtgacacccagtagccagcacagagttgtaggagggaggga

SEQ ID NO: 125868 - DNA, 122 bp, Homo sapiens
ggggacccaaagtccccccaccgggcccaggcggaagcaccaggcatttctggtcccagccgaggtctgaggtctgtggagcgcagccagcacctccactgccaagatccccggcagggggg

SEQ ID NO: 125869 - DNA, 122 bp, Homo sapiens
gccgcctagaattgactggtttggactaaatgttgcaagcggggaaccttgagctacctacgccagcgttctggattattttccaaatttggttcctgataatctgagaaagctatgcgctc

SEQ ID NO: 125870 - DNA, 122 bp, Homo sapiens
cccccagctccgcgttgagagctgaacgcgaagggccggatgtggggatcctgggaagagcgttccctgggattccctttctcactctagcgaggaggacttgcacacgttctggaacactt

SEQ ID NO: 125871 - DNA, 122 bp, Homo sapiens
cgacaggaggacgcccctgggtgaactgaactggatcttcacagccatcacagacaccatcgcgtggaacgtgctcccccggggtgaggcgcgggccgggccttggggagggaggctatggc

SEQ ID NO: 125872 - DNA, 122 bp, Homo sapiens
cccttaagtcatttccaccatcctcaggcagctgtgggaagccgagagtcctggactgttcgtccgggtgccagcgctggcagtcccagtccgtccggtgcagcagcccggcgcattcccct

SEQ ID NO: 125873 - DNA, 122 bp, Homo sapiens
ggggcagtgggtgcaaggagtttggtttgtgtctgccggccggcaggcaaacgcaacccacgcggtgggggaggcggctagcgtggtggacccgggccgcgtggccctgtggcagccgagcc

SEQ ID NO: 125874 - DNA, 122 bp, Homo sapiens
tacaggccgacgggaaacggctcagagaaaaccaccgccaccagacggccacctacaggccgacaggaaacggctcagagaaaaccaacgccaccagacggccacctacaggccgacaggaa

SEQ ID NO: 125875 - DNA, 122 bp, Homo sapiens
atccttcttcacgaagcgctcactcgcaccctttctctctctctctctctctctctaacacgcacgcacactcccagttgttcacactcgggtcctctccagcccgacgttctcctggcacc

SEQ ID NO: 125876 - DNA, 122 bp, Homo sapiens
tgcacgtcgccctgggagtcgttcccgggcccctctgcagacacagccttcaggtgtgagcggtgtgtgcgccggccgggggcgtctcttacaggaagtttatatttgcaaactgggcggtg

SEQ ID NO: 125877 - DNA, 122 bp, Homo sapiens
tgctggcttattgatataaaatcctgctgtgggcttaaagagaccagcaagcatgcattgcgttgcgtgttgaactgtagtaagttagaggcaagaaagaataaacaaatcagggctgtgaa

SEQ ID NO: 125878 - DNA, 122 bp, Homo sapiens
agcgcgcggctgacccagctgctccggctcctgcccggggtaaccacggtaaccgcgggccgccaggaatgcgcgctaattgaaggccgagtttcctcccacagtgatgagcaacaagtgaa

SEQ ID NO: 125879 - DNA, 122 bp, Homo sapiens
aaagggacccgcccggcaaccgaaggtgcaaagcccaacctggcgttccgaggggccctgcgtggcgtcaggggagacccaacccgcgtcccgaacccacctcaaccttgggaaggacccag

SEQ ID NO: 125880 - DNA, 122 bp, Homo sapiens
ccagccttctgaacgaggagctggacaggatccctggaaggggccccggggtctctgagtcgcgctcagcgggtgcttgtgctctctgcccagctgtgctgaagtcccgagggacatgtccg

SEQ ID NO: 125881 - DNA, 122 bp, Homo sapiens
cagcgtgccgctcagttccccgaatccgtgtgcacacgtgtgatctcgtcttcagtgtgccgctcagttccctgaatccgtgtgcacactgcgtatgtgtacgcgcagcatgctatactgaa

SEQ ID NO: 125882 - DNA, 122 bp, Homo sapiens
cttcttcttgaccaactcctatattggtaaaaacatgttagagaaatgcaccttctgaatcgtttcaaatttgtggtctttgttagagaagataagctggtgccctgggagacgtagctatt

SEQ ID NO: 125883 - DNA, 122 bp, Homo sapiens
gaggggctgtgagggcaaggctggccaggctagttgtcccgatttactatttgatactgacgccccactcaccccctccactccgggccatgacacaaacaccaggctttgccctccctgct

SEQ ID NO: 125884 - DNA, 122 bp, Homo sapiens
gatgcccccaacggagacctcacgcccgagatgatcctcagcatgatggaccggtgatggcggagccttgtgcgtcgccaggacttctctgggctgtgtttaaacggcccgcatcttaattt

SEQ ID NO: 125885 - DNA, 122 bp, Homo sapiens
gctgggaagggagctcagaaggggccggagccgcgcggccccctgagcgttctcggtaaacgctcggggtccccactccaagcccggccttccgcatgccgcttcctcggctacccttgaga

SEQ ID NO: 125886 - DNA, 122 bp, Homo sapiens
cagcgagtatagacagcccttctggataggggcagacgggtgggagctccgaaggggtgccggggcggtgatcgggaggtctccagcggcccgaaccagggtgaagaagaaggtggagtctg

SEQ ID NO: 125887 - DNA, 122 bp, Homo sapiens
tattcttacttgaatggatatgaattgaactccagtttttcactggtgtcttttgttaatcgagatccttccctgggtgagttatgttgtgggatattgtccctgtaattaaaatgatgcat

SEQ ID NO: 125888 - DNA, 122 bp, Homo sapiens
ccaatcccaccaacgtcttcaggctcactctgagccccgcgctgtggttctgctgaggtccgggctgtgccccgtaccggacagggccctggctttagcagaattaaagcttggaactgtcc

SEQ ID NO: 125889 - DNA, 122 bp, Homo sapiens
aacatcaaaaaaccagtgttggagcaagaatatgtcatgctgtggccctccagagggaagcgctttctgttgtctgaaagaaaacaaagcgctcccctttagaggtttacggtttgagtaaa

SEQ ID NO: 125890 - DNA, 122 bp, Homo sapiens
tagcgccgggccggccagctccagcaccagcacagtgcggcttctggaatggacagaggccgcggccccgcccccagggggcggcctgcgggtcagtgtctgtggggattggctaagcctcg

SEQ ID NO: 125891 - DNA, 122 bp, Homo sapiens
tcgccccggctgcttggcttctccctgtgcccctggtgtccatggacagggtcccctgtccggttccactgtgccgtggtggtgctgggcctctgaggcgagccggatggacggacggcatc

SEQ ID NO: 125892 - DNA, 122 bp, Homo sapiens
ggaagacagcggcagcagtgaggtaaaacacgattacttccaactgccttgcggaggaggcgcagtcgtgcggtgtgacttggacagcttgctgctctctgatggcacgcggagggagaata

SEQ ID NO: 125893 - DNA, 122 bp, Homo sapiens
ctaaaaagaccaacaagccctccatcagtatttatatgtattaagtgaaaacgtactccacgaaatgaagactaagttgggagcctagtgtcatcagcatagtccccattaacagcttatag

SEQ ID NO: 125894 - DNA, 122 bp, Homo sapiens
aatccactttaaaatcaaagaagtgtaaaaagtaaaagtaggggaaaaactacagaaaggcggggcacaaaaaacgattgcatggagagcagaggacttattatccctacctaatgtcattc

SEQ ID NO: 125895 - DNA, 122 bp, Homo sapiens
ttccttcagagttttactgtgtttgggacagaaatcattcctcttccctcctcatgttttcggggggtttgtttttttgttcgaggcagaaagtcttgctctatcacccaggctggaatgaa

SEQ ID NO: 125896 - DNA, 122 bp, Homo sapiens
tcttcctcactctctctaatgttgggacaagaccggctcctgatttccctgctgtgctcccgagtctgggtcacacacaacttggagccgtgaaagagctgccgtccgcgggcattaaccct

SEQ ID NO: 125897 - DNA, 122 bp, Homo sapiens
cccgcgggcgccgccgccggggctccgactgctgacgccgcctcccgcggagctccgggccgaatcgcctgggctgggcctcccgagagccacagtcatcttcagtccgcgggctaagttgc

SEQ ID NO: 125898 - DNA, 122 bp, Homo sapiens
gacgtcgtgtctctcctcctggggtaccgtggcctgtgccggggatagcagtcacacgggcgggtggccaggatgccccctggggctcctggcccagtccctgcctgctaccggcccaccca

SEQ ID NO: 125899 - DNA, 122 bp, Homo sapiens
cagacggggcggctgggcagaggcgctcctcacttctcagacggggcggccgggcagaggcgctcctgacttcccagacgatgggcagccagtcagaggtgctcctcacttcctagacgggg

SEQ ID NO: 125900 - DNA, 122 bp, Homo sapiens
ccgccgcctccgccccgccgcctccgccccgccacggccactcaccggagggttcggccgcgcggttcaggatccctcccgcactaaatgacgaacgtcgtcggccgccccgcccgccctgc

SEQ ID NO: 125901 - DNA, 122 bp, Homo sapiens
gcccccttcgctgtgccccgcccacgcactaactttcgcggccggtcccttgagtgcgtgcggcatatttccctgcgcggaggagtgcgtgttctttctgatccgctctttcaagagcggat

SEQ ID NO: 125902 - DNA, 122 bp, Homo sapiens
agggatgggaagcccagaagcccagggcaagggactgggcagtggagatggaaatggaggcggtggatatcagaggaggggtcaagcagacagatgcagatttctgagcacagagaaacctg

SEQ ID NO: 125903 - DNA, 122 bp, Homo sapiens
gaaaccgagaggcaggtcctgggtgcgccggcggtacagcggagagcgtggagagaccctcgccgcagccatttcctgccctttgtgtgacagccgctgcggcgaaggggcgggcgctgggt

SEQ ID NO: 125904 - DNA, 122 bp, Homo sapiens
gggggctcgaaattagatcagatcaggaaggctggcgttttccctgaggctctcgactaacgaccaaggggaagagaggcacttggcctaacgcccctcctcactctgccctaccagtcaca

SEQ ID NO: 125905 - DNA, 122 bp, Homo sapiens
taggaggggcaagggagtccctcagacggagtggagagcggggcttccctggtcagagggcggtaccaggggaagggcgtggtctcctgcgaaggggcggagctccgcctacgaaggctgag

SEQ ID NO: 125906 - DNA, 122 bp, Homo sapiens
tattgaagcgcagggagacaaaacgtccacctctagagccgaggcggcggttgcctgtcgcgtgcccgtggtcttctgcctgcccccggacatctcgggccacgtccggcccggcctccggc

SEQ ID NO: 125907 - DNA, 122 bp, Homo sapiens
tttgtacgaggaggaggaaaccttccatgtccttctgagcatgcccatggggggaagaatcggatcagagttcccaggggctcaagttacaatcgttcctgacaaagatgatggtgagtact

SEQ ID NO: 125908 - DNA, 122 bp, Homo sapiens
cgggctctggtggagggtgtttaccaccaggccccacgccctgggtcttgccctctggaacggcagcaggcgcgctcccggcgaatctgcctgaatcgccgtgaatgcggtggggtgcaggg

SEQ ID NO: 125909 - DNA, 122 bp, Homo sapiens
aaggactcgggagtggtgagtgccaggggaccctgccctaaggaatggaggccaagtgaacggggcctaggaccttgcccccaggctcgttccagccactcctgcccctttgggtggaatgg

SEQ ID NO: 125910 - DNA, 122 bp, Homo sapiens
aaaaagtaatatagttataggcagaagttccctttcttttattctgaggttgaaagaaaccgcagcccgataggattgcaagaggaacccttaaggaatctgctccttgatgggcgctagga

SEQ ID NO: 125911 - DNA, 122 bp, Homo sapiens
ccgctacctggactgcgctcgcggcgacgtgtccaagtttcccccctcagagccccaggccgagaatcccgggtatctgcgcaaagctcccgcgcctcgcccaccctactcttcctatcttt

SEQ ID NO: 125912 - DNA, 122 bp, Homo sapiens
ctgtttaaatattggcagttgacgacttaactcagttaaccgtaaagatgaaaaacctcccgggtgagtacaaaaggagcaggagtcagagtgcctggctgcacagctggggccaagcctct

SEQ ID NO: 125913 - DNA, 122 bp, Homo sapiens
gacacctggacacacacactcagatacagacacacgcagcaccctcatagaaacacacaacggaaccggggtgcacctggacacacagatgtggactcttaggtcagatctgggatcaagaa

SEQ ID NO: 125914 - DNA, 122 bp, Homo sapiens
gtggaggcagccaatcaatgagccagtggactttcacatgaacaaggggcgtgaccaggccggaagcaagggtgagagtttgtttaggaaaagtaccagacctgctagtgcagggatgcagg

SEQ ID NO: 125915 - DNA, 122 bp, Homo sapiens
gcgcggctagggcggttttctttcgcgtcgaccaaacgtgggccaatggaaaaccggaagcgtcctgtgagtgatgtaatgacagcccaatggaagctgggggcgggcctcagacacactat

SEQ ID NO: 125916 - DNA, 122 bp, Homo sapiens
ctcccctcctctacgagagaggagttatcccataacctcgtggtcccccattttctgtgacgaggaaagtcagtctatagttcagcgagcagcccctcatttatctggaaaagtcagctgtt

SEQ ID NO: 125917 - DNA, 122 bp, Homo sapiens
tattaccttgaaccacccaaatttgaccagtaggttgaaaagaagtatggctgcattctgcgcttcctctctgacactctagcacagggcattgaggtataagagaatatcaatattggcac

SEQ ID NO: 125918 - DNA, 122 bp, Homo sapiens
tgtgcgcgcccatccggcgtgaacggcgtgcagaacaggaatgtgcgaagcccatagttgcggtcaaagtaggtcacccggtccttgagctcgtaggtatcaaagtacggttccacatacgt

SEQ ID NO: 125919 - DNA, 122 bp, Homo sapiens
ttaggcgggcgtacacgttcggatttgtcacaggccacctaactctattggtctcacacacgtgtgccacctgtctgacccctgggaaacagagtttgcaaggttttcccgttgactactcg

SEQ ID NO: 125920 - DNA, 122 bp, Homo sapiens
aaggtggcgacgacagcaccacacagttatcttccacttacctacttgtcaatggacaggcggaagccccgcctctctttccacaaccggaccccaaatctcagccccagtagtgagcccgc

SEQ ID NO: 125921 - DNA, 122 bp, Homo sapiens
caacataggagatgtccagctggagaagccgtgacacccctactcctgccaggctgcccccgcctgctgtgcacccagctccagtgtctcagctcacttccctgggacattctcctttcagc

SEQ ID NO: 125922 - DNA, 122 bp, Homo sapiens
accagggaagtcaccatcactcatctatctgctcagcatggtatgagaggtttttattaacggagaaaaagtcttgaagttggacaaagaataggcaatggcaccactatgtacaaaagatg

SEQ ID NO: 125923 - DNA, 122 bp, Homo sapiens
tggttctggagaccagagaactgcgaggaggaagaggaggctgtgggctggacctaggcccgggtctggcacctgcccctggagtccacccagctccggcaccactggcccctgggagctct

SEQ ID NO: 125924 - DNA, 122 bp, Homo sapiens
tgggggcccagtgatgaacaagagaaaccacactcctcgtggggtttgcagtactgcagtcggagagtcagattctaaaccaatcatcgtataaatactgaagaatttaaactgtgtttaga

SEQ ID NO: 125925 - DNA, 122 bp, Homo sapiens
gtaatagacattccataaagggatagaatgatgtcaaagaacatttgtccattggcttctcgaatcgtttattcagtcaaacaaatgtttattgagcaactgttatatgccaggcactgtgt

SEQ ID NO: 125926 - DNA, 122 bp, Homo sapiens
aggctggggtccaggacaccgtagcactggaagcactcaaggccctggcctgggatggggcggggagggtgcaggtcagggtcgcaggctgaagggtgggttccagtccctctcaccagcac

SEQ ID NO: 125927 - DNA, 122 bp, Homo sapiens
attatggcttttaaatagaaaaaacatgctcccataaactggtagagattatttcaatcacggacaagacttttgaaagagtcactaattagtcactaggttttctttagcacaaaaggagc

SEQ ID NO: 125928 - DNA, 122 bp, Homo sapiens
gcagtcttctacattttgcaatgagggctgtttgccttggagtcattatttctaaggagacgctgctgtgcttgtgcctgtgttcggcagcatgccatttggggctttgaaacaaaatgaat

SEQ ID NO: 125929 - DNA, 122 bp, Homo sapiens
aggatgtaccgctctccgtggtgctgaagtatagagctggtcaagtgagttaagttgcaacgatgtgaaagcgcgctcctctgttctttgtgttgcagtggtaaaaactcgccttccgaggc

SEQ ID NO: 125930 - DNA, 122 bp, Homo sapiens
tcttgacccccccgccagagaaggaggaccctcccgcgccctttcggagcgtcggtggcccggctccggctctgcgctccatcctcccagccagcaggtgcccccagacccccggctcctcc

SEQ ID NO: 125931 - DNA, 122 bp, Homo sapiens
ccgtttggttcattgacttgcaaataaaacccctaacacaggtctgggctactaccaagtcggagctctctggctttctcacatggggaagccgagttgtttccccaacaccatgatggggc

SEQ ID NO: 125932 - DNA, 122 bp, Homo sapiens
cctctggtaaccacggttccactctctgctcctatgagttcagctgtttcagatgccacccgtgagagggaccatgtggcctctatctgtgtgcgccgggctcatcctgctttgcagtttct

SEQ ID NO: 125933 - DNA, 122 bp, Homo sapiens
tgggtggccagtgcagccacaggccctcacatacggtcctgtctgtgtgtcccgtggaagcgctacgtggatggtggcatttcagacaacctgccactctatgagcttaagaacaccatcac

SEQ ID NO: 125934 - DNA, 122 bp, Homo sapiens
atgaagatcgtcaacctcctcaacgacctctacaccagatttgacacactgactgattcccggaaaaacccatttgtttataaggcaagtgttctttatcgctgactgcagagctatccaga

SEQ ID NO: 125935 - DNA, 122 bp, Homo sapiens
cttggtcttgaggttgtgaaaaccatccgagtcactgccaccacctgaaggggccatgcacgacagagatcccagagcaggccacctgccaagctcataggcctgtggagaccccggttctt

SEQ ID NO: 125936 - DNA, 122 bp, Homo sapiens
gggacccctggatgtgtttcctgctaccgtatcccaaatgccgaagcgcctcgtacataacgagaacacagtaaatacccgctgaatggatcaacaacggtgaagggaacgattctctgaat

SEQ ID NO: 125937 - DNA, 122 bp, Homo sapiens
gggccggcagccgggcccgtgagaatcagcgcgaggcgctttgaaaacgactagaaatggcgcgcgcgccaccccctcccccccctgatggactgagacgcgatcccggcagcacgcggggt

SEQ ID NO: 125938 - DNA, 122 bp, Homo sapiens
caagacccgtcctggtacttgccgagccacggaccgcggcggctaccgcccggcctccctcgaccaccctccgcagcagcatcgcccgcggacgggatccggcaacccctgaccgtgagcgg

SEQ ID NO: 125939 - DNA, 122 bp, Homo sapiens
gcacaccaagtttttgggcctttcctcttaacctcaaagtgctcttttcttgaacctaaacgagaatgaatgaatcaaaaggaaaatgacaaggaagctgcggggcgtgcatttatttccag

SEQ ID NO: 125940 - DNA, 122 bp, Homo sapiens
aggcgtggtcgccggcgcgcatgcgcaggctgcgcggcccgtcgtccccgccacgccccgcggggcgggtttactagagggcggtaccctgctcccgccagtccctttacccctcgtgcgcc

SEQ ID NO: 125941 - DNA, 122 bp, Homo sapiens
cttcctatcttacttctccatcagctgctgaaatgcattttcccctctcctcacaaatgccgttgtcctggggcggccgtgcccataccttcattgcttcctgggcctgctctgtggctata

SEQ ID NO: 125942 - DNA, 122 bp, Homo sapiens
aagctggcactttcttactcttctctcagtaacccaagattgaaattttatggttaatatcgatttttctttcatcatttctcctcactataagctttcaaagtgtttgtgattctttcttc

SEQ ID NO: 125943 - DNA, 122 bp, Homo sapiens
tccttatcccacttctttttgtgtctattagatgctcagagtgtgtgcacaaggctggcacgcccagggtcttcctcatggcactaacagtctactgaaaggtggaacagagacaagcctat

SEQ ID NO: 125944 - DNA, 122 bp, Homo sapiens
ttcatctcactagggagtgccagacagtgggtgcaggtaagtgggtgcgcgcaccatgtgcgagctgaagcagggccaggcattgcctcacctgggaagcgcaaggggtcagggagttccct

SEQ ID NO: 125945 - DNA, 122 bp, Homo sapiens
ccctcgtcctgggcgccggctgggctctggttctgagtgttgctggtccctggtcctgggcgccggctgggctctggttctgagtgttgctgggccctcgtcctgggcgccggctgggctct

SEQ ID NO: 125946 - DNA, 122 bp, Homo sapiens
ccaagtgagttgtcaaggaaccaaatggggatgtaaacctaaaaggggttcccggcacctcggtttgtgttggttggaggtgatcgcacacttggcccttggttacgtcctcataaccttag

SEQ ID NO: 125947 - DNA, 122 bp, Homo sapiens
ttcccttctctattcctgcatagccctcctcccccgaatcagcaacaatttttgctccaccgttttctttcgggaaccagatgcgttttcagaagacagtactccagtgataaggtatctac

SEQ ID NO: 125948 - DNA, 122 bp, Homo sapiens
atagctaactgactgcagtgttgaactcctgggctcaagtgatcctcccaccccagcctccggagcagctgggactatgggtgcacactaccacaccagctaaagtgttggtttcttttttc

SEQ ID NO: 125949 - DNA, 122 bp, Homo sapiens
ccccactctttttgtcttgctctgaggatgccaggactttaaggacattgtcagcgagcacgtaagttcacccctgcaaggtcaaaggcaggacagaaagaagacccaaaggtcccagttag

SEQ ID NO: 125950 - DNA, 122 bp, Homo sapiens
ctcgatgtctatttggcttttctgtaaaatatcctctctgggtgttgagctgtggacagacgaaatccaggcctgttcacagggcagtcacagtgatcactcaggatcagtgagatgcttag

SEQ ID NO: 125951 - DNA, 122 bp, Homo sapiens
aataacgatgagtgacacccccgcaggttttccgggactccgtgggatccgcggcttacacggcttgccaggcaccaagggctttccaggatccccaggtactctgtgccgtcccagccccg

SEQ ID NO: 125952 - DNA, 122 bp, Homo sapiens
ttcggctgaattcatcgcgttcctgcatgctgtccccagcagggtctcccttgcaggccacggcctctggctctggacagctttcctggttttcctgcaggtcctcaacctggccctcgtgt

SEQ ID NO: 125953 - DNA, 122 bp, Homo sapiens
aggtaaaagagaggatgctacctagtggagttattcttgcagccccactcatgttgacagcgagcacattcatgaagatataaaagccagtccttcatgtttatattgcccaacaattagat

SEQ ID NO: 125954 - DNA, 122 bp, Homo sapiens
ctgccatccgcccgacccaaagccccccgccagctcccccaccccaccacctcggcccagcgccccgtgcactttaaatgtctgccctgccagcagccccgggcctggctcccgggtgcgca

SEQ ID NO: 125955 - DNA, 122 bp, Homo sapiens
cctccctttcaccatgtccctcaccgccttggacactgggggtccttttctctgagtctccgtggctactcctcttccttcgttagatctcctaatatggatctctgacttgctctttataa

SEQ ID NO: 125956 - DNA, 122 bp, Homo sapiens
accccagcccaggaggtttcactggaagagaggctgggcttgagtgagaagtgagacacacgcgagtttccggtgaactcggcaccaaacacctcagtttgctgctcagatgaggtgtcaga

SEQ ID NO: 125957 - DNA, 122 bp, Homo sapiens
cagtgctgcctcagcccaatcctgattctccgtgtggcagcgccttcttgtgttctaggtcgccccacagaaccagttatgtgcttacgcctgtgtctctgtctgtgctgttcccttcctgg

SEQ ID NO: 125958 - DNA, 122 bp, Homo sapiens
gcatccaggtggtggggggatgcagggatgctgtcaggtggcctgcagtgtacaggtcagcgcccccatgcaaagaaccacccggcccaaaatgtctatggcactgaggttgagaaactctg

SEQ ID NO: 125959 - DNA, 122 bp, Homo sapiens
ataagctttggtatgttatgtttccattgtcaattgtctgaaaatattttttaaatttcccgtttgatttcatctttgacccactggttgtttcgaagcataggactgggtatggtggctca

SEQ ID NO: 125960 - DNA, 122 bp, Homo sapiens
tgacagtcgtttcgaaaatgcacggaaatgagggcggagacccgagagatttgaaaaagccgggctgaaacagcgtggtattggtccccgcctccccagtcgcgccccagtgctgcgctgtc

SEQ ID NO: 125961 - DNA, 122 bp, Homo sapiens
cacgaccaaagccctgctaattctgttcattccaggtgccctcctggtcctctctgtctccggcttctagaggccatcccaccctcaaacatcctctctctttggacaaaccccctggccac

SEQ ID NO: 125962 - DNA, 122 bp, Homo sapiens
tagcagcacaagcgatatttcttttctgatttgtgcatgcaatctttcccctacttttcacggttgcacttctttgtttacagaagagattctggtcatttccacccctgccactccactct

SEQ ID NO: 125963 - DNA, 122 bp, Homo sapiens
tgggcaggccccgggccgcatgcggaccctagaggcaaccagcgggctggatccgcacagcggccctggggaatggatcgtgtacaggggacaaagctacacatgtctttcattttggaggg

SEQ ID NO: 125964 - DNA, 122 bp, Homo sapiens
aatcccttcctcctctcccctttacccccttccttcactccctagaccaagctggtcacccggctgggaatcaagattgtgtggctgggaagacaccagtctctgtgctcgggttcagccca

SEQ ID NO: 125965 - DNA, 122 bp, Homo sapiens
gcctgcgcaggtctcaggagtccgcgtcaaatccctgtattttcgagaactcgatttttccgcgaatcaatgtctgctttttggataccgtagatcagggtgtaaagattgagtgtgatgac

SEQ ID NO: 125966 - DNA, 122 bp, Homo sapiens
ggaaggcccgggaaatggaagagcaacctctcccggctgggcacccagcaccgagcaggtcggggcgccgggtcagccgctcccctcccccgccgtaacccgacccgctgctccccgccccg

SEQ ID NO: 125967 - DNA, 122 bp, Homo sapiens
tgcacacacacacccatgcacatttcatacagacacagacctggggagatgataaaactgcgtgtaccactaataagactcaaatatgtgcacatcctgtgctcataggtactcgctcatag

SEQ ID NO: 125968 - DNA, 122 bp, Homo sapiens
cggcgcccaccccacaatggcactgtcacatccacaggtctccgagttcatgtctcacggcgcccaccccacgacggctctctcacatccacaggtctccgagttcacgtcccacggcgccc

SEQ ID NO: 125969 - DNA, 122 bp, Homo sapiens
cccgaccgcgcttgttcccgtgaaaccccgagcattgggccgccgcctagacggctcccgcggctttgtactcactctgccctcgaagttgttttcctccacatcactcatgtcgacgaggc

SEQ ID NO: 125970 - DNA, 122 bp, Homo sapiens
ttgagctttcaggcaccgtctacaaacggggtttaaaatgagctagcgccatctactgggcgaatgccgtaaggtcggttgtgaggtcccggaatctgcaaaggaatgaatgaattacaaat

SEQ ID NO: 125971 - DNA, 122 bp, Homo sapiens
cctctggggatacccaatgttgacatctggtgggtgtctctctggtggctcttttctgaccgccatgaatgccagtgttggcttgcccccctgccgctgtttagggagtgccaggcctcagg

SEQ ID NO: 125972 - DNA, 122 bp, Homo sapiens
tctcgtcctccctgagcccccaaaattcaccatcgtatgtatgtcttcaaactgactaaccggtaagcccaacttttcagctgaaaaacagtgacagatggtctgtaaacactgaacttctt

SEQ ID NO: 125973 - DNA, 122 bp, Homo sapiens
tcccccgcagggcagcagccggctcgcccgcgcagggggtccctgctgagtcacgcgcagcggctcagcccggaggtgccctcgcctgcccgccgcccacccgctccccgccgattggcgag

SEQ ID NO: 125974 - DNA, 122 bp, Homo sapiens
tggggacaaaccctgccccaggccgggagggaggagggagcaggagggtccagcccacgccgctggccacatcagagcaccaagagaacaccaactgtttattacaggaattcctatgaaac

SEQ ID NO: 125975 - DNA, 122 bp, Homo sapiens
tggcattaggccgcgtgccgcaggccagctctcaccgctgggctcttgaagcaggaggcgcgagccgcgccaaagtctgcaacggcctcaagtctcgacgccagcctaggcaaaaggcaatg

SEQ ID NO: 125976 - DNA, 122 bp, Homo sapiens
cacagtgtgaaagacacttcagtttgtcagaaaaattcagctgttgctatatttatggttcgcccctgggctgcagagtagaatcatctcggagacgcaagtgagtgactctcaagggaaat

SEQ ID NO: 125977 - DNA, 122 bp, Homo sapiens
tggtactagtggggtcctgactacctctccgcttactcattgtgttccagcctttctgcccgtgagttccaggctcagggtctctgcttggatggtcttccccagatggcctcttttctcct

SEQ ID NO: 125978 - DNA, 122 bp, Homo sapiens
ggcttactgacagaatagaagggttgggaaagcattattaagttcacacaacaaaatcaacgaaaggtataaagctaggtttgaagaacaacagacaattttctgtagtattaaagccaaga

SEQ ID NO: 125979 - DNA, 122 bp, Homo sapiens
cagccgaactctctacctgggcctgagaagcgggagaatccgccccatcaactcttctcacgagagtatgcacttgcctattagaaaatgtgtttggaatagtaaccagcaggagtttcaac

SEQ ID NO: 125980 - DNA, 122 bp, Homo sapiens
agtgctggcctttgtcgccatgtgttacccttgccccaaccctgtcgccaccgtgggatccgggtccaaactgtatagtatataaatgcacgtaaatgtatgttaatgacgctggcgtggct

SEQ ID NO: 125981 - DNA, 122 bp, Homo sapiens
aatgaggggggaagagtggcagaggcggactcctggccattcacgcgcgcttgggtgggacgccggtgaactcggggcaccccggccggctccgagggcacagggcacgtgccgggcaggct

SEQ ID NO: 125982 - DNA, 122 bp, Homo sapiens
cggggcggcggggcggcggggcggcggggcggcggggcggccgggttggaggtgggagtgcgcccgcgcctgcagcttccgacgcccaaatccctgccccgcaggtgcggggcgccccggcc

SEQ ID NO: 125983 - DNA, 122 bp, Homo sapiens
ccacgcatgcgcagcttttcggggcgccactggggcggggccccaaacttggggggtggtcgtccccggcggcactctgcaaaactccatttcatccccaactcctctgagaaccctcagag

SEQ ID NO: 125984 - DNA, 122 bp, Homo sapiens
cgcagacaagaaggggagggagcgggagagggaggagagctccgaagcgagagggccgagcgccatgcgccgcgccagcagagactacaccaagtacctgcgtggctcggaggagatgggcg

SEQ ID NO: 125985 - DNA, 122 bp, Homo sapiens
cccgctgagctgctgcctggtgaagaggaagccatggcgctccgagtcaccagggtgagccgcttcggactgcgaactaacgcggccttcttagctgctgcctgctctccctgcctcgcctg

SEQ ID NO: 125986 - DNA, 122 bp, Homo sapiens
ctgcaacctgcggttccagcagacaaaccttgtgatcctcgttccagtcgacatggaggacgactcactctacttgagaggtgagtggcagttcaaccacttttcaaaactcacatcttctc

SEQ ID NO: 125987 - DNA, 122 bp, Homo sapiens
tctcttctcccacattcctccgactctcacttttgtttgcaaacctctggcaaaatgcagcgtcattctttttaggtcgtaacagtcatggtggccgttgtgctccagctctcaggacacgg

SEQ ID NO: 125988 - DNA, 122 bp, Homo sapiens
gcccggaggtccggggcagggcttgccggccaggggcggggcttcagctgatcaatgcgccggacagggccgccccgggcgcatgctcccggccgcaccgcgcacccctcccccccagcctg

SEQ ID NO: 125989 - DNA, 122 bp, Homo sapiens
cagcccataaccagccaacttatctataaccagccacctgaccatagccaaacaaccagccggcccaccagtagcattcagcccctcagctggccctgagggtttggagacaggtcgagggt

SEQ ID NO: 125990 - DNA, 122 bp, Homo sapiens
gaggcctctcctgcacccctcacaagggtagctccactgcagtagtgacttcctaccaagcgtcccttcttctgttggccatgtctcgtgcataaacttgatctgtccctcactcccttgct

SEQ ID NO: 125991 - DNA, 122 bp, Homo sapiens
cgagggagagtcctagctagagaacagctctgcttatacagcaacagagaaaactcccatcggctacccagtccttttctcttaaatatgaatgagtagccaaggagcctcaagcaaattaa

SEQ ID NO: 125992 - DNA, 122 bp, Homo sapiens
actcctgcatttccaggcgagcaccccttaggaaggacgcgacccggcacgcgttgcctgcgttcctgggtcctcgaggtacttaacgtcctggaaactgagctttcgcatcctagggaagt

SEQ ID NO: 125993 - DNA, 122 bp, Homo sapiens
tttcgctctgcctactggtccataaagacagctgccaaggggcaggcagccatacgtcaccgaggatcccagttagaaaacagccattcggcgcccggtggtgcctacagtctcaatgcggc

SEQ ID NO: 125994 - DNA, 122 bp, Homo sapiens
acagtgctcacccatttgttacatggcatttaaggcagggatctggttcctgtcacaacacgtgtatgtgtgttattagcaaaaggtactcaggaagatgaaaggtcctatacagtgaagcc

SEQ ID NO: 125995 - DNA, 122 bp, Homo sapiens
gcgagcccacccaccagcgctgcactcagccccagcagggaccaggcctgggagtgagggcgagccccttgcgcgaaccctggagggccggaccctaaccctggggctgtgggctctgcccc

SEQ ID NO: 125996 - DNA, 122 bp, Homo sapiens
gctcatgcaaattttctttttcagattcatgggaaatacctaacgcttctttctcctgaacgtggggactgctgtggatgttggcaagggagagacagcaggggaggggtggatctggcctt

SEQ ID NO: 125997 - DNA, 122 bp, Homo sapiens
gcagtttacagatgagggtatgggtgcccaagccccctgaaaagctcttagagccagaaccggaatactattctgtgtgactctaaaaatctctgcccattcttatgctcactaaagtctga

SEQ ID NO: 125998 - DNA, 122 bp, Homo sapiens
gtctcgctctgtcgcccaggctagagagcaggggcgagatcttggttcactgcaaccttccgcctcctgggttcaagcgattctccggcctcaacctcctgagtagctggtattacaggtgc

SEQ ID NO: 125999 - DNA, 122 bp, Homo sapiens
aggtatcaggcacgcgggtatcaggcaggtgggtatcaggcatgcagttatcaggcatgccggtatcaggcacgtgggcctcaggcacacaggtatcacgtgggtatcaggcacgcagttat

SEQ ID NO: 126000 - DNA, 122 bp, Homo sapiens
cgagagccccatctatcccttcaggaaggggaagtggcatgtgatgttggggaggtaggccgggcaggaaaactaagccagacaccaaaatctaaagctttgctgcagtcgcgaaaatgcgg

SEQ ID NO: 126001 - DNA, 122 bp, Homo sapiens
tgggagccttggtcctgagcagccaacacaccagcccagacagctgcaagtcaccatggacgctgaaggtaaagggacactctctctgccatgtccctgcacccatccccccactgcctacc

SEQ ID NO: 126002 - DNA, 122 bp, Homo sapiens
gactgtggcagatgtagcagtagcggttgatggcgatgccggtgatgttgaatatggagccgatgacgctcaggcccatcaggaacccactgacttggcagtgcagatagcccaggttccac

SEQ ID NO: 126003 - DNA, 122 bp, Homo sapiens
ttccactctgggctcctgccctgggtatattgagatgctcacagtgaagtcatctttgagcggaactcaaaaaagcagctgaattgtgcagcatcaggaagtaactaaaaaaaaatctctcg

SEQ ID NO: 126004 - DNA, 122 bp, Homo sapiens
tctgacctttccagtgacctccagaatggcttgcccttcctggaatccagtcctataactcgtaccgtcatgtggggaaagagggtcagtacataacaggccaattttgtgttgaaatctaa

SEQ ID NO: 126005 - DNA, 122 bp, Homo sapiens
ggataaatagttgcttaatgtaccatctctgtctggaaagttttttttaaatactgaattcgtgaatgtaggtcataagcatgaagcgcagttcagtttccagcggtggtgctggccgcctc

SEQ ID NO: 126006 - DNA, 122 bp, Homo sapiens
ctttcctagaacccaggactgcagcaggccttgctaccatctgccaggctttcccaacaccggcacactgctggttcatttgcatgctccctgggcccagagcctccgatgctggtgccatc

SEQ ID NO: 126007 - DNA, 122 bp, Homo sapiens
agtgctcggctttcaccggggtctccgggagggcaggtgttttctgagtggccgaggaggcgccaagtggttgagtgacctgtccagggtgtcacagagcgacccactccgggccacggggt

SEQ ID NO: 126008 - DNA, 122 bp, Homo sapiens
ccctccgtgaagggcctcacctgactctcaccacagcgggtgaacatcccaggagagcttcggagcttcctcttacctacttaaggttagagggtgggaggagagagaggatcgaaaaacta

SEQ ID NO: 126009 - DNA, 122 bp, Homo sapiens
tgtgatcttgaaagtggtatttcgtggatgtgtcccaagggcccagcacagtgtctggcacgtttagagcctctgaaaagagaggagaaagaagtgaagggaggaaggagacagagggcagg

SEQ ID NO: 126010 - DNA, 122 bp, Homo sapiens
cggcacctttcctctttctggcttttttcaggtcatccgcgcacccctgcgtggcaagggcggcctggaccccaccaaatccctccgcagctgccggggcggggccttccacgctagccctc

SEQ ID NO: 126011 - DNA, 122 bp, Homo sapiens
tgatcctcagatgcaccttataaaagccttttaaaatctccagaaccacgatgtgcctttcgatccacggcaccccagagtcacagacacgccgtgtgcgccaggctgaggcctccgaagcc

SEQ ID NO: 126012 - DNA, 122 bp, Homo sapiens
ggataatacagcttgaaaatgttatttatacattttcttcattttctactttcactttgccgtgcaatgaaagatttaagattattcataatcaaatcacttgtttaggagtccttatataa

SEQ ID NO: 126013 - DNA, 122 bp, Homo sapiens
ccgcatcctcgcccagcccctgtccgaggccgccgggcaccccctcaccatcccagtccccgaggctgccccaaccccgtcctgtccccgtggctgccccagcccgctccccatacccgggc

SEQ ID NO: 126014 - DNA, 122 bp, Homo sapiens
ttgctttgtttgcagcagtaaaactgacggtagagtttccaacacgaaagcccgtgtggtcgcgccgggagctcacggcgttccaagcggcacttatcccgcgttgatgcccaggcaccccg

SEQ ID NO: 126015 - DNA, 122 bp, Homo sapiens
tctatttgatgcagaaataaaaatactgaagatcacagagattttagaatggccccttctcgctccctgaggggcagagaaacagggctttgttttgcaacttgaaatttctttgtcatgag

SEQ ID NO: 126016 - DNA, 122 bp, Homo sapiens
ccgaaacccaactcaccggcagacaaagacgaccatggcaagtcggagattccgcgcctgcgcactccttccgcgggcagcgctcccagaggtctcctgggctgggccaggccccgactcag

SEQ ID NO: 126017 - DNA, 122 bp, Homo sapiens
cctgcccggcaagaagacgggaaaaacctccaactaccttggaggaaatcaataggattacgaggttaatgccagagcaggctgagtgacagttaccaaataaatgatcttgggaggacatg

SEQ ID NO: 126018 - DNA, 122 bp, Homo sapiens
caccttttcgaggctgagatacctggttcttagataggctatcttcattcaggaaacaaacgtgactcccttctctctggtaaacaaagggtgccctccgtgaagggcctcacctgactctc

SEQ ID NO: 126019 - DNA, 122 bp, Homo sapiens
agattacaggggatcagggagcaaatgaggatctggtgagggagggggacttggtgaggccgtctctgtggcatgctgggaatgccggcatctccgttgctcagataagctgcctccattgc

SEQ ID NO: 126020 - DNA, 122 bp, Homo sapiens
ccaggccaggccctgacaatttagaggccaccgaatgtaatagaacaggttagggagctgcgagacctggttctcatctgggccctgctgctaactttcacctaggacaagagtgtttgatg

SEQ ID NO: 126021 - DNA, 122 bp, Homo sapiens
gcgggtccaggaaacccctggggcgtacgggtggccccgggggggccgggggcggggaggcgggcggccggcaccgccccggccgacaaaagtcccttcagttcagccggctgcaggggaag

SEQ ID NO: 126022 - DNA, 122 bp, Homo sapiens
acccgaatactgcgcttttctgacgggcttaaaaaaacggtgcaccacgagattatgtcccgcacctggctcggagggtcctacgcccacggagtctcgctgattgctagcacagcagtctg

SEQ ID NO: 126023 - DNA, 122 bp, Homo sapiens
gctgcggccccgggaagcccaatcccgcgggactgcggagcccacgcgctcctcaggctccggccaactagctcggttctgcctctagcccgggtcaagaaaaatccaaaatgaacactatg

SEQ ID NO: 126024 - DNA, 122 bp, Homo sapiens
acaggcgtgagccaccacacccagcccaggaatttcttaaacaggacaaaaatagtcaggcgtggtagatggtggctgtaagcccagcactttgggaggctgatgcgggaggatcacttgag

SEQ ID NO: 126025 - DNA, 122 bp, Homo sapiens
aagcaaacagttggtgtttatcttctaccacttaccacaagtgtgatttgaaaaacaaaccgattttccagctgctcagtgattaaaatgtttgacaatttatgtcttcatgtttgatttgt

SEQ ID NO: 126026 - DNA, 122 bp, Homo sapiens
ttcaacatacatgccttcacccctgaacgggacaattgtaaggtactttttacagtgtctcggagattcagagtagacttgagcccttgttctccacaatggtaaccaacttattaacatat

SEQ ID NO: 126027 - DNA, 122 bp, Homo sapiens
gggacgaggctagaggcaggctcggccgccgaaatgatggcctgtcacggcttctgcctgcgctccctaggacccccctcagaggggacatttcacagcctcagaaacatttctggacttgg

SEQ ID NO: 126028 - DNA, 122 bp, Homo sapiens
ctccttggcccgtgaagttcatgaaccaggtacgtgcatgacttcgatgccacatgggcacgtgtggccatgtggggggtgcaggacccaagaaggaacaagaggggccgcgtaaccctgca

SEQ ID NO: 126029 - DNA, 122 bp, Homo sapiens
agggccagggccctgcagaagcaatgtcaggggactgacagatacaggagaaacccaggacgtagacctgacagggcgtggcagctgatgggacagaagcagggagccccccaggagtggga

SEQ ID NO: 126030 - DNA, 122 bp, Homo sapiens
gtgtatactataaatcaaaaagtttctgagagacatctccattaatttaaaggtttacttcgctaaagtggaagacgcactagagaaaaagaaatacaagttacagtaagatctgtggccta

SEQ ID NO: 126031 - DNA, 122 bp, Homo sapiens
cagccgggtccaagggctcgagcatcgcaacctgcggcctgagttggccccgggcgcacgcgagggaaatggatgcagtgcccgtgaacttggggcctgaataattgataacaacccgctgg

SEQ ID NO: 126032 - DNA, 122 bp, Homo sapiens
caaggcggtagccatggcggaggcggcggctgcagcgggtgggactggcttgggcgcgggcgcgagctacgggtctgcagcggaccgggaccgggacccggacccggaccgcgccgggcgga

SEQ ID NO: 126033 - DNA, 122 bp, Homo sapiens
gaggagccttgccagaatcgtcaggctgaggcccaccgcgggggccgactgtgggaggaacgtcttgcccaccctagaagactaggaaagaatgctggaaataaaagcacccaacggcccag

SEQ ID NO: 126034 - DNA, 122 bp, Homo sapiens
ttgaagaaaggggtacgggcaccttctccccgccctcgctccccccagcccccatcccaccgacctaaacagtcaggcttgagagactggaagggtttcacttccgcctggctgcaggaacc

SEQ ID NO: 126035 - DNA, 122 bp, Homo sapiens
agtgacatcagtcagaacaaatgtaccaaagttcagagagctgtttactaggcacgactgcgaaggcaagggggcaccagctcaggactgcatctgcctgccatttcccttccactcctcct

SEQ ID NO: 126036 - DNA, 122 bp, Homo sapiens
gagctcaggcgtccccgccccagcttttctcggaaccatgaaccccaactgcgcccggtgcggcaagatcgtgtatcccacggagaaggtgaactgtctggataaggtgagcccgggaccgg

SEQ ID NO: 126037 - DNA, 122 bp, Homo sapiens
atcccagcccagcagcacccccggaccgcacgccgaccccgcctcccggacttcgcaccgcggccccggcccccgccagccgcccagtaagtacacctgggccccgccccctggccgccacg

SEQ ID NO: 126038 - DNA, 122 bp, Homo sapiens
accgctgctgtccctgctgtcgctcctggttggtgcgtggctcaagctaggtcactgaaccgccggccacgccggaggcgctgggaaaggggatggggccctccgccctggcgggagagagc

SEQ ID NO: 126039 - DNA, 122 bp, Homo sapiens
gagggagacggggtggcctcaggagacccgggcttgcgtctcacagggacaggtgcgcctcggggtatcctggaaaccctcgtggggcttccaggcgctttgacagcacgaccctcagtgac

SEQ ID NO: 126040 - DNA, 122 bp, Homo sapiens
gttagagggtggctttctgcttttccacacttcaagaacgagttttttgggctgattcctcgatgaaaggtaaaaggtaaccatccagcttgggcttctagttcccagcagatcaataagga

SEQ ID NO: 126041 - DNA, 122 bp, Homo sapiens
gttgatgggtgacccggggagaggtacccggccagaggcgagtcctgcggagtggtagcgcgcacggcctgcgggtgagtgagagaaggaatgagggccgccggcggctgggcggcggggag

SEQ ID NO: 126042 - DNA, 122 bp, Homo sapiens
tcagtttatttctggcctgcaataattcttgccagtcaccttgcatcttgattactacatcgtttcactgctttcacaagcaaaactgaacgctggctctatctgcctgctctgctttcctg

SEQ ID NO: 126043 - DNA, 122 bp, Homo sapiens
acccagtccttatccccaggacctccacattctggtctagctgggcacaggaacatgatccgtgcatggagcgggtagctgatgggcatgggggagccactttttgttggggtccagcctca

SEQ ID NO: 126044 - DNA, 122 bp, Homo sapiens
cgccccaccttacgtcccgcccccacatatttggattggctaatatgttttcacctcttccgtgcgattggatgactcgaccgcccctcctcaacctgaaccgtttaatatattattggtct

SEQ ID NO: 126045 - DNA, 122 bp, Homo sapiens
cgagcttcgggccggcaacaccagggcggcggctcgggagagggctgcggactaagggggcggagggggcggccgaaccagcgccgggctgacgcgccccgcgccccgcgccccgcgccccc

SEQ ID NO: 126046 - DNA, 122 bp, Homo sapiens
aggagaatggaccgacagagatatttttggcaaatgctcacatcagagggcgtcctgttccgcagctctaaatgaatccgtctgcccatctccatctctcgcgctctctctctgcagaggct

SEQ ID NO: 126047 - DNA, 122 bp, Homo sapiens
cctgcttattgttaatttcaatataattcatgaatatgtgatgatggtggagaattaattcgattgagatttcttggtttggtccaggagcaggacatcaattcaactaacagtctccaaat

SEQ ID NO: 126048 - DNA, 122 bp, Homo sapiens
gcaaataacttcagtagcaccaatgcccaacagtctgcacctgaaaaagttaaaaaagaccgtgggcggggcccaaatgggaaggaaagaaaacctaagcacaacaaaagggctaaatggcc

SEQ ID NO: 126049 - DNA, 122 bp, Homo sapiens
gcgtgtctctgttctcgtcctgctccagcaggtggcattgtcccgccagcagtgtgctggcgtccgtggtgacaccatagttgagtagggcctgggcgctgcgctgtgccgtgccacaccag

SEQ ID NO: 126050 - DNA, 122 bp, Homo sapiens
acccttgcggtggtcatagggtaggtggtgaaacaaagtcataccaaggcacttccccagcgatcatcggttggtccctgccgcccttgcagttggagttcgcggtgcagatgacctgtcag

SEQ ID NO: 126051 - DNA, 122 bp, Homo sapiens
cccacacacgtacaagcagaggccaggaaaacgaagtaccaggcaagccggacgcattcccggaagcaccagtgagagacttcagggcaaactcgatgttccttctgggaaatcccatctcc

SEQ ID NO: 126052 - DNA, 122 bp, Homo sapiens
acggcctgggtgggcatgggcagggcagcttcagcagcagggggactgagggcagccaaccgcgtagcccatgctgctaccctctcccacctccttgtcactcgggccaagcacagttgccc

SEQ ID NO: 126053 - DNA, 122 bp, Homo sapiens
ggaggacgcaggagagaaaccgaggcagccgggtccgttccacaggtcggcgtcgtggggcgcagtgcgttcctgcgagggctcactcagcgctgtgggaggcattcatccgtgcacaaggg

SEQ ID NO: 126054 - DNA, 122 bp, Homo sapiens
ccgaaccccagcccgccgccccgaaccccagcccgccgccccgcgggttggggcgcgacccgggttctcttgccactcacaaaaccagctacgaccggcccccaaccgcgagagctttctgg

SEQ ID NO: 126055 - DNA, 122 bp, Homo sapiens
gggaggagggagttgggggattttgaaaaaccccagatctttgagagttgttccacttagcgcgtgcctgtgctgtggtcggatgggcactctgctctgccctccattcccccgcctctcag

SEQ ID NO: 126056 - DNA, 122 bp, Homo sapiens
atcctaccagtttctatacatccttcaggcagcattcctcccctcccctattgcttgattcgcccctcacgttcaggagaacgggctgccccgactttgttagtctggcggtccccgcgcac

SEQ ID NO: 126057 - DNA, 122 bp, Homo sapiens
caaccacccaaagtcagtcccagcccgcgcgcagggctccctcctaccctacaacagccccgaggggcctcaagtcccactgcctggaaccccacaagccacccccgcccccgcgccatttc

SEQ ID NO: 126058 - DNA, 122 bp, Homo sapiens
gacactataaagcagagagtggtgtgagcttccccgccctctgaaaagatggcaagtctccgtttcgggaaggctgcaacgctaaggtcaccctttgcaggcttcggacccccagtcctcca

SEQ ID NO: 126059 - DNA, 122 bp, Homo sapiens
ctcctcgtgggttcctgtcttgaaggatttcttctccgcctcaactttatgttcaagtagcgctttgggggttgggttggttttcatagcccccacccccggccctctccttttaaagggtg

SEQ ID NO: 126060 - DNA, 122 bp, Homo sapiens
cacatcccagggctgtacgcgcggactagcggagctaggggaaggtgccagggtggccgccgcctcagtagcacgcggacggctggaaagtcagcccccgtttccgcctcacccaggattgc

SEQ ID NO: 126061 - DNA, 122 bp, Homo sapiens
gggtcgggacacctgtgggcgggacggtgacaggccttggacctggatccccaacggaggcgcacttctgagcaggagtgtgggctgcagccggagctccaaaagggctccaagggggccac

SEQ ID NO: 126062 - DNA, 122 bp, Homo sapiens
agccattatgaaccagaaacctgtcttgtgtttctccagagaaagtggactatgaacaatcgaaagaaagtggtggatggtttctggaaggacaagtctgcaccagagaataaaagggcatt

SEQ ID NO: 126063 - DNA, 122 bp, Homo sapiens
acaccccagccaaagcccaagttccggaagtaggtgatgttcttgtctttgctcagccatcgggttgggtcaaaattttccgggtcgaagaagaaggtgggctctcggcccagagcatagat

SEQ ID NO: 126064 - DNA, 122 bp, Homo sapiens
agcttttccattctcccagcttattttccaggagcggagtgtggcgctcattgtcgcagtcgaacaagctaaagagcctgcaaggcccaatactgactccaggagatactgggaagggcttg

SEQ ID NO: 126065 - DNA, 122 bp, Homo sapiens
tattttcatcagcagatcttcgtaacacactcctggaagtgggatgacggggtcaaaaggcgaatccatacataagttaaatagatattgctcaattctcttccacggggttcagaccattt

SEQ ID NO: 126066 - DNA, 122 bp, Homo sapiens
tggggggcagccactgtgtaaccccaaagccagcagggcggccactgtgcttcgaggagtcgcaacagaccagccttcctgtgtccacgctggagaccctgccggctgtttaacctcgaagc

SEQ ID NO: 126067 - DNA, 122 bp, Homo sapiens
aagactcagtcccatggggctctctgaagggcatggaggggacctctggccacgatttcccgaaggatagggtctcccgggacagataccttccctggccactcgcgccgctccctgagacc

SEQ ID NO: 126068 - DNA, 122 bp, Homo sapiens
gtgtgtccaagcgcctgcacaggcagaagcgaggctctttcccataaccggaacccttaccgtgcccctagcaaactcccagctcctgcctgacaagttactgcctaacccgtgacttattt

SEQ ID NO: 126069 - DNA, 122 bp, Homo sapiens
gcaccgcgcggtgagtgtcgggggtgggggccgcgggtctccagcagcccctgccctgtgcggaccgccgccccgagggtccctgcttgcgggtccggggctgggcgtgcctggctccccct

SEQ ID NO: 126070 - DNA, 122 bp, Homo sapiens
tgaactcctgacctcagatgatccacccgccttggcctcccaaagtgctgggattacaggcgggagccgccgcgcctggcccagagtagtacactctttcagaaagacagagatgttccgta

SEQ ID NO: 126071 - DNA, 122 bp, Homo sapiens
taccagcttgatctaattgaccaaaaaaaaaaaaaaatgaattaagaaaaaacatttggacgaaaagaccagttggcaatctactacaatggtccagggcagagtgcaagagccacagagag

SEQ ID NO: 126072 - DNA, 122 bp, Homo sapiens
ggagaacgtgagaaatgatgttttcggccccagaatgatggattagcctgggacagtgggcggggggcggggggcgccggggaattagggccgatgcagctgtgcagacgccgggttagtca

SEQ ID NO: 126073 - DNA, 122 bp, Homo sapiens
agctgcagaggcccccaaacccgaaggcctcccaccctcccatctggtgaccccaccatgcggcctttgccctggggaggtgggacaagaacatcccctggagcctggctggaggttcccct

SEQ ID NO: 126074 - DNA, 122 bp, Homo sapiens
ggaagcctgcccagggttgtgagcatgcacgggaaaggcacccaggtcaggggggatccccgaggagatgcctgagctgaaggattgtggttggggaaagcgtagtcccagcaaggaagcag

SEQ ID NO: 126075 - DNA, 122 bp, Homo sapiens
acttgttaggttctcactgggttgtgggcttccagagggcaggactatcttgttctttgtcgctcctatccccgtaccaccccagtgtctagtacgtaggaggtataaacagttgttgaaag

SEQ ID NO: 126076 - DNA, 122 bp, Homo sapiens
ggtcaggtgtcccggccatccatggagaacaaggagtcattacagaggctcggtggcacacggtgaaaatgaggttcttctgggaaattttaggctgcaggatgtgagtggcccacagcagg

SEQ ID NO: 126077 - DNA, 122 bp, Homo sapiens
gaccctggcaggagggcagagggtccaggttcctggcagtgactccaggcacttcccctgcggtacaaccttcttcccgggcctggcgctgggggtggaagggtggctcctgatttaggctc

SEQ ID NO: 126078 - DNA, 122 bp, Homo sapiens
tgaccctagtttgatgggttttttcctttgtcctctctttcttggattgagtcctcacagcgcggcggactgcggcgtggtaggaactacaccacccagaatactgtgcgccgagcgtgccg

SEQ ID NO: 126079 - DNA, 122 bp, Homo sapiens
ttccgctgcccctttgcagcctggagctcagcaaggatgcccgcctggcttccatcttcccggttcgctccctcccttcctccccctctcgcctgcttgcctgtaatggctcaccatttttg

SEQ ID NO: 126080 - DNA, 122 bp, Homo sapiens
cgcgatgccacgggtcaggcacgagggcgggaagcctcagccctaacgcgacatcaggcacgagggtgggaaaccttgggggcctgtacctgcttgctgtcttgctcgctgcccctagggcc

SEQ ID NO: 126081 - DNA, 122 bp, Homo sapiens
cagcgggggacggcggggaacagcgggggacggcggggaacagcaggggactgcgggtcgcgtcctggccgccgaggtgagtgcgggccccgcggaccgtgggtcccctcgcgggcttctgg

SEQ ID NO: 126082 - DNA, 122 bp, Homo sapiens
cgctggtgcactgcaggtgacctcccccgggcccgggaataaattgtcaagtttccccaccgtgggtgtctttgctagccggcgagttgcagtcttctgagctaattaggagacggtcatga

SEQ ID NO: 126083 - DNA, 122 bp, Homo sapiens
tttgatttggtggtagcataggggttacagaacattgcctgtggcagtgtaacagcactgcgcaggtaaagagagcattactcgtgcagcttctaatccatactttgggtctcagtttttct

SEQ ID NO: 126084 - DNA, 122 bp, Homo sapiens
atcagtgcgccactggccgatgaaggtggccgcactgtcgcgggccacgaagaagcgcagcgccagccaccctgtgggcctggaaggtcacacttcgggatatgcagacagcctcatgggtt

SEQ ID NO: 126085 - DNA, 122 bp, Homo sapiens
aagcggctgagggctctggacccggtctccgaggcgtgaggcggtgggagggtcggcggccgcgtcctccacgaccctggggagaagtcccagtttccgcgcagccgacaacggttggaccc

SEQ ID NO: 126086 - DNA, 122 bp, Homo sapiens
agcagctgtctgggcttgtttctgattaaggtccacacagggagtgcagcattctgggagcgcattacctcctggcagccctcaagctcccagagcagccccaggaatccagagtatcctga

SEQ ID NO: 126087 - DNA, 122 bp, Homo sapiens
cagtggcgaggcccctcgccttctccccagaagcagcccctttgacgacatcggtactttcggtccattccctgggtcgatgtttccagaaccccgcgcccaggagcacgtccaggttatgc

SEQ ID NO: 126088 - DNA, 122 bp, Homo sapiens
gggccgcgtaacgctgaccgctgtgccttcagttctcccaggagaaagccatgttcagttcgagcgccaagatcgtgaagcccaatggcgagaagccggacgagttcgagtccggcatctcc

SEQ ID NO: 126089 - DNA, 122 bp, Homo sapiens
tgcttgtgactgactttggcaagtaagatcagtacccggcacctctgggcacacagggcccgggctgcatccactgtgccagggacctggtgccgggctgggcagcaagtcagtatcacatc

SEQ ID NO: 126090 - DNA, 122 bp, Homo sapiens
ctgaccgcacaaagactcccgtggccccggcagcagctcggccttctctacatctaaccacgtttactaaatttctacggcacgcagcgcaccgcaccaggagctgggagcggctcgcggta

SEQ ID NO: 126091 - DNA, 122 bp, Homo sapiens
ttcatgacctggccaggcaggaatgccatccatttccctgtcattccctagtcctggcatcggggaaactcaaattgaccagacactactctctatctccaactgcaatgtagttgagactc

SEQ ID NO: 126092 - DNA, 122 bp, Homo sapiens
gttcggaggcggggcaggtgggggcgggcccaggtagcaggtttggctgcgcgggggccgcgcgtcggaggtaaatactagggcggtgggtgtggggagccggggccggcccgggacgcggg

SEQ ID NO: 126093 - DNA, 122 bp, Homo sapiens
ttccttacaaagctctgaatgctaggcatgtggcacggagtgggcatggcccaccagccccggcccctcctgggaggaaagttgaccgatgtactgacctctgtgtgaaatctgggtcatca

SEQ ID NO: 126094 - DNA, 122 bp, Homo sapiens
gggtgagatgtggtgctagttttaggcacactgtgctcgttatcagattgcctaggggcccgactgaagtattcctccgcccagcgcctcgggcaaacgcgggatctcccagggaagctcgg

SEQ ID NO: 126095 - DNA, 122 bp, Homo sapiens
acaaggcagcttccggcgaaggcggtgacgcaaaggatggcgtaagcacgctcgggacgacggcgtcctcttgatcgcccttgaaggcccctttccgggctgtctgacacgatgcaagtgtc

SEQ ID NO: 126096 - DNA, 122 bp, Homo sapiens
gagggctctgagggtgtgcaggtcccccggacccattttttgcgggagggacacttgtagcggaagagttaggcccataacacctgaagacctgcagccaaagaaagagaacccgggcacaa

SEQ ID NO: 126097 - DNA, 122 bp, Homo sapiens
caaccacagaaagactgactctgcccaggagcctcctcctccaccccatccaaagcccttcgcaccaatttcgggaaattcttggatgctgatgccagcaggcagtttgggagtgcccacat

SEQ ID NO: 126098 - DNA, 122 bp, Homo sapiens
gacaggggtaaggaggaagctgctgaaccctgctaagaagatgggaggcctggtctaattcgagaaccagacacggcaggccctgtcttctgggctcagcccagtgagaagctggagcagca

SEQ ID NO: 126099 - DNA, 122 bp, Homo sapiens
aaacggactctcccagagtaagaaaacattacaagaacgtccatccagtgcctgccctcccgactgcaaagccagcctctttcctttcctgtggtttctgaaacggccaggataccgcctgg

SEQ ID NO: 126100 - DNA, 122 bp, Homo sapiens
gcactgcgcagcgccctcaccagctgcagggccctggcgccgtccacctgcgtctcattgcggctcagcttctcattctggaacagggaggcagtcgtgatgtgtgcaaacccacttcggcc

SEQ ID NO: 126101 - DNA, 122 bp, Homo sapiens
tacttgcaactttgcaggctaaaacacgtggagtgtccctactgtgtgctaggtacacggcgttagaggggggtagggatggatgtggatagaatattgacgtatagaagcctgtctttgtc

SEQ ID NO: 126102 - DNA, 122 bp, Homo sapiens
atggcttagtggaatagcatcaatttgtgcttcttcctctgtagctttcaaaagtcctgccgtagatagaaagttagacaggttctttgccaaagagtggccccttctctctggaaatactg

SEQ ID NO: 126103 - DNA, 122 bp, Homo sapiens
gcaggaggcgctgagccggcctgtgtggagcctgggccctgatccagactggagaaagcgcgctggagcggaggagcgagccttgcgaggggacaaacatctggccgcccgcctcgggcatc

SEQ ID NO: 126104 - DNA, 122 bp, Homo sapiens
ggaggacacagagggcaggcgggcgccctgttgggcttcctgatgacggggacgacaggccgaggattcacgctggaagcccacccaagccggcggggccctagcgcagaaattcagaaccc

SEQ ID NO: 126105 - DNA, 122 bp, Homo sapiens
ccagtcttctcaccgccaggcgggcaggtcagcagaccaggcaggaccgagcccgtcgcccggggctcttgttgtctgtgccatttcggtgccttttgtccttgcttcccgccgctccttga

SEQ ID NO: 126106 - DNA, 122 bp, Homo sapiens
acactgattgcttctaacctttactaaacagttttaaaattgctatagcttagcctgcgacgcttatgattagagccaacaatttgaaatggcctgctcacctgatgcagtcgtctctccgt

SEQ ID NO: 126107 - DNA, 122 bp, Homo sapiens
ccgaggtgcaacacgcgcggccgcgcagcgagggctgcacgctgcccggacgccggctgccggcggagtgccctcaccttactcgcggtggctttctggaggctgccattcggcggtgacgt

SEQ ID NO: 126108 - DNA, 122 bp, Homo sapiens
agaggcgttttagttggtattgctgtggaaatccatgcttatataaaagcccagagatcccgtggatgcttaggccttgttcctggcggcggtcgcaccggtggccaccaatggccttccta

SEQ ID NO: 126109 - DNA, 122 bp, Homo sapiens
atggcaagcaaagagagctccattttctatacttttctaggaatagaggaagagaaccagcggggccatgggaaaacagcccaggaccagacactaggaaatctaggtctcttgatagagag

SEQ ID NO: 126110 - DNA, 122 bp, Homo sapiens
tcccctgctcacacatgtgcctctttcttgggacgttgtgtgttctccacactcctgggccggtcaggaggggtcttgtgctctgctagggaggtgggcttccctgtaggaagagtgtggag

SEQ ID NO: 126111 - DNA, 122 bp, Homo sapiens
gcgcttggggaggcggagcgggaggagggcgccccggctgtctcggggccactgctgggccgcagggatccttgcaccgaccccagggtctctaagaggcagagggatgtgcagctcccggg

SEQ ID NO: 126112 - DNA, 122 bp, Homo sapiens
gtaacatgttcctgcaagaagattgacttcatcctagcattttctcctttgggtgaaacacgcaggaacaagccaaggagtgcggtctcattagttggatttccatcctaagggataagagt

SEQ ID NO: 126113 - DNA, 122 bp, Homo sapiens
tccgcactccactcggaagccctggcgtctctttccgggggcggcggccggtgaggggtgcgcgggactcgggccgcgccctggtcggccatttcgcacactcggggcgcgcccggcgggct

SEQ ID NO: 126114 - DNA, 122 bp, Homo sapiens
ggggttccttgggggcactccgagcaggggccgggccctccatgtgtccattaacgacgacggcaactggcccctcggctctgctggcaggagcttccggggcctgcaaagcccctggggga

SEQ ID NO: 126115 - DNA, 122 bp, Homo sapiens
accttgtagtcctggctactggggaggctgaggtggaagactcacttgagcctgggaggtcgagactgtagtgaaccatgatcctgctactgcactcaaccctgggcaacatagtgagacct

SEQ ID NO: 126116 - DNA, 122 bp, Homo sapiens
acaactggcatgagcaggtgcacctgcccgcgggccacctggggtaggtgaacattcacccggtgcacgctcaggggcgcgcagcactcagaggcaggctgagacccacagatgccatgtgc

SEQ ID NO: 126117 - DNA, 122 bp, Homo sapiens
aacatgcattatggatacataattacagtagtcaagaaactaaaccattgggtgggccagcgcccttctccagggattctaagagttatgtttgcacatgccttataccttgtgagttattt

SEQ ID NO: 126118 - DNA, 122 bp, Homo sapiens
gatggctgggtgcagggaggcactggagtaccaagagccctggagagacccctggccatgcggctgttgttccttgtctgtctctctcacccgcatgtaagctcgatattggcggtgaccga

SEQ ID NO: 126119 - DNA, 122 bp, Homo sapiens
gcggcagcgctcggccagtttggctgcaaatgcagatgcgctgcttccactggagtcccccgggggggcgcggtcctcatcaacagcacagattcctggtccctgctgcggccctgctcagc

SEQ ID NO: 126120 - DNA, 122 bp, Homo sapiens
ccgacggggcagaaccggccctgggtggctaagcgggcgggaaacgcagaggcaggcggccgacagcagtgcggggtgagctgccggctgggctgctggtgccttggctccgggagacatct

SEQ ID NO: 126121 - DNA, 122 bp, Homo sapiens
ttgaactcccgacctcaggtgacccgcctggttggcctccaaaagtgctgggattacaggcgtgagccactgtgcccggcccggaaatttacttttttaaccagtgtgtacttcatcatcag

SEQ ID NO: 126122 - DNA, 122 bp, Homo sapiens
cacctctcgtccaggagatccgcggcggggggtggcctgtggcgctgcactccagcgtgacgctctccccaaccagcacctctgtattctgtggctggattacaaaagtgggtcgagctgtc

SEQ ID NO: 126123 - DNA, 122 bp, Homo sapiens
caggtgaacaggaagttaaagactgaaaaggagacacaaaactgccgactttcccgacggcgaattggccctctggaaacagccgaccaatcacaggcagcaggggcgcgccctgcagcggg

SEQ ID NO: 126124 - DNA, 122 bp, Homo sapiens
cgcatgctccagggccagtgcgctcagcactcgcagggccgccctccagggcctcccctccgctaggctgggcacctgcgccagcagcccacgcaccagagcatgcacctggtggggaaggg

SEQ ID NO: 126125 - DNA, 122 bp, Homo sapiens
agattggcgtgattgagtgcaccacccccatgagagcagagggaggggctgtatgctccccgccatcttctgagccataatgagaagaaagttcctaaaatcacagttcaaaagaaaatgaa

SEQ ID NO: 126126 - DNA, 122 bp, Homo sapiens
tgtggcaggcggtggacgctgctgaaggtgagcgagaccccggggccagtcctcagtgtccgggagcaacgcccagtccgttggaagacccggggacaatgcccaaatttgggggagactgg

SEQ ID NO: 126127 - DNA, 122 bp, Homo sapiens
tgaggccggggcagggtggggccttcttcggagggggcgcggcctccgagtaattaatcccgtctttgttgcgttttgctcctctcctgtccacccagcagggccagcccagggcgcgctaa

SEQ ID NO: 126128 - DNA, 122 bp, Homo sapiens
tgcttctatgggtgccggtggtcagggttgactgtctcgcccggtccccagagcggtccccgcaccggcccatcctgcaggccgggctcccggccaacaccacagccgtggtgggcagcgac

SEQ ID NO: 126129 - DNA, 122 bp, Homo sapiens
gatcacatcctttatctggaacggttcctgctgcttatttgtctgtaaagaaaactcaagcgcttagcctggcattctaagccctccctgacatgcgcggtctcattccaggaatattttcc

SEQ ID NO: 126130 - DNA, 122 bp, Homo sapiens
tacagaagtcctagagcccggactttcatctggagatgtcagggaaataccacattcctgcgctgaccttttctctttcaccgtttaaccggtacagaataaccctgacccagaaagacaac

SEQ ID NO: 126131 - DNA, 122 bp, Homo sapiens
caaagggcgctttgccggtgccagggaaggtgagcacgtcgaacatgttgggcctgggcccggctccccgggcggcctcctccggggagccgggagccgaggctccgccgcccgccgccccg

SEQ ID NO: 126132 - DNA, 122 bp, Homo sapiens
atgacttccaccagggtaaaaaccactgatcactgagttctattttgaaactacggacgtcgagtttcctctttcacccagaattttcagatcttgtttaaaaagttgggtgtggtttcatg

SEQ ID NO: 126133 - DNA, 122 bp, Homo sapiens
actttaaaacactctttggtccttctcccctctttaaactcaaaagggtataatcatccccgggagagagcactccttttaaatggggctactcatcctggcttggctaatggtgaacctac

SEQ ID NO: 126134 - DNA, 122 bp, Homo sapiens
ctgcccttccgtagatgagagcaggttctgggactgcggggatggggctgccggggcccccgtgtgccatgcctctcacctggtattgcagaaatggcatcatgaatatgggggatcgctct

SEQ ID NO: 126135 - DNA, 122 bp, Homo sapiens
ccctgggtggaaacctcttcagcatttgcttggaatcagtaagctaaaaacaaaatcaaccgggaccccagcttttcagaactgcagggaaacagccatcatgaggtaaatagtccctgctt

SEQ ID NO: 126136 - DNA, 122 bp, Homo sapiens
caaagagtagggtgtctcagtcctcctctactagtagatggaagtcacaaggagatatctcgagacattcaggatgtttatttactcagaaagtaaatctacattccttttgtccaacaggc

SEQ ID NO: 126137 - DNA, 122 bp, Homo sapiens
tcacctcccaccctcctccctgcctgagccccctccaccccacccgggcccacgagccagcgcttctgtccagatacctggaaaccaccgcagaaattcctgttaggcggtttggggtgggg

SEQ ID NO: 126138 - DNA, 122 bp, Homo sapiens
tttggaggggctttgcttctttactaaagtgtttccgattttaactttatgttatatccacgtacagggtgtgacagtgtgtgtgtggacagagagagggagagaagtagctgggggtggca

SEQ ID NO: 126139 - DNA, 122 bp, Homo sapiens
aacatttgggccatgttggcacagagcgggggcctcttgggctatggtggccacactccccgggctaactgagttacctgattcccagcggaaaggtcaggaagggagggaagaaacttgct

SEQ ID NO: 126140 - DNA, 122 bp, Homo sapiens
gcactcatccacttgccccttcctctgaatgttcaggtgtgggagtacttgtctgtggaccggcacatgtacagatctgtgacatgcatgtaatgcatgcacaggtccatgctaatctacag

SEQ ID NO: 126141 - DNA, 122 bp, Homo sapiens
tggtggttgatagtgttgttcagaacatcgatgtttttcctgatttttggtctgttctgtcgatttctgagaaagtattaaaattaaagttgggtcttgcatttttatccattctgtcagtc

SEQ ID NO: 126142 - DNA, 122 bp, Homo sapiens
cgcgcatcttccaccaccatctcccaggtgtgtccttcacgagcaaccgctactgaaagacgcctgaccctcggctgcccatgggacggttcttttcttcccatggctgatattttatgatc

SEQ ID NO: 126143 - DNA, 122 bp, Homo sapiens
tttctgtgtttgaaacaaaagcccaactaacggattcctggtgctctgaggactcactcccgggagcgactttgatgtattgctgtccaattagtgcctttaattggtgtcctcggagacag

SEQ ID NO: 126144 - DNA, 122 bp, Homo sapiens
cctgggcccggctgcgcggaggacaaagtgggggtgctgggcgcgggcgcacaggccggacgccgggagccagcagcatctctgcgccgctttggtccagaccatctctgggccggcccgcg

SEQ ID NO: 126145 - DNA, 122 bp, Homo sapiens
tattgttgcattggggattaagttttgacagaagcattcaaaccacagcggtcacattcacgggttccatgtggacgtgaactttgcgagggacactattcaacccatgacaaaagtccaca

SEQ ID NO: 126146 - DNA, 122 bp, Homo sapiens
tgcccgcgcagctgggagccgcaggaggcggcccgggactccagcctgcagcccctatcccgcctcctcccacgctccagccacggcgcggcgctacctgctgcagcctctcttctccggag

SEQ ID NO: 126147 - DNA, 122 bp, Homo sapiens
atcctgttaaactatatcagtatgccttttctaagcaaccattgaaacttccagcaccagcggccaggtactgtggctcagatctgcaatcccagcactttgggaggccacagcaggtggac

SEQ ID NO: 126148 - DNA, 122 bp, Homo sapiens
tggctcgggacctgcagctcgccatgcctgagcctcccacccactccatgggctcctgtgcggcccgagcctcccagacgagcaccaccccctgctccagggcgcccagtcccatcgaccac

SEQ ID NO: 126149 - DNA, 122 bp, Homo sapiens
tggggaaggtaatgggtctgggacaaatctggggtcccagccgctgccagtttcctgtctcgtctgggtccccagccctgggttgtgggctcagactccgtccccgcagtgtggctgcagga

SEQ ID NO: 126150 - DNA, 122 bp, Homo sapiens
cggcggccgggctgctgttgggcggcggcgcggagcgggcggcgagctgtgcgggaggggcggccccgaggggcggggcgggccgacgccgcgtgtcccgccgcagccgcggagtccggctc

SEQ ID NO: 126151 - DNA, 122 bp, Homo sapiens
cctgtgtgatggattttttaagagcctgactggcggggtgaggtggctcatgactgtaatcgcagcactttgagaggctgaggcaggtgaatcacttgaagccaggagttcgagaccagcct

SEQ ID NO: 126152 - DNA, 122 bp, Homo sapiens
gtgagagcacaagcgagccagccaggagtcgaacctagaatcttctgatccgtagtcagacgcgttatccattgcgccactggcccctgcctgtaacgctgtcttaactgttactcttttca

SEQ ID NO: 126153 - DNA, 122 bp, Homo sapiens
ctcaggcctgtcgacccaccctgtgattttgaccagattacagcactcaggaagagttctcgttttgaaacctgaagactcaatgtgtacttcactgccggggacctcagtttgcccatctg

SEQ ID NO: 126154 - DNA, 122 bp, Homo sapiens
tctctccgcattaatggcctctggcagtctaattaatggcagtctggacctcccctggatcgtggggcccctctgagacgtccccgatccccagcttaaatttatccaggaggacctgtgag

SEQ ID NO: 126155 - DNA, 122 bp, Homo sapiens
ctccttccgcccccagcctgttgcagaggctggctcgccgggttccagctccgctgcctgcggctcggcagtctctgcgcagcaaggtttgtctccatggcaaccagactggcggcgcaagg

SEQ ID NO: 126156 - DNA, 122 bp, Homo sapiens
gggactatttcccagtctggcggtagcgctgtgggagggaattggcaatctctctgcctacgtgggagagaagggagggttgggggaagtgtggaaaacctgaacctgagctgctgtcgcct

SEQ ID NO: 126157 - DNA, 122 bp, Homo sapiens
ggtttaacctataggccctgggccctgggctggagactgacactgacaaaaacttaagggcggaggacccgggggagctgctcattggggttcggatgtagttgctcttcgttatttttagc

SEQ ID NO: 126158 - DNA, 122 bp, Homo sapiens
ataaccccctctcctgccctagatgtgcagctcttgaaaatcaagctgagacacatccagcgtggagcagaggtctttttccatttcatttcctgccacgagggaatcagtccgtaggaggc

SEQ ID NO: 126159 - DNA, 122 bp, Homo sapiens
cctgccacctacagccccccaagccctgtgcatagcttagccaggggggtatctgggccccgggcgggaacctggaggctggggtgcacctgaggatgttctcgatgcagctgcgctggcgg

SEQ ID NO: 126160 - DNA, 122 bp, Homo sapiens
gcccgcccgctcgaagccccgcccacccggcggtcacaccgccttgcgcgctcggcatgacgtcactcccaccaggcacctcgccttgtcaggagctgccaggcgccaaccgccgacctctg

SEQ ID NO: 126161 - DNA, 122 bp, Homo sapiens
cgcagcgaccggggagcggactgaccggcgggagggctagcgagccagcggtgtgaggcgcgaggcgaggccgagccgcgagcgacatgggggaccgggagcagctgctgcagcgggcgcgg

SEQ ID NO: 126162 - DNA, 122 bp, Homo sapiens
ccgcctactctcccgttaaaagcagagcgcggtgggcaacgtactgggagccacaccaggcgcctgcaaagccccgaatcacttgtcttttccacacttcccttgtacttccaaaaacgagc

SEQ ID NO: 126163 - DNA, 122 bp, Homo sapiens
gcgactcgtaccatcactatttctacgactatgacggcggggaggatttctaccgctccacgacgcccagcgaggacatctggaagaaattcgagttggtgccgccgccctgggacttgggt

SEQ ID NO: 126164 - DNA, 122 bp, Homo sapiens
gcagcgagggagggtacgtctgctgtgccggccacccctgccctctggatttccccactgcggggcagcccgcgcctgtcacctggctggcccaacccagctggccctggctctgttaaccc

SEQ ID NO: 126165 - DNA, 122 bp, Homo sapiens
gcccgaccagcctggcaagggtagcttctgggcgctgcaccccgactgcggggacatgttcgagaacggcagcttcctgcggcgtcgcaagcgcttcaaggtgctgcgcgccgaccatactc

SEQ ID NO: 126166 - DNA, 122 bp, Homo sapiens
ggatttggcaggagtgtgccccaaaatacagtggaaaggtgcctgaagatatttaaaccacgtcttggaaatttagtgggtcttggctttgggataggtgaagtgaggacagacactggaga

SEQ ID NO: 126167 - DNA, 122 bp, Homo sapiens
attttataactgaatatggcatgtgtgaaaatatcagctaccagactctgttagtccaggcgtatgaatattccagatcacaagggaggtgtgactcccctgtgaattgcaatgcggaaggt

SEQ ID NO: 126168 - DNA, 122 bp, Homo sapiens
gttgtaacggagaattcctgtcatgttaaaaacgcgaagcattttatattacctcgtgctcgaccagggagtgaccaactctgaggatgaattccacctaaagcctaacccagattacacct

SEQ ID NO: 126169 - DNA, 122 bp, Homo sapiens
ggcgcatcttagttatggtgtcagtcccaaagcctgtatctggccgaggttgcttggggacgtgatggctaaagctgtgcccttgcagggtgagagtgcggggtggctgctcgtctggagaa

SEQ ID NO: 126170 - DNA, 122 bp, Homo sapiens
ccctcccactcccactccctttcccctccccctcccccccaattcccgctggccccgcagcgctccagcctccccgggcctcccccggcccggcccactcggccttgctagcctggcgctgg

SEQ ID NO: 126171 - DNA, 122 bp, Homo sapiens
acacacagacacgcacgcaggtccccacggtgctacgtcaggtgggagtcggggtgggaacgctcagaatggcacccgtgacgaagggcggtatgcctgccgggacacggtccagacaacaa

SEQ ID NO: 126172 - DNA, 122 bp, Homo sapiens
cttagatggggcgtagtagtaactccataatttgtgttataaagtgcttttgcgtcctctcgtttgctccttatcccatcctagcagtaggtgttggtatccccatttttgaggccagaaaa

SEQ ID NO: 126173 - DNA, 122 bp, Homo sapiens
gggaggctgagaagctggaggaggcagcgcagcagccagagtgcctgctgtgcgcagcaacgggcgtgcctggtcctgccctgggcggcaccaatgccccccgcccccgccccatcccggct

SEQ ID NO: 126174 - DNA, 122 bp, Homo sapiens
agcacttcaggaagttcctctgggggcaccgtggcaggtcagagagagcggcaggtcaggcgaggggctggtgggtgggaggagggaagcctcatcctgcccttggcccacgcctgggcaca

SEQ ID NO: 126175 - DNA, 122 bp, Homo sapiens
gtagtgcatcttgaagagctcaaagcacatgaccgcacaaatgcttacagggtttcctcccgagtaatccaatctcactccccttgtaagggaattctggggcagctatggtttgagtatgc

SEQ ID NO: 126176 - DNA, 122 bp, Homo sapiens
gacagtgtgtgatggctgtggagagacagtgtgacatctgtggagggacagtgtgacggccgtggagggacagtgtgacatccgtggagggacagtgtgacggccgtggagggacagtgtga

SEQ ID NO: 126177 - DNA, 122 bp, Homo sapiens
gagaaagcctcgggcaggaaggggttcccacggggagcccagcggggtggggggttcactcggttgcctggccggtgcctggtgatgctgagtggtgcccaggcggctcacgctgggcctgt

SEQ ID NO: 126178 - DNA, 122 bp, Homo sapiens
agtgtgtggtttgggagttctgtgaagtgtttgcagtcgctactaataatccaggtgacacggcaaacattgcagttcctaggtccagcacaattagaggagggttcactcgtaggcagcat

SEQ ID NO: 126179 - DNA, 122 bp, Homo sapiens
cgggcggtgcggactcagcgggccgggtgcaggcgcggagctgggcctctgcgcccggcccgacctccgtctataaatagagcagccagttgcagggctccattctgctttccaactgcctg

SEQ ID NO: 126180 - DNA, 122 bp, Homo sapiens
cagagatagtcacttctgcctgggttgcccccgaaagccaggctcccaggagtagctgcacggcctgtcaatcagcgggggcaggggcgggcgctgcctgggtttggagggtggagggggag

SEQ ID NO: 126181 - DNA, 122 bp, Homo sapiens
aagcgccctcctcgcttctgctgagctgtggctgatgccctggccatggaccccctcagccgctgtgtgtgcgcctctcaacacgcacggctgactccagcggcacgcctgctcctcggccc

SEQ ID NO: 126182 - DNA, 122 bp, Homo sapiens
tggaagccaaaagtctggagttaacctgacttctcttctggctccaggggctgccgggatcgtctgtcctcaccctccttgtcctccccagccctaaccacccggcagcctcttctctgtct

SEQ ID NO: 126183 - DNA, 122 bp, Homo sapiens
acgtcgtcttttcccccaccccagagggtgagcccctcagcggagatggtaatgatcgaccgaatgttcattcaggaggagaagaccacccttgccttggataaacagctggccaaggagaa

SEQ ID NO: 126184 - DNA, 122 bp, Homo sapiens
ggttcgggcctgtctttacggcgcaggcgtattcacatggaggccgtgttgctgttaatgcgcatgtcccggaatgcggctgggaggactgcgcatgctcgaagggtgggggttgaggccga

SEQ ID NO: 126185 - DNA, 122 bp, Homo sapiens
gtgacatctagtcacatggccacatctggctactagagagtgggaaatatggtctaaccacgtgcctggccacattcctattactacagaaggagagaacagattagagcaggcagctggca

SEQ ID NO: 126186 - DNA, 122 bp, Homo sapiens
ctctacaggcagcggcgtcggtttcggcccggccctgcccccaacggctccgctctcccgcgctcaccccgagcccagtccgccatcgtgccctgccccggctcctcgacgcggacaccgac

SEQ ID NO: 126187 - DNA, 122 bp, Homo sapiens
ccaagcggtgtcggcagcggttgttttattacctttcggtgagaacttacgcgaggagagcgaaggagaggtgacaatgagcaggaaatagttcagtggggtctctttaaacagtaacattc

SEQ ID NO: 126188 - DNA, 122 bp, Homo sapiens
gttcatctcggtgctgcagtaaaagtcccaggaaagacggtgctggccgcccaggcctggcggtgggcctgcgagaatacccagcgttggtgccgcgcgccctctgggtgtcccgctggctg

SEQ ID NO: 126189 - DNA, 122 bp, Homo sapiens
cctgcccccgagcgtggggccagttggttctgattgcgcgccgcccgggctcccgtggatcgggctggtccttcccagagttaaagctcctcccagtcgctccggagcccgcggggaccaag

SEQ ID NO: 126190 - DNA, 122 bp, Homo sapiens
cgcctgtctccatgtgccgcgcagctgaggcacaacattcaagcccgggggtggggccggcgcgcgccgggaggaagcggccgcgcggcagctgcggggcgtgggggtggtggtggcggcgg

SEQ ID NO: 126191 - DNA, 122 bp, Homo sapiens
tccttcctttcctggggacacactcaggttcctgcaggcaggattcctgccctcagagctcggagctcagggtccaggggtgggctgatggagcatggtcccaaatccctgtgttctctggc

SEQ ID NO: 126192 - DNA, 122 bp, Homo sapiens
tccgtcagcgcggcccggggagatcgcccgcaggcagcggaggcgcggcgggccgggggacgaccagggagcccctaacaaagcagctttgggagggccggaggcctctgcctccctcggcg

SEQ ID NO: 126193 - DNA, 122 bp, Homo sapiens
acatttactgaatacccactatgggccaagtactattcttggcctagggatgtgtagcaacgaaaaaaatctgcaaaatctttgtcctcatggaacttacaggggaatgaatgaataacaaa

SEQ ID NO: 126194 - DNA, 122 bp, Homo sapiens
cccaggccccaagccgaagcccaagtgatggggggggtccccatgtccctcccctttttccgtcccagagatgtgggctgcaccttatcacaccagacattccgattccccacggctgagtt

SEQ ID NO: 126195 - DNA, 122 bp, Homo sapiens
aaaagctgcgaggacgcgcattttaacctccagggacggcttgagccccgccctgcctttcgaaagtgctgggaacggattttatcagcaggcgaaactgtcctcaaagctccgtggcccag

SEQ ID NO: 126196 - DNA, 122 bp, Homo sapiens
cccggcgagcggaaggggctccgggccgagccgagccggtggcggggagccgaggggcggcgctgcagacggacaaagccaacagcagacagacagacggagggggaaaaagatggcgacgc

SEQ ID NO: 126197 - DNA, 122 bp, Homo sapiens
cccagacgagtccctggccctggtgagagactgaagattgctggggactccacgttcaaccgaatcccacgctggtgggaagaggacgcggtcgatacaggcgtcccgcgggtcactctggg

SEQ ID NO: 126198 - DNA, 122 bp, Homo sapiens
aaaccgtaaaaggctggagcgggcggggtaggtgtggctctgtgtgcgtgacctgagccccggtcccagtccctgtagtctcctgcggccgcggcctctcagccatgggcgccgtctggtcc

SEQ ID NO: 126199 - DNA, 122 bp, Homo sapiens
ggctctggtgctggtggcgccgcgcgacggccgcgtagtgttcaattgcgcctgtcgcgacgtgctggcctggaccttctccgagcagcagctggacctgtaccacggccgcggggaggcga

SEQ ID NO: 126200 - DNA, 122 bp, Homo sapiens
gagactgagctttcttcagcctgcagtgaaatacatgcaggaagggttagatacgcgccgcggagaaggaaatccaagcgccctcctgggcagacggggctggagcgggtgcactagggagg

SEQ ID NO: 126201 - DNA, 122 bp, Homo sapiens
ggcggcggtggctatttatagtaggtgacgtcaccttgaaatagaccgttagggccggcccgcccttcccccctcccactcccgccgctccccgccgcccggcctggccactctcactgcgc

SEQ ID NO: 126202 - DNA, 122 bp, Homo sapiens
tattaaagatatttataaacgaacaaaaagttggaaacactttgcataccaaagctcaggcgtgggcgagagcggggagactagactccgtccgcggtccagggctgcatggggcagcgatg

SEQ ID NO: 126203 - DNA, 122 bp, Homo sapiens
gtggagggaggctgggggcggggcctggttctaggagacacgttctagggatggggcttgcgctctgcggagatgctgggggtgaggcttgagctctgggaggggttggaggtgggggtgga

SEQ ID NO: 126204 - DNA, 122 bp, Homo sapiens
gtcgcgcttcctagtgccgtttatagggtcccggcacttccgctgtcgggttagaagcggcgcggtcatggcggagcgcggacagcagcctcctcccgcgaaacggctttgctgccggccgg

SEQ ID NO: 126205 - DNA, 122 bp, Homo sapiens
cagggctcacgctgttgttctttgtgtctgtgcctgggacagggcatggcctgtgtgggccgcaccaaggaatgtaccatcgtcccgtccaaccactacggacccatcccggggatccccgt

SEQ ID NO: 126206 - DNA, 122 bp, Homo sapiens
cgggaagccctggggctggggaggaatcctctaggatcatgatcgcagctgctcttattgcgcgcgtgctgagtctgcgggtacagtgccaggcactgcacgtgcacctcgccacctgatca

SEQ ID NO: 126207 - DNA, 122 bp, Homo sapiens
cttaaatgaaaccatgcgtgttgaatccccggagtctggccccttctgttggttgagcaccgtgtctgcggggtttgtctgtgctgttgtgtgttgcaaggcttttgcgacacaaaccagac

SEQ ID NO: 126208 - DNA, 122 bp, Homo sapiens
cacaactggaactgatctctggttatgccaatctaggtctgcctggcagggtgagtctaccgctcgaaagctgcacagaggaaatcctccctcctccaggttcaggcccggagttacgagcg

SEQ ID NO: 126209 - DNA, 122 bp, Homo sapiens
gttcaacaacagtggttggctgaattcattcatttattcattctttcaacagaatgttaccggacacgtaacatatgctggtcaggaccagccacataatttgcaaggcccagtgcaaaata

SEQ ID NO: 126210 - DNA, 122 bp, Homo sapiens
acctgtgggtcacagtcctcaggatatgttgtaactcatttaaccctcaaaatcaccttccgaggtatgagcagagttattcaccctgctcagaaaactggtgttgagaaatgttcagaaac

SEQ ID NO: 126211 - DNA, 122 bp, Homo sapiens
acgtgcactcctccagtagcggctgcacgtcgtgccaatggcccgctatgaggaggtgagcgtgtccggcttcgaggagttccaccgggccgtggaacagcacaatggcaagaccattttcg

SEQ ID NO: 126212 - DNA, 122 bp, Homo sapiens
acccagctcgcagccacgtggggaagcgcggccctgccctcaggccccgccccactcacgcgtcaggccccgcccaccccaccgccccccgctcccgcgtccaggctccgccccgtccccgc

SEQ ID NO: 126213 - DNA, 122 bp, Homo sapiens
attcctcccctcctttcccccccgcaccagtcccctagagaggcgtacccgggtcccgcccgccagagcctgagctttgtaccgcccaccaaggccacgccccctaccagctgtggggcgcc

SEQ ID NO: 126214 - DNA, 122 bp, Homo sapiens
gggaacatactttgacagcagccactacagaacttgaacctgaatacaggctgcaatccacgtgtgagatcttccctgctggcattggctgctccctcacctgggtccccaacatttcacac

SEQ ID NO: 126215 - DNA, 122 bp, Homo sapiens
gcagagttatgtcatgcccaggccagcagggggctccatgaggattcatagaagatgccccgcgtctcggcgcctttggtgctgcttcctgcgtggctcgtgatggtcgcctgcagcccgca

SEQ ID NO: 126216 - DNA, 122 bp, Homo sapiens
cagcagcatggcggggctccgacgcccgcagcccggctgctactgccgcaccgcggcggccgtgaacctcctgctgggcgtcttccaggtcctgctgccctgctgtcgcccgggaggggctc

SEQ ID NO: 126217 - DNA, 122 bp, Homo sapiens
ttagtgatgagggaatagaactgtgatactttgctaagttaagaaaatgctactattgttcgttgataatatggttgaatgtatcatttggtcccctgtagtaaatcccacagtaacggaag

SEQ ID NO: 126218 - DNA, 122 bp, Homo sapiens
tttcaaaaaaattaattaattaaaaattaaaaaataaagacctagcaaaccctgaagccccgggcatacctgcatgcttgttgtatctctaagagggacacttggatggggcatctgtttgg

SEQ ID NO: 126219 - DNA, 122 bp, Homo sapiens
ccagcgttggggaggccagggggcagagacggcagctgccaggtgagcctccagtggagccgaggtctggcgcactcagccaagccccaagcggccgtggcctgacagccgctgctcaagca

SEQ ID NO: 126220 - DNA, 122 bp, Homo sapiens
aaggtggtatgtgttttaggatgctcaactttgtgtactttatattttgtgtacacatctcgtgcccagcctttagcaagactttccgaaattaatgttttgattccagaaacttcaggcca

SEQ ID NO: 126221 - DNA, 122 bp, Homo sapiens
gagggtaggcgggggcggcctgggccctcccacttttcagggctcctgggccagttcgcccgcacagccctcgggaacttgttaacaggaaagcctggcagagaaacaaatgccagcgtttt

SEQ ID NO: 126222 - DNA, 122 bp, Homo sapiens
gtgcctccggggcttgtggctgtgcccgcgagcgcgctggggtctccagccagtgggtaacgcatattgactgatctttcagagacgtttgtacccgttcaaaggtgacttaactccatggt

SEQ ID NO: 126223 - DNA, 122 bp, Homo sapiens
gctgcaaacgccctctccagctccagtagctgccctttgctgaaggtggtccgctttctccggtgggaacccaacccgctgccaccgtctgcaggccatggtgggggtcaagctgggactcc

SEQ ID NO: 126224 - DNA, 122 bp, Homo sapiens
cgcggtcaccattaacggaccctgcatttgagccccatcccctcgctgggcaaagaccatcgcccacacaccgctcacatctgctgccgagagcttccagaattccaggccgcgtttaggaa

SEQ ID NO: 126225 - DNA, 122 bp, Homo sapiens
aggccggcgggcggtgatgtggcgggactctttatgcgctgcggcaggatacgcgctcggcgctgggacgcgactgcgctcagttctctcctctcggaagctgcagccatgatggaagtttg

SEQ ID NO: 126226 - DNA, 122 bp, Homo sapiens
tgttctgcctgcatagcatttaacataacacttccacatctattattttatttagctctccgagccatcccatgatgtaagtcattaggtattagcctcatttgttttcttttgtatttttt

SEQ ID NO: 126227 - DNA, 122 bp, Homo sapiens
atgggtgctcaggccccagggactctctggttccaaggagcctcaagggcagtggggcctcgggcttgggacccaagccctgcctctctccctggggaggcagagcagggtatggggttggg

SEQ ID NO: 126228 - DNA, 122 bp, Homo sapiens
agaaacaaaacaaaacaaaaacccaaaaaaactgcatttctggccgggcgcggtggcttacgcctgcaatcccagtactttgggaggccggggtgggcagattacctgaggtcaggagttcg

SEQ ID NO: 126229 - DNA, 122 bp, Homo sapiens
ctgtggggacctcagcaacgccctcaagtgctattcccgggcccgggactactgcaccagcgccaaacacgtcatcaacatgtgcctcaatgtcatcaaggtcggcctgcctcggcgggcgg

SEQ ID NO: 126230 - DNA, 122 bp, Homo sapiens
caggctggatagaggtgtaggctgagggaggccctggatcctggggagactctgtgcacacgccagggaagacgctggccccggatcctgggaagactctgtgtgcacacgccagggaagac

SEQ ID NO: 126231 - DNA, 122 bp, Homo sapiens
agaccctgtctcaaaaaaaaaaaaaaaaaaaaaaaaaagtttggaacagtggagtggcagcgccatcatatggctgttgttgtgcttatgttgagaggtgctttggggtttttttgtttttt

SEQ ID NO: 126232 - DNA, 122 bp, Homo sapiens
tcttatattctgttccagaggctgaattaaacaaaatctacgtgatcgccttggagatgccggggatcgaacccggggcctcatacatgcgaagcatgcgctctaccactgagctacatccc

SEQ ID NO: 126233 - DNA, 122 bp, Homo sapiens
aatgctcttaagaaaagtcattgcacaaaattcatagaatgacaaaaatttggactagcacggtcagcacaattataggaaagaagggatatgaacaggtttccataaaggggaaaggggag

SEQ ID NO: 126234 - DNA, 122 bp, Homo sapiens
tttggacaagttaatgaatctctcttatcttcagttttctcacctgtaaattggagctaacggtatcaaccacgctatggtttgaatatggtttatttggccccatcaagtctcatgttgaa

SEQ ID NO: 126235 - DNA, 122 bp, Homo sapiens
tctacatgccgcaacatagtcaatttgaaaataagcatatccagaatggtaaagcacttgcgcagtaattcagccatgctccttctaagtatgaaaatctgaatatcaaagcacggtaagga

SEQ ID NO: 126236 - DNA, 122 bp, Homo sapiens
ggcttaacaataacaagagaaacctttatagacacaatatatcttgcattaaatcagagacggtttaaatcagtcttgtaacttctaatattctgggctggcaactacagcatgacaaatgt

SEQ ID NO: 126237 - DNA, 122 bp, Homo sapiens
cccttcctcttctcacaccaggacgccggggtgtcgctcgtggaggatgggggatgggatcgtttcttcatccgtgcatcttttcagggatgtttccgttgtttccggatgttttcgttttt

SEQ ID NO: 126238 - DNA, 122 bp, Homo sapiens
gataacgaggagggaggaagctgagaggctggtggcacggccgtgctccgtggagtaggtcgtgcactcccggagcccctctccctcctccccggatggaaatccacacaactcctttgccc

SEQ ID NO: 126239 - DNA, 122 bp, Homo sapiens
cagggagggtgcttcatgtagaacattccaggagcccaaaccctgccaagtggctgctggcggtgaagagcagctgcagcacagggtgacttgggctcctccggtctggcactgtcagctcc

SEQ ID NO: 126240 - DNA, 122 bp, Homo sapiens
ctggccgtttgctcggcctcggccccagctgccctggggcctagccactagctcccctggcgctagcctaccctgtcttgaccgcaccctgaagatttgggaagtctttctccatcccaaga

SEQ ID NO: 126241 - DNA, 122 bp, Homo sapiens
tggtgctggtttaattacagtcagggtacagacaggaaatcacaggcagcacagtcactgcgtctgactgccatactggtgacacctagaccctcccactgccttaggctgcgtgacctaca

SEQ ID NO: 126242 - DNA, 122 bp, Homo sapiens
tctcatgtgggacttgcccttaagtcaggagtcagggggacagtggccttctctaggggacgggccttctgcactcatctggggaggatttgggctccaggtttctggtgaacagctgaggt

SEQ ID NO: 126243 - DNA, 122 bp, Homo sapiens
aatacagatgtacttgcctttgacgtctgcctccctaagtatggttacagtttgtcactccggttctggagggccaccctgtccctgaattcacgcccaggtcctgagggcagaaccatcct

SEQ ID NO: 126244 - DNA, 122 bp, Homo sapiens
tggtttctcagtggcccaggtctttaaatccactgtgtattaccctcacagggcttctttcggcgaacgattcgactcaagctggtgtatgacaagtgcgaccgcagctgcaagatccagaa

SEQ ID NO: 126245 - DNA, 122 bp, Homo sapiens
tgctctacatgtgagaacaaagaaataaagatgctactccattccagtgaggcaggggtgcgtgaggacacacagccagaaggaatggaatgccttttgcaaattggtccattcgtatttcc

SEQ ID NO: 126246 - DNA, 122 bp, Homo sapiens
gcctccctggactcgcggtgcgatcgctgccccggcggcctccccggcctcgctctcggacgccccttgcccgagccccagcccggcgcaggtggctcggaatccccacccggcagctccca

SEQ ID NO: 126247 - DNA, 122 bp, Homo sapiens
gagctgagatgcctgattcgttcagactttcatgtgacagaggacagaaagcttctatttcgcttaagccgctataattttgggtatttggctcagcagttggacttaactcctaactaatg

SEQ ID NO: 126248 - DNA, 122 bp, Homo sapiens
ggggggcgggggacacctccgcggcgcgtacctcctccccagccccagttcccctccacccgcttcatccccgcacacactcagccaggtcctggtctcctgaggagtcttctctctgcaca

SEQ ID NO: 126249 - DNA, 122 bp, Homo sapiens
cacagaagacaggagagagacaataccaaagacggaaacagacacagcacgggtgctcgccgaggctcagctgtccgggctctgggcccccaggagcgccggctgctccaagtggcactgcg

SEQ ID NO: 126250 - DNA, 122 bp, Homo sapiens
aggggcatttgcaggccgaaaggagcccgagcccccagtgcttttctctggcctgagagacggggtcctcccgggccacgggctcctcacctgagcttgctcttgagtgcgttcacctcgcg

SEQ ID NO: 126251 - DNA, 122 bp, Homo sapiens
gctgtttgacgtgcctgccatcgccatggtgacagcttcagaggctggaacaagcttaggcgggggttgagggagctccagggacagcttccggactgtgggtccagcagcatgggctgtgg

SEQ ID NO: 126252 - DNA, 122 bp, Homo sapiens
ccagccaggaggccccgcacttcggtgttttctactagctctgcctacctccgtctgcgccgtctccctgactagtttgacccttcgagggccgccgtagtgcgtcgcctccgttgccgggg

SEQ ID NO: 126253 - DNA, 122 bp, Homo sapiens
cccaagcgcttcttattggctaatgtggagcgaacctgcacatccattgactgaaagctccgtctatttgaggctaaccgagagcgtcccttccttttgtgttgcctggaaacagactgtcc

SEQ ID NO: 126254 - DNA, 122 bp, Homo sapiens
gcgtccggggagcaagggccatggccaccgtgcaggagaaggctgctgcgctgaacctctcggctctccacagccccgcgcacaggcctccgggtaggtgccgaggactgccgcctgggatg

SEQ ID NO: 126255 - DNA, 122 bp, Homo sapiens
acactaacccctagtaaacagactcttcaattcaacttatcaatgcactgcgaagatgtccgacttcattgcaacaatcctgggaggatgctctgagctctgccctgcccattagaggctgt

SEQ ID NO: 126256 - DNA, 122 bp, Homo sapiens
ctggcgaggcaccctggcgcccaacagacagacgctggagcctctgaatcgcaggggcaccgggctctgcagacccaaaggccaccgaggagccgccacaactggcatctccagcccgccta

SEQ ID NO: 126257 - DNA, 122 bp, Homo sapiens
aaggttatcattcacatgcacatcaagggtatacctgtagaggctgggcttggtggctcacgcctgtaatcccagcactttgagaggctgaggctggaggatggcttgagctcaggagttca

SEQ ID NO: 126258 - DNA, 122 bp, Homo sapiens
tgccagggcacgtttcaaagtcgtcctgtgagcttggctggggctcgggactgctctctgcgaatttgaggtcagccgggtggatatcttggcaaaccacatcctccttcagccggaggatc

SEQ ID NO: 126259 - DNA, 122 bp, Homo sapiens
ttccggctgctgcaagaaacgactgcaaagcaggtggcacactggtaccgtttaggtgagcgctctgcgtgagtgcgtgctgctccactgggcctcaggtggtgccggtgccattctaggag

SEQ ID NO: 126260 - DNA, 122 bp, Homo sapiens
tgcacgcagctcacccacctctacctgcgccgctgcgtccgcctgaccgacgaaggcctgcgctacctggtgatctactgcgcctccatcaaggagctgagcgtcagcgactgccgcttcgt

SEQ ID NO: 126261 - DNA, 122 bp, Homo sapiens
cccccaggccccgccccgggcgcgtccactgttgcgggagaatcggctccgctcgttctccgctgttccggccgtccctccaccggccccgccaccgctggccgcagtttccgccgcgatag

SEQ ID NO: 126262 - DNA, 122 bp, Homo sapiens
tccaggtctggtggttttcctgccaggtcatgatgaaaccatcctacttctgttgaacctcgtcccaggcaggatcggggcctgcggcctacagcctgtcttcccagcgctccagggctcgt

SEQ ID NO: 126263 - DNA, 122 bp, Homo sapiens
gggtgtgacctgagggggtcgcagagcctgcagtcctttcggcttgggctgcgagggatgcgcaggagccctgggtgttccgcgggctgagggcccagaacgggctggggaggagagagggg

SEQ ID NO: 126264 - DNA, 122 bp, Homo sapiens
gttgttcttgggagattctttccccaattgtcaattttttgcttatttttagtagtgacccgagccaggaactgcgcctttaagccgctttcccattcggggaaatcgacgccagcactcga

SEQ ID NO: 126265 - DNA, 122 bp, Homo sapiens
ccatcacgtcaaagcggatcccgtaggctttcatcagggtgcggaactccaccccggctgcgtctcggtaatatctggcaaatctgagggagacagggcccaggggaggcctcagcctgcct

SEQ ID NO: 126266 - DNA, 122 bp, Homo sapiens
cgcggtccggcggaagccgccgcggaggtctcgctttttcccgccggctccgctggaagccgcctcctggccgccgccatcttgaatccgccgctctccgccaggtcccgcccccgccgcgg

SEQ ID NO: 126267 - DNA, 122 bp, Homo sapiens
agttgagttagacaaagcttgaaactagaactttggtgttagtagcattgaggtcatcgacgatgttgactaaaacagttttggtggagagatgacaacagaagcctgaacagagtgcactg

SEQ ID NO: 126268 - DNA, 122 bp, Homo sapiens
ctggcctttaagtcctttatcccaaggtccctttaaatactttgtcccttacctgagtcccgcccagggcaggtaatggcaagttccgcccacctgccagaaacggggatcaggcctggtta

SEQ ID NO: 126269 - DNA, 122 bp, Homo sapiens
gcagccccagtggaaacttgcaagagacagtcaaaaatgacttctcacccctggtggattcgtggctagtgctttgtttaccaggttccagaatagatctccctgaatgctgcttgcagaca

SEQ ID NO: 126270 - DNA, 122 bp, Homo sapiens
aagtactcggccaggtcttcctcttccatgatgcccagactcatggtggcagtgacctcacggcccaggcagctgactcttcacagtgaaattgtgggtagcagagccacaggtggctcagg

SEQ ID NO: 126271 - DNA, 122 bp, Homo sapiens
agtaacccccgtgggagcaggaggagaagtttctagagcaacagttgtaggacatgttgacgggaagatgtgagttcagctgagtgtacctgggaagattctgagttttaacgtggcatcct

SEQ ID NO: 126272 - DNA, 122 bp, Homo sapiens
ctgcccccttcacccagccgggaacaaaagcacagagcagagcccagaactggctgctgccggtcggggcgggggtggaaggggaggctttaagcctggccaaggtcagaactgaagcaggg

SEQ ID NO: 126273 - DNA, 122 bp, Homo sapiens
ctcccaggttcaagtgattctcctgcctcacccaccagagtagccgggattataaatgcccgccactatgcccagctatttttttgtttttttagtagagacgaggttttgccatgttggcc

SEQ ID NO: 126274 - DNA, 122 bp, Homo sapiens
ctgtttcccacctgcattcagttcaaggcaaaaaggctgtgagagcacgctacagcgcagcgcgaaaggggcgactaaggtggagaagagagaggaaaacgaaataaacccaaggaaccaat

SEQ ID NO: 126275 - DNA, 122 bp, Homo sapiens
cggccctacctagaacacaagatcggctggctggacagcctgggtgtgcagcttggcaagcgctacaacggcagcgacccagcctcgggcccctcggtgcaggacaagtatgtcacagccct

SEQ ID NO: 126276 - DNA, 122 bp, Homo sapiens
cgagcgggtgacttttgtgcattcgttttaatttttggaaatctctcttttttcctccctcgctcgctgccgggcatgtcctgatctggcggccgctcctaccaccctgggcagccgagcag

SEQ ID NO: 126277 - DNA, 122 bp, Homo sapiens
gctggatttcttcatcgtcgtggcggggtaggccccgcctgggagaggccacagcgctggcgaaggggccccgcccaccccacagggatccctgtgtcccacctgtaaagaaaaatgggagg

SEQ ID NO: 126278 - DNA, 122 bp, Homo sapiens
gtgacaggacgaggtttcccgtggaaccctcgggacagctctggacgctcgggactcggtcgctttcagggtcagatgtcagaggtggcctttgccctctgccctcagccaatacttttcct

SEQ ID NO: 126279 - DNA, 122 bp, Homo sapiens
ggcctgcctgggcccacctggctgcagcggggagctgagcctccctgaggaggaaggaatcgcacctggggcagcaacagcagctcctgcctgggtccctcatggccgcgtgagccgcttcc

SEQ ID NO: 126280 - DNA, 122 bp, Homo sapiens
tacgttaaggggaaatcactataatcaaatctctacgtcttgcctgctgctaaaacaaggcgctttcttcctgggattttgcagggacgactgatacacacacggtctccctacacacaagc

SEQ ID NO: 126281 - DNA, 122 bp, Homo sapiens
gctggtgacaaaagaaacacgcaggcagagttagtcacccgtcaaggggagaagcctccgcgcccagcaaggacgctgcaggaccccctaccccgggtttccgcacggctccatccccagtg

SEQ ID NO: 126282 - DNA, 122 bp, Homo sapiens
tcgccgcggtctctgccaggaccccgacgcccagcctgaccctgccattcagcggggctgcggctccacggcctgcgacagcagccccacctggcattcagcgcgctcccgggggcagaggt

SEQ ID NO: 126283 - DNA, 122 bp, Homo sapiens
gaggtcaaaacatttagtctggtcttttcaggtgaggacttccccatccaggcacagtgccggtccaatccccctttaatttcccatgactcctcgcgtcctgaagccccgcccccagttcc

SEQ ID NO: 126284 - DNA, 122 bp, Homo sapiens
gggagtcgagcgcggaggctcggggggcgggacgcggggcctgggagcggccagggaccgcggcagcgcctcagtgccagcctggcgcccgcgactgcctgccccagcccctcagtggcggc

SEQ ID NO: 126285 - DNA, 122 bp, Homo sapiens
ggctgagcccatgaggccgactctgccccagagtgtagggtccagccctccggggcttagcgggtgttttccccgtgtgcagagacaagaagagattgtaataaataaagacacaaaacaaa

SEQ ID NO: 126286 - DNA, 122 bp, Homo sapiens
tttatcatgttgacaatggggacctgaccccctttcctgcctcatctccatctccatctgcgacccccaagtgcaccctgcatctctgccctagcagctttgcttgtagctccttgctaccc

SEQ ID NO: 126287 - DNA, 122 bp, Homo sapiens
cagtgtcctcggaatgttctcagagcacttttaaaaaccggagagtcggccggtggctcacgcctgtaatcccagcagtttgggaggccgaggcaggaagatcacttgaggtcaggagttga

SEQ ID NO: 126288 - DNA, 122 bp, Homo sapiens
aaggccagcgccaacggacggccgtgggacacctggaacacaggacggcaccgtgaggaccgtgagggtcccagccccgcccagattcccgggggaggaagttctcaggaaacacgaacgcg

SEQ ID NO: 126289 - DNA, 122 bp, Homo sapiens
gcctctggcgcgctcgaacttccggcccttggagtggacgtagggtttggtgtggctgtgcggggttcccggggccttgccaaaatgcccgtacacctttcggcccttgagaggaccggaga

SEQ ID NO: 126290 - DNA, 122 bp, Homo sapiens
catgaataggttgcctcctggggacccagaagaccagcttccaatgtgttccccagcagccgttccctccaccagggaggctgagtcactgacacagcagggagtacagcaatcccccttat

SEQ ID NO: 126291 - DNA, 122 bp, Homo sapiens
tataaacaagggtgaccaaaccctaggccagagttacttaaggcccttgtagagtgctcccgaatggtgcagtaacctccaaaatgtcagagcttcaatgccaaagccacaaggaagaccac

SEQ ID NO: 126292 - DNA, 122 bp, Homo sapiens
ctgttgccgcagacagcggagggagctccttgcggaagggatccaggctgcaggcggccccggtcacagagactgtgtggggagcagggaggccctgagagtcaacacagcaatgagggtgt

SEQ ID NO: 126293 - DNA, 122 bp, Homo sapiens
gcgcggtggccagcgcgtgtcctggcctgccatcggcttcctggtgctcgcgtggctcttcgcatttgtcaccatgatcgtggctgcagtgggagtgaccacgtggctgcagtttctcttct

SEQ ID NO: 126294 - DNA, 122 bp, Homo sapiens
tggaggacacatacgccggaagattgagagggaggccgtacgggtactacatagcagacacgtcagactgggacactgcctgtttacagaggactataaaacccctgccccggactcacttg

SEQ ID NO: 126295 - DNA, 122 bp, Homo sapiens
agatgcgaaacagcagctacgggtctcaagaacagagtacaacaaacatgcctgcagacccggtcttctggcagtgcccggctgaggggaatctctctcatgttggcctaagcctcaagtca

SEQ ID NO: 126296 - DNA, 122 bp, Homo sapiens
tctgccagatgggaaaggtgggggccacggtgacccacattcacaccaaccggagacccccggggcaattctgggcccacctggcattgaatgtgggacagacacaaaccaggccgggtaac

SEQ ID NO: 126297 - DNA, 122 bp, Homo sapiens
ttgctggggaccgtcctgcctcccgtcggggcctgcgctgagactgggctccatgccagccggggctggctggccccctcgctccagagagcgacctgcacagagtcccctcagccatgagc

SEQ ID NO: 126298 - DNA, 122 bp, Homo sapiens
ccctgctcggttcacgccaaggatgtaattcatgcacacttggacgtccaacatggctgacgcgccttggacacacagcctcggcgctgcatcattttttaatcagctatctgaggaatatt

SEQ ID NO: 126299 - DNA, 122 bp, Homo sapiens
ttccccctttgtggacgcgaccattggccccgcgctcggaggtggtacggaccaaccctacggtcatagattttccgagtgaagcttttgactaagtctcaggaaagcgttagctacagaat

SEQ ID NO: 126300 - DNA, 122 bp, Homo sapiens
accagcagcctccacgtcctcacttgaagtcatcctcacccaggttcactctggggaggccgcccttgggcctttctctacggctgcagctgacacttgtccagctggtttctcttcctcac

SEQ ID NO: 126301 - DNA, 122 bp, Homo sapiens
ttagacctttatgggccagaagacagcaccagaggaatccacactaacaagctttgctaacgggcctttatcaccacttacttgccttcccacaagttctgcccctagacaaagttcttccc

SEQ ID NO: 126302 - DNA, 122 bp, Homo sapiens
cccagaaacactcaaccgtctgggaatatttttctcaaaggcttcggctctcttctcggccgctggtggaggaaaattacaaaaataagtgccatgatggcgcatcttttgtaggcagtagc

SEQ ID NO: 126303 - DNA, 122 bp, Homo sapiens
ctatggccagacacccctggccttgaaccctggctctaaccttggctaacttagtggcaacgacctgggacaagttcctgaccttcctggggcctcactttcttacctataaatgcagtaac

SEQ ID NO: 126304 - DNA, 122 bp, Homo sapiens
caaggcgccaggcgaggtacctgggttaggagctgctccggcgtcagctggttgatccaacgtgtgtatcgttcggtggagttagggggatctctcctcactctgcaaccaatgatctgtga

SEQ ID NO: 126305 - DNA, 122 bp, Homo sapiens
aaagtctgaggcacactgtgagcgggaacgaagccatcacctgccccggaaggccccttccgcttggagcagcaccgtctgcccggagttcccagcagtctcccaaagggcacgtccagggt

SEQ ID NO: 126306 - DNA, 122 bp, Homo sapiens
tgggaggactcgggcagctttcctgggatatcacaccatatagactgagaatttcagaaacgcaaagtgcgcgtcccagcagggcgagaatggcgttaactatgtcaccaccgcccaaattc

SEQ ID NO: 126307 - DNA, 122 bp, Homo sapiens
atgcccgagagcccaaggtcccgggacctggtgcaggaagagccgcctgcgcgggggagacgcggggatcaccggccacaccccggacgctcagtcggggccttactcgggggggcggcagc

SEQ ID NO: 126308 - DNA, 122 bp, Homo sapiens
acccttacgtttttcctctttgtttctgctgtatgcatacacataaagagaaaaagcacacgaaagtgttaaacagtggttatcctttgagtgggaaaaacaggtctactctccaaatatag

SEQ ID NO: 126309 - DNA, 122 bp, Homo sapiens
gttacataaggatgatcatagggtcgttgtgaggattatgttgggatagttcatgcaaagcgcttaacacagtgcctagcgcatagtaagagctcagtaaatgttagttgttgtcttccttc

SEQ ID NO: 126310 - DNA, 122 bp, Homo sapiens
aggtggaatgaaccacccaggtcaagaaacagaacaaagccaagccccagaggcagactgcgatgactccctaagcggataaaacacaagggagggtgagggaattggagatctgccacgct

SEQ ID NO: 126311 - DNA, 122 bp, Homo sapiens
tgtgtggagggggacctgtgagcggaggatgtagagagacagctgagaactgtgagacagcgccagtccccaaggccccagtggctgtgtggaggtcagaggtgctgccgtgtggtcccgtc

SEQ ID NO: 126312 - DNA, 122 bp, Homo sapiens
cgcgcagaaccggcggtggaataaccagcgcctcaagtgtgtgcatctgggaccagggggcgggggagggggacctgcggccccgcggccaacccggttggtgcagacttggggatcccaga

SEQ ID NO: 126313 - DNA, 122 bp, Homo sapiens
ttgggctgccccctccagtgtactccagaaggtgccactttatcctggctgtctgttctccgatgagcagcattagagcataatgccaggggatgtggaatcacctccagagctgatttgtt

SEQ ID NO: 126314 - DNA, 122 bp, Homo sapiens
cagcccagtggagaaaccaggagccctggaccgcgagcggcggggtcggggaggcgacaacgggaagcccctgttggatcctgggcactcaggacctagtgcgccatgggcgccctcccgca

SEQ ID NO: 126315 - DNA, 122 bp, Homo sapiens
aaagacgctgcctcacgaggccccgcaatgctcagccgttgggttgggggaaacagtgctcggcggaaagacgctgcctcaggaggccccacaatgctctcctttcgcagggcttaggcaga

SEQ ID NO: 126316 - DNA, 122 bp, Homo sapiens
actccgggcgcggttctggaagcagtctcggggcaaggggctgctgcacggcccccaggacgaccttcgagacaatgtcctcaactacgatgagcaaggaggcggggaggaggaccaggtga

SEQ ID NO: 126317 - DNA, 122 bp, Homo sapiens
ttgtttgtttttttgtcttgttttctcctcttgaagaggacacacggagccctgggttgacgttataggaggtgttggtgccgtgcactgaagggatctgctgttttctccttcctgcaact

SEQ ID NO: 126318 - DNA, 122 bp, Homo sapiens
ttgaaaaaaactttataaagacatctttaatcattccaaaattgtgtccgttttcttgagcgttttgattttttacttttagcttataccagctgaatggcagccttgcctaatccacctac

SEQ ID NO: 126319 - DNA, 122 bp, Homo sapiens
agaaagtggaagttctgaatacaaggaaagaagggcagtgaaggaggcacagctggatctcgtgctatggcactttgatgagtttatttggattttagcagtaacctggtgttttgaggtag

SEQ ID NO: 126320 - DNA, 122 bp, Homo sapiens
tggagggttaaggcgggcgcgtcccgcgggtgggcggggggggggggacgggaccggtgccgggagctccgctgccctggcgtcccctgggtccaggcccagtcgctccttgggcctctctc

SEQ ID NO: 126321 - DNA, 122 bp, Homo sapiens
ggaaagcccggcgaccatcatgcccggctgccgtgggtggtctggattggaggcggcagccgggctgtgtttgtgcggagggtggcagggggccagcggaggaaactgcccaggcgccagcc

SEQ ID NO: 126322 - DNA, 122 bp, Homo sapiens
cctccgccccagggagcacatccttcctggactccttcacatctgccgcagtggaagggccgaggggacactcagggctactggcccctaggcctgcccaggacccccatccccggtcttga

SEQ ID NO: 126323 - DNA, 122 bp, Homo sapiens
tgaggcaggagaatagcttgaacccgggaggtggagcaattagccgggcgcggtggcgggcgcctgcagtccctgctactcggaaggctgaggcaggagaatggcctgaactcgggaggcag

SEQ ID NO: 126324 - DNA, 122 bp, Homo sapiens
tgacccctgtccgcttctccattgttgggcgctatcaccccgggaggggctgggctggaccgggcgcgcccgactcggaggagggacgcgtctggagaaccgggacgtggagagagggggcg

SEQ ID NO: 126325 - DNA, 122 bp, Homo sapiens
cttagtacacagcaatagataactaatacaatgatattgaaacatactacaggctgggcgcggtggctcacgcctgtaatcccagcactttgggaagccaaggtgggaggatcacttgaggc

SEQ ID NO: 126326 - DNA, 122 bp, Homo sapiens
tccgggcggtggggttgtccagcccaggaattgctgggcccagaagccagggactgcctgcgcaaaggtacccaaaagatgcccttaagcctaactaagctcaaattcctctccagctctcc

SEQ ID NO: 126327 - DNA, 122 bp, Homo sapiens
aaccccccagaaggcagaaattgctaacatatctgcatataggaaggaacaaacggggcgcgctcccgcacacgccgcctttaagaagctgcaccattctctgcaagggtccactgctttat

SEQ ID NO: 126328 - DNA, 122 bp, Homo sapiens
atgctagcagcatataagtgacctggctagtttatattttatctaggaggaaggacaggacgcctgtgagagactcaggaacccagacggacatgccagcccttcctgatggttggagtgac

SEQ ID NO: 126329 - DNA, 122 bp, Homo sapiens
ctgcccccccaaccccctctttagtcatttaaaaaaagatttttgtcttcctgagaagttcgcttaaaaggtttccatgggaacagtgaggggagatgaaggcagagaacagagatctgcag

SEQ ID NO: 126330 - DNA, 122 bp, Homo sapiens
ccgggcctgccaggggcggctttgcaggattcttccagccgcgggggacggggacggggacggggcggggtcccaggcccatgccatccacctgccaagccgccgggtcccgggaggcgttt

SEQ ID NO: 126331 - DNA, 122 bp, Homo sapiens
attttcataatttatatgagctcttcgtgtaacaaaaataccaagctgctacgggaatgccggcaccgtggctgaaaaacagcacacgtggttagcgctgccggctggccttacccagggga

SEQ ID NO: 126332 - DNA, 122 bp, Homo sapiens
aaaacattaaacataaattacaatatgaattagcaattccacccctaggtatctaggatacgtcaatacaaaaacttgtacacgaatgttcctagaaacgttgtttataacagccaaaaagt

SEQ ID NO: 126333 - DNA, 122 bp, Homo sapiens
agggagcgcagaccctggggcctggtgctggcgggcaccgcaggagggcgggaggggcttcgtcccaggccctgggtctgggcagcaggtcagccagggaaacaggcttggtgctttgggcc

SEQ ID NO: 126334 - DNA, 122 bp, Homo sapiens
ccaggaggtgattaccttctaatcacccttggttttatttttaggtaacatcaaggaggacgccatgagagcgaaggccgttgggtaaccgccctttgctctcgtgctgcgcatctccctgc

SEQ ID NO: 126335 - DNA, 122 bp, Homo sapiens
gtgtgtgtgaccatagacgacccatactaatcaggtctcagagtaaatagcagcgcagggcgatctcaatgtaaattgcgcttgtcagaaacacacccccctccctcactttctctcctcct

SEQ ID NO: 126336 - DNA, 122 bp, Homo sapiens
cacgtagacccggatccccagctcccggaccccttccgactgctcccttcgccactcgcgcggcttccactcctggactcggcctccacccctgggcttggcctcaaagcctcctcagttgt

SEQ ID NO: 126337 - DNA, 122 bp, Homo sapiens
cttcccagaaaaataggagctaggattgcagcagagccaagccctggcagccctttcgggcgtccccaggcagtgccctgaagcccaggctcgccttttgtgcttcctgcgtccgctccagg

SEQ ID NO: 126338 - DNA, 122 bp, Homo sapiens
aagctcctgttctgagaatgaatgggactcagagctaagacctcatctgtaaaatggggccgcatgcttgacagggctgtttgaacgtggaataggatcctattcagaaaagtgctttgtaa

SEQ ID NO: 126339 - DNA, 122 bp, Homo sapiens
cctgcttaggaggtggacttcatccaggaggtttggggagaagaggtttacacaggtatgcgacatgatgacaaatgtgaaacttagaaaacaaacagggccatttccaaaactagaactta

SEQ ID NO: 126340 - DNA, 122 bp, Homo sapiens
acgccccgtgtggaaagctaacgtgctctttatttgggagacgggacagaaaacgcaggacggcgcctgcacggtgccagatactcactggcagccaggcgcagctgcaggaccgtggggta

SEQ ID NO: 126341 - DNA, 122 bp, Homo sapiens
ggcggggccagggcgcctgggggcggcgaattggcggatggggcctcgggggcggggcagcggctcctgtcagcgggtgaaatggcagcggcggagccggcggcggccgcggtcccgggggg

SEQ ID NO: 126342 - DNA, 122 bp, Homo sapiens
tagcctgcctttcccagagcccctcgctgtgaagccacccctgtagcagcagcgtgtctccgggaggacccagagaagcaacatcacccatgtgctgcacggaaccctaacccccgcatgtc

SEQ ID NO: 126343 - DNA, 122 bp, Homo sapiens
ttgagactccgcttcaccacttaagcagcgcggtgacatggggaactcacctaaccttcccgagccttcgtttcctactctgcaaaatggagataacaagtctgcattttattatgtaacta

SEQ ID NO: 126344 - DNA, 122 bp, Homo sapiens
cccggcacccctgggggcgctgaggcaaggaactctgctagccagctgcctccgaacgcccgctgttccccggccaggtggttctggctcttctgcctttccacacccagtcgggggagttc

SEQ ID NO: 126345 - DNA, 122 bp, Homo sapiens
gggccataccaagaggagaggctgatttccctacacgtgtcagggaaagtcccaactctgcgcagtgaccctcgcttgccattttcgccggtctctagggggcgctgccccgagactgggtg

SEQ ID NO: 126346 - DNA, 122 bp, Homo sapiens
ggctcggccgggccgcacgccggtgccccctaccgtccggagtcatccctcccgccccggcgctcgggctgcgatcctggtccctgccagtggaatctggaacaccagccagttgtgcgcac

SEQ ID NO: 126347 - DNA, 122 bp, Homo sapiens
ccatgtgactcgtggggggcggggtttggaatgcctgctcgggggaaatgaaaaccacagcgccaagccctggactgccgaggatgtctgcaaatgccttttcttaccatcgttcagtgcca

SEQ ID NO: 126348 - DNA, 122 bp, Homo sapiens
gatcagggtgtgttcagggaacagactgaaggtcccaggtatccccatataagtgcatttcggacagcagccccaacttccaactccctcatttgcagggtgccccattttcagcccccaga

SEQ ID NO: 126349 - DNA, 122 bp, Homo sapiens
acagacccccacccaggcagccccacggcccaggagatagctcacagctgccccctggcccgctcgagcagcacacatcagtggggtccaccagaaggcatcccgggcgttgatattccccc

SEQ ID NO: 126350 - DNA, 122 bp, Homo sapiens
gtgaggttgggcatggtttgcaataagtactcattttcttgagtttacagtaatgcctcccgcgctgctccgggttgcaaaagcccacactaagcctgtcgtcgaatgcgtgcgtgggtggt

SEQ ID NO: 126351 - DNA, 122 bp, Homo sapiens
attgacttcaacaccatgggccagatcaaccgtcagacccagcgccaacgccgcgtccgccggcgcctcgacctcatctaccccatggtcacagggaccttgcctaaggctcagtcctggcc

SEQ ID NO: 126352 - DNA, 122 bp, Homo sapiens
tccccggggtctcgccagccccttcctgcagccgccgcctccgaaggagcgggtccgccgcgggtaaccatgcctagcaaaaccaagtacaaccttgtggacgatgggcacgacctgcggat

SEQ ID NO: 126353 - DNA, 122 bp, Homo sapiens
cactgatggaaagggacaaaacagaagagccactatcagcactgggtgcgcctctctatgcgttatctgcatgatcttagtccccactaggagcccagtcataccctcatttatacatggga

SEQ ID NO: 126354 - DNA, 122 bp, Homo sapiens
cgtcagtaatccaggcgtggtaaaatctcccagcgttggggctggccaacggctgcaccccgcggtttttgctttttattgctttttgtatttagaggctatttcatacctctgaggaggcg

SEQ ID NO: 126355 - DNA, 122 bp, Homo sapiens
gacttggagtgaagccgatggctctccctaatgtgtgtgggcctccatcaatcagttgaacgtctgaatagaacaaaagactgactttccctgagcaagaaggaattctggcggcagacagc

SEQ ID NO: 126356 - DNA, 122 bp, Homo sapiens
cccgccagtgtctttcccgaggacacgcgaatcctggggggctcactccggcaaagaggacgagacactgcaccaaggacagggcctgacctctctggccgccttccccggggcctcagttt

SEQ ID NO: 126357 - DNA, 122 bp, Homo sapiens
ccccgggcggctccccacccatctgtcgcagaccttggtacaggcccagggggccctcggcggcctctccgggctgcccttgccccctgccgagttccgggcccgtgtctgcgcaagctgat

SEQ ID NO: 126358 - DNA, 122 bp, Homo sapiens
taggggaggctctgcacagtcctgtgctgcccgggagagctgagcagaagctgttgaagccggcctcctggactgagcttggtccagcagcctatccacgtgagagccctggctgtctggag

SEQ ID NO: 126359 - DNA, 122 bp, Homo sapiens
ttggcggcccggacgccggtgccacccgagccacccagcgatgctctgggccccctacgtcggggctgacctcaccgcccatcctggcggaccccgcccgctctaatgggaccgcgcccacc

SEQ ID NO: 126360 - DNA, 122 bp, Homo sapiens
ggtcctccctggctcatatttccctgtggggtcctcctccactctgcagtgccatgggcgcgcccgtgcagcgtcctctcttcacgacaggtggtggggagcatgcgtgcttgggtgtgtac

SEQ ID NO: 126361 - DNA, 122 bp, Homo sapiens
gctcgggcttgagttcgatgacgaggtcctgcatttccatctcgtcgtctgggttggcggcgggcgcgggctctactcggcggggcgcgctgccggccttgcggcgggacatgagtcgcggg

SEQ ID NO: 126362 - DNA, 122 bp, Homo sapiens
atacatttccgtgtgttttaatatttattttcactcactacaactctttcgtggagggagcggaatttaaacttccgggtcagcctcagtgcagcttgggaaacgtagttcctagtccccac

SEQ ID NO: 126363 - DNA, 122 bp, Homo sapiens
tagcatatgacctaggagcaggagtgaaggatgggagtgaagcaaggaaggaaagagagtcgattacagagctgtttcgttgagctggtcacagctcctgtgtccaatctcgtggggctgcc

SEQ ID NO: 126364 - DNA, 122 bp, Homo sapiens
ggacaattccagctttaatcaatacattttgttaaatgtgccataaaatgagactttttacgcctttataaggccttagatgtaaataaactcacccaaacaaaaaaactttttgagactac

SEQ ID NO: 126365 - DNA, 122 bp, Homo sapiens
gatggtaggcctatctctgtgatgagctgtttttttttctcaaagtttgatgagattcgccgtagaattccttctcacatagtcttgggcaagattttacccgatcttccaacacatgagtc

SEQ ID NO: 126366 - DNA, 122 bp, Homo sapiens
acggccctctggtggccgcggggctgttgggcagcagggtggaccctggaggcgccacctcgaacaccagcttggctctccagggaggcgtctgaggctcctgagctcacgggtccacgcag

SEQ ID NO: 126367 - DNA, 122 bp, Homo sapiens
ctggtgacaagggaaagagaagctgaagccaagctgcagaccctgtttgttcacaggctgcgcatccaggaactcagacaggcagtgggcagcaaagtcaaagagctgcaggagaagtgggg

SEQ ID NO: 126368 - DNA, 122 bp, Homo sapiens
cagggagcgcctcgtgccccagtgacacacttttccaacagccggcacgttgagctcttgcgcgcctgcgcaacgacaagactgtcgggatttgtagtccaccgacaaagtgggcggactgc

SEQ ID NO: 126369 - DNA, 122 bp, Homo sapiens
cgcatccacagtgcaccctgtgctggtggatggctcaggacagtaagcattcctctgccccgcatgatgagtgagggtgtctttagaatttctgagtcccacaaggaagtttttcagctggc

SEQ ID NO: 126370 - DNA, 122 bp, Homo sapiens
gcagacccagggggagagaagaccccgagcggggacggggaggcaatgatggaggaaagccgccccaaaccagttgagaggtggagatgggaactttataatagatttggggcggcaaaagc

SEQ ID NO: 126371 - DNA, 122 bp, Homo sapiens
ttgtaagtcttcgtgctgttgtaaaaattgaggtcgtggttttccacgcgatttggctggcgaagagaccacgaagccaccccccacgttttcaactgagtaaatatctaaatatttttgct

SEQ ID NO: 126372 - DNA, 122 bp, Homo sapiens
tgcgggccccgcccatggggcgcgcagtgtaggtcggggcctgaggtcccacggtcttctcgccgcgtgcggccgggagcaaacgcactacaggttccgtggcgcctcgcgcgaggccagac

SEQ ID NO: 126373 - DNA, 122 bp, Homo sapiens
gacttagagacaggtgcacagaaactgaagctgaatgagacacactggacagcagtcattcgttcattcagcaaacattcactgggatggggagatacagggacaaaggaccagagggctta

SEQ ID NO: 126374 - DNA, 122 bp, Homo sapiens
ggacctgctggtgagcgggagcaacgtgctggagacggccgtcatcctcctgctggaggccggtgcactggtggcccgggctgcggtgctgcagcagctggacaatgtcattgacgtgatca

SEQ ID NO: 126375 - DNA, 122 bp, Homo sapiens
tctgagggaacccggaagggtggggagagagagcgtgccttgcccccagcaaagcgaaaccggccaagccctcagccccttggtcacccacaatgggggagtaaaccttccctgctaacaag

SEQ ID NO: 126376 - DNA, 122 bp, Homo sapiens
ggtaatgagcgtcagcgacattcaagggcactttgggctaaaaaagaaagtgcttgtacacggatggaaatattctagaagaacataaaaggaatttcctcttaggaggttagggaaatgag

SEQ ID NO: 126377 - DNA, 122 bp, Homo sapiens
acctatagccggcctggagttgaaccctccggtgaataggagcttctgtagttgctctcacggagtatttctgaagaaatgtggatgagcccaaaggctttctggtggtccgagaacatggg

SEQ ID NO: 126378 - DNA, 122 bp, Homo sapiens
gtcgctccccctgccctctcccatccccatctggctcttcccttcagatcaggaggtcagcgctccgcaaggaccctgtcacagggacaccaccactgagctttggggaggtgtgtgctcac

SEQ ID NO: 126379 - DNA, 122 bp, Homo sapiens
ctccgagaacatcagaggatccacaacagttgaagagccttttgaacgcagtagcccgctcgtatctatggtttcgctttccacagtttgttacctgcagtcaactgcagttcaaaaatatt

SEQ ID NO: 126380 - DNA, 122 bp, Homo sapiens
gtggacaatggagtctgggggagggggaaccccggggacatgcccccacccgggaggggccggtaacccctgggctatcttctagacggggcgaaccaggggtcattgacctgccccctgca

SEQ ID NO: 126381 - DNA, 122 bp, Homo sapiens
atcattgcctggatggagaagaaccccttcgtgctgggagcaaatctgaacggcggcgagcggctagtatcctacccctacgatatggcccgcacgcctacccaggagcagctgctggccgc

SEQ ID NO: 126382 - DNA, 122 bp, Homo sapiens
tggggcctatggtaagcattccgagaaatagggggagcatgtagcatcacaggcaagaggcgagatgaatgaactttctgttcatttgagagtgcagacagaggtaggaggaagtaggtgga

SEQ ID NO: 126383 - DNA, 122 bp, Homo sapiens
ggctggaaatgaatggggcccggaagcgagctcaaatcgctgacacctggcaccgggctgcgtccactttcatgcttcctaaggcagttctgcctgcaagaagggaacgcgcatcgcctttc

SEQ ID NO: 126384 - DNA, 122 bp, Homo sapiens
gggcaggactaataagggacacgtgctgccaggtgtacaggcttcccacgcgccaggcagcgaggcacgccaggcacacggcgtcaactctgccaggtgtataggcttcccacgtgccaggc

SEQ ID NO: 126385 - DNA, 122 bp, Homo sapiens
tgaaagagaggaaaaaactgatctgttcaatttctctactgagatcacgagcttgggattcgcccaccctcagtttcccctccgggcgtggagacagttcccgctcaccgcggcctccaaga

SEQ ID NO: 126386 - DNA, 122 bp, Homo sapiens
cgcgggcagggcggcgcgccagcctcggcccgcagggggcgccgtccgtggccccagccccggtccttacctttgaggaccgagcagagccgctccagggccatgttcccgagctgcccggc

SEQ ID NO: 126387 - DNA, 122 bp, Homo sapiens
atataagggagcttctggattctgttccctcgtatatccagatgggtcaaagatgcgaatcggaaaatattatcaggaaggaatgaaatcagattgtcattaagaatgagaactttcagttt

SEQ ID NO: 126388 - DNA, 122 bp, Homo sapiens
aagctggagaaggcgcgcgcccaggcagagcaccgaaaacagtgccaggtgcggcgcctgcgggagcaggagaagatgctacggaacctccgggagcagcacagcctgcagctgcagaggag

SEQ ID NO: 126389 - DNA, 122 bp, Homo sapiens
cggtgtcactggtcacgcgtagagaggcaaattcatgagcagcattggggagttaatgaacggctggccagatggtgcctgtcagaaggtgttgactttttagacaactgggactgtttcct

SEQ ID NO: 126390 - DNA, 122 bp, Homo sapiens
taacaagttcttcgacgctgtgatctaatcaaggaaaacctgggacgcagctaatagatgcgcatcgagtgtatcgacgctctaagtacgagggctggaacagtgagcaggatcagtccatt

SEQ ID NO: 126391 - DNA, 122 bp, Homo sapiens
cataccagctccttccattcccgtgtgcggggggagggggaccaacaaaccggaggccctcgctcttccaatactcacgccctagctacagaggtcaaggaaggtttccccaggagcagttt

SEQ ID NO: 126392 - DNA, 122 bp, Homo sapiens
aagcggcggcggcgaggagggtcacagccggaaagaggcagcggtggcgcctgcagacgccgcgcagcccgggcagccccacagcgcaagctggctgccgcggcggcgggggctttatcggc

SEQ ID NO: 126393 - DNA, 122 bp, Homo sapiens
actgctaggatcctgttggcttcctctggcacggctcggctgggttcctccctccctgtgcggctcgcctcagcaggcacacatttagaaatcattcacgagcccctcaaagtcgcacaaaa

SEQ ID NO: 126394 - DNA, 122 bp, Homo sapiens
cctcggcctcccaaagtgctgggattacgggcgtgagccaccgcgcccggccccttcgctcgctcttacccggtgaggtcccgtgcccgcgtacctcccgcatgacacttgggcgtgcggcc

SEQ ID NO: 126395 - DNA, 122 bp, Homo sapiens
cagtccctcttagaggagctgtttcctgccggaactaattatctcgacttgtagctgattcgctacgactccaaaagagactgcaccaccccccgtttcctccgaagtggttggtgccttag

SEQ ID NO: 126396 - DNA, 122 bp, Homo sapiens
tcctggcgtttgcctgcagcaagatggcggcggtgtcaatgtcagtggtactgaggcagacgttgtggcggagaagggcagtggctgtagctgccctttccgtttccagggttccgaccagg

SEQ ID NO: 126397 - DNA, 122 bp, Homo sapiens
atctgcccaaccctcccccaccgcgcgccctggatcctctgcctgccccctcccccgtgacgtcaccctagtcctgtcccggggagcctgcaaagcctctcagattcaaactgctagacgca

SEQ ID NO: 126398 - DNA, 122 bp, Homo sapiens
gggtccgcggggaaatggtgggctctccagccaggggccagagggatcgtgaggagggtgcggcacccgcaccctcccagctccccggcgtgggccccgagcggttcctggcgcgcctcccg

SEQ ID NO: 126399 - DNA, 122 bp, Homo sapiens
ttgcttcatcttcaagctgttctttcacagccatgtcctagttatgacagtgtgggaagtcggaatgacaaccaccaaaccaaactggtctctgtcttcaccttctcacagaaaaaaaaaaa

SEQ ID NO: 126400 - DNA, 122 bp, Homo sapiens
agcctctcggcaacctccctttggctccgccttttaaaggacctttacggtaaataaccccgacgcttaggagagcttcctcttctgggccctcaaacttacccaggcctcttctatggaca

SEQ ID NO: 126401 - DNA, 122 bp, Homo sapiens
ggccaggtgtggcctcttgggggtgaagccagtccccacagctagactgtgtcagcctctcgggcaagaccgtcagcagatgggctcttaggccagtctctgggttctgtctcccgtgtgtg

SEQ ID NO: 126402 - DNA, 122 bp, Homo sapiens
gcttccagctccctttcctatttcgattccagcctccacccgccggtacttcccatcccccgagaaaaccatgtcctgtcccccaggagctctgggggaccccagggcgctttgagggtggg

SEQ ID NO: 126403 - DNA, 122 bp, Homo sapiens
agaaaaaaagaaaaagagtcctgccaatttcactttctagtttcactttcccttttgtaacgtcagctgaagggaaacaaacaaaaaggaaccagaggccacttgtatatataggtctcttc

SEQ ID NO: 126404 - DNA, 122 bp, Homo sapiens
cacacatcactgcacccacctaaccgcccggagtcggaattgtggccgtgggcacctcgacgggttttcaagggggaaccaaagtttcactgcagacgggcaggcagagctgggtccagcag

SEQ ID NO: 126405 - DNA, 122 bp, Homo sapiens
tccaaatcctgtctggggacatgggtgaaagagcgggctgtgggaccccccactgcggcgcgccgtcatcactcacagcccaggtggtcgcctgcaagagcccacccctctcttccgcgcct

SEQ ID NO: 126406 - DNA, 122 bp, Homo sapiens
gtgaaacccagtggatgctgtttcatagtgatggctccatgagtcacagtaagagaaatgcgatcagcctcacagtttggatgtattcagagcagggcaaagaagtgaatcatttaaaaacc

SEQ ID NO: 126407 - DNA, 122 bp, Homo sapiens
ccatcagcccttgaggctgcagggaccagccctttggtaggtgcgctttgcttcctaacccgttgccgggttggagattccacctccgaagttttctttctgacttttgattttacattcct

SEQ ID NO: 126408 - DNA, 122 bp, Homo sapiens
gagtgcagccggatgaacaggttccagacccggcccctggcagggcgggcttcctccctgcgttgtgacccgacccgtcccgggaaacgtttgccttaaagcggaatttcctacctgtacgc

SEQ ID NO: 126409 - DNA, 122 bp, Homo sapiens
cgactgggcggtgccttacgtaagaggcggagactgggctactgggctcatgcagtaaagcgagtcaaggcctgagtggcaggagggcgaggccgggaccaatcccaggaggaggcggtgtc

SEQ ID NO: 126410 - DNA, 122 bp, Homo sapiens
tcgcgtttcctcgttcccaggacttgctggtcataggcaggggtgtggcctccccaaccccgagatctggccgggtgcctccctgagggtttccctctgtgcctttgcagcccaggcagcct

SEQ ID NO: 126411 - DNA, 122 bp, Homo sapiens
tgaagtcattgaatgtatacatccaacaagagtcccaagccctgggctagtgctgtaattcgtatagcagcccacacattcttgcccttgtgtaataccacgaatgaacacccatagtcacc

SEQ ID NO: 126412 - DNA, 122 bp, Homo sapiens
tccattcttaacctcttcatgatcagcctcgaccggtactgcgctgtcatggacccactgcggtaccctgtgctggtcaccccagttcgggtcgccatctctctggtcttaatttgggtcat

SEQ ID NO: 126413 - DNA, 122 bp, Homo sapiens
ccgtgttgattttcccatgtctctcacaccttccccagcccccacaccgcctggccgctacgcccccatccctgagccaccgcagggcagagctggattgagtgctttgccccacagatgta

SEQ ID NO: 126414 - DNA, 122 bp, Homo sapiens
gacctagatctctagacaaaataaaacaaggaaaatatgctagaatcaacaatgatggatcgatagttgcagtccagcttcgtactacaaatgagtgccataaaacctactatacttgtcac

SEQ ID NO: 126415 - DNA, 122 bp, Homo sapiens
gtctttccaagtgccggaagcaacagggatgtcgtctggaaacaaaatctggtattgaagcgcagggagacaaaacgtccacctctagagccgaggcggcggttgcctgtcgcgtgcccgtg

SEQ ID NO: 126416 - DNA, 122 bp, Homo sapiens
ccctagggacctgcgggccccagggctgctgtcgctcagtcaaaggtgatccggaagctgcgctcctgctccttgcgccggccctcgcacaccttggtcacctcctccaccttcctctgcag

SEQ ID NO: 126417 - DNA, 122 bp, Homo sapiens
gttcttttgcactgtacatatgaggtgcttgtgtgtgtgtgtgtgtgtgtttttccgagacggagtctggctctgtcccccagtgcagtggcatcatctgggctcactgcaacctctgcctc

SEQ ID NO: 126418 - DNA, 122 bp, Homo sapiens
aggcagggagaaggggaggcagctaatcagagtctgagagcacgatgatctcttctggatcgcattgtgtggccacacttgtctgcagggaagtgagagacaaagagtcaaagagatctgga

SEQ ID NO: 126419 - DNA, 122 bp, Homo sapiens
ggagctctgtcttcactctactaaatcttgcaactgcactcttctggtctatgtttcttacggctcgaggtgagctttcgcttgccatccaccactgccgtttgccaccgtcgcagacccgc

SEQ ID NO: 126420 - DNA, 122 bp, Homo sapiens
cagatgctgcgctgaagatatctgctccagagttgacatgcgtccgtgtccgctgggccacgggcctctcaggtggtcacggtattctgactggttggagggctgcccttatacttcttttg

SEQ ID NO: 126421 - DNA, 122 bp, Homo sapiens
gggggtctgtctaaatcaacctttttggctccattttttgacaaagggccaagaggttagcgtaatcggtccagtagttctcattaccttcgaggggaaggggaaagaggagaggggcgaag

SEQ ID NO: 126422 - DNA, 122 bp, Homo sapiens
ggccgaggtgttgggccacaagacgccagaaccggcccctcggaggacggagatcaccatcgtcaaaccccaggagtcagcccaccggaggatggagccccctgcctccaaggtccccgagg

SEQ ID NO: 126423 - DNA, 122 bp, Homo sapiens
ccgcggcgggagcaggctgggctcgggatgcgctcagccaatcagtgggggagcggcgcgcgcgggggtggcgcgcggaagggcagcccgcgcgctcccggccgcagggagtaaccgctttg

SEQ ID NO: 126424 - DNA, 122 bp, Homo sapiens
atcaaagtgctggaattacaggcgtgagccactgtgctggcctttggtgacttctgaaaacgtctcttaagctacagttttccaccccctcatcctcatggtttcatctgtggcatccttct

SEQ ID NO: 126425 - DNA, 122 bp, Homo sapiens
gaaacgcagccctggaagctgattgggtgtggtcgccgtggccggacgccgctcgggggacgtgggaggggaggcgggaaacagcttagtgggtgtggggtcgcgcattttcttcaaccagg

SEQ ID NO: 126426 - DNA, 122 bp, Homo sapiens
tactgttcttagcctccatttccttgtctgtaaaatgggaacatgagtgctaaatgagatcgtgctatttcttgaatacactgtgtgcgccccctcccaggacctttccacttgctctttcc

SEQ ID NO: 126427 - DNA, 122 bp, Homo sapiens
caggggcgtttggagggtcagtgagggggccgcccgggtgaccttcagggtcccagggaccgtcagtctcctccgggctgcttgagactccccgaggacactgagataaagggcgaggacac

SEQ ID NO: 126428 - DNA, 122 bp, Homo sapiens
agaggtgaagttaatgccaggacaaaggcaggagaggacggggtccccacacccaggtgtcgactatgtccaagcctagcctctgcctcccggggctcaccacccagcctctcctggccagg

SEQ ID NO: 126429 - DNA, 122 bp, Homo sapiens
atgatgcctgtggtcatccctggccaaccctggatctcagggttcccatccacacagtgacgttgcggagacccttggctccagagtccctcccgtccatctattcaggggtccctcccagg

SEQ ID NO: 126430 - DNA, 122 bp, Homo sapiens
gacgcgctacgatgagagcgagttcgagtccaggctccactggctgggtagaaaagcatccgaggctcgtctttctgaaaaggggaacacggcactaggggacacgccacccatgtggctga

SEQ ID NO: 126431 - DNA, 122 bp, Homo sapiens
ggtggcagcgcccaagagaccccgcacagaaagtgggctgggagtctcgcttgctgtacccgcacctaagtgctcagaagcggcctttcgctctgcagagggggggtcttagaagcttgggg

SEQ ID NO: 126432 - DNA, 122 bp, Homo sapiens
tttctctcctccctccctgacgcacacacccttaagacccagcctgttctccgccaggaacgcaccacctgcgcttcgccggccaccggttttgcaacggagagcccgctggccacggcggc

SEQ ID NO: 126433 - DNA, 122 bp, Homo sapiens
ctgagaaggagtactcaagctatgcagaaaagacttcacatagaaagcctgagactaggccgggctgtggtggctcacgcctgtaatcctagcactttgggaggccgaggcaggcggattgc

SEQ ID NO: 126434 - DNA, 122 bp, Homo sapiens
ctttgtgagttagacggactttggttcaaatcctagccccaccactcaccagctggcagacgttgcacaaatcgctttgtttctctgcacctcagtttctcatccacaaaatgggagtggga

SEQ ID NO: 126435 - DNA, 122 bp, Homo sapiens
ctcctggcctccggatctgcagccactgatggccggactcggacgcggcaacgctaagtccgcgatcttcagctcctaagctgcgagctcagaacggaaaccacagcaactaccgtccgcgc

SEQ ID NO: 126436 - DNA, 122 bp, Homo sapiens
gctgtggatcagaggaccctgtgccagatcatacaactccttgcagttcatgtaaggactcggattttacctggagtggaaaaagaagcactgaaagatttgagcaggggagtaacctgata

SEQ ID NO: 126437 - DNA, 122 bp, Homo sapiens
gtgaactgcacaagcatttttttgtccccatgcgtcctacctggcagtacaggctggtcacgcacgccctgtaagaccagtggccagcctccatactttctgtcacaccttcaaagtgacac

SEQ ID NO: 126438 - DNA, 122 bp, Homo sapiens
agcacagctagtgggtggcaaagcctgaaactgaaccttagcagtttgacttcaagcctgcgttcttaacctttatgattatctttgcatattttttttaaatcaagaggtaagtttgttta

SEQ ID NO: 126439 - DNA, 122 bp, Homo sapiens
ccaccacgcccaatcgatcgcccagctcaaaataccggctggtgtgtaggtgggagaggccgccgctccccgtgtgctcgttgtctctgttcccaggccctctagagcaagatactaactat

SEQ ID NO: 126440 - DNA, 122 bp, Homo sapiens
acgcggagagcccctggctgctggtctttgctcaggtctcacggcggccccattgatgtccgagcgggctggcggctctgttgggcgagctagtctcaacacgggcacactcctccttctct

SEQ ID NO: 126441 - DNA, 122 bp, Homo sapiens
aaaccaatgtaaatgcaaaattagcaaattatagttaactgcagccaaaattttcccaaacgtatcagaatatgttagtcccctgtcacattactgttgattgtatacaccaaacatgagct

SEQ ID NO: 126442 - DNA, 122 bp, Homo sapiens
cttccgccattttctttgcctcatcaccgaaggcaacagcggcggtagtgagcgacactgcgcaggatttcatggaaacaacaaatttccaagtcccacgacgatacccaaccttaatcgag

SEQ ID NO: 126443 - DNA, 122 bp, Homo sapiens
cgaactcctgacctcaggtgatccgctggtgttggcctcccaaagtgctgggattatgggcgtgagccaccgcaccctgccatggttagagtttttatcaggtatttgttctggaaagcaga

SEQ ID NO: 126444 - DNA, 122 bp, Homo sapiens
aagtggcagatttggggacctgaggcagcagtggggttggtaggcttgtccaggtcgtggcgtattcccctccgtccctgttaggagctgaacccttagaatgttgctggggagatctggaa

SEQ ID NO: 126445 - DNA, 122 bp, Homo sapiens
cggccctggcagggactgtcggagtggccggggcaggtgacctgggcaggtggcccggagcgcgcgcaggcgcaggccccacagatccagctggggacgaacgcgcctccgcggagctccag

SEQ ID NO: 126446 - DNA, 122 bp, Homo sapiens
gttgctttttctgcaggtgcaggagagccagggtggtaaaggaggtgagtggaactggagcgggaaaaaaggaagcttacctgtcccatccgccctgtagaaatttccagttgagtaacaat

SEQ ID NO: 126447 - DNA, 122 bp, Homo sapiens
taaatggtactttctccattttaatcctggaaattaggcaaccttctgggttaaagcaagcgttctccgccactgactaacagtgagtgtataatggatctgtttccccacagatagccagc

SEQ ID NO: 126448 - DNA, 122 bp, Homo sapiens
aacaggctttgattgcaattgcaatcaaacctctgtagcaaatcgtacaattaaaacacccgcaggcaggtgtgggcgacgccagcagcacacggggaagctgggcacgtggggcggaggca

SEQ ID NO: 126449 - DNA, 122 bp, Homo sapiens
agatccagaggctggtaccaccttcctttctaaaataaaatctctctggcatgaagtcaccgcctatttcacatccggtttgccctgggacgtattactactgtcttggtaaagagaaatct

SEQ ID NO: 126450 - DNA, 122 bp, Homo sapiens
gccatggatggggacttgctattcttggacagtgacccccggtctccctgtaccctctaccgtgtctgtccctgtaactgcagcatcttcatgggcagagtccacatccccagcagggagga

SEQ ID NO: 126451 - DNA, 122 bp, Homo sapiens
aaggcagaaggcagaagcaacagagaaggaatgctgaagaaatctgggccagcatattctcgaggaaggtttcccagcctcacaggctctgtgacaattgtaaacagctcaggagctccagg

SEQ ID NO: 126452 - DNA, 122 bp, Homo sapiens
tcaatataaagtatcttccccttcatatgaagagtacctatacctagggcagtctctcttcgacccaacaagttactatcactttttttttttttttgagacagagtttcacttgtgtcgcc

SEQ ID NO: 126453 - DNA, 122 bp, Homo sapiens
accctacaaacaggatccacagcagtttcacattaatgaaaaagcaagacttcaagagggcgggagtttttgtctgctgatcttcccgcatctaaaatagtgcctgacacatattaggtgct

SEQ ID NO: 126454 - DNA, 122 bp, Homo sapiens
cctccagccccccacggggcgctggctgacagtgtctgggcggctctgggccgaggtcgccgcggggcgtctgaccttgcgcccaggcgagcgggaaacccagggtgcccgcgagcggacgc

SEQ ID NO: 126455 - DNA, 122 bp, Homo sapiens
ctcagaggtcgggtgggcgcccactccgttcgctgcgcgcacagcgcccggcgagaggctcggagtttgatcacacacagcgtccggcttcctgtccccagcgccccctcccgccccgtttc

SEQ ID NO: 126456 - DNA, 122 bp, Homo sapiens
agcgactgaatgaggcccttccagcccagctgaatacaactgggtacaaataagatctggcggtttttaattccagggtttagaaatgttaggatttctgtgtttctgttgcatgtagtttc

SEQ ID NO: 126457 - DNA, 122 bp, Homo sapiens
aggtagacagactaggattttttgactttacaatggtactcacacaaccattctgtttttcgctttccatacagtattcagtaaataacatgagctagtcaacactttgttataaataggct

SEQ ID NO: 126458 - DNA, 122 bp, Homo sapiens
gacagaaacccagtccctgtcatctctctctaaaagcctgtgatagagaagcttcaggctcgtattaatggtgcccaagggccttggggctttgacttttatttccttattgtctgcagtca

SEQ ID NO: 126459 - DNA, 122 bp, Homo sapiens
aagcatgtgggtgggggagatgtcacacgcacccgctccagctgtacaagcaagccactgcgaggattagacgcttgttagttatgaacttaggtgtctggtctgtttctttgcctttcaaa

SEQ ID NO: 126460 - DNA, 122 bp, Homo sapiens
cccattcccactgcccgcttttaggtccgcaggctgccatgggcaaggaacaacagggcccgggaaggccaaacacggggaaagttgccaggccctttgctcctgcaggaagggccccttcc

SEQ ID NO: 126461 - DNA, 122 bp, Homo sapiens
ggtggggacccggaaggtggggtgggggcgggatggaggcggggcggggtgtacgaggggcgtgtacactggctcagggacacgcgctctcggccacagcaactggctccaagttccctccc

SEQ ID NO: 126462 - DNA, 122 bp, Homo sapiens
ctgtcgggggtcagacaggcgctggtgccttcggggctctcggtcaggcgctggtgccttcgggggtctcggtcaggcgctggtgccttcgcgggtcccagtcaggcgctggtgccttcggg

SEQ ID NO: 126463 - DNA, 122 bp, Homo sapiens
cctttcccccttttcgggaatagcaagcgagtccaagagatgaggtcacgtgatgccgtccgaccaatctggtgtgagcagaggcccccattcttccggggagaggggcgggggcggggccg

SEQ ID NO: 126464 - DNA, 122 bp, Homo sapiens
ttagaatcccccaagacctcagacctacagcctgccccttaggtggttcactgtcttcatcgaaacgtttgccgccgagtcgcacgtccttggcaccaaaaagcgttgagtccatttttcaa

SEQ ID NO: 126465 - DNA, 122 bp, Homo sapiens
ttcccagcccttctcgtattcctcccaaatattccgggaggtggtcctagggggctgactcgtgtgcttcccaagttcatcttctgtggcaccgggtgttctccctggctttagtgcacagc

SEQ ID NO: 126466 - DNA, 122 bp, Homo sapiens
cctcctccacgccagggcctgcgcgtttccacccgtgcctcctccacgccggggcctgcgcgtttccacccgtgcctcctccacgccggggcctccatactttgcagccactgcagggatcc

SEQ ID NO: 126467 - DNA, 122 bp, Homo sapiens
tttttctctggtttctcagacagctccggggccaagattcggggagacattgagacagagcgtttgatataaaagaagggggtaagagccaagtcccagggcccggagcttggctctctggg

SEQ ID NO: 126468 - DNA, 122 bp, Homo sapiens
agaactacaatccccagcaagctttgcgcctgggttagcgatctagcttgctttgttgcccgcctagtttaagattgggagtcgcatttccaatgcgcagtaccctgggatttgtggtctcc

SEQ ID NO: 126469 - DNA, 122 bp, Homo sapiens
tccaaagcagaaatccttagaccagcaaatcaaagactggctatccccaaagaggcactccgtagataagcaagctcaacttaatcaaactaaagagcaactcccagatcagcaagctgaag

SEQ ID NO: 126470 - DNA, 122 bp, Homo sapiens
gcggcccgggcggggacggaggcggggcggggacggaggcggggcggggcccgggccgggcgctaagtctcacccgctccacgcccctcccgcagcatcgagaaggtgtcctagatcacgtc

SEQ ID NO: 126471 - DNA, 122 bp, Homo sapiens
cccggcggcggccgagtagagggggcgagagttctcaccccacagccttcgaccggagtccgcctccgcccaagcccctgcggttctgacctgagccttcagcccgcagcgcgcctcccttg

SEQ ID NO: 126472 - DNA, 122 bp, Homo sapiens
agaaaaacgggttatcggaagtctacccgataggcccactcagaggggaaccggcagtgacgtcactggcatgttgaactacaaagtccatgatgcagtgcgggatcgcagaatgccgcgag

SEQ ID NO: 126473 - DNA, 122 bp, Homo sapiens
gccgagcccgggaaggtcacgggagcctctgtcccggctccgccatccgggccgcttccccggctgcggccctgctgcgggactgatcccctcagcactgcccacacctctcatccgctgtc

SEQ ID NO: 126474 - DNA, 122 bp, Homo sapiens
acaagactcctagggcgtgtctccctctccaagtccatcggttgccttcactggcgtccacgtcaccatggtctgtttctcaccagatggcggcagcggcagcctcctgacggcctccgtac

SEQ ID NO: 126475 - DNA, 122 bp, Homo sapiens
ccagaatgtgtaaaagcacctcagatgatctggccaatctttccctctttttaaaaaccccgttgaaaataactatcttaaaagtatatgctctgtttcaattaccaagaggcagctgtaat

SEQ ID NO: 126476 - DNA, 122 bp, Homo sapiens
ctttcgagttggcactgtccgatagaattctgtgatggtgatggccacttctgcatggtccggcaaggggcagggcgccacatgtggctactgagtattgcagtgtggctggtgagagcaac

SEQ ID NO: 126477 - DNA, 122 bp, Homo sapiens
cctcggctgctgcccggcagcggcagcagctgcgtcggcggcccacacagcagcgagaggcgagaggaggctgcctcgaggatgaagtgcaaacccaaccagacacggacctacgaccccga

SEQ ID NO: 126478 - DNA, 122 bp, Homo sapiens
gggggtgagctggctcgggccgggacagaggtctctctgcgtacgccccgctccgcccggcgccaagggaagccgctgtctcttccgtcgagttctgagaccttggcaaacttccctccccc

SEQ ID NO: 126479 - DNA, 122 bp, Homo sapiens
gcagcgtcccacattgtttgaggttccaggaagtcgctgctacgctcacttgtaagtcttcgtgctgttgtaaaaattgaggtcgtggttttccacgcgatttggctggcgaagagaccacg

SEQ ID NO: 126480 - DNA, 122 bp, Homo sapiens
tcagcaccccaagcactgcagcgtttctcccaggaggctgggcgagtccgtagcggaagtcggagcggcagagcagtgattgggtgcggccggcaccgtctctgggcttcgacttccgggtg

SEQ ID NO: 126481 - DNA, 122 bp, Homo sapiens
acctgctggtggaattcagggctggcctgagggctggtgacaccatccctggggactccccgagtttctctctccatcctgctgatgggactctgggagccgccctgcatgtcttgctttct

SEQ ID NO: 126482 - DNA, 122 bp, Homo sapiens
gcaccccccacaagccggccgtccttccgggggagcccggctctcgcctatggcgtttctcgctggggcctcccaatgttgtacttgaatgagttagagaaaatgccacactttcgcatgaa

SEQ ID NO: 126483 - DNA, 122 bp, Homo sapiens
atgagaaatgccatgttggctgggacaatggatacacctgagagaggctgtgtgcacacacgacccaggctggagggctctagtaccttgacactgtgtattgcctcttggattgctaacac

SEQ ID NO: 126484 - DNA, 122 bp, Homo sapiens
agcgtggggcagagagagggcgaggagagggcggggcctcctcctttcacaggagcagagcggttcccccgcccccgacagcgctttctgttgctaggcgacctccgtgcaatcccgcctga

SEQ ID NO: 126485 - DNA, 122 bp, Homo sapiens
ccacggagaaatcagaggtagacagtcggcaggcaggcactctggggagataaacagatgcgtggcattccacagctctgaggaaagatgccccttgaagctagggagaagcttttgtccat

SEQ ID NO: 126486 - DNA, 122 bp, Homo sapiens
cctcccacgcacgctgctgcggggggcctgggccacgcaggggtcgggtgtggggggtcccgggcaggtggtagcggcgtctccgcgctctgtacactaaccactacaggggcgctccgacg

SEQ ID NO: 126487 - DNA, 122 bp, Homo sapiens
ctcacttcccagacgggggtggccaggcagaggtgctcctcacctcccattcggggcagccgggcagaggcgctcctcacttcctcccagacggggaggccgcgcagaggtgctcctcacct

SEQ ID NO: 126488 - DNA, 122 bp, Homo sapiens
gcctctgagtctgttcccctcctccagtcacagccacaagatccctgagtttagagcttccgttcaatgcatgtttagggtaaagtcccaaaataggctgacaggatggaagggtagggacg

SEQ ID NO: 126489 - DNA, 122 bp, Homo sapiens
gatccttcagaaatgtcaaaggaaaagcaaaaatggtggagaaggctgagcacgtggcctcgcgggaggccggctcagagctgttctgaagttgcttttgtaacacaatctattctcaaagc

SEQ ID NO: 126490 - DNA, 122 bp, Homo sapiens
ctgcttcaggaggcagctcattattgcaggcatgtgtatgtatgcacatatgtgtatatgcgtgcacacccatgcctatgtgctctgcctggcagcttcctgatccacccatccactgggct

SEQ ID NO: 126491 - DNA, 122 bp, Homo sapiens
gcctctggcgctagggtttccgggccgctggtgtcggcgggcggagtccgggtttgccaccgctgcccacaggctcaccatggcctgagtaaatgctcgcactgctcatacatccattttta

SEQ ID NO: 126492 - DNA, 122 bp, Homo sapiens
gcggccggagtggggccgcctttgtggcgctcgggtcctttgatctgggccacaaagggccgagaagctgcagcccccggctttctgcggacgactccgcccgggcctgggagggggcagga

SEQ ID NO: 126493 - DNA, 122 bp, Homo sapiens
ccgctactcccggctgtgactccagtttcgtccccagccgccgggaccgccccctcgccccgcccccagcgggcactcaggccgtaccactgtgccttcatgggggtggagatagatcgtgg

SEQ ID NO: 126494 - DNA, 122 bp, Homo sapiens
cagggacctctgctccctcccctcccgcctctcaccttggggccgtccctattctcagctcgatcccgggtgaccattgctcctccggaccctgtgtggaccggttccctgctcgcctggag

SEQ ID NO: 126495 - DNA, 122 bp, Homo sapiens
gctgtgaacccagagaggaccgggcagctgaggagtcatccagggcagcccagccaggcacgtgtctggccccagctgcccagcacccggcctgccaaagactcacacccaccccagcccag

SEQ ID NO: 126496 - DNA, 122 bp, Homo sapiens
ttttgaaatgttggttcaagtaaaacattctgtgtgtagttacacttggggtgtctgggccgccgttttctagagtatgtgcacatggggctaaagcagtgggtaggaccccgatcaacctg

SEQ ID NO: 126497 - DNA, 122 bp, Homo sapiens
ccaaaaaaataccgtatgttgcctttaagagcaagccaagccccctcctgtctttggagtcggggactccgtttcccagctcccctgacagtgccactgggcctttatctgccatataagga

SEQ ID NO: 126498 - DNA, 122 bp, Homo sapiens
ccgttttcagaaaacctgtctttccacttaatatcgacttctgtcgaaatgcccgtatttcggaagccctggtttttggcaaactgtccaaaggtcaccctttctgatgatgaatgccttta

SEQ ID NO: 126499 - DNA, 122 bp, Homo sapiens
gaagggaaggggcagccgtcttggctcgcgagggaaggagggcggaagcgggcgcccgctcgcaagcttattgcatcctaccgcctgtagagctggcctcctccagctgagccgaaatgctt

SEQ ID NO: 126500 - DNA, 122 bp, Homo sapiens
tgacctcgtgatccacctgcctcggcctctcaaagtgctgggattacaggcgtgagccaccgcgcccggcctaatttttaaataaatagagacgggggttgggtgtcactatttgcccaggc

SEQ ID NO: 126501 - DNA, 122 bp, Homo sapiens
cctgggagcgagagtgtgccatggttttatcatgtcttagaaagatccctcggccgggcacggtggctcacgcctgtaatcccagcactttgggaggccgaggcgggcggatagcttgaggt

SEQ ID NO: 126502 - DNA, 122 bp, Homo sapiens
tagaggggaaaaggtaaaaaatatcagttcctattctctagcacatgtaagtaaaccaaccgatctgattttttttttttttaagatggagtctcactctgtcacccagactggagtgcagt

SEQ ID NO: 126503 - DNA, 122 bp, Homo sapiens
agcccgcgcgccccttcccctccggcctcgtccctgtcaggccgccaccatcgccaccctcgtatacataagtcagtaaaagcaagatgcttccacttttggatgacttaccgcgcggtcgc

SEQ ID NO: 126504 - DNA, 122 bp, Homo sapiens
gggccccggtgggtgactgtggctgggaactacgggctttctcgccccggcgccccctggcggacccaccagcaggttgaaggtgtccggccagtgctgagcaccaagagcctcagccttca

SEQ ID NO: 126505 - DNA, 122 bp, Homo sapiens
cagcatctctctgctgggaggttttcctcctttgtttcgtcatttaattttctttcttttcgtcttgcttctcctggacttttatgatgacccagctgaactagctgcttctgtcttcataa

SEQ ID NO: 126506 - DNA, 122 bp, Homo sapiens
acagtcataaaatatgggatagggctctgtcgtaaaccccacatggctgatgggttctgacgggcgcctcggcttgcttcggcccgactcttaacgttgcagccagcctgagactccacagc

SEQ ID NO: 126507 - DNA, 122 bp, Homo sapiens
gctattgtttccccacgggcgggtggggagcctggccctgcctctgagcaagtatccccgcggtgatgccacccgcctgcccgcctgcgccatcatggacgcacccttcggcggtaagtggg

SEQ ID NO: 126508 - DNA, 122 bp, Homo sapiens
tctgtgatgcgcatgccggagaaaaagcctggagccagaacagaacaccaccaagaaggccggaccccgggctccagaggctgctgtgagggaaccctgctccccactctgcccaacggccc

SEQ ID NO: 126509 - DNA, 122 bp, Homo sapiens
aaagagatgctggtaaatttgggatgtaattggaggattggaccggtctccccgctccctcgaccaatggctgtcacgcggtccctttaagaaaccaggaatccgcccggagtcggagccca

SEQ ID NO: 126510 - DNA, 122 bp, Homo sapiens
ttgttcttttcattattgtcattataagttcctgtagagatcctttaaactctccctaaacgctgacctgcagctctagccagaagggctgggccgggcgtggtggctcacgcctgtaatcc

SEQ ID NO: 126511 - DNA, 122 bp, Homo sapiens
gctttccgttcaaggatccaccatgagactgtgggtaaggcactttctgggcagtgaaatcgggcttaagagaatcattgtacttttattttgctcctgggaccggcaagggcagttaagag

SEQ ID NO: 126512 - DNA, 122 bp, Homo sapiens
tcattttcatggcattctcttaagactttctttttttcctcttctgaaacaattaccaaacgattttgttttctgtcttttccaacataaaacagctttttttctggaataaatgataccaa

SEQ ID NO: 126513 - DNA, 122 bp, Homo sapiens
tcgtttgccacgcctctaggccacctggagctgaagtttcgctgttttccacggcatttccggaatgccagggcatgccctgtcaatcctgcacgccctgcggccgcgctgctttctccacc

SEQ ID NO: 126514 - DNA, 122 bp, Homo sapiens
tttctaatgatccccctgtaacagccttggaaatctcccactcaccagaactcatgcaaacgtatgccagatgaacagaaaaagaatatgatctaattgttttttcaggcaaaatgtgcagt

SEQ ID NO: 126515 - DNA, 122 bp, Homo sapiens
ttatttgtatgaatacttctgggttcctaatatgagggtacctaaaaagtacatccgctgcgcttcttgtaatctgagggagttgatgaacatgggccaaggaagctctttccttcgccttc

SEQ ID NO: 126516 - DNA, 122 bp, Homo sapiens
agatggtgaggtagcggtcaaaagacatgatagtgaggatcaagaactcggtggtgcccacgaagaagtggaagaaggcctgcagcaggcagcaggacatgcagattactgttcttgccact

SEQ ID NO: 126517 - DNA, 122 bp, Homo sapiens
ggcttctcttctgaatgtgttctctggtgtctgctgaggttggacttctggctaaaacctcgcccgcactcactgcacacataaggcttctccatcgagtgtatacgatggtgtctgatgag

SEQ ID NO: 126518 - DNA, 122 bp, Homo sapiens
gtgggaagagatggccccaggtccctgcagaggctccaccggctgcgggcagccctgaggcggccagaccccacacaggccgacaggagccacgtggaggacacaaaggctcctgccggctc

SEQ ID NO: 126519 - DNA, 122 bp, Homo sapiens
ggaagccagacacaaaagtctccatcctgtgggagtcactcacaggacaattctggaggacgcaaagctgtaggaccgaggagagacaggtggtggttggaggccgggaaggggcctgactg

SEQ ID NO: 126520 - DNA, 122 bp, Homo sapiens
tggttgtaaaatacttcaataaacttcccataatttacctcaccatgcccctgctgttggcgttgctgtttccaattttttgctattttaaacagcataatacacatctttatacgtgaggg

SEQ ID NO: 126521 - DNA, 122 bp, Homo sapiens
gcgcctccgcccgccggcccccagcggcgctgcgcgcgccacccaaccgtcgccgcccgccgcgagatccgaggctgctccgctagcagccgacaaaacacctccccccactcttctaaatc

SEQ ID NO: 126522 - DNA, 122 bp, Homo sapiens
gaaagataaatgctttacagagtgcacaattgcccaataatatgctcattttgtgcccctcgtttcccatcctttggatgggagtcctatagtgtcaaattaatgtatttgggtctgaaccc

SEQ ID NO: 126523 - DNA, 122 bp, Homo sapiens
cgacagcccatgtcatggcggagctgcaaattaaaacacacggagacaccaccacgtacccgtcagcgtggccgaaacccaggacacggatagcaccgaaggctggcgaggatgtggccaca

SEQ ID NO: 126524 - DNA, 122 bp, Homo sapiens
ccacaatgagaagattttaaaaaaatattgtgaaatatcctcatctctattgtttttagacgttggggtttcaaatctgcaaaggctgactgcggcgttgtcaggattgtcaatgttggaca

SEQ ID NO: 126525 - DNA, 122 bp, Homo sapiens
tctactggttgtctccatggcatactacaagtgagttctagtctgccagttgggagtggacgaacagttttgaaacagtttgagtgaggaccttcagaaaggacctggggacaggagcgtga

SEQ ID NO: 126526 - DNA, 122 bp, Homo sapiens
ctgctccaccgtaaccacgccctccccacagtcccgccccatcttcgctctcagcgcgcccggccccgcctctgccctttaaggccacaccgctatccaggcccggctccccgcctgtccgt

SEQ ID NO: 126527 - DNA, 122 bp, Homo sapiens
gcctggccagcggagctgcctgatgagttctttgagctgacggtggacgacgtgagaagacgcttggcccagctcaagagtgagcggtgggtgccccctcagtgcctcccggcatcttcgcg

SEQ ID NO: 126528 - DNA, 122 bp, Homo sapiens
ccgaagcgggaggggtgggtgcctccccgggggtcccagcctccgcggcctgcgtgggcccgtcatccagcagcaggcgtctcatctgcctcaggaccctcgtgtcctgcgcacggtccttc

SEQ ID NO: 126529 - DNA, 122 bp, Homo sapiens
tatgagtggttttgggagaggccaggctgagctcttactagctccttgcaacaaaacaagcgaatgtgaaaagtcttaaacactcagctttctggtcagaggaaatcccaaaatcagcatga

SEQ ID NO: 126530 - DNA, 122 bp, Homo sapiens
caaaaagatatccatttccctgtttgctactcctgtgtttttgattcagtagttcttggacgagagctcgttgtccacatattacatatgactattctccctaagcattcagaaggaggcag

SEQ ID NO: 126531 - DNA, 122 bp, Homo sapiens
taaaagacagtaaaaggaaaccattattttatcttcttcagtaggagttatttcaactaacgcaggatttggtagaatcttaaagccaagtggcttatttaaaatgctttaatttttcaaga

SEQ ID NO: 126532 - DNA, 122 bp, Homo sapiens
attgtatctgcagacggattcctaactgcgtaatgggcgctactggtttgcaccccaaggcgaaggcgctgaaaatgctcctgtcaccttagatctcagtgatgaacgacaggaggaggagt

SEQ ID NO: 126533 - DNA, 122 bp, Homo sapiens
gctcaggcccgtaatcccagccctttgagaggccgagcgggtggatcacttgaggtcaggcgttggtcaagtgctcctagagaaccaggctgaccaacatggagaaaccttgtctctactaa

SEQ ID NO: 126534 - DNA, 122 bp, Homo sapiens
ccataagcaatattgcctatgatggatctcagaacaataatctgtgttgagaggcttcctcgattatcctctggaaagaagtgagtcttgaatgtttgtaaattaaccacctataccattac

SEQ ID NO: 126535 - DNA, 122 bp, Homo sapiens
aggttcatcagatgttgccccattgcttccttctcgcttttgcacagatggcaatatcaacggtgtctagagactattgatagtttgcctcacctagttatgttttgagtttcatggggata

SEQ ID NO: 126536 - DNA, 122 bp, Homo sapiens
ttaggcttctaccctcccaaagagactaaaagatgcaggaactttctcctccaatgttgacgtttcaaggagggagagagagagatctcaggttcttgagaaagccattcactggatcttaa

SEQ ID NO: 126537 - DNA, 122 bp, Homo sapiens
cggcggtggcggtggcggtggtggtggcggcggcggcgggggtgggggcggcggcggcggcgcggggggtgccgcggggcccgggctcggggggctgggcgggggcgcccccgcgggcgcgc

SEQ ID NO: 126538 - DNA, 122 bp, Homo sapiens
aagtacttattacctactctgtgcctgtttctgctcacagaatgaacaaaacacaaaattcgtggccctcagggagacagacagtaaacaaagtaaataggcgaatgctattagttttctgg

SEQ ID NO: 126539 - DNA, 122 bp, Homo sapiens
tttcaggaggccagacttagagttggaaaagtcaccaaagtgtgacaacagctctcgctgcgaagcagtttgccccgctcggctgtcccgaggacagccctgagcatccccctcatccattt

SEQ ID NO: 126540 - DNA, 122 bp, Homo sapiens
tgcactcttagctccagcaggaccggcccagcctccgtttggctgggatttgggggcgggcggcagcacgattttctggcaacgagttcgttgtgggtctgaaggaccggcttagaactagc

SEQ ID NO: 126541 - DNA, 122 bp, Homo sapiens
agttagcagtgtgaaagctgctgtcagggcaggaatgggtaaagagaaataaacacataacgaggagaaccagtggaatcagtcaacatccaaatgaaaaaattaagattacagactgacct

SEQ ID NO: 126542 - DNA, 122 bp, Homo sapiens
aggcggaatcagagggtttcagagaaagccgtcaagccagtgccatgagtttcgcgcacacgaggagggagcaggctggggggtgttgctggtgtgagggctctctggttgcagggagcggt

SEQ ID NO: 126543 - DNA, 122 bp, Homo sapiens
gagaaaactgagtttctgcaaggtgatcgctggtgactcacagaacacacagctgcagtgcgaccggcggtcctctgcccacagatgcacttattcctaagggaaggcgggatctgggagcc

SEQ ID NO: 126544 - DNA, 122 bp, Homo sapiens
cgcgggaaaccctggactccatcccgggatttgtccccgtgtcgaagatggtatccaggtcgccgaaaacttcccggaagtttagaccaagacctacttattatctacggtgtccgggaagg

SEQ ID NO: 126545 - DNA, 122 bp, Homo sapiens
ccccaccgggagaggctccctccctcccctttctccccgaaccctcatcttagaagccctcggattcagtctggatcccaaagaagggctgaattcggaggacctctctttgcccccaaagt

SEQ ID NO: 126546 - DNA, 122 bp, Homo sapiens
cttggcgccttcgcggaaggtgcgtccgagccatggccgctgccaacccgtgggacccggcgtccgcgcctaacggcgctgggctagtgctaggccacttcatagcttcggggatggtcaat

SEQ ID NO: 126547 - DNA, 122 bp, Homo sapiens
gagcccagccatttcctgttaagtgtctgaagggttgcctggagccccctctgcccatctcgggtcctgcccacgcgttgtgcagggatgtggactctgctcttagcatcctcttccactct

SEQ ID NO: 126548 - DNA, 122 bp, Homo sapiens
ttccaccaggccttcctggccttcacttcctagcccactgctgacagaaggagtcactctcgctccttcctgcatctccctgaggccgcacgctgtcgtggacgtagcatggctcaaaggtt

SEQ ID NO: 126549 - DNA, 122 bp, Homo sapiens
taggtgaggacaggcaattcaggcatttcctgcatttcccaagaccgccctggcctgccacgcccctataatgtgcctttaaaagcccaagaccgtcgctaggcacagacggaagtgactgg

SEQ ID NO: 126550 - DNA, 122 bp, Homo sapiens
tcatgagggacttggaatcttttgtgttcctaaaaaccacatgtaccctcagaagggcatcgtttaagagaaataagccagccccacccataggaatctttttagccactcagcaatttaat

SEQ ID NO: 126551 - DNA, 122 bp, Homo sapiens
cctccagaggcacctccccggggtccatgatgatggacaggtagcccgtcttgatgtctgcgtgggccggctgcggggaggggacagggaggagtggggcagctcactgatttggccatacc

SEQ ID NO: 126552 - DNA, 122 bp, Homo sapiens
gcccccgaggtccagggccaggaaatcccctcgctctgtgggggcagagaccctcagtgccgggatagggcttgtggctccagccccagcacacactgggacccccaggagcccatgtttcg

SEQ ID NO: 126553 - DNA, 122 bp, Homo sapiens
cccagagcttgtcctcggacagctgagtgaaatactgcgggtagggataaaacacacccacgttatttaccaagatgccaacgtctttgtccttcagggcttctcgaattggaaggtagatc

SEQ ID NO: 126554 - DNA, 122 bp, Homo sapiens
atgcagcatttcccaaggaaagccacacattcagctgcttattaacagcaacatgtttttcgtgttaatttgccgttcacaacacactcctatgtgttacctccttaggccctcactaggag

SEQ ID NO: 126555 - DNA, 122 bp, Homo sapiens
atatttcaggcatcgcaggccatatgatctttgttgcactactccactcttgctgtattgcgaaagcaatctaaggtaactgtgtaaacaaatgagtgtggcttgtgccccaataaaacttt

SEQ ID NO: 126556 - DNA, 122 bp, Homo sapiens
tttcctcctctaagtaccttcaggagaaagtacttggtcttgtagcttagtgaagagtggcgatgaagaaagatctttcagcccattgccagaacttaactgccccggttagtaatggctta

SEQ ID NO: 126557 - DNA, 122 bp, Homo sapiens
gctgcagcaatttttagagtgaccctttgccgtcccactggataaggcaggccgagcctgcgctttggcccgggagcagagcagcgagcgccctcctctccgtctttggccttcaactctcc

SEQ ID NO: 126558 - DNA, 122 bp, Homo sapiens
tggctcatatctgtaatccccgcactttgggagtgccaaggtgggaggattgcttcagttcgggagttagagaccagcttgggcaacaatgagatcctgtctcaacaaaaaatttagccagg

SEQ ID NO: 126559 - DNA, 122 bp, Homo sapiens
cagcccctcctgccccagtaccctctccccgaggcctcgtcctccccgccatcctggaaacgattttgttgtctgcagagattatgtgtaactgcctgtgagttataagcctccacagcaag

SEQ ID NO: 126560 - DNA, 122 bp, Homo sapiens
tcactttcctaaaaccaaccacctcagctcggctgttggcagcaacagcagtggcagcagcgacggcaaagtggcggctgaggccgaggcacctcgtgggctcgtgtccatgccgggccaga

SEQ ID NO: 126561 - DNA, 122 bp, Homo sapiens
gtggctgtccccgtcttggggggggccagcagacccttggtgagtgcctggggtggctcccgggcctcctcctgccccctccccactggcgggtggggtgggaagggggcgggtgcagccgg

SEQ ID NO: 126562 - DNA, 122 bp, Homo sapiens
gggcggggtgggggcccctgggctcccagggtgggagctggctccgaggctggctggctccgcaggtccgctgacgtcgccgcccagatggcctccaggctgaccctgctgaccctcctgct

SEQ ID NO: 126563 - DNA, 122 bp, Homo sapiens
gcaggtctggccacaaattcaaactttcttcagtgtttttcatgtctttctcaccaaaagcgaagccaagacttctcctctcatcccctcttcccaggggagatcagtctccggtgtacggt

SEQ ID NO: 126564 - DNA, 122 bp, Homo sapiens
ttggctgctggggaggcgcgtggccccgccccacccggccgcactcccgtgaagtgctcccgctaggtgctcccgccagatgctccagctgctaggggactggctcagggccggcaaggagg

SEQ ID NO: 126565 - DNA, 122 bp, Homo sapiens
aggaaagggaactccctgaccccttgtgcttcccgagtgaggcagtgcctcaccctgcttcggctcgcacacggtgcacgcacccactgacctgcgcccactgtctggcgctccctagtgag

SEQ ID NO: 126566 - DNA, 122 bp, Homo sapiens
cccgcctcttccgtgtgagaagagccttggctgttcctctccctggtgtttaaagggcgtcggtgcacgtacagcgagggcttacatccactttacgggatccggagcggaggaaaagggcc

SEQ ID NO: 126567 - DNA, 122 bp, Homo sapiens
tggggcagtgaggggtcctgcgctttgtcacatgaggctggtttggtttcacacagttcccggtagcttttcacataccctcccttcctggattgcacaggcaacgtcctccctcccctccc

SEQ ID NO: 126568 - DNA, 122 bp, Homo sapiens
ttaaagataaaattaggctagtttagtgatattgaaagaaaattattaatgtctctcatacgtcagtggctcttcattggacacagtcattgagttggctttttaaaaagcatacatttgca

SEQ ID NO: 126569 - DNA, 122 bp, Homo sapiens
actggccttggggatctgggggcggcccctctgcagacaacagagtgacgggggcgggaccgggctggggctggggccttcctggaatcccgcagggcctggggacctgttcacttggggag

SEQ ID NO: 126570 - DNA, 122 bp, Homo sapiens
gtgagaaaggcgtgggtgggggccgagggaggggctggctggctttagactgtgctgctgcgtagatgggtgcctggcagcctccctgggcacagccgtggaagagactgccatctccgtca

SEQ ID NO: 126571 - DNA, 122 bp, Homo sapiens
ggtgaagtaacttttgtaagaccacagaaatgggaaatactgactctagcattcaaaccccggtttgtcttgttcaaaatctacaggcttaccactatttatttttgccaatatcttgtttg

SEQ ID NO: 126572 - DNA, 122 bp, Homo sapiens
ccggcgctgcgagtcgatgtgggtgccctgccttcccacaggctgtttctggggcagcggcgcactgaccttcgacaggcgggcgtcggccaggtcacagccagtgacggtggcgggctctt

SEQ ID NO: 126573 - DNA, 122 bp, Homo sapiens
tgggaaccagtcctggccctggtaccttgttgcatcctctaaacgatcagtggaggccaccgaggaaattgcctgttcacctcctcctagttatctagtttgcaaacggagtaaagaagaag

SEQ ID NO: 126574 - DNA, 122 bp, Homo sapiens
ggggacctaggctgccaggacgcccaatagcctccagaggttctggtggaccagagcctgcgcactccgccgagagcatgcccttggctcatccaatcagagcggcggatccaggcgcctgt

SEQ ID NO: 126575 - DNA, 122 bp, Homo sapiens
gacagccccctctttctgcctcttcctcagaatccggggcaccagctaccagagccctcacggcatccccatagacctgctggaccggctgcttatcgtctccaccaccccctacagcgaga

SEQ ID NO: 126576 - DNA, 122 bp, Homo sapiens
gtagaaacacacacacacacacacacatacagcctatgtattcagtaccaggaaacatgacgggctagatggtataatcatccaacagaaagcgcacaataactgaagccactgcagaggag

SEQ ID NO: 126577 - DNA, 122 bp, Homo sapiens
aggggcgcttacctgtagccattgcagctaggtgagctgtccacaggaccctgagtggttcggggagttgggccttgggatccttgagctggtctcttgtgggccctttttataccctggcc

SEQ ID NO: 126578 - DNA, 122 bp, Homo sapiens
ctgcagttctaatcctctaatctctgaccctgcttagtacactttcctctcacttgctctcgctatgtgctgagtagattgctgtgaagaaggaggtgttgagggagtacataatgaaaaaa

SEQ ID NO: 126579 - DNA, 122 bp, Homo sapiens
gtgaccggcagcgaagcctgcaggtgccttagaggtggggagcaccgccaagccgaggaacggccgcagatgtgggtgtttccagagatccgaaaggccgcatggcttagggaatagcggct

SEQ ID NO: 126580 - DNA, 122 bp, Homo sapiens
tgccccgcccagctccccggggcctcccctgatccctgaccctgtgccgcccactgtgcccgccctcaggtcccgaggaccccgtctgtcctaatcccggcatgacccttaccagcgcagcc

SEQ ID NO: 126581 - DNA, 122 bp, Homo sapiens
ctgcctaagcagtctcctgcttccagattactgtcgcttctgcctctgagcccattagaccgtgtcacatccttaaatcttcccaattaggctggtcagagtgtagtggtgtttacaactaa

SEQ ID NO: 126582 - DNA, 122 bp, Homo sapiens
tactaaaaaaaagaaaagaaaagaaaagaaaagaaagaaagaaaaaaaattagtcaaatgcgtttgcttgaacccaggaggtggaggtacaccctgggcgacagagagagagaggtaaaaaa

SEQ ID NO: 126583 - DNA, 122 bp, Homo sapiens
acatgaactgaacatgccatgtttcaatctggccccagtggctttttctctgaaagcaaacgtgtgtcttttacaccagggctttctccccaccccagggggtgtcttccatccttttgtgg

SEQ ID NO: 126584 - DNA, 122 bp, Homo sapiens
ctgagccttcggtattgaaaacgtgggtaactgaggtctggagaccgcctgttgatttcccgcatcagagctgttcttcccccctggtgggcgcagaccagaaacaagcagacaccatcctg

SEQ ID NO: 126585 - DNA, 122 bp, Homo sapiens
tcacgtacccatctatcctctcccggtgcatctgccacacgctgttgggtttttgctcttcgtgcacatggtacttgcgcctcgacctgcagttacaccagtcgcatcatctgtacttgcca

SEQ ID NO: 126586 - DNA, 122 bp, Homo sapiens
aattttattaatagcttattctgtaaaaatgctattaataataataaaaatatcaaaaaacgttttgaaggcattgcattacctgccgttttggattatgatcattcttttgtgtggatagt

SEQ ID NO: 126587 - DNA, 122 bp, Homo sapiens
cttactgctgggtgcgcggggctgggggtgcgagtaccacccctgaagtctcttcctgggcgacctccggggcctcattctaggcctccttaaagagaaggatctaaattaggaaaaggaag

SEQ ID NO: 126588 - DNA, 122 bp, Homo sapiens
aacagatgaatacccagggtcatggtcggtaacatttattgcgcaactctgaggccggggcggacccagctggggagatttactgtgggaacgtctggcccggccccttcctcccctccggg

SEQ ID NO: 126589 - DNA, 122 bp, Homo sapiens
aacacattccaataatcctactttcacttggcactttgtgtagaatttgcaaattgctttcgctgtaaacagtagctgtagaatacttcacactgagaagattaaatgaggcccttatccta

SEQ ID NO: 126590 - DNA, 122 bp, Homo sapiens
ttgtgtggcactccctctctaggcctgggagggtcagggaggcagtagccacccaggccacggagctgcggctgcacctggaaagccacactcaggaaacacgcatctctgcaccccgggct

SEQ ID NO: 126591 - DNA, 122 bp, Homo sapiens
tctaatgccacctgtcgtcttatcatctgattgcagacaaatggaatcctgtgctgaacccgaatcttccaaaaaacagcctacaatctgtgaccaccacaagatgtgccctgatggcagct

SEQ ID NO: 126592 - DNA, 122 bp, Homo sapiens
ctgtgaagcggaaaggaggccggtactttcagcctgaggtcggccagggtgctgcaattccggacagagagatgtttttcccttgggttgggaatggcatgttctgagcttcttttgacttc

SEQ ID NO: 126593 - DNA, 122 bp, Homo sapiens
ttggcttccccggagagttgccattgctcagccccccacaactgcagaaatctagattatcgcccatttaatgaagctgaagttgcagggtaagggagaaaggaataaagaaaaagtgggag

SEQ ID NO: 126594 - DNA, 122 bp, Homo sapiens
gggggatgacggttaggcagcggaggttaggccagtcctgggcgtagagcctgctgtccacgggatgctggggagagggctgcccgccctgtccttctcagccctgattctccaggctcaca

SEQ ID NO: 126595 - DNA, 122 bp, Homo sapiens
taggtcacgggcggtgaaaaccgtgggaacccagaaagacggccaaagcacgatgaggaccgctgccggcagcccgccccaccctgggctcctccccacacccgctcgggcagccgggagcc

SEQ ID NO: 126596 - DNA, 122 bp, Homo sapiens
ccctccctcctcagcccacatcctgctcctcccaccgcggtggtcacatgggggcgccgccggatttaagcttaatctgcctggtgctcagcacagcatcctggctgtggcgcgtgctgact

SEQ ID NO: 126597 - DNA, 122 bp, Homo sapiens
aaattgtaaaggcacagaattgtaagcttcattttgaatccactaaatcaatcccccctacgtcaattcagtcataaatactacatgttaccataaccatctctccagagtctccttttatc

SEQ ID NO: 126598 - DNA, 122 bp, Homo sapiens
cacccctcttgccgtgtcgccctaagccagttccctctcggacccttcctcagagcggaccgggtcctctctagtctggacccccatccccaagggacgggtccctgccccagccccggacc

SEQ ID NO: 126599 - DNA, 122 bp, Homo sapiens
acctatgcctcaaatccactgaaactcaaagagaagaagggagatgtcacctgaccacgacggttgcgatgatgccgtttacaactgtcctgtcgcactgaacaccatctgccacccaggca

SEQ ID NO: 126600 - DNA, 122 bp, Homo sapiens
ctagtccagctgtttctggaaatcctccaaaggcattcctgccaaggggccacccagcctcggaatgcctccactccagggagcttgctgcctgctctacttgtagcttgggcttggatcca

SEQ ID NO: 126601 - DNA, 122 bp, Homo sapiens
cccccagcagtgtcgctccaattcaaattagtggagaaaagattacagtaggccctgagccgactgtgaattcggtgcttggccaaggtaacactcatcgtattcacggagtgaaatactat

SEQ ID NO: 126602 - DNA, 122 bp, Homo sapiens
ttttggacttccagcctctagaaccatgaaaccataaatttctatttaaagatcatttgtcgtggcaggcctaggaaactagtacaaattttggtagtagaaagtgggatgctgctgtaaca

SEQ ID NO: 126603 - DNA, 122 bp, Homo sapiens
gcgtcggccgcgctcagcggcagagcggagcggagctgtgaggcgccagtgcggagcgggcgggcgggcgggcggcgtgaggcggagcgcgggcggccggcgaaactccaagggcggaccgc

SEQ ID NO: 126604 - DNA, 122 bp, Homo sapiens
gcactggccgcccgctcggctactacgccgacccgtcgggctggggcgcccgcagtcccccgcagtactgcggcaccaagtcgggctcggtgctgccctgctggcccaacagcgccgcggcc

SEQ ID NO: 126605 - DNA, 122 bp, Homo sapiens
acttaattactggattctggctctggaattacatgccagtagatatataccaagataggtcgggtaggtgtatttgaaaattggtacatgcatactgaacaatattttagttcatgtctttt

SEQ ID NO: 126606 - DNA, 122 bp, Homo sapiens
tacgatcataaagagacattcaaatttgctttcttcaaagattttgctctgagctacccacgactgcctgagacatgtcagatcttcaagaagtggctagctctactctgagaagctttctg

SEQ ID NO: 126607 - DNA, 122 bp, Homo sapiens
tagataccaaattctgcggatgctcaactcctttgtataaaatggcatagtagctgggtgcggtggctcacgcctgtaatcctagcactttgggaggccaaggtgggcagatcacttgaggt

SEQ ID NO: 126608 - DNA, 122 bp, Homo sapiens
tcctccactccgccccgaggcagcctggctaggctagcggcgggtctccgcccgcccgaacgtttccataaatcaggccgctggcaggctgctaattagctcgaccgaaaagaatagaaaga

SEQ ID NO: 126609 - DNA, 122 bp, Homo sapiens
cacagtggaaagcagattttccaagaatcctggcggagccaagatcggctcgcccgcccccgcctcacgctggctcctgataggcagctagagctgtccgttttgacagaaacctttgcgca

SEQ ID NO: 126610 - DNA, 122 bp, Homo sapiens
ggtgatccgcccgcctcagcctcccaaagtgttgtgattacaagcgtgagccaccgcacccggccttgcttccacttttgcaggagcaggtttagctgacaaccgtgcgatctcctcgtggg

SEQ ID NO: 126611 - DNA, 122 bp, Homo sapiens
accgggaagtgacttgatggtgtctccttggccatctggaatcaaagggcagtgtctaggcgtggagatgaaggctgccctaggccaggcgggtgggcggggagtggagcagatgagttcct

SEQ ID NO: 126612 - DNA, 122 bp, Homo sapiens
ctaatctgggtcaggagcggctgccggctcccccactcctggagatgagcgactctgtgacgtcacgggaggcgcgggcggagcgccggggaagcgaagtaggcaggggcgaggcggctggg

SEQ ID NO: 126613 - DNA, 122 bp, Homo sapiens
agcggagaggctggccccagcccgccacgccgcttccccacgctcgcagccacgcggagccgcgtcctggtccagcctcacccacccagagcaagaggcggaggaactggaacagcgccccg

SEQ ID NO: 126614 - DNA, 122 bp, Homo sapiens
ctcgcggaggtatagagatcctagaggccacttatattttctgagccttagtggtggactcgtggtatatttaaaatgtacattcaaggctgggagcggtggcgcacgcctgtaatcccagc

SEQ ID NO: 126615 - DNA, 122 bp, Homo sapiens
cgccagcgcttaaggtcgcgctctccccacccccgccttcctcccttcctcggcggcttccggatctggacagagctgcaggagtggcttcaaacacttcccctggagacccctccccactc

SEQ ID NO: 126616 - DNA, 122 bp, Homo sapiens
tatagtctttctcacggctgctggggtaataaaacacatgcttttaatccggattatccgcggtgacatggggcctccgctactgcccgtataagttaaagaaaggcctgttctctcaaact

SEQ ID NO: 126617 - DNA, 122 bp, Homo sapiens
ggtcggtgatccactgcaagctgtccttcgcatagttttctactgccatcacttcatggacgcttagaaaggttttcttccttgcttggtaggggagggccatcagagtcaatagaatggcc

SEQ ID NO: 126618 - DNA, 122 bp, Homo sapiens
agaggtggggcagaggagaggccttctatcattctctaagacctagaaatctactttcaccggaaggcacagacttcacagaagaattgagcaagagccagcgtggaaatattggacagctt

SEQ ID NO: 126619 - DNA, 122 bp, Homo sapiens
agcaccctcttcttttataagcaaatattttggccaaaccctgaacaattgtttaaaacacgttcatctatgtcaaggttgtattttgaaaatgcctcattcaatgacttagttttcactta

SEQ ID NO: 126620 - DNA, 122 bp, Homo sapiens
cactcggagttcctgaagaaatctacttttgcccgcctcccaccctacaggtatcgattccggaggcggtcaagttctcgctccaccgagcccagatcccgagacctgtcccccatcagcaa

SEQ ID NO: 126621 - DNA, 122 bp, Homo sapiens
ggccggcagcgtggggcttgggagacccgtgccctgacaatcttaccctagatcttccaacgactccaagatgtcagtctccatgaggtcacactccatgctactgtggtattcaaatttcc

SEQ ID NO: 126622 - DNA, 122 bp, Homo sapiens
aatgacaagtgtcagcagtcaaaggacagcaaattccagcactgtgaggggaaggtgatacgtctgtaaggaaaggaattaggtggcctccagagaagatgccttgaccatgcaacctcgtc

SEQ ID NO: 126623 - DNA, 122 bp, Homo sapiens
catgacgcagtgagaatttaaaaccaaaacaattggacagcacttgttttgacaactgtgcggcactgtgccacgggaccctggtctttgaaaccttggcgtgcgcgagaatttcccagtga

SEQ ID NO: 126624 - DNA, 122 bp, Homo sapiens
gacggcccaggcaggcactgtgggcttcaccgcccgcaacttttgaccctagaggccctgcgctgcagcctgtggcccggagggacagaagtgggagcgtgtttgggccactctgcagcgaa

SEQ ID NO: 126625 - DNA, 122 bp, Homo sapiens
ggcttgcccccccgggcattcgggtggactacgaacacaaactgaagccctaggacttgtcgcccgtttgcgctctcgccgaggcacaggctgctcgcggaccaccctgctccgaaaactaa

SEQ ID NO: 126626 - DNA, 122 bp, Homo sapiens
tggctagaaaagggcaaagggccgatccttgcgattatggaactattcagcaccgcaacacggcagggacgggggcccccagtggtgaacacgcacagaactcaaatcaatcaatctctctc

SEQ ID NO: 126627 - DNA, 122 bp, Homo sapiens
ggcctgccttccgtttctggacgtgtcacagacactggtcccatgctgtgcgtccgtctgcgtctggcttccttcacacagcagaatgtactcagggccatccctgttgtcatccctgttgg

SEQ ID NO: 126628 - DNA, 122 bp, Homo sapiens
cgtgcagttcctctgctgcaccagcatctgcttcagttcgctgaactcgctggagccttccgtggactcctccagcgtgttctctggctcctgcatgtccaggtctggctgttccccacagg

SEQ ID NO: 126629 - DNA, 122 bp, Homo sapiens
aatacatttatgtggagagttttgaaaatcacgatctggcaatccacgcaccacggggctcgcggtgatgattcctgggtcatgagacgatggcggcttcctgccctccctcctctcgttac

SEQ ID NO: 126630 - DNA, 122 bp, Homo sapiens
tttcaacaatgttatacagtctccaaacattctagtaaggtgatttttatgaccacttaacgattaaaataactcaaatactatatccaaaacaatgaaagaaaaaggaggctggcggactt

SEQ ID NO: 126631 - DNA, 122 bp, Homo sapiens
tgcggtgaaagcgactgtgtgcgcgctcacggcctcgcctgtccctgcatcagcccatctcgtcaggcagatcaacatgaagctgtaaaacggatgacttaggccgggcgtcgtgatgggcg

SEQ ID NO: 126632 - DNA, 122 bp, Homo sapiens
cacacaaaagaatccacaggtctaggtagcataacatggtggataagaggaggaactctgcgaccaggtgacttgggtttgaatcccagttctatcacgctctagttgtgtgatgttggcca

SEQ ID NO: 126633 - DNA, 122 bp, Homo sapiens
acactagatgctgttcctcaaactcctgccacacacggcaacctacacggtcccaagcgccggacactaactaaaaacagacaggctcaggaacacgtgagccaacactcccgagaggcgag

SEQ ID NO: 126634 - DNA, 122 bp, Homo sapiens
ggacggcgcccgcggttttcatggaaattgcactgcctaacggtgccagtggtccacctgcggtggcgtcttttgagaacaatccgagcccggccgacccccagccccgtgaagacgcggcc

SEQ ID NO: 126635 - DNA, 122 bp, Homo sapiens
gttgcctctaacaactctgttgccttctccacctcttccccctatagttcattttccacacggcagtggggcttggggacttgttttaagatacaaatcagatcctgtcccttaaatctgca

SEQ ID NO: 126636 - DNA, 122 bp, Homo sapiens
gtcacacctgagcatattggctggccctgcacgccgcgtgcgattcccggttctgcggcgcgagcacagctgcgctctcccaggacgtacctgggccccgcgctgtgaagaaagccatttca

SEQ ID NO: 126637 - DNA, 122 bp, Homo sapiens
ggactccactcttggggcccagtctctgctctggcaagctgttgggtatgggacccaccgcgagggggacagaagggcggggaccctggctctcagaactacccaactgagaggcacagagc

SEQ ID NO: 126638 - DNA, 122 bp, Homo sapiens
gcgcgtctgggtctgtctctgactctgggtccgagtcatcgtcccaggtgcgggaatcatcgcaccgccctaggggaagctccattgcgaccgggtgggcgctgccggcctcgcgtcttgtc

SEQ ID NO: 126639 - DNA, 122 bp, Homo sapiens
attccaggagtggggggaggttgctgcgacagctttaggctcctctccgcgttattgggtcgtcgtaggtgcgctgtgggctgctgcgggctctgagacccggccacaggactcgcggctca

SEQ ID NO: 126640 - DNA, 122 bp, Homo sapiens
cataattaaaataccagtgggtgctaagtgctatcacagatatgtatgcagatttgtaggcgcactaggaggaagtagtggaaggcatcacagaggggtgacttttgagcacagggtcttgt

SEQ ID NO: 126641 - DNA, 122 bp, Homo sapiens
agagcccgcagagtccccaggtggcactgtcagagtcgctcagtgggaacctgcgccagccggcaggagacgtggctgtcctcagcctggcagtgcgtctggagggcctgtgcgagctcagc

SEQ ID NO: 126642 - DNA, 122 bp, Homo sapiens
ttcagagcggcattcccccacagagacggccccacggaatcatgttctccctccctgacccgggcaggaagatctggctctgcctaaatccagttcccagaactgggtgtttttaggaagct

SEQ ID NO: 126643 - DNA, 122 bp, Homo sapiens
agaagatgagccaggggcccaagatgcaggcctgtaggcctcttagatgcctgaagattacgcaactcctcctttagctccaaactggcttaaaactcgccagtgggcaacctcttccccat

SEQ ID NO: 126644 - DNA, 122 bp, Homo sapiens
ctgggctctgcttgacgtttcttcaggctggctcgccggtaccatctcctaggatcctggcgctatttcatggatccccagagaagacaggcgagagtacatcgctgacgacgtccacagag

SEQ ID NO: 126645 - DNA, 122 bp, Homo sapiens
aggaggtgagactgctgaagctccaggccagggggagtctctggctcagtgctaggtgtccggttcaccgggcctgatgccctgcgtggctgtgggtggatgtacctgcctgggaggctggc

SEQ ID NO: 126646 - DNA, 122 bp, Homo sapiens
cctcacccagcaggagatacggaccctggaggtaagggggtcgtggacccaggctgggctcgaggagcggcccagacacctccctccgtgcccaagttcactcctggccgagttgcatcctt

SEQ ID NO: 126647 - DNA, 122 bp, Homo sapiens
aaagtggacatccttgctttgttactaatattacaggaaaagctttcagtgtttccccatcgagtatgatgtttgctgtgaagttttttttgtttgtttttttttttgagacagtcttgctc

SEQ ID NO: 126648 - DNA, 122 bp, Homo sapiens
gctgggctgttcccgcccctatgcccttttttgggtttccggccagaggcatgctgggagcgtcacatgcaaattgagcgtgcacccagcgttccgccctttctacgctgggccggttatcg

SEQ ID NO: 126649 - DNA, 122 bp, Homo sapiens
cagagtaacgattccatccgcacctgcagaactgagagcaccagaaactcctcacctgcgcgcatcatccaggcaggttaacagcggggaccaaggaccagctttaagggagtgatatcact

SEQ ID NO: 126650 - DNA, 122 bp, Homo sapiens
ggagaactgggagatggagccgggggcaggcttgatccagactgggaggtgcaggaatgccggggtgtgaagagcgtggtctttattctgggggctggggagccacagcacaatcttgagca

SEQ ID NO: 126651 - DNA, 122 bp, Homo sapiens
acagccctgcggagctgctttccggggtccctttccctggaccagattttcgcgggaagccggatcctctccgttcccttggagtgagcaagcgggacagttctgcggaaagtttccgcccc

SEQ ID NO: 126652 - DNA, 122 bp, Homo sapiens
gtgcaagttgccacagaacagcacggttttgtccagggtagccctgtggtacattcttggcggtgatttgacaagatctggacattagctgctgagatgaaatgtgaaattgcagagccctc

SEQ ID NO: 126653 - DNA, 122 bp, Homo sapiens
tgccccgagtgaagatgaaccacgtgctctcctgcagccacccatgtggtcttgtggccccgcgtggtctcgtggagtaaatgcagtgctcggggcttcagagacaggcacagtgggctgga

SEQ ID NO: 126654 - DNA, 122 bp, Homo sapiens
ctccagacgccagggggcccacccgctgcccgtggtcggcgcgcggagctcgaaagcgcgcgcctctaacaaatgaaaacccatagggacttagggttgaattttaactttttttttttttt

SEQ ID NO: 126655 - DNA, 122 bp, Homo sapiens
acagtggcggtacagtgcctggagcagggctgtcttctccttggagtgcagcctggtaaccgggacctccccgccaggtcctgttgttgctggagaagggtagctgacaaactccaactcag

SEQ ID NO: 126656 - DNA, 122 bp, Homo sapiens
gtgccgttgggaccacggcggccagagcggcaggatggcttccggcttcaagaagcccagcgctgcctccaccggccaaaagagaaaggtggcacctaagcccgagctcactgaggatcaga

SEQ ID NO: 126657 - DNA, 122 bp, Homo sapiens
aggcagactcaaaaggctacatcatgtacggttccatctacagcaagggtccccaacccccgagccacagattagaaactgggccacacagcaggaggtgaggagtgggcaagcaagtgagg

SEQ ID NO: 126658 - DNA, 122 bp, Homo sapiens
ttggggatcacacggaaactgcatgccgcctcccggcctcagagttctggaaaggtggagcggatgaatctgactatcaaaaatagtactgttgtcttccccgctggatatttaaaacaaca

SEQ ID NO: 126659 - DNA, 122 bp, Homo sapiens
ctgctaggatggatgtggcggcaggcaatagacagacttgagcagcgagtcccggggcgacgctggcctcgctaccttcctggcgctcacgctgcctctctctcccccaccggccgcaacgc

SEQ ID NO: 126660 - DNA, 122 bp, Homo sapiens
gaagattactgtagttagcattacttttgcaaaagccagaagcaaaactatctccactagcgaagacactgggagtccatcttctcacctttatccacaggtacaaaaggtgagaaaagcat

SEQ ID NO: 126661 - DNA, 122 bp, Homo sapiens
aagccagagctctttgtggttccatcaagtatgctatcaccaaactacaatgacaggtcacgcaaggtgaaaaagctcccaaagctcaggaaaggactgacaaaataccaactatcctcaac

SEQ ID NO: 126662 - DNA, 122 bp, Homo sapiens
cggggcggggcggagcggggcggggcggaagggcccgggtctgctgcggacggggcggggcggagcctcctcctgcacgggggagcccccgggctcgccccagctcagacactcctagcctt

SEQ ID NO: 126663 - DNA, 122 bp, Homo sapiens
ggaagcaggtgaggtgctcgatccagggccagttaatggggtagatgtacagccacagcacgagggcggcgaagaggccggcaaaggccagcagtgacaccaggatgagtgcccgcttgcgg

SEQ ID NO: 126664 - DNA, 122 bp, Homo sapiens
tgcttgcgggccagcgcaagttccaggtgggcgtgggctgggcggaccccgcactctgagcggccagccggccccaccggccccaggcactgaggggcttagcacctgggccagcagctgct

SEQ ID NO: 126665 - DNA, 122 bp, Homo sapiens
ccctccccccacccagcccctccccccccctcagccccaaggcagtacctttgtcgaggacgggcccaaagatggccaggctgtcatctatggtggtgcagttccagcggcggccccggaac

SEQ ID NO: 126666 - DNA, 122 bp, Homo sapiens
agcaatgacttttccacagccttcctctgagcctgcaagagtctttcctgttgcagttttcggataatttatatttggctttttcactttcagtcctctcttataaaacctaaataatctga

SEQ ID NO: 126667 - DNA, 122 bp, Homo sapiens
tgcctgcgtgtttgtgagcatgcgtgtatggtgcacatgtgcacgcatgggtgggtggagcgtgggggcagtacacaaagcctgtgggggagatctattgaccctatagatatattagcatc

SEQ ID NO: 126668 - DNA, 122 bp, Homo sapiens
ctgcaaagcctccagatagctgtgtggccacgggagctggggacagacggcagcccagtgcgcttggccccccggggaaagccgagactggaggtggacacaggctcctccgagaggcaccc

SEQ ID NO: 126669 - DNA, 122 bp, Homo sapiens
aatcacatttaaaaccttaccctaaagtgggagttgctgagagaccaaagaatgactgggcggagtccagcttggtgagtaggtgagtttattaggactcacatgtggggcactcgtgggca

SEQ ID NO: 126670 - DNA, 122 bp, Homo sapiens
gccgcagcgaggggccggagatagcctagttgaaaggcccgggcgtctcggcggggagcgcgttccgcgctgtagggtaatcgcgccgggcggccggccgcctggccgggcctcagcgggag

SEQ ID NO: 126671 - DNA, 122 bp, Homo sapiens
atattaaccaactacaatgagagagagctgggagggaaggagccacagtctgccccccgccggcagaggctgaagcagctgatctcacagggcttcctccatgcctcccacttcactactca

SEQ ID NO: 126672 - DNA, 122 bp, Homo sapiens
tgacggacaggctggggttcagggcgctttcagttcacggagcgcacggagcggctgctccgcgggaagcggtgcaccttgatgtgcttggagaggtggtcgctccgcgcgaacttcttctc

SEQ ID NO: 126673 - DNA, 122 bp, Homo sapiens
ggaccctctcccactcccagacacatgtgccgggggcctgcccccacctgggtctccccacgccccacagtggccctggctgggagtggccagtgctcctgagccctgcaggtgatggggga

SEQ ID NO: 126674 - DNA, 122 bp, Homo sapiens
cgtgacatgcagtcgccggatcgcctttgagtctcgtgaggtacttttggtcccaggctccgcggacgaggtactgcgcaggcgtgggagggtctgcgcatgcgcagaagcactccgggcgt

SEQ ID NO: 126675 - DNA, 122 bp, Homo sapiens
gggacgtaagcagcttttgtttaacctagacagagacagggagcctctttcctggggtggcgtaaacagcacaaatctgccctatctgcagttgccatttaaatgaaccctgttttctaata

SEQ ID NO: 126676 - DNA, 122 bp, Homo sapiens
gtatatgactcagggtgcgattgctctttttcctctgtggagaaagcgttttcacttgtacggacacctaagtgttaagatggccgcgcccattgtgtcattcccgtcattctttgtgcaaa

SEQ ID NO: 126677 - DNA, 122 bp, Homo sapiens
gggattatcattaattcttacccttttgggataggcgtacaaagtacattctcaagggctcggagaatattacaaagtacattcacaaggttagggggagaatattacaaagtaccttctta

SEQ ID NO: 126678 - DNA, 122 bp, Homo sapiens
gatctgtatgggattgtatgccatagaaacactttatgtcactgagactaaagctcccagcggtcaagaaaagtaacagggaaaaggttacagaaggcattttcccatgagcttctattccc

SEQ ID NO: 126679 - DNA, 122 bp, Homo sapiens
ctgcagcaaatcatttctcccaatattgttactaactttaaaatgctgaatgtggagcatcgatagtggcaggaggcagacaaatgcctaggcagacaggggcaggtccctggtgaaaccca

SEQ ID NO: 126680 - DNA, 122 bp, Homo sapiens
gcccgcctgagcgcaggagtcaggctggggacctggaggaaaggggccgcagggctcagccgcctccacctgccaccttcgccaagactgcgacgtggagctagagccagagtagggctgca

SEQ ID NO: 126681 - DNA, 122 bp, Homo sapiens
tcctccatctaaagggactccctttcctattcatttcttcaactaattcttattaagtatcgcaaatatgtataccaggcgctgttggtggcactggggctctatgtccctgctttggtgga

SEQ ID NO: 126682 - DNA, 122 bp, Homo sapiens
tctggaactaagacacgggaagaaaaccccacggggacgattcagctggggtggttcttccgccccaacacacaccctctgtgccgtcggtcaccacgcagtcccaccctcgaacacccaag

SEQ ID NO: 126683 - DNA, 122 bp, Homo sapiens
caggacgttctggactcgccgccgcctccggctacagaacccccagctttaccctacagacgcctctagggtcgctgcctgatcgcccagtttaagggagacccgtcctaaggcccaccctc

SEQ ID NO: 126684 - DNA, 122 bp, Homo sapiens
aatttcaaaagcacagagcaaccagatgagggggagtggcagggatgtgcttggaaagaccggaaggagagtaagctcctgaagggacctgaatgctaagctcaggagcttgaccttcatcc

SEQ ID NO: 126685 - DNA, 122 bp, Homo sapiens
aacaattaatcgggcgtggtggcgttcgactgtggtctgcacatggcatcttttccactacggacacctccaaaccacagggtctgctggatcatgtggcccaagtagcctggctgcttaca

SEQ ID NO: 126686 - DNA, 122 bp, Homo sapiens
ctgtcacttgggtgcagggtatggagagctccttggtaatagtggacacacgctgtcactcgggtgcagggtatggagagctccttggtaatagtggatgcgtgctgtcactcgggtgcagg

SEQ ID NO: 126687 - DNA, 122 bp, Homo sapiens
ggctggctgtgggctctccctcccatagaagaggcctgaccccacctggcaaggcctccccggaactccaaccaggttcagaggaggaggcagaagccatggggccatcccagccactgtca

SEQ ID NO: 126688 - DNA, 122 bp, Homo sapiens
gacggcggcactggcgggctggggcaggggccgggaggcagttaccggggccacgagcgccgctgtcgcgttccccgagcgcagcggatcctcgtttgcggcgggccagggccgggacgagc

SEQ ID NO: 126689 - DNA, 122 bp, Homo sapiens
tgccgactgggaagcaagggagcgtctgcctccagatgtttctctggcacatagtgaatgcgggaaatgagaggactcatgctactcatgggggttacctactcggaggctgcggaaggtag

SEQ ID NO: 126690 - DNA, 122 bp, Homo sapiens
cctaggggcaagagacgacaacaggtggacaagatgcgagccaccagcccactaggacctcggagctgccatggggtgggtctccctgaagaagagtcaagcagccttcctctccccagccc

SEQ ID NO: 126691 - DNA, 122 bp, Homo sapiens
gctcctagcaaccggctagcagctcggtttccaaggactgtaacgccttcaaccgcccgccgcgatagagtgcccacgaccctgcctcgggaatcccgctctgcaccgccccaccagacccg

SEQ ID NO: 126692 - DNA, 122 bp, Homo sapiens
tgtggggcctgcccagctcacacactctgaacccaggggctctactaacagtgtctgccccgggaacattcccaataagttaggcttgtcccaggccatctgtgcccagatttctgagccat

SEQ ID NO: 126693 - DNA, 122 bp, Homo sapiens
agcccgagcccgcgccggagccggaaccggagcccaagccgggtgctggcacatccgaggcgttctcccgactctggaccgacgtgatgggtatcctggtaagttacctggggagggggcgg

SEQ ID NO: 126694 - DNA, 122 bp, Homo sapiens
cggaggaatgtcctagcctcaatggaccctgtgtgaagcttcagggtggggggcagagcccgagaacacccctcaaggcagcgccagagcctggcactgggccacagcaagaggcagcgcac

SEQ ID NO: 126695 - DNA, 122 bp, Homo sapiens
ttatgatgattaaatgagataaatgaaagtacatgtttcaaatgcttaatgcctgacacacgttaatggtcatggtcgtcatcattatcgttattaagtggccaacatggataaagagtata

SEQ ID NO: 126696 - DNA, 122 bp, Homo sapiens
gtctttgtgtttttgcatttttacaatatgctcttaggtacccttcctggagtaatccttcgatgtgtttataatgacttctatagactggctggagattggtctacttaaaaatggcaacc

SEQ ID NO: 126697 - DNA, 122 bp, Homo sapiens
ccgggcagtaagcctcaccccagtgccttcaatgcagagctcctggctgccaagcgccgccgcggcccgacagcatctcccgccgcagcgccagccctgcccctgcttgatccccgccccgc

SEQ ID NO: 126698 - DNA, 122 bp, Homo sapiens
tgagtcaggctgctttgctggagaacttcgtggaccgaggttctttccctccttcccgcccgtcctgctctttagtgcgatgcaagcgaccagggatgtgtctgttgttgttctttgtggtg

SEQ ID NO: 126699 - DNA, 122 bp, Homo sapiens
ataaagtattcgcataatacaatgaactcataatttggccggatgatttgtaggcagggacgttttagtgtcggttttacgagattccttgatatattacagaattagagtccagatttaca

SEQ ID NO: 126700 - DNA, 122 bp, Homo sapiens
acaaagcataactgtagagttgttcccagaggcctcaggagtgacaccgccaccaagccacgctactctcttagttgttattattgttttgtgttgttttagacggagtctcactctgttgc

SEQ ID NO: 126701 - DNA, 122 bp, Homo sapiens
gaggtggcgaatcttcaagggaagtataaaatgagattctgggattagcaagcatctgtgcgcgtgagggggcccgaagcttaagcttcattagcttcacgtctcaaactgcctctgcaatg

SEQ ID NO: 126702 - DNA, 122 bp, Homo sapiens
ctcacctcctccctcctacaaactaaataaaaagcagtaaaattactttccagaatagcccgcttcaaagcagaacagaggacccggctgcaggaatcctgagtcttgccctgataaggttc

SEQ ID NO: 126703 - DNA, 122 bp, Homo sapiens
gctgcaagccaaggcggaggacctggatgacctgctgtatgcggccgagatcctggagatcgagtacctggaggaacagtgcctgaagatgctggagaccatccaggcctcagacgacaatg

SEQ ID NO: 126704 - DNA, 122 bp, Homo sapiens
cctcctaatccaggcccacttctctggctcatgtccaccccttgatgggcgttccggggtcgtcactgtcctctgcgcccctgggcactggcagcgcgggccgggcagcggggagggaggcg

SEQ ID NO: 126705 - DNA, 122 bp, Homo sapiens
gtccgcgcgagcccgagctctcccgcgctgcagctcacaggcagcgaaaaagtcgctctgcggaagccctggagaacttctggaaggagttctcaggcccgcgctacttttgtagtgcagga

SEQ ID NO: 126706 - DNA, 122 bp, Homo sapiens
caggtggcagttctagcagctgtagccccagtcgttgcctcagtttacctcccagcaccccgtgctccctttgagctttggccagatccagagcgggaaggccagcccccgcaccttccccc

SEQ ID NO: 126707 - DNA, 122 bp, Homo sapiens
gggcgcatggccggtgcagggttggggaagcaagcgcacagagtaagcgcccgcctgtaccgctaccccaggaagccggcctcctgcctcttcgctgcgcagcacatcgcaccgtcctggaa

SEQ ID NO: 126708 - DNA, 122 bp, Homo sapiens
atacatgtgcgtgcgtgtgtgtttgcaaaagtccttgacggtgaaggtcgggattgtccccgggaagggaagggcgaaacccgaggcggagagggagggagacaggaatgtctttctttctt

SEQ ID NO: 126709 - DNA, 122 bp, Homo sapiens
cctgcctagggcctcgggtttccttttcattaactggcttgcgtgtgcgtgttgcatgcacgtgcacacatctccatatgccagggataagtaactgggctgcatgcttcgtttcccctgct

SEQ ID NO: 126710 - DNA, 122 bp, Homo sapiens
ggccgggcgcaggcgcaggctccagagcgtatataagggcagcgtggcgcacaaccccagcgcgagtgccagagcccagccggcgcggagcgggagcggtgcaggctgaggtctccgagcgg

SEQ ID NO: 126711 - DNA, 122 bp, Homo sapiens
acctccgtcatcactgtttttgtacttgtgacaagaaattccaaagacccatgaggtttccgatgattgcacaaaacatttactagaaggtctgctattcagtaatgcaccccaaggaatcc

SEQ ID NO: 126712 - DNA, 122 bp, Homo sapiens
agccgttccgtgtttctcccccagccgcagcggccagggagccgctcctcgtcttgcttccggttgatgtgtcgttggtactcctcctcggatgccctctcctgaagccatccagcctctgc

SEQ ID NO: 126713 - DNA, 122 bp, Homo sapiens
tgccgccctgccgccgctggggagggcgcggagggtctccgaggactgctgtcctagcctcgcctgggtgcatggcccagctgccgccctggactgtggctttggctgctcgacccacaagt

SEQ ID NO: 126714 - DNA, 122 bp, Homo sapiens
acccagctccaaggagagctgtgccgggtgctctggaggggtgttaggacccctggcacccggtgtccctcagtggacggccgttgattctgtaacaaggcggccagtgcccacggtgcagg

SEQ ID NO: 126715 - DNA, 122 bp, Homo sapiens
aattaggtgctaagaagtgcttcaatattaccaggtacattatattagatataatacctacgactgggactcaagacactcaaatctaggcttaacatatgaaatgttgcctacagcctttg

SEQ ID NO: 126716 - DNA, 122 bp, Homo sapiens
cccccctcccccagctggggggagtgttccaggcgctttgccctgaggcctaaaaatcctcgcgggctggagacctgcggtgcaggcatcgggccccccagaccctgggagtggtggcggcg

SEQ ID NO: 126717 - DNA, 122 bp, Homo sapiens
cggccctggtaggcccacagcttcccgaagccaagctccccaggcccagctcaggcctcacggtggcctctccaggccagctcctgccctctgatggcatctgcaggccccaaacggcctcc

SEQ ID NO: 126718 - DNA, 122 bp, Homo sapiens
ccagcctgtctttgatattgatcaatgaactccttctcaaggaatgctttcctctaactgcggtgaaggtggtggctctggtggttctctccaacatgggtgtctgggttttgactgcctaa

SEQ ID NO: 126719 - DNA, 122 bp, Homo sapiens
ttatgcagtcctttcaagttccaaccaagcacagggggttgttaatatttactcattcctcgtctctggaatgatcttgaactataacagtttacttagactaccaaatgccaccagcattt

SEQ ID NO: 126720 - DNA, 122 bp, Homo sapiens
ggcacacctggaacaggcactggggtcaagccgagccggaccgcggagaggcggggtagccgcagtaggactgggggccctccactgagccccgtcagtgctgcctcagcctgggaaggcac

SEQ ID NO: 126721 - DNA, 122 bp, Homo sapiens
ggagagcaagtcaagaaatacggtgaaggagtccttcccaaagttgtctaggtccttccgcgccggtgcctggtcttcgtcgtcaacaccatggacagctcccgggaaccgactctggggcg

SEQ ID NO: 126722 - DNA, 122 bp, Homo sapiens
cttaattacatctttaaaggcccaaatagtctcacccactccaaatagtcacacccacaccggaggttgagcacttcaacacatgaatttggggaggacacagttcagtccataacatcccc

SEQ ID NO: 126723 - DNA, 122 bp, Homo sapiens
ctgccgctcgatctcgtcgttgatccgccgggcttccttggcctcctcgctcaggcagcacgccatgatggactccagagtcattcttccaaagtgcctccgctgcagccccgccggcaccc

SEQ ID NO: 126724 - DNA, 122 bp, Homo sapiens
gagccaacaccttagccaaaggatcaaggtcaacagcccggcagtgagaggccccaacagcgtctgcctcccagcctgacgctgggagggtgacacagcatcatccctggggttttgagcag

SEQ ID NO: 126725 - DNA, 122 bp, Homo sapiens
tcatggcacgaaggacattacagatgtgactttgagttggggagagcagcctggattatccgggttggccctgtcaatcgagaaaaatgacacgtgtccgtcactttatgaggtttattcga

SEQ ID NO: 126726 - DNA, 122 bp, Homo sapiens
acgcagaaccagcccccgggcggcctggcttggtttttcattcccgggagatggatccgtcgcccaaaagttcggaatgacggtacccctttcccttaagatcgatgaggagacgaaataaa

SEQ ID NO: 126727 - DNA, 122 bp, Homo sapiens
cccacgtgcacggccccaccctggcgcaggatgaatgtgtggcaggcccgtgaggaaggccgcctgctgttgcccgaggcggttgtctggaggaagggcacaggacacatgggagagagatg

SEQ ID NO: 126728 - DNA, 122 bp, Homo sapiens
cggatcccattaggagcttaaaagggacaaatgtgctcagggcatgcagtttttgccttccggaactagatcaggatcatgcatttaagctagaaaatggaaagaggagttgcttcacccac

SEQ ID NO: 126729 - DNA, 122 bp, Homo sapiens
tgaggggcgggggagaggtacctgtttgggctccgtgggcacgggcggcggcgggggcaccgcctgcacgggtccggccggcatgactgcgacgctcagggctgccagtccgcctcggtgtc

SEQ ID NO: 126730 - DNA, 122 bp, Homo sapiens
tgacacgtcttgcttaaaacccaaccaaaacgtcaaaaggatcatgaggccctgctttcccggtctgtattcatactgaaaatcaagatcaagcaacttctgcccttctgctccacaggagg

SEQ ID NO: 126731 - DNA, 122 bp, Homo sapiens
tggcggctcgcacctcagagcctgcgtgggccgcggctgcacccgagtcctctgcttcatcgaaagagactgacttggcaagcccaacttgacaacaaattaaaaagaatgctcgggctaga

SEQ ID NO: 126732 - DNA, 122 bp, Homo sapiens
accatgcccggctcacatggcctccttgtaataacgctagtgcctgggtgcggtggctcacgcctgtaatcccagcacttttggaggctgcggtggacggaccatgaggtcaggaaattgag

SEQ ID NO: 126733 - DNA, 122 bp, Homo sapiens
aaaacctcttccctatttggctttctgtgagcatgagatcacatagaaaatgtgaaagcccgctgaatcctccagcacggatcctggaatagagaaagtgctctggtcatcgcaaaaaaaaa

SEQ ID NO: 126734 - DNA, 122 bp, Homo sapiens
gcgcgcaattccttctgaaacctatccgcctcctactcctgtcccttcctctggcgctggcgggtcctcgtcccgaacccccaccgcaagccctggaacggcttcttaacccttttctcggc

SEQ ID NO: 126735 - DNA, 122 bp, Homo sapiens
tcagtcctcggagccctccctgacctcgctgccttttctgctgtcttctccagaaccgcgcggagatcaagaatggcagcatcctgtgcctcagcacggccccagtaatgcccctcccgtcc

SEQ ID NO: 126736 - DNA, 122 bp, Homo sapiens
gcacatttgatgtttctaaattgcctttcctctcatccccagacttaagtaaatccatgtcggggaggcagaaacttgaagcacaactaacagaaaataatatcgtgaaagaggtgagggac

SEQ ID NO: 126737 - DNA, 122 bp, Homo sapiens
aatctcacacatttacaacatgctgtagtaacacaaatatcactctctcttctgcagcagcgaagtacagagtagcatgctcttaatagcagtcctcagagggacgctatcaacaatctaat

SEQ ID NO: 126738 - DNA, 122 bp, Homo sapiens
tgatctcacccatcccgtgtgggtgcgcaggaggggccgagggaggagggtgctggagggcggaagttacctctgactggaggagatacccggcccgtgttaccagcactggtgtgctcgtt

SEQ ID NO: 126739 - DNA, 122 bp, Homo sapiens
ctcttgggttcttcatgtaggaaattaccatgcactcaccgagatttttgtctgttccaccgtgaactccccatgaatccctgtaaagtgacccagaacccagcatttacttggctcacctc

SEQ ID NO: 126740 - DNA, 122 bp, Homo sapiens
catcaccgtcttcagcctgctggagggggtcctgcgggcagccatggccctctagtatagcgctgtcctgaagcggccaggcacccagggccacctgggccccgcgggggaggaggactgag

SEQ ID NO: 126741 - DNA, 122 bp, Homo sapiens
cagacacgcatttccttcaccgagctcctccggagtccttgctggttgcttcttgggacccgcgagcgtctggccgaatcaggcagccttctctggactcctggggcgcccttggtggtcct

SEQ ID NO: 126742 - DNA, 122 bp, Homo sapiens
acactaccgcgcctgcggcaggagcccaggactcagggggagcctgtcccatggcccccacggtgccagggcaggaaccaaaccaggacgtttccccagcccagggctgcccaagggaaagg

SEQ ID NO: 126743 - DNA, 122 bp, Homo sapiens
tactcttttccctctcactgtctgtggtctgaggactgcttacaaagttggactgtggcacgaaggcctcctgattaaaccaacaaagaggccgcctctccagagctcagaattgtcctgac

SEQ ID NO: 126744 - DNA, 122 bp, Homo sapiens
tcgccagcagcccagctcccggaccggctccgtcccagtggccggcctcacgggcgcagacggccgcgtgtttgctctctgttccccggcatgggccacacagaaactcctttctccaactt

SEQ ID NO: 126745 - DNA, 122 bp, Homo sapiens
gacggcagcggggagaggctgttcttctccaggtgccagccctgctgctgaaagtgagctcgccgcggcccggggctcctggccccagctcaggactccctgcagagagcaggcagggataa

SEQ ID NO: 126746 - DNA, 122 bp, Homo sapiens
ctgcgtgtcgctcccagctgcagacgctggacaaaagggcgacggggtggcagcccccagcgaggacggatgggccatagggctgctctctgggcatctctgagcaagaccctccggcgcca

SEQ ID NO: 126747 - DNA, 122 bp, Homo sapiens
agtcactggcagagggctgggaaatagaggggttatggtaagactccctcactccaatgacgttgtgtccccaacaggtacatgcctgggaagacagccagggaacaggcagctacatcaac

SEQ ID NO: 126748 - DNA, 122 bp, Homo sapiens
aaaaaattagctaggcgtgatggcgtgcacctatacctcctactcgggaatcatctgagccggggaagtcaaagtcatgcctgggcgacagagtgagaccctgtcttaaaaataaataagta

SEQ ID NO: 126749 - DNA, 122 bp, Homo sapiens
tattacagcaaaaggctgtccctcccaaacctgggattctgggctcactgagttcacctgcgagtcagccctacctgcactgctctggtctagtacaaacaggctgctggcattgaggtagg

SEQ ID NO: 126750 - DNA, 122 bp, Homo sapiens
aacgattcaatagatggattttctccctgctcctaatcctgggattagaccatgccttcccggccccttcgctgacgtgcaggtaacccggcacagatggcgtttcaccgggcaggtgaccc

SEQ ID NO: 126751 - DNA, 122 bp, Homo sapiens
cacgttaaactgctccaattggtagctaaacgagagattgcaaaacatgcctctactcaacggcttaatgtctgagcacttacctcccccgctgctctgccgttgggagcactggtctctgg

SEQ ID NO: 126752 - DNA, 122 bp, Homo sapiens
cttccaggctcattttaaagttgtatttaaaggactgccctcggaaatgcttctgtttagcggaacttgtattcagcctgacacgctttgccaggaacaaacctcatgtgaaagaaaacaaa

SEQ ID NO: 126753 - DNA, 122 bp, Homo sapiens
ctgacatatgaaagagatgtgacagtgacagcttcctcgctaattttgaaatctggctctcgagaagaataggctgtgccattctctgtcagaataacaaagagcctggatagacataaagt

SEQ ID NO: 126754 - DNA, 122 bp, Homo sapiens
gcgtcgtaattgggatgttccgagccacctggttcttttcagctgtatggacgttcccctcgtggcgctggacacccccacgtccacacacttccctcggtcatttccctgttgtaagcaat

SEQ ID NO: 126755 - DNA, 122 bp, Homo sapiens
agccatcccaagggcccggtctgcacgaggacaggagcgccgcggcgtctgccaagggtgcgctcagccctgaagcacgcctcccggagccgcctcgggtttcacaatcagtgcttctccct

SEQ ID NO: 126756 - DNA, 122 bp, Homo sapiens
tttccaatgatttagcaccatccccttagtgctatcttgtgatagagttctcccaagatccgctgtttaaaactcctgctccctttctctccagatggccatgtgaaaatacgcaggcttct

SEQ ID NO: 126757 - DNA, 122 bp, Homo sapiens
gcattttttccttccaaatctcggttcggctcgaaggcagggaatctaaaagaccgaggccgatggaagagagccagcggggcgagcgagcgggcagcctccctttttgcctcccggagtta

SEQ ID NO: 126758 - DNA, 122 bp, Homo sapiens
agaagctcaggcagagtcagggccaacctcggcccttcctgtgtttgcttctgggaagcccggcgtgcgtgggctcagacagctgccctcctcctctcagccctcagagcctggacctgggc

SEQ ID NO: 126759 - DNA, 122 bp, Homo sapiens
gacagaagagaggcagctctacaccccttgcttgcaattctgagcattctgtagcaaactcgtttggccatcaaaccagacctcaattgagacaaggctatttaagcttcctcccagttggt

SEQ ID NO: 126760 - DNA, 122 bp, Homo sapiens
aggagaacagggtgctcagcctgggggcccagcctcccgctgtcacgcgctgcctgcggccgagacccctgcccgcgccctctgccgggctgccctccaagccgccctttctctggaggtcc

SEQ ID NO: 126761 - DNA, 122 bp, Homo sapiens
gctttttttctttctttctttattggtagcggccaaaaagagttgattgctattgggatccgctgagtaaagacacgggcaggggtgcgcggaggtgagaaaactgaagacctggaagattt

SEQ ID NO: 126762 - DNA, 122 bp, Homo sapiens
tcttacaagccaacccattatgaggtagacaggggatttatcctgcagagcccacagggtcgtctgctctagactgagcctgcagacatcttccatcccagggccaaagggtaagggccagg

SEQ ID NO: 126763 - DNA, 122 bp, Homo sapiens
tggtacaaatatttataaagcacatgcctccccttaataaaaagggttttaaagtgaagtcgccttgtcctccctgatttgggggctcaaaggtaaagtaatgcctcatcttgtgtggcagg

SEQ ID NO: 126764 - DNA, 122 bp, Homo sapiens
cggaatcccgcagagggctccttcaaacacagcgtgctgggctgccacccaggtctcttccgattctagggcagggcctaagaagccgcatctcaaacaagctcccaggtggaggtgatgct

SEQ ID NO: 126765 - DNA, 122 bp, Homo sapiens
ggcggatggaggttcgcttctggggctactcctccttatacgtcgctgactgccccgccgcgattggagcttgcgcacccctggaaagcctccgcctgacttcttagcatctgggggttcgg

SEQ ID NO: 126766 - DNA, 122 bp, Homo sapiens
aatgagtaaatccttaggcgaaacttattcaaaatcccaagaaaacagtcggcctaaggccgacaagggagaggcagaggtggacagcctacgcgttccccaaaacatgtgcttataaacaa

SEQ ID NO: 126767 - DNA, 122 bp, Homo sapiens
ctgccctcccccaggaacatgcacgctcactctgcttccttgtgggtggcctttttttaccgatccccttttttattttttacaaccggacctccacccccaacttcctccagcccagctgg

SEQ ID NO: 126768 - DNA, 122 bp, Homo sapiens
gctcctgttctggctgccgccgctgctgctggaactgctgctgtaaccggatgagtggaccgctgtgacagggaggtagggcaggacacgcccctgagtgaggcacggagcctggagggagg

SEQ ID NO: 126769 - DNA, 122 bp, Homo sapiens
tccctccctggaatacctccagctctggcgaatagccctatatacagcacaggaagatagcggtggtaaggctttgttttaccattgctttaggtgttagagattcttattgagcccatttt

SEQ ID NO: 126770 - DNA, 122 bp, Homo sapiens
cccccaacccaaggcacccaccacgcagcacgccgtccctttcggcgctcggaaagccctcgggcgaacccctcccgagcccacccctcccgggacctcagaagatggctcaggacggcccc

SEQ ID NO: 126771 - DNA, 122 bp, Homo sapiens
gctgcggtaggtctgctgcaaggagccaccacggggactgcgccacactcctgatgaaaacgtgtttacccacagcctcgcctcgagcctccttgacaataccgctgcttcaaagcaatatt

SEQ ID NO: 126772 - DNA, 122 bp, Homo sapiens
gctgcgtcctcccgctcaggagggcccgaggagcggacggcagaatcttggggcccagcccgtctgtccctcatgggtctgtgaccttgggctagctcctcagctgtctgtgctgtagtgtt

SEQ ID NO: 126773 - DNA, 122 bp, Homo sapiens
gtttagcatcccgagtctgccttttgctgattgttccctccctgtgtctgcagacaacttcgttttcagccttggtgctctgtctcagctgcttctaccacacacataggatttaggcgcat

SEQ ID NO: 126774 - DNA, 122 bp, Homo sapiens
ctgtctcaaaccaatcgattttaaagatacagtatccttttctccgtgtaacgatttatgcggaaaataaatctccaagctcaagagcaaatgaaaagtttcacctctggttcctgcttgag

SEQ ID NO: 126775 - DNA, 122 bp, Homo sapiens
tccttcctccttctgtgctgagcctcctcccggggcaggagcatttctcaagctcgtgggcggggtcaggcccaggacacctctctgtcccctcctctctcagttctgcctccttgtccctc

SEQ ID NO: 126776 - DNA, 122 bp, Homo sapiens
tggacgcctggcccaggtgcttgcttgggatggatgcagatgactgcatgtctccaaggccgggaccggggcgcttcctctcctgcacccgcccctctcggccagtccctccactcccccta

SEQ ID NO: 126777 - DNA, 122 bp, Homo sapiens
gcatggaggagaaacgccagcaaaagccagcagaggagaagttctaacgggactgggaaacgtgagcctgaccagaggtcttgcggctgctttgtttctgaagactgcaagttctcggccag

SEQ ID NO: 126778 - DNA, 122 bp, Homo sapiens
ttggtttggggttccggggaggcagcggtcattgtgtatttgcacccgagtgttgagacccggggaacgggaaatattacagctctgaggctctgtgagggcgggtccttcccaccccaaag

SEQ ID NO: 126779 - DNA, 122 bp, Homo sapiens
gggcaacggcctgggggagggcgaaggcccctcctcccacccgctgggcttccacttccccgtgcaccccaagtcctggctgcacccggacagcttcccgatcctgggcctacccgacttcc

SEQ ID NO: 126780 - DNA, 122 bp, Homo sapiens
aagtcgctttgcagacacagctttcccacgtgtgaaatgcagagttgcgtcaggcggtctcggcatcttccagcaggaagaaccttctggaatcagcagtagtccctgctgtcctcctgcag

SEQ ID NO: 126781 - DNA, 122 bp, Homo sapiens
cagcacccggagcgccgcactgacccgcgattctgcccgaaggccggcccgggtgcgccccggcgcggggagacaccaacaaggccagcttttccacgagaggctgcttagctcttgtgacc

SEQ ID NO: 126782 - DNA, 122 bp, Homo sapiens
agaaaactctgagaagggcggttctgaagcataacatactgagaagcaattaaagtagaacgaaatgttggcgtctcaacaaggagatgcaaaaataagtgaacaaatgtcctgctggggag

SEQ ID NO: 126783 - DNA, 122 bp, Homo sapiens
ctcgagagtagcctgacccttttcttgcccccataggctgatctactggctgacctttgccgtgggccgctccttccgaggcttcggctacggcctgacgtttctgccactgctgtcgatgc

SEQ ID NO: 126784 - DNA, 122 bp, Homo sapiens
agtcatggtcacggggtgggacgtgcgccctgacgtcgagcgccgcgggcctctgcactgcgatctgctgccccttggtgggcacgcgcggcactgtttcctgagggcctgatggtggacgt

SEQ ID NO: 126785 - DNA, 122 bp, Homo sapiens
cctgtaactggacagcagcacagagccactgcccacggcatgacccgccctccatctccacgttcaggagcatccctgtaactggacagtggcacagagccactgccgcccacagcacaacc

SEQ ID NO: 126786 - DNA, 122 bp, Homo sapiens
tgtactgcctcgatctgtgccaggcatttatacacagccacatgtgcgagtcaggtagagcgtatgtggtcacccccatggctcacggagttagctgaatggcctctccgctgtccctagat

SEQ ID NO: 126787 - DNA, 122 bp, Homo sapiens
atgagaacgatgagcccattgaaataccatcggaagacgatgggacggtgctgctgtccacggttacagcccagtttccaggggcgtgtgggcttcgctgcaggaatccggtgtctcaatgt

SEQ ID NO: 126788 - DNA, 122 bp, Homo sapiens
ggcggtgcttctcctgtcagcatgtgggcggggtagggcggggaccagcagccgcagagccgtcctcggcggtggcgacgacgacgacgttgctcagtcttggggtgggctccgcggtgcag

SEQ ID NO: 126789 - DNA, 122 bp, Homo sapiens
ttaaaactgtttccaaggttacaaattgccgagcctcgtatgcaacaggttcctccaaagcggtatcattacagattaactgtaatgtgtaggattagaataaaagcataagggattaggta

SEQ ID NO: 126790 - DNA, 122 bp, Homo sapiens
gcaggtgcctgctcaaggccacatgggcaggacgaggccaggctaggattcaggctctggcggtggctccagacccgtgctctaccgctgtgcagagcaaatatcccgactaccctacctcc

SEQ ID NO: 126791 - DNA, 122 bp, Homo sapiens
tgaaagaaagaaacaaacaaacaagtatcttgccacaaccccaaactacagacaacagggcgcattcccctcatgaactccctagggacctgcgggccccagggctgctgtcgctcagtcaa

SEQ ID NO: 126792 - DNA, 122 bp, Homo sapiens
ctggcggccgccggggcgcaggtgagcgcgagctccgggctctgaggctggacgtggagccgcgaccgccccagccccgaacccgccactccggggtgcccggcgcagcctcgacgccccca

SEQ ID NO: 126793 - DNA, 122 bp, Homo sapiens
tgccttggcgactaccgcttagaccatgtcgtgcctttgggttgggttgccatagtgacacgcaaagcgtgctgggaacgccctgcggcatgtcgcacgcgtacttcatacaccatagagta

SEQ ID NO: 126794 - DNA, 122 bp, Homo sapiens
cacaaccaggtagcaaagacactgtgtggagggcaaggggcctaactccataccgctgaccgaaggagggaccacactttgtctttttgtagagtcctccagacaggggagagaaaaaaatc

SEQ ID NO: 126795 - DNA, 122 bp, Homo sapiens
aggagaggctgggcacagcaggggatgtgggtacctggaggccaggggagtcggtgtccccgccgggcggggggcactgggaagggggcccgggcccgctggctgccgcctgaatcaccacc

SEQ ID NO: 126796 - DNA, 122 bp, Homo sapiens
ttgctgacctgaattactgtttttaaatagcttaagaactttctgccttcaccagtttcgcggatgaagacacagactcagggagttgaacctgcccagggttcccctgctcccagtgatga

SEQ ID NO: 126797 - DNA, 122 bp, Homo sapiens
aacttcaatgatccacccgcatcggcctcccaaagtgctgggattacaggagtgagccaccgcgcccagcccctcaggatgttttctgaaggcagcaggaatgtaagctctctgggagcaga

SEQ ID NO: 126798 - DNA, 122 bp, Homo sapiens
tgagatcggcagcggaagggttaagtcagtgtagacattttccaagggctgtgtcctcaacgccgcgggggctcggaaagagttaaattgaactcgtcacatttttaaagcgcttggggatt

SEQ ID NO: 126799 - DNA, 122 bp, Homo sapiens
tgctgctgctgctgctgcttggggcggtactgctgtggctgccgctggaagtgccgctgccgcttttgttagcaaccggggcctccacctccatggactcttccctgtcaagtccgttgtgt

SEQ ID NO: 126800 - DNA, 122 bp, Homo sapiens
tccagacggggagtcagtactgagagacccggaaggcggggagcaccgaagactccacaccgggagtcactactgagagacccagaaggcggggagcaccgaagactccacaccgggagtca

SEQ ID NO: 126801 - DNA, 122 bp, Homo sapiens
gcactgaacacctcccctcctcccctcttcacttctgcgtgtgcgccgcgtccagaccgacggccctaaggctgctttaacccaagcactgccggtccgtggaggtccccatggacaccctc

SEQ ID NO: 126802 - DNA, 122 bp, Homo sapiens
ggagggagaatttgttgaccccgggctgcagcatggaggtgaactgcctctgcatgaagccgtactgccgccggggcccctcggcgtcttcgaagccccccgccggctcctcgccgccgccg

SEQ ID NO: 126803 - DNA, 122 bp, Homo sapiens
gtctagaatttgctgatttttttctgtgataatttaagtttttgaatagtgatgcattcccgtgtcgtaaaactgaagagtcaaaagcatacccagactgcagccgctggggaagagtgtgg

SEQ ID NO: 126804 - DNA, 122 bp, Homo sapiens
ctgaacgcaaggctgttttgaacgcatcggacctgacaccctcagaaacccgggacaatacggggctgcactgaacgcaaggctgtgttgaacgcatcgggcctgacaccctcagacacccg

SEQ ID NO: 126805 - DNA, 122 bp, Homo sapiens
ggaatggactgcattcctgagcctgcagcccaccaagggctgtgcgtgtgtgtgtgatcccggtagacataagtccatgaaaacccaggtctctggcagctcttctagtgccagcaaaataa

SEQ ID NO: 126806 - DNA, 122 bp, Homo sapiens
ccacgcctggaggcccccactgaccctcagacccgcgtctgcgcccctctccccgcaccccgaggcagagttgggaaagcagtggtcttagaccccccacctcgggcactcggaagagaacg

SEQ ID NO: 126807 - DNA, 122 bp, Homo sapiens
aactggcatcattacttccgttccttccagctctttggagatcaatgtatgaatgtctaacgtgagcgttggacctgccatccaaggagacgaaccacgcccgggggtgcggaagcggcttc

SEQ ID NO: 126808 - DNA, 122 bp, Homo sapiens
ccttgtccgcccgccgcctcggccccggccaggttggaaggaccgggtgcccctaccgcccggagtggcgctctcagcgtccccgcaccttcatgcgcagtagattcttggacaaccttgtc

SEQ ID NO: 126809 - DNA, 122 bp, Homo sapiens
tttgattagggatttttttttctgtccctgtgaccatacactactcaattctgacagcttcgcatgagtctagcagaaaattgagggattcactgttattccttaacttgcagaggtccaga

SEQ ID NO: 126810 - DNA, 122 bp, Homo sapiens
atcagtcccagcgggtacgttatcgagtagcacaaacagttggatttttccctcaagaaccgagtctggacgcggagatggagccaagtgtggctgcattttcggacccggaaatccgttgg

SEQ ID NO: 126811 - DNA, 122 bp, Homo sapiens
gtcactcccttgcttctctggctatttccttatctataaaatgagtgggctagtttaggccgactgagacgcagacagggatacggtactgtccatggacctctgagctgccctttccacat

SEQ ID NO: 126812 - DNA, 122 bp, Homo sapiens
ccggggcaaaaatccgtaaccaagacaacagggcgcgattccaatcaagatggccgccagcgcctctagacgccctctacgaggccgtccccggaagtggcgttacgcgcagcttccggttc

SEQ ID NO: 126813 - DNA, 122 bp, Homo sapiens
ccattcatgttcatttattgccatgcaggggtgatgcaaggcccaggcagtgccatgctgcgtgcatgggaaggggtggagggccctcgggaccgcaccgggctgtgctcatagctggacgg

SEQ ID NO: 126814 - DNA, 122 bp, Homo sapiens
gagccactctaatattctgtattattctgtgcatagatttagatcacctgagactgggaacgttgttactgggcttctagcagcagtggtgtactcaggatcagggtaacccccagtctaag

SEQ ID NO: 126815 - DNA, 122 bp, Homo sapiens
tgtctttctcaccagaaaacaaactctggtttttggaatgtacttacatccctaaggtagcgctccatccatttaatgatatcaatgcctcggattctatcctcaaatatgtcaatctgcaa

SEQ ID NO: 126816 - DNA, 122 bp, Homo sapiens
gggcagtttcttgttctgctttgccatcttggggtggctctgaaaagctttctgaacctccgacaaaagaaaaatgttcacaggattgattactacacacaattcagtgaagacaactgggc

SEQ ID NO: 126817 - DNA, 122 bp, Homo sapiens
cgcggaggagctggaggatctggtgcacttctccgtgtctgagttgcctagtcgcggctacggcgtcatggaggagatccggcggcagggcaagctgtgcgacgtgaccctcaaggtaccgc

SEQ ID NO: 126818 - DNA, 122 bp, Homo sapiens
tatcgggttcaggcaggtggaagccaaatgatcgtaattaaagttaattaacaggccagtcgtcttaacgtggttaacaagcagggtgcggggcagcacagacacccgggcaaattcatgat

SEQ ID NO: 126819 - DNA, 122 bp, Homo sapiens
ctcagctcttcagcctcctggaacgctaggacaaaggagtgccttggtgctggcagaagccggggggcacagctgggttttacaaggaaggacgaaatctcatctcagcaatcgggatagat

SEQ ID NO: 126820 - DNA, 122 bp, Homo sapiens
gtgagaaaaaggctttctgcccccgctgtgagtgccgcggagcgagcgcggcgcgtttcccgtctggccatttgtacccggacttcactttgtaccagcgtcccttcatggaggtttgggcg

SEQ ID NO: 126821 - DNA, 122 bp, Homo sapiens
cccagctacccggagaacggcgtggtccagatgaactccagggacgtccgagcgcgcgcccgcaccatcatcaagtggcaggacctggaggtgggccaggtggtcatgctcaactacaaccc

SEQ ID NO: 126822 - DNA, 122 bp, Homo sapiens
cgtccagcgctgccacagcaacggcgcgcagggcagggacccaggagggaggcggggccgcgcctgacccagtccagcaccctggcctgccagcctcgccgcttcgccactcaccacaaaaa

SEQ ID NO: 126823 - DNA, 122 bp, Homo sapiens
tttcctcagagaagaatctcagattttggaggcgctgggcggcagggccattgagctctgcgtctggagcgcttccctcagttccctgagtcgcatccttatgaagcccctaagagctcttg

SEQ ID NO: 126824 - DNA, 122 bp, Homo sapiens
ggccgcgcgcgcgcgcactcacgctgctctcgggcgctgggcggggagagccgcgcgcaccggttaattctgccaatcatgcgtctgggcctcccatcgtgtgggccaagccccgccccaac

SEQ ID NO: 126825 - DNA, 122 bp, Homo sapiens
gcccccgccgccggcggttctccgtggccaagcatccttggccttggagcccaggggctgcgttccccttggggccggggcgggagagaggacctcggtggtactcgcccgtgcgctgggcg

SEQ ID NO: 126826 - DNA, 122 bp, Homo sapiens
ttagggaaggcagaaagtaggtcagggacggaggtgcctgtttacccgcgccggactcaccgccgccgccgccgcgggatccgagtgcgggcgcgggcgcgggcgctcccggcgagccacgg

SEQ ID NO: 126827 - DNA, 122 bp, Homo sapiens
ggatgggaacggcagatgtcagccaaatggggctctgtttgagtcacatcctggtaaatgcgtgtcagaagcaggtgagcgatgttaaatttcacacaaacaacaatccagatgaaaggtga

SEQ ID NO: 126828 - DNA, 122 bp, Homo sapiens
cgagcttgccctccgcaagggcctgcagagagagccgctcccccgcacgcttcttgccaccggctgagaatatgctgagcacccaccagagggcgtccgcactcactgtgcccccggcctgc

SEQ ID NO: 126829 - DNA, 122 bp, Homo sapiens
cctcccccaccggctgcccgcgcccccttcgcagaagcatcagtactctcccacacctcccggtgaatcctgcatgtcagattcacacaccttcacaacctgaccccacgcagcctgggcct

SEQ ID NO: 126830 - DNA, 122 bp, Homo sapiens
ctaagtcctgaatagtccaccattgataagttgtgtgacttggaacaaattactaccccgcgtcgatgtggagaggattaaacattaacagcgcgatgtaaattcaagctggtaatacagga

SEQ ID NO: 126831 - DNA, 122 bp, Homo sapiens
tggtgaactgaggaaagcagatggcctccaagcatgggtgggccttcagcaacgcaccaccggcctgaaaaggacaaaatagcactgacagggtgactcctctctgcctgggaacttgagct

SEQ ID NO: 126832 - DNA, 122 bp, Homo sapiens
tgaacccctgacctcaggtgatccacctgtctctgcctcccaaagtgctgggattacaggcgtgaaccatcacactggcctgtacctggctcttcattggtctttactatacagagagtgct

SEQ ID NO: 126833 - DNA, 122 bp, Homo sapiens
agccccagcagcctggctcggccgcggcggcggcagcagcagcagcggcggcggcggccgcggcggccttggggcacccgcagcaccacgcacctgtctgcaccgccaccacctacaacgtg

SEQ ID NO: 126834 - DNA, 122 bp, Homo sapiens
tgctgttacatgtttgcgattgaactcgtagcaagctgccgatggaacacaacctgcctccggcacagacgccgatcttcaatcccttctccccagcaccggtgacagccctagtcatcctt

SEQ ID NO: 126835 - DNA, 122 bp, Homo sapiens
agtggagtcggaggtgccacgctttgctgtctctggagaccagggccttctctagacacccggcgggactagttcctttgggcataatttaggtgttttgtgaaatgttaaacattgtcttt

SEQ ID NO: 126836 - DNA, 122 bp, Homo sapiens
cccctggcagagcggggtcttcaaaggccccaggaaggaagaggtgggacacagcaggaacgcgtgaaagacaagaagggtctgttggagcaaggaatggaaaccaggctccaccttcacca

SEQ ID NO: 126837 - DNA, 122 bp, Homo sapiens
gagcgtcctgcctttcccagcggccttggcctgaccatcctggccctgcgggagggggtccgcccacccgcgccctgtccatgtctccgccccgttccagcgccccgtgtccgcgccctcct

SEQ ID NO: 126838 - DNA, 122 bp, Homo sapiens
cgggctggccatgtagtagtctgcagtcactatccttactgaaaacatgttcgccgccgccgccactgcctcccttcactggcgacccggcagcggcagcagcagcggcggcggctccctcc

SEQ ID NO: 126839 - DNA, 122 bp, Homo sapiens
gccttgtggacaggatttgagacaacccaggccaggtttctctggtccatgggaagcatgcgtatgctttttgccctgactatgtctgtagagaacagcccaaacaacaacctcctccccat

SEQ ID NO: 126840 - DNA, 122 bp, Homo sapiens
atttttttatgttgaggctttttcgacgtgaaactgtcacagatggcaaaataaatgtcacggtacttagttttaagacatgaggtctttttgaagccaaattgatgtgaagcttgtgatcc

SEQ ID NO: 126841 - DNA, 122 bp, Homo sapiens
taatgaatactcagttaatttctctgcctggctggagaactcctgggcttccctggacttcgcccttcccctacctccattgctaccctcccagcaaggaggcttcaccaatgactgacatg

SEQ ID NO: 126842 - DNA, 122 bp, Homo sapiens
agccactctcgggctcggaggggacgcgctgagcagcaggacgcctgccgccgcagggggcgaagttgggaaaacttggagtgctgctcgccttacttttgctttctcgctccttccaggcc

SEQ ID NO: 126843 - DNA, 122 bp, Homo sapiens
ctgcccgcgccctggccacagtggggacagcctggcttggcggggacgcaccagtcccgccgccgacgcggagttcctaccccgccgtgcgaggcagtggctccggcccttccagctcggga

SEQ ID NO: 126844 - DNA, 122 bp, Homo sapiens
cccggcgcaaacacaacaaagcccgcagacattctgtccccacgaagaacggacgccactcgacttcctagcatcttgacgggctatccaagcgcggagtcagtttataaggtgggtaacca

SEQ ID NO: 126845 - DNA, 122 bp, Homo sapiens
tgaggtcacagtcatttcttaaggccacaagaccgtgccaagacccactcaggtattttacgcagtttatttccttcctcatccagcagcatcaatgactttagacattaaacattggaaga

SEQ ID NO: 126846 - DNA, 122 bp, Homo sapiens
ggaagtgaggaaaaagggaaaagagtttaaggaagaggaagggcaggtgctaacaaggagcgtgcggcgtgtgcagtcaaaggaggtgcttttttaaatgagaagcccatgacatgctgatg

SEQ ID NO: 126847 - DNA, 122 bp, Homo sapiens
ggcttcgcctacctgctccccaagacggcggtggtgctgcgctgcccggcgcgcagggtccgcaagcccctcatcacctgggagaaggacggccagcacctcatcagctcgacgcacgtcac

SEQ ID NO: 126848 - DNA, 122 bp, Homo sapiens
tctatataacaaagtaagcctgatactagttggagtagccttaacattggctatatttgccgacttgtgtagtacctagtgttatcaatgacctgctttaggctttgatttgcttatgtgta

SEQ ID NO: 126849 - DNA, 122 bp, Homo sapiens
gaagaaacaaatatcatttgtaaaatcagtcactaagccatcaattgctgtttctaagcccgttctggctaactcccatcaagggagttgaagacctgaagtgtcaggtctcagtgcaaatg

SEQ ID NO: 126850 - DNA, 122 bp, Homo sapiens
caacattatcacaatgaccttagcctataacggaaagtgatcagcttcccccaaagcagccgcccaactacctgctcaggctattaatctcttttcattacctacatttttaatctactttg

SEQ ID NO: 126851 - DNA, 122 bp, Homo sapiens
aaccccgtgggacccaggcgtccaggcaccgcgcccaggagagccagctctgagcatccccggggggccactccttctgccaggagcctgaaacccaaacgcgagagatcaggacccccgag

SEQ ID NO: 126852 - DNA, 122 bp, Homo sapiens
ttcaatttgaaacatcccaatgataggacactcatgactattaagcattggcctcacaatcgccaaagtgagaaagcaagccaacatccaggccccagagccattatgtcaggcaacaccgt

SEQ ID NO: 126853 - DNA, 122 bp, Homo sapiens
tctcaaggtaattctgaggctctcttccccattgtcttccaatggtctttgcctcctgttcgctaggtctgctcctccttatccggcatgatctatggtgggcgtcaccatgtccaagcctt

SEQ ID NO: 126854 - DNA, 122 bp, Homo sapiens
taaatatggggattataatggtgatccactttatatgactgacaaccaaataagtgaatacgtgtatagcaggtattaaccatatgcttagccgacctatttcaacctcctaaccaaccaga

SEQ ID NO: 126855 - DNA, 122 bp, Homo sapiens
ggggccaagaaggtgagtttcgtcccctcgatcctcgcggagctcctggccgctgggctgcgagcgactccgttcacacccggcgtccatccctagccaagccctggggcctcggcaaaaca

SEQ ID NO: 126856 - DNA, 122 bp, Homo sapiens
tgatgagtttctagatgcaatacaccaaaagccaacccacaaaagaaaacaaaacaataacggggactttattaaaatttaaaatggctgctctggttaagagaacaaaaaagcaattcaca

SEQ ID NO: 126857 - DNA, 122 bp, Homo sapiens
gtttgtgccacaggccaagtactgaacatcatgacactcatagacactcttcactgaagacgtggatagaccctggggccaccattctctcctctctggagtgttggaggggccctgaccag

SEQ ID NO: 126858 - DNA, 122 bp, Homo sapiens
gcctcatctgtcttgttcaatattatcctagtacctggaacagtgtgtgaaaatagtaggcgctcaataaacagctgttgaaggaattaatggatatcactgaaggtgttaacacagagaag

SEQ ID NO: 126859 - DNA, 122 bp, Homo sapiens
tctccgaccacttcagccaaactccatgtcattcccccggtcaatggcctgccggcgtgccggcctctgcctgtgcctatgggcgtgctcttcaacccatgtgctcctgtcaacgtccagcc

SEQ ID NO: 126860 - DNA, 122 bp, Homo sapiens
ggcttagcacctgggccagcagctgcagagggggcgccaggtcccccggcactgctggcccgcccgcaccacgcttgaattctcaccgggcctcagccgcctctccgccgggcagggctcag

SEQ ID NO: 126861 - DNA, 122 bp, Homo sapiens
gggaacaaggtgctgagtggcatcagggtctctgcctgcaggcgggggatgtgtctgggtcgtggttgatgggaagaacctgaccatagattccccatgcagagctgacgattagcaattaa

SEQ ID NO: 126862 - DNA, 122 bp, Homo sapiens
gggaggccatggcctcggctgagttgcaggggaagtaccagaagctggctcaggagtactcgaaggtacccatcgtggtctgggagtagggggtcccccgccctgcggcctcaggttgccgt

SEQ ID NO: 126863 - DNA, 122 bp, Homo sapiens
cctcctagatttccaggaggttaagcacagatcccttctcgctggcaccccgcagagtcccgcttctgctcacctagcgcgtttacagagtgttttcaccatactttgtctcatctaagctc

SEQ ID NO: 126864 - DNA, 122 bp, Homo sapiens
cgtggcaatagcgttcctgggccctctggctgaatagcatttctctacctggaggatttccggggctagggtggctccagacccagggcagagacactgggaggttgttctggggccctggg

SEQ ID NO: 126865 - DNA, 122 bp, Homo sapiens
cactgactctgaagaggccaatatctaaacataactccttaaatggaagagtctttatgtcgtaaatgtataacagtaaccaattcttttacttgatggttaaatatagaaatagctttaga

SEQ ID NO: 126866 - DNA, 122 bp, Homo sapiens
ggcagagggggccaagccggaggggtgcgggggccatacctgaggtggaggcctgggcatcgttcgtgggcaggcccgaggtgtggaccagatggagcacttggtgggtggtgctggggggc

SEQ ID NO: 126867 - DNA, 122 bp, Homo sapiens
aagatggaggtatttctgaatgatctctgtagagaaggtggccaaaggaaacatcacacacgcacacacacacacacatacaaatgtggttatgtttgtttgtttgtttgtttgttaagacg

SEQ ID NO: 126868 - DNA, 122 bp, Homo sapiens
ggacgggaacgggagaggtctgaatctgctttttatcctttccgcctttgtcccccttggcgcttttgcggctcttgtcgccgccctcgggctcgttggggcccgcacggaggctctgctcc

SEQ ID NO: 126869 - DNA, 122 bp, Homo sapiens
attccttttcctaatgccagcctcgcgaagtctggtcccatgtaccctgggattctgccacggaagatgactcacttaattaacacgctgctcctgaccgtacacttggaagcagaggttcc

SEQ ID NO: 126870 - DNA, 122 bp, Homo sapiens
cttccaagcagagcccatggggtgtggcctaaggagcttgggggctccaggaaagttgcccgctgtgctgtgccgccccgggtagatcaaagaccctctctggtcattggctgggcgcggtg

SEQ ID NO: 126871 - DNA, 122 bp, Homo sapiens
ttgtggaagatcttgtagggaaaagccaacggttgagatggaggcttataccggtgtgagcgagggtagaacaggaagagtatgtatgcaagtgccaagactgttcttctcaacgctgaagc

SEQ ID NO: 126872 - DNA, 122 bp, Homo sapiens
ggggcatcgcggcggcctttctagccgctgtcccaagggttggtctcgcgctttcggctgcgagctctctgtggtgctggcagcgacatgtggcgcctcccgggactcctgggccgaggtaa

SEQ ID NO: 126873 - DNA, 122 bp, Homo sapiens
ccttgagcaaatggtctctgccttttgctcagtgccatggttctatcttccccagggtgccgaaggtctttaaggtcgtcagctcacctactgcccagcctgtggtgtcaaatgtcctgcct

SEQ ID NO: 126874 - DNA, 122 bp, Homo sapiens
ggttctgtggggcatctctccacctttcgcttaaaggcccgtttcccaagacacaggacgcgtttcccggggctcacctgcctctgagccgccccaacggcctgcaccttcaccaccgccac

SEQ ID NO: 126875 - DNA, 122 bp, Homo sapiens
ctctcccgcgtggtgggcggagtctaggcacacccagacccgattcataactcgtagaggcgggagagtcctaggtggcatagtgggaaccgagggctcccgggtcgtatctcccctctatc

SEQ ID NO: 126876 - DNA, 122 bp, Homo sapiens
atctaggatagccagagaaataaatataaattttgtgacttacagtagttatcaaattaacgtgttctgctgaccatgatggaataactggtatcagatgatcattcccattataaataacc

SEQ ID NO: 126877 - DNA, 122 bp, Homo sapiens
ctacaaatccgggttggccacacccagaagaaatactctctttcctagaacgttgcattacgctccaatcccgagcaggtccagagagccgtagccgctcagcctgctgggacttgtagttc

SEQ ID NO: 126878 - DNA, 122 bp, Homo sapiens
agcgtaacctcgcagatcccctgcgtgtgtcctcgcaagactagctcaccgaaatggccgcgtccagtcaaggaaactttgagggagatattgagtcagtggaccttgcagaatttgctaag

SEQ ID NO: 126879 - DNA, 122 bp, Homo sapiens
tgcgtctctgcgtcatagaacccttatttgcatacaccaacgactttttctattggtgggcgctttcgccgacgcgctgacatcccccgacacaaaggccgtgcttcggcactgttccatga

SEQ ID NO: 126880 - DNA, 122 bp, Homo sapiens
aggttatcttacattagaaaagtgagtatcaggagaagtcaaaaagacaaaacctgtcaacggaggggtgcagtcagttacggagccatttttcttgattcttaggaaatggccttctatgt

SEQ ID NO: 126881 - DNA, 122 bp, Homo sapiens
aagctcccagaaacccgccccatggcttcctttctttggcagagtcaggctccagaagtccgccttcctccacaggcaccctaatctgccgtgcccttgcagcttctcctccccagactcct

SEQ ID NO: 126882 - DNA, 122 bp, Homo sapiens
gtccccaagaggtaagaggtatctccttttctcctgagcctaggtcacctcggggtcccccgaagttccccagaaggggctgcacaagtcaggacaagaagtccaggaaatggggggtcgcc

SEQ ID NO: 126883 - DNA, 122 bp, Homo sapiens
gagcaattacttactcaaatcggtgggtcttgttttaaaattcatgtaagctataactcccgtccttagcttcggtggacttagacttttcatcaaaacatttggccggatgcggtggctca

SEQ ID NO: 126884 - DNA, 122 bp, Homo sapiens
gctcagaccttcaggtgaaagctgcaaagtcgcgggtgcgtatgtacgggggctgcctcccgaggaggagctcccaagccgcagggtggacgctggagacaagaacctcagggtcacaagtt

SEQ ID NO: 126885 - DNA, 122 bp, Homo sapiens
cggtttgggcttggactgaatgacgccacccgctgttcgggttcactggcttagggacagcggtttgtgggacttctcagcctccgtgatcaaggagccgattcctgtaataaatctcctcc

SEQ ID NO: 126886 - DNA, 122 bp, Homo sapiens
gtagatcttttgaattttatatgcatgctcatgttgacttcagatctgcaacaaatgtggcgctgcagcaacatgggaacagggaaaatattcaatacatgttgctgttaaattgagtattg

SEQ ID NO: 126887 - DNA, 122 bp, Homo sapiens
tacaaagaacaggctgaatcttttaacgtggtctttttgctagaaaaagtaatatcacaacgacagtaatgcatctcatgttttagtaacaatggtttaccctagggagcattaacgtcact

SEQ ID NO: 126888 - DNA, 122 bp, Homo sapiens
ttcagtgccccagtcgcacccagaaccagcttaatcagattgcctggtgcgggtagggcccggatacagtatttttttaaattttatttttattttgtttgagacagggtccctaggctgga

SEQ ID NO: 126889 - DNA, 122 bp, Homo sapiens
tctaggtccgctaatgtgctacgcgataactgaaagacagcacaagccagagcggacggccgcgggatcccgttggggcgcatgcgcgagagcgaacgcggcgccgtgcgcatgcgcgcaag

SEQ ID NO: 126890 - DNA, 122 bp, Homo sapiens
catcagctttatgaaataagtgaaacactttccgtgatctgaaaaatatcaaagtatcctcgcattccctaatcctttccaaagcccagggggcaaaagataactggtcttcaggcatctgc

SEQ ID NO: 126891 - DNA, 122 bp, Homo sapiens
gacctcgccctcctccctggccggccttcccacccggaggggctcctcagccacgcactgcgtccagcaaaaccactaagtcagggaggccagggcgggcagcccattcatcgtcctcaccg

SEQ ID NO: 126892 - DNA, 122 bp, Homo sapiens
acgtgaattttgttagccgggcatggtggtgcccagctgtaggttagccgggcgtggtgacgcacagctgtaggttagctgggcctggcacagctaggttagctgggtgtggtggtgcgcag

SEQ ID NO: 126893 - DNA, 122 bp, Homo sapiens
ggggctgttcagaagctgggcccagggagccctgaaggcaggggtccagcctgccgtgaccgcacaggcccagattcctggacgtttcgctttcgtaattgcacacgcagggcctggattcg

SEQ ID NO: 126894 - DNA, 122 bp, Homo sapiens
tttctccctctgcccgccttgccaagccccagatccttgtcatgcctatgcctggggctgcggctctgccacccttggtggatatgaatgattttggacagatgtgtatgaatctttcatgg

SEQ ID NO: 126895 - DNA, 122 bp, Homo sapiens
ccgccggcacgcagcgcctttgggtggcagcgggagtggcgggccgggaagcctggcggccgcccgaacaccacccaacggaggacctgagggtgcagaggtcccgggaaggcggcctcggg

SEQ ID NO: 126896 - DNA, 122 bp, Homo sapiens
gcctggccgcccctctggctttttaaggcggggcaaaaacttggaacagctaccacaaagcgaacgcctatctgtttggaatttcgcaaataaggaacgtttaaatgacgtagttcacatcc

SEQ ID NO: 126897 - DNA, 122 bp, Homo sapiens
gagttttgggaaaggttagtaaaaggtggtgtcccagcgtcagaacagatgggcagccagcgagggcactgcttcatatctatgatgggaatgcaagaattgaggagcaggagactgagggt

SEQ ID NO: 126898 - DNA, 122 bp, Homo sapiens
tagcctttccaaggcagggccagggaacctgtgttttcagcatgctccccaggtggttctcgggtagtctgtggactggtaaaacctgctccaatgctctttcctcaatgaataagggatgc

SEQ ID NO: 126899 - DNA, 122 bp, Homo sapiens
ccagctgcgctctcccgggggctaatcccggggcaggacggggaggcttgggccaatcagcgcgctggggcggggcctaagtggcgcgcgccgggcggggagagactggagaaggaggattt

SEQ ID NO: 126900 - DNA, 122 bp, Homo sapiens
gggccgaccctggtcttttgtgccccaggactttgaacgggatgaggagcgctcagccaacggtggctccgaatctgacggggaggagaacatcggctggagcacggtgaacctggacgagg

SEQ ID NO: 126901 - DNA, 122 bp, Homo sapiens
agaattcaaacccaatctgacaccttgacctttctggttctgagctcaaggtcagtgttgcgaacagcccgccctgccaccaccatccccagggctatgatggggctgggaaggccactcac

SEQ ID NO: 126902 - DNA, 122 bp, Homo sapiens
tggtggagaagagggagctgatgcagtctgaccagaaaatcatgctgtgaagacaggatgcggagaacattggtaattcttctagcaggaatcaattttattccacaagttgagtataaaat

SEQ ID NO: 126903 - DNA, 122 bp, Homo sapiens
acctccacctcccagccgcccgccttggcctcccaaagtgccgagattacagcctctgcccggccgccaccccctctgggaagtgcggagtgtctctgcctggccgcccattgtctgggatg

SEQ ID NO: 126904 - DNA, 122 bp, Homo sapiens
atagggcacatgtgaagaaaaggcctttgcccctctcactactgactccaggttgaaactcgaggggtcccgggcggctgcagcgctgccgcgagctcccctggaagcggtggcttgtccct

SEQ ID NO: 126905 - DNA, 122 bp, Homo sapiens
cggggcaccaggagctgtcaggtggcctcggggcagcccggctggcagagaagagttcgccggcgcggcggcggctgctgcgagcccggagccggaagtgccacgtgtcctgattgcggctg

SEQ ID NO: 126906 - DNA, 122 bp, Homo sapiens
gcgcggggcctgggcgccggccaagacttgcagcgttctcttgggtcccttagctttctacgagttaaagtcagatcctcctggtcacttaagccccctttgtggttcaggggggaagccac

SEQ ID NO: 126907 - DNA, 122 bp, Homo sapiens
tggactgaggcgccccactcaaacactgtcttgcaggcaagacttcctccccattggaatcggaaatctaccctagggtactaatctactccttaagccctggctcaggcctcactagtccc

SEQ ID NO: 126908 - DNA, 122 bp, Homo sapiens
tcaagatttcagcagggaaatctgtatatctgtacaaggttgaaaacctgggccgggggtcgcgttggaaccccacaggaaaaaggcgcggaaagccgccgggcattttccggggttccata

SEQ ID NO: 126909 - DNA, 122 bp, Homo sapiens
aaagagagaggatcttgctatgtttcctagggaggccttgaactcctgggttgaggtgatcgtcctctctcctcaagttccaagcaccattgcgccaggcttgttcccttagatttgtgcgc

SEQ ID NO: 126910 - DNA, 122 bp, Homo sapiens
gggcaccagaccacacgttcacggggcacctcacccagcgtctgcgggcaccagaccacacgttcacggggcacctcacccagcatctgcgggcatcaccgccccttccacctgttgcactc

SEQ ID NO: 126911 - DNA, 122 bp, Homo sapiens
cgtatcacagcgcccccccggctggtggggaggatgagctacatgaggaggctggcagcccggcaccctatccctggcagctgagatgattgtggagcgaatggcatcctcctgggccactg

SEQ ID NO: 126912 - DNA, 122 bp, Homo sapiens
tgtatgtgagagcacattggtgaggctgcccatgcatgccactgtggacaaagacagatgcgatcgtgtgtgtgtggggactgcgtatatgtttttgtcagtgtgtgtgaccacgagtcagc

SEQ ID NO: 126913 - DNA, 122 bp, Homo sapiens
ttcagcccccgagggaactattacaaaaccagggtcacaaggctagtgaagtgtgcaatacgcaataatcaggcacacgtacaggtgtctgcactccacactcgcactgactcttggaaaga

SEQ ID NO: 126914 - DNA, 122 bp, Homo sapiens
ggacaaacacgaggaccccgctgcaggccaatcaccgcggagcaaaggtgaccgcggagtcgcctgacaaaaaatatagtacgaggggaatccttaggaaagctgagtgcaaggcttgagtt

SEQ ID NO: 126915 - DNA, 122 bp, Homo sapiens
ctataaacttaaacacactgtgtgactgaaagcccgtccccagtaacgtacgtatggagacgcctagtgcctgtctgctgtcccagcccacagcctgctctccggcgtgctgtgcacgaaga

SEQ ID NO: 126916 - DNA, 122 bp, Homo sapiens
agatgcaaattcaaggagactctcaggcaaatgttgtgtaaactctgggcgctgtaacaccggcttggagcaagcaagactctccacccacaaactgcatattctttaaagtcactgtcgct

SEQ ID NO: 126917 - DNA, 122 bp, Homo sapiens
acctgcgcccacctgcgcccacgtcgcccacctaagcgtgaacagctgcgtcgcggacgccgccttccggcagggacccgcgccccaggtaagcgttagtcccgccttcaggagtgcggagc

SEQ ID NO: 126918 - DNA, 122 bp, Homo sapiens
caccaccaccaccacgagcaccaccaccaccaccaccaccaccacttccacccgtcctagcgccactgccaagcacacctcgctcccagcacaccacagcccgcgacctcagggcagggagc

SEQ ID NO: 126919 - DNA, 122 bp, Homo sapiens
aagtctgtgaaatatagcctgactcctgatcttcacctctgcccccacagacaagttcaccgattcagccattgccatgaactcgaaagtgaatggggaacacaaagagaaggtgcttcagc

SEQ ID NO: 126920 - DNA, 122 bp, Homo sapiens
ggcttttctcctccgctcctaaaagctcaatgtatgaatagccccgggatttccaaattccgtcggatcgggaggccggggacacggcccgatcggcctacccaccatccctacagagcttc

SEQ ID NO: 126921 - DNA, 122 bp, Homo sapiens
gcccccgcctcccaggccagcggcccagacaggtgagcgcagtccggggatggcggagggcggggacagagagcgcggcagtcggctgcggcctgggcctggcgcgccccctcgcgggcagg

SEQ ID NO: 126922 - DNA, 122 bp, Homo sapiens
gcggagccagggtccctggaatggcggagactctgtcaggcctaggtgattctggagcggcgggcgcggcggctctgagctccgcctcgtcagagaccgggacgcggcgcctcagcgacctg

SEQ ID NO: 126923 - DNA, 122 bp, Homo sapiens
gtgactcagcaataacacggctaaaataaggaaattcattctgttccatgtctcggtccacggggaggctccaagtcagtggcttctctgttccaacaggaacccaggctgctagcagctct

SEQ ID NO: 126924 - DNA, 122 bp, Homo sapiens
tcttttgttgcttctcttcaggttccaattgcggttctgggaaatactagtgaattcacccggtaaatgcaaaagttacacacagtggctgaggaaaattctgcaatattaagcaatttatt

SEQ ID NO: 126925 - DNA, 122 bp, Homo sapiens
ggaccactttctactgcacgagcaggcagcgttctggcagctgctgggtgttttgattctcgcgtaaccctccctatgcctttagtcattgagttgaggatatttattcatcaaacttgtac

SEQ ID NO: 126926 - DNA, 122 bp, Homo sapiens
tttgggttggggagggtctcgaaaatggggatcctagggtacggagctccgtgggcttggcggtcgtgctagcccagcgtgtgggctggggggtggggagccgtgtttccagggtggggaag

SEQ ID NO: 126927 - DNA, 122 bp, Homo sapiens
acgactcctatcatggaacagtttggggaccactgggctaaatcaattattggacaaattcggggaacaatctacaaaatactaatgcatgtcaaacatttcctcggcttggtcataagcaa

SEQ ID NO: 126928 - DNA, 122 bp, Homo sapiens
gcgcctgccgcactcggagtccgggtgagcggcttgtggttagctccaggggagacttgccggctggcctgggaggcagcatcactgcccagccttctctgcccacagactttgtgcccatt

SEQ ID NO: 126929 - DNA, 122 bp, Homo sapiens
gctctttgcggttggctctggccttgagaacccgaccttggggccctttgattggaagaacgtgcagcgcacctcggcattgagggcggcttcctcggggcgcggcgccgcccgcctctgag

SEQ ID NO: 126930 - DNA, 122 bp, Homo sapiens
tctcacgaggtctgatggttctataaaggggagtttctgtacacaagctctcttacttgccgctatgtaagacgtgacttttctcctccttcgccttccacaatgattgtgaggcctaccca

SEQ ID NO: 126931 - DNA, 122 bp, Homo sapiens
cgaactcctgacctcaggtgatccacctgcctcgacctcccaaagtgctgggattacaggcgggagccctgggtttactttttgcaccttgattatctcaactcaggtgtgagatgcagaaa

SEQ ID NO: 126932 - DNA, 122 bp, Homo sapiens
ctccaaacccgcccacgggccgggctgccacgccccccacgcttattggcttaggggcgccgacccatgccccgtgccgcgtgcagccgccggcccccgcacagcctccattggcacctccg

SEQ ID NO: 126933 - DNA, 122 bp, Homo sapiens
agagggcaaatgcgaatcggctacaacactggaaatctgagcctggaacctgtagggtcacgtgggggttatctcacagcgctcaccttccaccagttggtccaggctggaaatcttcttga

SEQ ID NO: 126934 - DNA, 122 bp, Homo sapiens
ctctactacaaatacaaaaattagcagggcatagtggcactgcctgtcatcctagctacgcgggagcctgaggcaggagaatcgcttgaacccaggaggcaaagttgcagtaagccaaaatt

SEQ ID NO: 126935 - DNA, 122 bp, Homo sapiens
cccgccccgccccttcgcgctcgcgccacttggagctcgcccccgtcgttcccgcggcgccgcgcctcgctggctcctcagcttccagccaaaatggcggagaacagcgagagtctgggcac

SEQ ID NO: 126936 - DNA, 122 bp, Homo sapiens
cggcctctgagccgccctgggcccgacggtgtggggtctattatgagagatcgctgaagtcgtggttggttagaggaggaggcgctttgtcgggcgctcctcctctcggccccgcgaggcca

SEQ ID NO: 126937 - DNA, 122 bp, Homo sapiens
tgtgactctcctgaaattgtaaacttgtgcttctgtgtccagttttctaatgagtaggttcgtagcttgattgaattaataattgtgagcccatagacacaagggaagtgagaaacagtgct

SEQ ID NO: 126938 - DNA, 122 bp, Homo sapiens
ggcgcgtccccacctcgcgggcgtgttcccagcgcccattcattccctccccgcagcaaacgactccaaactggaagtctttctggcccagaacagcttccgtagtggccacttcctatttt

SEQ ID NO: 126939 - DNA, 122 bp, Homo sapiens
gtttgcctattctggacatttcatactaatggaatcctaggataagtggcctttggtgtccggcgtgtttcacttaggttaatatacttgaggttcatccacattggagcatgtatgagtac

SEQ ID NO: 126940 - DNA, 122 bp, Homo sapiens
agcggtgaagccagctgggcatctgctctgcactctgctgggtgctgggtgcagagctgacgtgatcagtgtccactgcgaacagcaaggagacagtcagaggcatcgatgcagcctccacg

SEQ ID NO: 126941 - DNA, 122 bp, Homo sapiens
tgggtatttctctccatgacccttggatattctagctagaggatcctgtgaggaaagtgccgggcacacagtaggggctcactcttctagacatgttatctaaaacctgattcatctgtcct

SEQ ID NO: 126942 - DNA, 122 bp, Homo sapiens
ggtggctgtttttgaacccccacttttctcttttaacatttgttttaggtacataaattacgttacttccatctttgcatattcatcaaagtgagtaacaacatcgataattaatgaaaagg

SEQ ID NO: 126943 - DNA, 122 bp, Homo sapiens
gttgcttcccccgctgcgaggtaattcctcccctggggattttggggagcccctggttcccgcaggcgtcggggccccatgtcctgccccagattggtgctgcgggaggggactgggtaccg

SEQ ID NO: 126944 - DNA, 122 bp, Homo sapiens
gggctcttcccccgccgaggcctgtggtttgtggagtcgaatttccctgccaccagtgcccggttagcaggggcgccagcctgggcgcctgcgcggacggcgggcgtcgtcaccatggcagc

SEQ ID NO: 126945 - DNA, 122 bp, Homo sapiens
aatgcactgtacactcaatcacctgcaggcctttgcacaggctattccctctgctcagaacgcctttcatgctcatgtcctcactctgcctgcctaacttctgctcctttggggatctggct

SEQ ID NO: 126946 - DNA, 122 bp, Homo sapiens
tctggagtttgttccttccgatgttcggacatgttcggagtttctttcttctggtgggttcgtggtcttgctggcttcaggagtgaagctgcagaccttcatggtgagtgttacagctctta

SEQ ID NO: 126947 - DNA, 122 bp, Homo sapiens
gcccccgcctgcacccccgccccgcggccgagttggcagccgctctcgcagccactttcccgcctcattggctcccaaatgtattttaaatatcactctgcgcagagacaattactgaaaac

SEQ ID NO: 126948 - DNA, 122 bp, Homo sapiens
tggtggaaggaaaggaatggggttccttctactactcctttaaggtaagtttcttgcctgcgactctgaacactgacttataacaatgagactgctggaacttaagagtgtcaattgaagta

SEQ ID NO: 126949 - DNA, 122 bp, Homo sapiens
tggtcgacccgactactggttttcagtaactccggggatttaacttggtttcgtcttggtcgacccgactactagttttcagtaactctgcggatttaacctggtttcatcttggtcgaccc

SEQ ID NO: 126950 - DNA, 122 bp, Homo sapiens
tgggcggggacaatggcgggatgggcggggacaatggcgggatgggcggggcctaggggtcggactgccggacctctcctcggcgcgtcccagcgacttttttaggcctgtttgtcgcccag

SEQ ID NO: 126951 - DNA, 122 bp, Homo sapiens
ccactaccacaatgaagataaagaaataacatttccatagtcccctaaagaatagccacgcgataaaattccacgcagtccttaaaaagaggaggataaatttgtaagtattgttatgagaa

SEQ ID NO: 126952 - DNA, 122 bp, Homo sapiens
cgagggaaagaatgcgtggtgcacggggccatgtgtgtgtgtgggctccttgcacctcatcgcggtctggaagatttctgtgcctagatttggtgaatgttcatatttcccttacaagctgt

SEQ ID NO: 126953 - DNA, 122 bp, Homo sapiens
cagagtcagctgacagagtcagccaacgacagagtcagccaacgacagagtcagagccaacgacagagtcagccaaggacagagtcagagccaatgacagagtcagagacaacgacaaagtc

SEQ ID NO: 126954 - DNA, 122 bp, Homo sapiens
ggcctcggttcaatgagggccccaggcaggggacggccacacccaggtttttggaggggccggggagggcgcgttcggggatggcactgggagtgggcagggctgacgcccctttgccccca

SEQ ID NO: 126955 - DNA, 122 bp, Homo sapiens
agaaagttgtgttctgagacgggcaaaaaagctgaaagagagtaagtcatcctcgcattgcggctatatgcacaagctcttagagggtggacattcgttcttcagttgatgaatacttgcag

SEQ ID NO: 126956 - DNA, 122 bp, Homo sapiens
caagtttctcctatcagtaacccattgcaaacagggcttaaaagcctatttatacaaacccgtatgttccaatctctaagacttcagttcaaggttttagcaagttaaattcctcaaacctg

SEQ ID NO: 126957 - DNA, 122 bp, Homo sapiens
atttccctggtaattagtgatgttgaacattttttcatatgttggccatttgtgtatcttcgtttgagaattgtctattcacgtccttaggctgttttttgatgggattgtttttttcttgc

SEQ ID NO: 126958 - DNA, 122 bp, Homo sapiens
ttcatatcctggacaggcccccagatgagacaggattgttcccttcatcttaacccccttcgtgggcgggaactggagcagctcatttcactcagctcgcctcctgccactcctggcggcag

SEQ ID NO: 126959 - DNA, 122 bp, Homo sapiens
caacagcaacgtgcgcagtttctaatcagaaacctctcctgtctggtattttgttccagccgcagcaggggccctcacccacatcattccgggggcaacagcccccatgccagccatgcagg

SEQ ID NO: 126960 - DNA, 122 bp, Homo sapiens
gcgtcccgcttcctagtctcagcggcgggaaggaggtcccgtggcgagagactgcgcacgcgctgcccgtcttcggctgcctggtgatctgggcttgtagctccgccccctctttctccgcg

SEQ ID NO: 126961 - DNA, 122 bp, Homo sapiens
gctctgcacagtggcaggtgcctgcagctcacggatgcggcgctgccagggcccagggcccgggcccagctggtagcagagcacctggcgcttgacggctacacagagcaccggggtgcggg

SEQ ID NO: 126962 - DNA, 122 bp, Homo sapiens
aggcagaaagcgcccgaggagcgttgcattccgcagaaccccaaccaagccggagaaatccgtgcacagaccagattaaatgtcaggcctcctgaatctgaattctctgaaagatcagggaa

SEQ ID NO: 126963 - DNA, 122 bp, Homo sapiens
cttccctggggagctcctgtccccgcggcccccggccacggcccccaggaaccagccccgcgcctcaccggttattagacagctcgcgaggactgtctgcgagccgcctctttcctgctaat

SEQ ID NO: 126964 - DNA, 122 bp, Homo sapiens
tcagaattctgaaggcagagaagcaaaagtagcagctgtgggagctccctaaagtggaatcgggcatgacactctgaattttgaaattgcaaacccacagttcagtaggttgcagcaacaca

SEQ ID NO: 126965 - DNA, 122 bp, Homo sapiens
gcagactcgaagcttcacacctttattgtgtccgggggcgtccggggcctcaggggtgttcgtagcccgtgggcagagggttcacgtggctattgtggaacagagtgtggttgccgtccccc

SEQ ID NO: 126966 - DNA, 122 bp, Homo sapiens
ctgttggccagttaactccatcagtaaaaagggctctactggaacaaaggaaaggcatggcgtggtgaaggaaatctggggaaggttggccaaaggaatcctggaaagcctcctttaaagtt

SEQ ID NO: 126967 - DNA, 122 bp, Homo sapiens
tcccatcccacacagggcaggtacctccaggcacttcctccatgaagatcttaaggtagccgccctggctagctgagcccagatagcgcactatgttcttgtggcgcaggcgtctgtgaaga

SEQ ID NO: 126968 - DNA, 122 bp, Homo sapiens
gcccagacaggttccaggagacttgagttcaggaactgcatctggggctgggttggtgtccgtggcagaagcctggacttcaggctgttgccatgggaagttcccttacctcacgctccctg

SEQ ID NO: 126969 - DNA, 122 bp, Homo sapiens
caagtgacaccctgtcaaagaacagatgggtggggtcagctctggaattcaagtacttttcgcaggtgtatctctcctggaaaccactttcctgcatttgtcagagctcacagcttctgcga

SEQ ID NO: 126970 - DNA, 122 bp, Homo sapiens
ttttaaaacatcttttttgtgttcctggtttgggggagcaagggcactctggggctagggcgtcagtgcacaagggaggtgctacatccagctggggtcacaggagggcctgggcccttaag

SEQ ID NO: 126971 - DNA, 122 bp, Homo sapiens
tttggagcactttgcacctggagcctgaggagggccactccgaacccgatgtccctctcgcggctgttctggcgtgggatgtgtccgcagttgccagagcaatgacaacactgcgggaccgc

SEQ ID NO: 126972 - DNA, 122 bp, Homo sapiens
ataacacattcatcaactcaagtatggcaactgttcagagagcttcagagctttggtacccgagtgcagacttggtaattaccgggaatttgtctcccccgtataaattctggcgaacaacg

SEQ ID NO: 126973 - DNA, 122 bp, Homo sapiens
aaaaataattggtaagctcaaaggtaggctatttaaaatacaaagtcaagaccgcagccgcggagccgcgatgcctaaaggagggagaaagggaggccacaaaggccaggcgaggcagtata

SEQ ID NO: 126974 - DNA, 122 bp, Homo sapiens
ccgcccctcagctatttgttcacgtaatgcgattggaaacgtgcaaggcggacagctcctcgcctctgcccctccctctctcccgtccctgccctcctccccccagacacgttgcacaggga

SEQ ID NO: 126975 - DNA, 122 bp, Homo sapiens
agcccagcaccgcggctgctggggggacccgggcctggcagcgggggctggtcacggagccgagctggggcctcccgtccatcagcgtccatgtgggccagccgagttgtcgaggcgagaag

SEQ ID NO: 126976 - DNA, 122 bp, Homo sapiens
tctgacacagtgaaagccattcagatctgtcttgttggcagcattcctcactttgagcagcgccctcctactaggatacccctccttgactacaaccccacattctctacttcctgggctct

SEQ ID NO: 126977 - DNA, 122 bp, Homo sapiens
tagacggcggtcgggtaggtgacggcttggttggggtcgctgcgaggggactactaggagcgccgaggcgtgagtcgtagcctgtggcttggggtcgggagtgcaggaggcgaaaatgtttg

SEQ ID NO: 126978 - DNA, 122 bp, Homo sapiens
agttattttcagtgccgcagggcgcagaacgcttattccctagggaccatgagcccctctcgcgcccctccatgcccctgtcagctctagggctctgtgatttccaccagaaatcccaaaca

SEQ ID NO: 126979 - DNA, 122 bp, Homo sapiens
gaggacccgccctagaggcggaggtacacctgctgcccaatagcggtggctgtggttggtcggtggctgtggttggtcggtcacgctggggaaatactcttacgggccgctagggggccgag

SEQ ID NO: 126980 - DNA, 122 bp, Homo sapiens
tgtccctgcggacccggcctccggggcacagccttggaggtttcaaaatggcatccgcttcgctgctgcctcagggaggaagagaaggggcgggaaggggcggcggcccagcctcctgggct

SEQ ID NO: 126981 - DNA, 122 bp, Homo sapiens
gggggtcaggggaaataatatgaatctgacgctggggacatttgcaacccgcagagtcaccgccacctggtgtctcttcagtgtctatggagaccagtaaatgactgtttgctccactgttc

SEQ ID NO: 126982 - DNA, 122 bp, Homo sapiens
acaggtctgagggaagtggagcccccgcccactcatggaacccaacatccggtttccatccggcaaaaagcagttcccgagaggaccatgctgattctatgatggggaaacccaggagccgg

SEQ ID NO: 126983 - DNA, 122 bp, Homo sapiens
ggaacgttctctcccggccctgcggcgcggtctggctgccccatgggcctgcgctgtagacgtcccccataggtcgccccagggcctctgcccacccgagccccaccactctcagaaccccc

SEQ ID NO: 126984 - DNA, 122 bp, Homo sapiens
cgctgagagaaggaaaactgaatgttatatcgaaagtcccgtgctgggcctgggatctcccgctgcaggtcaccctctcggacggccgctcgacaaccacctatcggggtttataagggagc

SEQ ID NO: 126985 - DNA, 122 bp, Homo sapiens
ccttacctacatctgcattgcaaaacgcctgttgcgggtgcaccggggagcagctgcaggcgtcggccgggcgaagcagcgtcgccagcagcaggaggccgagcgccagccgcagggtgcgg

SEQ ID NO: 126986 - DNA, 122 bp, Homo sapiens
gccaaagcaatgagtctcggccggccccggccccagctatttagccgggtgcccgggccccgccccacatgagaagagccaataggagctctgagagtctcctgagtgacaggcgcagcccg

SEQ ID NO: 126987 - DNA, 122 bp, Homo sapiens
caattaatatacgagcgcctactatgtgcctggcacaaagataaagacatcaaccttgaacgtgaaaggtgtgtgtttctggatctgcaaatatataaggttctgctttatacgtcatttta

SEQ ID NO: 126988 - DNA, 122 bp, Homo sapiens
ctcggcccagtccaggcgccgcgcgtggctggagctctggctggctgccttagtgtcatgcggaggcgtagcgaggattcagggacagtaagctctgttctcgccgagcagggggcgggctc

SEQ ID NO: 126989 - DNA, 122 bp, Homo sapiens
cctgcgcaatgaaagacaaagtttttgctgacccgggcagcagactttggcagctgctctcgcttggacccggcctctcccaacctgcgtcccctcctcttcagtcccgcgcgacccctgct

SEQ ID NO: 126990 - DNA, 122 bp, Homo sapiens
actgtggatgccatttgcatttgccttgatggtggctgctggtgggcggtcatgtgatggcgcgagctgggggaaccaaagccgaggtccttagttaccgactcccagctgtgctttttcgc

SEQ ID NO: 126991 - DNA, 122 bp, Homo sapiens
taagctgaactgatcacgcctgcaaagaccctctttccaaataaacccaccttctgaggtcgcaggaagacgtggctttggaggacactgtttggctcactgggagggtgtgggctgtggag

SEQ ID NO: 126992 - DNA, 122 bp, Homo sapiens
cactgtctacaaattattttcttcccattcacaaacccactcaactggcttttatctcatcggtctactaaaaagtttctgttgaggtgaccaatcatctccaaattactaaatccaaagag

SEQ ID NO: 126993 - DNA, 122 bp, Homo sapiens
gcctgcgcccccgctgccgcgcgcctcctcgtcctcgagccgctgcagaaggaagcgcagcgtctccacgcgctccgcggatgcctccccttggcacagcgccccaagcagggcccgggggt

SEQ ID NO: 126994 - DNA, 122 bp, Homo sapiens
aattcaaagcatggagatgtgactctgctgtgattctcagggaccaatccacaggacctacgggccattcccaatgtgtggagattcagacagtacccctggaacaaaggggctgctcccag

SEQ ID NO: 126995 - DNA, 122 bp, Homo sapiens
gcgtgggccgggccgtgctacccccccggagcccctggggaggatccttcctgcctcttccggcgtctggggctccaggcgcccttggcttgcagattgatctccctgatctctgcctccat

SEQ ID NO: 126996 - DNA, 122 bp, Homo sapiens
tccgtctcaaaaaaaaaaaaagaaaagaaaaaagaaattgtctcgagagtccaaatcactcgcaagctcagtgcacatcaacagggacgcagcagcttagaacacagacgcaagcgggaggc

SEQ ID NO: 126997 - DNA, 122 bp, Homo sapiens
ttgcctctcctagcccgatccttggaaatagtatgctaggactcctgaactccagcctcccggcccctttccctaagtccaagctcctctcccagtaattgtcctcaagagatccgcgtgac

SEQ ID NO: 126998 - DNA, 122 bp, Homo sapiens
gctcggtccggtccccgcgcctgctgtccccaggccctctcgggaggcagaccgcggcagcgcaaaggggcttcgaggatctctgagcaacgacggctgagtgacctctttccctctcaagc

SEQ ID NO: 126999 - DNA, 122 bp, Homo sapiens
tccacaaatgtggctgccttcgggtctgtgccgggacgcacctcggtggaattcatactacggttcccatggagagcttcctgccctggagcctgcgacccgcagcctcggagcccctgctc

SEQ ID NO: 127000 - DNA, 122 bp, Homo sapiens
aatgtcctaacatgtcagtgcctgaaccaacctggctgttggccataaccagcaactacccgtcaatgagagcttcgaacctctggggaatcccaggtctgaaattacagatgggccatggg

SEQ ID NO: 127001 - DNA, 122 bp, Homo sapiens
ttttgtggccactgcggcggctgcggcggctgcggcagcggaggcgcgggggcgcgagcacgggttgatttttcaagatctatctcctttagtgcaactcgccaaatggaatcgagttgaca

SEQ ID NO: 127002 - DNA, 122 bp, Homo sapiens
gctaaggacgcggtgacgggcgggggcggggcggccccgggtcgggaggcggggcgggagcgccggaagcgggcggtgccaggcccagcctcgcaggcggaagggcgcggaggaggtgacgc

SEQ ID NO: 127003 - DNA, 122 bp, Homo sapiens
gcccccacccgcggctcccgcgcctgggagagacccggcctggcctgccagtgggctgcgcgccttggctcgccctccgcgggcactcctgccccactggctcccgcagccccgcggctctg

SEQ ID NO: 127004 - DNA, 122 bp, Homo sapiens
gcccgagcgtcttcgcgcgcgccgcagcctgggcgcccggccctcggaggtggctccgcccgcaccacgccccctccggctggtcccgcccccccagccggcaccgccccctccagccgccc

SEQ ID NO: 127005 - DNA, 122 bp, Homo sapiens
ggcggaagctgcagaggccaccggggcgctaactgggtggccggtgggccgctgtggcctcgagcagcctcttcgcgcggccccgcaccccggcaagcagcagcgggccgcgacgcccagcc

SEQ ID NO: 127006 - DNA, 122 bp, Homo sapiens
gttgcgagaagaacgagcacaacggctacatgactgacagggcaacgtcacaagaacagccgcagccacggcaacaacgacaatgtcacttaaatcaaaacaaaaataccagacacactcca

SEQ ID NO: 127007 - DNA, 122 bp, Homo sapiens
acgatgccccgcgattcctcctcctccaggggacgtttcaaatccctggacgatgccccgcgtgaatctagaacatgcctcacctccctgtagtccccgctacctgggaggctgaggtggaa

SEQ ID NO: 127008 - DNA, 122 bp, Homo sapiens
ggccccagtttccactttgagctctctgtacccgcagggctgtcacacctctgtctcccacgcagtcattgtcctccctcaatgttgggcagcaggagaggcggacttaacgcctttcgtgg

SEQ ID NO: 127009 - DNA, 122 bp, Homo sapiens
cctcggcccggtaccagttgttggatccaagagaattccggaacccaaacggtccattaccgcggctctggggtgggcgaggggtgagggggccgggtttccgcgaagggggagggggaagg

SEQ ID NO: 127010 - DNA, 122 bp, Homo sapiens
tgcccttgtcgccgcactcacagccgccagcgcatcctctgctacacctcagtgaccgaacgcctgccattacctacaaatcgcccgcgccccagagcgccatgggaaaaaaaaccgccgct

SEQ ID NO: 127011 - DNA, 122 bp, Homo sapiens
tccctgattgggcatcattctcacctcattgtagattggtttgactgggtcctcccatcacgaaggggctgtattttatcttcatgaggataggcacatatttcatgtatgaatttgctgtc

SEQ ID NO: 127012 - DNA, 122 bp, Homo sapiens
agacgctgcctggccgcgcgcgcaggcgcaggcgcaggcgcagaggccgacaccacggggcggctggtatgtgtccaccggcccctaggcgcctcgagccccgcccctgggagacgcaggct

SEQ ID NO: 127013 - DNA, 122 bp, Homo sapiens
aaaaacaaaaaaatgagccaataaataaagtggacaaagaacaccaattgttgccatcaccggtagggggtgaagtgctgaaggcagcatgggctccagagggaggatgtcctggagccctg

SEQ ID NO: 127014 - DNA, 122 bp, Homo sapiens
ctttatcaaaaaacacttcccaagggcatgtggccatggtaaggctatcatagagacacccgcccccaggtaccctttctagctgccagatcatgtatctgcaactttgggtttccccttga

SEQ ID NO: 127015 - DNA, 122 bp, Homo sapiens
acgcggcccttccctgctctgagcagcccgaaccctgcgttcgtgctcactctcggctgccggcaccccctgagccatgcgctcactcactcgctcggcaagactacatttttgggggaggc

SEQ ID NO: 127016 - DNA, 122 bp, Homo sapiens
gggtggttatggcttgcccagagcggtggaatgagccataaggctgaaggccaagggactcgggccacccatgcagtgaaataatcccccagaaatgcggtgccgggagtggaaatgaaagt

SEQ ID NO: 127017 - DNA, 122 bp, Homo sapiens
cggcctcaccccagtcagagaagcaggcgcggggatgggacacgcagcttccgggtcaagcgctttttctttttcctcccggaaacaacggtgtcattctctagttccggatctaaggtgac

SEQ ID NO: 127018 - DNA, 122 bp, Homo sapiens
acacgtgtgcattgcatggttctgcagttgcctgtgcagctgaacatccgtaggaagccacgtttaccatttggcccctcaccaaaaacattttctgacccctaccccagaccccgaccctg

SEQ ID NO: 127019 - DNA, 122 bp, Homo sapiens
tggggttcggctgagaggtagtgagcgggacgttactctttctctctgattccgggcagccgaggggagaaaccccctcgaagagtgtgtctttggaagcagtgttgggagggggggatgca

SEQ ID NO: 127020 - DNA, 122 bp, Homo sapiens
attgcatagcgatgagagtggtgtcacgggaagtcatcctcatttcctcctcacacagctcgtgccaagcttgtgcaatacgacctgctcattaaatcccgccgcgcagatggcgcctccca

SEQ ID NO: 127021 - DNA, 122 bp, Homo sapiens
actttaggttttagcacacctatattccatcatcacactgaagtgcagaaaatcacttcccggtatagatacaaatttacttcatattttaatgtaaagtataggggtgtggtttataaaac

SEQ ID NO: 127022 - DNA, 122 bp, Homo sapiens
agcccgggcagccaggcccagaaggtcatcatctgccatcggggcacccgtaagtgcttccgcttcccagctcagggagaaggggtcgggcactcgaaggctccggaggggctgggggagct

SEQ ID NO: 127023 - DNA, 122 bp, Homo sapiens
ctgtcgatggagaagcacatgaggatgacatcagtgtccgggtaggagagaggccgcagtcgatcatagtcttcctgccctgctgtgtcccacagagccagctccacctgacacacagggcc

SEQ ID NO: 127024 - DNA, 122 bp, Homo sapiens
ccggtacctgatgcccccttcccagggcgggtgtatgatctggcaacctaaggggtgagtcggggaggcatacagagaggaatggtgggaaagaggaaaaggcaggctccccagtgggagga

SEQ ID NO: 127025 - DNA, 122 bp, Homo sapiens
taagatgcttgttggtttcattaatagaaatctcagctgaaactcacttaacaataaggacgtggattatgttgcacaacaggaagtacaagaaggcttcagagtgggttaattgaactcat

SEQ ID NO: 127026 - DNA, 122 bp, Homo sapiens
ttggggtaaggctttgggggaggaggtgggatttgggggctctttgggccggaccacactcgaataggaggaaacttccagaagggtgggttcctttggtgataagcaatgaagccccttcg

SEQ ID NO: 127027 - DNA, 122 bp, Homo sapiens
gtccaaagcggcagggagttttgaaagtggagatcgtggtccccatggaaagaaaaaaaacgaagcagtagagcacgagtcttggcccctggtcccccggacaccgcccctgccgcatatgc

SEQ ID NO: 127028 - DNA, 122 bp, Homo sapiens
catctatggtatagaaaccaatagacattcatggcctgggcttgggaacatagaccagttcgtgcaccttcatctcagtcccagttttgaacctgtctattcctgagctcttgcttctctct

SEQ ID NO: 127029 - DNA, 122 bp, Homo sapiens
cagcctccctccactgctcagccgttggagagggcgtggccccgcgagtaacaggtctcccgccccacactccgcgggcccgcgcgcagacaaagacattccacagctcccgccccctccac

SEQ ID NO: 127030 - DNA, 122 bp, Homo sapiens
gccattttcccattttaggcgatggcaacgcaacccctccgtttgctctgggcaaaacttcgagagttccctctgaagctggagctttttcctcagatccaagatccaattggtcaccaatt

SEQ ID NO: 127031 - DNA, 122 bp, Homo sapiens
ctcaataaaagggaaatattaactaaaaatatatgtgatacatggaaatggcaaaaatcacggtgaagctatgcaaacgatgcaagttcagaaagtgctgtgttaagtcatgggtgtggtgg

SEQ ID NO: 127032 - DNA, 122 bp, Homo sapiens
gagtcaggagtccaaagcagatgtgggcaggggtataaaaagaccaccagaaactcctgccggaacctgtgctggctgctattcagagggcacaatcccggaattaaacaataggtgatgga

SEQ ID NO: 127033 - DNA, 122 bp, Homo sapiens
gaacattaagattttacaagggtgcagggcagtcattttccctaatcagtctaaagtcaacgctacgggtgtaaattcaatgtcaaactccctctgtctgtcactggggcagagtacatttt

SEQ ID NO: 127034 - DNA, 122 bp, Homo sapiens
tgatgaagacagaaggctccggggtgacgaatttggccgatggcagatgttttgggggaacgccgggactgagagactccacgcaggcgaattcccgtttggggcttttttttcctccctct

SEQ ID NO: 127035 - DNA, 122 bp, Homo sapiens
ggcaccctcctccccccggcaggggctgggccaagatataaatagggttggcggctgcagcgggcggcaaacagcccgcccggcaccaccatgctcgccctggaggctgcacagtaagtgag

SEQ ID NO: 127036 - DNA, 122 bp, Homo sapiens
tcaactggttctacttacacatttctcactgaaaaactgaagttgagcaaacttttcacccgatgggtgcaaaactgttgcacccagatgagctgcagacaagagcagggctttcaatggaa

SEQ ID NO: 127037 - DNA, 122 bp, Homo sapiens
cccagagcaggcggtgctggagcaggctggcgggatgggactccatgtctcacctccatccgtttccacaacctcagccaaaactctcggctgctcatgggagtgcatagtggggtgagggg

SEQ ID NO: 127038 - DNA, 122 bp, Homo sapiens
caccgccagtagagcctcgggttggggaatagaagcccccgggaggctaggtcctttgggcgcggcctgtgtgcatctggggagacggtgggagtggtggggagaggtcgcccgggtctggg

SEQ ID NO: 127039 - DNA, 122 bp, Homo sapiens
cctttacctcattctccctcagtcaccctgggagccccactatactctgtagagtctgctcggcatctgtgatctaagctgatccattcagctggattatcatcatcaaccttgcacgcttt

SEQ ID NO: 127040 - DNA, 122 bp, Homo sapiens
agggggagtaatttcatttgacgaccatatacaggcctaatgggagcctgcaaagtacagcggccgcagtcatgggtagattacaggattcccatctgtaagatcagtactgtgggggtgga

SEQ ID NO: 127041 - DNA, 122 bp, Homo sapiens
cggcccctgctcaccctccttggaggccctgggcactcatccaagcactcatcgcctgagcgctcatccaaggtctgttggtttatttgtccatcggctccctctagaaggtgagccctggg

SEQ ID NO: 127042 - DNA, 122 bp, Homo sapiens
tgctgcgtgggagggggcgtccctacctggaaagctggggacgctgggagactcacagcccggaaaacaagggtgacgcacccactcccacctcgacccccgctccgcctcctggtgccctt

SEQ ID NO: 127043 - DNA, 122 bp, Homo sapiens
ccagaatgaggcgatgacatcatcctggggggggttgactaatggccgcgctggggggggcggggaagtttacccggtaacagcggctgccgcacggccccgcccccggggaagggctggga

SEQ ID NO: 127044 - DNA, 122 bp, Homo sapiens
tgggagtgactcacttgggttcagaggtcgtggcactgagatgggtctggcagatcccagcgtccaggcccagcccctatagtgtcagctccctcctctggggacccccttgcttgtgcccc

SEQ ID NO: 127045 - DNA, 122 bp, Homo sapiens
ggggcgttgagcaaccctctttgcctccagttgtcgtggcttcgtggggccaaccattttcggccaggctgagaaatttcttattgatgggtctgctcatttcctgcataggaagaaatcgg

SEQ ID NO: 127046 - DNA, 122 bp, Homo sapiens
gacgctgcgacggggcgtcccgggggtgacactggcatgtgacgctgcgacggggcgtcccggggcagggccctgccaagggacccccaacaaacacgactgaaactcagcctggatacaaa

SEQ ID NO: 127047 - DNA, 122 bp, Homo sapiens
agtgtggcctctgcccagacaggtcgtgggtcccatgttgagtcacggtcatgccacacccgaaggccacacccgtccttcagcttgcttaggtttgggctgtgatcatgtcctcagagccg

SEQ ID NO: 127048 - DNA, 122 bp, Homo sapiens
gcgcccagagctgctgcaatgactttgcatggagtgtaccctccactggggctgtcctcccgcgtcggccactgcagtggcaccgctccgggcagggccctgcacgccgtccttccctggcc

SEQ ID NO: 127049 - DNA, 122 bp, Homo sapiens
tgagccgaggcccagggtgtcacccatcagagcctttcaccatctgtgcagatgtcagcgcggggaagggacacctcctttacataaaaacagcttagaccttgcaggctcctggaagattc

SEQ ID NO: 127050 - DNA, 122 bp, Homo sapiens
gaagccacgacagccaaggctacggctaccttcctgcagcccctggggatgccactgatgcgacgccgcggcggccaaggcggggctgaaggcggcgcgcccggcttccctgagccagtttg

SEQ ID NO: 127051 - DNA, 122 bp, Homo sapiens
ttctctggccgccagctcatcccgctgctctgggctgcctcggccaggtggacgggttaccggagatttattgcactgttttggaagaggcatggggctaaggaccagcgggacggcaggag

SEQ ID NO: 127052 - DNA, 122 bp, Homo sapiens
ataaccctttactcctgcatctctataccaaaataagtctcccttctgcgccactattcccgacgccagtcagccactgccctcttagaggcaaccacgcttctcagtttcctgtgcctcct

SEQ ID NO: 127053 - DNA, 122 bp, Homo sapiens
cagaagctctgcccacatggtgtcccggttcctccttccatccatcctgtctgagttcaccgcactggtcacctcaatggctggagacaccagtgtccgcatctttgagcagcatttgtgag

SEQ ID NO: 127054 - DNA, 122 bp, Homo sapiens
agagagccacggcgaggagagggtggctccttccagggggcggtgcgctctgccgttccgcgtcatatcccttggcagtattgtaaacacaagtccactgtatgtttttaaaacgtgagaag

SEQ ID NO: 127055 - DNA, 122 bp, Homo sapiens
cacgtgacccggcgccgcaggggtcccccagattcaattctagctctcgggctggtggggcggtcgcgggcgcctctccaagggagctgattcattgtctggtaggccctctgcagggccca

SEQ ID NO: 127056 - DNA, 122 bp, Homo sapiens
ccggctcggcaggggcggccagtggggtgggctggtagccggcatcagggcttaataggccgtggctgccggggctgtagtcgaaggccagtgggaaggcatcctcgtccgggcccacagtg

SEQ ID NO: 127057 - DNA, 122 bp, Homo sapiens
atcataatgtttcagagttgaacaaaatagtttgcattaagtgcctggaagaccctgcagcgtgagcagaggtgcacagacctgtgagacttgaaggcgttggagccatccccaccctctga

SEQ ID NO: 127058 - DNA, 122 bp, Homo sapiens
gcctgccacgactctaatctaagccagattatctctctcctagacttgcacaacagcttccgaaattgtctacctgcatctatccctgcccctgtttgcagataaagtgagcttttaaaaac

SEQ ID NO: 127059 - DNA, 122 bp, Homo sapiens
tgttgtgagattagggccaggcaagctatttactggacgagtagagcaggaagtgttctgcgtaaatggcaggaaaaaccagctatgggtgcctgcgcatgctctgctccctaggctggagc

SEQ ID NO: 127060 - DNA, 122 bp, Homo sapiens
agccgccggatctctgccacatagagcgccagcagctgctccaaacgctggatctgccgccgggaaccacgggtccttggagactgagaggcagtgttttcagcatttgtggggtccaagga

SEQ ID NO: 127061 - DNA, 122 bp, Homo sapiens
gtagaatggagacatgtgaggaatccctgacatttccaatgacaggccgctcagctaaaccgggaaaaatccacaaaacagaaagaacccacagggagaagcacttctctctccaacctgac

SEQ ID NO: 127062 - DNA, 122 bp, Homo sapiens
cctggtggccctccagggctttgtgcagacgctgcagggctggctcactggtctctgggccgtagaggaaacggcagctgcaggtcttctgcatgacctcggtgcgaccgtagcctgtgagc

SEQ ID NO: 127063 - DNA, 122 bp, Homo sapiens
gcgtccagatagtctccacagcacaaagctaatcatgaaaacatcgcagcatgtatggaccgtttgccatgcgcctggcactacgtcctcaacttcacgtgaccggattgcatcccccgcac

SEQ ID NO: 127064 - DNA, 122 bp, Homo sapiens
ctggaaaacctgaactttgctatggttcctgctgcagagccttctggagaggcgattccccggcctctggtcaacagtcttcccaaatcattcccaatggacttacgacagccagagccagt

SEQ ID NO: 127065 - DNA, 122 bp, Homo sapiens
gcatggccggggagggaggagccggcagagaacttcgcctgggccaccaggaaactcagccgagctgggaagagggggactggcaagcggccaaggcggagggaggcaggaaggcgtgaggc

SEQ ID NO: 127066 - DNA, 122 bp, Homo sapiens
aggatgttctagccggagtctactcgatggtagggcaggaagccgccttgtctctgggcgcggccatgttggaggctccgggcccgagtgatggctgcgagctcagcaaccccagcgccagc

SEQ ID NO: 127067 - DNA, 122 bp, Homo sapiens
ccaaaaacaaagcctcggtagacgagctatttgccgagatcgtgcggcagatgaactacgcggcgcagcccaacggcgatgagggctgctgctcggcctgcgtgatcctctgaggcggccac

SEQ ID NO: 127068 - DNA, 122 bp, Homo sapiens
gaccgagctgagggcctactgtgtgccttgcatgtggggtggagcacagagccccaggagcgcatgaggcactgaccaagctgagggcctactgtgtgccttgcacatggggtggagcacag

SEQ ID NO: 127069 - DNA, 122 bp, Homo sapiens
aagcggtcgtgagccttgagctttgcagcttttcttggctcccatttcctcctaaagccacgagtttaccagcgtctcttacaagtagtgtgtcgccactttaaaaaaaacatcaggaaagg

SEQ ID NO: 127070 - DNA, 122 bp, Homo sapiens
tgaagtgtggccttgaaagctgcacgtctaacaaactcttagaggaatttataggtattccgatgcaagtgaaccatggcctacactttgagaaacagtagactacattgatagacttctat

SEQ ID NO: 127071 - DNA, 122 bp, Homo sapiens
ctttatgacctgtgtcttgtgctaacccacttttttctgttttatatcagaaaagtctaccgatttttctttttttaagttcaaaaactactatagcataccacccaccataccaacctact

SEQ ID NO: 127072 - DNA, 122 bp, Homo sapiens
ctagaaggcctggaagccgagaacaaagtggatgtttatggttatgttgtcaagctaaggcgacagagatgcctgatggttcaagtagaggtatgttctaacctttagtgattattctcact

SEQ ID NO: 127073 - DNA, 122 bp, Homo sapiens
ccgagcgcccgtccgcgtcctcgtgcgtcctcggcgcagctggaggccgcgggcttgccacgcgtcagcccagttctcggcctctgcggctgtcctgcccgtgtgcaccccctggcccggcc

SEQ ID NO: 127074 - DNA, 122 bp, Homo sapiens
ttttttgggggaaggcctataaacattcctgtggagtgtttacaaggttcaaatctcttccgactacattgtgacagaggaggccctgggacaaagctattgtgtacatttttgccaattcc

SEQ ID NO: 127075 - DNA, 122 bp, Homo sapiens
ctcgcgggcccctcctaatgtcagggacttaagattggggctcgctgggacctggtggtccggttatgggaaaagaagcctcgtgggagagcagaggtttggtggggcgagggcggcggctt

SEQ ID NO: 127076 - DNA, 122 bp, Homo sapiens
gcgcttgcgggccagcgtgagttccgcgtgggcgtgggctcggcgggccgtactcagagccgccagccagccccgacccacccgccacgggcagtgaggggcttagcacctgggccagcagc

SEQ ID NO: 127077 - DNA, 122 bp, Homo sapiens
cgcgggagcgctaggggcacgggagcgcagtccctgtggagtcgctgcgggtccgcgtggcgtgcccgggggaccctaaagaccgtcgggtgggggctgagggcgaggggcgggacaccggg

SEQ ID NO: 127078 - DNA, 122 bp, Homo sapiens
tcctttcttggcgggtgggagactccgggtagccgcactgcagaagcaacagcccgaccgcgccctccagggtcgtccctggcccaaggccaggggccacaagttagttggaagccggcgtt

SEQ ID NO: 127079 - DNA, 122 bp, Homo sapiens
cgttttctgtgacccttccaaaagaagcgttgttttggatgagtctctgtccccggaggccgagggccaaaagtgtcttatgttagaggcaaagatgcccggatttagagggcttccaaccc

SEQ ID NO: 127080 - DNA, 122 bp, Homo sapiens
cggaaatgctcaccgtgtctgtcttctccctggcatggtggggctggctgcacaaacactcgaagaagtctttgaatgccagccctcagcacgtggggcaggtgcaatggtgcctggagtct

SEQ ID NO: 127081 - DNA, 122 bp, Homo sapiens
tgtctttcccacctttggtcgacggtcttccccacactcctgatgggtcagagtgcggtgcgagcggagaggcaggcccgacccgggcctgggcactcccgacggcgggtcagagtgcgatg

SEQ ID NO: 127082 - DNA, 122 bp, Homo sapiens
ggctctcagaccttcagcctcagactaggggctgcactgtcggctcccctggttctgaggcgttcagacttggactgagccacgttaccggctcctctggttctgcggcttgtaaacagcct

SEQ ID NO: 127083 - DNA, 122 bp, Homo sapiens
cttaattatcctacttcctcacaatcttttcctgcgcagttggaattccgcatccaagctcgtttgaggcaaaacggcgaccgcgggctccagtgtcctgagtatgtttggtcaatgcaggc

SEQ ID NO: 127084 - DNA, 122 bp, Homo sapiens
tccagtttcctccagggacccagatagactacacatctcccagccttccttgcagtcaggcgtgatcatgtgaccaagttacggccagtggaagtgagcagaagtgacatcatcgcttccag

SEQ ID NO: 127085 - DNA, 122 bp, Homo sapiens
tgccgggaatgacctctcctcctttcactcttccccctggctcctcagctgcagccgctccggcctccttgctgttcctgggatacgccacactcagtctggcctcggggcctttgcactgg

SEQ ID NO: 127086 - DNA, 122 bp, Homo sapiens
cgtcaggagtggtgagttgtttggctgctcaaggcaagatcctaagtgtgaatggcagcacgtgtagagggaggcttatataccctgataagagtatgtgatgagtcacatgcgtacctgtt

SEQ ID NO: 127087 - DNA, 122 bp, Homo sapiens
gctgctcctgagctcaagtgatctgcctgccttggcctcccaaagtgctggggttacaggcgtgagccactgtgcccagcctgaaatttatatatattaatatttggtaaacaaatgttaaa

SEQ ID NO: 127088 - DNA, 122 bp, Homo sapiens
gcgcgggggcccgcggcgcgtgggtgtggaggccgcggggcggcaggaggcactgggaagcggggtgaagagcaccgaagtccagaaaagggcagtgtccgccctgcgctcctctgctggcg

SEQ ID NO: 127089 - DNA, 122 bp, Homo sapiens
ccacgtccggcgagaggcgagtgatcggacaacttctgcacctcccggaagcggctgcgccggccccgcccctccagaggcaggcgtggcctcatgaataatgaatcgtgcgggggaggggc

SEQ ID NO: 127090 - DNA, 122 bp, Homo sapiens
tttctcttaatgtcattaaacaatcaagttattttcagattaaggcccacttgctccactcgtcccctgtcccttaaccgtcgctttagagtctcgcgagaacagccccttttttttgtgtt

SEQ ID NO: 127091 - DNA, 122 bp, Homo sapiens
tttgggtacacgctatggtcttgtggatattgacgtagactttgggtacgcgctatgtctcgtggatactgacatagactttgggtacacgctatggtcttgtagatattgacgtagacttt

SEQ ID NO: 127092 - DNA, 122 bp, Homo sapiens
taggtgtcctctgtcctgacagcggctcctgcccagtctggagtgctggtggtttatctgcgtggcctctgcagctctgtgtgctatgcgcgtctcgaggtggagagacttggtgtctgcat

SEQ ID NO: 127093 - DNA, 122 bp, Homo sapiens
gggttcccagcccaagaaccttctcattcacctgcgcagcgccgcgggacctcacccttccggtgtggtgccaagatccagactgcctgacttgttttcgtgccgccggacggtgtgtttaa

SEQ ID NO: 127094 - DNA, 122 bp, Homo sapiens
ctgcagctcttccgcaggagcagcgcgggcaagcgaaatgaatctgctgggctaaccccgcgttgactccgagctgtaaatcaggggcccgcgcaccaactttcattaattactcggagcca

SEQ ID NO: 127095 - DNA, 122 bp, Homo sapiens
ctctggcgcgcagggtgcatttcgggatggagcaagcgcagcgcgaagttgggcgcccgccggctgcagcagaaccccgcccgcggcgctctaggactgcatctcggcctccgggtcgcgac

SEQ ID NO: 127096 - DNA, 122 bp, Homo sapiens
cacggggtgccgaggggcctctggagggggcgggttctctcgagccagaaagtccggagccgcccaggaattttggctcgaactgagtgcatttcctctcgggccggccgggtgcgatccgg

SEQ ID NO: 127097 - DNA, 122 bp, Homo sapiens
ttcactgggccctctgactgtcccaaggcccccgccgccactccagcgccgtgcagccaccgccgcacagccaccgtggccaccaccatgacgactgcgcgtccccctcgcaggtgcgccag

SEQ ID NO: 127098 - DNA, 122 bp, Homo sapiens
gttccggttagcctctgccactcgtaggtaggccaggcagagcgaagctgtctgacccgtcgactgcggcagtccgcggaattcttgtatcctgtccagggtatcctgacctttctcatgaa

SEQ ID NO: 127099 - DNA, 122 bp, Homo sapiens
aagggagagggatgccagaggacgtgatggtgagggagagggaagagggtgggactccaccgcaccagggcttctggctttattgactgggtatatggtggcatcctgggccaagacagtga

SEQ ID NO: 127100 - DNA, 122 bp, Homo sapiens
tcagcatgtgtgcgtgtgtgtgcttacacacgtgcatgagtgtgagtgcgacttctcggccgcagagtcccccattaacgctccggtatttgtttgttcagttccgctgtcccatcggccct

SEQ ID NO: 127101 - DNA, 122 bp, Homo sapiens
cccagatggaaatgcataagtcacccgtcttctgcatcgctcacgctgggagatgtagaccggacctattcgtattcggccatcttggctccaccggcagggtgtagtatttttattacttt

SEQ ID NO: 127102 - DNA, 122 bp, Homo sapiens
ccaaacgtccccaatagccatgctcgggagcggtgctttctgggaactgtagtcttcttacgtcctgaagggatacccaggcaatccccgaaactacaatgcccaaaatgctccaagtggga

SEQ ID NO: 127103 - DNA, 122 bp, Homo sapiens
gggcggggccaaataagggaataaaagctggctgctggagccagcccggataacccactccggaacccttccacgccatggaggttttcttcgttcgcttgctgctgctcgctctttgggtc

SEQ ID NO: 127104 - DNA, 122 bp, Homo sapiens
agcacggaaggtgaaaggggctcccagcctggctccttctcagaagtcccagcaagccaccgtatggcataaggtctttgtttcctcacctatccaacggaggtgacaccctgctcccctgg

SEQ ID NO: 127105 - DNA, 122 bp, Homo sapiens
atatggatgaggggtggcctagaaccttagcatctagaacgatcctgaaccgggaagccacgcctcccggccctctattggctggccccgggggcgctgctgacgcggaccctgcctcttcc

SEQ ID NO: 127106 - DNA, 122 bp, Homo sapiens
agcgctgcagggtgcaacttgatcagaagcctgtcacagtgggtgcagtcccaggccagccgccccagggcacctcaggggcgtaaagcctacagaggagccacctcagctctgccctgctc

SEQ ID NO: 127107 - DNA, 122 bp, Homo sapiens
agaggcccagtgacatgttccccagtgtaaccccctccttggtttcacatcccctctacccgattctaggccaagcccctccagtgtagttggtgacccagaacaggtgaaagtgaggctgc

SEQ ID NO: 127108 - DNA, 122 bp, Homo sapiens
agaaatggggaaatggatcagcaagaaagtgcccgccccaggcatgggtgccgtgcgggacggggacgcggcccagccgggaatcggggtgcccagggtgcgatgtgcgaggggctcctgag

SEQ ID NO: 127109 - DNA, 122 bp, Homo sapiens
cgtagtaattctctactcccacatacttttggttgtacaacaggtccaaataagactctacggatcttggatcgtccagactatatgacttgactattggtgggctttttctcccagtaatg

SEQ ID NO: 127110 - DNA, 122 bp, Homo sapiens
agcttcatgtgtgggacgcggagccccatgagcttgaggggctggtggggagatgtccgccgggccttccagccttcagcttcatgtgtgggatgcagagccccatgctgactgttgtcttg

SEQ ID NO: 127111 - DNA, 122 bp, Homo sapiens
aagctggcaacacacacagcaagcgtgtgtgcggcgcccaggctgaggcgagccctgatgcgcaggggcgctcggcagtcctacctcagcggagaaagcatagtccttgcatggggatttag

SEQ ID NO: 127112 - DNA, 122 bp, Homo sapiens
agtcagtggtgtcctggggccctgccagacacatgcacggttcttcaagtgtttattctccgtcactcaggggacccggtcttcgagggtgctgccgcccactgtctccctccaccctcact

SEQ ID NO: 127113 - DNA, 122 bp, Homo sapiens
gccaggggcggtgcaagccccgcccggccctacccagggcggctcctccctccgcagcgccgagacttttagtttcgctttcgctaaaggggccccagacccttgctgcggagcgacggaga

SEQ ID NO: 127114 - DNA, 122 bp, Homo sapiens
aagagtcccctattcctgaaacttactctgtccgtggtgctgaaacattgtaccgagacccgcccagacgggcgctgtcagccgctgaaaaaaaaaatcttccccgaggctgcccaaatcag

SEQ ID NO: 127115 - DNA, 122 bp, Homo sapiens
gagaactcagaagtttttatttttttaattgataaataagattgtatttatcatgtacagcgtgatgttttgaagtataaatacattgcagaatgaccaaatttagctgataaacatgcatt

SEQ ID NO: 127116 - DNA, 122 bp, Homo sapiens
gtcgcgagcgaacgaccaagagggtgttcgactgctagagccgagcgaagcgtgagtgcgcgggaccccctacccctactcctcggggcccccaccctcccagccgggccgtgagctgcctt

SEQ ID NO: 127117 - DNA, 122 bp, Homo sapiens
ggagaggaaaattcttggctctcctaatttgcaaattattttacagcaaacttctactaccggtttgcattacaggagttcttacctccatgaatacaaagaaagtcattatttgaaatagg

SEQ ID NO: 127118 - DNA, 122 bp, Homo sapiens
gacttctaggttcttggttaaaaccttcatgaggcctttgcgacagcagacctggaccatcgccaaggcaagacttctggattcttggttagaactttcaggaggcctttgtgatgccagac

SEQ ID NO: 127119 - DNA, 122 bp, Homo sapiens
cagacggggcggccaggcagaggcgcccctcacctaccaggtggggtggctgggcagagacgctcctcacttcccagacagggtggccaggcaggggcgctcctcgcttcccagatgggggc

SEQ ID NO: 127120 - DNA, 122 bp, Homo sapiens
agatggacatgcgaggagtgattttagcctcagcgatcgagggaagaatctcctgatgggcgtgaactgatatgtgtgggggtgtccatcatctgggatggagctccagggtggatggacat

SEQ ID NO: 127121 - DNA, 122 bp, Homo sapiens
tcccagcgctggcatacataagccctggcgtgcggggcggcttctgcgctggggtctctgcgcgtgcacgggcctcaacatatgcatggacgtccaggtgccacgtgggcatctcgtggtgc

SEQ ID NO: 127122 - DNA, 122 bp, Homo sapiens
gagcatgagacggatgaggaaccagcaccagcgaaggggagggccccggagaccacgagacggatgacgaaccagcaccaacgaaggggagggccccagagaccacgagacagatgaggaac

SEQ ID NO: 127123 - DNA, 122 bp, Homo sapiens
aatgagatggtccctttcccgcggctgctctgcctgcccagaatggtccccaggttttctcgcttttaaccaagaaactcaaggcttctgcaacgagacacagcccccaggactgcttctca

SEQ ID NO: 127124 - DNA, 122 bp, Homo sapiens
ggccgatgagtgttggcatctgtgatgttgatgtgcacatagcagtgatcatgaagggcacggtcagatgcagttagtaccagcttgaagtagcgttcctgcttgtagtccagtggcagagc

SEQ ID NO: 127125 - DNA, 122 bp, Homo sapiens
cgggatctcgcgcgagacttggcccagcggagcacagggcatgctgggagttgttgtccacgatcgcgagacccgccccctccccatgcccttcgccgcccagcgagttgtggagccgcagc

SEQ ID NO: 127126 - DNA, 122 bp, Homo sapiens
cgggcacagcgggcccaacagctgctgcagctgcaggtgttccagctgcagcaggagaagcggcaattgcaggacgacttcgcacagctgctgcaggagcgcgaacagctggagcggcgctg

SEQ ID NO: 127127 - DNA, 122 bp, Homo sapiens
cccgctcaatctggctgagctccagagaatggcagggctgggctgtcacatgctgagccacgtgactggcagtggctgggggctccatcccacacagaggacaggggctctgcagtccttca

SEQ ID NO: 127128 - DNA, 122 bp, Homo sapiens
caacataaagaataagactgcacctacttggcctgtagtacacatgctgattttctccaccgcagatgaatttattgagaaagggagatcctgtagcaactttcactgtagaaagtacaaag

SEQ ID NO: 127129 - DNA, 122 bp, Homo sapiens
gtccacacctcagacccatctgcccgcccggccagcctgcctcgtcgttccccgcgggctcgtgcctcaacaggcagcgtgtggatgccaccgtcaccttcacgggagaggcaggtccgccc

SEQ ID NO: 127130 - DNA, 122 bp, Homo sapiens
ggtggggccaacctgagttagaattctagccctaccactgactcactgtgtaaacctgggcgagtccccttagcctttctaggactctcttttcttgtctgtaaaatggagacaataatacc

SEQ ID NO: 127131 - DNA, 122 bp, Homo sapiens
gctctctgcgccccctgggctgcagtgggcaggcaggacacagggtgcctggctgattcccggggaggctgtgggccctcaggcagccgctgttctgtgtcagcgctaggcttggcctggga

SEQ ID NO: 127132 - DNA, 122 bp, Homo sapiens
ccggtcgcttgccgggagcgggagctgtgggcagagagatccttgggtgggtgtggccgccgcctgcgtttggaggccccgtgcagcgtcaacccgggacgccagagcaccccatcctcggg

SEQ ID NO: 127133 - DNA, 122 bp, Homo sapiens
gcgctgaggcagtgactggggcacagaatccaatatggccgtgcacaggtgctccctggacggacccgggcgaaggcgcgctggcaggggatgcggacgccaccctggtcccacgcctccgc

SEQ ID NO: 127134 - DNA, 122 bp, Homo sapiens
aatacatgtgttggaaggatgaatgagcgagtgcccactaacctccgagaccctcatggacgtggccagtgcgtcactcaccttgctgtggttcccattggctgccagttcccaagtgtcac

SEQ ID NO: 127135 - DNA, 122 bp, Homo sapiens
tggccatgaagaagtattattcttagctgtttctatgacaaatctgcaaaactgggagcccggttattatcaatattacaaaaactttgttttagtgggcaccttttgatcacatttttaca

SEQ ID NO: 127136 - DNA, 122 bp, Homo sapiens
agcggcccaggcgggcgggatccaggcgggccatggcggatgtccccggggcacagcgagcggttcctggtgacggcccagagccccgggaccccctggactgttgggcctgcgctgttctt

SEQ ID NO: 127137 - DNA, 122 bp, Homo sapiens
ttttcttttgtgcaattgtcattattaatgataccgactcgtttactcaaacagtcgaatcggagccccagctcttagcccggatgcagcaattgcccgtgggccccctttaacaccaacag

SEQ ID NO: 127138 - DNA, 122 bp, Homo sapiens
acggcacaaaggactcccccctccccgcttttccttttccttcaccctgacccagttctacgccctgtaagacgttgctccagcctataagtggggctgcctcctctgcttttgtcaagaga

SEQ ID NO: 127139 - DNA, 122 bp, Homo sapiens
tttgctccttagtaaagattaataaaactccatgagactgttgtccagaggtcctgcgtccggcccccacccccatcctcaccaacaataaacaccagcctctttctgaaaccactttccca

SEQ ID NO: 127140 - DNA, 122 bp, Homo sapiens
cgtggtgtggcgggaacgggaggccgtggggtgggcggcagcacaggttgtggctgagctcggggccggggcagcggcgcttgcccttgggagggagaaaacaggcaaaggacaggatgtgg

SEQ ID NO: 127141 - DNA, 122 bp, Homo sapiens
ctcattcgccagtgactaatgctctctagagcagccctgtgctgctcaaatttcatcagccggctttgtccttcataactctgcctagaccataaaagctcccaaacctgttgaggacagcc

SEQ ID NO: 127142 - DNA, 122 bp, Homo sapiens
tcagtggcttcagatgagaaaagaggtgaaatgaactttaatgatacatttcatttagcccggcataaccgcaatagtttcacgttaacatgtggtctggattttaaaaaattatccgtgaa

SEQ ID NO: 127143 - DNA, 122 bp, Homo sapiens
gggacaagcccccggcgtgagggcagcagagtagccctgaacactgagatggtgacgccccgggcgcacccctgccggctggaaggctccatcccctctttgctgagacccctcgtcctggc

SEQ ID NO: 127144 - DNA, 122 bp, Homo sapiens
ctcaatcaagggaacccataagtgaaccaaagcccaactttcctggagagaggcaatcggcgctgagagctaattactgctggctctaccatgttgatgtcacaggcatcattacacatcag

SEQ ID NO: 127145 - DNA, 122 bp, Homo sapiens
tgatgaacaccaacagctccctgggtgccgggcggggtccacgccggagctgcttcactgcgcccgttctagacaggagcaggcaccatggggcaaggccaccagcctgtggcacagcgagc

SEQ ID NO: 127146 - DNA, 122 bp, Homo sapiens
tattcagtccctgcttgcgactgttggcgcacaggaccgaccttgggctagtggccctggcgggtgggctgggtatgagtgtctagcttggcccttcactgcaagactgtgcaaattgcttc

SEQ ID NO: 127147 - DNA, 122 bp, Homo sapiens
gttggatagcacagccctccgggttctggtacgtctgtcaaggccagaaaaggtatgttgcgatggatagtgctacatctgccactgggtggtaatctgatacaggcctgctcaggtgacac

SEQ ID NO: 127148 - DNA, 122 bp, Homo sapiens
gtgcctggcagctacttgtcctctgtgcactccggcatgcctgcctctagcagggcagcccggaactgcgtcaggacaccccggatgctcttgatgaaacccttggaaagtgggaagagggg

SEQ ID NO: 127149 - DNA, 122 bp, Homo sapiens
cactgcaaaatggtctgtattcatgtaatctacaccagtcacaggctcctggctgtggtccgcagaagaagcctccgaaggaaacaatgagaatatgttcagatcaatccttttgtgtaaac

SEQ ID NO: 127150 - DNA, 122 bp, Homo sapiens
tactcaccacagcggctgggtgtgtccatatctgtccaggagccgttggccaggcacttgcggaccttgggccccaccacctcgcgctccccccggcacacatactcaatctcatagtccac

SEQ ID NO: 127151 - DNA, 122 bp, Homo sapiens
gcctgctccatgacacctaataggcaccagagacttgaaaccacactgctggtagggtctcgtgtggagggaaggcaggagaggtgggccccagacctcaaagccttttaaccgcagtcagg

SEQ ID NO: 127152 - DNA, 122 bp, Homo sapiens
ccacctgctagaacaccgcacttccgcctccctcgccaccaccccggaagcgctcgccgccgaccaggaagaagaacccgcctcgcagcgtcctcttctggcaccccagggtggccttgttg

SEQ ID NO: 127153 - DNA, 122 bp, Homo sapiens
tgtttctcttaaatcaaaatgtttacatgaaatactatgatccaagaacacacactgctgcgcttgcttaaccgggtcgagttgaactagttcgtcttctccgccccaaccccggtgccgta

SEQ ID NO: 127154 - DNA, 122 bp, Homo sapiens
acactgcctctgagttggaaccccttcatgggcaaacttggggatcagccccagtctccccgacccaggccactaaacttagcagtctcctgtctcctcatcagctgctcactaacatggct

SEQ ID NO: 127155 - DNA, 122 bp, Homo sapiens
tggcctgcagcatcagctgctgctggagtttccagttcttccacatagactgcgagaactcggcctgccccactcctgtgtgtattcctagcagtgctgagcataaggcttggcccagagtg

SEQ ID NO: 127156 - DNA, 122 bp, Homo sapiens
acgtgctcaaggatgacaagatgggcctcaagttcttgggcaccaagtacctggaggtgacgctgagtggcatggactgggcctgcccctgccccaacatgacggcgggcgacgggccgctg

SEQ ID NO: 127157 - DNA, 122 bp, Homo sapiens
aaactctaccttgaatacagatcttcaagaagccccagaaataagtttccccagaaaggccgctggagataggagaggagaggctgtcttttatacttcagctcctggagacctagtccagg

SEQ ID NO: 127158 - DNA, 122 bp, Homo sapiens
tggaagaatcaaatccctgttgtccatagcagggaccttactttcacctgcttacattggcgtttctccttctttatctcattatctccagtctctcatccctgcttcctggaatcacctcc

SEQ ID NO: 127159 - DNA, 122 bp, Homo sapiens
tgtttgtctatggtttcagtaaatacgtctgttgcggcatctagcggctatgggtggcaacgcggctgataaatttcgggctggtgtagagttagcccttcaatctggaaacaaggtgtgcg

SEQ ID NO: 127160 - DNA, 122 bp, Homo sapiens
gcggcaattgccgggggagccctagcaaccttcccgcgtccttagttaccaaacaggaaacgctccagcccgaaggcgaaacttccggttgagaactccctgcctgcaggccgaagaatctt

SEQ ID NO: 127161 - DNA, 122 bp, Homo sapiens
accccgcacctctggccttgtagtactcgtgttccagctccccctcgtcgtcctccgaggcgtagttcagcagctccgcttcgtacagggccaggaagtcgatgtccttcttcctccgcctt

SEQ ID NO: 127162 - DNA, 122 bp, Homo sapiens
aacctcccgcacattctccctaagcaataaattaccttcctggctttaattagctgctggcgcgcaagcggggctgggtgctgacgtgctgctttcccacaggtcccattctgtcacacaga

SEQ ID NO: 127163 - DNA, 122 bp, Homo sapiens
ggaacagccccctcccccaggcagtgccttgtgtgaatgaaatggcagtttccaaagttgcggagcctcgccaccaccccctgcatctgcatgccccctcccaccccctgtcgtagacagct

SEQ ID NO: 127164 - DNA, 122 bp, Homo sapiens
ggccaggcatttagggggtgccaggaaaggcagagggcccagatggtggaagaagtgtagcggcagcccgcctgggcattcccctgggaggcatggagattaatgagtaacgtagaacagag

SEQ ID NO: 127165 - DNA, 122 bp, Homo sapiens
ttatctaagcttgacagggatgatttcccagctgtatcttcgtaagggttatttggagagcgctgtcaggcttcaaactacatattgccagatgatgtcatgggacagccccctccccctct

SEQ ID NO: 127166 - DNA, 122 bp, Homo sapiens
aggggcaggggacctcctggggaatccatggagctggtccgcttgagccgcaggcgggcacgggcctgggcaccccaggccttgcctcgagctgcagaggccacaagacacttctggtactg

SEQ ID NO: 127167 - DNA, 122 bp, Homo sapiens
cattggagtggaggagtccaggtggaagttgatggattggacaggtaaagagaagagtcccgcctcctcatgcctatagttgggtatatattaggaaaccttaaattatgtacagagagaga

SEQ ID NO: 127168 - DNA, 122 bp, Homo sapiens
caggccctcttcctggtcgaggtggaatgcagctgactctcaggttccccagagcaggtgcgggcccgtggggcacccggggagacagggcaagggtgcttggcaacactcacacaaagcat

SEQ ID NO: 127169 - DNA, 122 bp, Homo sapiens
ccacctttcaaaaggggaagtggcacatttggggcatgtgggcagctggtgggatgggtccgacccagtgagagcagcagctgtccagctccagctcaaagcagggcacgaaaaaaaggaaa

SEQ ID NO: 127170 - DNA, 122 bp, Homo sapiens
tcgtcagtgtcccgagagatccccagaagaacgagagggctgaacaggggaccccactgacgtccggtgggccgactttacgatcctttagggtaaaaatttcatctaggaagacctagaga

SEQ ID NO: 127171 - DNA, 122 bp, Homo sapiens
cgcgcggcgcccaattccccgcggaggggagtagccaattaaggcacttgaaaagggagtcgggtggaagatcccccgcccaccagtatcctggatttacccaggtcgagttcagagagcct

SEQ ID NO: 127172 - DNA, 122 bp, Homo sapiens
gaatgtcttgactggttaatttcatcttcaaggctactcctaacgaattaactgtaggaccgaaaacatgaaaaacaaaaaacaaaaagggaaccggtaggcagaccgccacggagggaaaa

SEQ ID NO: 127173 - DNA, 122 bp, Homo sapiens
tggaggtacatgtgcagatttgttacatgggaatatcgcatgatgcggagatttggaatacggatcgggtattacgctaactgcctgggtgatgggaacactttagatttctgaggctcagc

SEQ ID NO: 127174 - DNA, 122 bp, Homo sapiens
atttgcagagggagcgagaaagggggccgaatgaaacgattcagaaacttttggggcacgcggaggagctcaaacgtgggcagggctaaagcaacagggaattattcaaatataactgggtg

SEQ ID NO: 127175 - DNA, 122 bp, Homo sapiens
agatgtactggctgcccggctcccttctgcacttgccccttaataaattcctttaatcctcgaaacgatcccgcagagggatcctggcattatttcgtcttagaaaaactgaattcgaaatg

SEQ ID NO: 127176 - DNA, 122 bp, Homo sapiens
aagacgcagaaggtgaaggtgctcacgggcacgggtgagtgaggtcgctgatgcgggcaccggagcctcaccccatcaccctgggggaccccggccatccctggaggaggcagggaggagag

SEQ ID NO: 127177 - DNA, 122 bp, Homo sapiens
gagttatagcgcccaggtgccacgtttcagggcctaccagtaataagtgactgtgcaggccgcgcacacccgctcggctggggcttcgcacacctcacagcagagtctgcgccccttgggga

SEQ ID NO: 127178 - DNA, 122 bp, Homo sapiens
agtcttggacaagaacccctcgccctcctgccaacccgccctggcacgcggaaagggcgacgtcggccccaccccaggccttgcgcgcccctcacccagaagcgcccgaggagtactcacac

SEQ ID NO: 127179 - DNA, 122 bp, Homo sapiens
ctaccagctccaagtctgtttctacagattaaaccccaagacaaaagagctgacaggaatcgaatcaataaatgtgatttgataaatgtgttcagaacacaacaatgaataacctgcccaag

SEQ ID NO: 127180 - DNA, 122 bp, Homo sapiens
cgggagctggggtagaggacgctggggtagtgggcgccggggtagcggggtccggggtagcgggcgccggggtagcaggctccagggtagtgggtgctggggtagcaggagccagggtagcg

SEQ ID NO: 127181 - DNA, 122 bp, Homo sapiens
caacctgagtggggctctaacaagagggtcgttcagcagaagtgagactccagtggagcccgtgggagacccaaggccaggagatgggtggaggccagagggcagagtctgggaggggccgt

SEQ ID NO: 127182 - DNA, 122 bp, Homo sapiens
tcctccccctatagaaaagccattgccctcttttcctccacccttaaagggacctgtattcgttggccccgttcaggcaatggcgcctcccatcccccttgaggagtctggaggccgcccaa

SEQ ID NO: 127183 - DNA, 122 bp, Homo sapiens
aatgattattgtgtcatctaatacttgaagattttaacaaagcaagtgtttcttctgtggcgatccctggtggcctccagaccttccattcatgtggcttctgactcagctcagccctggtg

SEQ ID NO: 127184 - DNA, 122 bp, Homo sapiens
aaactgcacatttgggcagagttaccagcaatgaacctgcctctgtagaggatcctaagtcggggcgagggggccctcagtgaagcctacagaaagccaagcagcccaggggttccctctcc

SEQ ID NO: 127185 - DNA, 122 bp, Homo sapiens
gagccctgctggcgcgcctgcttctctgcgtcctggtcgtgagcgactccaaagtgagtgcgctcttgctttgactgatgctgcccaaggacctctgatcagcaccaggggagaggaggggc

SEQ ID NO: 127186 - DNA, 122 bp, Homo sapiens
gcaagcgtgggagccttgaaaaggggcctctggccaggcttgggggaaaagggcggtgtccgcaaggctttttagagggagtgatgtttgttaacattgagacccgatataaggaaagaacg

SEQ ID NO: 127187 - DNA, 122 bp, Homo sapiens
acactggccgtctcgccagccggccagttccaccgcgtccccagcagggagcccaggggccgcaaacgcaggggcgccacccctgccactgccactaccaacatcttctctggccacccggc

SEQ ID NO: 127188 - DNA, 122 bp, Homo sapiens
tgtggggaacaggaaacttgcttttatttgctgtttctgcaatagtgttgtttgggtacacgacaggaccatggaactctataatcttgtatagggatacatgccaagtgccattcctgatt

SEQ ID NO: 127189 - DNA, 122 bp, Homo sapiens
cccccgtgactcgcagctggggcttctccacgggtggcggctgcatcgctctgccagtgacgctgggctggtccctgggggccctcctgctgctgtgggggtgcaggggtggatgctggccc

SEQ ID NO: 127190 - DNA, 122 bp, Homo sapiens
tgtaaaagaagtgtgagccggggtaggccagggtcccacttagggacttcaacacttcaacgacacctgcaagccacacatcctatccattgggctgttgccaacaaagacagtggtgctgt

SEQ ID NO: 127191 - DNA, 122 bp, Homo sapiens
ctcctgggctggacaccggcaccgtctaggttggggaggctctgggaaagaccagaatgccgaacccacccccgaggaccgtcctctctcaaaggtggggccgggggaggagcccagtcaaa

SEQ ID NO: 127192 - DNA, 122 bp, Homo sapiens
ctcccgcgcgcgcgccccgcacacagcctccgtgcagtgggcagagcccggccccgcgcgcgccccgccccgcccctggctagccgcgcccgcccccgcgctcctgcttcctcccctctttc

SEQ ID NO: 127193 - DNA, 122 bp, Homo sapiens
gactcaatgcgttatgacccaccagtttcctattcagggaacacactctctccagtactccgtttccaaggacaactcctgtgtccagacccctagtcctcaaccttttccccaagaaccct

SEQ ID NO: 127194 - DNA, 122 bp, Homo sapiens
cccatccgactcttccggcccttggaggcctggctcctgtaccttcacctggcgtcttggcgcctttttctcagcggcctgtgggtggatgtgcatggtgtggcctggagagaggtgagcca

SEQ ID NO: 127195 - DNA, 122 bp, Homo sapiens
tgtatgctcacacagcacaaagtgacctcgctctagttccttccttttcttataaggactcgatctcatcggcgagccccaccctcacgatctcacctaagcctagtcacctcccaaaggcc

SEQ ID NO: 127196 - DNA, 122 bp, Homo sapiens
gggaatgaagcggtgcacggtggaacagtggctgactccagccggtcgccgagctgaccacgtggtgctgggccggccacgtggtgcagccgcgtttggacacctggactccagagcgtcac

SEQ ID NO: 127197 - DNA, 122 bp, Homo sapiens
cccagatcagcgcttctgacgagcccatttgcacggggactcggccctctcttttcctggcgaggcttttgaacctgtcgccaagccagtacctcagagagaaggaaatgcagagggacgag

SEQ ID NO: 127198 - DNA, 122 bp, Homo sapiens
cccagtctcctgcacatccgggacgctgagcagggctggctgtcaagtggggctggctgccgtgctcacctgccttctgctgctgggggccgggggactgtgcttcttcgcctttagtggtg

SEQ ID NO: 127199 - DNA, 122 bp, Homo sapiens
ggacacagcagcggggcactcactgggaagcacagcgaccctcctgtgacgctgagaggccgccccgtgcagaagcaggcgattgtggggcttctcagtgggtcccgaaggggctggagcgc

SEQ ID NO: 127200 - DNA, 122 bp, Homo sapiens
acaaaaccattacggttacagggggtctttttctaaaaggggccacttagaaacctcaggcgcgaattaacaacaaacgctaaagagcaagcccttgcggggcgggggtggagaagagaaaa

SEQ ID NO: 127201 - DNA, 122 bp, Homo sapiens
agacagccattctccatgtcattttccacagcatcgcattcaccatgagacctgtttgcacgtcctgtctggctatgggtttatacatcaagatgggtcaagtcacccagcacaagtgttgc

SEQ ID NO: 127202 - DNA, 122 bp, Homo sapiens
ccccctgtggccgggcctcctccaatccccaccgtttcttccgggacggatacctgcctccgccaattgtcgcgtaccctggccaggtaactagggccgagttacaaccgcgcggcgttggc

SEQ ID NO: 127203 - DNA, 122 bp, Homo sapiens
gatgtcagatcccgttacccacccccgcccaccattcctcctcccctttttcccccttcccgaggcatcacccacacaaatactggatcctctggcttcactgacccagagggacctcaaaa

SEQ ID NO: 127204 - DNA, 122 bp, Homo sapiens
cggctaaaatccagaacagtggtagctccaaatccggccgaggatacagagcaacaggaacgctcattcattgcttgtaggaatgcaaaatggtacagccaatctggaagacagtttggcaa

SEQ ID NO: 127205 - DNA, 122 bp, Homo sapiens
agagagtgaaattgagcaccgagaggtgccttgcttaaggtaacactaggctggaatccccgtgccacacgaacttcctagtgcatttagcaaccaattccaccacggtccctactcacctg

SEQ ID NO: 127206 - DNA, 122 bp, Homo sapiens
atggctatggggcagcagggctccctgggacggagccagcgggacagggcccgaggaatccggggtaacactgggcagaagcagctgtcagcatggtttcccgtaaaagagactgggagaga

SEQ ID NO: 127207 - DNA, 122 bp, Homo sapiens
ctgcaggcccccacagcgtcactagtaggccaagcggacactgcgggacacgttccccaacgtgggatgtccgtcctcagcagtctgtggccttctgtgaagcaaagccgttttgcaggctg

SEQ ID NO: 127208 - DNA, 122 bp, Homo sapiens
cagccgcccgcggggcattgtgggccgtccgcgcgcccgtcccgtcgccgccgccgccgccgcagacccctcggtcttgctatgtcgagctcacccgtgaagcgtcagaggatggagtccgc

SEQ ID NO: 127209 - DNA, 122 bp, Homo sapiens
gtcgatgaaaaagaacgacgcgaggccaacaaaaagatcgagaagcagttgcagaaagagcgcctggcttacaaggctacccaccgcctgctgctcctgggtaaggccgaggggcgcgcggc

SEQ ID NO: 127210 - DNA, 122 bp, Homo sapiens
agtctcaggcctagaagggcccgggggtgggttctgtgggctgggaacagccttattacccggctcaacgaaggaagttcagggcgggaccagagattggccattccgctactgcgcaaaga

SEQ ID NO: 127211 - DNA, 122 bp, Homo sapiens
ggttttggtgggactccctggagaacactaaacggcttctgtcttcgcagcctaacaggacgtattatctgatggaccccagcgggaacgcacacaagtggtgcaggaagatccaggaggtt

SEQ ID NO: 127212 - DNA, 122 bp, Homo sapiens
gaaggcaggggagattatagctggcatgaagtcaagctccatgtggcaggaacaggacaccggtgggggctgccagggatggcagagcaaggtgagtcatagattgccttttcactttaaca

SEQ ID NO: 127213 - DNA, 122 bp, Homo sapiens
gccaaggggagacttataaaaccatcagcattccttaggctataggttgggggcccttttcgggggtggatgagtaggtattagatcacagtcatcctggtggatagagatggaaagtcagg

SEQ ID NO: 127214 - DNA, 122 bp, Homo sapiens
gggcaggacccacgagcgcgaagccaggtgccgcgcggtccgcgccccggctccgggcgacgcagggactttgctggcaatgagaaggctgctcgaccagcctgccggagtcacgattcccc

SEQ ID NO: 127215 - DNA, 122 bp, Homo sapiens
ctttcgccgcctgcctccttttactgctggttgccctcaaaggagccctctccctccacacgcctttgggccttaccagccgccggaagcggcggcatccatcccagcaaagcgtgcattcc

SEQ ID NO: 127216 - DNA, 122 bp, Homo sapiens
gccaacacagcgaaaccccgtttccaccaaaaaagtacgaaaactagtcaggcgtggtggcgcgcgcctataatcgcaggcacttggcaggctgaggcaggagaatcaggcagggaggttgc

SEQ ID NO: 127217 - DNA, 122 bp, Homo sapiens
ggatttgaagaccattgaaaataagagattaaaccggttgattccaggctactggtcagacgaggaaagcagcccagagcactgaccacaggggaaaacatctccgggcatactgggagcag

SEQ ID NO: 127218 - DNA, 122 bp, Homo sapiens
cccgaggggtggcctggtccttcactcctggcctgtgtggactctgatggggctgttggacgcgatggccttcaacctggggcccgttggccagagctcggcctctcagagaccgctgcagg

SEQ ID NO: 127219 - DNA, 122 bp, Homo sapiens
agggtccaggaaagagtccacgagttccattcaagagttcgtgtatcctgttcaggtatccggggatttggtccagggacctggaggtttggttcagcagaccaggaatcttggctctgaat

SEQ ID NO: 127220 - DNA, 122 bp, Homo sapiens
atttttctcttaaccttccaagggtacctcaccattccacctgtctccccatggaagatgcgagtgagaatgccatgactctgtgacctcacaatactaaaagaattttgcttctgcaggat

SEQ ID NO: 127221 - DNA, 122 bp, Homo sapiens
cttgagtagctgggactgcaggtgcacactaccacacccggtccatttatttttatatttcgtagagacaagatcttacagttttgcacagagtgatcttaaactcttgaccccaagtgatc

SEQ ID NO: 127222 - DNA, 122 bp, Homo sapiens
tcagtacactgtctctacaggccaggaaagagttgtgtgtctttggggtcccttccgctccgcctagggttcccggccaggccgagagaccaagcagggaccatgcgcgtgttggtaccccc

SEQ ID NO: 127223 - DNA, 122 bp, Homo sapiens
aggaggaggaggatgaacaaaatggccgccgccaccagccaggcaggaaacagggcagagcgcaggcgcgacccgccaggtcaccgctcaggccagccgcgacagcctgcaagggggacgac

SEQ ID NO: 127224 - DNA, 122 bp, Homo sapiens
aaaactgataccccgtattgagcaagctgttttctgggaaactccgaactgtctcctgcacggttcaggcccggttaccgctgcctgcaacccccgcctcggagccagctgcgcctggagct

SEQ ID NO: 127225 - DNA, 122 bp, Homo sapiens
actcttcaatgacctcttccccagagctgctttcaggtggttgcaactggttacaaaatccgggggcagtcctcactctcagaacaagtctttttcttagcggtgtgttatccctctccaac

SEQ ID NO: 127226 - DNA, 122 bp, Homo sapiens
gtggtggtacgtgcctgtaatccccgctacttggcaggctgaggtgggggattgcttgagcgtggcaggtccaggcttcagtgagcagtgttcatgccactgcactccagcctgagtgacag

SEQ ID NO: 127227 - DNA, 122 bp, Homo sapiens
ttgatgctgggaagctccaccgaggactcaggacagggtaacagcaaagcgggcacaggacgccaaccacagcaggtgagtggaggcaggagccacgggtggggccaggccacacagcctgg

SEQ ID NO: 127228 - DNA, 122 bp, Homo sapiens
ctgaccagcccagattgctccctggattggggagcagtaggtttaaccctagtttgatcccgcctggcattccctctgcacctgctctccctgcagggagtagatgcttctgaccatctctg

SEQ ID NO: 127229 - DNA, 122 bp, Homo sapiens
agggagttgggatgggggttgcaggaagacgatgcgggaccccatcccccaggagtgggtcgaagtcacgggtgtgtccagaagcagccctggtacagggagccaggcgacgctggggcagg

SEQ ID NO: 127230 - DNA, 122 bp, Homo sapiens
gtagcgggtctgccagagagcgtttacctgcgtgaatgcacaaccacacactacgggtcacgtcccacactcattctttccctaggcgggccaggctgtctgcacgcggagacccagagagg

SEQ ID NO: 127231 - DNA, 122 bp, Homo sapiens
ttcctgctcctcagcccggcgcagtggagttgttgctgttgttggtgcgcggtcacagctcggagtgaatggtgtttctgggataccacagcaaccttgacgaggactcaaccatctctcca

SEQ ID NO: 127232 - DNA, 122 bp, Homo sapiens
gtgggtgggcgcagcctctggcgcttcttcgggatcccagctgaccagctgggggtggggcgtggcggagtggccacgtgggccgcgcggagaacgcgccaggctcatcacctggatcatcg

SEQ ID NO: 127233 - DNA, 122 bp, Homo sapiens
tgcctttagcaagtctttgattttcctacacatacactcagggctgtattaacactccaacgaaggtacagtcctcatttcttattttaagatttcttccttctcagctttatcagatttat

SEQ ID NO: 127234 - DNA, 122 bp, Homo sapiens
ctcccctcctaccctggggcgccctcggggtctcactgccgcggaggaagaaggcagcgccgccctcgcctgcagaaacctcattcccgagaaagtgcgggacgagcgtcttgggatgtgga

SEQ ID NO: 127235 - DNA, 122 bp, Homo sapiens
cgccaagatgtggatacaggttcgcaccattgatggctccaagacgtgcaccattgaggacgtgtctcgcaaagccacgattgaggagctgcgcgagcgggtgtgggcgctgttcgacgtgc

SEQ ID NO: 127236 - DNA, 122 bp, Homo sapiens
tgcaaagtctataccggactgcagccgtgtaataagcattgcttccaaatgttttgcaatcgtacagattcgacgagatattgtattatcactaagaggtatagttcttagtttatcagctg

SEQ ID NO: 127237 - DNA, 122 bp, Homo sapiens
cccggcccttgctcctgcgacattgtggggtcagccgaggaatcaaccctcattctgccgcgctgcacccccgcttccgggttccgcgactgcgcgcatgcgctgcagggccctgcgcggct

SEQ ID NO: 127238 - DNA, 122 bp, Homo sapiens
caggagccgccagggaccaaaagtcacgcaaaatccactcaggctgccagagacccgagtcgggtgcttactggatcatggcagtcagtaccgagtctgttggctggttccgaaggttggca

SEQ ID NO: 127239 - DNA, 122 bp, Homo sapiens
ggtgctcgtcctgggcgtacttggccttgaggagaaaatactcatggtgcagaatcacctcgctgtccacatcctccaccagaatccaaaaagcctcggatgaaccatgcacctgccaacag

SEQ ID NO: 127240 - DNA, 122 bp, Homo sapiens
tatctcatatacccatctcctccttttcatttaagtctaatgcaggtccctccctgtctacgtaggactaacacaatagcatctccacagggatcactcatctcaaattcatcctgtgcaac

SEQ ID NO: 127241 - DNA, 122 bp, Homo sapiens
gctgatcacactcgtcaagcttccagttgcaaatgagcaggtgaggaagtgtaaggtgggcgtgtggccctccagagccatggagaagatgctgtctcgagggaagagccggtgcagagact

SEQ ID NO: 127242 - DNA, 122 bp, Homo sapiens
gtgggggtggtatctgcctgaaaggtttggggaactgcccccagtatccccggcttcctacgacaaatctgacaccatgaggacatccatgcccttcatctgttcatatttttagtctcctt

SEQ ID NO: 127243 - DNA, 122 bp, Homo sapiens
cacacggttattaccaggatcagagactgaggcagacatgaagggcgaataaaaaagattcgatctgatgtcagatgagtcatcacatttcctgacagcctagatgtctcttcatgcaagaa

SEQ ID NO: 127244 - DNA, 122 bp, Homo sapiens
gaagccagcattagttagccttaagaggtttcttacacccttatcttttcatagtttaaacgtgcagttaaaagaaaggttgaatgcaaagctacaagagctctgggaaccaggatggtcag

SEQ ID NO: 127245 - DNA, 122 bp, Homo sapiens
gacagataaagacagagcagcctgtctttatcggaggttcctctgccagtaggaggggcccggagaaaaccagaaagagggccagagccagagaaacatgaagcaccccggggcctcccaca

SEQ ID NO: 127246 - DNA, 122 bp, Homo sapiens
tggattactttttgtttacatgccgaaatttgttgggtgacttagtattcttattttccacgaactatcacctaacacctcgagtagggcctccttcaacctttaggagagcaaagaattga

SEQ ID NO: 127247 - DNA, 122 bp, Homo sapiens
aggagccgccgccaccgaaccgggagggaggggaaaagaaaggccactccccagaagcggcgcctgaccgccgcctccgctaccgcggaatccaagatggcggcttcagcagcccccagcat

SEQ ID NO: 127248 - DNA, 122 bp, Homo sapiens
ctgcgggggccaaaactcacgctgcccagccttgaagagctggagaacggagccgggccccgccgaacctgcgctcgcagagaatgttatcttcacagcaacttagcaagccccacagaaca

SEQ ID NO: 127249 - DNA, 122 bp, Homo sapiens
gaagggaagagcagtccaggccattacccccatgaattcatttgacaaatatttattaagcgtctactgcaaacttggcccggtgctggaagctgaagacacaattccagaggcagacaatg

SEQ ID NO: 127250 - DNA, 122 bp, Homo sapiens
tgcaaggaatcaggtgtctgctttttccttcactttccgcaagtttactctgcagttgatcgtcgaaggtggtggaaggtttcattttcccggaaggggcatttggaagtaagtgcaccagc

SEQ ID NO: 127251 - DNA, 122 bp, Homo sapiens
acgccacgcccactggcgccacgccccttcgcgccgcgcgacgcgccgctccatcgcacacgctctctgggccccgccccactcacgacccgcccgcgccacgcccctgagcgcgccagagc

SEQ ID NO: 127252 - DNA, 122 bp, Homo sapiens
tccttcccagcctcccagagccgtagaggcagaggccaggcctttgaggaaccatcaccacgtgtgcggggcccttctatcaccacacagtcttccccaagccttcctggtcccggctgtgt

SEQ ID NO: 127253 - DNA, 122 bp, Homo sapiens
tatccatctgcctgcggccacttggggctgccgaggctccctaggtcattggtcaacactcgcttcttcagggcaggggtgtccaggtccccaggagggttctcctcctgcacccagttccc

SEQ ID NO: 127254 - DNA, 122 bp, Homo sapiens
ggtctgaccacacttgatccaaagcccttcctctgagctctcagctccacgtcacaacctcgtgaccacgtgcctctcactgtcatgtgcttagatatgtgtgtgtgtgtccacctcaccac

SEQ ID NO: 127255 - DNA, 122 bp, Homo sapiens
agggggaccgtggaccctgtaaattcactcggcgcccagcattactggctaaatcaagaccgctcttcagtctgcaagaagagacagagcaagtgttcgttacacaaatcaatttggtccaa

SEQ ID NO: 127256 - DNA, 122 bp, Homo sapiens
cagccgcgcccgggatgcagagagatctaccaacacccgagaatggggacagggcgcatgcgcacaccgtggccgtggcgtctaagtgctcgcccagctgcggcagccgctaggtggcgcat

SEQ ID NO: 127257 - DNA, 122 bp, Homo sapiens
aagcctctctttattcattaagtcactggtgacaaggactaaaacacttagcacactcagcgacatgtaagatcagtgttgaggagggattagagcaggcccctgagagggccattttcttt

SEQ ID NO: 127258 - DNA, 122 bp, Homo sapiens
ttctccatctcctggatggtctcgatcagctcccggttgagcttgctgaggaagttctcacggcttcggagctctcgcagagcggccctcccgctcctgagcgaggtctgcgggcggaggga

SEQ ID NO: 127259 - DNA, 122 bp, Homo sapiens
gcaccggattccccgcggcggcaaggcgaagccagggtaagggcggtggggacggcgccccggggctgccctgcggtccccactgcctgctctgcgttgccccgtagcctcctcgggcaacg

SEQ ID NO: 127260 - DNA, 122 bp, Homo sapiens
cggcagtggcaggttcaatggggaggtggtttttaaaaacctcctgcttatcgatttctgcgtggtgagggaaacttcagccggcctttccgtggagagaagctgaaaaccgaccctgcttt

SEQ ID NO: 127261 - DNA, 122 bp, Homo sapiens
gtccgcgctgcgccccgggtggccccgccgccagcaagcgacctggcggctgtgtcctgccgcctcctccgcgaagcccctgattgcccagcccgctcagacccaggcccagactctcactc

SEQ ID NO: 127262 - DNA, 122 bp, Homo sapiens
acggaagtacttgctaatcaagaatttgattgacttttattaagctattgaccaaaactacgttaggcttgcataataaagggctgagtaaaacacatggtctctgctacaggggacacatc

SEQ ID NO: 127263 - DNA, 122 bp, Homo sapiens
ggggggctgatcggcgctaccggattggacaacttggcatggggcggggcctctgggaggcgtggcctccggccggctcctctgctgttgccaagggaaactgccgcgaggaggcggaagga

SEQ ID NO: 127264 - DNA, 122 bp, Homo sapiens
ttagccagcttggttcacaaccctgcagctattctgacagttaccttttgcttagccatgcgaaactactgcctggaattttctgttctcttgtgaccaccctgtgttattcctgtctcaac

SEQ ID NO: 127265 - DNA, 122 bp, Homo sapiens
ctatatctaaggaccgtggggttctgtatctcaggaccgtgggggtccatatctagggaccgtgggggtccatatctagggaccgtggggggtccatatgtcgggaccgtgggggtgtctat

SEQ ID NO: 127266 - DNA, 122 bp, Homo sapiens
cattgagctccttcaccagcaccaggaaggcaccgctgatgagagcgaagatgagcgaggcgatgttggtgtgggggaggtttttgcaaatgtcaatgaaggtctgggggaaagagcatcat

SEQ ID NO: 127267 - DNA, 122 bp, Homo sapiens
cctctctccctgctcgacttcccagctgctggtgtcccagtgtgtgtagagtcaggaaaacgatgtgaaattggcccgtcccctgtggagacccctggtgtcaggtgtgtgtagagtgtggg

SEQ ID NO: 127268 - DNA, 122 bp, Homo sapiens
actcactagtattaacccaaattatccaaccaggaactcggagcagagactccgagagcgcgagacactggagagggagcgtgcgaggaaaggaggaggggagggggaggatacggaaagaa

SEQ ID NO: 127269 - DNA, 122 bp, Homo sapiens
ttacaactttggaagaagacatgcaatatagaaaatacacaggaaatagaataggatggtcgcctacagtggggagaagataagaggatgttataaaaataataaaacaaaacgaaacaaaa

SEQ ID NO: 127270 - DNA, 122 bp, Homo sapiens
atgaagttgaacttggctgagtcaatttaaacagttccaagggggctccttcatcttcagcgaagggtgttctatctctggtggctaatatagttttcaaatgtatgctattcgtatttcta

SEQ ID NO: 127271 - DNA, 122 bp, Homo sapiens
tccccgcgccggaaggggcgcgcgacctcccgcgtcacctccgcagccgcgtcacctcctcgcgggctctgcctgggccctccaatcctaggccctctcgcggagtcccaatcacaggcccg

SEQ ID NO: 127272 - DNA, 122 bp, Homo sapiens
cacacaggccgaactctcctggcgggacactagcccgtccgcgccaaaacctagcggggacgcgctcagagggccgagaaggcgcctcgaatcacaaaggagcttctctcacgcacacgttg

SEQ ID NO: 127273 - DNA, 122 bp, Homo sapiens
gggttggggatggttgcgtggcctgagccaaacccatcagagccctcccagggcttctgccgaaatgcagggaaggagacaccctctgttactggagcttgctggcccccgaggggacctct

SEQ ID NO: 127274 - DNA, 122 bp, Homo sapiens
tgcgagcgacggagggcgaggcggggtggggggttgggagggcatgtgttccggccccgccgaggcttaagttccatgcgttcgattcctcgcttgccgctgccgcccgcagccctcatctc

SEQ ID NO: 127275 - DNA, 122 bp, Homo sapiens
gtggttgatttcaggactggttgatgagcctagagctgataagatgacagatataagaaacggatcaaaaagggacagggacaggtccattgggcacagacgccaacctgaaagaaccccca

SEQ ID NO: 127276 - DNA, 122 bp, Homo sapiens
cccagcgtcgggggcaaaaagccgcggctgccggggcaaaaagcagcggaggcaaaaacccgcggcggtggctgcaaaaagcagcggcggcaaaaagccggggcggcgggggcaaaatagtg

SEQ ID NO: 127277 - DNA, 122 bp, Homo sapiens
aaccggccttgtggaatttgcaagaaacctgaccgctcttggtttgaatctggtcgcttccggagggactgcaaaagctctcagggatgctggtctggcagtcaggtaaggcatagctagtt

SEQ ID NO: 127278 - DNA, 122 bp, Homo sapiens
cagcggctgccgtggaggtagtccagtgtgctggagctgcgccagagcgggggtgggggccggcgctgagacgcggtgctagctggaggcggttcctgtccggggtgtgcgtccgcgtgcag

SEQ ID NO: 127279 - DNA, 122 bp, Homo sapiens
tattccgtctacctttgctgtgtcccctggttgtggcatacacacgtgtgggtataaaatcgtaaatcctatgtagtcgcgtagtgcatgcgcagaaggcttagacacgaaatgtcatttca

SEQ ID NO: 127280 - DNA, 122 bp, Homo sapiens
cagcttctggctctgcttagccaattatggaacagacagaatgtacttggctgccccaaacggctaaagggcagttctgttcccaaaatggaattctgttgtgcctcaagctaggcagcata

SEQ ID NO: 127281 - DNA, 122 bp, Homo sapiens
accacttgctgagccttcctcaagaccaggcacctcggcagagatttcagggttgtcaggcggaaccaagcattcaagggtaataactcgttggggtccctgaaatccctgatgaacacacc

SEQ ID NO: 127282 - DNA, 122 bp, Homo sapiens
atgggccaccaacaaactcacctatgctacatacctgctccccaccgcccccacctcactcgtaaagtatggggaaaagaaagcaaaagccctttccgacctggtcttcttctgcgcctctt

SEQ ID NO: 127283 - DNA, 122 bp, Homo sapiens
gagggcacgcggggctccgcttaccttccgctgcttacagataagtcgaggtcgatgcagcgcctggctcgggcatgtctcgctgcggaccctggcaagcctggggcggcacggagcactcc

SEQ ID NO: 127284 - DNA, 122 bp, Homo sapiens
gcgatgggccgggcttgtcctgcggagactgtcgccaaggcaggaagtggaacacaagtacgtgggctccttgagcaaagtgctgttaaacagatgggacactctagatgcattagttaaag

SEQ ID NO: 127285 - DNA, 122 bp, Homo sapiens
tgttggggttcacctgtgttggggttcgctgtgtgttggggtctgccgcgtgatggggttcgctgtgtgttggggtttgccgtgtgtttactgagtccagtgtttctgttctctgctcactg

SEQ ID NO: 127286 - DNA, 122 bp, Homo sapiens
aaaggcaaagcaaacagcaactccaacaggtcccaagttggtgagagctgcaggagaggacgctgtggggggacagtgggcaggactcacctcccgcagcagctgcatccccttgagctcct

SEQ ID NO: 127287 - DNA, 122 bp, Homo sapiens
agatcatcacaaagagggtgcctcctgcttccggcccatggcagagtgtgtccgagaggccgcctctcacctccctccctggcctcgcacacgcagtcgggactggatttctgatggcaatt

SEQ ID NO: 127288 - DNA, 122 bp, Homo sapiens
cgccgccgggtcccgggcggcctgccgtgacagcggcagtgcattgtggggcttgtagtgcgggactgggtctgggtgggtgggcgcggccgcagcagtcgcagcggggccatcttcggcgg

SEQ ID NO: 127289 - DNA, 122 bp, Homo sapiens
aaagaaaaaaaatcaaaacaaacaaataaataaccccaaagagatggacccaggggagaacgcgtaagtgtgaggggcatgagtatacacgagtgtgcgtgtctttccctctcccttatttg

SEQ ID NO: 127290 - DNA, 122 bp, Homo sapiens
cctacaacagtgattggtacacacgaggtaaccaacaaatatctgctgaatgtaaaattccgctttaggaatccaaattgttacatatttcacagcttcttgaaccctaaatgtaacagtaa

SEQ ID NO: 127291 - DNA, 122 bp, Homo sapiens
tggaacaaggaaatggatttcaaaagcactacctatgtggccagggcgagtaaactggggcgataaagcttacacaactgagttatgagtcctaaatgagataacaagaaaagcagagcatg

SEQ ID NO: 127292 - DNA, 122 bp, Homo sapiens
tttatgtcaatatatctgttcactttttttttctttttttgagatggagtctccgcctgtcgccaggctggagtgcagtggcgccatcttggctcactgcaacctctgcctcccggattcaa

SEQ ID NO: 127293 - DNA, 122 bp, Homo sapiens
tatgtgtctgcacgtgtttctgcatgtgtgtgtttgcacccgtgtgagctcctttgccaacgcactcatatttgtttccatgtgcacgtgtgtgtatgtgcttatgtgcatgtgtgcagtgt

SEQ ID NO: 127294 - DNA, 122 bp, Homo sapiens
cccggagcgcggagctggtgaggaggactccggcccggacccacgggcgctgtgggacctcgtcagccgctcggcccgcgtcgcggcgttgggcctcgggtgtcggcggtgcgggcggccaa

SEQ ID NO: 127295 - DNA, 122 bp, Homo sapiens
gagcggggccggcaccctaggggacgcgaagcccgggaaggggcgtgtctgagcaccgagcgcccgctgtgcggatgtccgggccgtaacccgagccgggcgcgtccacgtcgtcctcgttg

SEQ ID NO: 127296 - DNA, 122 bp, Homo sapiens
aatctcctcaggcaacagggatcaggaatctctccctgccacggcccatactgtaggctgcggaggatatgggcgtatgtcggagtgcctgctttttcagggtggctggtttgtcggccaca

SEQ ID NO: 127297 - DNA, 122 bp, Homo sapiens
gtctgctgggtctgggagcactgggctccaccctctccgaacgaacacctggcggttgggcgtgcctcagtttcccggaggcggggcattcctccgtcgccgccccccacctcccctttttc

SEQ ID NO: 127298 - DNA, 122 bp, Homo sapiens
ccagactggtattgaactcttaggctcaagcaaccctcccaccttggcttatcaaagtgccgggattacaggtgccactgtgcctggcctcattgtatttttctttttcttttttttgagac

SEQ ID NO: 127299 - DNA, 122 bp, Homo sapiens
gacccacagcctcttcaggcacgagggtgacgtgtgacctcagggcacaagggtgacgcacggcctctccaagcatgagggtgacgtgtgatctccaggcatgagagtgacgcgtggcctct

SEQ ID NO: 127300 - DNA, 122 bp, Homo sapiens
gggtcccgagtctcacgccaacgtctcccagagctacacgggtcccgagtctcatgccaacgtctcccagagctacacagttcctgagtctcatgccaacgtctcccagagctacgcgggtc

SEQ ID NO: 127301 - DNA, 122 bp, Homo sapiens
gggcagggctgcctgagcgggggcacctttgaattctgggagtccaggcctggagccggccggacgctggcctgcagtagggacagcagaggtggccaaggcccctctctcctcacagcctc

SEQ ID NO: 127302 - DNA, 122 bp, Homo sapiens
cggactcggacgtctttgtgccttatggctacctctaccccagaagccaccccggcgacccgccctcaggcctggccccgccactgtccaggaaacaggggctggtggcatgggtggtgagc

SEQ ID NO: 127303 - DNA, 122 bp, Homo sapiens
cagcctcactcatttgtctacacattgtctaggactgcttgtgtgacaagggcagagttgcgtaggtgccacagagaccacatggctggcaaagcctaaatacttattacctgggccaggcg

SEQ ID NO: 127304 - DNA, 122 bp, Homo sapiens
gtcacatattactgcccatcctggtggtagggggtgttgctgtgagctccctgggagctacgtctacagatagttcctgatgaggcagacaatggtggcctaagcaaagttcaaccagaagg

SEQ ID NO: 127305 - DNA, 122 bp, Homo sapiens
gtcgccccgcggcggccagaggtcccagcgtcccaggctcggccattccggtgccccccacgcccagtctgcggctgtgcccgcgtccctagttttccgccggttacccccacgggcgcgcg

SEQ ID NO: 127306 - DNA, 122 bp, Homo sapiens
ccaagatgactgagacaatcagagaggatttggggtgtggggacttcaaattaataaatccggtattagctttgtggaattagcaggattagggtacctctttcaagaacactggttgaatt

SEQ ID NO: 127307 - DNA, 122 bp, Homo sapiens
catcacaggaacatggaaagagagtcagcaaagagacaagacatccccaccagggacagccgagccagctgagccagagggggcaaaagaccacaggcacaaccagagggagccaagcatcc

SEQ ID NO: 127308 - DNA, 122 bp, Homo sapiens
gactgcttccgaggtcatgttcccaggacgggcgcgtcttcagggtggaagcctggcgcacgtccggaggtgccgaggacccaaccagcccaaactctgggggaaatgactcccctctgccc

SEQ ID NO: 127309 - DNA, 122 bp, Homo sapiens
ttccaatcatggcggaaggcgaaggggagcaggcgactgacatggcgggagagggagcggcggcggggggcgcatttttaaacaaccagatctcatgacaactcactactgtgagggatcca

SEQ ID NO: 127310 - DNA, 122 bp, Homo sapiens
gcctcggtccccgcggaaagctactccgcgcgtctggattggtcgcgaacgcggcttccccgcccatcccgccattaggagcgctcccattggctgatgttggcgcgaaggtgcgcgagtca

SEQ ID NO: 127311 - DNA, 122 bp, Homo sapiens
aggcctgggaagggcaaggtccagtgggacccctggggactatcccaggatgggttagggcgtgggggctggaccagggaaggatgaggacagcgctagtggtggtccccctccccctctct

SEQ ID NO: 127312 - DNA, 122 bp, Homo sapiens
ggactggatccgacgggtggagcagccaggtgagccccgaaaggtggggcggggcaggggcgctcccagccccaccccgggatctggtgacgctggggctggaatttgacaccggacggctg

SEQ ID NO: 127313 - DNA, 122 bp, Homo sapiens
tcagaagaggggcagctagtccaggccaggcgccccaggatggggtagtggctcagaggtcgcggggtgctggagctgatggaggaatccttccgcacacgcccgcggcccctccgctcccg

SEQ ID NO: 127314 - DNA, 122 bp, Homo sapiens
cagaagaagagacacaggccctgggcccccaaagacaaggccatctgaaggacagggttacgagtttatttcttggtgcctccaagagctcatggaaaagcagcacagtgagcaacaagcaa

SEQ ID NO: 127315 - DNA, 122 bp, Homo sapiens
tttaagagggagcgctctccgccgtgacagggaccggggtaataaggagagcttgattaacgtggtgcacttgggggagagatgagaggcttcacgtggtcctgttcgggggaggcaatgag

SEQ ID NO: 127316 - DNA, 122 bp, Homo sapiens
catttgctgctggtattttgggaactcacccactgcacaaagcgagacaccttggttggccggtgggccaggtccccagagtttggtgatcatggctgagagatggactgtgcacctatttg

SEQ ID NO: 127317 - DNA, 122 bp, Homo sapiens
caaggcagatccgaaagcctagtagttagttgcactgggttgttttgacaagctaccacacgtcttaagtaaatagtaaagcctttatttttgtgttaagaacagcattttgaaaataaaac

SEQ ID NO: 127318 - DNA, 122 bp, Homo sapiens
caatacctgacccaaaccaggtcagattctctaatcctggactttagaattgtgatctgacggcaggtaaggccagctctaagagtagctcagtctttagcacttaaatttgagaactagtg

SEQ ID NO: 127319 - DNA, 122 bp, Homo sapiens
taaacccggggaagagagaggctcctcctcccagctccctgcgttctcatgctttcggaccgtagttttgttgagagggccaataaatgacatagaatatcaagtcccacacttttggggtt

SEQ ID NO: 127320 - DNA, 122 bp, Homo sapiens
aatagagttgaggtaaaacaatgaaaacggaaatttatcttttgaatcaccaacttctttcgcctcagttcctttaccaagtaaaagaaggaccatatacaggcagagggggaaatgtggag

SEQ ID NO: 127321 - DNA, 122 bp, Homo sapiens
agtttctttattgtcttcccaacgtccccccacacacactgcactaaaatgcaaacttcacgaaggcaaggaggaacttttgcctgtattgttcacctcagtgtccccagagcctaggtcag

SEQ ID NO: 127322 - DNA, 122 bp, Homo sapiens
taagaacggttggaatgatgcatgatggtctgattgcgtttagcgttctgttcctcttcccgtagatcccaactgggccagtttgaacttgggagccctcatgtgcatcgaatgctcaggga

SEQ ID NO: 127323 - DNA, 122 bp, Homo sapiens
cttggctcacgatcggtttggcacttcgcgttcctaggccacaggacgtcgaacctcgggcgacagcagcctcccgctagggggctcccgacttcccacggaggttccacctgtactgcgca

SEQ ID NO: 127324 - DNA, 122 bp, Homo sapiens
ggtccttgagaggtacatttctggattataaagttaccaagtggctactaaaaagatttacgcctcacaggagtagagaaagaattacaagccgggcacagtggctcacgcctgtaattcca

SEQ ID NO: 127325 - DNA, 122 bp, Homo sapiens
ccatatggattaaatgtccctgacgttacgtatggttttaaaaattagaaggaaatgtaccgggaatatacacatgtataaaatatgtaaagccaggccacatttttagctttgtggacatg

SEQ ID NO: 127326 - DNA, 122 bp, Homo sapiens
gcctcattcatttcactcgcgcgggcttctgggccaggcggcctaaggttctggtcccggcgctgccccttactccgtgtgaggttttgggcagattgtccttctttgtgctgtagtttccc

SEQ ID NO: 127327 - DNA, 122 bp, Homo sapiens
gagagactgcgctgaccgggtctgagggaagctttgccaacagcctggcccgtgactgatcggaattgcctaatctgaattccagaccctgcgacatttccccaaatcttgctgtgattgct

SEQ ID NO: 127328 - DNA, 122 bp, Homo sapiens
taagcccctcactgcctggggccagtggcgcccgccggccgctcccagtgctgggccctccgagcccatgcccaccctgaactcgcactggtctgcgagtgccgtgcacagccccggctccc

SEQ ID NO: 127329 - DNA, 122 bp, Homo sapiens
gactttttgtaaaaggtatgatacagttacaacaaagagtgaaatccttcctgagaggcacgccttgcttagatgcacatgccagaaccgatgatgatgctgttccccaagcagttcttgat

SEQ ID NO: 127330 - DNA, 122 bp, Homo sapiens
ggcggggggggacagcaagtgcgtaagcagccccagctcccggcctgcctccggaaatgccgcccagggctcagtcacgaacctagccaggcaggggggcacagccagagcactcaggggtg

SEQ ID NO: 127331 - DNA, 122 bp, Homo sapiens
gtgaacatgggggagtttccgtttaaacgactgagtctccctcactgcaaaggacaatgtcgctggatcccacgtgttaaacgactgcgtctccctcactgcaaaggacaatgtcgctggat

SEQ ID NO: 127332 - DNA, 122 bp, Homo sapiens
ctggcctgggagctctgcagtgccttctgctggaagtgccagccgtgtccgccctgcactcgctcccagcacagggcagaggcggtcgcagagctgcatgatctacttttaagttctgtgaa

SEQ ID NO: 127333 - DNA, 122 bp, Homo sapiens
ctctgcgctgcagcctccacctcctcttcttcctcctcgtcatcctcctcctcctcctcccgatccgacagagcccggccatcctcgctccgagcagcgggcaacttctttcccttcaccag

SEQ ID NO: 127334 - DNA, 122 bp, Homo sapiens
ctgtcctaatccgtgaggcaaagctgcccttttgcctgcattcggtgacttttacgaattcgttgggagctagtcttagcagtagtgattttggataatttatgtctgaaatgtgcaaaaat

SEQ ID NO: 127335 - DNA, 122 bp, Homo sapiens
tcccttttactaactagggagactgtgaatattcccaagcccagcaccacgtgcacacgccgccagctggctcgcgcgttttccacggagccctctggaggggagggagcgcggttcggact

SEQ ID NO: 127336 - DNA, 122 bp, Homo sapiens
ccagggtgctggaccataggtcagccacctcaagaggaggatgagtactgtgtggagatgcgtgtggtgttaggcagaggccatgggactctcagccaggtctggaagctgccacttctggt

SEQ ID NO: 127337 - DNA, 122 bp, Homo sapiens
gaggagcttccagtctaagggagcccgagttcacagagagggtcccctaggacactggcacggcatcctgctggccaggaaagggaactgctgctcctccagagaggataggtgggtttgtt

SEQ ID NO: 127338 - DNA, 122 bp, Homo sapiens
ctcccgcgctgccttttgcctccgttgcaacagcctccggtgaaaaatgtgtctgtgagccgctgagggagggatggccagcgggcagcagggggcgccgggggccagcgcgactgactgca

SEQ ID NO: 127339 - DNA, 122 bp, Homo sapiens
tcttgaagggagctgcagaggccctaaagaaacagagataacggctgtaggcagaggccacgttatccaaacctcaccagcccggtctgacccgccgagtcgccaacctccttcctaaggcc

SEQ ID NO: 127340 - DNA, 122 bp, Homo sapiens
aaagtcaagaggcctgaggtgtactccagactctgccctgaactcagtatctcttctttccggggcttcctttctataaaatgggggaatgagggtagctttctttcttttttttttttttc

SEQ ID NO: 127341 - DNA, 122 bp, Homo sapiens
cagcaaggggcgggtgacgtaagcaggggggcgggtcccgggcatataaatacaggctggcgggtctgtgcttcattcataagactcagagctacggccacggcagggacacgcggaaccaa

SEQ ID NO: 127342 - DNA, 122 bp, Homo sapiens
gcgggaaccccagcttctgcgcgcccggccgcgccccgggcctctgccccgcctcgctcccgctgcccggcgcctttgtccgctctgcgcccctggagtttctgtgcctccacgggcgggag

SEQ ID NO: 127343 - DNA, 122 bp, Homo sapiens
ctgcgcggcgagaggtggcctgggaatggccgggccgggggtgggccggagccgctgtggcggcggcggcggctgggggcggtgagcgcggcgtggggctgcccctccccggaggcggcggg

SEQ ID NO: 127344 - DNA, 122 bp, Homo sapiens
gctggtgggggtattggcagggggatcaatcagtcaggaggctggcctcacctggacccccgaccttccagggtccccgagccccgctcaccggcttgctattcccccgggtaggggggggg

SEQ ID NO: 127345 - DNA, 122 bp, Homo sapiens
gtgcttcactgggggacagaaaaataaatatggtcatccctatgatggagtatgatagagcgaagtgaagcttttgtagtgacatggaaaaatgtccaagatgtattattaagatattgttt

SEQ ID NO: 127346 - DNA, 122 bp, Homo sapiens
tcatctctttaaggagggtttatccgaagctgctctgggtcctcggtgttaaaacacgggcggtgatgtcattggcaaccaatcaaaaacttaaaagagccagccggggccgcgcggagcag

SEQ ID NO: 127347 - DNA, 122 bp, Homo sapiens
ggccgctgtgcgcgcagcccgagtgcccgaggctgcacccgcgctgcatccacgtcgacacgagccagtgctgcccgcagtgcaaggagaggaagaactactgcgagttccggggcaagacc

SEQ ID NO: 127348 - DNA, 122 bp, Homo sapiens
cggtgatctgcgccgtgggtctggcgggcaactccgccgtgctgtacgtgttgctgcgggcgccccgcatgaagaccgtcaccaacctgttcatcctcaacctggccatcgccgacgagctc

SEQ ID NO: 127349 - DNA, 122 bp, Homo sapiens
atggccaaggtgagaagatcgcttcaactcaggagtttgaaactggcccgggcaacatagcgaggccccccccccgaccccatctctagaaaaaaatacaaaaattaggccaggtgcccacc

SEQ ID NO: 127350 - DNA, 122 bp, Homo sapiens
tccctgctctggcagccgcatgaagacacaccgagcgagacacactgctgagcgtatctgcgtatttcagcatttgtcagctaaccgtgtctccatggttagcattttaagtaccaagaccg

SEQ ID NO: 127351 - DNA, 122 bp, Homo sapiens
taagaaaattcgcctgcaatttgggattagataaatactctaattaggaaaaaaaaaatccgtgctacttgatacctcccaacttccccgagaatggtggcagcatctggaaccgagagcgc

SEQ ID NO: 127352 - DNA, 122 bp, Homo sapiens
cgggccgcggctgccaatcagggcaggagcggagcttacctgcagcggggcggggggcaacggcgctccggggccgggaacgggggcctcccctgtgcctagggaacagcgagggcgaggtg

SEQ ID NO: 127353 - DNA, 122 bp, Homo sapiens
ccccgacccccaaaacatccttccgtcttcaggtctcagctcagacagctcctagtcttccgggatgatcttcctaccaaggtctcctcgggttcccaccgcgttccatgccgcctccatta

SEQ ID NO: 127354 - DNA, 122 bp, Homo sapiens
tcaggtggggcagagtccacagaaggcccactgcactcgctacctgggcagtaggggagccgcccaagccgggcctccgacgtcccctggttggagggcgagtggttcaggctcactcccga

SEQ ID NO: 127355 - DNA, 122 bp, Homo sapiens
gaactggaaagaatgaagcattttaaataggagggggtagaaagtggactgcttccaaaacgctggtgggctcgcgtttactctggattctggtcatttgcattcctatcttaacctctccc

SEQ ID NO: 127356 - DNA, 122 bp, Homo sapiens
gatttcttaagtttggcttttctggcccgtctaggcaggcatacatgcacttcacccatccgcacagctccccactgttctaccccacctctctgctacagccactctgaaaacaccccagt

SEQ ID NO: 127357 - DNA, 122 bp, Homo sapiens
agtctctcctcattaccccagcttatctctcttttaacctttatgggtaagggtggggtccgcagtttatgaggctaattccctaggcactacctaggtttccctgctacaggcttcaactt

SEQ ID NO: 127358 - DNA, 122 bp, Homo sapiens
tctattccaagatttcattattattttatagttctcgaacacaccaagagtgctgcccggcggtacctcacacattctgcaactaactaaaacaaagaaaggcagaggcagctctactttaa

SEQ ID NO: 127359 - DNA, 122 bp, Homo sapiens
acagggccaacctgactcaacacaagggctgcttgtccccagcctgtgggcagtgccacacggcaggctaggggaggggtgaagcagcaggaccatgccctgggcctggaggggcagagggg

SEQ ID NO: 127360 - DNA, 122 bp, Homo sapiens
acccaggcagccccagggccagggtgccgcccctctcctcccctactatcaggcatcaagcggggggacaagcgaactcaggaatacatcccagcctcccggtaagggccccagaggcaggt

SEQ ID NO: 127361 - DNA, 122 bp, Homo sapiens
tggggcttatcttgaagttccccttggtgagggagggcttcccaggctctgactcagtgacgccagcactgaaatcagagaggcctgcatggcagccttctgccttggcatgcccagcctcc

SEQ ID NO: 127362 - DNA, 122 bp, Homo sapiens
gttagttacaatcagagttgctgctatatgaccaattattaggcaaccactaaccaatcacgttgtagaagaaagtgttccgaatatattgctaagtttaaaaagcaggctacaaaatacaa

SEQ ID NO: 127363 - DNA, 122 bp, Homo sapiens
attcggaccagcgaggcagccttctgaggcgaaacttccccttccggcgaccgcggacgacgtgaccagaagtcccgccgcttaaagggtaagcgccgattttaccgcccggccgaggctcg

SEQ ID NO: 127364 - DNA, 122 bp, Homo sapiens
cgatcagccctgccgcctgtacctgggtttgtgctggccttggacgggttgatggtgctccgtcctttgtacttgggcttcaccatcttggcgacgagaccgggaccggagtgcgaggtccg

SEQ ID NO: 127365 - DNA, 122 bp, Homo sapiens
ttagtcccgggcaaggtgttgcggccggcgccattttctcgagccgcctgtttcgggtgccgccatgttggtgaggagaaatcaccgttacggccactgtccaaatccccgcgtcgctgcac

SEQ ID NO: 127366 - DNA, 122 bp, Homo sapiens
gcgcatgcgccatacgcctgcgcagaatcgagtgagtgggagactagtcaaaaaggctgacgtcatcgcacatgttctggtcatgtctgtgtgggggagaccacggattcggtgcttttcgt

SEQ ID NO: 127367 - DNA, 122 bp, Homo sapiens
ctgttgagttcaagaaaaatgaccaattcatctaaaaccccgagctggcagatgctctcccgcgcggcggcggctgacgtcagtgctactttcagcgtctttggtgcagtcttggtgttcgc

SEQ ID NO: 127368 - DNA, 122 bp, Homo sapiens
gggtctcccgccagccgcccacaagtccctggaaacgtctaagcatctgcgccccaccttcggggactcggctacaatctaagctgagtgcccatgcatggaggacccagctcttctgcctc

SEQ ID NO: 127369 - DNA, 122 bp, Homo sapiens
caggcctgctcgttggcctgctcctagtgcctggacccagttgggggaggcgaaacagggcgcccgaggagcaccccgggagagggcggagcactcccgtgccccggggcaggagtgcaggg

SEQ ID NO: 127370 - DNA, 122 bp, Homo sapiens
cagaatattatttacagatctcaacctaagggaagccagctgggggaatatttgtttgcacggctccccttcccccagactccctcccaaatctctaaataaacttttctattgattctgga

SEQ ID NO: 127371 - DNA, 122 bp, Homo sapiens
gcctgggggaagtccagagcctaccccttccccaaagcggggctatgggcccagggagttcgcgtttccaccaacgccttgtccagtgaccttgaacaagtcctgacccttctctctccgcc

SEQ ID NO: 127372 - DNA, 122 bp, Homo sapiens
acagaccttgaggagggggctcccatttgggatcagggcccccagcacatcccacctctccgtccttcagccaaatgggaacgcaaatgtgtgtccccatcagcccccgccgcccccctcct

SEQ ID NO: 127373 - DNA, 122 bp, Homo sapiens
ggagggcgccagcccgcctaccctggagagtctgcccgagcaacgtaaggcgggcaggggcgggggccagatacctgctctccccagaccgccctgggccccggggctgccagggctgcagt

SEQ ID NO: 127374 - DNA, 122 bp, Homo sapiens
agccagggctgcatgtggtgctcgcgggccaacacaggttcccggtgggtgcaggctccacgagccccactctcagtgcgtcctgccggtgcctgctgggctagatcagggaatgagcttgc

SEQ ID NO: 127375 - DNA, 122 bp, Homo sapiens
atgcactgagtcggggcctccagagccgcagtgcagggcagtcgagggtccgctgcagggcggaggtcacagccgcgcaagtcgtcagtctccggtgcagggctgccgctgagtcttcaaga

SEQ ID NO: 127376 - DNA, 122 bp, Homo sapiens
gtgcagggagtcctgcttattaaagcttaaagagaagcctccccaaccctcccacccatccgtctcacagttctgaggggattgggactcagggatgggctacccaccccactctgtgtgtg

SEQ ID NO: 127377 - DNA, 122 bp, Homo sapiens
gggtaaggagtcaccatactgatattcccgcggctaatggtacttcacagagcgaagtgccggagcccgtcgccggcgattgcgcattccgtcgcggagagcattatgggattggtagtcca

SEQ ID NO: 127378 - DNA, 122 bp, Homo sapiens
cggccaaaaaaaaaaaaaaaaaccaaccccaaacaaaaaccctgtgcccagaattgcattcggctgggagaggtggggatccagcagcaagtccgcaccgagccggctgcgcgcagcgcggg

SEQ ID NO: 127379 - DNA, 122 bp, Homo sapiens
gagcggcagcggcgtcggggggcctcagtggggtgggtctgttcgtgggcggggccttcccggagacggggcctcggtgggactgggtctgttcgggggcggggcctgtttgaaggcgggtc

SEQ ID NO: 127380 - DNA, 122 bp, Homo sapiens
cgcggttccggcatggcggttctgtggcccattgcgcacgcgcattgaggaagccctggacggggcggggccgccctcagtcccgcccgcatccacttgtaaacgaggcgtaccgctgctaa

SEQ ID NO: 127381 - DNA, 122 bp, Homo sapiens
ttctaaccccgccccattttcctccacgcgtaacgctgacgactataaagcgcgccggagcgccagaaaccgtcagggaaactgcccggtttggactgatgatcggaagcaagaaggccctt

SEQ ID NO: 127382 - DNA, 122 bp, Homo sapiens
gtgtggggggaggggattctacatgtcaagtgacatggactcatcacaatgtcagtgtcccggaaaccttaaaaaaaaaaaaagtggtgcttgtgctggctgttctaaagtaaatgagattt

SEQ ID NO: 127383 - DNA, 122 bp, Homo sapiens
atggctgtggacacacctaggtggacctccctttctctcctggctgcctgaggatgtgcacggccctgtggaagtgagctcccctaataaaagcctggactcatcaccccggcgcttcgtgc

SEQ ID NO: 127384 - DNA, 122 bp, Homo sapiens
aggggtgggcctttagttcagttttgctctgtaaatcacctaatatggggagggctgagtcgtccagccgaatgagttgggttaacaccagcgccgcagatcgatgttcccactatccaaac

SEQ ID NO: 127385 - DNA, 122 bp, Homo sapiens
cggagcctcgtctccagcagggcagggggctgcaggagccgttcttagcatctgggcacccgggagggaggggcctgtggggagccagaagtgcgcaagtcaggagacagggcagggctgga

SEQ ID NO: 127386 - DNA, 122 bp, Homo sapiens
gtggggcgggtggccccgtctcccggatagccatcttcatgttttcacgccacggcgaagcgcctccgtggcctcagctcctggcctgcagcacgcaggggatgttcttgtccccgccgggg

SEQ ID NO: 127387 - DNA, 122 bp, Homo sapiens
acttttctccagagcgtcgcggggagcgccccgggctgggcccacggggactgcggaatacggggatgaacttggcttggggcagccagcaccccacggcagatgaacaatcgggagcagat

SEQ ID NO: 127388 - DNA, 122 bp, Homo sapiens
gcagaggactagtccctacaccgaatactccggtggccttgcttgggggctgggttttgacgtgctggaggctgtcctagacttagagattaaaaacagggaagaaccattgctgaaacctt

SEQ ID NO: 127389 - DNA, 122 bp, Homo sapiens
ggagatgggaaaaaggaagacagggctcatggaaagaattgtggggtcaggggacagtggcgggaggagctggctcaccaccctgtggacaaatcaggccttataatttgtgattctgtggc

SEQ ID NO: 127390 - DNA, 122 bp, Homo sapiens
ggtctacgtacacagcggagtgcagtacggcctggtctacatacacaacggagtgctgcacggcctggtctacatacacagtggagtgcagtacggcctggtctacatatacagcggagtgc

SEQ ID NO: 127391 - DNA, 122 bp, Homo sapiens
gcaacaaccacaaatgcagctgcaggccaccaccaaagtagatcccagaacagggacgcccgcctaagacagagggaccacacatacgacgcacaggctagcatcagaatactactgggaaa

SEQ ID NO: 127392 - DNA, 122 bp, Homo sapiens
accatacacaggcctgagttctcattatcctcctcttttcttttttttgagatggagtttcgctcttgttacccaggctggagtgcaatggtgcgatctccgctcactgcaacctccgcctc

SEQ ID NO: 127393 - DNA, 122 bp, Homo sapiens
tgcgcacagctcagaatcccggcccgactgcagtcgggagagcagccgccccctggcagccgagcaccgcgtgctggtttccagcttccccgccagctcctgcgtcagcgtgtcctctctct

SEQ ID NO: 127394 - DNA, 122 bp, Homo sapiens
ctccagggaccggcagagactctccccggacgggtctcgcctccctaagggtctctgcttcgcctgtgagaggaggggttgatgtcctgactctaaggtgtctcggctctctgcgtcctcag

SEQ ID NO: 127395 - DNA, 122 bp, Homo sapiens
gggggaggcaggtcaggaaatgacatcagaggcctgtgctcagggagtgggggtctgagccgggctggggcggcgggggcggcagtgagtggggtgggggcgagcggacctcggcggagcct

SEQ ID NO: 127396 - DNA, 122 bp, Homo sapiens
gcagggaccctgaggcctgtacctttaagagcagcagaatgttctgcactatgcagaggccgtttgtcggatcacgtgacagcacccgcgtgttcccccatcacgtgctcagaggttttccc

SEQ ID NO: 127397 - DNA, 122 bp, Homo sapiens
cctcgctgccctcctcgcagctgtgcttgagtttcaaagggggagaggtttgtgagggaccggcacagggacagccagagccggcaccctccggcccaccgtggcacccctgacgatcgcgg

SEQ ID NO: 127398 - DNA, 122 bp, Homo sapiens
ccactccatgaggtctgcgtgggaccggggaggcagggctgcggtctcagggcaaaggcacgtgtatgaaacatcctctgtgctctggcccttacacacagtgcttcgagaagacgcagagg

SEQ ID NO: 127399 - DNA, 122 bp, Homo sapiens
tcggaagtggctgtggctggactcgggcctccaaagtccgcggccccaagttctccttggcgcagctcggccctcagtcccccgcggccccgagttctccttggcgcagctcggtcctcagt

SEQ ID NO: 127400 - DNA, 122 bp, Homo sapiens
gctgtggaccgcactgaacccagtcccgcagcaagccctgctgccgccttttcctgggcacgcctgcggtggtgacggcccgctgctcatgtctccacgccaaaccccagcccctctcccga

SEQ ID NO: 127401 - DNA, 122 bp, Homo sapiens
ggcattcgggggcaggtacaggagttgcaggcatccatcgtatgctgtccagcgtctgcacgttcccttgtttgctcccagtgggtagagaacccggcattgtgggtaccttattagaactg

SEQ ID NO: 127402 - DNA, 122 bp, Homo sapiens
cagcagccgctttcattaacagctttttcacaccagcgctttcatgggcagcttctctcacgctgtccgctcttatctcagccgtttgctccggctctgcggctcctgtcaccccgacatct

SEQ ID NO: 127403 - DNA, 122 bp, Homo sapiens
cccccgccccgccctcaccaggaacctgacacctactcccaaatcggggtcggggaaaaacgtggggcgagaaccagaacccacccaccttccgcggtgggaattgcagggcgcggctgggt

SEQ ID NO: 127404 - DNA, 122 bp, Homo sapiens
gagactctgtctcaaaaaaaaaaaaaaaagtacctacctcaggtagggactgaataaacacgtgtaaggcactttggaaaaatacctggcatatatagtaagcagtatgttggccattacca

SEQ ID NO: 127405 - DNA, 122 bp, Homo sapiens
ccggaaagcagacttagctcctgatcgttgtcaatctttgggcaacccggggcctcgcaacggctcgggtttagtgtgatctggggaggctgcagcccagttccggctaccgtgggcgcctg

SEQ ID NO: 127406 - DNA, 122 bp, Homo sapiens
tatattctcctacttcctctgcaatttttcacacattgtgtattatgaatacttttgaaacgtgttggaaatggaagaaatctagaattgaattctgatatttattttaacattcatttctt

SEQ ID NO: 127407 - DNA, 122 bp, Homo sapiens
gacagtgtcctctgtgtgccccagagggcctggccaactggttgggttgggatgaggcctcggttttgagcctctgcggtggcaattccagatataccaggaggccgaaactgctcctggag

SEQ ID NO: 127408 - DNA, 122 bp, Homo sapiens
cctgattcgtttctcttgcagggtaaatctggcccttggaactacaacccagaggaagttcgtgctgttctggaaaagctccacagttaatctggacagatacctcaattctaggtgaccaa

SEQ ID NO: 127409 - DNA, 122 bp, Homo sapiens
tttaaagggataggaggggccgggtcggccgaagcccgaaccgaaggagcgggcatgaggcgctgcccgtgccgtgggagcctgaacgaggcggaggccggggcgctgcccgcggcggcccg

SEQ ID NO: 127410 - DNA, 122 bp, Homo sapiens
gggccctctttgctgatggggacactgagacactgagactcactgagatgacaagacttgcggtctcctggcacagatctctttccctctgcctcaaagcccttccatccacccacctccct

SEQ ID NO: 127411 - DNA, 122 bp, Homo sapiens
atttcacagtgttatggtaaacacaggcaaagacaagaaggcaagcacagataagttgatcgtggctcagttctttgaaggagattaataggcttttgtggggatgcagggggagctttctt

SEQ ID NO: 127412 - DNA, 122 bp, Homo sapiens
aaacacccgacgccacagcgcgcgcccctcctccgggtccccgcccggcgcgtccagccccgccagcctctatgggcatgcaacccagccgcgtgcctccctccggctgcaaacacggacca

SEQ ID NO: 127413 - DNA, 122 bp, Homo sapiens
ccgcccccagtccccgcagcccggagcaggatgggcccgggctggactgaggggctggggcgcccgtctgccctgatgggcgcagctgtctgggaccacgcggtgccccgggtcggccccca

SEQ ID NO: 127414 - DNA, 122 bp, Homo sapiens
gaaatgatgactcagctctgggccctgattttcctcttctttgtctaagagatgagtcatcgcctttatgcctttaattttcagacttcaaactcatcccagcaatgtagaggaagctgatg

SEQ ID NO: 127415 - DNA, 122 bp, Homo sapiens
gtacacctacctgttgtcctatctgctttggagactgaagcaggaagattgcttgagccccgaagttcgtgaccagcctgggcaacgtagcaagagcacgcctcaaaatatatttatatgtt

SEQ ID NO: 127416 - DNA, 122 bp, Homo sapiens
ggggcgctgtctggtcggcccggtgtggctggcggcgtgcgggtgctcgcggtctcctgccgggctccccgcccccaggattctgcaggtgctcatcgctctctggccggcggtcagcgcta

SEQ ID NO: 127417 - DNA, 122 bp, Homo sapiens
aaagccccgtctttcccttcactgaatttctgcctctaccacacaattagcactaatgtacgtggacatgccccctagaggctgagcttgcgtgaagggacccaggcacttctggagagatg

SEQ ID NO: 127418 - DNA, 122 bp, Homo sapiens
aagggggaagccccacacatgttcacacaatcggatccgtggagaactcactcatcagcacgagaacagcaagggaactccgcccccatgatccaatcacctcccaccaggcccctttcccg

SEQ ID NO: 127419 - DNA, 122 bp, Homo sapiens
gctccccttccatctgaaactttcttctctccagctctgcagtctttgaccgtggcgatccggcaccctcggcccggctgcttttgcaaagtccacactgattcattatttcagagagccaa

SEQ ID NO: 127420 - DNA, 122 bp, Homo sapiens
actcatcagccagtgcaggaacttggccaggatctcctcacgcagacggtgctctgcggccggaacacagccaaccccttaaacgagaaggacatgccacatccagatcaccgagggcctgg

SEQ ID NO: 127421 - DNA, 122 bp, Homo sapiens
catggaggagaagcgcaaaagccgcgaggcggaggagctgggccagcaggcggggactaacggcggcccggaccagggcagcgtcaagaagagcagcggcagcaaaggcactaagaagttcc

SEQ ID NO: 127422 - DNA, 122 bp, Homo sapiens
tgcagttcggactcctgggcttagatgccccatcccgttcagatgcaaatgtgctgggttcgggttgagtgtgaggaatccacctccccacccccaccccggcccacgccttccttccccga

SEQ ID NO: 127423 - DNA, 122 bp, Homo sapiens
ggatttgctcacgtgtcaggagttgatgggatgctgcccgtcggccttgactgataagaacgccaggaaacaagaagccgccgtttcccaggcagctgggaagggggagtggacagtagtct

SEQ ID NO: 127424 - DNA, 122 bp, Homo sapiens
ggttcacatgtggcacattctctcctggggcctgtcctgcaggactgcccctgagcagatcggcctcttcccgggcgcccggtgggcccctcgaccccctttgaggcagggagtgagataac

SEQ ID NO: 127425 - DNA, 122 bp, Homo sapiens
ctcaggcctgcagagctccagagctccggaacgagagagccaggacacaagcgtgcagcccgcgatcgcccaggatggccggtggccctggctgcaagcctcacctttcccttggcccactg

SEQ ID NO: 127426 - DNA, 122 bp, Homo sapiens
acttcgtctaaaaattgtaatatatctatatgaaacaaactttaaaacattgctgaagaacgccgaaaggacttgggtaaatggaaaggcatacccttctttgataggaagctctcttttaa

SEQ ID NO: 127427 - DNA, 122 bp, Homo sapiens
acccgggcgcgagccccgcgtgcaggcgccgggcctgggcccctgtggccgtcccgccagcggccgtcttctgtccctgcatttagagaagggggatggcaaagggacccgccagcggatcc

SEQ ID NO: 127428 - DNA, 122 bp, Homo sapiens
gcctctgagtggccctccatgaaaatgcctcatgtctctgtgtccctaaactgtagggtacgtagcacattggtagatacttagtaaatgttttgctgaagaattcaagtttttaaattgcc

SEQ ID NO: 127429 - DNA, 122 bp, Homo sapiens
tggtattgatgtgcattatcttttacaactattatctccattttacagatcaggacataacggtatagagaaattagacagaggaccagttttccaacagagtgctatgtagcttccactaa

SEQ ID NO: 127430 - DNA, 122 bp, Homo sapiens
agggagtgcgacaaggcctgtggctttctgcgcgagaatcggccagtgtcctttggggcccgggatggggtttcagcacccactctcactaccggggctcgggagggagggctggagagcct

SEQ ID NO: 127431 - DNA, 122 bp, Homo sapiens
ttggcgcttgcgcagaagagactcccgggctcttaacgtcgggtatcaggagtttcttcccggagcaaggacccccaagacggaagaggatggccgcggcggctctgaggagattttggtcc

SEQ ID NO: 127432 - DNA, 122 bp, Homo sapiens
tggaccgctttccagaactccgaaccctgtcgcgggtccgcgtcgccctcccccgggcagcgcgtcaaatcggcgcatgcgcactcactggattgccgcgtagctctttctccccccaccca

SEQ ID NO: 127433 - DNA, 122 bp, Homo sapiens
gagcatgcacatttaaacactttaaaatacattgtttaccaatctcactgccagtaggaacgtatgtaaaggttcctttccccttgctcttgccaatataattatccttcttaatactcgca

SEQ ID NO: 127434 - DNA, 122 bp, Homo sapiens
tagagcaaacggttcgatagcacccgtcaggatttttattaagctggaagaattaggtaacgcccctaggtgcccgttagatgcctccgattggttacaccctctgaaggattggcctgtga

SEQ ID NO: 127435 - DNA, 122 bp, Homo sapiens
atgttggccacggtctgatcttggggcagaaccaaagggagaagttaagggatttcatgacggcatcaattccaaaacatttgcatggtgctggtattgcctttggtcccactgagtgttta

SEQ ID NO: 127436 - DNA, 122 bp, Homo sapiens
aataaaggaaaactaagagacttcattaccaccagatgtgcattacaagaaatgctggaccggacaactcatggcggcggtggcggcagctgcttgggcgcggtgcggtggtgactgagcta

SEQ ID NO: 127437 - DNA, 122 bp, Homo sapiens
taggtgtgcttcaagtgtcctcaaataattcccgcagcttccagaatccttgcaatagcccgctggaccatctgcggcaattccacccacttccacgcacctgctcttctttctaaccccag

SEQ ID NO: 127438 - DNA, 122 bp, Homo sapiens
tcaggtaaaggaaaaatatctatgtgtgataatgtcacagttaaatcaatgagtcattttcgagtctgactggaatcatgagaaggaatgaggagcaaatcttacctaaataatatgggaca

SEQ ID NO: 127439 - DNA, 122 bp, Homo sapiens
gtagaagttgtcgagtcttagacaggcttggagcgtacttgggcaggtgtgtggggtggccggtgtacctcaagccattggttcccaaatcttagcatacagcagaattgcctggagcattt

SEQ ID NO: 127440 - DNA, 122 bp, Homo sapiens
tctgaggtttcccctccaggtgcagcttcagagccaggcgagccaggaaggaccagcgggcgaggtggtgagttgtgaggcgcgcccagtccctctgttcccgcctggcacttgctctggcc

SEQ ID NO: 127441 - DNA, 122 bp, Homo sapiens
ctcggaccctgcgcctgaggaagtatcgaggcaaccctctgccacccgaagttcgtgggtcgctcccagagggcgcgccctggagccgagcgcccttgggcggccatctggaggccaggtgc

SEQ ID NO: 127442 - DNA, 122 bp, Homo sapiens
tgaactcttctcctacgtgctgcaggacccggctgccaaaggcagcctgggcacccagatcggctttgcagacttcatgggggtcctcaccaaaggggtctgggaagtagaatgggccctgc

SEQ ID NO: 127443 - DNA, 122 bp, Homo sapiens
tcaggcacaggccccgccgaggctgcccctgacttgagggctcacgcaccgggctgcttgcggctctggactattgtgaataaggccggtgtgagtattttactgtaagtctttggggacgt

SEQ ID NO: 127444 - DNA, 122 bp, Homo sapiens
tttttgcccccctcaacctgcatctttgctatcctgggacttactgctcttcagaactttcgggcccctggtagaaggagatgtctctcctgtgtctgagatgggtggggcaggaactcccc

SEQ ID NO: 127445 - DNA, 122 bp, Homo sapiens
ggagagaaccaccaaggacggctgggtttactacgccaagtaagggggccgcagtggggccgcggacgcacctgggaccctgcacagcccacggacgccacctgcgcggggaggacgcgcac

SEQ ID NO: 127446 - DNA, 122 bp, Homo sapiens
agcctggggagccccgggaggcaacggcagccgcgcggctcgggggccggggttccaaggcgcccccgccgccctcggtccccagtccgcccctcggagcccgccacggcctagcgccgccc

SEQ ID NO: 127447 - DNA, 122 bp, Homo sapiens
ggatgtggagtttcccgagcacttcctgcagccgctggtgcccctgccctttgccggcttcgtggcgcaggcgcctaacaactaccgccgcttcctggagctcaagttcgggcccggggtca

SEQ ID NO: 127448 - DNA, 122 bp, Homo sapiens
tctgaaagcccacgacaagcctcctgggcttttccatgaatatcgccgtgcccctgcctacggatatgctgatgtgtgtatacaatattctgtgagaagcagagacgctgaacactaaacaa

SEQ ID NO: 127449 - DNA, 122 bp, Homo sapiens
ggctgctcagcaagggcaacgatgccgagagggtcgggggctgcacgctagcgtacctgccggcggttctggagtacctggcctccgacaccctggagttggcgggcaacgccgtcggaaca

SEQ ID NO: 127450 - DNA, 122 bp, Homo sapiens
tgacatggccccggggagccgaggtgagcgttccagcttccggagccggagggggcccggcgtacccagcccccagcccgacgtgaccatgctgtcccgcctcctaaaagaacaccaggcca

SEQ ID NO: 127451 - DNA, 122 bp, Homo sapiens
ccctcatatgccacacgggacatgagcaggccggccgggagccgggtcccgggagctccacgaaggggcctgtcctccatgaccaggacacccgctgcgccttcctcccgaggcctcccggg

SEQ ID NO: 127452 - DNA, 122 bp, Homo sapiens
aggctttctcactgacgtgtttacttctcagagtgagccagtcagaagtgacatggaacacggaattttcgcattgcactgttactagtcacagctgcctgttgttacctccgataatctgt

SEQ ID NO: 127453 - DNA, 122 bp, Homo sapiens
aggaaaggtgggagaaaacaacagcaaacctgtttgcccttctcatgtttcagtcagcgtcgggccacaacgtcgatttcctgcaatcctgaagcattgcgtgactaatcacatcttagttt

SEQ ID NO: 127454 - DNA, 122 bp, Homo sapiens
gagccacccagactcaggcactgggctactcaatgttaattctgcagccctggctgggcgcggtggctcacgcctataatcctagtcgtttgggaggctgaggcaggaggatcacttgaggc

SEQ ID NO: 127455 - DNA, 122 bp, Homo sapiens
ctgcggtgctcgcgagcagggtggcagctgcctctcggtggagacgtcttgggacccttgcgcccttcttctctccttccttcgctgctgtctcctttccttccttggctgctcgctctttc

SEQ ID NO: 127456 - DNA, 122 bp, Homo sapiens
tgcagagacagccgttataatagacgcctctctgtgcactgggatggcggactggcctgccggcgcaccaccggccacccagcgcaggacaccaggccctgtgagcagcagctgctgtggcc

SEQ ID NO: 127457 - DNA, 122 bp, Homo sapiens
atggggtgggggggctctctgaatacactcccagtaaaccagggttcacacctctcctgccgctctgcctcagactctgccttcgctctatgtatttaaagtgcctggcactagtgggagct

SEQ ID NO: 127458 - DNA, 122 bp, Homo sapiens
ctagtcaatgtgcagagagatccaggtctgaatcaactaggtctcctttgggctgacttccgtgcagggctcaaaggggaggcagatactgccttttgacaatgcaattgtgcctgagagaa

SEQ ID NO: 127459 - DNA, 122 bp, Homo sapiens
gtctctcttcaacgctgacatatgtagttgtcttaaaatacttgacattcatgtcaaaaacgttgtgtatttcaaccttcctgacattgttttcctcctatgagccatgcaggcaccaatca

SEQ ID NO: 127460 - DNA, 122 bp, Homo sapiens
ctacagatggccaacctgctgtaccacagccagcaccacatcaagatttggttccagaaccggcgcatgaagtacaagtaggattatgggccaaggagatggcctcgttgtggggggcccct

SEQ ID NO: 127461 - DNA, 122 bp, Homo sapiens
ccccgctggaggccgccatccatgacattgtgcaactggtggcccgggcgctgggcagtgcggcccaggtgcagccgaagcgagccctcctccccgccccggtcaactgcggggacctgcag

SEQ ID NO: 127462 - DNA, 122 bp, Homo sapiens
atcaaacattttgccatgagtttagaaaacttaatgaagtatttactgctgagagcacaacgcacttgacataagaggccggggaagaaatagaatgattgcatgagaaaatgcaaggtaag

SEQ ID NO: 127463 - DNA, 122 bp, Homo sapiens
gcgctgctttgcttggccactgaacacatcagagaccgtggagacccctgggaggagaggcgttaatagcagtgaccgccccgggtcaggacccatggaggtgaacgtgcacagccctgaga

SEQ ID NO: 127464 - DNA, 122 bp, Homo sapiens
aaaatgaagagatggtgacacgtgtctaaagctctaggggcctggaaccaagtgacgcagcgctcagagaagcagaaggagcggtggtttcttcatagagcagcaagtggtagtgacagagg

SEQ ID NO: 127465 - DNA, 122 bp, Homo sapiens
gtttgaaccatagcacataccaccctgcaaggttacgggaaggcgtggcctctctaggcccggagcctccaaatgggaatcccctcgggcagtctcttaggggcaagcttctgagggtcacc

SEQ ID NO: 127466 - DNA, 122 bp, Homo sapiens
tggagttttatgattattcaaatcagtctccctgagcatttggggtaagagtatttagaacgtttattttgccaaggttggggatgcatatgcatgacacagcctcaggatgtccttgatga

SEQ ID NO: 127467 - DNA, 122 bp, Homo sapiens
tgaaatatatcttcaaagaatgataatcatccctgacctattggaatgggacacagacttcggaggcagctcagaaggaagtgtttcaaacataatggagcaatgtttttcatcgtgttact

SEQ ID NO: 127468 - DNA, 122 bp, Homo sapiens
aatgaggaggttctgggggtggtggctgctgggctctgcagcaggtctgactcagggggacgggaggagctgggacttcattcccaaggtcaaaggggaataaaggtgtctgaggaggaggt

SEQ ID NO: 127469 - DNA, 122 bp, Homo sapiens
cagggacgccctgtgcgcgccggaccggcgggggcggggcgtgcaggcgggggcggggcacgccgtcccatgggaccggccctcggccactgccccctccggccccgccccgagcgcccggg

SEQ ID NO: 127470 - DNA, 122 bp, Homo sapiens
tcatctgagtgagtcaggtaggccaaagattgacactcctaaaatacagacccatttgtccggctggttacctgacattttcacttggctccttaactaactcactcagacttacacatcca

SEQ ID NO: 127471 - DNA, 122 bp, Homo sapiens
cacaggtttccgtggtgtagtggttatcacattcgccttacacgcgaaaggtcctcgggtcgaaaccgagcggaaacaacttgcaatttttcggggtgtttctgttttccaagattccctta

SEQ ID NO: 127472 - DNA, 122 bp, Homo sapiens
tcaccacaccggtgaagctggggcctctatgcaggtcaggacggcagcaaagttggccgccgacttagccagcacccgcagcctgcaagtacagattttctcccacagcctcctgggttgct

SEQ ID NO: 127473 - DNA, 122 bp, Homo sapiens
agcactgggaagttctcctttggaaacggtttttagggtgtgcacctctcagcctgagtccgatctcacagagactgtgtgagctgctgctcgccctcgtgacccccttcagctcatgccag

SEQ ID NO: 127474 - DNA, 122 bp, Homo sapiens
gtctttttccaaaaataaaaaataaaaacatgctttcaataagttctttcccccctctggcgagggctactaaatttgctcagcatttaatacgtaaaattggctaacagtgtctgcacagc

SEQ ID NO: 127475 - DNA, 122 bp, Homo sapiens
ggcggtgctccaggagccggtgaacagcacgcactggaacagccagagggaggaacggcacgctgcacttaccattttatctctggtcactgggagggatgcccaggcctcattgacccctg

SEQ ID NO: 127476 - DNA, 122 bp, Homo sapiens
cccaataaggttttaaaaaatctttatactttaaaaatttctgccgggcccagtggctcacgcctgtaatcctggcactttgggaagccgaggtgggtggatcacctgaggtcaggagttcg

SEQ ID NO: 127477 - DNA, 122 bp, Homo sapiens
tgtctttcggttcataattgcgattgttagcgaagtggtctcgaattccatttcactccccgttcgccgctctcagactaaattgcaaatatccccaagtctgtagcaaaaaaagttttctc

SEQ ID NO: 127478 - DNA, 122 bp, Homo sapiens
tcctaaagctacctggcttcttccccggctcaggcatcctgagagacgtcacaccaggcacgaagcaggcacaggtcacccaaagagggactgagtggggtcctgtccttcccactatatat

SEQ ID NO: 127479 - DNA, 122 bp, Homo sapiens
tccaaatgcaaaccatagttacaaatgtgctttttgtcaaacattaggaaagaaaatgtacgacactactaagaaaatggtgcagaaggcagagaagactcttggattgggaggaaattcca

SEQ ID NO: 127480 - DNA, 122 bp, Homo sapiens
gacgctcgaagtgcagcggcccaaagcgcgcgaccccgctggactcgggcccagggcccccgtcctccagggacagctcgaaggcatcatcaatgctgaactggggccgggcggcgctcatg

SEQ ID NO: 127481 - DNA, 122 bp, Homo sapiens
aggcgcaatctggacatgccatagcagctgagccaccatcacgagccgggctctgcataccgggtagggacgctggcccttcaggtccctaacaagcgcagcatgccctgggggctgacagt

SEQ ID NO: 127482 - DNA, 122 bp, Homo sapiens
atgagatggcaaagaagttatgaagaaacaggtcgaattatagaattgactaattaggtacgtctgggacacagctaccaaggtaacagactccctaaaaagataaaatccagcctgtagct

SEQ ID NO: 127483 - DNA, 122 bp, Homo sapiens
cgacgaagaagacgacgacgacgacgaagacgacgacgacgaagaagaagaagacgacgacgacgaagaagaagaagacgacgaagaagaagaagaagaagaagaagaagaagaagaagaag

SEQ ID NO: 127484 - DNA, 122 bp, Homo sapiens
cacaccattagagatgaatgccctcagcagaaggcaaaagtaggttacatcccttggttacgtgccagcccaaagatgccgacacagtggaattgagccccacaatggtcatttatctaatg

SEQ ID NO: 127485 - DNA, 122 bp, Homo sapiens
gacggcagcggctgggggtggggccaggggacctgggcccctgagccggcagagacgcggcgcagctgggcaaggcagggctgtgtacccagcagccaccgttctcattcctcgggatcaaa

SEQ ID NO: 127486 - DNA, 122 bp, Homo sapiens
tccgccagtcttggcggaagcctgagacgcaatagatggagactctccttttcgccttggcgtactctttttttttttttcctccctggtaagatgccaacgcctgttgaatgaattaagca

SEQ ID NO: 127487 - DNA, 122 bp, Homo sapiens
actgaagaccggatgattgcgttttggcgtgtgccccaccttttcgaagagtggcgtctgcgctgggcgctgaaaccagaactgtcccagttgctatcaatctgcggcctgggggtcctcca

SEQ ID NO: 127488 - DNA, 122 bp, Homo sapiens
taaaaaccacctgccacctcatgcaagggctgattacatacttatgttctatgcataaaacgccaaaactaggaaattcagaacgacagttaaatttaaacaaaataaaagttgccagaaac

SEQ ID NO: 127489 - DNA, 122 bp, Homo sapiens
tttgtaaatctggggcttaaatgtgaaggaagaaaagactcccaggtcgagatgtgcctacgatggctgactccaaggacaatcttgctggcagtgatagcctacctatttagaggccactc

SEQ ID NO: 127490 - DNA, 122 bp, Homo sapiens
ggaattccttcttctgaagccctggctccccagcaccaggagcaggcatagccaagtgcgcgaacaaagaatgaagactgggaggaggcgatcaggagagggcagtggaggaggctggaagg

SEQ ID NO: 127491 - DNA, 122 bp, Homo sapiens
ggcggacagttccaggggtgataaacgcggacacctggcagagaaccacgccctgcagctcgcgaggctctttcacgcacagcactgagcggccccccttgcaggcggacgccgctgccctg

SEQ ID NO: 127492 - DNA, 122 bp, Homo sapiens
ggggcccgggccgggcctacggggcaaatccaggcgggtgtccttctgggggcccagatccgcctccctggggctcaccatacagcgacggcctagtctaggccgccaaggacacatacggg

SEQ ID NO: 127493 - DNA, 122 bp, Homo sapiens
aggctccaggctcctcgccgggacagtgtctctttgggtgcgtgctggatccctgggggacgtggcacatccccaggctttctaaacattgggtgggttctggcatttggttttgtaacgtt

SEQ ID NO: 127494 - DNA, 122 bp, Homo sapiens
atctgcccaccttggcatcccaaagtgctgggattacaggcatgaaccaccctgcccggccgggatgtatgctcttggatccactgtctctcacagactagtgtgggccttgggcccccctc

SEQ ID NO: 127495 - DNA, 122 bp, Homo sapiens
cggtggcgtcacaaaaggcgggaccacagtggtgtccgagaagtcaggcacgtagctcagcggcggccgcggcgcgtgcgtctgtgcctctgcgcgggtctcctggtccttctgccatcatg

SEQ ID NO: 127496 - DNA, 122 bp, Homo sapiens
ctaaggagccttttccaccagcaagcggagcctggatggagctcatcgggcagagccgagcggagctgagcagaggtccacaaggttaatttaagttacacgcattcaaacaaaattcttgc

SEQ ID NO: 127497 - DNA, 122 bp, Homo sapiens
tggcaggcccggtgggagctgttcatagatgttcctttgcccctctagtagctgaggtcccggacaccccagtttccagggctgctcccgcgtgtccctctgcctgtggctcagccagacgc

SEQ ID NO: 127498 - DNA, 122 bp, Homo sapiens
cttacccctggcagggtcttctgctcgtgcagtgcactctgggccttgagagcagagtcccgggcgcagtaggtgaggaaggcacagcctgaggaggaagaggctggctcagggggtttcct

SEQ ID NO: 127499 - DNA, 122 bp, Homo sapiens
atatctaaggacagcaaaaggcaggtacgtcccggcctggcctgcatggggcgggggccgcggaagaaccctgcgccctccacacgggacttgacgtctgctctgccctggcccctcctcgc

SEQ ID NO: 127500 - DNA, 122 bp, Homo sapiens
gggaatttatgtccaggtgagtttaaggaaaggaaggacttgggacccaggtcaaatagccgccacctggcaccattgaagtgctgtcaagttctgttggctgctactgcatcaggcaaatt

SEQ ID NO: 127501 - DNA, 122 bp, Homo sapiens
ggcccaccacaccgtggaactccagaccaccccagctctccaatgtagcggagacccttccgctagccatagaaaataacttaagtcacttaagctgtacttggggtaatcaggttatttaa

SEQ ID NO: 127502 - DNA, 122 bp, Homo sapiens
agatacgccaagtatgccgagcagatccagaaagtgaacgagatgtccgccatcctccgccgcatacagatgggcatcgaccagactgtgcccctgctggacaggctcaacagcatgctgcc

SEQ ID NO: 127503 - DNA, 122 bp, Homo sapiens
gtaaaggcagctgacaacaatactgggggccttgggttcagaaggctggtgtgtaaccaccgtcctttcctatcactgagcttggagccacaacagtgacactacaaacgaaagatgggttt

SEQ ID NO: 127504 - DNA, 122 bp, Homo sapiens
acctgggagctttcaaaagctggaagggaagaggaggaaacagggctatgggtcagaaaacgagtccttccacaagagccaggaggcagcagacaagggcagccagtggggccctggacggg

SEQ ID NO: 127505 - DNA, 122 bp, Homo sapiens
gtcctggccgttgtggtagatgggactggttgtggggctgcggctgccggggccctcgtgcggctcaggttccccaccgtgcagcgtggggctggcctccagcacacacaggttctcataga

SEQ ID NO: 127506 - DNA, 122 bp, Homo sapiens
ttgtgagtaacgctggtatgggagcctaagtgtctgtttgggtgtttgtcttcattcttccggacctacccttgggagtggaattgctggatcgtaaggcagttcggtgttccactatttga

SEQ ID NO: 127507 - DNA, 122 bp, Homo sapiens
gatttgggatgtggttaacctcattcaaatgaacacaggaaaccgaagccctgtgcttcccggctcattcccttcagctccgggtgacgttcctcaatcaaaaatattagacttctctttct

SEQ ID NO: 127508 - DNA, 122 bp, Homo sapiens
catgcgccccacccgtcctgaggacctccgaacctgcagggggcgatgaaagtaggcttgcgctccgcttgtagctgcttccgggtcagaggtcagacggtctagcgctgcgtgggccatgg

SEQ ID NO: 127509 - DNA, 122 bp, Homo sapiens
ttatcgtcacacggacattgtcacacagtcatcgccacatggtcgtcgtcacacggtcaccgccacccagtcacctgccacacggccactgccacatggccatcgccacacggccaccgcca

SEQ ID NO: 127510 - DNA, 122 bp, Homo sapiens
accgctaagagagggcgatctcggtctcgaacccctaccaagagaggtcattctcgatcccgatctccccagtggcgtaggtccaggtctgcacagaggtggggaagatctagaagccccca

SEQ ID NO: 127511 - DNA, 122 bp, Homo sapiens
aaacttgcttagtttccaatttctctgaagtgacttccagttaacagagctgacctgccacgctggttttttaaaggtttgcaaaataccttcagtaggtcctgctgtcagtcaccatatgt

SEQ ID NO: 127512 - DNA, 122 bp, Homo sapiens
ggccttcactaaatatgtaaatgttgctttcggcatctggccatgaccctccctctctaccgcaagtctctctagcaagctgctttccagagaggcaaagctgttccaacaatcatggtttg

SEQ ID NO: 127513 - DNA, 122 bp, Homo sapiens
ggggaggcttgactgagctcccacccggaatttcaccttagacctttaaagaccttgctccggcctcccgcgccagcgctaacacctagtcctctttagtggagttccggcggaaggggatg

SEQ ID NO: 127514 - DNA, 122 bp, Homo sapiens
ggggccagcttcccccaatcaccggtgctgctgtggaggaagagcttggtggcgctaggacgtccttgtgaatgtgacttggaagagcagtttgggatttttttcattgcctggggatgaga

SEQ ID NO: 127515 - DNA, 122 bp, Homo sapiens
gccgcgcgtcacaaagaggagcccggcgcaatctggcaaaacccaactttccaccaggctcgccagggccgccagatacgtcaacagaatccatctttcgaagggcctggaaggcgccgggt

SEQ ID NO: 127516 - DNA, 122 bp, Homo sapiens
gaaaaggagcttttatctgaggaatgcaaacctcctctaaatgatcagtccccagaggcgcgtgggaatgagacagcagtcacagaccacttccctccttgggctaaggaatcctgtcttaa

SEQ ID NO: 127517 - DNA, 122 bp, Homo sapiens
cctcgcccagggcgcgggcctgggactgtcagagatcacggaccactgcgcggctcagcccggtgaaagcataggggttagctgggcctccatcccagactccaaagcacaggcttccctct

SEQ ID NO: 127518 - DNA, 122 bp, Homo sapiens
cacagagccgtgactaaacaactgtgggaaactggtcccagaaatctaacaaaatctggacggctgatcagcgcctagcgaatcactggagtggagtaaccagaacattcttttcaagcagt

SEQ ID NO: 127519 - DNA, 122 bp, Homo sapiens
acagtcagacggctctaggtgcgcggcttaacccgggagccccctccctggacatcttggcgaggtcctctcactcagttccacgaggtggggactttgagcagagcccgcttcggggaaag

SEQ ID NO: 127520 - DNA, 122 bp, Homo sapiens
tcatcacccctgctgcaccgagtcagagagtgggcgagctaaaactgatgcccctgaagccgcctaccacctggcacacagtaggcactcaagtgattgctgaagccgtgcccagcaccaag

SEQ ID NO: 127521 - DNA, 122 bp, Homo sapiens
cccttgccaggaaaggtgaacttgcagagcttcccagagaagacacctggggcaggtgagcgtggggtgacaggagatgatgcagaaaaggtgaagctcagccacctgccagctgtgtgact

SEQ ID NO: 127522 - DNA, 122 bp, Homo sapiens
cgtgggtgtgggctctgcaggtgccccggtcccatggggtgtccagtcaggaggcctgcccgggcctccgccggtcctctccctctccttggggtagtccccgccctccagctctgaggaga

SEQ ID NO: 127523 - DNA, 122 bp, Homo sapiens
aggattatgcccttgcaacttcaatgtatcttggtgattcaggattttctgcagagggcacgtaaatgcttgacattctcagtaacacatcatagttcaggaggcagcattgcagttccgct

SEQ ID NO: 127524 - DNA, 122 bp, Homo sapiens
caccatcctgcccgtcaacgtgatgattcggtcttcgtgtttgactcttttagttcctcacgtacctgttttcacgagaaaacagcatctgggatgagaagtatgacgcggtggacatgcag

SEQ ID NO: 127525 - DNA, 122 bp, Homo sapiens
gctcacgaggagcggcgagcgccccaggcttcagctttgcggccggccggccaggcctcgcgccagcccgggtgcacacccaaggcgccgggcccgcctccagctcctgggcagcgggaacc

SEQ ID NO: 127526 - DNA, 122 bp, Homo sapiens
ccaccagtgccccgtgtgtgggaagcgcttccgcgaatccttccacttgagcaagcatcacgtggtgcacacgcgcgagcggccctacaagtgcgagctctgcggcaaggtcttcggctacc

SEQ ID NO: 127527 - DNA, 122 bp, Homo sapiens
acctttgttcaataaaggaaatatgcactgctcacttttttgaaggaaatgccaaagttacgttttacaacaaggctagagtttgtaaattctgggttcatttgtgatgacataagtcagca

SEQ ID NO: 127528 - DNA, 122 bp, Homo sapiens
aaaagaggaagcccagaaagtgctgaagtaaacactttgggagaccgttgcaacataaagcggcctctcagtctttggtggaaccatcactaggccccaatcccttagtccctcttgcgtcg

SEQ ID NO: 127529 - DNA, 122 bp, Homo sapiens
caattgccgctcaccaggcccaggggaccggagtcagagccctcgcgcctgcgctcgaggcgagggccaatagggagaggctgataacttcgatttggggcttcacgtacttcccacctgcc

SEQ ID NO: 127530 - DNA, 122 bp, Homo sapiens
ccacaggaagtttggattttattttaaattaaatgggaaatcactaaaggtttacgagtacgagagtgacataatctgacttatgccatttaaaagatatttttcaatttgagtgattagga

SEQ ID NO: 127531 - DNA, 122 bp, Homo sapiens
cccggcctctgaggtctcggccgctacagggcgagctagggccagtgctgggcaggggtccgagaggcccggggctgcgggcgggcgggcggttatcctccagagatcgcgcatcagcacag

SEQ ID NO: 127532 - DNA, 122 bp, Homo sapiens
aaaaacagactgtgagcgccacctggtggccaggtgcagggcacaccgtatctgcattgtcggggtcccccccgactcccaccctgtcatatcttatgatatgcctgcaacacgatgagatg

SEQ ID NO: 127533 - DNA, 122 bp, Homo sapiens
tgggatgatataggggcagatgaagggcacaggcatggttgggccaggcatacaagtccacgacgggggccaggaagagcagcgggaggcgaggagcgcccttcaggccagagaccttggct

SEQ ID NO: 127534 - DNA, 122 bp, Homo sapiens
gcggccgcgcggaggctccgtggaggcccgtgggctgcgagaggccacccccagccccgccggggctgtgacaatgactgcccgcttttggagcgctccgatttccactcctgcttctcctt

SEQ ID NO: 127535 - DNA, 122 bp, Homo sapiens
cctctcctccttgatttatgctgcagagtggaacgaccttccctgacctcattttcatgtcggcgcgagcacacccggagccggctacgcacattccggaggaggcgcgcgctgacacgcac

SEQ ID NO: 127536 - DNA, 122 bp, Homo sapiens
caccctccttgtcaaaactagatatacctacattttataagttctttctaatattaaggacgttttaaactatgaagcacattccttgaactttctgaaatcagactccttgagatcaaaca

SEQ ID NO: 127537 - DNA, 122 bp, Homo sapiens
agttagggacagggagtcaggaaagatgggagctctttgtggtgaagaagagcccagtaacggcagcccagcaacagcccctgaggtgcaaggccatggccatgggtgaagctggccccaaa

SEQ ID NO: 127538 - DNA, 122 bp, Homo sapiens
ccccctcgtttcttttctctctcggaagctctagggtgtgaatcacattttctttcttctcggcaaaatggaccccgcgtctggggagggggaggggagagggtggggagggaggcggcgga

SEQ ID NO: 127539 - DNA, 122 bp, Homo sapiens
tcttcccaacttctctatctggaaggagttctcacttgacagatgaagaaactgtggttccgagtggttaagtcacctacccaagagccagcatgtcgtggctctgggatttgaatcagatt

SEQ ID NO: 127540 - DNA, 122 bp, Homo sapiens
ggactgaagccaaaaagctttggggcatggatgcgggtgtccactgagtccactatcctccggaagaaagcactggagggggaccaggaggctcacgctcttgcactttctgaagatgcctg

SEQ ID NO: 127541 - DNA, 122 bp, Homo sapiens
agaagagtgacgatgtggagagggacgggctgcatgtgctccccgcccccgagaggcctgcgtcatgcggtctcgcccgctctgcgccaggcgtcctgctaacgtgtcctggagggactctc

SEQ ID NO: 127542 - DNA, 122 bp, Homo sapiens
tagcagagtagcggccttgggctgctgttgcaaagaaaactcgaaataagtcgcaaggaccgtactttcacttgcgtttgagtgacatcccttgcacgaatccatcccagccaggctgacaa

SEQ ID NO: 127543 - DNA, 122 bp, Homo sapiens
aagggatttcgcgccaaatgcaaagcccttctggagaaagcccatctgcctttgcgcctgcgcagtgtagccgtggcccgcgggtatttttggctgctggaacaagttcgaatctgagggtt

SEQ ID NO: 127544 - DNA, 122 bp, Homo sapiens
cgctcccgagcccgctgcgcggcccccgcacccccggcgctgggtccacggtgggggccgcggggcggaaagtttatccgcctcgggtcctcctggccccgcgccccactgctccgggccgg

SEQ ID NO: 127545 - DNA, 122 bp, Homo sapiens
ctacatcatcagctaccaccgactgccccctccagctgtatcacagcctgtcttctgccacgtctgcatgaaatgaaaccactaagcacaaccgtaaacagccagccttatctcaagccatg

SEQ ID NO: 127546 - DNA, 122 bp, Homo sapiens
caggccgccgctcccctccccgcgctcgcccggcgacccctccggccgccgcccaatgcccgcagcctgccctccagccccagccactgcgccagtgctgttccatcccttccacccagcct

SEQ ID NO: 127547 - DNA, 122 bp, Homo sapiens
ggatgttgcatcccctgaacagtcatcagtcagggaagcagaggagggaaagtaatcttgcgaggaagagaaaatactatttaagggacagtcagagaacataatggaattcaaactttctg

SEQ ID NO: 127548 - DNA, 122 bp, Homo sapiens
atgcccagggttggagggaggagggcgttcatagaagaacacacatgcgggcaccttcatcgtgtgtggcccactgtcagaacttaataaaagtcaactcatttgctggttccaggtgccct

SEQ ID NO: 127549 - DNA, 122 bp, Homo sapiens
atatttaggggtagaacccaggtctcaataatttttacagttctccttgtggctccaggacgcagctgaagttgtgtctcacttctctagaccctgcccacttctggcctcccctgagccac

SEQ ID NO: 127550 - DNA, 122 bp, Homo sapiens
ggtgtctgatggtgcatttgatgagctattggctgactgtgcctgctgagggccagggtgcggtcttcttccccaccaccctgtccctgggcactgagcctccatctcagtacgtcacaggt

SEQ ID NO: 127551 - DNA, 122 bp, Homo sapiens
ttaggacagaaatcataagtccttttattctattcaggaagacactgtttatagctataccgttatcttctctcttcaaataggggagtttatcaaagctttgtatgagtccgatgagaact

SEQ ID NO: 127552 - DNA, 122 bp, Homo sapiens
aaaaaagacagcaataattaatgccaagaacagaaaagaatgttgacgtgttgcccggcccgccaagcgggcccctgcccaggcccccaagctctgccaccactggggtgccgtcccctccc

SEQ ID NO: 127553 - DNA, 122 bp, Homo sapiens
gtgggggttaaagaggcatgttagccacggtggggggactctcttgggctgcattgctggcgcaggccccctccaggcacgtcctggctgcaggtccccagaggggagtttcctagtctggg

SEQ ID NO: 127554 - DNA, 122 bp, Homo sapiens
cagcatctctctcactgcactgtagccatttattcaccagaatgcatccttcctgacctgcgagctcttccagagcatgaacagaggagtataatggtttggcaccccgcctttggtgccag

SEQ ID NO: 127555 - DNA, 122 bp, Homo sapiens
tagacagaatgtggcgtattgttgggcagggccctgaggacccttttgttgtttcccccccgtttaacaggactggaaagctaagcaaaggctttactctcacggaattggatgaattggac

SEQ ID NO: 127556 - DNA, 122 bp, Homo sapiens
cttgtggcggctctcaaactaatcctgactgagtttttgaggcagccttctattcccactcgcaccaacccagcacgcttaccaaaattcccaagtaaccttctctttgttacgcaaacgcc

SEQ ID NO: 127557 - DNA, 122 bp, Homo sapiens
ctacagggcatatgggaatcatgggctcgggctgctgctgctgaactctgaactctcacccgctgcctccctcctctgccccgctcctcctcagcggagaacagaccgccgcctccgaccgc

SEQ ID NO: 127558 - DNA, 122 bp, Homo sapiens
acccgctggcttgcagccgcggaagcccccactgccgcgctggcgatcccgctaggcgcccgggagaactactgctcccaggttgcctttcgcgccccgaggcctgctggggctctcggacg

SEQ ID NO: 127559 - DNA, 122 bp, Homo sapiens
tggtaaggagcaccgcgtgcagcatccccagggcaggtgtcctgctctgggaggtgcctccgtaggcctggccctggcacctacctagctccttccaggcaaatgggagtggagggtgggaa

SEQ ID NO: 127560 - DNA, 122 bp, Homo sapiens
tcacagtgggcatccggcagagaaactggttccagcagtggctcagagggggcgtccccacgccacagaagcagcagcggagggcctgttttcacacccaggctctgacagttgccaggggg

SEQ ID NO: 127561 - DNA, 122 bp, Homo sapiens
aaagatgtgtctgtgcctatctatgtatttactattgtgatctcttgttgctttacttgtcgaggagacaatttgagagagtgaaaatcttcctcctctcctcctcctcctcactctctcct

SEQ ID NO: 127562 - DNA, 122 bp, Homo sapiens
taaccaacccatgactgcttctaagtcccaacctttaaaagttcaaatagagccacttagcggccttccttcctttaatccttctgggtagagatttcttagaactctataatacccgcatc

SEQ ID NO: 127563 - DNA, 122 bp, Homo sapiens
gctcctcgcgcccgccgcgccctcggaagcttgcccccgagcaccacagctagcagggttcgcggacggccacccgcactgccctggccccagaggtgcagggttcaaaccccttctctgca

SEQ ID NO: 127564 - DNA, 122 bp, Homo sapiens
cccccccaatctgagtcatgcctttccttgcctatttccccatctataattgagggcgggcgacagccttccagagtaaattaagtcacagagggaatcctgagaggtgagcagtagaaaga

SEQ ID NO: 127565 - DNA, 122 bp, Homo sapiens
tctcctggtgcgccccgggtggggagggaaagctgactacatgcacgtccccagccagcgcgcggcctccgcggtgtggctcctagtgcccggggaagaaccctcaccctccctattcccag

SEQ ID NO: 127566 - DNA, 122 bp, Homo sapiens
aagactggacctctgtgacctgagtttagcacaccttttcttccccatcatccaagtttgcgaatttcgggctctttctcgcactggagtcccagcaaccccagagattactaaagatgcaa

SEQ ID NO: 127567 - DNA, 122 bp, Homo sapiens
ctccgttcgtagctgcggtggcgagatggtgttctccctcggtcataatcagatctgtaccggctgtcttgtcttctcctgtcgggactgcggcctcgctcccgccgatccagggaccgatg

SEQ ID NO: 127568 - DNA, 122 bp, Homo sapiens
acgccaagtacgaaaaggctaaacagctgacaaaatttccacttgagcaaccctggggagcgcaaacaggaggaatcggggcaagggtgacttgaagaaagcactggcagatcacgcacttt

SEQ ID NO: 127569 - DNA, 122 bp, Homo sapiens
tctgtttttattgcagccaaattccgacacagattttttgaaggaccacccagatttggccggagctgctaacaatgctgaatgcctctttgagaaaaggtctttaatttctattttaatga

SEQ ID NO: 127570 - DNA, 122 bp, Homo sapiens
ccctccttctcccgccggaaataccctctttcaggacggcgcgcctgtgcggcgcacgcgcgctcagttacttagcaacctcggcgctaagccaccccaggtggagcccagcaacaacagag

SEQ ID NO: 127571 - DNA, 122 bp, Homo sapiens
cagcgccccccaagaggacgaggatgaggcccggctgcgcaggcctccccggcccagctccgaccccgcgggatccctggatgcacgggcccccaaagaggagactcaaggggaaggcacct

SEQ ID NO: 127572 - DNA, 122 bp, Homo sapiens
cccgcgggtcagggctaatcaccccacgtcccgtctgagccaccctccttgtgtcccgcgcgggttgcagctgctggaacccaagaacacagggcactgacaagtgacaacaaccgtcagcg

SEQ ID NO: 127573 - DNA, 122 bp, Homo sapiens
caccgctgtggcgttaggttgctctcgttagctcacatttgagagactgaggctcagtggcgtgcagtcacttacagtggttgcacagctagagagtggtggaggcaagatttgaaaccaca

SEQ ID NO: 127574 - DNA, 122 bp, Homo sapiens
ttttgcctttatgattcctaatttttcagcttctgctctttttaataactcctcttccttcggaacagtctttttgtcaaaagcctttcctatgttatcaattttctgttttaggaaagcca

SEQ ID NO: 127575 - DNA, 122 bp, Homo sapiens
tccgcaccccgaccgcacccctctcccttcctagcccccgtctgcccagaaaagcattgccggataaaaggcaggacgcccagttactgcgtggggacaaacttaggctaaaaatgtatcct

SEQ ID NO: 127576 - DNA, 122 bp, Homo sapiens
gacacagtgctcctgtaaaggtgtgcttgagtatacaagcatccatattatcattaatgccggttcctcctgacttctcaccaactgctcctcgtctccatggtaacagcccttccactcat

SEQ ID NO: 127577 - DNA, 122 bp, Homo sapiens
cacagaaccaacaccaatcatttggaactggagtgcaaaatacagcttacttgccatcctcgaacagatgtacaaggctttcttatgtgattctaaatcattttctctaggtttgtgcaggc

SEQ ID NO: 127578 - DNA, 122 bp, Homo sapiens
ctgcgtcgccagccagagagaaatgtgcctgctgaacagtcagtgccataatgcaatggacgccgaacacaactttgctgcgtgtgctttctatttggctggggagcgtgaaggacgcctga

SEQ ID NO: 127579 - DNA, 122 bp, Homo sapiens
gggcggcgcctggaatttccaccgccagattctcgatcggctggggctaggagtggggaccgaagggggtctgagagggtggggagaccagctggattctcccgggcagggcgtgggggaga

SEQ ID NO: 127580 - DNA, 122 bp, Homo sapiens
gaggccatctcctgggccgcctggcggccatcgtggctaaacaggtactgctgggtaagtcgctgctcgtggcccctctgtcatgggcccccgctggaggtcagtgatgagcaacattcacc

SEQ ID NO: 127581 - DNA, 122 bp, Homo sapiens
ccaggatacaatccagagacaatgacaaatgggggattcccgcttctgcagaaggtggggcgactggtgcccaggggcccccaggaagtgcccttacctgactcccaggatcctcctctgtg

SEQ ID NO: 127582 - DNA, 122 bp, Homo sapiens
cgatggctttggagggaacagaccagtttgtaggttgcccctctgcctgggtctggcgggcgcttcttggtgagagatcccacttggtatctctgtgggaacggaagggaggggaggccgtg

SEQ ID NO: 127583 - DNA, 122 bp, Homo sapiens
ttacattaagaaaatcacaaacacttaaaattgtaggtttaggtctgaagtcaacacagacgagttaaacaatctatttgcttcctgtttacagaattaaagtattaaccacattctttgtc

SEQ ID NO: 127584 - DNA, 122 bp, Homo sapiens
ttcggcagccctggagactgccactcgaaaaaccgggctctagagagcacccgggcggagcggaaagtgaggcttagccacagagacgatccttgcatgagacatccgctggcgcctccgcc

SEQ ID NO: 127585 - DNA, 122 bp, Homo sapiens
ttagtttagggcggagctatcagtcctgagatgcgctttgatgatgacgtagaatagagtcgtccaagcctagctacccgagcgctcccatggtaacaggcggtggtgaaagtggttgggag

SEQ ID NO: 127586 - DNA, 122 bp, Homo sapiens
ctttggttaagctccggggttgctaacgcaaattggttaaatctggggcctaaaaagagtcgccgattttagaagttctctgttcttgataggagctgtaattcagaaataggcaagctaat

SEQ ID NO: 127587 - DNA, 122 bp, Homo sapiens
tggataattgaaatggcagaagagcagttctgctccaaattacagtctgaaaaaataaaacgtttttgaggagtgctctctaaacgtaaatatgaaatgaagtttcaagaggtgggaaactt

SEQ ID NO: 127588 - DNA, 122 bp, Homo sapiens
ctaggttgagtgacggacttgagcagccaatgagtgtgcagtttgttgcgatgtggcacccggctccggcattataaagggcgccacgagtcggcattgtcaggcggcggcaccgcgcggga

SEQ ID NO: 127589 - DNA, 122 bp, Homo sapiens
gcgagcctggtcctgtcgctgcccgccgcgcagtactgcctgcagagggtgaccgaggcccggcacaagtaggagactgctccccgcccgctcgggcccctgaggagccagtgcccccgcgg

SEQ ID NO: 127590 - DNA, 122 bp, Homo sapiens
caccaggacgcagctacgcggtgctgttgggcatcatctttgggggcctcgcggtggtggcggcggttgcgctcgtctatgtgctgctgcgccgcaggaagggcaacacgtgagacccccca

SEQ ID NO: 127591 - DNA, 122 bp, Homo sapiens
gaaggaagagctaagacacccttctaggagctgctgcccagcaacgatggcaaatctccacgccctttactgaagattaaagctaagactaatccaagcacagtttcttttaatgaactggt

SEQ ID NO: 127592 - DNA, 122 bp, Homo sapiens
caattcttttggacacatgcctagaagtggaactgctgggttcccaataattctgttgaacgttttgagcatcgcggcggccgcactgttttacattctcaacagcaatgcatgtaccagga

SEQ ID NO: 127593 - DNA, 122 bp, Homo sapiens
tacagacagacaccactgcaccaggcaattattattattatcattattattattattgtgcgtgtgtatgtgtttttagtagagatggagttttgccatgttggacaggctggtcttgaact

SEQ ID NO: 127594 - DNA, 122 bp, Homo sapiens
ccgagggtccagggtcatagagtgtccaaagggggctcccacgggagggatgagggtctgcgacaggtgacaaggatcaacgcccgattgccggtcccagctccggcttgtctagggcactc

SEQ ID NO: 127595 - DNA, 122 bp, Homo sapiens
ctggtgatatgaaattttaaaaaattaataacaaaaagaaaatgaacaagaacatcccaacgagccagttttgctgctctgaacatgaaccagaattaactcttatttttgtttgtcaagtt

SEQ ID NO: 127596 - DNA, 122 bp, Homo sapiens
tgtgtttatatattacttgaatcactcaaaacaagcactgtggtgttctttcacatttcccggagaaacaaatcatttcaactatcattcaattctgaaaaatgtaccttccatttcaggac

SEQ ID NO: 127597 - DNA, 122 bp, Homo sapiens
cagcctagcatttaaaatcttgccaaggtcccaggcttcctttgtagccttgaacatacccgacacctaagctaccaaagctaacttttgatcatttattcatccactcaatgattgtttct

SEQ ID NO: 127598 - DNA, 122 bp, Homo sapiens
catttgtatcatatgaaaccacttttttcttcttttttttcaaacagaatcttgctctctcgcccagggtggagtgcagtgatgtgatcttggctcagtgcaacctctgcctcccaggttta

SEQ ID NO: 127599 - DNA, 122 bp, Homo sapiens
catgaagtgacagctcatacggggttccaggagggggtggaggcaccagagcctggcggacgtcccctggcagcacttcctcatgtgcccccggcccctcgggcacccgcatgcgcagttgg

SEQ ID NO: 127600 - DNA, 122 bp, Homo sapiens
ggcccgcgcgcccggccccctcctcgggcttccccgagggcgggacgtctcgggctcccccgcccccccaggccacctcccggccgtgtcctagcgctgccctcgggccgggggcggggccg

SEQ ID NO: 127601 - DNA, 122 bp, Homo sapiens
aatagcattttattttatattagtgaaatggaagaaaataaaaaatgttaggacatattgcgcatactaagggtaagcattatttcatgacagttttgtttcagttatccatgtaggtatgg

SEQ ID NO: 127602 - DNA, 122 bp, Homo sapiens
agcactttatttatattgatacccaatgatctattaaaatgactggtaaccagcttacaccgagtaaatatttgctgagtgatcacgacaaaaaacagtttaaggctcatgtgtatataaac

SEQ ID NO: 127603 - DNA, 122 bp, Homo sapiens
aagcggtttctgtgtgcggttctgatttgcctcaatgagaaggttttcattcatggctcccggctctcagactgggtggaactgctcccatttaaaggggaaaagaggtggctcggctcgtt

SEQ ID NO: 127604 - DNA, 122 bp, Homo sapiens
atgcaccgctcaggctgcgagacaggcgtgggggctcagtggggtcctgggctcccaccacggccgcgccgcctctccggctgcccacgacaggcggagcacagaagacaggctgacggcag

SEQ ID NO: 127605 - DNA, 122 bp, Homo sapiens
agttgctgcggcattagccaatccataagctctatcccgcctgggtgggctctgcggcgacgcgcgccaagaaggggtcgggagttttttggcgctcgctaaagggcgttgagaagggcggg

SEQ ID NO: 127606 - DNA, 122 bp, Homo sapiens
atgatttgatttttttttccaggtccttggctctcctaagactcataaaagccgctccagcggctaaggaagttctgtgcaaagcctgtagtttctagttgtgaagatcttcaggtttgctt

SEQ ID NO: 127607 - DNA, 122 bp, Homo sapiens
agcagcgggtctgcccgggctgcgccttgaccgcttgactcgctcctacgcagcagcgagcgcctgctgaaaggcctctgctccaccccggagctactggccgtggaggctgcggcggtggt

SEQ ID NO: 127608 - DNA, 122 bp, Homo sapiens
gcccggtcagtctcttgctctggggtcttgggtggcgggcggcacctccgcttgcagtgccggagccgcggccccgctcggaaaagggctgccgtcggagttagatgccggggactccgggc

SEQ ID NO: 127609 - DNA, 122 bp, Homo sapiens
ttggcagaaggtgggacccggatctcagtcctggcaggaagggatggctcagaacctaggcggagtcaggtccgctgtggtcacgtctccggtgacccacttccagctctggtctttacctt

SEQ ID NO: 127610 - DNA, 122 bp, Homo sapiens
tctcaggaccgccgactctgcccttcctctccgccgtctggggccaacccgcctcgttggcgcgctgcgcctttatagtctgcaaagccacactgaagagaccagagatcacctggtggcca

SEQ ID NO: 127611 - DNA, 122 bp, Homo sapiens
gcaggtttcttccaatgaaaaactaacaaagtcatcaaaagacagactgttttttttccccgcctcagagtaaaaatcacattggggaacaacaaggaaattaaaataagaaaaaatagcac

SEQ ID NO: 127612 - DNA, 122 bp, Homo sapiens
aggcgttcccgaagtcctccacccggggctccgccagcccagagggggtaaggaagtcgtcgccctggttgccattgtaattcccacacaggccgcaggtcttcccggcatagacgggggac

SEQ ID NO: 127613 - DNA, 122 bp, Homo sapiens
gctatgtggactttatgtgaaagtaatatttttgaaaaacctcaggtggcctaggtttagcggagtaagttccaggattggctgaggcaaagaatttctggcatggagtcattgctaattca

SEQ ID NO: 127614 - DNA, 122 bp, Homo sapiens
aaacttgcctgggaaccggggcggggacatcacgagggtacagactcctcccccgagacgcgatgctgcgttttggagaggcaaaaggcaacgctgagtctgcccagaccacgcccacgacg

SEQ ID NO: 127615 - DNA, 122 bp, Homo sapiens
gtgggcgtccagtccttgaggccgcagagcccgcagctcaggcagagcgacccgcagaaacggaacctggacctggagaaaagcctgcagttcctgcagcagcagcactcggagatgctggc

SEQ ID NO: 127616 - DNA, 122 bp, Homo sapiens
cgggctgaatggtagacgttctggcgccgggcagcggccaccggctggttcccacttccgcgcgcaccccttaaactgtgttctagaggccccagcctcgccttgcagcgcctcactagctc

SEQ ID NO: 127617 - DNA, 122 bp, Homo sapiens
gggcagtggcgatgaagctactgccgccgacctccagggccccgagcctgccaggcgtgccgccagacacccgccctgcactgtgatcctcctcgcgcaccaatccctgccacagcctcaag

SEQ ID NO: 127618 - DNA, 122 bp, Homo sapiens
aaattgcagttagaaaacttttcacattagtgtaggaaactttttgcaggcctagttcctcgatagccaaaggccagctttgtaagcaggcccttctaacgacagcagcctcaaggctgata

SEQ ID NO: 127619 - DNA, 122 bp, Homo sapiens
cgctgctctggttgcaattcagaggaggcacagggcaaccgctgctggtgctgtacagggcgggctggctgcccaccagctccccaaggtggcacacacctggacagctcatcacttccagc

SEQ ID NO: 127620 - DNA, 122 bp, Homo sapiens
tgcagtcatctcttgacaagcatatatcctctctgaactggatgccctagaggacaggagcgtatctgagcctagcccagcacagagcaggcactgagaaaaggcttgctgagtgaatatga

SEQ ID NO: 127621 - DNA, 122 bp, Homo sapiens
gatgtcattgtttccagaccctgcgtcatcacagagggtaaccttcccaggctcttccttcgggctactgtctgacactcagcatttcctgctggtgcttgtctgcccccatcccccttggc

SEQ ID NO: 127622 - DNA, 122 bp, Homo sapiens
cagagcacacagctgccacagggagaccccagaccagagagagggctttccaggtatgtccgcaaagctctgaaagggggcaccctgcaccaagcctactgccctggtgggaggttgttggg

SEQ ID NO: 127623 - DNA, 122 bp, Homo sapiens
aatgcctttgctccactaatatttccttagctactgagtgccaggtactgcgccgcgtggcgttgcacaaagcacgagaattactattatttgattagggaggatgctgaggactgaaccgc

SEQ ID NO: 127624 - DNA, 122 bp, Homo sapiens
tcctcggttttgtccgagggacgccttcttcggaaccgagtgcggtgggctaggactatacgtttgcaagtttaagagataagcgagaagaccagacagagcaaacaataaaaggctttttg

SEQ ID NO: 127625 - DNA, 122 bp, Homo sapiens
cccgcaacaccctggcccagggaatgagtgaaaatcagttgagattcctctccttattcccgcacctgggctcaattttttgccaggattagagcacgcaagctcagtgctctcaattggac

SEQ ID NO: 127626 - DNA, 122 bp, Homo sapiens
ccctaaggtctcacaattagtaagatgcagacaggtttcaaacccagaactgtgtgtaaccgctaagttatgaggcttctctgagcatttattgagtaccagctatgagccagaaaactcta

SEQ ID NO: 127627 - DNA, 122 bp, Homo sapiens
gcgcgcgacgcccgggaggcggtgcacgcctggcgcgagcgcctgagccgagagcaggtgcgccaggtggaggccgcctgcgctccagccatgcgtctgctcgcctaccctcgcagcggaga

SEQ ID NO: 127628 - DNA, 122 bp, Homo sapiens
ctccattctcaggattgatcccaacttcttgccaaggcagtcgccctccgcttgtgctatcgatgaccttgcccatttcacctttagtatataattaaccctaggactaattttaatgatgt

SEQ ID NO: 127629 - DNA, 122 bp, Homo sapiens
gttgttgttgtgtttttttttttttttttttttttttttttttggagatggagtttcactcgtgtgtcccaggccggagtacaatggggcgacctcggctctctgcaacctcctcctcccag

SEQ ID NO: 127630 - DNA, 122 bp, Homo sapiens
acacagaccggagatattatttgcaaaacctgtcaagtgtaacgattcacccccaccttccggtcattataaacacagcagggttggcgctctttcccccgggccctttaaatacacaattt

SEQ ID NO: 127631 - DNA, 122 bp, Homo sapiens
atatcactttgccttgattataccaagacactggcttctgtttgttctctccactttttgcgtccttaatgtgccccagacaaacagaagggctgtaattgtgtaaactcaggtcccctgtc

SEQ ID NO: 127632 - DNA, 122 bp, Homo sapiens
cctggtctgaagcactttatatcaacatggtttatgcactcctctggggctccctgaggacggatctcctcctccatttccctcaacaatgcatccaacataggcctgagcccaaacttagg

SEQ ID NO: 127633 - DNA, 122 bp, Homo sapiens
gcctacccttgggaactcagagcatcctctttctcttttctgctgagctggtggctgcaccgagttgcctctgtctctttaagagagaaagagagagcgagagacggaaatcaggaagtgcg

SEQ ID NO: 127634 - DNA, 122 bp, Homo sapiens
cagtaaagcagtacattctgaaggtgcattaatgaaagtttcccctctccttggagagcacgaatctttagttgtctaaataatttgatagcataagggcaggcagttaaaaagtggagata

SEQ ID NO: 127635 - DNA, 122 bp, Homo sapiens
agcaaaaacactttgttcctgtttcaagtttaaattatagccacagcaatatcgaaaacccgaaaaaaggatctttcaggtcaacttcaaagaggagctgagatgtaggatctgtcagggga

SEQ ID NO: 127636 - DNA, 122 bp, Homo sapiens
ctgggcacacgggcgtcgtgcccggctggcatttgctgtcttggcctgcatgcatgtgggcgagcccctaaacccgctcagtgcagggagcgcggctcacccacagcccacggggcgcggtg

SEQ ID NO: 127637 - DNA, 122 bp, Homo sapiens
tgccaggtgtcctggattctcttctgccctgtggggctgtgtctccgtcctgtggccacacgctgtgctcttactgcacttgaggcagccccccacttcctctcccgttggtgtccggtgac

SEQ ID NO: 127638 - DNA, 122 bp, Homo sapiens
cagcagcctcaccgaacagctgaaaccctagacggttttttaactgcgcggggctgctcgcggtgcctattaaacatcctcctggctgggtgtcattttcttgcttctccttttgtattctg

SEQ ID NO: 127639 - DNA, 122 bp, Homo sapiens
acggcacactccggccggctttttgtccgcactctacaagttcgcaaggcgcgggaaccccgcctctcgctgcttattggcccgaaagggctatgccgcccctcactgcccattggctgaga

SEQ ID NO: 127640 - DNA, 122 bp, Homo sapiens
aggaattagtcattctgttctgggctgtagttcatgcttttctcccactctcttttgtgtcgcactcatgaagatcccttgcaactgaagccaggagacagtttttagttaaaaagaggagt

SEQ ID NO: 127641 - DNA, 122 bp, Homo sapiens
ttaagtatctgtgtgtttgtatctcacaccatcccacatggatgtcatcccataatcgtccgatttatcggccaagcgggacccctcctccccccacaggccagggtctgggtgggcaggac

SEQ ID NO: 127642 - DNA, 122 bp, Homo sapiens
aaggagccccgcagggcccctccgggttttctgggcctttctgagcagcgttccttgctccggggtatggtgcgggaccctttctacagtgggggtcttagaacctcttctcacaccaggtg

SEQ ID NO: 127643 - DNA, 122 bp, Homo sapiens
ctctgtcacccaggctggagtacagtggcgcgacctcggctgactgcaacctccgtctcccgggttgcagggacagggacaacctccgcctctcgggttgcaatgacttctgcaactctcct

SEQ ID NO: 127644 - DNA, 122 bp, Homo sapiens
gcccggctgctggggcctacgtttggcattgagccgtggggaactagacctgttcaatagcgacagctagtggtcaccctcaaaaacaaggtgctctgaacctcgcggggaaagcgctgtca

SEQ ID NO: 127645 - DNA, 122 bp, Homo sapiens
ctaaacaagctaggtcagctttgtggtcaattgctcaggtattattgcctccaactgttacgtgtacattttgtacccatgattccttagtagatctttccacatttggtctcaatcttttt

SEQ ID NO: 127646 - DNA, 122 bp, Homo sapiens
tccgccagctgccaccaccccaaaaaaagccgcagactccgggcactcggggaacaatgtcgtcaagggctcccggttcccgggtttatatggctcgaaccttacatcgccagccggatcca

SEQ ID NO: 127647 - DNA, 122 bp, Homo sapiens
ggcccagcaggacagctggactcacacctgctgctggcgcaggccttgttctgcccagggcgcacgaaaacacccggccccacgcagagaggcagcagggagagtggtcctcagcccctctc

SEQ ID NO: 127648 - DNA, 122 bp, Homo sapiens
cagttttgcaggcttaacaggaagcatggctagaaggcctcaggaaacttacgaccatggcggaaggcaattgaaagcaggcatttcttacagggtggagcaggagacagaaagagagaaag

SEQ ID NO: 127649 - DNA, 122 bp, Homo sapiens
agagaaaaacagaagtgggagcctgctgcgggctccgagaggacttgatgggagccctggcgcgcgctgggcaccgcgcggtgagtgtcgggggtgggggccgcgggtctccagcagcccct

SEQ ID NO: 127650 - DNA, 122 bp, Homo sapiens
aagcgaggtctcctcagagctccaggtggcgttttcagccgctccgtcctacctcggcggcgtcaggcctgaagatggattgttattctgtgtggcccaggcctgtggcgagcccaggaggc

SEQ ID NO: 127651 - DNA, 122 bp, Homo sapiens
tctcattccaaaaggtgaaactagatcttatccttctactgttcctggaagtagaaaccccggtagcaaaaccgcctccttgctggaaatgaacttgaagaaacctggcggtcccaaccttg

SEQ ID NO: 127652 - DNA, 122 bp, Homo sapiens
ccctggcagagtcatgcagggagcgtgcagggcgctgaccccatagcaatgcccacacagcgtgagccccacccgagccccgctgctgagttcatttcatgacagacacctgggagagccat

SEQ ID NO: 127653 - DNA, 122 bp, Homo sapiens
atattgagtccttcattgtagtgaagcgtccttctcatttcaaattgtcgctttttttctcgttcttcaggtgagaggtcactatcctcctctccactgctttcttgttcctgaacctgata

SEQ ID NO: 127654 - DNA, 122 bp, Homo sapiens
gtcccgaaccctgccctgcggggaggcagctaaggcccagcgagaaatcgagagcagcaccggtgggccggcactgctgggggacccagcacaccctctgcagccgctggcccgggtgctaa

SEQ ID NO: 127655 - DNA, 122 bp, Homo sapiens
gagccaccgcgcccggctgaaaactactcttaatagttacccatgaatcctcatgacagccggtgatatagaagcatattgtatgcacattccttttacacctgcatggtaaatgctctttg

SEQ ID NO: 127656 - DNA, 122 bp, Homo sapiens
cggtaatgatgtttaaaaggtgctttcgaacgatctcatttgatgctgaggcaaccgggacgtttagtcccattttacagatgaagtaactgagtctgctcagtaggtgagaagacttgccc

SEQ ID NO: 127657 - DNA, 122 bp, Homo sapiens
gctgggttcggcgcagctaacagacggcggcagtgcgagaaagccgaagatggcggtccccgcggcgctgatcctacgggagagccccaggtagctgatccgttaagctcttgcggtagccg

SEQ ID NO: 127658 - DNA, 122 bp, Homo sapiens
cctgggccatgacccctttcccatctcttgtctagttaagagtcgttcagggctaaggatcggactttgtgaagaggagcctccctgttatacaaaaggcaaaaagggaacccagaggatga

SEQ ID NO: 127659 - DNA, 122 bp, Homo sapiens
ggagcgacactaccagctgctgtcggcgttacagagcctggtgaaggagttgcccaggtacgcgggcggggcgggcggcggcctgccgaggccgcatcgtgtcccgccggggctcaccgcgc

SEQ ID NO: 127660 - DNA, 122 bp, Homo sapiens
aatcaacatctccatgtgcacgatcacactcgacttgcatagactccctactctcacctgcgagcacgctctcagctcagtcccaaacatgcacagggctggacccttctccaccatcaaat

SEQ ID NO: 127661 - DNA, 122 bp, Homo sapiens
gctcccaggactccagaggccaggtgggcgtggggaggatgtggtccccgcgatgtcgtccggcagagcgagcgagttctgtgtgatcagacagaatttgagtttcagtgtccaaatcagga

SEQ ID NO: 127662 - DNA, 122 bp, Homo sapiens
tgccgccggggcctggggctgacccgtctgacttcccgtccgtgccgagcccactcgagccgcagccatgtctggggacgagatgatttttgatcctactatgagcaagaagaaaaagaaga

SEQ ID NO: 127663 - DNA, 122 bp, Homo sapiens
acttctcacactcagcagccactcgggagttgggaaacaatctcctggggtttgtgctggcgtgattaaggaaagaggccacttacaggcctttgtctaaagcctcgcgccggtggtggctg

SEQ ID NO: 127664 - DNA, 122 bp, Homo sapiens
cagagtcaaccagaatataaaaagtgtgagtgcagagataaacccactcctgccctataacgacagtaacaaaactggcccagtggtagagctctcatcacaggccaggcactgcgctaagc

SEQ ID NO: 127665 - DNA, 122 bp, Homo sapiens
tgtgccacggtgctagactgcgcatgcgtcggcgactggcggccgggtttgagagcaaagcgcgttagccctgggcagctcctgccgggctgttctgggatccttagtgaaagttggaactt

SEQ ID NO: 127666 - DNA, 122 bp, Homo sapiens
ccaccccagcagctgcagagcccagcactgggcatgctgtggccaggaccctgccagggccgtggggctggctatgggggagaggtgggaaacaggtgaggagtaagcacctaggggcctgt

SEQ ID NO: 127667 - DNA, 122 bp, Homo sapiens
gactgacacatagtgcttggtgaggtcacgctggcgctgaatactttttgtataaaccgacgaacagctgatgaccgcatgaatgctcacacaaggggaaagggcgccaagccaaggagccg

SEQ ID NO: 127668 - DNA, 122 bp, Homo sapiens
aatacagggacagagaaacaggttaagcgcccccaagggaacgtagtcagcagatccagacgatgagaagccctacggggcaaacagctccttccttcaccaagtgaatcataaggaaaaag

SEQ ID NO: 127669 - DNA, 122 bp, Homo sapiens
actgcaccctcacggtcacccgggccctgagactgccttaggaagccctgatgggctgtgcgtgacgctgggctgtacactgttcccttgctttggccccagcctgggccccatgcccacgg

SEQ ID NO: 127670 - DNA, 122 bp, Homo sapiens
tccgtgccgtctctgtgggttcacctgctctgggcatttggtatagacagaaccgcacagcgtggggtcttctgggtctggcttcttttgctctgcatgatgtgctcgaggttcgtccatgt

SEQ ID NO: 127671 - DNA, 122 bp, Homo sapiens
agagtttctgtgtttctacaaactctgcaggcgatttctaggcagctgaaggttcagaagcgctggtctagaggacctgtgttggaatcaagggtttgggcaggcagaatttggcaggctgt

SEQ ID NO: 127672 - DNA, 122 bp, Homo sapiens
aaatactactctaattttactccacctttctgtgtaaaaactggccataaagaaattatccgagctggggagctgggcgaggtggctcacacctttaatcccagcgctttggaaggcaggag

SEQ ID NO: 127673 - DNA, 122 bp, Homo sapiens
cagaccctttaagttcctgtctgtgtctcaagtctctgcctttgtctctgactagtttcccgcttctgcctcaagtccccacccagttcccgccccaggtttgtagaattctcccttgctgt

SEQ ID NO: 127674 - DNA, 122 bp, Homo sapiens
tttattcgcgtgggccgccattttgaaagcatatccattccgtagagcagaggaattggccgctggcagggtttcctagagcgaggcaggtatagttacataggatgctggagtgtgaccct

SEQ ID NO: 127675 - DNA, 122 bp, Homo sapiens
ctggtataaatacactgtctaaagcatttaatggtctttctttaacacagccaactcccccgggtttgaaacagtgttaaattctctcttgcttgtggcaaaagaagctgtcaagtccaaca

SEQ ID NO: 127676 - DNA, 122 bp, Homo sapiens
tgggcaggccgggggtgagggctcgcgctccgggagctgcacggggctgcgtggaaagagcgccgagcggtggcgtcgttgtcgccccctcctcgtcgggaagaatcgtttggtctcctgcc

SEQ ID NO: 127677 - DNA, 122 bp, Homo sapiens
gcactttccgggcctgccagtgaggctgaggactgggggacccctctgtctccaggcattcgggggcctgaggtccctccagctacttctgggggggctctgtcagccactttctcagggaa

SEQ ID NO: 127678 - DNA, 122 bp, Homo sapiens
ccgttcctgccttgcccatctgtctttctttctttgtgaatttttgggaagccctgcaggcgatctgcttctgtcatctgaagccagcaaggcagcgtctgtagaagcaggtgaagctccaa

SEQ ID NO: 127679 - DNA, 122 bp, Homo sapiens
gggggcccgcgtcccctccatttctgcattcccagttcttggtatggttcctctgaggttcggttttcctgagcacctggggtgtttgcagggatgtggaggggttcctgcagaagacacca

SEQ ID NO: 127680 - DNA, 122 bp, Homo sapiens
aaacctctatgaaccccaacctttttgtactcggggaggctgaacccctgcccaaaatagcgcggtgaaagctactgccttctcccaagtaggggcctccagtactgccacagcaggggccg

SEQ ID NO: 127681 - DNA, 122 bp, Homo sapiens
ctgctgccggaagcggaaaccccctcctaccaggaggcggggcgagacagcttccgactccgcccccagaggaatctctctgaatgcggccatgctgggatgtcctattgtaaccttaggga

SEQ ID NO: 127682 - DNA, 122 bp, Homo sapiens
ggacggcagagcagaggtcgccgccgccgccctgggatcccatgccgtcctctcagcccccgcccccaactccgaccttgactcctaccccgaccccgggtcagtccccgccgctgccggac

SEQ ID NO: 127683 - DNA, 122 bp, Homo sapiens
ggcatccagttctacggggtcctctgtggatgctagggtgcccgggaaccagcagttccacgttgcattttcctggatgtccgagcagagcacccgggtcaggcgagttcccagaagctcct

SEQ ID NO: 127684 - DNA, 122 bp, Homo sapiens
agtctttgcttgttctttatttacagtgacattgtaatgaagtcaaaagagtgtaagtttcggtatgggtagagttgggtttaaaccctggatctgtagtttacttagtcaatcctcaaccc

SEQ ID NO: 127685 - DNA, 122 bp, Homo sapiens
gatgcgcggagcccctgggctcctgaggcaaaggcttacccatgtagcatagtgttgcctcgtttcttggtgattttcttgctccatctctttaaaagcctcccttactcggtgccgtctcg

SEQ ID NO: 127686 - DNA, 122 bp, Homo sapiens
tacacgtctggctctcggctgtggggctcctcttagagttatgcggatgggagacaaccacggccgcctcaccgagccaccgtgcacggcactgcgcaaacaagctcccagcacagcagccc

SEQ ID NO: 127687 - DNA, 122 bp, Homo sapiens
ctgcaacaaattttgtgcaaacacctatgcttgcatctggcatttcccctccccgccctgcggaagtggcccagctctcagagctcctcagacctcacccccagggtcctggggcagcacag

SEQ ID NO: 127688 - DNA, 122 bp, Homo sapiens
catgaattaatggacacacccaggaggacctggtcacaaatacagagactgaaactcagacgcatagagtaacacagacacacagaattacacagacacaagcatatttacaaacatgctca

SEQ ID NO: 127689 - DNA, 122 bp, Homo sapiens
caagtgatcctcccgccttggcctcccaaagtgctgggattacaggcgcgagccaccgagcgcggcccatacgggaaaacgtcaaagcctgacaggtgtgacaaataatgggcccctaggca

SEQ ID NO: 127690 - DNA, 122 bp, Homo sapiens
agtcatcgcgagaattgaccaaacgcagctcctccaatcaggagttcgaggaggtcgtgacgtcaccggggtggccggtagcaatccggtttagttaaccagccactgtaccgtcagcgccg

SEQ ID NO: 127691 - DNA, 122 bp, Homo sapiens
gcagggaccgcagcgacgccctcaccggaagtcccgcctctgccgtgggcctgcgagaatcgaggcactcgctggcgtacccatgtatcgaaatgagttcacggcctggtaccggcggatgt

SEQ ID NO: 127692 - DNA, 122 bp, Homo sapiens
agcctcctaccaccacaccaaagtgctggttcctcgatttccagggtggggtaaagtgaccgagcaaaggggatggtgtgtttgtgtgtgcgcgcgcatatacgcgcgcgcgtgttgtgcat

SEQ ID NO: 127693 - DNA, 122 bp, Homo sapiens
tgcccagtcaaggaagcctggtcaggtatgagccccagaagggtggtctccacccaccaccgggaccagcctcggggggccgcggagcctacgcacctggacaggtcgcagctgcacctggg

SEQ ID NO: 127694 - DNA, 122 bp, Homo sapiens
tgaaggtacggccgctctgctgctacagggttcggcatcgtctggtgatgggtctggcctcgcagaagaggccctcgggcctggagatgtgaacacaggcagcgaccctgttccagagggct

SEQ ID NO: 127695 - DNA, 122 bp, Homo sapiens
tggggttagctcgccgcggcgagggcagcggcgggggtgcccgagggcagctgcagcatgcggagcccccgggcctggcctggccgcgccccctgacatggatttctataccacaactcacc

SEQ ID NO: 127696 - DNA, 122 bp, Homo sapiens
tgtgaaggcctgtgctgaactaatctgcctcactccactggtgtcctttcttgcctcatccgataccatactcatgctcagccactataattacaccctcgtgtacaccttttattctttca

SEQ ID NO: 127697 - DNA, 122 bp, Homo sapiens
tgacctgggctactgagggccacctgagctgctggggtggggctcccccagcatccctggcgaatctggttcctccccaagagggggcaggcagggagaggcgggcgctgctttcccctctc

SEQ ID NO: 127698 - DNA, 122 bp, Homo sapiens
ctgtgctgtacatggagctgggcctacgcactgccttctggcgcacatggctgccggggccgccaggggacttgacacggcgcttcacatcgtccggggaaggtggcaggtcccccggacgc

SEQ ID NO: 127699 - DNA, 122 bp, Homo sapiens
ctagcctcaagtgatcttctcacctcagcttcccaaagcactgggattacagtgagccaccgtgccttacctggttgggtttctgaagttacaatattgcatatagttttcaaaatataaag

SEQ ID NO: 127700 - DNA, 122 bp, Homo sapiens
catcgctctctctccgagcaaggtccttcgctctctggcaatccccattgtatccctatccgcagctcgtttctaatctcactcagccgccagccttcgctaggaggatagaggcacttggc

SEQ ID NO: 127701 - DNA, 122 bp, Homo sapiens
cttgttctatccactgcatttgacactgctgaccactctctctttaaaattatcttttctcgacttctgtcacactactttcagatttttttgtttgtttaaaatctatttcttgttagttt

SEQ ID NO: 127702 - DNA, 122 bp, Homo sapiens
cctgtagaccggcgggtgcagggcccggtcccagagttaagggtgtgagtgagactgctgcgggcaggggttggcctatgccctctgctagggggagaggtggagtttgggtgtggattaat

SEQ ID NO: 127703 - DNA, 122 bp, Homo sapiens
cttaagaaccaatagtgcagcatttgtgacaggagagcgcaaaacaaaccctggctgcctcgggatggagcggggcggcctcaccaccactgcatccagcctcatgctccagagcggatttg

SEQ ID NO: 127704 - DNA, 122 bp, Homo sapiens
cggggacagggcgggagagacctgtcagtggtggtcccctgttgccacccgacatactgacgtgctggcgggccacgcgcgactgcaccgcccagacatggggactggtcaggcaggaagca

SEQ ID NO: 127705 - DNA, 122 bp, Homo sapiens
caggatgtccgagtgccccctggccctggctctcgtgtgcatggacgtgcctgaggggtccgggcacggccatacgcaggacccctgtgcccggggaggcgctgcagggattccccatccgg

SEQ ID NO: 127706 - DNA, 122 bp, Homo sapiens
tggcgatctccatctccgtcttgcctccacagatgtgtcgctggttgtggaagcggagctcggtcagcgtgttgttctggaggagggcccggaagatggccaggatgcctttgcctgtgatg

SEQ ID NO: 127707 - DNA, 122 bp, Homo sapiens
aagcgcttcgccatcctctgggtggagtcagcctcccgtttgctgttagcgccgcgtttgcgaatgggttcgcgaatttttctctcagttggctaaggagcaaggagttagcgtgcgttaag

SEQ ID NO: 127708 - DNA, 122 bp, Homo sapiens
cccggctcgcggggaatccgtgggcttgcactcgccagaaagagctgctgcaggagcagccggatggtgaggcccgttcccgaccctgggtgggaggaacttaaagggctgagttctgaggc

SEQ ID NO: 127709 - DNA, 122 bp, Homo sapiens
ctccatgccccatgagcactgcgggcaaggcgtgtgcctcctcaggtgaaaggacgcgcgcggctgaggggccgaagggggcacagccattcccagcagccccaccccctcggagccgcggc

SEQ ID NO: 127710 - DNA, 122 bp, Homo sapiens
tcagagggtctgggcagcagggtggacaggaaggctccggaatattcagttgcgtcgccgcgcggaggggacaggtccgcgcctcccggagagcgggacccgagcgtaccgcgcaggcgcag

SEQ ID NO: 127711 - DNA, 122 bp, Homo sapiens
tgagccgggaagcagttgctgtggtacctgctgctgcccgagcggacgtagagcatcggacgcgggcgccgtggcgctgggcaggagggcgaagccatgacgtcagtcaggtaacgagcggg

SEQ ID NO: 127712 - DNA, 122 bp, Homo sapiens
cactcctgtgggtttccaggccctggttcagcccaccccatgccacggcctaggggcctgcgggacacaggaagctcggggctcaggcccacctgactggggcctctgaggctcttgttgct

SEQ ID NO: 127713 - DNA, 122 bp, Homo sapiens
cgacggggcccgaaatggggcccgcgcccacagtcgcggagccgcaagttgccgcagaaccgccctgggaacatcacgcgaagttgcaacatgcacttgcagcggaagtattgcctcttgga

SEQ ID NO: 127714 - DNA, 122 bp, Homo sapiens
cgcttcccagaggaagccgaatagtgcaagccggaggagaagccagcgacccgtggaggtcgccatattggaccggggcctcgggtcatgtgggctcgcctcacgtgactcaagtcccaggg

SEQ ID NO: 127715 - DNA, 122 bp, Homo sapiens
ctggactcatgctgcacacgttaagttcagtcgtgagaagggttttaagcaggagtgacacgatcacactccagtcttaggctgcatgcacatccaagtctgggcagtttatgtaacttttc

SEQ ID NO: 127716 - DNA, 122 bp, Homo sapiens
tggtcggtgattgactccacaggtaacaagctctgggtcaagatcttgggctcggcggggcgccaaggggaagcagcgcgcccggccttgttcatgccgtgagctggagcgggagcccctgg

SEQ ID NO: 127717 - DNA, 122 bp, Homo sapiens
gcagagtgcacctgcctgtgagggcaggtgtgcccgggtgcttgggcgtacgtgcaacggcgagcgtgcaagcgtggagctgaaattgtgtacgaatgtgtggggtctaagtgtgccagtgt

SEQ ID NO: 127718 - DNA, 122 bp, Homo sapiens
agaacacaaccatgtgattatctcaaccaaggaactgaggaatccagcacgcaaggacatcggaggtgggctagcactgaaactgcttttcaaggtaagtttaaaatacacatatattttaa

SEQ ID NO: 127719 - DNA, 122 bp, Homo sapiens
cttgggactaacgctcagaacttacatcgcctccatattgccgtctccatagatacaggacgcgcaggaaacggcgtcttcagatatcccagggcaacgacggcagcccgagtaagtcaaga

SEQ ID NO: 127720 - DNA, 122 bp, Homo sapiens
gacgtaaagcctacatttgctgtacagccgccactctctctgtgtcttttctttaaccctcgccttccctccaaaacctaacagttacgatatggggaaatgaaagtctaagaaatatgatt

SEQ ID NO: 127721 - DNA, 122 bp, Homo sapiens
ataaaaggttctttagcagttaaatagattccaatatgaacgtctcccaggacaaagctgcgtctcgcctctgggtcacacgcatctgtgcggctggggtgtatgtgccgcgtcacagcagt

SEQ ID NO: 127722 - DNA, 122 bp, Homo sapiens
acctgcctgaatcactcccttgaaaaaggcccaagtgcagttgtttcctttaatgacctgcgctattacaggctttggattttgtgtgtgcgccaagaagaagggtaaacaacacacaaact

SEQ ID NO: 127723 - DNA, 122 bp, Homo sapiens
gccgggccgtaccaagagcgcaaatttgcagggggaagcgcggggctccgggaatgcacgcgcggctcgagtgggcggggcggcggcccaatggccacgcccccacccccgcggccggcgaa

SEQ ID NO: 127724 - DNA, 122 bp, Homo sapiens
gtcaggcttctctgctaaccagggagactggttgctaggagaccatgctaatgaaggactcgctcactacccaaatggcaagcaatccggctttgtgccagaaacgaagcacttccgaggca

SEQ ID NO: 127725 - DNA, 122 bp, Homo sapiens
gcggaactcgaaattcatggggcgactgcgagcccggggtctcagcttcagacaccctggcgtgccctccactccggaaacggaaccgtcggcgcccgagcggggggtggggggggagggag

SEQ ID NO: 127726 - DNA, 122 bp, Homo sapiens
tgatgaccgcaaaacgctcttcagacgcgccgaccttggtggcttttggagagatgcatccgagctcgctgctggcaaactctcaagtccaagtgtgcggctccctccggaaagaggcctca

SEQ ID NO: 127727 - DNA, 122 bp, Homo sapiens
ttacattcatagggtttttctccagtatgaattctttcgtggaggtgaagggaactgaggcgactgaaggcttgatcacattgtttacattcatagggtttctctccggtatgagtacttct

SEQ ID NO: 127728 - DNA, 122 bp, Homo sapiens
ccatgtccaggagctcatccacgtcaatctccagttctgggatctcctcttcctggcagtcgtagaggcgcgtgagctgctccaggatccactcctctaggttgaggcgcttccgtagctcc

SEQ ID NO: 127729 - DNA, 122 bp, Homo sapiens
gtgagcagggaatccgcaggcttcagcggcgggggttgaccggcagctggcgtcgagaggcgcttgggaaatggggtctaatttattttagaccctgtccccgactgccgcgccctgactgg

SEQ ID NO: 127730 - DNA, 122 bp, Homo sapiens
ctctccctcgctggctgcctcgctctttctcttcctatataaccttgcccgccgcggctgcgggggactctccaccgctccccacccagacaggggctggaatggcaggctgccggccgctg

SEQ ID NO: 127731 - DNA, 122 bp, Homo sapiens
tccagattacctgtagatcttcagatgcaaactgtgattcagtaggtctagagttgggcccgagagtctgcatttcacaagctcacaggggatgtgtatgctgctaccgcactttgagaggt

SEQ ID NO: 127732 - DNA, 122 bp, Homo sapiens
ggtgggcgtcttgcttttcggtcacctggggttgggggtgacctgcttcctgggtgagggcgtctgcgaaggcggttggaggtggcccgcccgccggtcccatcggccaggagaagggagac

SEQ ID NO: 127733 - DNA, 122 bp, Homo sapiens
tgaacgccccctgcgctccccccgcgctccccgcgcccccctccggctccagctgggccgcggcctattgcaggcacccgtccacagatggaacccattacgccccagcgcctctcgggacg

SEQ ID NO: 127734 - DNA, 122 bp, Homo sapiens
acctgcttcgtgctcagcagcgggtcgtgggaaccaccctacattgtcactcatctgtcacggctgcacagtgctcccttgtgacacaatgcacagcctataaccttttgggtgtttgcata

SEQ ID NO: 127735 - DNA, 122 bp, Homo sapiens
ttgaacagggaaggggagtttcccaaataggaggcatatggcctaaattcaggtgcagaccgtgtacatttcagccaagtgtatgacagtgggatcaataaccatggcatgcactagaggtg

SEQ ID NO: 127736 - DNA, 122 bp, Homo sapiens
ctgttccgacacgtagggaagagacatgctctaacgtgagtgctggagacagggcacacacggtttcccgtgggaagagactccgctctgccaggcattcagaaagcagggacccgaggccg

SEQ ID NO: 127737 - DNA, 122 bp, Homo sapiens
tttttatattttcaggtcatagatttaagtccttgatccatcttgagttgatttttataacgtgaaagatgaggatccaggattattctcctacatgtggcttgccaactatcccagggcta

SEQ ID NO: 127738 - DNA, 122 bp, Homo sapiens
aagttaatagaaatgcggagtcaggggcaggcctcggcggcgtccgggctgggggcgaggcgcccacgccccaccctcccgctgtggccgctggcgccggcccgagcgcgcgcagcccggtg

SEQ ID NO: 127739 - DNA, 122 bp, Homo sapiens
aaggaacacattctcctcaacagcaggggcctatgggcttcgcagacacccacagcaactcgggtctctaggatggcctcagacagcaaggacagaaagcaatgcccccatgcacccgccgt

SEQ ID NO: 127740 - DNA, 122 bp, Homo sapiens
cggcccactgtgctccgctccaagccctcccacccctgcccggcagggctgcgctgaatccgggctgcctgcagggaggcgccacacctgcccagacccagggcagcatggctgttcccttc

SEQ ID NO: 127741 - DNA, 122 bp, Homo sapiens
gattgggaattaagcatgttgtctttttaaacttagcatttggatgcagtattttatatgcgtctcctggcttggcttcacactggtaaatggtgtttcatcaggccaaatgatgggaaggg

SEQ ID NO: 127742 - DNA, 122 bp, Homo sapiens
tggtgggagggaggtcctgaagcagaggacatcttgattctggttcagtccccgatctggcgtaccagcccacccgggagaagaacacataggaataaagaaaccacgtgggaggagaggag

SEQ ID NO: 127743 - DNA, 122 bp, Homo sapiens
ccccgcctccccgcttccccgccccgcccccgggtgctgttctgacttccctccctcctccgcagctgttcagcccctcggtgaccgtgcccgacatgagcctgcctgaccttgacagcagc

SEQ ID NO: 127744 - DNA, 122 bp, Homo sapiens
agcactctggtgtgggaggtgggccgtacgggcccagagggggcgcagggaagtctccaccgcgcttctctccgtccagcccgggccggggctttgcaccctctctcctcgcccccgacttc

SEQ ID NO: 127745 - DNA, 122 bp, Homo sapiens
acttgggggcggtgaaatagccgctgtaggtccgcctctttcattgaagaaatttaagttcgtgtggttttaccttttccgggagtctccagctggccctcatttgtgtccggagctcagga

SEQ ID NO: 127746 - DNA, 122 bp, Homo sapiens
gatgatggtattaataaaatgttttataatgtcaattctactttaaataacccagctccccgactttaatgctggccccttgacccctctagcaataatattcatattacctggtggaataa

SEQ ID NO: 127747 - DNA, 122 bp, Homo sapiens
ccgccgccagccctctcctcctcctcgcctcctccctccctaccaccacccggacaaagacgtctcgatcgcgtttccccactccaggccgcagtaatagatcgctccggcagcaggcggtt

SEQ ID NO: 127748 - DNA, 122 bp, Homo sapiens
aacactgagtcccggccggagtccctggtggctcccccggccccggcagggcgcagcccacggggccccacacccatgtctgcagccagagccctgggccaccacttcatggccagccttat

SEQ ID NO: 127749 - DNA, 122 bp, Homo sapiens
cagagggaggtggcagagcaggctctgctctcaggaagtgccccgtgggtggcgacgggccgagaggtgctctgggggacgagttatggctctgagctgcccgtgcaaggcagggaggctgc

SEQ ID NO: 127750 - DNA, 122 bp, Homo sapiens
caacttggatagatcttaagggtaatttgctgagtgaacaaagccctatctcaaagcttgcgtaccttacgattccattttaatagcattcttgaaataacaaaattagggtaatgggatca

SEQ ID NO: 127751 - DNA, 122 bp, Homo sapiens
tctgaaatagaaacagggactggggggaaaggatgtgagttttgtgtgtgatagtcataacgcatcacccagacctgagaggtgacaatcctgtgctataccatgacctttactcaacttta

SEQ ID NO: 127752 - DNA, 122 bp, Homo sapiens
cattgttgtattcatgagtaagactaaatatcaccagacggtgagtggtttcctaagtgccgccaatggacaaggggtagctagaacaatgatgaggtgtttctctaatgactcatctccag

SEQ ID NO: 127753 - DNA, 122 bp, Homo sapiens
atacttccaatccagtatcactaccctggcctatgccagcataatctcttgcctactaagcggtctctgccttctgtcttgcccctttcaaatctactctccacacaatagcaagtttgact

SEQ ID NO: 127754 - DNA, 122 bp, Homo sapiens
acattaaaactacttcccaacccacaaagaccccacttactactaatttctggggaatttcgtttactcgttttatctaatattaaaaaatcaacattttgccagcagttaaaaagacaacc

SEQ ID NO: 127755 - DNA, 122 bp, Homo sapiens
gctctgatgagaggttccatacacttccaagattgcccattgctgacagtaacctatgatcgtggttttcacatttggcaagagagactgttctgagcaaaccctcctccctgaggagctat

SEQ ID NO: 127756 - DNA, 122 bp, Homo sapiens
ctttccattgcttggcctgaacagactgaccttgttaacttaagcctggagtccatgcctcgtcttccttttgttcattgctgttaccaagaaagccaaggaagagcagcctgactcattct

SEQ ID NO: 127757 - DNA, 122 bp, Homo sapiens
cctctcacccgggctccgctttgtgtgtgcatttttttcccttcctctagtgctcggcaccgggctcccggccgcctcctccccctcccccgccctccgcctcccttcccggggcggattac

SEQ ID NO: 127758 - DNA, 122 bp, Homo sapiens
gccagggccagggccaggaccagcgacagggcagggccggcagtttcgctttggtgggcgcggagcagccgcctgggccgggcaggagtaggagcgggaggaggaggaggaggagccggtgc

SEQ ID NO: 127759 - DNA, 122 bp, Homo sapiens
gagggaggggcgggaggaggaggctggtgtgggggctggagctcgggcagggaggccttccggggaaggtcgtcctcccagctcccgcccaccggccaccctggcctggccccagccgctcc

SEQ ID NO: 127760 - DNA, 122 bp, Homo sapiens
aatggtgatgactgtgtgttcaaatcattgtgtttaatgccagcttctcagtggtgagtacggaacaggtggaaattctaaagcacgcttgcttatctacttggtttcgaagtttgttatta

SEQ ID NO: 127761 - DNA, 122 bp, Homo sapiens
ccccacttcagcggcagtgtggacaccctctgaccagccccctactttccagtgttcccccgcctccacccatcacgataagcacgccaggttctgctgagaccactgtcccatgagtatgt

SEQ ID NO: 127762 - DNA, 122 bp, Homo sapiens
ggaggcacccccatgcgatatggaaagtaatagcacccccacttccctccctggatattacgatacacatcacagggggtgaagcacccccctgggaaataaggagtaatagcaccccaccc

SEQ ID NO: 127763 - DNA, 122 bp, Homo sapiens
aatacctccccaggagggcatcctggatttcccccttgcaacccaggtcagaagtttcatcgtcaaggttgtttcatcttttttttcctgtctaacagctctgactaccacccaaccttgag

SEQ ID NO: 127764 - DNA, 122 bp, Homo sapiens
gaagcgaggcgccagccccagccgcttcgctgccgcggagcctgcacgaccgagaggtcgcggagagaagccagagacaggccagcgacctggcgaggcaagaaaataagataaccgaacgc

SEQ ID NO: 127765 - DNA, 122 bp, Homo sapiens
ctgctcacagacctggggcttacagcctgtgggctggctcacttgcatggtgatgggacacgttgctgggagtgctggtcacttttatttgggggtgtggacagctgctttcccaggggagt

SEQ ID NO: 127766 - DNA, 122 bp, Homo sapiens
aaggtcgcgcttcctggccgccaaaaccgaggtggaggaaacttggtagtcagcgagctacgccctctcggctcctcctcctgctcctcctccagggccgacctcttcaagatggcgggcgc

SEQ ID NO: 127767 - DNA, 122 bp, Homo sapiens
gggtggcaaccctccactggagtgcccttcctcatcgtcttggggttaagagttgccgcccggccagggcaacagccagggcaaagggagagagaagccgccccggggcgagaaggagaaaa

SEQ ID NO: 127768 - DNA, 122 bp, Homo sapiens
tgcttccggcaagggggtgcagagggagcgggaacacgggcgccgcagagcctagagcgtcggcgagcttctcggaaagagttggtgccaccgtcctgacaccaaccctctgggactgtggt

SEQ ID NO: 127769 - DNA, 122 bp, Homo sapiens
tcggctctgggatttgcatgacaaaagcactctacaaacaacaacaaattgccagcttgtcgggggccgcagggcgcgcgcgacaactggcgcgttcctctgggcggcgctgggctccgaga

SEQ ID NO: 127770 - DNA, 122 bp, Homo sapiens
agggagaggggctctgctgcctccgtcccctctgcctgtcggggcccgtgctgcaccccacgttgctgcagagtaattggcagccccccaaggttaatgcactgttagccaggggttctcct

SEQ ID NO: 127771 - DNA, 122 bp, Homo sapiens
ccactccgcgtctctgcctgcggggactccacggagttcgataattacctagagctccaccgcgccgccattacaccggacgtacgtcacttcctcttcccgagcaccgacggtaggaagaa

SEQ ID NO: 127772 - DNA, 122 bp, Homo sapiens
ccagagatataacaaaaaacagagtacctacactagattagttacatgttttcccaacaccgaatattataaatatattactatatattaataagtctatatttaaaatacaaaatgtctaa

SEQ ID NO: 127773 - DNA, 122 bp, Homo sapiens
gtagggcagggcagagcccgcttgaccccttccttgggaggggggcctagcgccggggcgcgtttcctcttcgcgctgccctgtcctggcccgccactggagccggtagcccgcagggcagc

SEQ ID NO: 127774 - DNA, 122 bp, Homo sapiens
tgatttcccagctccagatccttggatgggcctgacatcaggctcctgtccccacggcagcggtcccagcctctgcgcctgccacctccagtccccgagcccacagcgccacccaggttgtc

SEQ ID NO: 127775 - DNA, 122 bp, Homo sapiens
gcggatcaagtgggggcggctccctgggtcagctgggtgggcatcctgccaggcattcttcgggtccgctgtgcgcttggagtcagtcaccgctgtgtcctgagaggaggtcccattgttct

SEQ ID NO: 127776 - DNA, 122 bp, Homo sapiens
agggcaacatagagagaaacacggggcagtatgccaccaaggaatagacatatacacacacgcatgcaattctatccgtttacataaggactccctaacattgatagctacttgcctttata

SEQ ID NO: 127777 - DNA, 122 bp, Homo sapiens
cgatggcagaggcttctggaaggggcctgggacagcaggagggtgatgcagacggacccacggcaaggacaggcagggctaggaccatgccctgggccacacagggcctcacgctctgccag

SEQ ID NO: 127778 - DNA, 122 bp, Homo sapiens
accgtcttaaatatagcagcactgagacagtacaatgacaatggatgagaactatggcatcggggacagggggccaaggggaggggccattccgtgtctccagcctgctgggcagcagcgac

SEQ ID NO: 127779 - DNA, 122 bp, Homo sapiens
atggtggccgacaccaggtggttgaggtccccgtaggtgggggtggtcagcttgagggtgcggaaacagatgtcgtagagtgcctcgttgtcgatgcagtaggtctcatccgtattctccac

SEQ ID NO: 127780 - DNA, 122 bp, Homo sapiens
cttgaaatgttgctattctgttataatccatcatttaccttaggagatctgtcattctgtcgattacttatgcatatcaaatttaaaagtaaatcttaacatcactacaattatattcgaat

SEQ ID NO: 127781 - DNA, 122 bp, Homo sapiens
cctctggcagctctttggggacaggaagctgccccccaccggacaggtcctgctcaagtccggctatgccttcgtggactacccctacaagaactgggccatccgcgccatcgagaccctct

SEQ ID NO: 127782 - DNA, 122 bp, Homo sapiens
ttcttggtgggctggctgtagacgtaaccttcactttcacattgtgtatgtgtgtgtgcgcgtgtgtgtgtgttgaatagcaagggccctagattcacactgcctgctttcaaatcctgggg

SEQ ID NO: 127783 - DNA, 122 bp, Homo sapiens
gaagcattaggcggctgcccccggggaaacacaaaacttctttttgaatctcgggaaaggcggttgactgcattaaggagctcccgagacagaatgaggaagggaaaagccgagagggcggg

SEQ ID NO: 127784 - DNA, 122 bp, Homo sapiens
gattttctgtatttcaagaagaatcatactcaaacacaagtggggtgacagaacactcagcgatatgtaattagttacgaaggttaacgctaaggcattgctttgtttacagtttttatcct

SEQ ID NO: 127785 - DNA, 122 bp, Homo sapiens
tgcactgtctggtcaggctcgccggttctttgagtggtttttctggttctgggtcggacccggagttaggtggatggccggcaggggcagtagacagaaggatctcagcccaaaaccaagga

SEQ ID NO: 127786 - DNA, 122 bp, Homo sapiens
tataatttatatgcatttctatagttttttaaaaacatgtttaagttctttatgtgtcctcgatactgtatttttagaagtctctttggtgtgtatggttaattatgcctcctttttgttgc

SEQ ID NO: 127787 - DNA, 122 bp, Homo sapiens
gcagctcgagcagggtcgggtgggggggtgggggcggggaagtgggggagccagcgccggcgaggggacctgaggacaggacttggcagcgccccccaacccccaggccattccgggagcgg

SEQ ID NO: 127788 - DNA, 122 bp, Homo sapiens
gaggcgctgcaagcccgcgcgcagctccggggggctccgacccgggggagcagaatgagccgttgctggggcacagccagagttttcttggccttttttatgcaaatctggagggtgggggg

SEQ ID NO: 127789 - DNA, 122 bp, Homo sapiens
cagacccagtcctttatttattacattggccatttggtccaccagccaagaactcagtaccggtcccacccttacagggcatcctggaggtggtagtggcattggatgtgggtttgtggtca

SEQ ID NO: 127790 - DNA, 122 bp, Homo sapiens
tacacgtgcatatgtgtgcgcagctcagcataaataaatgagattcacaattccccacctcggaccagcgccaaatccgcaagaggcccacggctaaatgttattcagggcttttggtcaaa

SEQ ID NO: 127791 - DNA, 122 bp, Homo sapiens
tcgcgagcgattgacggaaacagaaattgctttgcggcccgcacggaaattgctttccttcggcttccgttcttggtccatgtgagagaagctggctgctgaaatgactgcgaaccggcttg

SEQ ID NO: 127792 - DNA, 122 bp, Homo sapiens
tgtttccacgtgtgggagcgcctctcattcccccaccacacacgcccagtttccgcttctcgcccccaagggcacagctttgcctgctgggtgctgtgccctgctgggtacacgcgggcctc

SEQ ID NO: 127793 - DNA, 122 bp, Homo sapiens
ctagtagcttgcatttgagaagcttatgacttagatgggcagaatcaacaaagatgaaaccgcctgaggacacatttaacaagtaacatttctagggaaaatgaaggaagtaccacaaactg

SEQ ID NO: 127794 - DNA, 122 bp, Homo sapiens
tgcaaacccaggggctcctttttcattctttctaaaaccttgatatcctcagcccaaaggcgatgcccccctgccacctccaagcctggaattgtgcataacccggatcttgtatctttgta

SEQ ID NO: 127795 - DNA, 122 bp, Homo sapiens
tgggagtaagcaaatagtctcccccgccactggggcacgagccagctgcccctccgcggccgggagcccaaccctggggaagagagcagccacgccccattcctccaccgtgactcgaacct

SEQ ID NO: 127796 - DNA, 122 bp, Homo sapiens
cctcaatgaccaagtcagggtgaggtgagggcttcctgagttcagatcccagcaagctcccgatcctgcgcaacgaagaaaactcaacaaaacaggctttggctgtttattttatttttttt

SEQ ID NO: 127797 - DNA, 122 bp, Homo sapiens
attaataattaataaaactgttcccgatatccgtgggggagaggatattactcccaatatcgcagaaagtgtacacccctctatgatgttactcctaatagccagtgggtagaggatgacat

SEQ ID NO: 127798 - DNA, 122 bp, Homo sapiens
ggcgggtcccccccctgccaccccgctccctacttcctccttctctccccactggaaccacgagaagaacaaaatggccgccgactccttagacagcctcgggcggcgcacggatgcgcgcg

SEQ ID NO: 127799 - DNA, 122 bp, Homo sapiens
ctgagccatggaaaaattgtcttccatgaaacctgtctctagtgccaaaaaggttgggaccgctgcactaaaggagtgttatgatattgcagatgtaggggcagtcactcaaatctccacaa

SEQ ID NO: 127800 - DNA, 122 bp, Homo sapiens
aggccatctcacgtgtacataatcagagccacaataaattctatttcacaccccttgtgccgggctcagtctagcccctgggaggcggctggggtctggcgccgccctgcgcagcccgcgcc

SEQ ID NO: 127801 - DNA, 122 bp, Homo sapiens
gtggtgttgtaataaaattagttattttaatattaagccagatgtgtttaaagtaggggtcgggaggctgggcaaaaggctgatagagtaatactggcataatttgatgaggacctggaaag

SEQ ID NO: 127802 - DNA, 122 bp, Homo sapiens
accccgaatcgaagcccgtcatccccgcggggcacctctccatgcccggtgcgcacggcgcgcagacacccagctctccagagacctggcccggaccccccggagcccgcccagacgccgcc

SEQ ID NO: 127803 - DNA, 122 bp, Homo sapiens
gaataacaatttgctgatggaataaacaccctcctacatgccctccctcagtggccatcacgagaacaagagggcagagagaagccttggcaggatttcccaggggtgaatggcaggccagt

SEQ ID NO: 127804 - DNA, 122 bp, Homo sapiens
gatcatctggacccagccatgcctgaagccatcaactcctgagattttcagtttacacgacgatgctattgcaacacatttctttttctgttcaaggtacttgggagagtttcctcatctcc

SEQ ID NO: 127805 - DNA, 122 bp, Homo sapiens
tctctacaccatggaacctgcacagaggcgtccaggccagtgcacccgagccggggcagacggagaacgcccctgtgctcaccctgccctcggccttgcgtggggaagaagctctgggtctg

SEQ ID NO: 127806 - DNA, 122 bp, Homo sapiens
ctgagaggacctctcctgtgtgctggggtcatttggagcaagaggtgtgggcggtcgcgccgagacggtcacctctctttcccccgggagtctcggcgttgcacctgagcgtgagtcctcgg

SEQ ID NO: 127807 - DNA, 122 bp, Homo sapiens
atcatctgtcctacctttaaatattgaatttgggtcttcttctctggcagagattcccctcgtcccaactgattaataccaggggaagtagcaatatcttgtgatgagaaccctgcagccac

SEQ ID NO: 127808 - DNA, 122 bp, Homo sapiens
ctgggcagggggagcccaacgggcagagcattgctgtagagctccgcgctgggcgggcggcgcttgtcggagtggtgctgcaggaaggtgtgtttgttgcggtgcaggtagtccaccaggtc

SEQ ID NO: 127809 - DNA, 122 bp, Homo sapiens
aaccggcgtttcagatgtttatttgcaactaatttcttgtgctggaaaatgcttgttacccgggcggagcgcttccgctctgcgcggtccggcccggcgggcggtagctcgctgatccctcc

SEQ ID NO: 127810 - DNA, 122 bp, Homo sapiens
tccccagggactgatacaggacgggagccccggggagggcgggaaagagggagacttgggcggagcccacagaaccccagggtctctgttttagcaagaaggacaggaggctagaacggggg

SEQ ID NO: 127811 - DNA, 122 bp, Homo sapiens
gccgggattcagctcgagactggcgtgcccagtgggtggaggcgtgagtgcttcggcccgcgcttggcattggagtgaaatcaggaattcagattgaggtctgaagcagtgaaaacgctctc

SEQ ID NO: 127812 - DNA, 122 bp, Homo sapiens
tggctggcacaggtgcctcgtacctggctgcgtgccagctcctcgcacgctctgcaccaccggttcgggtcccatggcagccgacatgccgtgggcctcctccaggccatccatgcgtggga

SEQ ID NO: 127813 - DNA, 122 bp, Homo sapiens
cgggggcctgtagtgcgcggtcaggaggcgtttgtgattgcgaggagggctgcttgctgtcggttcaacgattgctggagcgccggcggtgtcggcacaggtctaggcatggggaaagcacc

SEQ ID NO: 127814 - DNA, 122 bp, Homo sapiens
ggaccccagtcagcaccagcctcgggagcgcctctggacaaggtgccaaaacgaagcacacgtgctggccagccagcatccttcctcccagaggccggctcaggcccagaagtgctgccgtc

SEQ ID NO: 127815 - DNA, 122 bp, Homo sapiens
cgtctcttaataagccccattcccactttgttcgggtcgatatcgagaatgccttctcgccgggctctctggtgcaccccccggtgatttccgggctcccctatgtaccccgcgttgatttc

SEQ ID NO: 127816 - DNA, 122 bp, Homo sapiens
ttgcccagtgaggggcagtgggcaagggagctcgtagaatcctgggtcagcggggtggggcgctgggtaagtggacagggtggtatcttgactgaggacgaaggggcagaagaggggagggc

SEQ ID NO: 127817 - DNA, 122 bp, Homo sapiens
acacacagcaggcgctcaatatatgccggttaattgatagcagcagacacagtgcttctccgtctgccttggacagccagacaccagtcttctctggctcactctttcttcctttctttctt

SEQ ID NO: 127818 - DNA, 122 bp, Homo sapiens
ccaccttacttagcgagagcccagcactggcccagggtcctaaagggtaacgtgagacggcgcaggcagaagctggccatgagccgctgggacccccacggctggaatgcttgtcggctggt

SEQ ID NO: 127819 - DNA, 122 bp, Homo sapiens
agtgggagccgcgccctgtgctctgcgtccggcactacccacctcaagtctccaaggcttcgttttctgggctggttctgctagctgtagtactgctgccgggccctctgcactcagcttta

SEQ ID NO: 127820 - DNA, 122 bp, Homo sapiens
ccggtgggacctcgctgctgtccaatcaggggggaccgggtgagctcctcttcctggagccgggctccaccagcgccgcaggctcacaggccgggggtgggggctctggaccgaggggcggc

SEQ ID NO: 127821 - DNA, 122 bp, Homo sapiens
ttctctgtcatcaaatttgctttctgatttctcctctgtattaactgatccaatggcttccgtcattctgaggaaaaagttcaagctccttttcaaggcctacagtgcttgctccttggctc

SEQ ID NO: 127822 - DNA, 122 bp, Homo sapiens
agccgcgggggagggggccaccgcagtacttcaggacagttacatgggcacagcctcctccgtcctggcgcagggtcaggctccgcggacgacgcctggagacagctgccaatgccaatagc

SEQ ID NO: 127823 - DNA, 122 bp, Homo sapiens
acctccagcttaaaaagacgaagcaaagcagagcccaggtgagcgggggtctcggggctacgcgggggtctcgggggtgagcgggggcctcggggctatgcagggttttcagtccccgctct

SEQ ID NO: 127824 - DNA, 122 bp, Homo sapiens
cagcccgaggagacccacgctcttccgcaagcgagggatggaccccttccggatgcagaacgtgccaggacagcagtttcgatttcctaaggagaaggcttacttcccccggcgtcccggca

SEQ ID NO: 127825 - DNA, 122 bp, Homo sapiens
aatttctgaataaagtcctttctaccagctgctgctgtgtggtcactctgcgggtccccacggtgacctctgcaggtcgacacgttttccttcatggccgcacgaaggccccttacaggtgc

SEQ ID NO: 127826 - DNA, 122 bp, Homo sapiens
tggtttctccggaggctttccctgagtgtgtctcacactgtggtcttttgtgcgcaggtgcgtggcgtctactccagatcgcaggaccatccaggtaagagtgtttccttctcactctgagc

SEQ ID NO: 127827 - DNA, 122 bp, Homo sapiens
tccacgacctcaaggtggcccccggctactacaccctcactgcagaccagggtaggagggcgggtccgctgtgccactgcctcgcacctcccgcctgtgtggccctgtgacccacctctgac

SEQ ID NO: 127828 - DNA, 122 bp, Homo sapiens
cagggccggcggggctcagctcagcatggctgggcgcgggggctccgcaaaagttgctggcggaggggggcggcgggcgggggcgggggcggggcgcggggccgggagagccacagggagtc

SEQ ID NO: 127829 - DNA, 122 bp, Homo sapiens
aagcggcccaggaggacgactcctttcagtcctctgtagagagaatacgcacgatggctgcgcttctgaactctcccggggtggaagctgcagcctggcttttaaccggaattgcccagacc

SEQ ID NO: 127830 - DNA, 122 bp, Homo sapiens
cctcaactcctttaatgttctcctcctttacttaatacaactcaagattaagatttccttcggggtattccagggatagaaaccaaataagcttatcagaatctaaagtaaataaaccctat

SEQ ID NO: 127831 - DNA, 122 bp, Homo sapiens
gtctcctgggttcaagcgattcttctgcctcagccactctagtagctgggattacaggtgcgcaccaccacacccatctagtttttatatttttagtagagacggggtttctccatgttggc

SEQ ID NO: 127832 - DNA, 122 bp, Homo sapiens
gggtttcaaagaactttcattcgatttatcctctctgatcctcacagggacaatatgaagcggtgagaagagttgttttatccacactctacaaatgaaggaactaaagattaagtgggtgg

SEQ ID NO: 127833 - DNA, 122 bp, Homo sapiens
cacatcctcgaagatcacaggcctggactccaggttcatcatgagcatggacgtcagctgcgtcttggctcgttccagctccaccgcgtccacggttccgcccattaaaataaactcctttg

SEQ ID NO: 127834 - DNA, 122 bp, Homo sapiens
ccaagagtgcgctgcctgggcccgcttgccctggagtgtaagtgctgggtaaataagaaccgcctggcgcaggctgtgtctactcttcacgccgccttctcagatcgggctgcatgtcccca

SEQ ID NO: 127835 - DNA, 122 bp, Homo sapiens
agattccaaagcccaaggtagtaaaaagaggattatagacgtggtggaacctgttggctgcggggcaaatgactgacctgtaactgtcagggatttatggagggaaatgagtgcctaacaaa

SEQ ID NO: 127836 - DNA, 122 bp, Homo sapiens
ctggcgaggctggcccagcacagggcgccaggcaggagaggctccaccgggcctcactcacggctccagacccgtggccgcccccagggcaggagatactccccaagcctcacctgtgcgca

SEQ ID NO: 127837 - DNA, 122 bp, Homo sapiens
aacagggttatttctcttcctttacctgtcaccctgcactcctttcaactgcacccactccggtctgtggaaagaataagtgagaattcttgtttcactgggtgcaccctgaaaccctcaaa

SEQ ID NO: 127838 - DNA, 122 bp, Homo sapiens
gaggtgctgttgtatagtgtcgacctggttggtggtggggtggtgtgttggcaaagggggcgggaccgccttccagcgcacatgcgcatcatggtctccaggacgaagcttttgttgggaaa

SEQ ID NO: 127839 - DNA, 122 bp, Homo sapiens
tcgaggcgaagaccactgcggccggtgccccgcactcgcacatcgtccacgaccaccggccgctcaggtatgacaaagccaaactccctcatgtacctgcactccccgcggggacccaagga

SEQ ID NO: 127840 - DNA, 122 bp, Homo sapiens
ttttgcgtggacctgttttcatttatcttgcatagatacctaggagtgggattgctggggcgtgtggtgaactttcataatgtcttgaggaactgccaagccatcttccgcagcggctgcat

SEQ ID NO: 127841 - DNA, 122 bp, Homo sapiens
cacctttggagtttccacatccagtctggcttctggagtgtccaaattccacagcaaagtcgacgatacctgctcctatgactggcagattgcattgttcttcatgggtatgggcaggctct

SEQ ID NO: 127842 - DNA, 122 bp, Homo sapiens
ggctctgtccccataaactgtgacacaggtgtgtgtagacgtctatgagggccatagcgccgggctgtaagggcatctgtaggggtgacgcagccgggctgtgtctctgcacctccgttctg

SEQ ID NO: 127843 - DNA, 122 bp, Homo sapiens
gagagcggcggctgctcctggaagttgtggtgtcgggagcccagccggtgccgccgcagccgccgcctagggcggtggggaggaggagggagccgcggggcttggcggggtcgggagggagg

SEQ ID NO: 127844 - DNA, 122 bp, Homo sapiens
aggcactctgctaggttccaggttcactgttctctagtacctcactgtctagaaaggaaacggataatttcagtaacttgtgattaatactgtaatcaagatctgtaccaggttcagtggtg

SEQ ID NO: 127845 - DNA, 122 bp, Homo sapiens
caaagaggattctgagctccagccgcctacacattgatttcagctgttgggaccctcagccgagaacccagctatgccgtgcccagatgtaagacctacacatctgtgagcttgtaagtgtg

SEQ ID NO: 127846 - DNA, 122 bp, Homo sapiens
gctcccctcccaagcgctggccgccactgtgcatgcgacagcccatcccgagggaggaatcggggagaatggatgcaagcccccggcaggccaccatacaaaaccccaagtcaaaggtcaag

SEQ ID NO: 127847 - DNA, 122 bp, Homo sapiens
gatctgcatgactagcaatggccacttctgcctttcagtagctaagtttccctaaagtggcgcaagaactaattgtacatcccttccccagtgagatagatgagtcactgacgatacagtca

SEQ ID NO: 127848 - DNA, 122 bp, Homo sapiens
gaggggtgagtgacctgacccacgatgcagggacattcacacagtgtcacgctgcatcaacgtcaggcactgtactagacccagcagtgagccagagctccggaggagacaggaaatggatg

SEQ ID NO: 127849 - DNA, 122 bp, Homo sapiens
aggcatggtcagccggcgtggccacccaggagtcagaacactaaatgcacacacatgcggcgatgtgatcaggccatcccgtggcctgtccggggcctcaggtccggctctgcggggactgc

SEQ ID NO: 127850 - DNA, 122 bp, Homo sapiens
aaggcggtggcacctgggctggatggctaaacaagcaggctgtgactcattgttctagaacgaggcttctcgtgttcacctaagtgcccgcatggcagcacctgtttggtaaagacttcagc

SEQ ID NO: 127851 - DNA, 122 bp, Homo sapiens
cggggctctgcggcacaggatgaatgagcaattccgggcgcgcgctcttgcgccccccggcggtgctgcagaggcacgaaatggccacgtctgcaaaggcgctgcccaagccgcccatcctc

SEQ ID NO: 127852 - DNA, 122 bp, Homo sapiens
gagtggattttaagaagacaggaagacctttgaagaggtggtgctgatttccttggctggcgggaactctgtctggctgttgcatgcatcacttttgtgtgggttattttgttcctctgtgg

SEQ ID NO: 127853 - DNA, 122 bp, Homo sapiens
gggttgctctcagagagacagagttgaacaactaccccttgcggtgtaggaagtatcttgcggccttctaggccaattagttggcttcgaacagtccagtggctcctctaactggatacagc

SEQ ID NO: 127854 - DNA, 122 bp, Homo sapiens
gctcaggcgttccgaggccgccagctgctgcccgcccttctcccacaccactacaggcggcggctcccccaggaccacgcacttgagctcggcctcggcgccacttaccacccgcacaggcc

SEQ ID NO: 127855 - DNA, 122 bp, Homo sapiens
gcggcacgtgcctgcagtcccagctacttgggaagctgaggcaggagaatggcgtgaacccgggaggcggagcttccagtgatgcaatgagctgagaccacgccactgcactccagcctggg

SEQ ID NO: 127856 - DNA, 122 bp, Homo sapiens
acccggagatccctggggaccctgtgctgtcagcgtctccagcccgggtgggagatgtagcgcgagctgcccacacgtgctccgcggccggctgggcccgccccactacggcagcccctgcc

SEQ ID NO: 127857 - DNA, 122 bp, Homo sapiens
cttgctgcgacatgctgtctgcataatttctgtcattcatgttttctgagagcacaacaccgtgtccttgggctaatagtttaagggagtccactgtttctctaacaacatcactgtctaag

SEQ ID NO: 127858 - DNA, 122 bp, Homo sapiens
caccctcgccttcgacggcccctcgagtgcagcgccgtgcccccagtcccgcggaggctgcgtcctctgcctggtcctgagatccttcagaccccaccattgtcttaaggcgccgtcgtccc

SEQ ID NO: 127859 - DNA, 122 bp, Homo sapiens
tttttatcttttgagatcttgctccgttgcccaggctggattgctgtggcgggatctcagcgcactgcaaactccgcctccgggttcatgccattctcctgcctcagcctcccaagtagctg

SEQ ID NO: 127860 - DNA, 122 bp, Homo sapiens
agatccagcaccgggttgcctctgagcgattctcctttcgctgtagggtctggtcgcctacggatccctgagtccttctgtaatattggttcctggagtaaactgatagggcgctaaataga

SEQ ID NO: 127861 - DNA, 122 bp, Homo sapiens
ggctcgccgacctcggcgcggcatcccggccgccgcctcacctgcttgcgatagggcgtccggcagttgctgctgcccccggggttgccactgctgctggggaagatcatcgctgcgggcgg

SEQ ID NO: 127862 - DNA, 122 bp, Homo sapiens
ggttccaagatgaatgcctccttgtaccacgtgtctgacaccgctcacattccggttccacgtcagttttagctccgtccgcctccataggtcaagcttaaagggcccgtacctctccctta

SEQ ID NO: 127863 - DNA, 122 bp, Homo sapiens
ggccgctcccctgcccgcgctgcgtgctcagctccctggcttgcggctgcagcgcctggccgcccgccccagccattcgtgggcgatgctgcacgaacatctccaccgagtgacatttagga

SEQ ID NO: 127864 - DNA, 122 bp, Homo sapiens
gccgccgccagcgcggacccctctacctgggccaccgccgctgagaggagccgggcgcgtcgccgccgccgccacctttataggcccggacctgctctggccccgcccccgacgcaggctcc

SEQ ID NO: 127865 - DNA, 122 bp, Homo sapiens
cctgccccggtgatcggggatagtctcaggaggcacgagtcgcctgcctcggtgatgcaccgtttctcacaccggctgctctggcccgagctaaaggggaagacgtgtgcggataggagctg

SEQ ID NO: 127866 - DNA, 122 bp, Homo sapiens
gttccaaaggggccgactactaaggcaccatacaaaacctccgggggcgcccgctggctccggccgactggaaagccttgatcctgcagacctcccaggcggtttcataggctgggctctcc

SEQ ID NO: 127867 - DNA, 122 bp, Homo sapiens
ccatttaacttctatcttcctagagagtctttgcatgacccacctgtcactctccatcaccgtacccctttgtttttttccccaatacttttcacaattttgatatgttgatcatgaactgt

SEQ ID NO: 127868 - DNA, 122 bp, Homo sapiens
ctcgagaacccggtgtcccgcctgtctcccggggggtatgggcgggtctcccgccagcctcgccagactgagccaagggcctgaaggaaataaatggctttctgaaaaaattcgtcttaatt

SEQ ID NO: 127869 - DNA, 122 bp, Homo sapiens
gacccgcttagaaaagcgctacgtcaaacgagagtcctaaagagcaggcgaaagccacggcgtctgcgtttgcaatgcatgctggtccgtgtagttctcagcctgacaccgtcgttcccaga

SEQ ID NO: 127870 - DNA, 122 bp, Homo sapiens
aatttggccagggtggggggttgagtcagcctcctcagagaaactgcgtgagagtgtgtgcgtgcatgggagtgtacttgtggaaaggtgtgtttgcgtagccttagggaaggaaggcaatt

SEQ ID NO: 127871 - DNA, 122 bp, Homo sapiens
aggcataggtaggaccgctgccctgtggggagtagggggttggaaggcggaggccggtatcgtgggggtcctgagcccttcctgtgagatccgggccgactattgtatctgtgtcgcagcgg

SEQ ID NO: 127872 - DNA, 122 bp, Homo sapiens
atgaagtccaaacaaatgataattaaattcatatagaatgttaaaagaagtgtgaaatgacggcaatgtttagctcagtgtaaagtaacaaaatgagcatgggcttttaaccagcagggggg

SEQ ID NO: 127873 - DNA, 122 bp, Homo sapiens
gttcaccaggctggcttcagggcggggtgggagcggcgggcaggacccacccccgggtgccgggggactcgggccgcggtcagcacagcctccagatgttcttcaaagcatgccccaccccc

SEQ ID NO: 127874 - DNA, 122 bp, Homo sapiens
catggaggctccggggtgcggggaggccaggcgatggcgagggcagggtcagggccgaggcggggccggtcaatggcgggttcagggtcgcggccggggcgggacgaggcgcgcgggcgctg

SEQ ID NO: 127875 - DNA, 122 bp, Homo sapiens
actcacgatggggatatgtgtgcacagaccatgagcatgacacaccttcctcccacagcacgcaccactgcccctcaaccttccatcttggcacaaacaaggcctgggcttgctccatcagc

SEQ ID NO: 127876 - DNA, 122 bp, Homo sapiens
ccctgacgtggttagcagaacctctcagctctgctctcacctgagccatttgagataaagcgcttttgtggagtcagttaacgatgctgcccctggaaataatatacccagtgacgagtacc

SEQ ID NO: 127877 - DNA, 122 bp, Homo sapiens
ttgttcaaggtcacacagctcatgaacgactggttccaaagctccctgccctctccaccgcgcctggccgctcagagcccatgatgaagtgatttgggtagagcgaggtcaggccacatctg

SEQ ID NO: 127878 - DNA, 122 bp, Homo sapiens
cggcctccgcgggcgtagctgtgcgggtctccaaaggcggcagtaggtgcgggggctactcggctaccgttgctgcgcccgtgcaccgcgcattcaacggatcctggcacgtggcgctctgg

SEQ ID NO: 127879 - DNA, 122 bp, Homo sapiens
gaattcaccaaatcagcttccacttagcattaggaggtcatgccatacaactcacgtatgcgggcaaacacttttgatttgcatatcctgggtgtactgagccacataataaggtgtcaaaa

SEQ ID NO: 127880 - DNA, 122 bp, Homo sapiens
cctcggccaccccaggactgtacctcataccactctctgcccacagcaccattacatggacgggcagaccccctgcctctttgtctcctccaaggccgacctgcccgaaggtgtcgcggtgt

SEQ ID NO: 127881 - DNA, 122 bp, Homo sapiens
ctcggcttccacccccgaccgcgccgcctagctccgcgcccgggccgcgttcttttcccacggctggcacccttcgacaacttctgattggcccagcccgccagccgctctttttgattggc

SEQ ID NO: 127882 - DNA, 122 bp, Homo sapiens
aaaaaaaaagaaaaagagaaaaaaaagaaactgcttaccatctctttaaaacaccttatgcgttaatggttaagttataaccttagttaagacttactatttcatgtgggaggttacctggg

SEQ ID NO: 127883 - DNA, 122 bp, Homo sapiens
cggaggaagcacctgcggttgtccactgggtgggcactgcccgcggggaacgggcgggaccgcaacttcggagcactttggcagcgtggggagggggctcctacccggacgccccccagggg

SEQ ID NO: 127884 - DNA, 122 bp, Homo sapiens
agatcccccttcatctaaggcagccacaacgtgagctttacatatcagctgcatttgaatcgatgatgggagcgatgtttgtaattccacatcaagcagccccggtgtctggcgtttatttg

SEQ ID NO: 127885 - DNA, 122 bp, Homo sapiens
cgtgcttgtaagttctggtgccacaaatgtcagtgacagccttgtgttcccgccagacctcgtggaaactggccaagcttcaggccattgataaggagaggcagcccgtgggaaaaggcgtc

SEQ ID NO: 127886 - DNA, 122 bp, Homo sapiens
tatttactctccgaccatttacagaagaagtttgccaacccccgatctagggaaagaaaacggtgtcctgtgtagggaaggacataatgcttcgctccttattcaagggccagtaaatcccg

SEQ ID NO: 127887 - DNA, 122 bp, Homo sapiens
tttgtttttccaattctgtattaggaaaaagaagttgcacagaggatcagacatcagatacgtttctaaattctgcagctctgggtgggcagcctcatttggggaaatgctagctgctgttt

SEQ ID NO: 127888 - DNA, 122 bp, Homo sapiens
ccacctttcctcatggggtcccgtccccgtggggagcacacggagaggctgccggtgccccggcacccacagacctctggagggcccctctgcaccacctcccccggtggcgtggggctgtc

SEQ ID NO: 127889 - DNA, 122 bp, Homo sapiens
cagacccccgatcgcccaccgcccctgtcgccctagcccaggcccacgcgcggccgcatgcggatccactcactggagaacgtggacaaggcgctgcagtttctgaaggagcagcgcgtgca

SEQ ID NO: 127890 - DNA, 122 bp, Homo sapiens
ggctggggcgccaagctgataggccggccccgtttccctgccgtgtccatcaggctccgccgactacaggtgtccagagtgtctataaggagggggtccaggctcattgccgagggctgtcc

SEQ ID NO: 127891 - DNA, 122 bp, Homo sapiens
cgggcggtgtttgttgttgtgactgggcggctaggtgagacggagcgcacgggcagagtgcgcatttggggcgactggttcttgggggaagatataaataatgaatcggtgttagattattt

SEQ ID NO: 127892 - DNA, 122 bp, Homo sapiens
tcggaattgatcacttcaacaaggaaaggcttatgggcagggcccaggctgagagcctgacggacacttggattgtgcgcacactgggacccagaaatgaatggtgacccctcccttaggaa

SEQ ID NO: 127893 - DNA, 122 bp, Homo sapiens
cagagcctgggctcccccagctccgtcagtctctctggacttggggaccctgccagctctcggtggcctgatcttgggcataggagaccttgaaccccttctgagtcctcttttctattctt

SEQ ID NO: 127894 - DNA, 122 bp, Homo sapiens
ctccgggcagggcccctctagggagcgggaacgtttcatatgcatgggacccaccagatccgctttccgctggaccggtggcgaaactgaggtccagagaggaagagactggagtctccagg

SEQ ID NO: 127895 - DNA, 122 bp, Homo sapiens
ggcgagctggtgctgtaggacttggccaggcggctgggcgactgcttgggcgaggagccgcgcggcgcggcgtaggtggcgccctcgggggccgagccgccgcgctgcagcttggtgggcga

SEQ ID NO: 127896 - DNA, 122 bp, Homo sapiens
atgaccaccaggggtcaccccaacccaaggaaacaaaggcctggccactgccgcgaaccgcgccccggctccgcccctcacctggggacgcagtgcctggaagcgctcctgccgcacccact

SEQ ID NO: 127897 - DNA, 122 bp, Homo sapiens
gagtggaagccctgatgctgcccccacggactctgagcacacactttactgttctgttctcgaaagtcgcgctcctgaatcctcacctggctgctctgagtcctcctctcctcagacctcct

SEQ ID NO: 127898 - DNA, 122 bp, Homo sapiens
gcagccgagggcctctgaagagctctcgagccgggcgggggtcgtcccggccgcccccaccgtcattaaaggcccctctcaaacactcgaggaggttttcggagcgcgagccggcccgacag

SEQ ID NO: 127899 - DNA, 122 bp, Homo sapiens
aattttttttctccacgtgatgcattcccgtggcacactccgcgcacatcaaaccccttgcgcctttattgccggcgatgccccggcccgcgttatcagccccacacacgcagccctctctg

SEQ ID NO: 127900 - DNA, 122 bp, Homo sapiens
catgttgtgtatccatcattagttgacggccgtgtgggctgttgtaaataatagtgcttacgtcagcatgcacacgcagtcttaggtggacacatctgtgctgcacacatggacgcctggtt

SEQ ID NO: 127901 - DNA, 122 bp, Homo sapiens
tgtggtagttaactagaatgtactgtggttaccaaggaaagcagtcattgggaacacatacgtgattgtaagcagtagggggtccattggctatagagattttaaaaaacaatgatgaaata

SEQ ID NO: 127902 - DNA, 122 bp, Homo sapiens
gcagcttggctggggctaggcttccggggctctgcagtcctcggcgtgtgctggcagcttcggagcccaccgagccgggcggctaggatggtgagggcgccgggcaggagagaggccggcct

SEQ ID NO: 127903 - DNA, 122 bp, Homo sapiens
agccagccacagccccgccaacgcgcacgaatcccacgtggcgtgagtcttttcacagaccgtgggaaacatgcacaactgcctggtatctaatttagggacacagcctcgtgacgtaaacc

SEQ ID NO: 127904 - DNA, 122 bp, Homo sapiens
ggtggacatcgagtgtttgttgaatgaatgagcgaaaaactggcaaacctagcgtgccctcggtgtaatacacaataaactcccaccaaaggagaaaacctgcgtgagacacaaacttcgtc

SEQ ID NO: 127905 - DNA, 122 bp, Homo sapiens
aggctgcggcgccgctactcacctctccgaactggaaggcggagacgatggtgacaacgacgcccaagaagcacacgtagagcccatacctgtgggacaggcaggtataggtctgtctctgc

SEQ ID NO: 127906 - DNA, 122 bp, Homo sapiens
ggcgcggggacttgcggccgagccagatgaacacgtcggaccaacagtccagaatgtacacgcagcgcgtgtccagcagactctgcagctgcggaccgggagtctggaggtcaaagcccagc

SEQ ID NO: 127907 - DNA, 122 bp, Homo sapiens
tcggtctggaggccgtacgtcagtcccggggatgtcgggatcagccttggaggatgccctcgatctttatcctttcctatgtccccagtccctggcaaaaggtagtagacccaggggaagga

SEQ ID NO: 127908 - DNA, 122 bp, Homo sapiens
ctgccgctgctctgcatccccaattccggcgggcacgggtgcagctccgcgtagtgctcccgaatccccatcgccggccaggccccgcccctactgtccggtttccccgcctgccccggcgg

SEQ ID NO: 127909 - DNA, 122 bp, Homo sapiens
gccccgcctccgcgccgaaaaacaggcaggaaccacataacccagaaggctgtgcgcaagcgtctgcgcgcgtattggggcaatgtgagctctgggggctggacttccggcgttgggactgt

SEQ ID NO: 127910 - DNA, 122 bp, Homo sapiens
tgcagaggtcacagagcgcggacacccgcggggcttaacaggcggggctatttttcgaggcggaagaatactcaagttgcaagagtggcaactttttcaagaaggggaaagtcccacttcgg

SEQ ID NO: 127911 - DNA, 122 bp, Homo sapiens
gagaaggaaagtacccaacattggcttcggagtatttgactttggggaaaagggctggctcggagtctagactcttctgtaagactcacagaacaaaagcaaggaattgctgatttgggggg

SEQ ID NO: 127912 - DNA, 122 bp, Homo sapiens
tgggtggggccagataagagaataaaagcaggctgcccgagccagcattggcaactcgctcgggtccccttccacgctgtgggagctttgttctttgcaataaatcttgctactgctcactc

SEQ ID NO: 127913 - DNA, 122 bp, Homo sapiens
gtttggtatccagcaaacacatctaaacaaatcccaaacatccctctgcagttcttgccccgagtctcccggaacgcagctcagtagctgtacatctgctgctgctgctgctccgcctgcac

SEQ ID NO: 127914 - DNA, 122 bp, Homo sapiens
ggggcagggaaaagggcgctgaagggggcttcgcgggcgggtcaggcggaggtgtttgcgcggggcgagagtagaccggggccggggctccctcctgcctgcccgcccggccgcggttagag

SEQ ID NO: 127915 - DNA, 122 bp, Homo sapiens
caggggtcaccgggcgagagcgcaccgtcatgcaaagcaccagcaagcaaggtcagaggtcgttagaggctcagaaaaggggctttccacatcgcccctgcagtacagtcacagtttccaat

SEQ ID NO: 127916 - DNA, 122 bp, Homo sapiens
ccagctgccgcgcacccgcaacagcccgttgtcccctcccgggccagctggtcttgcagccgtcctggcagagctgggggcagagcccgcagtcttgttcccagaggtctggagttgccgca

SEQ ID NO: 127917 - DNA, 122 bp, Homo sapiens
gtaacatgcaatttccctgatatattgaactgatgcttttatttgatcacaggactcagccgttacaaaaataacaagtcattttctttaataaaaaataaaaggaagtatatggttgggtc

SEQ ID NO: 127918 - DNA, 122 bp, Homo sapiens
cctgggaggggattttcgttgccttttgggtgagaagcagcctttttgattgtttcactgcgttttctgcagggcgttttccactgcgccgtggagacagcgaagctcgggcctctggcctt

SEQ ID NO: 127919 - DNA, 122 bp, Homo sapiens
aaggctggtcttgaactcccgacctcaggtgatccacctgtcttggcctcccaaagtggccgggcagggctgaattcgccccctcaccagctactgccaaccacggatgaatggcttctgcc

SEQ ID NO: 127920 - DNA, 122 bp, Homo sapiens
agcggggccaagcctccctccaggcactaggcaggcagcacagcgaggcggtgcgtgccacgacagcaccaggcagaggcacgccacaaaccctgacagaaagcagggagtgaatgagcaca

SEQ ID NO: 127921 - DNA, 122 bp, Homo sapiens
ccgaggagggaagcaggaaatcgagaataaggggcagcccacagaccaccctccttttctcggggcgccccccaaaggcgcgccctgccttaccttgtctgacggccttgaaggtgacggcc

SEQ ID NO: 127922 - DNA, 122 bp, Homo sapiens
gtggcagatgaaagcttaaggcctccttaggagttgggtattgacctgtgctctttgaggcggtttttaacctttgatctttcttctggccgttcccccggaccggcctattccaacccagt

SEQ ID NO: 127923 - DNA, 122 bp, Homo sapiens
agtaaatgaggagagttcttcaccagaaaaagacagcaaagacgtgtttctcttccttctcgtcacagaacaaactccttactcgagggtggagtatgtgtctcagctctccttctcttcag

SEQ ID NO: 127924 - DNA, 122 bp, Homo sapiens
aaagatgaggggacccatatctcgtgagctgcagttctgaaaagtcagttctagaggggtcgtctctcgcgaggcccgggtgcccacacaggatcgacgcgtggcagtgccacctgggcccg

SEQ ID NO: 127925 - DNA, 122 bp, Homo sapiens
cgcgcggccggctctctctgggaatcagtcccttctactgtcatcgagtttggagaagcccggctgtacagcgttttctttcctttttttttttcccttgggggcagagttgaaaataattt

SEQ ID NO: 127926 - DNA, 122 bp, Homo sapiens
gagtgaaaaacaaaaacaaaactgtattgtttcgattttgaattttttaaaaaatcaaatcgctatcagtaggtaaaagtctggaaggctacataccaatctgtaaacagtggtttcctcta

SEQ ID NO: 127927 - DNA, 122 bp, Homo sapiens
cattagcaaagtaaatctgctgggggaaaaaatatccagcattccagaaagattagcacacgcagtctccagtgtatgagggagttgcgctccaaaagatagtttcaaaagttggaacttag

SEQ ID NO: 127928 - DNA, 122 bp, Homo sapiens
cacttatgatagaagggaacaaggctggaaaggtacactgggcctggaggcaaaggacctcgaatgccaaaggaagaagttatattttattctgcaggcagagccttttttttttttttttt

SEQ ID NO: 127929 - DNA, 122 bp, Homo sapiens
cgccgccggcccggcgtcagcggcgtcaagtccctgcgcggtcacggtcgcttcgacgcacgcaggatccctccgctgggacaagtagtgccctgagactcccgaggctctgcatcggcgca

SEQ ID NO: 127930 - DNA, 122 bp, Homo sapiens
atggtaaaaacaattaaggcttctattatccaccctgggcactgttctaagcaatttatgcggattaactctttcaatcctcacaactttatgagggaggtgctattttaattctgatttta

SEQ ID NO: 127931 - DNA, 122 bp, Homo sapiens
tattcaatatcgttttgctttcttgtgtagactgagggtgtaaacctcgtttctgacagtcgcctataggacttttcagcaggctgtgggcctagaggtgggggatgtggaatcaagctaaa

SEQ ID NO: 127932 - DNA, 122 bp, Homo sapiens
gacgggggacctggcatttggggagacttcaggcacaggagggacttcaggccaggcctgcggcagggcaggacggcgccggtgttcacgcaggcgcgcgaaagaaaaggagcgcccgggcc

SEQ ID NO: 127933 - DNA, 122 bp, Homo sapiens
agcctggcgcgcgattatttgaagacgctcacggagcggctggctaggctgaggagagctcgccgggctctgaggcgcaggtaacctctggagtaggccgaggcggggggctgtggaaggct

SEQ ID NO: 127934 - DNA, 122 bp, Homo sapiens
ctatctggcagtggacattttgagctccttggggcctatgctgaaaaaggaaatatattccgacaaaaactagacagaggcattcgcagaatcacgtttgtgatgtgtgaactcaactgtca

SEQ ID NO: 127935 - DNA, 122 bp, Homo sapiens
cgagccagagtctgaacgtacggagggagatcacagaagggatcgcgaacatgaggtcctcgccggggctctgcagcccggtaagaagctgggggtggggtggggcacagtttgctatcctg

SEQ ID NO: 127936 - DNA, 122 bp, Homo sapiens
ttaatacctgggtgatgaaataatctgtacaaaaaaccctctgtgacagtagtttacatacgtaacaaacctgcacatgtacccctgaacctaaaagtttaaaaaaaaaatgacagtcaagg

SEQ ID NO: 127937 - DNA, 122 bp, Homo sapiens
catcgagaccaccgggaaggtactgcatgggcccggccaggctgcaggtgctccagagggcgggtgcgggcagccctgcctccggccggctgcactctaaaacccaggtctgggggtcccgg

SEQ ID NO: 127938 - DNA, 122 bp, Homo sapiens
atgtggcagatgtcaacacagacccagcatctgtgactgtggatgtgcgagcagggggaacgttcaaggggacttgaggtgattctcttcatggagaagtggtgactaggcaatggttagac

SEQ ID NO: 127939 - DNA, 122 bp, Homo sapiens
cccagaactcagctggcccgtctgcccctgcacgcccagcatcccccttctccatgccctcgcctggctggggcctcaaatgcctgctcccttggctctacccagagggagcctcggacagc

SEQ ID NO: 127940 - DNA, 122 bp, Homo sapiens
gcagggccagtttctgtgccgcgtctcggggctgtgagccaaaaacattcagtacttcggcgccgggacccggctctcagtgctgggtaagctggggccgccgggggaccggggacgagact

SEQ ID NO: 127941 - DNA, 122 bp, Homo sapiens
aagttgcgattttctcctcgcccaaaaaggggatgctgatggaacaagtgacgtccacagcggagatgtttgtgacccttagcaatgtctgcacgtggaacagcccgtggctgccttgagtc

SEQ ID NO: 127942 - DNA, 122 bp, Homo sapiens
caaacttctttttattttgagacccagtctcactctgtcacccaggctggtgggcaacggcgtgacctcggctcactgtaacctccgcccactgtaacctccgccttgcaggttcaagcgat

SEQ ID NO: 127943 - DNA, 122 bp, Homo sapiens
agcatcgagacagcgggcgaacgggcgtccggggacagggtgggggcggcggggaggaggcgtcggagactctgaaccccagaaaagttcaaggtttgtgcaggttcccccagggaaggcga

SEQ ID NO: 127944 - DNA, 122 bp, Homo sapiens
cccgctgatgccaggtgtgtggacacctccagccttctcagcagtgcgcgtgcctgagggcgaagaacccacccccggccgtgggagactcacttgccagaggcgctgttggtgatctcgtc

SEQ ID NO: 127945 - DNA, 122 bp, Homo sapiens
gctgaaatgcatgtcagggtcaaggacaagttctgggaagctgggcgggccggcaggaagcgcagatacagtccctagggaggcagaggcggcaacagggagattcccgggactggcccatc

SEQ ID NO: 127946 - DNA, 122 bp, Homo sapiens
gacctgcaccggggactctagccaggtccgcccggccccgccgtcttgtggagccctgggcgaggcaacccctacccttgtcgatttggttttcccggacgagtgctcagcactcccctcct

SEQ ID NO: 127947 - DNA, 122 bp, Homo sapiens
tgagatggtgtggcttggttgcccagactgtaggttcatgatcgcagcttgttgcagcctcgacctcctgggctcaactgatcctcccacctcagcctcccgagtagctgggactacaggca

SEQ ID NO: 127948 - DNA, 122 bp, Homo sapiens
tgctgaatgaccgatgagatgcagccgggaggctctggccggctccggaatgataatggccggcgggtgctttgtatgcgcgaccagcaggcctctgtgccgggcactgtggcgctgccgtt

SEQ ID NO: 127949 - DNA, 122 bp, Homo sapiens
agtttgatttcgcgctttcaaattaatttccatttggatttaacagctccatgaagcaggcgttcttattctgattttaaatagaaaactcgggctgagaagtgggtctgaaaagctctctt

SEQ ID NO: 127950 - DNA, 122 bp, Homo sapiens
gggagaggtggttcatttacataacgtgtgaaaaaccagtcaggactaggtgtgtcattgcgtcctttgcataaggtgaaaacttctgacagtccccactccacactccaacattttttttg

SEQ ID NO: 127951 - DNA, 122 bp, Homo sapiens
cctttgcatatagaagtctggtgtttattgggcagcccatgcgctgggtaggaagccaggcgtgcgagatgaaaagcttcgatgccgaggggcagtttccttgagaagacggtgctgtctgt

SEQ ID NO: 127952 - DNA, 122 bp, Homo sapiens
ctcacctttcaccgagcgcggcttcgcctgcttccgcctggacatgtccggggctccgggcgctccgtcgccctccgcagccggctccccccgccgccccccgccgctccgggcagcccttc

SEQ ID NO: 127953 - DNA, 122 bp, Homo sapiens
gaataaaaatatcttaatgaagaaagccagcagaaaacaacagagccttgaagtggaaaccggtttcctggaactccactctgcgagagggctgaagtgtttatgcagaggaaagtgccaca

SEQ ID NO: 127954 - DNA, 122 bp, Homo sapiens
gtattccaaaccagagatgttcaaattggtgagaaacccaacaaatgcctttcatatatacgagaaccaaatgaagtcagaatttgccattattgcacatcacatttttgggggggaaagtg

SEQ ID NO: 127955 - DNA, 122 bp, Homo sapiens
cgccgccgccgctttcctggttgctgtctccgggagtgcggggcccttggagccggctcgcgtgggagcctgcagcccggcgcggagaggaaggcggtcgggtgtgacagcggccggggccg

SEQ ID NO: 127956 - DNA, 122 bp, Homo sapiens
gaaccacatcttgacacttccagtcgaaggaagagtgcgactgcgcggcagcaaagactacgcctcccagcgtgctttgcggcgggccggcccgctttacccagagtcgccctgccgcaatc

SEQ ID NO: 127957 - DNA, 122 bp, Homo sapiens
ccctgcctaaatgtcttcataaagtgcaaattaatgcagatcctaactaggcatttggaacgctaacctagttttctgtgtttagctaatagctagcaattttgcttacacttttatcctct

SEQ ID NO: 127958 - DNA, 122 bp, Homo sapiens
ctcccggccgccgcgcatccaccggccatgcaattaaggggaaaatggcctcatcgccggcgtgtcatctggtggcgttcccagagcccatcgccgccgccctattcagacccggccttaat

SEQ ID NO: 127959 - DNA, 122 bp, Homo sapiens
ggccgcgcaccgaggcttctgccagcgcctgcggggcctctgcgtggagtgggccggcagcgtttttctacccggcaacaaatacatggctttattccacttcttaatcccagtgtctgtta

SEQ ID NO: 127960 - DNA, 122 bp, Homo sapiens
gctgagcactgccagggtgcagagaagcgcgggcaagccgaaccgtgccatggtgcgggccggggcggacgcgttcccacctttgggaccggacgggaagcggcgctacggcagcgggccga

SEQ ID NO: 127961 - DNA, 122 bp, Homo sapiens
aatgtccactacgcttcattctttctcccttaccctgttgatttcttccatatcacccagcgctgatggtaattgtatgaatacatgcttatctgtctgtcctcccacccctaactctaaat

SEQ ID NO: 127962 - DNA, 122 bp, Homo sapiens
cagtagtagcaccacctttgatatggcttttgcagtgtttcccccacttagcataggctccggttacagcagcagaatcctcaccaaataaagacagcctagaggcagcagtcttagtggct

SEQ ID NO: 127963 - DNA, 122 bp, Homo sapiens
aaaaatgctttgagataaacctggagccacagctctctgcacagtcagatcgcaggaacgcggcctagctgcttcagccacgttctcgcggcgccacctggtggccatggaccgccatcgcc

SEQ ID NO: 127964 - DNA, 122 bp, Homo sapiens
gccccttatctcaccatgccgagagatgtcgcagacagatacctccttcgtgttgtgacccggagccaggtcttcatagtgcttttctctctctctcgctctcttttttttttttggactca

SEQ ID NO: 127965 - DNA, 122 bp, Homo sapiens
gctcctgggcctatcatgtgtgctgtctttgtaaacagtcaggatcccaggactatcacgcgtgctgtccatgtacacaggcaggctcctgagcccatcacacgtgctgtccgtgtacacag

SEQ ID NO: 127966 - DNA, 122 bp, Homo sapiens
ctggtcggcgtcccgtagggcgccctcccgcgctaggccggccggcgtggcgctcggcgccgaacaggccccgaggaggccgcagttaggcctagtgattatccagttgccctgagcggctg

SEQ ID NO: 127967 - DNA, 122 bp, Homo sapiens
ctgggccagaatcttaaaggctttgcagttgcagaactattcctgttttttaaagtttcacgtatgtatgagtgctgtttatacatgatgtcttggaatatgtatcatttgtttcactgttt

SEQ ID NO: 127968 - DNA, 122 bp, Homo sapiens
ccgctcaggcgccgtgcgccgccgccatctgcgcccacacacccagcgtcgccgctgccccgcccccgcatgccccgcccctccgaccctggctccgccccacgcgccggtcccgcccccgt

SEQ ID NO: 127969 - DNA, 122 bp, Homo sapiens
tccccaatcagcactaccggtcttagcgagagtactgactccgactccaagagtggcctccggggtttcagcgcttacaacccgagcagtcggatccccaagtctaccaccagctcgaactc

SEQ ID NO: 127970 - DNA, 122 bp, Homo sapiens
gggctcatggacttttcctcaaaggccaggtagtaaccgtttcagggcgtgtgggtctcacgatgtctgtcccaaccagcggtggcctttgcggcagggaggcagctgtggatgaggcctgt

SEQ ID NO: 127971 - DNA, 122 bp, Homo sapiens
aagtttttaaaaattaaattaagaaaagaaatggcccaatcactatctcagtttccttctcgtatatgagcataatgcagaggacaagatgcagagaaagaaattataacctctgcagcgct

SEQ ID NO: 127972 - DNA, 122 bp, Homo sapiens
ctgtcccgcccaggagccttgcaggctggagggcagctggagagcggcggcgcccggcggcgaggcgggcgctgccggccgggactcgggcagcgcccaccaaccgctccgccccgggacag

SEQ ID NO: 127973 - DNA, 122 bp, Homo sapiens
tccctgcctccagcctgttctggagacctccaagcaggagctggaggaggatccaccgagcgccgcagcccgtgcagcctcctcctgggagcctccaccctaaagacactctctgctccttc

SEQ ID NO: 127974 - DNA, 122 bp, Homo sapiens
ggcagctgctccctccgcatgttctcgctgcatcttccgagtggggggagttatggtaaccggagggggacagcggaggacgggagggtcggggaccggcctcgtgcggacagggtcttgag

SEQ ID NO: 127975 - DNA, 122 bp, Homo sapiens
ctctgccgtcctggccagccgagggattcggaggctcttttgaaaagattgcttttccctcgtgcgtttttgccgccctgtctttaaacacctaaaaaccgtggtttctggggtggctcccc

SEQ ID NO: 127976 - DNA, 122 bp, Homo sapiens
gtaattgaaccatggtacggtttcccccatgttattctcgtgatagtgagtaatttctcacgaggtctgatggtttttaagtggctttccccttcgctcaacacttattctctctcctgctg

SEQ ID NO: 127977 - DNA, 122 bp, Homo sapiens
ataaaatcacggcaacaaaatttactccacctctgaattactggtcttaatctcagaagccgaatccgtacttatttttcttcaggttatcagcttcgggataggtttcatcattgattaga

SEQ ID NO: 127978 - DNA, 122 bp, Homo sapiens
gaaggaaacaatccctcttcctctctcttgtgaggcctggctaggagtgcctgggatgggcgggacactgcctggggaaggcgggtggggagcggtggaacccgacccttggagcgaaggcg

SEQ ID NO: 127979 - DNA, 122 bp, Homo sapiens
tcattgctttaggaatcgaggtgtggctaagtttttacctgggagcaaaggtgatgcaagcgtttctggtgagacctacccttggtttagggtggggagggaccgcataacagaccatctgt

SEQ ID NO: 127980 - DNA, 122 bp, Homo sapiens
aggggtgactatctcttggtcttggttgtcaggcaatgctatggaagggttatttagagtcgtagaagtgtctagtacaaccaccagctgatgaagatagtacaggaggaagcaggcatgtt

SEQ ID NO: 127981 - DNA, 122 bp, Homo sapiens
caacactttttcaaacagaaactgaattgactgcattttctaataatgttgtgtgaattacgaatgcagaactctggccttgtctttcagaagacagatgtctgtggcttgctttctgctta

SEQ ID NO: 127982 - DNA, 122 bp, Homo sapiens
aacactccacatagcacagtcattagaaacctagaaaacaaacttgaaattagtgctaagcgacccgcaaactctaccagtcttacaacatgacctgaagtttaatttcagaagtcttttta

SEQ ID NO: 127983 - DNA, 122 bp, Homo sapiens
ggccaggcgcggccgggggcggggccaagcgtcttcgggcgctggcggaggaagccatggcgtcaacacccggcgccgcgaagacggtgcgggcgccaatgggaaagactgcggtcggcggg

SEQ ID NO: 127984 - DNA, 122 bp, Homo sapiens
ccctttctcatttattcttttgtgcgctaaaacttaatactgaaaattggcaacccaaggcggatgtaacacatggctaggttttctgtggcttcctgattcataggccctctcattgccac

SEQ ID NO: 127985 - DNA, 122 bp, Homo sapiens
ggagccaaaaccccgggatggcaggcaggaggcttgcatcctgagcccagctctgctgtacgctctagggcacacccctttttctccctgggcatcagtttccccatctctattatagataa

SEQ ID NO: 127986 - DNA, 122 bp, Homo sapiens
ttggtcggccgtccttcctggagaaggtggcgctgccatgtttgagtctcaggctcccaacggccgtggcgtgcgtcacccttgcgtcgcccttgcgtcgctgcacgtggggcgtgggccct

SEQ ID NO: 127987 - DNA, 122 bp, Homo sapiens
gtgagtcacttaacttctctagtcctcagttttcttatctgtaaagtgggctccagcatacggcttaactgaggtaacacacgttgttcatgtcagctgttgctttcatgccggctctgcct

SEQ ID NO: 127988 - DNA, 122 bp, Homo sapiens
atttcacccttctgagcctgtttctttattcgtaaaatgattataataattctttcacagcgttgtgaggattaagtgaaatgtgttaaatgcctactacagtaggtgctcagatatttatt

SEQ ID NO: 127989 - DNA, 122 bp, Homo sapiens
aaccctccatagtttacacctggtacagctcttcagttcatcaacatttactgagccccacgtgtcccaggtgtagaaggtcctttattttcttacgctttttatttgcataatattcgctt

SEQ ID NO: 127990 - DNA, 122 bp, Homo sapiens
tgcttgggacactgtctacacacagaaaaattccctacacgcgggaaaatgggacggtgacgtacacgctcgggacattgtctacgcacagaaaaattccctacacatgggaaaatgggacg

SEQ ID NO: 127991 - DNA, 122 bp, Homo sapiens
cacagcaaaattttaatcccagattggttcttctttgcatcttgctataattttttgtaccgttacatctgtgtacttagagaatgcaaatttactgccatattcatccaaaccaaatacaa

SEQ ID NO: 127992 - DNA, 122 bp, Homo sapiens
cacgactatcacacgtgaaccttacgtggctcttgaaggccttgcggacgtgcccatgggcggccttctggaccacggcataccgacgcacgcagtacgtgttctggggtttgatgatgctg

SEQ ID NO: 127993 - DNA, 122 bp, Homo sapiens
agctccaatagctaatcaaaatggaagccccgcattaagaagcagtgtagcctaaggccccgctgcatcccaatgcgcgtttcgaggcttaccttcgctgctgcctttttcggcttcgcttc

SEQ ID NO: 127994 - DNA, 122 bp, Homo sapiens
gcttgggcaggagggtggcaggctttagcagcaggcagcaggagaggcccaggagagtgacggagggagggaggaactgctctggaaatcccctaggccagggcctgctctctgggtcacat

SEQ ID NO: 127995 - DNA, 122 bp, Homo sapiens
ctcccgggttcacgccattctcctgcctcaacctccccagtagctgggactacaggcgcccgccaccacgcctggctattttttttggatttttagtacagacggggtttcaccatgttagc

SEQ ID NO: 127996 - DNA, 122 bp, Homo sapiens
aaatactgcatgcttccacttataggaagtccctagaggagtcaaatccaaaaacagagtcgaggttgccagggtctgggggaaggggaatgtggctgctgttgccaaaggaccataggttc

SEQ ID NO: 127997 - DNA, 122 bp, Homo sapiens
ataatgttttcaaagttcatccacgttgtagcatgtatcagaactccattcctggccgggcgcggtggctcacgcctataaccccaacgctttggggtgccaaggcaggtggatcacctgag

SEQ ID NO: 127998 - DNA, 122 bp, Homo sapiens
cgatgcgggcatagggccacctgccaaatgcactgtgggcacctcgatcggttgttttgtcgggggagaaacccactcgtcatcttcctgctcgcataccgtgactatggagagggaagaaa

SEQ ID NO: 127999 - DNA, 122 bp, Homo sapiens
tacagcttccacccccagtttccattctcccctaaagcactggattcaggtaatcgcggacgcacttggctcctcccgcactggccgctgccctcggcgggacaatgggcgccctagcagcc

SEQ ID NO: 128000 - DNA, 122 bp, Homo sapiens
tttgtaccctcaacatttaacaggagataaataaggcctttaaaattatttgaggtttgacggttatttgcttcacaaaacagaaagtggaatgttcttagcacttttttgaagataccttc

SEQ ID NO: 128001 - DNA, 122 bp, Homo sapiens
tccggatttcgctgctctagaaatccctggaggcccagagccagctccgaggtggacggtcggacccctcacccgcccgttatccgcaaggctggcagcggctccacctgcggaccgggaag

SEQ ID NO: 128002 - DNA, 122 bp, Homo sapiens
caaatacacatttatcaggtcctgtctgtgccaggcactgtgtcaggccaggggagtggccgggggaggaagatgaatgaatcagtgacagaggcttcaggaagtactggcactctggatca

SEQ ID NO: 128003 - DNA, 122 bp, Homo sapiens
gcactgaaaagggtagaaaagatagtcatgggtcactgatgctacccctccatcataccccggtagcagctttgtggtgcagacaatctgtgtgcttgggggagggagagtgcagtgatagt

SEQ ID NO: 128004 - DNA, 122 bp, Homo sapiens
ccgcccacgatcagcgatgcacccacgtggccctggtacctgctcgaggatgggcggggtcggccacaagctggggcctaggccccacctctctatgcccagctcctaggtgctatccccgc

SEQ ID NO: 128005 - DNA, 122 bp, Homo sapiens
cagggctgaaggctgctgtggcgggatgtcccttcgccctgccccacttataccactgcgcggttccaaggcacctctactggcgccctcccgccgggctgcatggcgacgggtgaccgcca

SEQ ID NO: 128006 - DNA, 122 bp, Homo sapiens
gccggaagcgccgcggcggcgtggcgcagaggggtgacgtcaggggccgcgccgggcgggcggcaagctgagagtaggctagtgttactgctcggtttctagccctggggacttgccagcct

SEQ ID NO: 128007 - DNA, 122 bp, Homo sapiens
gggaatcccaccggctgtaccgcagggcgttagtacctagatggcttcggtgcccccaagcgatgggctcaagctacagggcgggctttgcacctggccttctcagctctgaggcaggcagt

SEQ ID NO: 128008 - DNA, 122 bp, Homo sapiens
tcttctcacttcggactgctcacttgccttgttcagccctgaatcatcaggtgaagggagcgagaattgcgggggttggagttaggtagagggatttaaggtgctttctcccagaattgggg

SEQ ID NO: 128009 - DNA, 122 bp, Homo sapiens
tgaccttatttggagtgacggtcattgcagatgtaattaagatcaggtcacactggagtccggtgggccctaattccttatgatgtccttataaaaagaggacatttgggctgggtgcagtg

SEQ ID NO: 128010 - DNA, 122 bp, Homo sapiens
agtgcaaaaatcactttggggcctcattaaccctttagagacaagctttgccccaggctgcggaccagacagatgcttagggaaggttgataaccagcttcagtctctactggattagccct

SEQ ID NO: 128011 - DNA, 122 bp, Homo sapiens
ttgaaattcatttgtgaccagaactagtgaccaaaagacgtttccggcagctgttccgcccgttaggaaacgtgctgcagttctcaatttctatttgaaagtttccttccttaaatagaacg

SEQ ID NO: 128012 - DNA, 122 bp, Homo sapiens
gacggccatggcaatggaagctgtgatatcctccaaggccctgttcttcagcaccgtgctcgttttcctcaggaagtccctgacacactccgccagctcagagaccacctgcctgtcctcct

SEQ ID NO: 128013 - DNA, 122 bp, Homo sapiens
agctcccgcaccgggaaaactgccgaggttttagggctcactagccctttctttggtgggcgctccctctcctccgcccctcgagatgggttgcgggaagcgggctgtggagctgaggagtt

SEQ ID NO: 128014 - DNA, 122 bp, Homo sapiens
gtgagagtctgtgggtgaccgacaagtcatcggccatcgacattcggggacaccaggtcacggtgctgggggagatcaaaacgggcaactctcccgtcaaacaatatttttatgaaacgcga

SEQ ID NO: 128015 - DNA, 122 bp, Homo sapiens
tccagactcgggagggtcgagggggcgcgggagagagcgcgggcggccgccggggctggtcgcctgcagggatgggggacgagcggccccactactacgggaaacacggtaggcagcgaccc

SEQ ID NO: 128016 - DNA, 122 bp, Homo sapiens
gcagaattccagccagctagccagaggagtttggattaggccctttgtcccttaatgagccgtctcccaaaagtcacaattttggttggaatacagtgagtgaggattgtttcttttagtcc

SEQ ID NO: 128017 - DNA, 122 bp, Homo sapiens
agcatccaaggggacaaggctgggtctcgtggggcattgtgtgaggacaaaccgtaacaccgattttccccagggggtgagtgaggactggaaatcaacatgcatccatagccacccctctg

SEQ ID NO: 128018 - DNA, 122 bp, Homo sapiens
ccacttatttgcatacgtcaataaatactgctgcgtccttcagcaaggttaaaaagacaccgcacacacgaccctttcttctcccttccccagctcgaacactttttaaaaaaacaaaacaa

SEQ ID NO: 128019 - DNA, 122 bp, Homo sapiens
cctcctccgaattcttgaccgagagccttggaaccacattctgcccaaatctgtacacgccggagccagggagccgcccgccgcccggggagcggagtggggaaagagggggtggagaaggg

SEQ ID NO: 128020 - DNA, 122 bp, Homo sapiens
cagcagccacatttaccatggagggtgtatccgcacagcacccacgttaatcacagagggcgcatctgcacagcagccgcattcaccatggacaggatagctgcacagcaacgacatttgcc

SEQ ID NO: 128021 - DNA, 122 bp, Homo sapiens
ggactgtgcagatccttatggggctttctgcttggcatgactgctcatagataggtaaaccgtataatgcagttactcctggtgggttcaaggcttcacctggtggtgaagctgtggctttt

SEQ ID NO: 128022 - DNA, 122 bp, Homo sapiens
atcttagtaaatcttgatatcttctgagatgttattactctctccaacctcttttggaaacgagctaaggtataaacaaccaacccacacttaccactaccagatgattatataattatttg

SEQ ID NO: 128023 - DNA, 122 bp, Homo sapiens
ggctgtcacggttccggcgcgcgtgttctggcgacgccgtgggggccagagccatcctctcggggacccactcctgtcctgagttcacccaaagggaaccgctaagacaatggacaccctag

SEQ ID NO: 128024 - DNA, 122 bp, Homo sapiens
cgcgagagctcattcatgttcacacgtccacaaacgccccggcacgcaccgaggcgtacccggcaggtgctggcaggcaattagtggagggagcttcaaagatctgctttagtggagtgatg

SEQ ID NO: 128025 - DNA, 122 bp, Homo sapiens
aaagacctaaaggaaacgaacagcggcctctgcttctttgagcttggaagagccgctactcgaatgagctcaggcttcctgtggcaaagagagcgaagcggctgtgctcagcccacgccccg

SEQ ID NO: 128026 - DNA, 122 bp, Homo sapiens
ctcttatgaaacaacttaaaaataatagtcatggtagtcttctaggaagaaacaattacacgctgttgtcagtaaacagaccttatttcctagggatagggtggggagctggcattgcatga

SEQ ID NO: 128027 - DNA, 122 bp, Homo sapiens
agaaggacggggatctccctttgccgctaagagactccaactcccaggatgccttgggagcgctggaccacagctcccggcattcccggggaggcgcggggctagcgtagcctccgccccgc

SEQ ID NO: 128028 - DNA, 122 bp, Homo sapiens
tccagcgtcctccaacgtggaccagtgagcttggttttatgatcttatgaatttaagattcgcacgtctttgatgggattttgtctgttctgctgattccacctgaagctcagaaggcaccc

SEQ ID NO: 128029 - DNA, 122 bp, Homo sapiens
gttgtggagtccgatgagggtgagctcagatgctctgtggtcactccctgtgccgtgcttcggggacgctgagatgctgcaccagccaggcagggcggggtgggccccacttccatcgagct

SEQ ID NO: 128030 - DNA, 122 bp, Homo sapiens
agctcacctgcaagggcacccgatgtggatcctgtgactccccacatattccaggtggagcgatgacctcacttgccccctctcccggccggtgggtggaagggcaaggacatgccgtcggg

SEQ ID NO: 128031 - DNA, 122 bp, Homo sapiens
cccagtagttcaacgagacaggacagaacctggggtctcttgggctccaagggtctagggcgaaaggtcactgctcacctccagagcccgtcccagggccagggcaccccatcccaggaaga

SEQ ID NO: 128032 - DNA, 122 bp, Homo sapiens
ggtgccggcctccggggactggagggggatggggtcccgcatggctaaataactccttggcgcctcctgctctgctgtgccgccagggcctcccctagcgcgccttctggagaggctttgtg

SEQ ID NO: 128033 - DNA, 122 bp, Homo sapiens
tgtagcaggccgcggggtgagggtgggattaggcggccaattttacaaaactccagggagcgtcgccagcctcgatttcctggggttattcctgggagagaggcgttctcacggacagccac

SEQ ID NO: 128034 - DNA, 122 bp, Homo sapiens
catttgaccttcacaaacaaggctgtgaggtcggaaacaggctcagagaggtgaagacaccggctttagatcacacagccaggaagtgctagaggcgagattcaaacacaggtctgcatgac

SEQ ID NO: 128035 - DNA, 122 bp, Homo sapiens
gtctccaacctcacatccaagtggaacctgattatgcacctatgtgtcccagcaatcaaacgcaggatgaaaatcaaaatgaaccagcagggcatggtggctcatgcctgtaataccagcac

SEQ ID NO: 128036 - DNA, 122 bp, Homo sapiens
ctgtcttgtgcttctcctgtattggggtttgtcctctggaagcctgcgtcctcttcaagtcgccttgtgagagcccccacccctgtgaccctgaggggcaagatcagttggaggtatcagag

SEQ ID NO: 128037 - DNA, 122 bp, Homo sapiens
cttgcgctcctctgcggtgtgtgggggggtctctggtccgcgagaggacagtccctgccgcgccgagcgtcctccagcgtccgcggccgccgcgagcagcgctgaccggcagggggcgctcc

SEQ ID NO: 128038 - DNA, 122 bp, Homo sapiens
aggggtcttcgaagagggcccacatgcggggctgcagcctcctccagcggccagatttgccgtcggggcccccgagccccgccgcgtcctcgatgcccagcctcttggccgccaggtcctcg

SEQ ID NO: 128039 - DNA, 122 bp, Homo sapiens
tggcgggggcggggccggaggcgggcggtttagagagcggggcggtctgcggggtgggggcggggcctggtgggggcggggcctgtgcggtctgcggcgcggagccgagtgggctgcgggga

SEQ ID NO: 128040 - DNA, 122 bp, Homo sapiens
gaccaaccgtgttttaagaagcgtcctttagtagaagtcagggcaggcaccgcggctccacgcttactttcgagggtgctggcgggtgtggctggagctcactctcactgccggaagtgagg

SEQ ID NO: 128041 - DNA, 122 bp, Homo sapiens
gctaggccacggatactgctgctggtctcaggactcctggtggtccggagctcatgttagcgtccccagctgcagcccagggagggagagaggctgcgctcagtctgagagtggctgcctga

SEQ ID NO: 128042 - DNA, 122 bp, Homo sapiens
accctaggctctcctgaaatctgccccaagggttccttcttctttagttgtaccaatcttcgtattttctgtgaatggtgtcttgagaatgcctcacaattttctatacatccttctctgca

SEQ ID NO: 128043 - DNA, 122 bp, Homo sapiens
gccttcgtttgggtatgagagggtatctaccagcagggatgcccatccaattatctctcccgaaggcgcactccctattcttttaggagcatattaatcatttttactcttccacaggcatt

SEQ ID NO: 128044 - DNA, 122 bp, Homo sapiens
cgacggcggcggcccctcgggcagctaccagtccccgcgggatgcccggctcaccgccgccggagaagaggagccctccaggccaaaaaaatccccccaagcccagggtcgcaccgcggcgg

SEQ ID NO: 128045 - DNA, 122 bp, Homo sapiens
tttcccggggtggtgtggtctagtgtcccccttcccacctgctacagggacctccaggcccggtgcccaatgcccccccaatactgagggtcagggggtccggcccccaaactctacttcct

SEQ ID NO: 128046 - DNA, 122 bp, Homo sapiens
acatatcacccggacaccaggggcagaggctgttctgggcgggaggttgtgcctgccccacggagcgacagaagcggggagaccagacgtcgaccctgaggcgtgcctcctggggggctcca

SEQ ID NO: 128047 - DNA, 122 bp, Homo sapiens
ggccacgactactggctgtgtgaatttttgcggtgagagtgcatgtagactctgcataagcgtctgctgcagcaataggcacgttttgatgtggaggaaaccattactgagctgttctgtta

SEQ ID NO: 128048 - DNA, 122 bp, Homo sapiens
ccttggagacggtggcgcctcttgcgtcatcacgcgggcgttggagcttacgccatcgcgcgtcctagagtcctagcacgctattggctggctgtcaagcaatgggaggagtcgtgagaacc

SEQ ID NO: 128049 - DNA, 122 bp, Homo sapiens
ccagggggggaccggggggtgatattactccccgcatcgcggggggcgtccgcccccttgcgacgggaatcgtaatacccaggtggggagagggggttgatattactccccgatttttccta

SEQ ID NO: 128050 - DNA, 122 bp, Homo sapiens
ggaagtctgattggccaaaaagtccaagatttttccccaagttatgaattagcttcaattcgatactaacaatactccacaattatcaagagtgagcccccaagaaccccattggaactgtt

SEQ ID NO: 128051 - DNA, 122 bp, Homo sapiens
gaaaaggttaatctcagaaactaacttgaactcgcgcggaagtgacgcaacagaagttgtcgcgctttgcatctccgcctcccgtgctccgcctccggtcttacgtttcgcccccggcagcg

SEQ ID NO: 128052 - DNA, 122 bp, Homo sapiens
caagcgcaaatcggtgcccgcccggcgcgcgagaggggcggggcaggctggggaggcgggcggagccattcttatggtggtacagaagctcctgacttccagccaaaaagacaaacggaggg

SEQ ID NO: 128053 - DNA, 122 bp, Homo sapiens
ggtcttgctatgttgccaggtctggtcttgaactcctaggcccaagtgattctcttgtctcggccttccaaagtgctgggattataggcatgagccactgtgcctggccagggcttgggaat

SEQ ID NO: 128054 - DNA, 122 bp, Homo sapiens
tcctagaatgagtcacccgtagatcagggtctggggaagaggctgatccctggcgctgcccggctccctcgctgccctctggagctcagggcagcccggaatagggctctttgaagaggaag

SEQ ID NO: 128055 - DNA, 122 bp, Homo sapiens
gccccccaccacactcttcaactacaccaccggggtcctcccctgaccaggcattgggtgcgcatgcgtcctggttgcaggctctctggctgcgcatgcgcactgcccgccccgcccgcccc

SEQ ID NO: 128056 - DNA, 122 bp, Homo sapiens
agggaatgagcagggatgcagggtaggccctgagttgctgggggctcagcatggccgctgcgcacattgcatcattttgtcgacactggtgtgggtgaaatcttccaaaagaaattaaaaca

SEQ ID NO: 128057 - DNA, 122 bp, Homo sapiens
aggcggcttaggcctgccctgtggagcatccctgcgggggactgtggccagcttgagctacgcagatcctgagagcactcccgggtaggcaatgctcttgacgggtggaacacctcgtcaga

SEQ ID NO: 128058 - DNA, 122 bp, Homo sapiens
cgctgcactacgtagagctgccaccaggtggagctgaatccacacctctgagaccgcacacgcctctgacacttggcatcgtggcctctctgggtcctgattctttggaaggtaggcggtaa

SEQ ID NO: 128059 - DNA, 122 bp, Homo sapiens
gccaccactgacctgggccgcagcctgggccccgtagagctgctgctgcggggctcctcgcgccgcctcgacctgctgcaccagcagctgcaggagctgcacgcccacgtggtgcttcccga

SEQ ID NO: 128060 - DNA, 122 bp, Homo sapiens
gcttcggcgccccggccatttgcgccgcgctcacggccctgcagaactatctcaccgaggcgctcaaaggcatggacaagatgttcttgaacaacaccaccactaacaggcacacgtctggg

SEQ ID NO: 128061 - DNA, 122 bp, Homo sapiens
gagcgcgcgcgcgcccggcggcaaacccaattcctgtgcagggtggggacgagagattcgcgggcccgtaggtgtggagcggggcgcggagggatccgtgggagccgcagtgcggcggcgcg

SEQ ID NO: 128062 - DNA, 122 bp, Homo sapiens
ggaaggaaagggggtggagatgtgtgacagccaaaccctccggtatgtgatggaaggttccgagatcctaaatacctaaaaccaataaatgaagaagtactcatatatataccctttataga

SEQ ID NO: 128063 - DNA, 122 bp, Homo sapiens
atccaagtgtgtggttgcagccgacgacctgccggcgctcagcagaagctccgcgggatgcgtagcaccagtcgccggagcccagagcctggcgttcgccgctgccttcctctcctcccggg

SEQ ID NO: 128064 - DNA, 122 bp, Homo sapiens
aagaaaaccccgtccggaccatccgcaaaaagtaagagctcagcgacaagatctaagaaacgccaacatcgagtgaagaagagaagagggaagaaggtaaaggtgagcattgggtggcaggg

SEQ ID NO: 128065 - DNA, 122 bp, Homo sapiens
gaggaatgtaacatgtaaacactgactcccatattacactgttacaacttgcattaacagcgccggacaaaagccgcattttcacagaagcatcgtacagggatatatctccagcttaattt

SEQ ID NO: 128066 - DNA, 122 bp, Homo sapiens
gtgtaatttcaatttgaactctccccagagcggccttttccctcttgttgcctgccaagtcgtttgaaggctaagcaaacattcttcctccctcccgtccgcgcgagtctcggtctacaccc

SEQ ID NO: 128067 - DNA, 122 bp, Homo sapiens
atccctcgagaatggaacaggccattcgccaaggaggcggtgagcgagagagcaaccttgcgcatgcgcaggactcgcagcgtcctcggcgcccggggacttgggggttttggggttggggg

SEQ ID NO: 128068 - DNA, 122 bp, Homo sapiens
tctgcttcctaggacccagggacaaaggccaaattctttataatatggcactgctacatacgaaaccaagctaggagtttggaggagggagagagattcctgacatgggtggaaatataaaa

SEQ ID NO: 128069 - DNA, 122 bp, Homo sapiens
gcgagcagcgagtttccgtcctagtttgacattgagttagaaccgtttttctttagaagacggaagtttgttttattgacaaaaataaagctaaatatggcttctgggttcggccgtgtggt

SEQ ID NO: 128070 - DNA, 122 bp, Homo sapiens
ccacagtgtctgatgtgacttttcttagtgacaggaaattaggatgagcacgagcaaagtcggtggtcacaagggagcagccaggccagtcctgcttaaactcctgctgttacatgtttgcg

SEQ ID NO: 128071 - DNA, 122 bp, Homo sapiens
acaatttaaaattcaggtcctctgatacaccagccacatttcaagagtgtaagagtcccacgtggctagtgactgtcatagaactttccaccattgcagaaagttctgatggacagtgctct

SEQ ID NO: 128072 - DNA, 122 bp, Homo sapiens
ttttaattacaagtgatcctgtgtatcaggccctgctggagagaccagtcgcagaggctccgagaatttcccggatcgtgcatttgaattcactacaatgctttgtcactgggggtttcagc

SEQ ID NO: 128073 - DNA, 122 bp, Homo sapiens
gagccgttttaaacccttttgaagccaagactcaccttcaagtgaaattttaaggggtgccggcaaagagatttgacttaattccagacctttccttcctgctggtctgaataattagcaga

SEQ ID NO: 128074 - DNA, 122 bp, Homo sapiens
aaacccaaaacagctgcttggaaggagccagcatgccagaggctgggcgcaggcgcagagcgccgcagagccaaattcaaatcactttcacactaagagccaaagatcagttttcaaaggag

SEQ ID NO: 128075 - DNA, 122 bp, Homo sapiens
aaagctgccgttcttttttgtgtaggttgctaaatagccatggtcctgccaggtgtgcaccgactctgccatcccctgctcctggaaaatggactggaggccttttagaacagtctcaccat

SEQ ID NO: 128076 - DNA, 122 bp, Homo sapiens
gtgcggaggccgggtcagccaagtcccccgccaggccagcatcgtcatcgggccctacagcggaaagaagaaagccacagtcaagtatctgtctgagaaatgggtcttaggtaagaatccag

SEQ ID NO: 128077 - DNA, 122 bp, Homo sapiens
ttcccaaacaaaagggatcttggggccccgggaggagcctgaatgactttggagaagccccgcctccagccggcgcggattggggccgaggctggagaagcaaggaggcgattggcgctggt

SEQ ID NO: 128078 - DNA, 122 bp, Homo sapiens
tcacgcagggtgtacacatgcgcgcacatgcacagcgctcacacagggtgtacaggtgcgcgtgcacacagctcacagtgcttatgtgtccgtgtatgcacactcgcagagagcccacaggg

SEQ ID NO: 128079 - DNA, 122 bp, Homo sapiens
tatgctactatgcagccagtctcattgctgttaaactgctgaagcagataactccatgtccgtgcacacaaagtaattgcaccaaactaatttgtgtttgcaaacagatcctaaattaacta

SEQ ID NO: 128080 - DNA, 122 bp, Homo sapiens
ctaatccaatgttgagaatactggtttaagtgggaagaaaaaggctgataacaaaataagcgagggaaggaagaatgtttattttatattttcaaattgtcattttgtttttatgttattgg

SEQ ID NO: 128081 - DNA, 122 bp, Homo sapiens
acatgcagacggaacctttcctgctgttgaggacatgttcctgagttgaggacactctcccgagctgaggtttctaaaacccctggccaatcaacaactctaagcttaacatcttcatttca

SEQ ID NO: 128082 - DNA, 122 bp, Homo sapiens
catttgaccgagcatatgcaactcgctactgaagaagtgacttccgttgcataccaaagccgactacactgaacagtaccttcctttctagaaacaattttagattggcaaaagtgcaatgt

SEQ ID NO: 128083 - DNA, 122 bp, Homo sapiens
accctttatccccattcatgtgtttcttagccccccagggaagaatgcttctgtgggggacgcagccacgattccttggaaggagaagctgagcccagccatgctggtctcctcctggcact

SEQ ID NO: 128084 - DNA, 122 bp, Homo sapiens
aaagggggaaagtcttataatgaggtggcgatttgcttagggaggggaatgcaatgcatgcgtgacatccagaggctgggaactaatcgtctcataggagaggtaagtgtgtaagcaggctg

SEQ ID NO: 128085 - DNA, 122 bp, Homo sapiens
gattaggggccggtagaggtgggcgggtcgggcggaagtcggtctggtcaccatgggggccgcagacgcctgcactcgggacttcctcttccagctgagaagctgagcctgcgcagtcctca

SEQ ID NO: 128086 - DNA, 122 bp, Homo sapiens
tcagagcggaaggttgcttggcttggctgggctgagctgagctgcacatcgtggtaactacggcatgtctgcacacagggaagccagtggggtgggagagagggaggcggcaggagggagcg

SEQ ID NO: 128087 - DNA, 122 bp, Homo sapiens
taaagccaaaatattaagccttttatcccaacttggatgggctctttcctttactctcgccggttttttctttactgtctctttaagatttctctctctatttatactttttttttaactac

SEQ ID NO: 128088 - DNA, 122 bp, Homo sapiens
gcaggcgcagcgtggggctgtggaggtcctgctggctggtggacaggacccggggagggccgagccctggggccagagccggccaggtggacgcacatgactgtgaggcgctgggctggggc

SEQ ID NO: 128089 - DNA, 122 bp, Homo sapiens
acccaggcccttgggcaccggcttctgggcggtggcagaaccggccgtgtgagtcaggaacgtggtaaagggcccagtggggaggcagctggcaggaacatggcagacgggcagggagctgg

SEQ ID NO: 128090 - DNA, 122 bp, Homo sapiens
ggggggcgggtggcgacagatcgcatggctaggtcctacaagcccacacctggggacaggcgggacgaggagcacagcccggggaagccacaggttgaaagcagtgagaatgtcaggggcct

SEQ ID NO: 128091 - DNA, 122 bp, Homo sapiens
cagcagccgcccttactgcgcgcgcgcagacttcggcgtctacttccggtgtggcccaggcggggtccgcagaaccagctatgtcggcctacggcatgcccatgtacaagagcggggacctg

SEQ ID NO: 128092 - DNA, 122 bp, Homo sapiens
gtaggagtgatcggtctttcccgaagtgggacccataatgaaagacaatgattggttaatcggtaataattaactaggaggagagcactctatcttccaattacatgatgatttgctaagtg

SEQ ID NO: 128093 - DNA, 122 bp, Homo sapiens
tgcccacgttggtgttccaggtggtccagttcacctcgtccaccctgcagggtaaggggtcgggagagcctgagagctgtgcccagcttcccgggccaagggctctgcccacaggccaagcc

SEQ ID NO: 128094 - DNA, 122 bp, Homo sapiens
tttcagggtcgatgtttttaactttcactgaatgtatcaggatgtagccccatcataagtcgaggcacatctctgtttgagtgcctgttacgtgctggccatggtcccaggcctgcgggatg

SEQ ID NO: 128095 - DNA, 122 bp, Homo sapiens
aacgacagctgaactgagcatgtccgtgaatgcacaaacgaccgctgaactgagcgtgtccgtgaatgcaccgaccactgaactgagcgtgtccgtgaatgcaccaacaaccactgaactgc

SEQ ID NO: 128096 - DNA, 122 bp, Homo sapiens
ccggggtgggcaggcggccccactcagggtctggaaggcttggcctctccaagagccctgcgtgccgcacccatggagctgagcttggggtagccaaccagggctgtgcggggagggcccac

SEQ ID NO: 128097 - DNA, 122 bp, Homo sapiens
aggctgcgcagtcggtgccatcttctacgcccctgggagcgttgtggctgctgtttccttcggctttcctcctcctgctccaccatgtggagccgacggcagggccgcctcaggcccacggt

SEQ ID NO: 128098 - DNA, 122 bp, Homo sapiens
cctgaggcatggttgcacagctgctcagcaagcctgggatcatgtctaccaggagtgtctcgaagagctatttctgaggccctgactgcaggtgcatgtccattgggttagccatggccttg

SEQ ID NO: 128099 - DNA, 122 bp, Homo sapiens
agaagagccccagataatctgccatcctaccgcacagctgccaacttccacctgaggcagcggtggttgggctgttcgttgttcattcgttcattcattttgtggctgcaggtatctgcctg

SEQ ID NO: 128100 - DNA, 122 bp, Homo sapiens
ccttccctgccccaactccctccccagcactgggtcagtggtgtcctggcagtgaggctccgtgaggggctggcccttagaggaactggggtgggaggtggggcaggcctcacccttgggct

SEQ ID NO: 128101 - DNA, 122 bp, Homo sapiens
acgaccccctccccaacctccgaagcgggaagccggcccgacccaagctcacagaggcctcggtgttcaggccctgccaggtggcctctgcaccctgtcgtgctgttccagggactccatac

SEQ ID NO: 128102 - DNA, 122 bp, Homo sapiens
caggccttttgctatgtagtgtctgttaacctcatgcggtgctcccagccctgtgaggtacgcattatgctctgcatttttttcagatgagaaaacaggcttggaggttgggtatctttccc

SEQ ID NO: 128103 - DNA, 122 bp, Homo sapiens
gtgcaacagtgccatcatagctcactgcggcctccaattcctggcctcaagcgatcctcccgccttggcctcccaaatagctaagaatagaggcatgtgtcaccacacctttttttttttgt

SEQ ID NO: 128104 - DNA, 122 bp, Homo sapiens
tgaaagtactgtcatctaaaagcaattgtgattttattgtaattggttgtcactgttgtacggtgtctagaattaaagaatacatgtaaactttcatggtatttagcctttcttaaattttt

SEQ ID NO: 128105 - DNA, 122 bp, Homo sapiens
ctctttaaaaataacgagaggttggctgtaagagtttattttgttcctatttatttataacgagacttataatgtgtagagttagcacttaattatgcaaaaaggcttgctcttttaaaaac

SEQ ID NO: 128106 - DNA, 122 bp, Homo sapiens
cgataatagccatagccctgggctgccatggtagaaaagagcaggccctaccagccaagacgcacagcctctgaccacagttcctgcttgccgctctcacagttcccagatctgctgagttg

SEQ ID NO: 128107 - DNA, 122 bp, Homo sapiens
tttgtcagggcaaatccagtccccgtcactgactcggaaattcttggtcgacatcttgaacgccaccagcacagccacccgcagctatgtcttcacaggaggaaaacgggccggggactttc

SEQ ID NO: 128108 - DNA, 122 bp, Homo sapiens
cacacctcccagccccggcataggctcccgcccaggcaggccccacctcccgacaggccccgcccccagccgccgggtcctgcctcctgataggccccgttcccacgcctcctggccccggc

SEQ ID NO: 128109 - DNA, 122 bp, Homo sapiens
atgggggaattgccgggcgggcgctcgggcgctccgagctgcgcggctccccggggagaccgcagacactttgcggagatgttactccggagttggagacgatgataaatatgataatttgt

SEQ ID NO: 128110 - DNA, 122 bp, Homo sapiens
cggccaggtgagaaggccgtagaacgtaacttgaaaatcagcggcaggtgcagtccatggcgttgatggggctgaacgaagtgcaggaggcaaaactctaaatgggggtggagagcagagct

SEQ ID NO: 128111 - DNA, 122 bp, Homo sapiens
agggttctcgggttctgctcactggctgcatgagttggatgttctgctgctctgaagtgccggctgggccctcgtccgggtgccagctgggctctggttctgagtgttgctgggccctcgtc

SEQ ID NO: 128112 - DNA, 122 bp, Homo sapiens
ccagtttgccaataaaggtttctaaagcagcccaggcaccaccccacccacccacagccccgagcctcagtgtgcacaagggctctacccgcgcccgtcacagcgacctcggcagcgggcac

SEQ ID NO: 128113 - DNA, 122 bp, Homo sapiens
tgagacgcttacttctcagtcgatgagtctgatgcgcctgccagtggggaagcggtcacacggggggttcccgtgagcaggcctttgctgacaggagtttctgtttgacttttcaggagacc

SEQ ID NO: 128114 - DNA, 122 bp, Homo sapiens
gacatgtggggcaaaagagacgtattttaaaacccccaaacaaatgtgccctgaaactcacggagcctgagtttctgggttcctcgcttgcactgccccttccgaagccctgcgaggggcgc

SEQ ID NO: 128115 - DNA, 122 bp, Homo sapiens
tctccaggatgaggaagattccgcagcgaatgaagaaggcctcgtgcttcgccagcgcctcgtgcagcagcagcaggttgccctcgctggtgaggggggaggcgcgtcagaaggagggtgag

SEQ ID NO: 128116 - DNA, 122 bp, Homo sapiens
ggcagagctgaacgatacaacaggaactgtacatccagaaaagcctaaaataccactaatcggcccagtacagaaaaagcctgtcaagccctgctctgtgagagaattcagagccgatggcc

SEQ ID NO: 128117 - DNA, 122 bp, Homo sapiens
gtgataatgcagcgactcccgtctgtggctgggagctgtggctgcacgagacccggaattcgaaaggctctgcctccccatggacggagacttccgttgttttctttcctttctctccgcag

SEQ ID NO: 128118 - DNA, 122 bp, Homo sapiens
gctgaggaaggcagaagtgagagcccttggaagacaggtttgacccctaggctggtggggcgtgggcagccagcctggacctggaaggtctgcaacctggcaggctgacaatggcaatagca

SEQ ID NO: 128119 - DNA, 122 bp, Homo sapiens
ctctgctcaaggacagcaatgatgtctgccacatccttggagttgggaattacctggcctcgttacctcctccccactcctccccaccccaggaatctggatgctcaaggcttgactatttc

SEQ ID NO: 128120 - DNA, 122 bp, Homo sapiens
acgtaacccaatccaagatttgagggcggttacatgcacccactccctcgggtttggctccgcccctcaccttgacgtagccctcccagcctatcaacgactgcgcccgttgggggtgaggg

SEQ ID NO: 128121 - DNA, 122 bp, Homo sapiens
gggtgacagagtgagagactccgtctcaaaaatgaatgaatgaatgaatgaatgaatgaacgaacgaacaaggtggtttaatgtcagaaaacttcctaagcatttgctccccaaacctttca

SEQ ID NO: 128122 - DNA, 122 bp, Homo sapiens
tgcccgcaggagccatgctgaggtgctgggtatcagtggctggcttttgggccagggatacgaggctagagttagagttagaactgtgagccctgacggatatagtgagtcagttaatattt

SEQ ID NO: 128123 - DNA, 122 bp, Homo sapiens
ttaacaacttcaagcttaaaatagaacgtgaagtagcctgtgttgcaaaatacaaaccaccgtaaggaatctaatcctgtccttggtccttgggggtagtaaaagaagaggttttgacatcc

SEQ ID NO: 128124 - DNA, 122 bp, Homo sapiens
aaaatggagaaacagtaaagtcctgcaatgaagctataattaaggttgaaccatacattccgctaatcctgcaactttcctacaatcatttttctgcctatacaatcctgcttcttatagga

SEQ ID NO: 128125 - DNA, 122 bp, Homo sapiens
caactcataacatactttaaaatgttcaggtagcagtgagcattgttcatatgagaatggcggctgggtgatctctttgctgaattaatgagttcttaacatgtggacccaactgcctgtgt

SEQ ID NO: 128126 - DNA, 122 bp, Homo sapiens
ggctctttgaatttctcctgagctctttcatcgatggcaggcaagcttttcactagttctcgcattgctctgtctctgctttaatatgaacagcatgccaggcccattgccttaaatcatgc

SEQ ID NO: 128127 - DNA, 122 bp, Homo sapiens
attttgcctgcccgaggtcaagatcactcttgctttgcaagcctgtgagtctgaaagtgacgtcagcagatacactgctttctctccaaaaaagttttggcaaaaaacactaagtgaaagca

SEQ ID NO: 128128 - DNA, 122 bp, Homo sapiens
tttctcgagtctagaggggccttctctcggttccagggttgaggacttgccaggcctctgcgagcattctgctttaatcctcacaacaactctgcctaacccagggccttgctcttcgcgca

SEQ ID NO: 128129 - DNA, 122 bp, Homo sapiens
tacttttaatgactatataaattatgaatgccctgcagtcccaaatcaccaagaacacaccgaatcagaacaaagttgggtttattgacttgttgcaatgaaggagactgcacacaatagga

SEQ ID NO: 128130 - DNA, 122 bp, Homo sapiens
gagtctgaggtgaactcctgccccttcccaaggggcggctcctcagctccactgtgggcccggcatggccagagcacctggtcttcaaagagaagccaggaatccagattattaagtgacat

SEQ ID NO: 128131 - DNA, 122 bp, Homo sapiens
catggcctccatcatacccttgcatacaggaaggttcaggtggccatccacgacacgccacggccggccgatgaagcagacactctcacagtccctgcagggagagggcttgacatcagggc

SEQ ID NO: 128132 - DNA, 122 bp, Homo sapiens
tggtgtgtgttttttgttttgttttgttttttaaaaaaattcttgctgtgttggaactagcgagtggtggagtctctgaagcctcatcagtcaccgggactgtcaggaatagtggtttaaga

SEQ ID NO: 128133 - DNA, 122 bp, Homo sapiens
cgcagcccttcctgtcgccagacgagacttcctcgacattgctcccatactaagaagcaccgcgtttcattcaacaaaccaagtgtggatttgatagctgtagttactatagagatgcgagg

SEQ ID NO: 128134 - DNA, 122 bp, Homo sapiens
actgctgggcttggcagcccgggtcatctgtacctctgcctcctttcccctccctcaggccgaaggaggagtcagggagagctgaactattagagctgcctgtgccttttgccatcccctca

SEQ ID NO: 128135 - DNA, 122 bp, Homo sapiens
gtgcgatgtgcaggacagggcggccaggcgctggagccctacagagctggcctggaaaagcgggcggcggggccgactgcagcatagcaccacctcgtggccgctggtccacattgcagctg

SEQ ID NO: 128136 - DNA, 122 bp, Homo sapiens
catctctccaggccaccaaaaccaaggcccaagtttgttgaaactttccctgggcctgggcggcgaggtcccccctttttcttagattttttacctggaagttccctgctggcatcttagaa

SEQ ID NO: 128137 - DNA, 122 bp, Homo sapiens
aagaaacccattttctactaagagcagaaatttcttccacaggcttccacaaagacaccacgcaacacaaacagcaatccttctctaggtctcttttttatgtatcttcatagaggctgatg

SEQ ID NO: 128138 - DNA, 122 bp, Homo sapiens
ccggatctcccgggctctgcagcccctctgcggtccctgatgctcggctcctcgcgggggcgccccactccggcttctgtgatgtcagcgccggaacctggaatcccggctccgcgagggaa

SEQ ID NO: 128139 - DNA, 122 bp, Homo sapiens
ccttttagagggggccagcaacctgcatcagttagcttttgcatgatgagctacccctagcgttagcgatgtctgacaacattccttcatcactgctgcggagtctgcaaaccagcagggca

SEQ ID NO: 128140 - DNA, 122 bp, Homo sapiens
ccggagaacaggaggatggtgtagtctgcctctgcaaccctccctccttttctctctcttcgatggggctagagggcaggaaggaggggtagaggcagagctttccctacctgaccagtccc

SEQ ID NO: 128141 - DNA, 122 bp, Homo sapiens
ctctattattctacgtacaatatgcagaattaagcgagataacgtggtgccagcataaaccggcgaggacgtgaaattcgtcataaaatccaacaggagggcagtgaagcccttttttctca

SEQ ID NO: 128142 - DNA, 122 bp, Homo sapiens
ccacaatggaaatgatatcgttagctctgaccttgcatcccagctccagaagcccaaactcggcttttctgcggccggattgctgggtgaacagagcttcgcggaggggaccccctgctgcc

SEQ ID NO: 128143 - DNA, 122 bp, Homo sapiens
acctcgcaacagcccaaccactgattccacttcagtccctttgcagagtcgctcagcagtcgtgtcattaggaaatttaaaccttcctcacaaatcacttagagattctgctgtgcacatta

SEQ ID NO: 128144 - DNA, 122 bp, Homo sapiens
ctgtaatatcgagaaattaccacatttgggtttttctaccaacttgcttaggattttatccgaggtaacgaccccaggatcacaattttgtagctgaccgaagcacggcgagaaaattcctc

SEQ ID NO: 128145 - DNA, 122 bp, Homo sapiens
gccgcagctaggcgaggcgcaccgtgattggcggagatgtggagtgattggcggctacaccggccactcagcaggccgagctggcgccgcatccggggggccgcgtctggagtggagggagg

SEQ ID NO: 128146 - DNA, 122 bp, Homo sapiens
gggcgcccccgcggcgcagcagccccagcagttcgcgtatcctcagcctcagataccgcccggacatttgctgcccgtccagccctccggccagagtgagtacctgcagcagcacgtggccg

SEQ ID NO: 128147 - DNA, 122 bp, Homo sapiens
aaactgaggccgggaaggtgtctggatactcctgcattgctgggtattctggggcaccgccggtcatacgtgggcttctgggtgagccagatgctggtacacgtgcaggtactcacatcctc

SEQ ID NO: 128148 - DNA, 122 bp, Homo sapiens
ccatccccgcggccaggtccccggaccccatgccaccccggaagctggtggagcgggacacggatatccgggaaccagagcccccggcgcctgcatagacgctggccatgcagctggccggc

SEQ ID NO: 128149 - DNA, 122 bp, Homo sapiens
gtttgttgagtgaaagcaggcacaatggtaggtagtgggtactggagcaaatgactgcaccggccctcatgggacttccatttcagtggattcaggggaaagcagcacgtgtttttgagaga

SEQ ID NO: 128150 - DNA, 122 bp, Homo sapiens
ttggaacctgcccaggcctggattcctccagactttgcacatcaccacctgtacccgtcacgttccttggcttggtttttgggctcctggaaagactctgggattgtcccttggctgacctg

SEQ ID NO: 128151 - DNA, 122 bp, Homo sapiens
aaacagatgaaaatgaatattccatcttgacatcaaaggagacagagagggctggcatagcgctgggcggcctgcttgggagagaaccccacaggccagccccgtcagacccaggcctcaca

SEQ ID NO: 128152 - DNA, 122 bp, Homo sapiens
ttactacctgccagggacggtgcaaggtgcaaggtgcggtgcaaggtgcggtgcaaggtacgttccaagcttatcagctattgctaatgatagccaatacttagtgggtgctaattgtgtgc

SEQ ID NO: 128153 - DNA, 122 bp, Homo sapiens
cgcctgggtctggagggcggcgtacagaaggcagcctcagggaccggaggtcctttccctcgggctgggggaggaaggtcccctgaaccccagacacagccctgctcccacggtgccctcag

SEQ ID NO: 128154 - DNA, 122 bp, Homo sapiens
agacaaatactgcacgacctctcttacatgtgaaatctgcaatagtcaaactcatggaaacggaggtaggtggaattgtggttaccagagactagaggaagggggaaatgggagatgtcggt

SEQ ID NO: 128155 - DNA, 122 bp, Homo sapiens
gaacgttaggggtgggggagggaggagaggagcggtgaggttccacccttcgggggtcgacgtcgagccagcgtccccagtggagggagccccgcccccgctcctccatcgcggccccgccc

SEQ ID NO: 128156 - DNA, 122 bp, Homo sapiens
ctgaccctcttttcttcctccccttccctgtctaaggactcatgattagattggtccagccggaccatccaggataacctctgcttctcaaagtctttaaccttaaacacatctgcaaagtc

SEQ ID NO: 128157 - DNA, 122 bp, Homo sapiens
ttatgtgcccttaaagactgttagacaagaaaagcattcactggctaataatccataggtcgacctatgtcctaagttaggtgtaaggtccgatgccttggcccacactcgagctctcttta

SEQ ID NO: 128158 - DNA, 122 bp, Homo sapiens
ctccatgagttcacggggacatgaacaataaactgaccctcggtcgaaggaagcagggaacgcactcgcccccgaggtcatccggcctttctgagcagcctgcacctctggcacccaacacc

SEQ ID NO: 128159 - DNA, 122 bp, Homo sapiens
cacgacagcggccaccagctggggcgagcccatcagggcccgccgcgacgcctccttcttcgacagctggttcacaatcatggccgccttggtcaccaccacctggagggcaaaggcagggg

SEQ ID NO: 128160 - DNA, 122 bp, Homo sapiens
taaaaaatttaaaacgtcaaaacctgccagaataagacaatagaagagcgtatcgtcaggcgctgggaatggcaccacgacaaggcattaatgtggattcacttgcacagctgctctcataa

SEQ ID NO: 128161 - DNA, 122 bp, Homo sapiens
tcacctttcgtttccctttccccaaaagtagcgtaaccaacatttaagcttgcttaaaaacgaaaaccaaccgccttgcatccagtgttcccgatttactaaaataggtaaccaggcgtctc

SEQ ID NO: 128162 - DNA, 122 bp, Homo sapiens
aatgacatctcagcagtggctgacacacccagagcccagatcttgttctctaatgtcattcgccataaaaggaaccagggatccctggagaaatggttgattctagggctgggacaggggat

SEQ ID NO: 128163 - DNA, 122 bp, Homo sapiens
gcactctagcagatgcgggccgggagtagctgagctggccaaccgcctgggaccaggatgcggcagcgcccacccgcgcggcgtggagggggccgggggcggcgctcggcgcagatggcgct

SEQ ID NO: 128164 - DNA, 122 bp, Homo sapiens
gcctccgccagcagggcctggacgcaccgcctcctttgacctcgggcttcccccgcgctccgctgcttggggcagactggccccgagagggagccaccatctcccctgctccagggtctcca

SEQ ID NO: 128165 - DNA, 122 bp, Homo sapiens
gcctttctatgtgtttcatctctctctcaggtaccaaacagtactgttttagtccttctacgctctgggttgttttctcctccatttttttctagatttcattgcctgtctcttctttcatc

SEQ ID NO: 128166 - DNA, 122 bp, Homo sapiens
ccggctaatttttgtatttttcttggggacggggtttcaccacgttggtcaggcttgtctcgaactcctgacctcgtgatccacccgcctcggcctctcaaagtgctgggattacaggcgtg

SEQ ID NO: 128167 - DNA, 122 bp, Homo sapiens
gacacagaactcgctgtctcccaagttaaactgctcaagcattgtgtaacttcagcaattcggaaggcttttcccctccttacattcagctgagatatactttcttctcaagctaaattccc

SEQ ID NO: 128168 - DNA, 122 bp, Homo sapiens
tgcccctcagcggtgctaagttcctttctgtatggatcgcatggcctcggatacatctctcggggaccatctggcctggaacatcaaagaacagctggagatatcttctttccccttccttt

SEQ ID NO: 128169 - DNA, 122 bp, Homo sapiens
atggtacagccgctgtgaaaaacagcgtggcagttcattgaaaagttaaacatagatgaccgtgcgatcccatcattccacttcagggtgtgtactccaaaaaaccgaaaggagggacttga

SEQ ID NO: 128170 - DNA, 122 bp, Homo sapiens
gtgtggataagagtcgggggccaagtctcccgctggagcagcatggaaggctgggccggacgtgggcggtgggcaggccccaggactgctgctcttggcctggctctggcgttggcttagcg

SEQ ID NO: 128171 - DNA, 122 bp, Homo sapiens
agtgtgtgtggccacctgtactggtgagaatcgaggaggggggcgggaggtggtgggtctcgcttatatactggagaggctaggagcgaataatcatacagtcatacagataatcggagggc

SEQ ID NO: 128172 - DNA, 122 bp, Homo sapiens
cattttttccatgaacttgtcatagttttcactccggtctaccttccaagtgctgtcaaacgccatgatttcagttgagtcagcctctaggcagctagagattcaggtctgtccttgggcga

SEQ ID NO: 128173 - DNA, 122 bp, Homo sapiens
gtctgagaacagagggactgcatgtcaccatgggagaagggccatgccttccaccattgtcgcaccatgaagaggaggactcgtgggtcctgtgtacactgtagcatacagaagtcacagaa

SEQ ID NO: 128174 - DNA, 122 bp, Homo sapiens
acgctctcggtcacggtcacagtcatggtcacggggtgggacgtgcgccctgacgtcgagcgccgcgggcctctgcactgcgatctgctgccccttggtgggcacgcgcggcactgtttcct

SEQ ID NO: 128175 - DNA, 122 bp, Homo sapiens
atagaaatcaagatctaggttttatggactcattgctattacatgccactgcttctgggacgtgagtcagcaaacttgctttctctccactattccactctgatccttgacccaattaaaca

SEQ ID NO: 128176 - DNA, 122 bp, Homo sapiens
caatgggaggcggcgctgcctagcggctggtaggcggtgcctgcgcgggtgttaggttagcgcgaggcgtgacctagttgacaggctctgaggtgctgctgtggcggcgtccgcggggctga

SEQ ID NO: 128177 - DNA, 122 bp, Homo sapiens
gtaggttcaccatccggggctggggcgctagtctcgctttttggccagagagtcgtgcgccgtcactggtttctcatggcagccactccaacctgcgtgcgccttccctgatgcgccctgct

SEQ ID NO: 128178 - DNA, 122 bp, Homo sapiens
gagaacaggacgacggtgaagtcaggattcaaacccgagtcttccagtgtttccttcctccgcaatttagtgcccgatgtcatctttatttcaccacctgtcagcgcccatctcagaggcgc

SEQ ID NO: 128179 - DNA, 122 bp, Homo sapiens
caagggacagagctcctggtgccgccggaccgcgccctctccggataagtcgagaggcgccggttaatggaaaatgcctccgctgcaacttaaagccggtagaagcaagccgggcccagaaa

SEQ ID NO: 128180 - DNA, 122 bp, Homo sapiens
tccgttcacctgctcctgaaggctggaacgtattattccttccatctcactgtacacttgcgcctgttcactgaccgctcagctttttcctgcttctgcctgtgagtttggaagcgacagag

SEQ ID NO: 128181 - DNA, 122 bp, Homo sapiens
gatgcgtccctaaactcccgggggaattagacttgtgggaatgttctggggaaactcctgcgcggtgaattgctgggggctccgcccccccgataggtggaccgcgattggtctttgaagac

SEQ ID NO: 128182 - DNA, 122 bp, Homo sapiens
tgaaccctccccaggagctcacctggggcacccacgagaaaactacggaagctgtgaagacggaggtgtgcatgtggccgggagaacccggggggggagccgcactggggacagaggggtgg

SEQ ID NO: 128183 - DNA, 122 bp, Homo sapiens
aaggtccaaggagccgttgcagggaatgaacttgagccacgccttcagctggatttcagacgtgggcaggtgtgtctgtgtgcggtgcggggaggagagaggaagccatcggagccacactg

SEQ ID NO: 128184 - DNA, 122 bp, Homo sapiens
ttttgaatgttaactaatttaaatttaaatcttaaaaagttacatgtgggtagtggctgccgtacggaacagtacagcactagaataatgctgtgtcctcctgttacacatactcatggtct

SEQ ID NO: 128185 - DNA, 122 bp, Homo sapiens
ggagcagcagctcagcttcatcgagcgcctggtggagatggccagcagcctggccatccgcgagtggcggcggctgccccacgtagtgtcccacgtgcacacgcctctcctacaggtgcgtg

SEQ ID NO: 128186 - DNA, 122 bp, Homo sapiens
tgtggggggcaggagaggggccttggagctccccagtctcagctcagccaggcagaggcccgggtggccggctgtggacctgcggctgccctggtgcagcgttgttctggtccccgagtcgc

SEQ ID NO: 128187 - DNA, 122 bp, Homo sapiens
cgggccgccctgctgcacaaaggcctgctttgttctctcggctctgttttaaatatctgacgaatattccccccatccctgctccaaatccccggcctgacggcaggcgcggcacaacggcg

SEQ ID NO: 128188 - DNA, 122 bp, Homo sapiens
ggttgaaagttccagagctgccgtctaggcctcgtgtttgtcagacacccacggctcctgcgaggtcgcagccatgagctggcgggggtgagtacacaagcccagatcccccaacccgaact

SEQ ID NO: 128189 - DNA, 122 bp, Homo sapiens
acaggggcccgcacacgtcggctgggcagtgcagcttgccggtgcggtagtagttgagcacgtacgcgaagactcccgggtgccggtcaaagaagaactcgtcggcgcccgggtcgtagtcg

SEQ ID NO: 128190 - DNA, 122 bp, Homo sapiens
gcggaagaaaaaagcaagatgggaccgcaagctggacgtgactgtaaggggtcatggctgcggaatccagcaggggcattggggttgacgtgcactcagcgccgagcttcttcgtagttcct

SEQ ID NO: 128191 - DNA, 122 bp, Homo sapiens
gctgccaggccggcgcctgctcccgcagacctgccatgccaatgctctccaagctgaggccgggtggcctgcgacgctcagcccgctgcccatcacaagaagaaaagcgcttatcagggcgc

SEQ ID NO: 128192 - DNA, 122 bp, Homo sapiens
ggggttccgggccaggcagatccgatattcggtgccagaagagaccgaaaagggctccttcgtgggcaatatctccaaggacctggggctggagccccgggagctggcgaagcgcggagtcc

SEQ ID NO: 128193 - DNA, 122 bp, Homo sapiens
aagaacgttctcgctttggtagaaaaccaagtgtcaatgatgcacttgctggggcaaccccgggccgcgagcccgcccgcggccacactcttgcccgcactgtgaggaccctggcgcatcac

SEQ ID NO: 128194 - DNA, 122 bp, Homo sapiens
tcctcccctagcacctcctgagctgggtcattaggagagtggcattcccttcttccagttcgctcctcttcacttctccctcccatttgagcaaagcaagaaaacaggcttagttgttgcaa

SEQ ID NO: 128195 - DNA, 122 bp, Homo sapiens
gaacatatttccttacagctgacatttcttttattattaagaattaatgtctataaccctcgctaatacaaaaatcatcccttgtttatatacatttatttttgcaaactcacaccgaatga

SEQ ID NO: 128196 - DNA, 122 bp, Homo sapiens
ggccagagaaaaggggccatgtcttcttcattagggtacacccagagtcgagcagtgaagcgtgggagacagctagattcagcaggaagggcactggtgggactgggaccaccacctactcc

SEQ ID NO: 128197 - DNA, 122 bp, Homo sapiens
cgaagcaatgtgggcagagtgcagtgagagctgcaagatgagcacgtgacctgccgcggacgaaaagaactgcaagggacagtcggcccagtggctcctcccctgcgtgggccgagatgttt

SEQ ID NO: 128198 - DNA, 122 bp, Homo sapiens
gattgcagagttcactgcactgaccctcgatgctgacccttgaagtgccggaaatctcagcgtggactcagacatgataagcgttcaggcactcccctgacgcaggccagggcaaaggcctc

SEQ ID NO: 128199 - DNA, 122 bp, Homo sapiens
cgcggcagaccgcaaaaaagccgaagtcagaggacgacccagaacttggcttccccgagccgcgggtcgccttcccgggacgtcggcctggccccctcggaggcccatcctccctcggggac

SEQ ID NO: 128200 - DNA, 122 bp, Homo sapiens
taatcatactgtttgtgattcatgtcaaatactgcagcatacacatccatggttaatacacgagcaccatttgttattgactgatgtgaggtggttggtctttgttaaattcaaaaatggaa

SEQ ID NO: 128201 - DNA, 122 bp, Homo sapiens
gtaaatactcaaacatacagattgaggcttccagaaattaatccacttgaggcgtccacgcggaacaaggtctgctgaccacagttacacacgtcgtgacaccactgtatcacggcgaatgt

SEQ ID NO: 128202 - DNA, 122 bp, Homo sapiens
aggctttattctgtgctgccgatcagcagcaggcatattatatcctggactatgtgccggcgtccaaagtggctggaattgaaagtgaactttagcctatgcgtggctgaattcaggtcagc

SEQ ID NO: 128203 - DNA, 122 bp, Homo sapiens
tgattagtcatttcacaatgaggggatggcttcctggggtgttttcaagcttttgggtggcggcacagtctgcaagagggggaaaggctctgagaacaagatatgactaaagaatagtttct

SEQ ID NO: 128204 - DNA, 122 bp, Homo sapiens
gatgcagcctcattaccagacagagttctaaaggactcagccaatccccattatagacatcgactcttttgcaaactgtgattctaataaaaaaaaagtggaaattcttttgattggagttg

SEQ ID NO: 128205 - DNA, 122 bp, Homo sapiens
gccgccagacagcccagccgaggccagagccggttcttggggagtaacacccccctctaccggccacctcggactttacaggcaggaattgcagaatccgttgcattttcacaacaataact

SEQ ID NO: 128206 - DNA, 122 bp, Homo sapiens
ttcttgtgaccattctttcctccaggataagcgccgggacagcgccccctatggggaatacggcagctggtacaaggcctgtaaagtagacaggtgagtggggcggggctgggctggggagc

SEQ ID NO: 128207 - DNA, 122 bp, Homo sapiens
ctgcctggccctagtgaaacaaactgggcaatcagaccctttcataactctttcaaaatacggtagttttgaccaacagctttccagcttaataacgcagttatcattggtactctttagcc

SEQ ID NO: 128208 - DNA, 122 bp, Homo sapiens
tgctcctgctcacccttatctctcccctgtaaactcaaaggaaaacttatctctttatatcgactctataggtgattttctccattctgctataaactcaacattttattcttaaataacca

SEQ ID NO: 128209 - DNA, 122 bp, Homo sapiens
tgcactcttcaaagacctgggttgatagagactcagggaggcagttggatctcaaagttccgagggtctgggatctaacggtgatagttctagtgaaaccctcccacccttccaggagaccc

SEQ ID NO: 128210 - DNA, 122 bp, Homo sapiens
ccacaagagactcctcaaggtgcgcagcatggtggagggcctaggaggacccctgggtcacgcaggggaggagagtgaggtcgataacgacgtggatagcccagggtctctgcggagaggct

SEQ ID NO: 128211 - DNA, 122 bp, Homo sapiens
agtaaacctaccgccttggccttccaaagtgctggggttacaggcgtgagccactgcccccggcctaatcatcgtgttctagtctgccctccaatgggagaaacaagtaaaattatgccatg

SEQ ID NO: 128212 - DNA, 122 bp, Homo sapiens
cttaggtgatccacctgcctcgacttcccaaagtgctgggattataggcatgagccactgcgcccagtgattatagaaagttaaaggcacatggcaatgcacacgcctatctacgtcttccc

SEQ ID NO: 128213 - DNA, 122 bp, Homo sapiens
gcaacattatataagagaggcgacgatggagcagcgcacccggccaaaaaagcctccgtgcgcctactctacggtgcaccgcgtcccctctgcaccagaagggccctgtcctcccacatcca

SEQ ID NO: 128214 - DNA, 122 bp, Homo sapiens
gggagccccacacctcggtctccccagaccggccctggccgggggcatccccctaaacttcggatccctcctcggaaatgggaccctctctgggccgcctcccagcggtggtggcgaggagc

SEQ ID NO: 128215 - DNA, 122 bp, Homo sapiens
gggtactgtcctgctcttgcctgcagcttgaaatacgaaggcaaatcaatacaaaggctgcgagccccgcgatgcatcggggacatttgcatcagctcctgttttcaaatgcgcaattactc

SEQ ID NO: 128216 - DNA, 122 bp, Homo sapiens
aacccacagcgccttccactgcgatattgctccaaatccgaggaaattcaaactcccgggcgcgcgcaggccgacgggacccgaggaggaggggcaggacgaaggggtcgcgcgcgccacgt

SEQ ID NO: 128217 - DNA, 122 bp, Homo sapiens
tacccggccatctgccgaaggagctaatggagcatcgtggatggatgcgcgaaggatgcacgaagccggtgccagaggctgctccttccgctcccagccaagtggccctcccactcggactc

SEQ ID NO: 128218 - DNA, 122 bp, Homo sapiens
gaatagtgataactccttactctcctagtcagcctcccttggttggggagagggtggattcgattaactgtcattccaaattactgaatgtgttttatttggagcagttaaaaagttttgct

SEQ ID NO: 128219 - DNA, 122 bp, Homo sapiens
agaggtttcagtcctgggtttgggagaccggtggagcctgcagtcctgggcttgggagaccggtggagcctgcagtcctgtgtttgggggactggtggagcctgcagtcctgggcttgggga

SEQ ID NO: 128220 - DNA, 122 bp, Homo sapiens
tgttgagtctttacctaattgaatcagcagagcctacactgatgtcttccagttacaaagcggtcactgtaaagtaaaaggtgtcttcatatctaggtttgggctgagaaggatccaattgt

SEQ ID NO: 128221 - DNA, 122 bp, Homo sapiens
gactctatacataaataagtgtgtttgtgtttctgtggggagagaaaggggagggagatgcgatattaagagtgagtttgtataacagcaagtcagagctaagatgtataaaagtacacacc

SEQ ID NO: 128222 - DNA, 122 bp, Homo sapiens
aggagcaacccccgggggctcactgctgctgtgaggagtatgaaaggatgacagttgcttcggaaaatggcttgccagttccttacaaagttaaacattcgcctacactgcgatgcagcaat

SEQ ID NO: 128223 - DNA, 122 bp, Homo sapiens
tctcgaccccacccaggctccgcaaagtgatcccaacgtgcacatgcggagtggcccccacgcagggatggtcccattcccatgctggatagggcctgggttggagacaggccttggggtgg

SEQ ID NO: 128224 - DNA, 122 bp, Homo sapiens
ttttatttgcagaggattcttttctcaaaatgctctggcatttggacacacatcacatgtcgatatttgcataggagtcattttcagtggaataacatttttaatgtgtggttttacggttc

SEQ ID NO: 128225 - DNA, 122 bp, Homo sapiens
cagagttcttccaatcctgaactaactcacctgcacccttggcccaatcattttcactcccgagggtctgcactcctcgtttctacattggttttctaggaagaaaggggttggaccctccc

SEQ ID NO: 128226 - DNA, 122 bp, Homo sapiens
ccccgagggcactcctatccaaggggcccccaaactgtgccacctccaggggctgcgcgtcgactttggctgggtttggaagtacagcccacactcagcaaacagatcggctctctttcctg

SEQ ID NO: 128227 - DNA, 122 bp, Homo sapiens
gtggggggaggtgctggaggctggatgtctacagtgcagactgtaactaggaatgaggcgcgggagcaaggtcagagtgggcccctgcggtgcccggtgccctctcacgctcaggtagcagg

SEQ ID NO: 128228 - DNA, 122 bp, Homo sapiens
agtccccagacaccccagtcccatcttcgcctgttctagactccagaatgcgttccttagcgaaagctgagaaccttttaattcgctctcagtcaacaccaaagaccctcaagcaaaagcaa

SEQ ID NO: 128229 - DNA, 122 bp, Homo sapiens
aaacaaatcaagccactataataattaggagccccttgctctggtgcagggcataataatcgctagcaaatccttagttgatgacatcacagtaatctgagacagagaggtggggactgtag

SEQ ID NO: 128230 - DNA, 122 bp, Homo sapiens
cgtgccgtgctctctaccctccacagtcacggtgccggaccctctcccgataactggacacgtgtctcccacaggacacgcactggcactaaatccacactgcccatctcggagacaggcgg

SEQ ID NO: 128231 - DNA, 122 bp, Homo sapiens
cgaccgtcaccaagtgggaagcaaggggcgttgagactcagaggacaccgggctcccccacgtggctcctgacgtcctgtgacaatttcattccccttcaaaggttaccactggaaatgcaa

SEQ ID NO: 128232 - DNA, 122 bp, Homo sapiens
gcggcggcgcccagcccggggtcctcaaggaggccccgcccactggccggaacccgagcccgcccctctcaagggactctccccgggcccggccattggtccggtatggaagcggggcggga

SEQ ID NO: 128233 - DNA, 122 bp, Homo sapiens
tttgttttaaaaaatgtggtaaaatagacaccttttaattggaccacattttgtctatctcgacgtatgcctcagtgtcatcaaggagactctccttgacatgcagtcacggccatgatcca

SEQ ID NO: 128234 - DNA, 122 bp, Homo sapiens
agctagcaatgcacccagcccttgactgtgccctggtggacagccgagctgtggctctagcgtgagccagtgccttcctgtccctgccaagggtgaggccagagttggccccgaggctaatg

SEQ ID NO: 128235 - DNA, 122 bp, Homo sapiens
caggtcccgccccctgggcactgagtgacagaagaagcgatcacacagtgctgagtcgagcgggatgaacgagttccaggcacagcccttgacagggcaggcttcctccctgtgctgtcctg

SEQ ID NO: 128236 - DNA, 122 bp, Homo sapiens
gaactctctccggagttaccagctcagctccaatctgcacttctctctggatgtggtaagcggaactgatggacaaaagtatccggagctggtgttggaacagcccctagaccgcgagaaag

SEQ ID NO: 128237 - DNA, 122 bp, Homo sapiens
agcgtaggcctggccaccctgtcccgccgggggcccactccattgcgccgcgcgggtgcgcgtagacctgacctcccctcgggcataaaaagcgccctgcgggagatccaggccgggagggc

SEQ ID NO: 128238 - DNA, 122 bp, Homo sapiens
gcatcaagcgcagcatgagctccacgtcggcctccgcagtgcgcagctacgatggcgcggcgcagcggcccgaggcacaggccttccaccggctgctggctgacatcacgcacgacatcgag

SEQ ID NO: 128239 - DNA, 122 bp, Homo sapiens
aataacgggggaaaaaatgtgtccattttagggcttggaattggaaacgtggggaaacgtcgccaccttctggtaagtgatggaagtgagcaggaaaaaagatccaagctaagaagcggctt

SEQ ID NO: 128240 - DNA, 122 bp, Homo sapiens
agccaacaccccatgttcactctgacacgtggcttctgtggttctgcgggaacagaaacacgcagttccaggacgggcctccagggggaggttggggccgcccttcctgctcagcctgcaac

SEQ ID NO: 128241 - DNA, 122 bp, Homo sapiens
tcaatagatgcagaaaaagcatttgacaaaatctaacacttatgttacgataactctcagcgagctttagcttgctaaagaacatctacaaaaaccctacagctaacaacatacttaatggt

SEQ ID NO: 128242 - DNA, 122 bp, Homo sapiens
gtggcactggcacttcctctgcccgtctgcccttctgcccaccagcccgcccacctgaatcgcctctgactcactggactcacccagcaggtttagcaatccctaccctttagtcaaacaca

SEQ ID NO: 128243 - DNA, 122 bp, Homo sapiens
ccccagtggacaagacggacaaggtaccggctctcaggggaagtgggagccagtcacaagcgtacctaatttcggagagtgacaagtactctgaaaaagaaagaaggtagggctggtgactg

SEQ ID NO: 128244 - DNA, 122 bp, Homo sapiens
acgtgtgctgtttctattctgcagcgaggtcgcgctgaacagaaatgtgaaaacggtgtgcggtgggaggaactgccccgaactaaaatctatgtctcttaaccgatgaagggttgtctgtt

SEQ ID NO: 128245 - DNA, 122 bp, Homo sapiens
gaaggagctcgatggggcctccccaggtcccgccaggctgctccatctgcacgcaccgagcgtaactcgcgcgtcctgagcccgaaccccattgagcacaggcccaggtgctccgggatgac

SEQ ID NO: 128246 - DNA, 122 bp, Homo sapiens
tcacccctccatgggcctggtgctaaggtggctgtggatgccacagcatgaaccagatgccgttgaacagtttgctggtcttgcctggcagaagttagatgtcctggcaggggccatcagcc

SEQ ID NO: 128247 - DNA, 122 bp, Homo sapiens
tttattatactggtacggctcgtgccctcggtctcttgccttggcacctgggtggcttgccgcccacagactgagccctacttctggtaggaaaaatttgaatcttatcaaaatggatgcca

SEQ ID NO: 128248 - DNA, 122 bp, Homo sapiens
ttgcttctcacaacagggcagtagctacctgtgtctgcccgcagaccctgacccaaacgacggatgaataaaatgtacactgacacacagataatctgttttgccagtcatgctgagtgtct

SEQ ID NO: 128249 - DNA, 122 bp, Homo sapiens
atagcgccggccgctggcgcgaaccgtagccttgccaccgccgcctgcgcatgcgcaaggcggactgcccagagagacgtgggaggagccgcgaagtcaccagaccatctcccggcgcgggt

SEQ ID NO: 128250 - DNA, 122 bp, Homo sapiens
ctgagtgctggagacagaaacccctcacacaccctggttaccacacggaagcagaagctccgagcactgggtggcttctggaaggtcacaaagccaaggagggcccagcccggactataaac

SEQ ID NO: 128251 - DNA, 122 bp, Homo sapiens
tggccaacatggtgaaatcccgtctttgctgaaaatacaaaaattagccgggtgtggtggcgcatggctgtaatcccagaaactcaggaggctgagtcaggagaatcacttaaatccgggag

SEQ ID NO: 128252 - DNA, 122 bp, Homo sapiens
gcgacttcccacccacgatggggcccaccagcccgacccggagagtgtccgtgaagcagccggccccgcaaggacggctttggccaccaaccggaggtgggcctcatcctcccagatccatg

SEQ ID NO: 128253 - DNA, 122 bp, Homo sapiens
accagtggtaagaggcagagggggaacaggggcccaggtctaaagcaaatccctgtccaccgggcctactcaaaagcctctgcatccggccaggcgctctgcatccggccaggcgcggtggc

SEQ ID NO: 128254 - DNA, 122 bp, Homo sapiens
accagacaaccgacatgtaatggagtaaacttggaatactttttaaggcacctgagttcgcgtctggcagatctcttcctatgggaaatcctattacagactctattacaaagcaatactgt

SEQ ID NO: 128255 - DNA, 122 bp, Homo sapiens
ggctctcccgcgggtgggtcacgtgttggcggcgcctggttgccttggcagcggctgcggcggccgcgggggcggggtggaggcggggccgggggaccccgcgcgaccggcggaaggaggga

SEQ ID NO: 128256 - DNA, 122 bp, Homo sapiens
ctctctctgccgccttccagatcttgtccactttgatattccctcgatccacatagagctcgggtcgacgctccgcctgagtcccctggagcacatgcggcgacactcagtaactgacaaga

SEQ ID NO: 128257 - DNA, 122 bp, Homo sapiens
tgaatctggtcacagaagttcctgcttgggttcaatgatcattgggtcataaatggctcccgttatgttaatacgtatggaccccacagataagttttaccttcaaagctagagagcactca

SEQ ID NO: 128258 - DNA, 122 bp, Homo sapiens
cctccctcgcaccgggccgagcgccgggctcgtctgcattgacgtctgcggcggcggcggcggcagcagccgggctctcgggagcctgggtgaattatgatgcacatccaccgcggctgcta

SEQ ID NO: 128259 - DNA, 122 bp, Homo sapiens
aaaatgaaaagtacaaggcagtagtacaggaacctggcagccgcactggccgcccagaaacgtcagtggtgctgccccattcggcgaaaggttagggagcaggaaaagaggaagcaggagag

SEQ ID NO: 128260 - DNA, 122 bp, Homo sapiens
cttctgtctcaagaagattgttatcacttcctctggtgaaatcctgccttcctgtccccacggcccctcagctgatgccaccttactctggagaggatgggcagagcctcctatggagggag

SEQ ID NO: 128261 - DNA, 122 bp, Homo sapiens
gctccagcaggttgggcagccgcatgcgcttgtagcccaccgtgtggcagagcggcaggtcggcagggatgtcaaggcactgcggcggcttggagtaggagcggccgtgcagcggctcggcc

SEQ ID NO: 128262 - DNA, 122 bp, Homo sapiens
gagacacctaagactggccccaaatcaccttgcccagggaacagaagaagcagatgcctacggtgtggagcaatgccccacatctgcgcaattctaaattccatggccactcagtcttcatt

SEQ ID NO: 128263 - DNA, 122 bp, Homo sapiens
cagaggaagatcccacatgtgtagaatacagacccatggcccctgggagagtgaaggacacgcagatgattggcagcggccacttctcacacaagcaacccctctctgttttactgatgaga

SEQ ID NO: 128264 - DNA, 122 bp, Homo sapiens
atagaacctaccaagataacaggtgtgaaagtgctttgtcccagtaaggggtaaaatagacgtggatcctaactaggttatttatttcagttacctgtcacatggggagactgtgtcaaacc

SEQ ID NO: 128265 - DNA, 122 bp, Homo sapiens
cggtgacagtctctgcggaaagtcacgtttgtgatttcgggagagcacagaacgggacgacggcgctcttgctgggtcatctgggccaggtgacgaagaaacagtttcctggtgaagcagtc

SEQ ID NO: 128266 - DNA, 122 bp, Homo sapiens
cgccgccgctgcaacggccgccgccgcctccacctccttcttctgccccagaggccgcttcgcagggaaagttacataacacgcctgcaaagccttctgggaaacgtagtcccgccggggcc

SEQ ID NO: 128267 - DNA, 122 bp, Homo sapiens
tgccgtcctgactctccctgacctaattctttggttatgactttctcaccttctgggcttcgcctctgccagctttcgccgacgtcgcccttcccgccgcccgcccgggccttcctacccgc

SEQ ID NO: 128268 - DNA, 122 bp, Homo sapiens
ggaggctctaaaatgcaacctgagcaggtgtgtccctgctttaaaactcttccatagagccgggtgcagtggctcacgcctgtaatcccagcactttgggaggctgaggcaggtggaccacc

SEQ ID NO: 128269 - DNA, 122 bp, Homo sapiens
acggtgcgcacacacactggcctgcgcccactgtctggcactccctagtgagatgaaccccgtacctcagatggaaatgcagaaatcagccatcttctgcgtcgctcacgctgggagctgta

SEQ ID NO: 128270 - DNA, 122 bp, Homo sapiens
aatgagggtgaagtgctgatgtgacctgagttgggcaggctcaatccagactccagtggccgtcttggagtctcatggctttgctgaggcctccttgtaccttctggtattactttcattaa

SEQ ID NO: 128271 - DNA, 122 bp, Homo sapiens
ccgggggacattccgtgccccgagcgccccgggcccgcggctgcggccctcccacctgcgcgccggcctggtttgcagctcccaaacaatggccacattgtcgcagccgcacaccggccgcc

SEQ ID NO: 128272 - DNA, 122 bp, Homo sapiens
ccttctctcccactgttgaccccacctgtttctgtgtacatttatgcatggggccactgacgggcttgtgctaatggataatttagaagctcctcccacacatgctgggatcatgccccctg

SEQ ID NO: 128273 - DNA, 122 bp, Homo sapiens
tgtaattttcttcttcataaggtctcccctccccaggctgggagcagagggaagagcagccgcctcagccccagggaacctgcccttgtcagttgatctttggaaatccaaagaccagcttg

SEQ ID NO: 128274 - DNA, 122 bp, Homo sapiens
ataaaggttaagtcggcctggtatcgtgaaaaatgttgcctgccattacccactgcaggacgctaaaattcttgaccttagggccccgtcgggatgtttctgtctttgggtctgactggagg

SEQ ID NO: 128275 - DNA, 122 bp, Homo sapiens
ctggcctagaagtcattcttatggcagaaatctttctggccttaccccttctcttgagttcgttgggataggtcttgggaatccacaaatcctaaaatatgcgtgccttaagtcggcacaaa

SEQ ID NO: 128276 - DNA, 122 bp, Homo sapiens
cgggtgcggtggctcacgcctgtaatccttggccttgggaggccaaggcgggctgatcaccggaggtcaggagttcgagaccagcctggccaacatggtgaaacgctgtctctactaaaaat

SEQ ID NO: 128277 - DNA, 122 bp, Homo sapiens
gccggggcaggcggttcggccaccggggtgcggggctgcggagaatcctagcggccgctacggaccgaagtttccaaagatgcggttccccgagtgtacaccgctcccggttgtaacataca

SEQ ID NO: 128278 - DNA, 122 bp, Homo sapiens
ggtcggccccggagcttgggggggatgtgcagctaacggtcccgtcgggcgggctttcctcgggccgagcgcgcaggacgtgcgccgcagctatggagtgtcccgggagacggcgggcatga

SEQ ID NO: 128279 - DNA, 122 bp, Homo sapiens
ttccaaagtatcttaactgcatcccagaacaaagctcagccgtgttcataggaatgcagacgtatccagtatccaacacggcaaaattcacaacatctgcaaccaataaaaaattgtgggat

SEQ ID NO: 128280 - DNA, 122 bp, Homo sapiens
agcgatgagaaagaaagaaaatcaggattggagggcacggtttggtcttggactctggaacggattcacagctgcatttttgggaggaaagaagaaggggaaatcgctgaggtcggagtctc

SEQ ID NO: 128281 - DNA, 122 bp, Homo sapiens
cgaggggctggcggggcgcgggctggggggcgacagttgtagctccacttcctgctaatgcgagaaggtacaaaaagagatcaaaaagtcctgtaacctgaaacttccctcgcatcctaacc

SEQ ID NO: 128282 - DNA, 122 bp, Homo sapiens
cttccattgggtccacgacaggcagggctcgaggtgtcattatttcaccccacagcccaacgtgcttctgtcagtcgacggtttttactccagcgagcagcatcacccttaaaaaggtggca

SEQ ID NO: 128283 - DNA, 122 bp, Homo sapiens
gtagacatgggcactggaaacacagacagttcttcaaggagcagagatcataaaacaccacgttcttactaagagataataagggaagatgcaaaagacattggaagctcaaagaaggaaaa

SEQ ID NO: 128284 - DNA, 122 bp, Homo sapiens
gggttacagacggcacctggaaaatcgggtcactcccacccgaatactgcgcttttccgacgggcttaaaaaacggcgcaccacgagactatctcccgcacctcgctcggagggtcctacgc

SEQ ID NO: 128285 - DNA, 122 bp, Homo sapiens
acatccacctcctcgctggtctcgaattccactttagtcatgtcttcctctttgagcagccgctttcgcgccgagcccgaggtcgccatcgtggccgtggtcgccatgattcagagtccgcg

SEQ ID NO: 128286 - DNA, 122 bp, Homo sapiens
gtcaaaagtccctaccctgggtcctagcctgtcaggggctccgaaaacccaggctcaggtcggtcctgcccggcacctgtttcacacatgtacactccggtctgaggttggtcctctccccc

SEQ ID NO: 128287 - DNA, 122 bp, Homo sapiens
tttcccaccgctccctctcaggcgcagggtctagagaagcgcgaggggatctagagaagccggaggggaggaagcgcgagtccgcggcccgccccgttgcgtcccacccaccgcgtcccctc

SEQ ID NO: 128288 - DNA, 122 bp, Homo sapiens
tgagaccccgagggtgggcctggcggagacaccgccaactgaactccagctgagtgctctcgaggccgaaccagcgggcctggcggtctgtgagtgggtggccagccgctaggggcggggcc

SEQ ID NO: 128289 - DNA, 122 bp, Homo sapiens
gaaggtgggcgcggcctttgagcctgtgaccgacttgtggttggctgcgggggcggagcccgcaatggaaagaggcgtggccagttagaaagctcaagtccttagcaaccgcgccctgggaa

SEQ ID NO: 128290 - DNA, 122 bp, Homo sapiens
ggtcgggctgtggccctcatgggtccccggcccgccccacccacagcgccctccgtttcccgcaccggcagttcacgggagatttgaatccaagccatattccctagtacctccgactgtct

SEQ ID NO: 128291 - DNA, 122 bp, Homo sapiens
ggtctctgagaccccgtcagaggggtctggagctccatcaaaaaaagtccccgcaggctccggaacgcggggacggcccaggcctaggccgctgactcggcgctcgtgcgggcctcactgtt

SEQ ID NO: 128292 - DNA, 122 bp, Homo sapiens
ctgttctaagcgcccggctcctcgcgtccacaccgactccctctctggctgctgccacttcggagtgagaaactgagctgctgcttcagttccgtattcaggttttcgtcatttcctgccac

SEQ ID NO: 128293 - DNA, 122 bp, Homo sapiens
ctttaactgggcagacctgaatgattctcctcctacctaagcagttgtggctcagccccgcggggacagggcgaagctctggactcctcccagccacagcatctgccaacaccggcttccca

SEQ ID NO: 128294 - DNA, 122 bp, Homo sapiens
tccaaaagctgagtcctcaagatatgttgtatgtttccattcgctctcttgtccttttgccgtcaccataaaatgtacatacctgggctaacccactggtttcaaaagaatgatgaaaaata

SEQ ID NO: 128295 - DNA, 122 bp, Homo sapiens
gaagtgaatgaataaattctcagcaatctgaaataagttggcagctatctcacttggaagcgaccagctcatttttagagtctcttctgaccaccagaccataccaatctgctagaccaact

SEQ ID NO: 128296 - DNA, 122 bp, Homo sapiens
ggtggccgtgaccgcggcattaggtgatgcgtccttgaggggctgggggcttccgggcggcgagcggggcgcagtaggaggctcttagagacctcggaggaaaccagcccagcgctacggga

SEQ ID NO: 128297 - DNA, 122 bp, Homo sapiens
tgaatgtccctgactgaccagtttctgtttcagtggcccgttgccgacaagccctggtgccgcgtgccttccatgcttcagctgtggggctaaggtcttcagatgagcagaagcagcagcct

SEQ ID NO: 128298 - DNA, 122 bp, Homo sapiens
cagcacacatgggtgcattttttaggaccttgtacaggttgacaacacctctgtctcccccgcggccactcgcactgtggggcgggctaaaacccaacactagcgtcgaaatggccttctgc

SEQ ID NO: 128299 - DNA, 122 bp, Homo sapiens
atcaagtagaagccataacaaatagacatggttctttgacaatctcttcactttaggaaacgaaggcactccttaccctgcgagtgggcaggaaagggtggctcttcattgaaggagaccca

SEQ ID NO: 128300 - DNA, 122 bp, Homo sapiens
gtcttggggggtttgacacctatctgtccctgcagtagacccaccctggcccatgcagttcgttccctctcgccagctgcaccccctccaggacctgggagcccagaaaccagccgagcctc

SEQ ID NO: 128301 - DNA, 122 bp, Homo sapiens
ggcttgaggcctctatgggtgggggcagaaggcagagcctgtgtcccagggggacccacacgaagtcaccagcccataggtccagggaggcaggcagttaactgagaattggagaggacagg

SEQ ID NO: 128302 - DNA, 122 bp, Homo sapiens
cccagccccatccaccgtcaggcgactttttaagttccattgtaagacaaaatcaggaggcgtttctctgcaggtcctaaacaaaaacaaacagaaaagagaatcttatttagagtgtggta

SEQ ID NO: 128303 - DNA, 122 bp, Homo sapiens
agtcaccgcatgctgcggagaggagagatgtgttctgatcacttttgtcttctctgatcacggggctgttcagcccagggtgactaagtgggagcattctgtgggtcttaaatgctttcagc

SEQ ID NO: 128304 - DNA, 122 bp, Homo sapiens
cgggacagccggggtctattttgttgcgggttttcagcaaatccagggctggtctggaggcgcgaagtaggttccggagtccgagacctgggctgtcggccgcgggcccctgagtagcggat

SEQ ID NO: 128305 - DNA, 122 bp, Homo sapiens
tgcttgcaggaatctgtctctctcctcctggaattcagcctccagatgtcagatccgaggcggtggcggcagcatatggctcccctcagagtgaatcagccacattccaaaggtgcacacac

SEQ ID NO: 128306 - DNA, 122 bp, Homo sapiens
taagcacgtaccaccacgcccggccaattttttctatttttaacagagttggggtttcaccgtgttagccaggatggtcttgatctcctgacctcgtgatccaccggccttcgcctcccaaa

SEQ ID NO: 128307 - DNA, 122 bp, Homo sapiens
gggcggcaggaaggggaggcggcggccactcccggccaagccctggagtgaagaaatctccgggacttccagtaattgccgtccagccacacgcaggcacttgtgcaatcccgtgggggaga

SEQ ID NO: 128308 - DNA, 122 bp, Homo sapiens
tcctgagcctggcccccgggttccctggctccaaggaccccaatggccaaggtctgcatgcgccccctcagcctccatctgggactcctggggggaacccctcattaacccagcctctccgc

SEQ ID NO: 128309 - DNA, 122 bp, Homo sapiens
tccgcaccgcgctcactaagaccctgctccctccatggcagggtcctcccaggagcacaccggtctgccgctcacctggactcaggccccagggaggaccttccctgccctccacagcccgg

SEQ ID NO: 128310 - DNA, 122 bp, Homo sapiens
gggggcagagccctcctggcccagcgcaaaggcgatggggagggcaaacaggagagacagcgagagaaatgccaggcctaatgaatttcaatgagcagaggccacattcattccccagtcag

SEQ ID NO: 128311 - DNA, 122 bp, Homo sapiens
gaataagaaagacagtgaggcccaattactcaacaatgaatacaaagcacctcatctatgcgtagcattttctgataggcataaaatattctcagtacacatgaaggtataaattgtggttc

SEQ ID NO: 128312 - DNA, 122 bp, Homo sapiens
aaccatttgtttctcacctacttgtgacctggaaagccattccctgctttgagttgttcccgcctctctgaatggaacaaatgtacttcttaaatgtattggttgatgtctcatgtttctct

SEQ ID NO: 128313 - DNA, 122 bp, Homo sapiens
caataaacaggaagatttttctcgtgacgtcgtcggcgcgcgccggaagcgcggatcacacgggcccctacaaggggcccctacaagcggccacaaggatggcaggcttcgcggagctcggg

SEQ ID NO: 128314 - DNA, 122 bp, Homo sapiens
gaggagaaggcagctgtacttcgggcagtggaggaacgtgagcgggccgaggcagagggccgggagcgtgaggctcgggccctgtcactgacacgggcactggaggaggagcaggaggcacg

SEQ ID NO: 128315 - DNA, 122 bp, Homo sapiens
tcctcctcagtctgactcagcacgtttatgatttgggaaaggctggggatcagatggtgacgatatccaggcttgaggaacggcctcaccatctgccagtagaggactgatgcattgtacac

SEQ ID NO: 128316 - DNA, 122 bp, Homo sapiens
gatttaggagaagccagaagtcttcctttcaaagggaaaatggggaaaagaacctgaaagcgggcttcaatagttccaacccgatcaccgaaatgccaaaatgatgaacccggaagtgataa

SEQ ID NO: 128317 - DNA, 122 bp, Homo sapiens
aggatctcaggcctggcggaggagcacgctccttggcaaagactcacaatcccggtgttccgagagtagcaggtgtatgcctgtgggttctgagagccccacaaagggacaattcatccagt

SEQ ID NO: 128318 - DNA, 122 bp, Homo sapiens
gtagcttccgcgcctagggataaacttgtggtagctcgcgggggacaccgctctcccaggcgctttctacgcgctgtgcaccctcggcctaggccccggcgcagcgactcttgaagagtccc

SEQ ID NO: 128319 - DNA, 122 bp, Homo sapiens
ctgtgcgcaattagctgctgccgcgccttggagtccgtagtaacttggccaggctggccccgaacggaactagagaaagctgaggatgaggaatccagcttcggtccttttgtgtgtggagg

SEQ ID NO: 128320 - DNA, 122 bp, Homo sapiens
tttggctgattcagatctataaactttaaagtgactcatctagtgccagctttggccattcgtagcccagacttacttatttcctggctatggtggtgcttcccatcattccagcatgtcga

SEQ ID NO: 128321 - DNA, 122 bp, Homo sapiens
gagggaggcggggcctgtgatgggggcgggccctacggcgggcggggcggggttcgggtgcgaggccggtcctgcaggcggcagccagagctgcgcgccgcggcggcggaagatggctgcgg

SEQ ID NO: 128322 - DNA, 122 bp, Homo sapiens
aggacctccaaacacttcctcctctgcccctctgagaacagcaatcctggtgcacacccacgaacctgtgggggtacccacacctccacctggcctcccagacccttgaccgcaggggctct

SEQ ID NO: 128323 - DNA, 122 bp, Homo sapiens
agccacatggggtaacatttatgatatgccgctaagtagaagaaaaagaatacaaaactgcgtatatcctgtaattacgaccacttaataaaatgcatgtggaaaccctggaaggaagtgca

SEQ ID NO: 128324 - DNA, 122 bp, Homo sapiens
gtctttaatcatgttagtactgactcgatctatttatatgttagagtagctagcactaatcgagcttctactatgtgccaggcattcatgtcacaagcatagaccattcagttagttctcag

SEQ ID NO: 128325 - DNA, 122 bp, Homo sapiens
tgcggctcagctcctgttccttgtgcaccaggtcctgcttgagtgaggccagcagctctacgctcacgtccacctggcgggagagctcagacgcgcgctcctccagctcctccttctcgcgc

SEQ ID NO: 128326 - DNA, 122 bp, Homo sapiens
gatcactacatttaaagcagtccaatagtggaacaggctgcctcacaaatagtgagctctcgtttcctctacacagattctactatgggccaggatctcagccaagcagtggagccagaggc

SEQ ID NO: 128327 - DNA, 122 bp, Homo sapiens
ccggcggagcgccgagcaggcaccccgggagcgccgagcacgtcgagcaggccccgtccccgccccttgcccaggcccggccccaccccttgcccaggcccggccccaccccctcggagtca

SEQ ID NO: 128328 - DNA, 122 bp, Homo sapiens
tcaagctattttcgcggagggaagtctttgaaatacgacatctagaagagtggccctcggcgacaatgccgggcgttcccggaccggggcaacgctgggattccggggaagtggaggcagag

SEQ ID NO: 128329 - DNA, 122 bp, Homo sapiens
aaccctgtacgcatgctcctacgctgaactttaggagccagtctaaggcctaggcgcagacgcactgagcctaagcagccggtgatggcggcagcggctgtggtggctgcggcgggtccggg

SEQ ID NO: 128330 - DNA, 122 bp, Homo sapiens
ggtgccgaggcgtctgggggcctgcgcttcggggcgagcgcagcgcaaggctggcgcgcgcgcatggaggatgctcactgcacttggctttcgttacctggtctgcccccgggctgggcctt

SEQ ID NO: 128331 - DNA, 122 bp, Homo sapiens
ccaaaaatgaagctatctcacccagctgggtttggaggagcaatctgcttattattctgtcgttaccacttactcaagcgagctgtgatatgaatacaagcaaccagtgggctcgggaaggt

SEQ ID NO: 128332 - DNA, 122 bp, Homo sapiens
gtgggacgaattccaaaaagccatgaggcaggtcaacactatttccgaagccatagttgccgaagaggatgaggagggacggttggaccgccagattggggagatcgatgagcagatagagt

SEQ ID NO: 128333 - DNA, 122 bp, Homo sapiens
atccctaacgggcaaccggagcgtaccactgcggagccggctgcggggggagttaggggacgcgggcacccgtaggcctcacagacccacactgcccaccccggtacctttgttacacttta

SEQ ID NO: 128334 - DNA, 122 bp, Homo sapiens
cttgttatggggaggggaccccgggtgagggggccctattaccccttgatttctcaggagcgtctgggggggctcagcacgcacaaactccttctccttctaccactcttaaatttactccc

SEQ ID NO: 128335 - DNA, 122 bp, Homo sapiens
gccagaccgccgggtgcccatctggcttctattttcacagctgtatttttgcgattgccacgcttatgtgaactaaccaagttgaaagaaaattaaggaactggccagattcacatagttac

SEQ ID NO: 128336 - DNA, 122 bp, Homo sapiens
agagaggaagagagggaggaagagaggtgggagaattggtgatgctaggtacttttattccgtgtcaggccagacaaagagctcttagagagagaagccagttgccactcatggaaccctga

SEQ ID NO: 128337 - DNA, 122 bp, Homo sapiens
tctcatttgagatgactcatctctgtatcccaacgacgcggcaccaggtgtggcctgacacgtttgagcttaaaacctttttttctgattataaaaatatatgcatattttaggaaattaag

SEQ ID NO: 128338 - DNA, 122 bp, Homo sapiens
aatgggggaacagggcattctgggattcgtagttcttttctgaacaacagccagagtctccgctgtgacccgaaagtattaatagcacccgaagggctcgcccacgacaagtcatttatcgg

SEQ ID NO: 128339 - DNA, 122 bp, Homo sapiens
ctcgcgccagcaatgccaagtctttcccctgggcggtgcttaccaagccccgggtagtcacgagcggccgcggggttagcagagacccgagtactaacccgctcggccagcgtccggctgtg

SEQ ID NO: 128340 - DNA, 122 bp, Homo sapiens
ctctactgccgtagcaaacactgtgtaagtgaactcatgtgtggaggaggcgtaatcagccgggaaatttcatagaaggatctaagaaaatgctaaaaataagttcaacatgattctgctac

SEQ ID NO: 128341 - DNA, 122 bp, Homo sapiens
tctatgcctatcacctggtcaatacgagcagcagccacgttaaggtgtaatacacactggcgtcatctaacgttccatgtgaggaaactgaggcacacaaagggcaactggcttgctcaagg

SEQ ID NO: 128342 - DNA, 122 bp, Homo sapiens
gtgcagcgagctggagaggaaggggtggcctagagcgcaggggaaggattcctccccagccgcctgcacccctaccccggtagcggtccctgggatcgtccgtgtctccaggagaaccggac

SEQ ID NO: 128343 - DNA, 122 bp, Homo sapiens
cctgacaacccaacccaactcagacttctccctctcttggctctgatgattcttgcagtccgccccatcagcctaacacctgatttctcacttaccttgggcactgatgcttctccaggagc

SEQ ID NO: 128344 - DNA, 122 bp, Homo sapiens
cgggggcagcgggacagccgggggtcacagcggcctctcctccaacttcaatgaatggtacgtgtgacgggtcggggcctctctccctctccctgtccccaccccagcgcagcagccctccc

SEQ ID NO: 128345 - DNA, 122 bp, Homo sapiens
cgccagctaaaccttcggaacaatttcttcagggcagaatctgctcccacctcttcccatcgtgtctccccaccaggtccggcaggagtcgggaaccctggaggccccggagaggaaacagc

SEQ ID NO: 128346 - DNA, 122 bp, Homo sapiens
atcaccctctattgcctaaaataacaatcctggaagtgtcccgggaaaccccaaagaaggcgctgccttgaccttaggcatccacaggatggatgccaggaccctggggtggggacgtcttc

SEQ ID NO: 128347 - DNA, 122 bp, Homo sapiens
cccttggccaaagggaaaggggcaggacatcctcccgctctgagccacctccggaagtgacgtcggagtgtcaacatgcaagatggcggcccatcaccggcagaacacagcagggcggagga

SEQ ID NO: 128348 - DNA, 122 bp, Homo sapiens
caacgaagtcctcacttaacgtcatcaataggttctgggaaaccgtgaccttaagcgaaacgacgtataaggaaaccagtttgtttaaaggactgttattacaggatctgcttgttttgctt

SEQ ID NO: 128349 - DNA, 122 bp, Homo sapiens
cagctcatcgggcattagctagatcctcataaggagtgcacagtctggattcttcgcatgcgcagttcacaacagggtttgcgctcctatgagaatctaatgcctccgctgatcggacagga

SEQ ID NO: 128350 - DNA, 122 bp, Homo sapiens
cttcttcctgcccatgctggggggctggctcccgccggtggctgcaggtgtgccatcctccgctggcgtgccatcctctgacttgcgtttcttgcgcttcttcgtctctggcaagaatccct

SEQ ID NO: 128351 - DNA, 122 bp, Homo sapiens
tttaccactgctgaaatgactctgtggctaagtaggattaatcctggaaaggattgttgacgagcctcgaatcttcaccaatggacaacagctccacctagggggcttttgagattgtcact

SEQ ID NO: 128352 - DNA, 122 bp, Homo sapiens
agaccccattgcagagaagagcgaaagcaggggcggggtgggggtgggagtggtctcttccggttcttgaagatagcgtcccttaggcaggaggggtgggtcactcagtctccaggctcggg

SEQ ID NO: 128353 - DNA, 122 bp, Homo sapiens
acctgtcacaggcgagcttggcgtgcacgagccgactgtcacaggcaagcctggcatgcacgagctgactgtcacaggcattgttgggacagtgggggaagtccgaatgtgtcctgggtata

SEQ ID NO: 128354 - DNA, 122 bp, Homo sapiens
gcacacacacacacgagttatattcatggtcatccaggatttttcttctcccaacagtttcgatttgcacagggctgagagtcacatattttatctttgctctctgatgggtgcagactttt

SEQ ID NO: 128355 - DNA, 122 bp, Homo sapiens
gttacatacccgaacatccagaaactgcctgcaaagggtccacagctcacgttcccacctcgggtgtccaggttattcactcaggaagcaaaaaacaacaggaccaaggattagaaattaaa

SEQ ID NO: 128356 - DNA, 122 bp, Homo sapiens
gaatgaattctcgggctgcctgggcatctctctggggtccatcatattctgggaagtagtcgactagatgggaatacatgattttctcctctggaagatctttcttgtttaacaacagaata

SEQ ID NO: 128357 - DNA, 122 bp, Homo sapiens
gcctcccaggccgcgcttatagcgccggggcccttgtagcctaggatggcgtgaggggagcgagaccagaattagagcctgttgctgtagagaggacgcctcccgaggctcgggtcacctgt

SEQ ID NO: 128358 - DNA, 122 bp, Homo sapiens
cttacttagcccacctttctttttccatgaagcttttctgttgttgttttaattcattgccgatttgtaaacgtgtagatcgtgttactggttcgcgtgttaaagtgcacctcttgttaaaa

SEQ ID NO: 128359 - DNA, 122 bp, Homo sapiens
agaaggagttaaagaagcagctgtggggtcagatggagctcactggcagggccgtcaatccggcgcggctcacagactgcaggccgccatccagcagctgagtcaggaaagcgcagcccgct

SEQ ID NO: 128360 - DNA, 122 bp, Homo sapiens
gagcacagattatttttttcccctttaggagaccatgaaaatacactggtcattgatctccgctgctgttagcatgactgatatgtgtatgatcattctttgggagtgcgattgcagaagaa

SEQ ID NO: 128361 - DNA, 122 bp, Homo sapiens
tgatggggtgtgggctagagtaccgtctttgaagccgcttggcaagagaagtggggatcacgtctagtggagatggcagatgatgttctgtgtagccagcactggtgagagctatggtggcc

SEQ ID NO: 128362 - DNA, 122 bp, Homo sapiens
accactaattcctcagtcattcattcaacaaatattttcctgctttgcaataagtgaattcgaggaacacaaactttaacccagccttggggggtggttagggagggctcctggaggaggag

SEQ ID NO: 128363 - DNA, 122 bp, Homo sapiens
aaggaccaacagtggcttcccggtatcagcagacaccggccagcatttgcacctcccctacgtaatcattacgttttaaatgtttgaggggaaaggtctgcgctggcctccggggcgtggat

SEQ ID NO: 128364 - DNA, 122 bp, Homo sapiens
gaaaaaaacgagaacctggcaccaccacacgcaagctttccgctcggccgctgccgccaacgccgccgccaccgccgcccctgccaaacggtttcaaatccttgcgggccgctgggtcgccg

SEQ ID NO: 128365 - DNA, 122 bp, Homo sapiens
tcctgtggagggtaaggggccaggagccagcagtgtaataaccttcacccctgagccaggcgccagcaccacaatgtttaattgattcccgttccagctttctcaaggcacgacaggccccc

SEQ ID NO: 128366 - DNA, 122 bp, Homo sapiens
cacacacacacacacacacacacaccgctgacaaatagatgcatacaacctccctcctcccgcatctgaaggaagcagggcactcacctgaaagcaggattcccatccagtggtgtccccat

SEQ ID NO: 128367 - DNA, 122 bp, Homo sapiens
acctgtaagtagtatgtgctgagaagtgtggcaggcacaaacccgggcgccatagacacgcgctcacaccagctctcagagctggcagcgtgccacagatggcagaagctccggcacttctt

SEQ ID NO: 128368 - DNA, 122 bp, Homo sapiens
acgagaatctaatgccactgctgatctgacaggagccaagctcaggcagtactgcttactcgcccccactcacctcctgctgtgtggcccagttcctaacaggccatggaccagcagggggt

SEQ ID NO: 128369 - DNA, 122 bp, Homo sapiens
ccttttccagcctcccggagtgtgccaaaacttctgtcacgaacgaggccatggccaagacgggaaccaacgctgactgggtcactctcgtagccagcgccgcagctcccgtcccgccggcc

SEQ ID NO: 128370 - DNA, 122 bp, Homo sapiens
caacgttgggtcgagacccagctcggtgcacagaaagccaaggtcaaccagagcatttcccgcagctgggcgagccctcctcagcctgcggccagttcctcccaccagcttcaagctgccac

SEQ ID NO: 128371 - DNA, 122 bp, Homo sapiens
tgacctctctgggctgttcaggcaaaggcagcagttgctaatgaagacactggaggacagcgtggcttagtcagcacaggaaggaaatgacttagtgcagccgggtgctggcaggcgaccac

SEQ ID NO: 128372 - DNA, 122 bp, Homo sapiens
cttggtaaagaaatcgggagtgttttccttccactattgtccccactcccgcccaccccccgagggattttcatagttgggttggctgccacactggctcatccattcattcattcattcac

SEQ ID NO: 128373 - DNA, 122 bp, Homo sapiens
agaataaagacgagaaacaggggcttgggtcgctgcgcgtggcaggcagcctcagggaggcggtggttcagagattcggagctgcctgtcacttcttgaatttagcagagcacctgagctgg

SEQ ID NO: 128374 - DNA, 122 bp, Homo sapiens
cggcatgtccagtctgtggaggactcaaggtaaacccccctccttgagagccgcagatcccgccccgcggctgcaaaggggctgaatttgcccccagatggcagaggaagtggcgccagcct

SEQ ID NO: 128375 - DNA, 122 bp, Homo sapiens
gcacgccctttcgcgcaggagagtggaaggagggagctgtttgccagcaccgaggtcttgcggcacaggcaacgcttgacctgagtcttgcagaatgagtaagagtttgggcacgcgatttg

SEQ ID NO: 128376 - DNA, 122 bp, Homo sapiens
tcctgagcattggtcacctggggaggaaggtgactagaggactcctcccagaaaaaaacccgattcataagggcaggagaaaccaggaaatggcaaggcctttgcttgcaactgtccatccc

SEQ ID NO: 128377 - DNA, 122 bp, Homo sapiens
agacatccaatgtaaatacaacccgtgcaaaaagcagagtcggcagacctggagtgcattcgcagtatctcccgggggtgggggaaagaaatcacctcttcagaatgtccagaggggagttg

SEQ ID NO: 128378 - DNA, 122 bp, Homo sapiens
ctggagaagctacctggagaacctggagaacctgttccagtgcctgggccaggtgctgcccgagtcttgcctcctggtgtggaacacggccatgcctgtgggcgaggaagtcaccgggggtt

SEQ ID NO: 128379 - DNA, 122 bp, Homo sapiens
ggagctgccaaacatctggatcaacctgggcactacgaggggttgaatttctaccattatcgcgccttttgatatttttttccagacctcctgctcacatccgtaaagcccactgattcttt

SEQ ID NO: 128380 - DNA, 122 bp, Homo sapiens
cagggagagtggcccctggcaaggtggtcagagaggctggggagtggtccacggggcggccggtctgaactgcccacctggcttctcggcggcccccgctcatgccatgggactctgggcag

SEQ ID NO: 128381 - DNA, 122 bp, Homo sapiens
gggctcccccaggaggatccaggacccttccggcctcttcctgctcctgggggctccaggcgtcccttggttcgtggctgcatcgctccagtctctgcctccgccctcacgcgggctcctcc

SEQ ID NO: 128382 - DNA, 122 bp, Homo sapiens
tacataattgcttggttatgaataaactggctctggaaggacacacatagctaatagcatcgttacctagggggaggtgaagtgggtcctggagaacagaaagggagattttccaccttaca

SEQ ID NO: 128383 - DNA, 122 bp, Homo sapiens
gggggctcccgcagaggcagggaagtggcgggcggccgtggaccaaggctgggacggcagcgccaccctctgggttcagccgggaaatgtgttcaggatgtgccatgggctgggtggagagg

SEQ ID NO: 128384 - DNA, 122 bp, Homo sapiens
atggccctcgacacagatgtgcactcgcatgcgcttggcaaaggtgctccccgcactggacgtgcatttgtttttcctccaggactgtgttctggacaaggacctcctgaggcacccatgct

SEQ ID NO: 128385 - DNA, 122 bp, Homo sapiens
tgaaatgggaaattactacaggattttgagcagaggacacaaaatctgacttaagttttgcgtgaatcactctggctcctgggtgaaaaataatctgtatggtggcaatggtagatttaggg

SEQ ID NO: 128386 - DNA, 122 bp, Homo sapiens
ccagtgcccaagacagctcccagggggcagggaaggcctgtggagccgcctaaggccgagcgcaccctgtggcctaaatgcagccagctggagactccaggcccccagggaagatctgggct

SEQ ID NO: 128387 - DNA, 122 bp, Homo sapiens
ttccctactccaaagaaaaatacataggatacaccctgggctaccggcgaaccacagaagcgtggaggggaggccggaccccaggcagaggccccagtgcttgggcccgtggcgcacacccg

SEQ ID NO: 128388 - DNA, 122 bp, Homo sapiens
gcgaggccagggccttcttccagggtgcaagtgggtctcgccgcacggctctctgggattcgtagtcttgcagtgtcattcgggagttgtagttcctttcccacaatcggctgggcgaggcg

SEQ ID NO: 128389 - DNA, 122 bp, Homo sapiens
tattaaaatctacctgtaaaaaaccgtaagctcctcatccagtccctgaaatgctgcgttcgtttcaatttagaatcgagattgtttgtccttctagagcacctgtagggaaaaaccggtgt

SEQ ID NO: 128390 - DNA, 122 bp, Homo sapiens
gtaccatctcattgctggacagttctgtctgttagaaagttctccctcctttgactgaaacgctaccccctcagcttctgcccagtccttctagactgccccctggaagctcatagcaagag

SEQ ID NO: 128391 - DNA, 122 bp, Homo sapiens
aggcggtgaccggtgcaggccgagccaggccaagggctgaggggctggcttgagaggcaccgtcagatcgtctggaggagaaccgcgctgaccgcctccaagccagctttgcaggcgccggc

SEQ ID NO: 128392 - DNA, 122 bp, Homo sapiens
gtaggtatgtgactggtgtaagcacataagacacacaaaagaatacctggattttggggacggggaaagaaggcttcagttctgcagtgcaaaatgtctcaatcaatacaaaatggacattt

SEQ ID NO: 128393 - DNA, 122 bp, Homo sapiens
tcggtgcggaggaacacaactagcagcaccacacccccgccactgccagaaccaaagtgacggtgccgacacccctccgcaagcgcaaggccgacttccataagtaattagccagagcaccg

SEQ ID NO: 128394 - DNA, 122 bp, Homo sapiens
cgtgggcgccaggttccgggatggggctcgcgggggtgggccacagagagccgcaggggccggctctgggtactgctggggcagggcctccgcgggagctggctcgcggaagctgcggacgc

SEQ ID NO: 128395 - DNA, 122 bp, Homo sapiens
tttttattcccctcattcagctaccattatttcctggtggccaggactaggtctgagtcacgccttctgctcaggtctggagctgggtcgcagaatctccgccaatttggagattggcccta

SEQ ID NO: 128396 - DNA, 122 bp, Homo sapiens
ctggatgtagctgttttctagcagcaaaggcaattacattgtccttttaattcttgggaacggatgtgtttgggcaatattaacaggttttgtgtttttgacacaacaaaatatgaaaacga

SEQ ID NO: 128397 - DNA, 122 bp, Homo sapiens
actacagctgtagagagaaagtatattaatattaggaaaaggctggatcagctgggataccgccagactctgacagtggagtgtttacctttggtagaaaaacttttcaggtaaagacaaaa

SEQ ID NO: 128398 - DNA, 122 bp, Homo sapiens
ccacgcccccgcccttccggtctccgcctctccgcaggagcatgcgcgccaaggaggccccggcagtagctgtagtctgacgcctggcgctcacacctacagcgaatatctgcctgcggaag

SEQ ID NO: 128399 - DNA, 122 bp, Homo sapiens
tctggggatagaggatcccttgggagtggctgccgctttgctccacagaaggaaaaagaacgtcccagagcctgcccagtccaaaaaaagaataagaaaatgtgacaatcccagaaaaaaat

SEQ ID NO: 128400 - DNA, 122 bp, Homo sapiens
aacaggaaaagttcctttatctccctcgcagggcatgtgatgggctgtggctcacttcttcggtgtcccgcagctcagacccctaggggggcgggcaggcagtcaggcgggttgtggggagc

SEQ ID NO: 128401 - DNA, 122 bp, Homo sapiens
gcctagatatttacctggaatagaagccagctcagtaaatgcccaggtttgctgcaggtacgtttaaaaccctgcaaaggatgcttcaagttgatgcagtccagcaccctgtgttttaacgg

SEQ ID NO: 128402 - DNA, 122 bp, Homo sapiens
ccgggccccgcccctcggcgcgcagcgcgccgccgcccgtaggctccattgaaccgctcacgcgccgctcacgcgcaagtcccgcctcccagcgctgccccgccccccgagcccacgcaggc

SEQ ID NO: 128403 - DNA, 122 bp, Homo sapiens
cagagcttaggtattggaggggccgatctcgaggtagcacttaggcgaaagggatcccggcgctatgggcttcaagggggcccctccgaaaagccttccaccccggcccccaatcccgcggc

SEQ ID NO: 128404 - DNA, 122 bp, Homo sapiens
agatgagtaaagatgtggtttctagatagtgcctgaaaaagcagagaccatggtgtcaggcgtcaccacttgggcctataaaagctgccacaagacgccaaggccacaagccacccagccta

SEQ ID NO: 128405 - DNA, 122 bp, Homo sapiens
ggatgccggcgacgttcccagggcaagtgtgtcttgatgaccagctgggagtgtctctgtcgctgcgccctgtgcccgctgcctggggtctctggagacgcggctcccgcctccgcctcctt

SEQ ID NO: 128406 - DNA, 122 bp, Homo sapiens
gtgcatattacagtaggcttgcactatgagagctgccaccatgagtaatatcccagccctcggttctgcttccctttctgagtcccacaaaagccacatgtgggcagccttgggttcccatc

SEQ ID NO: 128407 - DNA, 122 bp, Homo sapiens
ttacacttgtaaatgcacgtttccttaagtccgaatagcctctgaaggtgtaaagaccatcgagattgtatgcattcataccctactgttgcaaactgttcagtgatggttttgaacaagaa

SEQ ID NO: 128408 - DNA, 122 bp, Homo sapiens
ccggtcactcagccacactggctcggcccagcgccttcccgaggtctgtgggggtccgggcggaggtggggtcagtgccgtgcgtgtttgatccagtttctgatcatccacttctgccccga

SEQ ID NO: 128409 - DNA, 122 bp, Homo sapiens
ctcctctgtcctcggggccttcagacacctgcatgcgccgattcagccacccgcgcgcgccgattcccctggccatggggtttccaaagtgtgtgctcagaggacagtttcctccaggatga

SEQ ID NO: 128410 - DNA, 122 bp, Homo sapiens
agcagcgccctcagcttgctttttaggagggcagatcgatcagaggagtcccaggggccccgcccgagggcacctccatctctctgggctgggctgacttccccggtccagggaggcacctc

SEQ ID NO: 128411 - DNA, 122 bp, Homo sapiens
gggaggggaagagggtagaggatgaagagaaaaagagtgcagatccagattcccccacagcgatttctaaccagttatgtctggagagactgaagcaggtgaattagtctctcgggcacggt

SEQ ID NO: 128412 - DNA, 122 bp, Homo sapiens
gcggggacggcgtggggtatgccagggacagcgtggggtatgccagggacagcgtgggggcggtgcggtctgggcctggacaggggtggccacgcccctggtcgctcccctgtccccaggtc

SEQ ID NO: 128413 - DNA, 122 bp, Homo sapiens
caccattacacatagaatagtttcactgcctaaaaagctcctgtggcccagggtgggaatcggccccgggtggaggcctccattgggttccccctaatcccggggacaagggcatcctctgg

SEQ ID NO: 128414 - DNA, 122 bp, Homo sapiens
tgatttcacaccgggttagccctgcacagccagccagcttgcatcctctggggcagaggacgcctctccgcctgcagcagcctgcgcgtaccgctgccaactgccaccggttccttcacctt

SEQ ID NO: 128415 - DNA, 122 bp, Homo sapiens
aaaggaggcggcttagcccaaacatgctgggggaggggctggcggcctcgacggcagctgcggaactaggccgagggacaaaggctaaggtcagccgcggttcaagccctttcgtctgccga

SEQ ID NO: 128416 - DNA, 122 bp, Homo sapiens
gctccctcatccggcagctcgccgggtcctgccttcctggcctagaggagtcgggcaggacgggtccgttcaccctttctgctggttccggcacccccagcactggtcatcaatctgacccc

SEQ ID NO: 128417 - DNA, 122 bp, Homo sapiens
taggcctcctcagtaccaacactcaccatgattgcggcggtggctgctccaggtctcggacgtggcagctcccggcggcgcctcggaacagctcacttccggcgccgggcccgacgggccgt

SEQ ID NO: 128418 - DNA, 122 bp, Homo sapiens
agtccagtgcctttgttccaggtgagtgggacaggccgggtcagagctacccagagagcccgccccttgcctcccagtgagcacttccttgcagcacatatttgaaatgctttcccaaactt

SEQ ID NO: 128419 - DNA, 122 bp, Homo sapiens
agagcgcgccgcgtgggggacggcccggttacttcctccagagactgacgagtgcggtgtcgctccagctcagagctcccggagccgcccggccagcgtccggcctccctgatcgtctctgg

SEQ ID NO: 128420 - DNA, 122 bp, Homo sapiens
gtcggctgcaaattgtagcctgcagccgtatttcagctcgccttcggggatcgccgcctccgaagagcaacaacaggcaaagcagtctgtgcacggacctccgcgcagactctcagcgcctc

SEQ ID NO: 128421 - DNA, 122 bp, Homo sapiens
agcaggtctcgatgtagtattcttctccggagtccaagccaagcctttcttcccaggatacgctttcctgcttccccagcggtcaggaccctaccgattccatagtaatctaaggagtcggg

SEQ ID NO: 128422 - DNA, 122 bp, Homo sapiens
tcagctttacccagcgggctgggtctgatcagctaactgaacttctgcaaggacaatgtacgacatccacagtaacagacacggctcaggtcagaccttgtggtgggttatgcttccctcgc

SEQ ID NO: 128423 - DNA, 122 bp, Homo sapiens
tctgggaacttaaagagttggaagcccggtcgttgccttcgaggggcttccccagaaacccgggagccaaggcagtcatgctgaggcctgttcactcatggcagagcgaggtttgcgctttg

SEQ ID NO: 128424 - DNA, 122 bp, Homo sapiens
ttcatcagctgaccaggagtgctcggcccggcctgccaggaacctcttatcaaactccaccggctgcctgcatctacaattcaagtccatggctaaccttctgttagagacagaaattctgc

SEQ ID NO: 128425 - DNA, 122 bp, Homo sapiens
aaatacgacgtgaacagctcctgcacccaaaaaggccccgagttaactctgctgcataggcgaggcaggcaccgcgccgccagtcggggacgcagagcgagcgcgtcctctgggatttgaag

SEQ ID NO: 128426 - DNA, 122 bp, Homo sapiens
ctgctgggagaacccacgggaagggcggtcacagacccgccagaagcgtccagacccaggcgctctctgcaagctccttccacagccagcctcctgctcgagggcaccagccccgcgtgatt

SEQ ID NO: 128427 - DNA, 122 bp, Homo sapiens
attttttatttatatttattcatttatttattttttaagacaaggtctaactctgatgcccgggctggagtgctggaatgcaatgacaccatcacagctcactgtagccttgacctcctggg

SEQ ID NO: 128428 - DNA, 122 bp, Homo sapiens
gctggtggaaggggcgaggagctttgcagttgtgtgcgagtgtgtacaggtgagtttgtccgtacgcgtgattaagtgtgtgcgtgtgatcaagtgtgggggcgagtgttgcgtgagcaaac

SEQ ID NO: 128429 - DNA, 122 bp, Homo sapiens
acatttatgtacaggtttttgcgaacataaaaattcaattcacttgggtgggaaaggaaccgataggtcatgtggtatgtgtatgtttaacttaataagaaattgctaaactatttcctaaa

SEQ ID NO: 128430 - DNA, 122 bp, Homo sapiens
caaagcttcactttgcaataacttggggagttttttaattcttgtgttcttttgcagcaacgtgcatgcaggtggaagccattatcctaagcaaacgaattcaaggagagaaaaccaaatac

SEQ ID NO: 128431 - DNA, 122 bp, Homo sapiens
ggggaggcagctgggagcagcgatgttgggaaacactcgcagcggggctggcctcgggcgcgcgcgagtggggaaaggcctaggagcctggacatcgctgcggatccgggacatcagcatca

SEQ ID NO: 128432 - DNA, 122 bp, Homo sapiens
gggtgttgcaaagcactgtggaactgaatacgatagaacaaaatgcattcaatcagtgtccgctatgggcacagtagaaaagaggaacactacacggggactttggcttctaactgactgca

SEQ ID NO: 128433 - DNA, 122 bp, Homo sapiens
tatctaccccaagtcagcccaattcagagaaacagatggattaaatcagcaatattgtgtcgtgtagacaaaataaccatttcactatttttctctcttttatggaggcattaaatttagac

SEQ ID NO: 128434 - DNA, 122 bp, Homo sapiens
gaatgggaaaagaaaacggccttacggagaacctaaagccagatcgccaagtggtgcggccggggccgcgtcgtagcggaggcggcgcgggggcgcgggccgggccgggccgggcgggcgcg

SEQ ID NO: 128435 - DNA, 122 bp, Homo sapiens
gccgaggttcagcagcccccgcaggaagtggaaacaggggtgctggggaggggccggctacgctcagtgcaactgaggtgcatcatcccagtctaccgtggaaagctttgcagtttggaggc

SEQ ID NO: 128436 - DNA, 122 bp, Homo sapiens
gcactgcgcccacgaggccgaggaggctggaatttggcagcacgtggtacaggagctccccggccgcctctcttttctgggcacccgcctcacgcctcctgatgcacatgtactgggcaagg

SEQ ID NO: 128437 - DNA, 122 bp, Homo sapiens
gcagggaggccgagggcgaccccgctgatggagagtctgctcttgttacctagattcgggcgcatttcggatttgactgtggatctttcaacgccagagggagtgcgtctcttaacactccc

SEQ ID NO: 128438 - DNA, 122 bp, Homo sapiens
gtgatgttctagcgcactgtggttcagtcactgtctaccaagcttgcctgggtgtcacggcgtgcaggcacttctgggacttggcgttctacaggacgccccagttggctgactcgggccgc

SEQ ID NO: 128439 - DNA, 122 bp, Homo sapiens
tctggcacagggctgggcccacatcctggcctctgcatctggatcagggctgttgatggtcggcctggtcactctggccagtgctcacactggaagtccatcacagctcacactgggagtcc

SEQ ID NO: 128440 - DNA, 122 bp, Homo sapiens
cctgtttggacactgtccccatccctgcagtgtccgccccacagccctgctcccgtcacccgctcggtcccacgccctcgtgggccagtaaagcccaatgctctttacaaagaaccttgctc

SEQ ID NO: 128441 - DNA, 122 bp, Homo sapiens
cggtcgtacttctgctccttgagcagctttcccagctgcgccatggccgcgcctgccgcgcggaaaacagccgagcccctgcggagcgccgccaccagctccacaagcgcgcaggcgcactg

SEQ ID NO: 128442 - DNA, 122 bp, Homo sapiens
cttttctcactctgcatcagatcatcacacttccagtaagtagagaaagcactgttacatcggggtcagaaaactgtgctaatgcaaaatgtcctgtgtttactgccatttttaattcccaa

SEQ ID NO: 128443 - DNA, 122 bp, Homo sapiens
actgtgaccggccaggtctttttttttttaaagagtctatcctaggcttggtacagatggcgcctgtggtaaatctgtgttaacatggtggtagaccatggagaatgggtagatggagcttc

SEQ ID NO: 128444 - DNA, 122 bp, Homo sapiens
tgcgggggctgtgtgtgcgtttggggcggtttgggggatgagaacagcaggaactcgtcgcgcccgcatctggggtcggaaatggttgtcttcagagacaatcgtgctgtaccacgggcgca

SEQ ID NO: 128445 - DNA, 122 bp, Homo sapiens
gtcctcggagaggggctgacgtcgcaaggagacaccccgagagccgggcttcccaaaacacggctctcaatgggcaccagggaggataccaccactgcccgcgaggcaggatcccagcacct

SEQ ID NO: 128446 - DNA, 122 bp, Homo sapiens
tctgggctaccgggtcacgtgaccgaggcacagatcagctgatgccggagggtttgaagccgcgccgcgagggagcgaggtcgcagtgacagcggcgggcgatcggacccaggctgccccgc

SEQ ID NO: 128447 - DNA, 122 bp, Homo sapiens
tgcagctccttccaaatggtaatttataaaccacatcacagcacacagctcttctccctgcggttaaatcaacgggtttttcatcttctattattttggtcatcacacttgaagtagactca

SEQ ID NO: 128448 - DNA, 122 bp, Homo sapiens
ggcgccgatgggctcgccagttctcctgggatcgcccgggcggccccaggatcgcaggcgcgcagccagccaggcctgagaaggagggcctgtctggccttgcagcccaccccgctcctcct

SEQ ID NO: 128449 - DNA, 122 bp, Homo sapiens
gctcgtcccatacctgctgggctttggcgcaaccctaggctgcctggccacacggccccccgccttgcaccctcacaccaggcacaggcagtacttctcagatgctcactgggctgctttcc

SEQ ID NO: 128450 - DNA, 122 bp, Homo sapiens
gaccaaagcctgtgagagacttcccagctgtctggcttgtggactgagcaatctgcggcccggtctcgaggggaaaataggtctgtggtccgcaaggccccagtggagcccttgggttcccg

SEQ ID NO: 128451 - DNA, 122 bp, Homo sapiens
cacatctgaaaaagagtcgtcagttttaggcgctttctcctgagagtccacatgttcctgcgagcccctgtcccctggggagctggccgcatactcgctgctgcagtgactgcccgtgtctg

SEQ ID NO: 128452 - DNA, 122 bp, Homo sapiens
gccactgtgacgtcgccgaaggccggcgctattacgacgccggaaggcccgcgcctgtgacgtcagctgaggcgcgcccctgtgatatctcacaggcccgccccttctgtagaaccaatcgg

SEQ ID NO: 128453 - DNA, 122 bp, Homo sapiens
agaattgggtctgggggatcagactcacgctctgcgaacccccaggtctgcgatctgttccgccccgcgcctcccgccgccgcgtttgaacccgaggaacggcgcgggcgggtctcagccgt

SEQ ID NO: 128454 - DNA, 122 bp, Homo sapiens
ccagcctctctgcgcccagcctcgccacgccatcttcccaacctctgccccaccatggcccgaccttaccaaccccagctgcgcaactacttccggggcgaaggcaacaccatagagcacga

SEQ ID NO: 128455 - DNA, 122 bp, Homo sapiens
atatgctggcggtgtgaatgtgaaggtttctccaggcaggcggctggggcgaggggtgggcgcagctctgaggatcagaccaaatctaggggaaaaaggggaggcagaccttcgggtccttg

SEQ ID NO: 128456 - DNA, 122 bp, Homo sapiens
ttcccccaggcactggcttgctggcatggacaatgtcccatgggaaggatagactggaggcgaaacatctctccagagtctgccggcgactgtcacttaggtgtccttggccggaaggagcc

SEQ ID NO: 128457 - DNA, 122 bp, Homo sapiens
tcacatcccagacggggcggcggggcagaggcactccccacgtttcagatgatgggcagccgggcagagacgctcctcatttcctagatgggatggcggccgggcagagacgctcctcactt

SEQ ID NO: 128458 - DNA, 122 bp, Homo sapiens
ggccggggtgggcgtgtgctggccgctgaccgcggagtccggcgtccccggcccgcccgccgccccccgcgtggctgccacctcccgccccggagccccctcagagccccgggccggcctcc

SEQ ID NO: 128459 - DNA, 122 bp, Homo sapiens
cagaactaactctgcttcgcagaggcgacctgatacttcatactatggagaccctaccctcgatttgattcctttagtaatgtttattaattttgttttcagggtttttttttgcctctaga

SEQ ID NO: 128460 - DNA, 122 bp, Homo sapiens
cccttaggaccacagccccgtccagggaatacccgtgaccaggacaggagctccttaccccggggtcagcccatctgggtgagttttcatctccaggatggggtggatattcttgtcccaga

SEQ ID NO: 128461 - DNA, 122 bp, Homo sapiens
ctatttataaccacagtcactctgggaggtgagactcctcagtccagagtcactgaggtccgaattgttggggaattactcacagaaaccccagaagcagctgaggagaagtggggccgaga

SEQ ID NO: 128462 - DNA, 122 bp, Homo sapiens
acaggccatgcccctttggctgctgtctgagactctgccttcttcactggcttcagcttccgtttgtctatgatttctgttcatggtcctcaggaaggatcctctctccagtttgagggaac

SEQ ID NO: 128463 - DNA, 122 bp, Homo sapiens
tttcagagagctgactgaacatatatatgtaagcagatgcaaggtttcgcctgcaaagttcgagctgaacatagccctttccatttctggccactgcaattgaatgcccttggagaaggtct

SEQ ID NO: 128464 - DNA, 122 bp, Homo sapiens
caataaacaaagcaaattagttgggggtggggaggcagggaggcccacaggtgtctatcacgttggtcaaataaggctaccagttagataacagaccatacagtctttggtttatatatccg

SEQ ID NO: 128465 - DNA, 122 bp, Homo sapiens
gagggcggtgggggaaggacgggggtctcaccgctggcctcgttgtagtacacgttgatgcgctccagctgcaggtggctgtccccgtggtaggtgccagcggagtcgatggcatgttcatc

SEQ ID NO: 128466 - DNA, 122 bp, Homo sapiens
ggagcatcagattttacctaatacagcagaactcctaaaaagttacagccatatgcaggacggcagtactcagcatggtcttatgcacaggaactaaaggaaaaacagatcgagtcacaaaa

SEQ ID NO: 128467 - DNA, 122 bp, Homo sapiens
tggccttagggagctcacactgcaccaggggagacgcatgatcaagaaagtcacagaaatcggagtgctgagtgccatgagagaggaggtgagaatggaatccagagagggtggaaaggcct

SEQ ID NO: 128468 - DNA, 122 bp, Homo sapiens
gggagtcttctgcctactcccagaagaggagggaagcacaggtgggtttctttagctctgcgtcggatccctgagaacttcgaagccatcctggctgaggctaatctccgctgtgcttcctc

SEQ ID NO: 128469 - DNA, 122 bp, Homo sapiens
ggtgaggaccgcgggacatgggggtgggggcgtcctcccagcagcgcaatgcccaccttgcgaggaaacccaggccagaccacaagaaggtgcatttgggttccgggtgttcagaacagtca

SEQ ID NO: 128470 - DNA, 122 bp, Homo sapiens
tttagtccatgctactcgtggcttagtccatgccactcgtggcttgtgccccaccctgcccggggccctcttcatgacagtgctctgctaggtcctgcctcccactgagcacacttggctcc

SEQ ID NO: 128471 - DNA, 122 bp, Homo sapiens
ctatccggatcctcaccctcccgggtcaaatcccagaagtggagttcttggatcacttaccggcttctggtttcctttcagacgcccacacgcgggagcgaaatccaaggggcggacaccag

SEQ ID NO: 128472 - DNA, 122 bp, Homo sapiens
gcggggaggatgggacgcgtggggactgaaggcggcatctgcctgaataaagccctcgcgcgctctgagcctcccactctgtcctggaggcctgaacctcgcgagtagagcctggcgctttt

SEQ ID NO: 128473 - DNA, 122 bp, Homo sapiens
gcggcgcaggcccggcccgtcccagcggcgacggcggggcgcggcttcagcctggccccgcgccccagccgggctgcctcccgcctccggacgcctcaacttcggcaaactttgtcccggag

SEQ ID NO: 128474 - DNA, 122 bp, Homo sapiens
catctatgctggtgccagggtaacccagatgaagaaaacacacttgaccctccagtcaatcgcggacgaatgagagagacagagagggaaataggcagtatcaacaccatggtgggcgccat

SEQ ID NO: 128475 - DNA, 122 bp, Homo sapiens
aaaggtcgaggactaacaggataactgtcttgagactttggacttcggcctcccaaacatcgtacttcactatctgtaccattcaccatttctataaactgacgcactctaaaggagaaaag

SEQ ID NO: 128476 - DNA, 122 bp, Homo sapiens
cacactccatggccgggagcacagggcagctgagtcagagcctcttccccttctccagcacgcactgcggctcgctgccttcggccagctccataaagtcctaggcatggaccctctgcctt

SEQ ID NO: 128477 - DNA, 122 bp, Homo sapiens
ttttcacattaaacattgtttaccacaatcagctaacagaaattactgtaacattggtcacgatgacttcataaaactaaagataaatgttatgaggaaacttcatttaacgtgaatggtaa

SEQ ID NO: 128478 - DNA, 122 bp, Homo sapiens
cccccgccccgccgtgacgcactttcccccccggccggtccccgccgagctccctggcggcgcagcgcggcgatcctcacccgctgcagcccctcagcagccgtgaggcatcccacaaaagg

SEQ ID NO: 128479 - DNA, 122 bp, Homo sapiens
ctaggcaaacaactccgcccaacagcagaggccctgcactgcgttgtgcctgcagcacctcgtgcgccttctgcagccggccaaccacctacaccgcagcccgcccacccgcacgcgggggc

SEQ ID NO: 128480 - DNA, 122 bp, Homo sapiens
cccccgcccttctctcttttcctcctgctctggccgcgttaagatgtggctacttcccttcgcgttctacctcgattgaaaattttctgaggcctccgtagccatgcttcccgtacagctgt

SEQ ID NO: 128481 - DNA, 122 bp, Homo sapiens
gagctcctggactgatcgtttaaggccgggcacaaggggtaagggatcaggcttcactatcgaccgacctgggctgaatgataccggttgactgtgtgacaaaagcaaatcaagaacctctc

SEQ ID NO: 128482 - DNA, 122 bp, Homo sapiens
tccgagcgagcgcggaggcacaggctgagccgccaaacactgggaaagtgggtgaggaaacgccttccaggcggggggagcaggatcttgcagccgccatctgattggaattaccgacgcgc

SEQ ID NO: 128483 - DNA, 122 bp, Homo sapiens
tctggctcaggcggaaatgaagctggccttccccatgttcagagtccaggcaggccagcccgattcacactcggctcagagacccctgacccaattacccctggttcctggtgagcctcgct

SEQ ID NO: 128484 - DNA, 122 bp, Homo sapiens
acacacacacacggaactaatgacgtctgtgcagctttttcagctgattgggcaccacatcggatgttctgtggagcaaagaataggagtcatttacagtcggcggaaaaaaaatgggagca

SEQ ID NO: 128485 - DNA, 122 bp, Homo sapiens
agacttcaagtgaggacacgccctccgccagctagccggcccatcccttatctcgttccgcggggcaaagatgaggagagaccgaccctctgctcgcttcttcagctttgaggagcagccac

SEQ ID NO: 128486 - DNA, 122 bp, Homo sapiens
ggaaaccaaagccttgaaaagagaaacaccaaggccacctctgccctcagcctcgcgggccgcaggtgagtgagcacacctccgctctaaggcaaagccaagtaactacgccttctggttgt

SEQ ID NO: 128487 - DNA, 122 bp, Homo sapiens
accttggcacctgctaggaagagccttggacccttccagttgcgtaaagcaaacctaccccggatctctggcttcagccgccagggggcagtggcagccctggggccctttcccttctggag

SEQ ID NO: 128488 - DNA, 122 bp, Homo sapiens
cctgcctatgtcagggggagctctctattccaaacagtataggtacagactaagctccttcgtgaagaacaccaaatctgacaacagaaaataataagatgcctcataggagaaagactcta

SEQ ID NO: 128489 - DNA, 122 bp, Homo sapiens
ccactagctggaccacactctgctcttaggcagtttgcccgttactgccctggtcttctgcggctgcctgacccagggctgatgcaagcccttaaatggcatctgcaagaagccaccacagg

SEQ ID NO: 128490 - DNA, 122 bp, Homo sapiens
gggactatcttactccttttaggaaaacccaactgtagctgctattcctttggttcaggccgcaaggaagaattgtaggttaccatgaatccatgaacccctctttagtatacaaagtccac

SEQ ID NO: 128491 - DNA, 122 bp, Homo sapiens
gcatgagctggctctggcaccgcactggctgggcaagagttttgccagccagccacggagcgtttccttccagggacaagacatgcttcttgaaagctcccgtagggccccttctgaatatc

SEQ ID NO: 128492 - DNA, 122 bp, Homo sapiens
tgttaactccacaggaagaaatcagaccttgcagcacggaggcggcggggacccgaaggccgagggcgcgcagccgccaagcgcagagccgcagaccagagcctcagcgcgcgcgtcgggga

SEQ ID NO: 128493 - DNA, 122 bp, Homo sapiens
gctgcctgccaagtgagaaagaccaaaaagtaaggttgcccaccaggtgcaaagccatggcgcggtgtgacatccccacggaggagaaactccttcgcgctaattacagccaccaggaagtc

SEQ ID NO: 128494 - DNA, 122 bp, Homo sapiens
agactcggtgctccaggcaggcccggtgacttggaagctgagtggggctgggctccgaggcgtatggcagatgctgaggccaggcctttggcacgtactgaactgagtgaggtctgcggcca

SEQ ID NO: 128495 - DNA, 122 bp, Homo sapiens
cagggtcacacagcggcctctcagagtcacgggaggaccgaaggccgcatgtgtggaagccgggggcctgtggatgagaggcaggtgccagggacggctttgacaaccacgcctgccaacgg

SEQ ID NO: 128496 - DNA, 122 bp, Homo sapiens
cgccgacgcccccgtccgcccccacaccacccctgccttcacgtcctacctgccggcaggcggactcagcccgtgcccaactgctcgtcggaccccgttgtctggggagccctactctttcc

SEQ ID NO: 128497 - DNA, 122 bp, Homo sapiens
ataaacatgattctgttttccattttattttttaactgttaggtatttgcagttctgttccgtggaacttctgcaggcctgtatttagcatgctgtaagtacttttgggtgaaataggctct

SEQ ID NO: 128498 - DNA, 122 bp, Homo sapiens
gggagcaacgggccctgcccccggtggtgtaggggccacctcgccccgcccagcccagcccgatattgatgggggcccacgccttcattgtttttttgttgttgttgttttttgttgttttt

SEQ ID NO: 128499 - DNA, 122 bp, Homo sapiens
tccaggaggtgacctgaattgagcattagcggaggactagggagtcttcagatccggaagcgggtattgtaagcagagggggcaaaggtgaagagcatcaaaatgcctggatcctggctggg

SEQ ID NO: 128500 - DNA, 122 bp, Homo sapiens
tggatttgagcctttgtcccagggccttatgagatactttgtcctccataaatttggagccgatttggaactagctagctgtttttctccctgctgaattaatgtgctgttcagcctaagct

SEQ ID NO: 128501 - DNA, 122 bp, Homo sapiens
actcccacaccctacccccaccaacgttcctggaattttggacttagctatttttaaaaccgtcaactcagtagccacctccctccctgctcagctgtccagtactctggccagccatatac

SEQ ID NO: 128502 - DNA, 122 bp, Homo sapiens
cagcaggtgcttcacctgccgcattttgagcctcacctcagcccttcggaacggagcctgcggtttaacaggctccccaggtgacgctcacacacactgataaacgccgctccaactcaccc

SEQ ID NO: 128503 - DNA, 122 bp, Homo sapiens
ggggcggagggttcccagcggtgtccagaaaagagggggaccctgccacccatctcgtaccgcaggtgcttaacgcctggttattggcttggggatctacaggctcccatggctgggggtgg

SEQ ID NO: 128504 - DNA, 122 bp, Homo sapiens
acactgaaatggcggccacacgtcactgtacatttgtccaaaccgagggaatgtccagcgcgacgtcagagtccgggtgataatgacgtgttgatgcaggttcatccactgtaacgaatgtg

SEQ ID NO: 128505 - DNA, 122 bp, Homo sapiens
ttctcaccgacgacgaggagcactgcgaccgtctgcaccgtggccgccccttctcactgacgatgaggagcattgcgactgtatgcaccgtggccgccccttctcaccaacgatgaggagca

SEQ ID NO: 128506 - DNA, 122 bp, Homo sapiens
tgcgtgatgggaagaggcaagctaactaaccctcgcgggtgtggacgagggccacgaccacgggatgaagagagctagaggggtcctggagctgaggggcctttctgcagggtctgggagcg

SEQ ID NO: 128507 - DNA, 122 bp, Homo sapiens
tgtaagggctgctttggcccaagaggccttagaaacccggtgtaagcctcaatcggtagccggtctggcctctttctcacacttaaccgacacagctcttgctctgatctcatcccaagtca

SEQ ID NO: 128508 - DNA, 122 bp, Homo sapiens
acagggccgtgtctggctcacaggaagctgccctcatggaacggggtgcagtggggtgttcgtggtcctgctgccgttggctgggcgcagccatccctgccggctcccccgcgcctgtgccc

SEQ ID NO: 128509 - DNA, 122 bp, Homo sapiens
tgacctcgtgatccgccctccttggcctcccagagtgctgggattacaggcgtgagccaccgcgcccggccaacctggaaaattttgcaaggaaatacagaaatgggtaacctcaggggaac

SEQ ID NO: 128510 - DNA, 122 bp, Homo sapiens
tggacaaactgcatgccgcacacagcaggtatagtcggttctgccaaaacgtgatatcggcgtccctagaaaccaccacgcaggcagaatggcgcagttaaaaaccacggtgtgtggggaaa

SEQ ID NO: 128511 - DNA, 122 bp, Homo sapiens
agagtggctggttgcgccatttcagcaggctctggggcacaggggctgtcctgagttgtccgataccctgccccgggtgatcagggcaggtggatggtggcctgggtggtgggttggctggt

SEQ ID NO: 128512 - DNA, 122 bp, Homo sapiens
tcgcctcctgggaggccggcggcctgcggcccgggggcggagccatcccagcgccgctgccgccactcaattggctggccgaaccccggttcccgcaccattggtggtgcgctgaggtgggg

SEQ ID NO: 128513 - DNA, 122 bp, Homo sapiens
agaaggactagaatttggcgccgggtttgaggggggcttgagcgaactaagaggagtgcacgatgagaataaagaaaaggtgcactaagttttcagaaatagatgaatcaaggacctatatg

SEQ ID NO: 128514 - DNA, 122 bp, Homo sapiens
cgagccgggctcacttaagggctacgacttaacgggccgcgtcactcaatggcgcggacacgcctctttgcccgggcagaggcatgtacagcgcatgcccacaacggcggaggccgccgggt

SEQ ID NO: 128515 - DNA, 122 bp, Homo sapiens
agtgatgaagagaatgggcgtgcctgtgaaatgaatggggaagaatgtgcggaggatttacgaatgcttgatgcctcgggagagaaaatgaatggctcccacagggaccaaggcagctcggc

SEQ ID NO: 128516 - DNA, 122 bp, Homo sapiens
catcaaagaggccattaggtgagtccacccatccgttactgttctcttcagatttagttccgcccaaaaggccattcagtgattcaaccactaaggggcgctgatagaaaagaaaccagaaa

SEQ ID NO: 128517 - DNA, 122 bp, Homo sapiens
cttacccgattcccaacatgacgcctgcgagtagacatgggagaatggctgtggctgtgccgtctacgataatctcgactgtaagacctgctacgtgatcgtctatgggagcgggagcgaga

SEQ ID NO: 128518 - DNA, 122 bp, Homo sapiens
ctctgccccccaggctcaagcaatcctcccacctcaacctctcgaggagctgggactacacgtgcaccccaccacacccaactaagaaaggatttcctgaatgtaatgtggtatgtggcctt

SEQ ID NO: 128519 - DNA, 122 bp, Homo sapiens
tgttacctataggacttatctaagaccataatcactgccgcgtgtgctaagtcccgcgcgcgtgcactcaggcccctctggatagacactggggacccctgaccacttatgtcagggaaaac

SEQ ID NO: 128520 - DNA, 122 bp, Homo sapiens
ctgcgccgggccggagctccgcagaaggaagccagcgggaggcctcctgcctttgactgccgtgcgtccagcctgcagcgggcctcagggggccgcctcgatccagcctgcccgaggctccc

SEQ ID NO: 128521 - DNA, 122 bp, Homo sapiens
acaggcaataaggacccagcggattggccgaggataggccagtcccctgggcagcagcgccgcgccgggactagaggggaacgtgaggagagctgcggaaagagatccagcctggctccctc

SEQ ID NO: 128522 - DNA, 122 bp, Homo sapiens
tttgcatcagattttcaggtcgtacttagcaaagggactcccgcacgacaaagctgtttacgaaacagaaaccagaactggggcagtgacactttggggccagcaatgccctctcccaaagc

SEQ ID NO: 128523 - DNA, 122 bp, Homo sapiens
aggactcgagcgctggctgcagcgacaccatggatctctcctttatggccgcgcaggtaacggggcgtcccccccacgcgccccgggccgccaagtttggggaggttcggggccacggtctc

SEQ ID NO: 128524 - DNA, 122 bp, Homo sapiens
caggctggagtgcagtgatgcaatcactgctgactgcagcttccacctctccagcccaatcgatgcctccacctcagcctcctgagtggctgggaccacaggcgtgtgctgccacatctggc

SEQ ID NO: 128525 - DNA, 122 bp, Homo sapiens
ccagacgcggagggaagtttcctcctggggagcagcgcacgtgctgcctggagacagaagcgaagatcagattgcacgtgcgtggaatgtggccgcagcaccagttctgagctccacgattt

SEQ ID NO: 128526 - DNA, 122 bp, Homo sapiens
acccctggtaacccccgcgcgcagaatcaccgccctgtgccctccttcccggccctggatcggtcccaatccccagagcccgcgcctgacccagaccatccgcggcagagaagggacttgtc

SEQ ID NO: 128527 - DNA, 122 bp, Homo sapiens
accgtcaagttttagtgcgcattgctaattagtcaatttctctctgccttcacaggctggcgacttcgctgctgagctgaaactgctaatttctgtgaccagcttttttcttagctgtgatc

SEQ ID NO: 128528 - DNA, 122 bp, Homo sapiens
agtgaagagccgtgggaggggctctcgtgactcttccgcgaagtgcagggaggagcaagccggctctggggccctcctgaaccaccctggccatccctcagcacatcccccacacctgaccc

SEQ ID NO: 128529 - DNA, 122 bp, Homo sapiens
gtgaacataggtgtaccctgtgacccagcacccacacgtagagtgaacataggtgtaccccgggacccagcacccaggtgtagagtgaacataggtataccccgggacccagcacccaggtg

SEQ ID NO: 128530 - DNA, 122 bp, Homo sapiens
atatatactcacttaaatgaagcatagtttgactattttttattcagtggtgttatttctcgagggtgcctctgcctttgttaatcagaaaataaccaggggtctggaatcttgcaatgggg

SEQ ID NO: 128531 - DNA, 122 bp, Homo sapiens
ccagcaacctccccccgcgccagcacagccacgctgcagccgctccctccccgaggccctcggcggcgtcctggccgggtcagctgtcacaatctcagtgtctgagttcaagccaccctcgt

SEQ ID NO: 128532 - DNA, 122 bp, Homo sapiens
ggccttggcttttattgagatcagagctgtgggctccccggcctctcagggaggcggtggcgggggggcctgattctgcactcagcccggcctcccaggtacaagtggctgactggagtcta

SEQ ID NO: 128533 - DNA, 122 bp, Homo sapiens
tagacgcattgggaggctgcccagtgttctgctgtggcactgctaaaagcgtgatggatgcgcttcttcaggaagtgttgccaggggcagttcaggaactacatgggggaaacagtcccatt

SEQ ID NO: 128534 - DNA, 122 bp, Homo sapiens
ctggagaactagatgagttctttattaacacactttaagaaggacattgataaatcagagcgcatcccataatgagaaaggggtccagttctggggaccatggtcaagaagttccccaggcc

SEQ ID NO: 128535 - DNA, 122 bp, Homo sapiens
actcaggccagctgaccagggttcactgcttaaggccccagaaaaacccagggcccgctgcgtctgataagcaacagtggtagcttctgtgtccaaaggaggttatttcagagtctggactc

SEQ ID NO: 128536 - DNA, 122 bp, Homo sapiens
gagagaggtctgatgtagaaagccctcgcttccagactcaagatgcatttctctgggctgcgggagacacacagttctgaggctaagaatgcaaagccgatccccagcgctgccggcgcaca

SEQ ID NO: 128537 - DNA, 122 bp, Homo sapiens
aggtccccatgctcagatgtttctgccagctcccatcataaagtgcatctagagcatcctcggagtgacccacgtgcctctctgagccttagtgtccccttcgtgggagggagtgggactag

SEQ ID NO: 128538 - DNA, 122 bp, Homo sapiens
cttctgatcgatgaccctggagttgaacaggtctgcagctgtcacctcccctctgatggccgccactttgatgccttggttttgcgtctctgtttcttcaattgtcgtggtgatgatttcca

SEQ ID NO: 128539 - DNA, 122 bp, Homo sapiens
acatagatggtgtctggtaaatcaggagagatcttaataatgcacctttctgccggagctcggccactaaaccccaaatcctccttgctcagctggcggagaacaacttctggaagtgctaa

SEQ ID NO: 128540 - DNA, 122 bp, Homo sapiens
aagcggggagccagacagcggcgggagcgatggagcgcgctgtagtgcgctgcgtaccttcggaacccaagctgagcctgtcattcgctttggctgatggtagccacaagaacatgcagcgc

SEQ ID NO: 128541 - DNA, 122 bp, Homo sapiens
tcctgaccttgtgatctgcccgccttgtcctcccaaagtgctgggattacaggcgtgagccgccgtgcccggctgagaagagactttttaacacagtagatagcttgaaatactcaaaggga

SEQ ID NO: 128542 - DNA, 122 bp, Homo sapiens
tggagccacacaggaaatgctgacacagcattcctgccccagaataggaccctggcgagccgggtccggtttcctgggagagaggaacaaacagctggggctggtagtgaaggatggggaca

SEQ ID NO: 128543 - DNA, 122 bp, Homo sapiens
atcctgcctggatcccatgtaatacctgtgggtagggcaaggaagttggagtcctgtgaccgacagtcttgttagagacattattagtatgaccccatcggtggtagctaatgactgagaaa

SEQ ID NO: 128544 - DNA, 122 bp, Homo sapiens
cacgcggactctgtggaaggtgacggataaatgacttctacagcgatcacatgccaaatacggcacaaacctctgctgatcctcttgccgccggctccttttacagagaggcagagaggttc

SEQ ID NO: 128545 - DNA, 122 bp, Homo sapiens
accgtcatttgtttaatcattgccatatttttggacatagtttttcaacagtgtaagcagcgctctctgattaaatacatcttcattcccatttcagaatacatctacagtatagacacaag

SEQ ID NO: 128546 - DNA, 122 bp, Homo sapiens
gatcgagactgtgatttcaccatccgtgagcgaggaaggaacccgggcgtgggtcacgcacggagctggggagatgaggggatctcccccagccgccttcctgtgaaagtggcgcagcccct

SEQ ID NO: 128547 - DNA, 122 bp, Homo sapiens
tatgtatgcaggtcttgctagagactgagaacctctaaaagtcattgcgcagagggaacgcggatttacccggcatggtctttggaaatcagtgtgctgtggaagcaggtcttgctagagcc

SEQ ID NO: 128548 - DNA, 122 bp, Homo sapiens
gtttaggtagttacaatgaaaccacaggcacctgtagaggtctccccaggctcaccttgacgctctgattggcggctgcagaccccatccgcgagatggcagtgttaggaacaaaggtgagc

SEQ ID NO: 128549 - DNA, 122 bp, Homo sapiens
ccaaggccactgccacggcatccttaccggggcttctgattgaaactgcacttgcacctgcgacctgaaaagcaaagaaaccatccaaggtcatgctgctggcttggccacagcagggccaa

SEQ ID NO: 128550 - DNA, 122 bp, Homo sapiens
accaaggaggcaggatgtgagggcgggcaagggttgaggcctcagtgtcaaacagaccagcgccgactctagattgtaccgttttcttcttgtgtgaccttgagcaagttgcttaggcgcag

SEQ ID NO: 128551 - DNA, 122 bp, Homo sapiens
aatcttctctccagtcctgcctgtcacttactccggctcacgctgaagcgttcgcgtttacggttccaaaaccaagactgaaaggcagtcttcacatatttattgtttataccctagttggg

SEQ ID NO: 128552 - DNA, 122 bp, Homo sapiens
ctccagggagtttcacatggagcaagggtgccatctagcggctgctctgcgaaaaggcgccgcagccaccggctccaccagttttctgggagagcagccgcagaggtggccagcaggagaaa

SEQ ID NO: 128553 - DNA, 122 bp, Homo sapiens
tcacatggcagaaggggacagcccagctctcttcaaccccttctaagggcactaatcactcgtgagggctccatcctcatgacctcatgacctcccaaaggctccacctcttactaccaaca

SEQ ID NO: 128554 - DNA, 122 bp, Homo sapiens
tccgagacgccagctgccccttctcggctgtgtggcttcgacttcctgattctcccacgacgtccctggccaggagccccgttggactctgcggctagccaaaaggggagggggagccccgc

SEQ ID NO: 128555 - DNA, 122 bp, Homo sapiens
gcccacccgcctccctgtgcctgggcctgccctgtgcctgcacacaggagtggctcatggcgtttgccctacacggatgggctgtcctgggagctactggacagtcaccttggtgggaatgc

SEQ ID NO: 128556 - DNA, 122 bp, Homo sapiens
attcagtagcggtaagctatctccacaaggcttttgtttgctcttctgagttcctggaatcgttccctcactccccttggctggcctgtttttcccctcggggctctcacctcctggctgag

SEQ ID NO: 128557 - DNA, 122 bp, Homo sapiens
gcaccccctctgctgctctgcccacctgccttttctagaaacgccacagaaagaaacccccgtggtgtgcaatctcatggcagggctgccctcggcagtgccattccgagaagcaccagagt

SEQ ID NO: 128558 - DNA, 122 bp, Homo sapiens
agttcgagttctgactgtgccatctacgctatgactttggggcaggcgacccaccctctgcgcctcattaacccatgtactgcatggaaaataagcgtctgcctgggttagaagagggctgt

SEQ ID NO: 128559 - DNA, 122 bp, Homo sapiens
tcagtgagtcgccctgggctgacaggctttgctcttccctgggcggtggggtctgtctctcggggaacacagagcctgggtttgcgtgagtcaggaggatcacctgtttcactaccaaaggt

SEQ ID NO: 128560 - DNA, 122 bp, Homo sapiens
agacagacccccgcagctggtgccccgtgtgaggaacgctgcggaggaagcacgacggaccgccgaaaagaagtgaaaagcaccgcgcagtcagtgagtaatcagtaagtcattggtgccca

SEQ ID NO: 128561 - DNA, 122 bp, Homo sapiens
gccgggggccgcggcggggggttgctgggcggctgcttgatggtgcctccgatctgcggccgctcccggggcttgggctcgatgggcgtccactgctcgccacgcacagccgcctgcggggc

SEQ ID NO: 128562 - DNA, 122 bp, Homo sapiens
cacgctccgcaagtgaacccgggcacctctctgaacctattccgggctgagggcggggagcgggtggctgcccgatttaaaaacatgtatatgtatgtgtatgtgtatgtgtatgtgtatgt

SEQ ID NO: 128563 - DNA, 122 bp, Homo sapiens
ctaattaaatcacggggccgcactttcccctgctgttctcgtgatagtgaataagtctcacgagatctgatgcgtttatcgggggtttccgcttttgcttcgtctctcattttctcttgctg

SEQ ID NO: 128564 - DNA, 122 bp, Homo sapiens
cggcaggcgcagccctcaaagctcgaggctttcattggaagggctcctgggcagggaaaacgcagaaagaagggatcctcaacctcgggctctgcgccttccccaccccacttcctgggagg

SEQ ID NO: 128565 - DNA, 122 bp, Homo sapiens
gcccccacagtcagtccgtaggtgcactcggagccgagctcggggacgctgaggcagtcacgcggccgtcgccatcttgcgtctgggtctgggtccggtcgggtccgccgcctgcagcaggg

SEQ ID NO: 128566 - DNA, 122 bp, Homo sapiens
ctgggctgtggggtgaggaggagctcatctggaagacgccgacgcggcgtgcgcagtgggcgcgtgggaggagctgtggtctgggggtcccgtccctacttgacctgttcggaatgatgtca

SEQ ID NO: 128567 - DNA, 122 bp, Homo sapiens
gaccctgcagccctggccaccatcctgtcaggtgagggtgtgaagagctgtcacctggggcgccagcctagtctggctaaaagagtactggttcgaggaagtcagggaggcaccacccagag

SEQ ID NO: 128568 - DNA, 122 bp, Homo sapiens
gtccacccctgcttccagcaacaggtgcaggagctcggctgggtgagctctgcccgtccacgggccacattctcccctcgcggcagggggctgctgagcaccagccgtgggggtcccccttg

SEQ ID NO: 128569 - DNA, 122 bp, Homo sapiens
caccgcgcccggccacaactcatcttttagagccagcctacacttgtcataggccatggccgatgaatgggaagtccacggtggagctgggtgttcctctcaagttcaactggctgcggcca

SEQ ID NO: 128570 - DNA, 122 bp, Homo sapiens
gtccagtcccacagagtcccacagtcttcatgtaaatgaggcacccagagagagcctatgcgagcgtggcaggggcgtggccttccacctcccgagcatcgctctgattcattgttaaaata

SEQ ID NO: 128571 - DNA, 122 bp, Homo sapiens
caacctcttgcggattcccattatctatcttaaactacactcccatcgtgcaacggaaaacggacagagctcctgcgtgcaccgaagggacttcgagccaatccattgtcacagctctcagc

SEQ ID NO: 128572 - DNA, 122 bp, Homo sapiens
tggagcccgaagctggagagcgcccctcaaaaagaagcctggaagcccgagagatgaacccgactcagagagggccaagactgcagaccttggggaccgaggacaccctcaccacgctggtg

SEQ ID NO: 128573 - DNA, 122 bp, Homo sapiens
gccggcctcgggcccgcgctcgctggctgagctcctgccacggccggctgtggacccccgcggcctggggcaacccttcctggtgcccgtgcccgcccggccgcctctgaccaggggccagt

SEQ ID NO: 128574 - DNA, 122 bp, Homo sapiens
ggcggggccgggataataaggtctgtgggtgtctgcaggcccgaatggaagcccccggcacgctcagccaccagtgcccgggagtcctgcgttcttggccgtctgaccgcatttccatctcc

SEQ ID NO: 128575 - DNA, 122 bp, Homo sapiens
aggtgtgtggagaagccctggctcagatgctgcctccgcagcccagggacgtcctcctgtcgtgtttctgaatgctggtgcggtcttgccttccacaccgggcttggctgtggcttgccacc

SEQ ID NO: 128576 - DNA, 122 bp, Homo sapiens
cgtgtctagctcacttaggtggccggatccacgcaaaagccagtgtgtcctctccttccacggaaactgcagtttctgtagatcagaatctcagaatgtttcctcatttcttggagaaggta

SEQ ID NO: 128577 - DNA, 122 bp, Homo sapiens
actgttatttatctgaaattcaaatttaattagtcatcctctatttttgtttgataaatccgggaaccctagcttttggccatcattagccacccagaaaacattcagtagtcatggtagag

SEQ ID NO: 128578 - DNA, 122 bp, Homo sapiens
gaaaggaacaggaacttagcctcttacgtgcttaatcacctaataagacacacacacactcgcacacaaatcacacacacacatacacacacacacacttaaaatacttattttggattctt

SEQ ID NO: 128579 - DNA, 122 bp, Homo sapiens
ctggagggcgagggccccggtgcctccacgcccaccgcggcccccagggcaggctgccttcggggtccctcgcagcttccacagagaccctttcccgtggctgctttggaattgcctaccta

SEQ ID NO: 128580 - DNA, 122 bp, Homo sapiens
tgatggaagttgcaccccaacaaaaacttaaagggtttaaaaatattgcccacactgacgcgcaaacaacacgaccgccccagcaggcagactcctccgatgcaaaagcttaggtgacaggc

SEQ ID NO: 128581 - DNA, 122 bp, Homo sapiens
gtttcagctggacctggaatacattcggtattcactttccagaagcgacgcaccagcctacggtcccagctcacgtctgggggaggtaggcacccttatttctgcgctgtaaatggaaaggc

SEQ ID NO: 128582 - DNA, 122 bp, Homo sapiens
cgggagtactgcgacgcagcccggagtcggccttgtaggggcgaaggtgcagggagatcgcggcgggcgcagtcttgagcgccggagcgcgtccctgcccttagcggggcttgccccagtcg

SEQ ID NO: 128583 - DNA, 122 bp, Homo sapiens
caatccaccagcagcttttcctaaaaggccaaaccacctcgtgggccgatcgtttttctccgtaacatggccaaatggccaccaaatggccggccggctggggccaaaaagccccttcccag

SEQ ID NO: 128584 - DNA, 122 bp, Homo sapiens
ccacaagggcttataggaaggggttcggagcttttcaaggaggcaggggaaaattaaactcgtgtctcttaatgtgtatttggtgggaggggaatgctgcctgaaataatgcattgcttcgg

SEQ ID NO: 128585 - DNA, 122 bp, Homo sapiens
cctacagcgagctgctcaggcgcatctgccgggacggccaagcccccgaggaggtggtggcgccgctgctgcgcaaggtgcagtgccgtgaccacgaggcggtgccgctgagcgtcttccgc

SEQ ID NO: 128586 - DNA, 122 bp, Homo sapiens
tccatcagcgggtgaacagacgcatcaaccacggtctgtccacaggctggaacctgactccgccttacaaaaggaatgaagcatggaatggcatacgcttcaacacggaggaaccgtcaaac

SEQ ID NO: 128587 - DNA, 122 bp, Homo sapiens
taacggagggcaggtgccagtctcgcgccctagttcgttcctctgctacaacgccaagttcgaggccacagtgccttctggaagagttgttgtgctgcttgggagcactgcacaggagaaac

SEQ ID NO: 128588 - DNA, 122 bp, Homo sapiens
cccgtcaaccgcccaacggctgaggagtgcggcagtgcgccagagactggcgggcagctccgcccgcggccgggatgcactaggcaaagccagctgggctcctgagtccggtgggtacttgg

SEQ ID NO: 128589 - DNA, 122 bp, Homo sapiens
acagggtccagaggaggctccttctgcctttgccagcttctggtggctccaggcattcctcggctcacggccacatcactccagtctcggcgtggccttctctcatatcttacatctccctc

SEQ ID NO: 128590 - DNA, 122 bp, Homo sapiens
ctcggacaccggatgggagtggcagggctggaacagcagcccagcaccgtggctcctcaacggggctcaatacagatccagggacccacaggctgggaaaatgggttttgttctgaagttag

SEQ ID NO: 128591 - DNA, 122 bp, Homo sapiens
gcgcacttgagtaacggagtcagggctccgcatctaaggggtgcacacccaggtccaagtcgaagtccagaaggatgggaagaaagacccaacctgatgcctcgccccactggggaggggag

SEQ ID NO: 128592 - DNA, 122 bp, Homo sapiens
tcagaccagatgtcctccccaccatgggcaagggctggtgggaaagacactcccagccttcgccttcatccaatactaataaataacctacagaaagagcagcgctggaggctggcccttga

SEQ ID NO: 128593 - DNA, 122 bp, Homo sapiens
gccgagggggctgtgctttaaccaaagccctggatgactgggttcatgtttctgcagcaccggtctccgagctttttaaagcacttgggtttctgcttcggcctcatgaatgcagcctaact

SEQ ID NO: 128594 - DNA, 122 bp, Homo sapiens
cctgccgggccggggcgggcggggccgctggtaaacaggctgggttctggtgacaccgggcggcggcggaaggcggcccgagggtcccgcgcgtcccacaaccctccagtcccgctctcctg

SEQ ID NO: 128595 - DNA, 122 bp, Homo sapiens
agcctgcaccccctgcaatcccccacctttcggggtctccccctccttgttgctaaggcccggaccgtcatcccagcaacagcctcagtcatgtgaccggcaatggcggcgctgacgagagg

SEQ ID NO: 128596 - DNA, 122 bp, Homo sapiens
aaccagggctgggctcttaaatccctgactcatcctgaggtatctgggtgataaatttcacggacttaacttgtactaattcaatccggactttacatatatgcagttaaaaagaaaaaaat

SEQ ID NO: 128597 - DNA, 122 bp, Homo sapiens
tgcatttttactaaaaatggtaattaatgagtttaaagtgacatgcaagaggttatgctccggatcagggttcaggaaagatgatacttggtaattgcctaaatagcgtattttccctcagt

SEQ ID NO: 128598 - DNA, 122 bp, Homo sapiens
atgtaatcagagaagccttagcatggctcttggtacaaggcacggaccaaatccatggtacgctcactcctttcctttcagtaatactgcctaaatagggcacatgtacctaaaaggatttt

SEQ ID NO: 128599 - DNA, 122 bp, Homo sapiens
gggggccctgccagcgcctcttgccgcccccccgcccgacggcgcttctctgagctaccgcggccccgggaccggcattaagtagccgctccaaaggcttctcctgctgccatggcgacgct

SEQ ID NO: 128600 - DNA, 122 bp, Homo sapiens
gattcagatctcagtgacagaggaggagtccatatctctaggcggaataccctgcaaccccgtggaagtatatgctgggacaattccctcagtccttcggcaaagaaacatatagccattta

SEQ ID NO: 128601 - DNA, 122 bp, Homo sapiens
cgaacccgaaccttctgtcctcgggagcccccagataagcggctgggaacccgcggggcccgcaggggaggcccggctgttccgcccgctaagtgcattagcacagctcacctcccctatcg

SEQ ID NO: 128602 - DNA, 122 bp, Homo sapiens
ggggcttcaccatgttggccatgctggtctcgaagtgctgacctcgtgatctgtccgcctcggcctcccaaagtgctgggattataggcgtgagccactgctcccggccacaatctacaact

SEQ ID NO: 128603 - DNA, 122 bp, Homo sapiens
cttctgggatgcagcaagcggcggggaggcagcgcgccggtgccaggcctgtggcgggggcgcaggcacagccggaaagggcctggaggagcagctgatcctgctggggtcgcttagaagac

SEQ ID NO: 128604 - DNA, 122 bp, Homo sapiens
catctgttgctctgtttactccgcggagccccgccgagctggctggcgcggtcgcctctccggcccgccgctgcccccgtcccactggcccaggaagtttgataaagacggggaagggggcg

SEQ ID NO: 128605 - DNA, 122 bp, Homo sapiens
cccatactggtccagtggtccctggcctgttaggacctgggctgcacagcaggaggcaagcgtagggtgagcgagtgaagcttcatctgtatttacagcaactccccatcacttgcattatg

SEQ ID NO: 128606 - DNA, 122 bp, Homo sapiens
tagggtttctctttgggggcgtggcttatggaacctcgttttcccgccgacggttggccacgtcacgtgacatgggttggaagatggcgtctcccacagacggtaagagccggcttagagat

SEQ ID NO: 128607 - DNA, 122 bp, Homo sapiens
cccgcccgctgcgagacgcactaggtgcgctcctccgacgttgcacagcgcctggcctggcgctgtcagtgctggcagtaggcggtcgacttataacagcagcccaggagcgaaatgtgctg

SEQ ID NO: 128608 - DNA, 122 bp, Homo sapiens
tctcggtttctgctcaagggtgggtggcttatggttcccgcagaggcattccaagttacacgatctgacaagacatggagcgacctgagtttgcgtgtttctaacacgttggcttgaatcca

SEQ ID NO: 128609 - DNA, 122 bp, Homo sapiens
cattttatttccggttctgaggacgccgcggaagcgggacgggattggagtgctctgctccggacgcactacgtaggtgggcctgcgggagttctgagtgcgacggcgcaggtctgcaccat

SEQ ID NO: 128610 - DNA, 122 bp, Homo sapiens
gcctgaggacaagggtggggtctgcaggatcccaggactaggcagaggacacggcctccccgggacaggggccgcggcgctgcgcttcagaggccgacaagggcaaggctgggaggtgccca

SEQ ID NO: 128611 - DNA, 122 bp, Homo sapiens
tccgctgggggcgagcccggagggaaccgaggggcccgggagggggagctgctgaaggcgcgcaggctgacaaagctataacaaaggctccctacaaaactagtactaaggatctttaaagg

SEQ ID NO: 128612 - DNA, 122 bp, Homo sapiens
gctttcctcttttactaatccacgtcagcacagaccctttacgggtgtccggctgggggacggtcaggtctttctcatcccacgaggccatatttcagactatcacatggggagaaacctca

SEQ ID NO: 128613 - DNA, 122 bp, Homo sapiens
gagcgcggaggccgcaccctgggcgccgggcgtcgtgtcgggaccgctgcccgcgctgcccgccggcgcggccattgttcgagccccacccctgatgaatattcacgccgcgcgggcgcctc

SEQ ID NO: 128614 - DNA, 122 bp, Homo sapiens
aatgagaaagaaggccattcaggtatgagaagaacctaggctgggcacagactacacagacgcctaacacaaaagctctgctgccactcaatctttgtttatatattatcacaaattttctt

SEQ ID NO: 128615 - DNA, 122 bp, Homo sapiens
ttgtggggtagctgaaaccgattttaagacagacttagttgggggggtggcgagctaaaacgggcattctacgggagctggaagacttctggggcgtcccaaggactttgagagacttggag

SEQ ID NO: 128616 - DNA, 122 bp, Homo sapiens
atgaggccactgacctctccaggtgaacgttgttggtgcagcagggcatgaaccagctcacgtgcctggcccactggccagaccacagcatggctctagctgccctgtccctggctgcattg

SEQ ID NO: 128617 - DNA, 122 bp, Homo sapiens
aacattcaaggttaaagtcgctgctagaccaaggctaaaccgtggcgaggtagttgcttgcgccgcagagtgtgggtgtgaacagctggagctcagtggttcctggagactcagggaccacc

SEQ ID NO: 128618 - DNA, 122 bp, Homo sapiens
aaagtgctcggggcctcctagggacacagccctggaagctcacctcatcttagcttaggccgcggcgaggtggggaggagagttaggagagggggagaggggctctgcgccctgcagaggcc

SEQ ID NO: 128619 - DNA, 122 bp, Homo sapiens
caactggagctagatgccttcgccactttgctgaaagatatgaactgtgcccaaggtgggcggtatcagataggagccccgaagtggaaacgtccagcgtgggaatctcctctctacagggt

SEQ ID NO: 128620 - DNA, 122 bp, Homo sapiens
gctgacgtccgaggtcaccgggatgggcacgctgtaatcctacccagcacccttcccccgcgtcacccacctgccagagcctaaggcccccggctctcgcactctgtacagcccaccttccc

SEQ ID NO: 128621 - DNA, 122 bp, Homo sapiens
agggacgaggacggggaggcgacatcagcaaggccgtgtgtgagccaggcagggtgtccccggtgtagcacctggctcgggcagaggccccgaggaggggctggaggagctgggcgaggagg

SEQ ID NO: 128622 - DNA, 122 bp, Homo sapiens
ccggaagaaactggagacagatttgatgaagctggacaactatctggtctccacgacctccggggtccgcagttccagcctttgagggctctcctgtgactgtcaggcaccttctatagttc

SEQ ID NO: 128623 - DNA, 122 bp, Homo sapiens
tgttttggcactggtggtgcttgcggtgaggtccaaggagcccagcctccctgagtggaccgccgggcccctccccgttccgggacacaggagaggctcccgccccttgctggctgggcagc

SEQ ID NO: 128624 - DNA, 122 bp, Homo sapiens
ataacctctgtggatgtgtggtcttgcttcagaggacatggttttcatgcctgatgaggacgagcgcaaagagtacatcctcaatgacacgggctgccattacgtgggggctgccagaagta

SEQ ID NO: 128625 - DNA, 122 bp, Homo sapiens
gattactgcaacaatcgtttgactttggccacaaaccatgactactctcagggcgaaagccgttggaaggaattattttcttcttctgctggagtcaatttaagtgttggcagtttccgagg

SEQ ID NO: 128626 - DNA, 122 bp, Homo sapiens
gagcgcctagaatcgcagcctgtgggagcatccgcagctgccgcaagcgcagcctccgcccggattccttacctcgtagccgtccccgctgccggccctcctaggcaccgctgccgccgcca

SEQ ID NO: 128627 - DNA, 122 bp, Homo sapiens
ggaaaagacaaacttggagagccagacattgagattccattgaggcgttggaggtcacaacgcggtcaaaaacatgttgagaggacttagctgcaaagttgttaactaagtagaaacctcaa

SEQ ID NO: 128628 - DNA, 122 bp, Homo sapiens
gacctgcccagaggaagcaaagcggaagtaggatccaaaacgctttcagcaggccgcctgcgcccccgcgcatgcgcaggtctctgactttgaccgttttggcgggtgcgcgccagccctag

SEQ ID NO: 128629 - DNA, 122 bp, Homo sapiens
tttgagccactacgtttgtggtagtgttagagtagccataggaaaccagtgcacccccaccgttcccagtgtttatcagtggggtgctattgtcatgtgagtggaggctggtttctagcata

SEQ ID NO: 128630 - DNA, 122 bp, Homo sapiens
cttcaagctccccttcttccttcggcgagaggccactggaggccggggccggagtatctgcggtcgccatccggggagcagcgccttccacacaaccttagccctccgtccggggatccgcc

SEQ ID NO: 128631 - DNA, 122 bp, Homo sapiens
ccacggatcctggaagcccaccagaatgtggcccagttgtcgctggcagaggcccagctgcgcttcatccaggcctggcagtccctgcccgacttcggcatctcctatgtcatggtcaggta

SEQ ID NO: 128632 - DNA, 122 bp, Homo sapiens
gacaggccactccttaccctccccgcggaatcgcaactcacccgccacccccactccaaacggacccagaacttcagccccgcgccgacggactcaggacaggcctcctctccggtcggcgc

SEQ ID NO: 128633 - DNA, 122 bp, Homo sapiens
gtccgtccatgttgtcataaatgacagggtttccttctttttaaaagctaaatcaaattccgctgtgtataaataccacattttctttatccattcatctgttttggacacttaggttgatt

SEQ ID NO: 128634 - DNA, 122 bp, Homo sapiens
gcgtggaaggccaggctgcgctggctctgggagtggcggcgaggacgggactggaagggccgggcctctggggcctcagctggcctcccaacttctgcccagctcgactcacctggttcttt

SEQ ID NO: 128635 - DNA, 122 bp, Homo sapiens
ttcaacgtgaggaagcaagtgacaaggacgcccgaagcacagtggacggtcatgaaggagcgggggtgtggcaggcgggtgacgtccaggagagggagcgcccctggctgcccctcggccgc

SEQ ID NO: 128636 - DNA, 122 bp, Homo sapiens
attaagccatggactaaggaaaggatttggtgctcaacagtaagcacatttctccttctgcgaggtaaaaatacagtctcttcagggcaaaaccaaaggctggaaaatggatgtactaattg

SEQ ID NO: 128637 - DNA, 122 bp, Homo sapiens
taagacgcgccctggaatctttcctttttgatgtggattttccaattaggaaaggctgcccgtgaatagtcttttctgcttgagtgatggccaacacactggcaggtttgcaagctttctct

SEQ ID NO: 128638 - DNA, 122 bp, Homo sapiens
gggatgaagccgaggttacgtaggcatcccttccctggctggagaggagggagggagcggcgtactgagctgaggcgtccttgctccagatcagttgaggccaactttgcttggggagcgag

SEQ ID NO: 128639 - DNA, 122 bp, Homo sapiens
gcacctcttacactaacatacaatggggctttaaatacagtttatgaaagaaactgtcagcggggaggaaagcaaagccagtgaaagctactgaatccctggcatgtaccagctcttgtgtt

SEQ ID NO: 128640 - DNA, 122 bp, Homo sapiens
gcgagcctagaccacaccattgcactccagttcgggcaacaagatgaaactctggctgggcgcggtggctcacacctgtaattccaacactttgggaggccaaggcaggcagatcacctgag

SEQ ID NO: 128641 - DNA, 122 bp, Homo sapiens
cgcccactcccatcctattgcccagctgagcccctcccttggctctcccacccatgggcccgatggccgcagctgggatccaccggacactgcagtcccccaggcttcgggtctttgcctcc

SEQ ID NO: 128642 - DNA, 122 bp, Homo sapiens
ggtctgacgacgtggccactgtccaatcctcatgctagaggcggggctaaaggccagtggcgcaagcagaaggaggagcgcagcggctgcaagcacgtgaccggggcctgaagccggaagct

SEQ ID NO: 128643 - DNA, 122 bp, Homo sapiens
ctggtgtgtattcctctacctaggagacaccagtcctattgaattagggcctcagccttacgatctcatttaaccctcattgcctccctttaggtgactaggtgtgagggtggagccctcaa

SEQ ID NO: 128644 - DNA, 122 bp, Homo sapiens
ccagcccggcgccccggtgctgaggtaagtgaggcggcagctgtgcgggtccggctcctgcgtgggcgcgcgatgccccggggacgcggtcgcgggtgtgggggggaaagggcagggtccgc

SEQ ID NO: 128645 - DNA, 122 bp, Homo sapiens
cttagcagctatacagcaacaggcacagggcagagaggttcatagctcccccagccaccccggggctggtacaagtgccctgggcaccaaccaccaccacctgagcccaaccatagactgtc

SEQ ID NO: 128646 - DNA, 122 bp, Homo sapiens
ccccggcatttagtgattctatcatgtcggcatagtttcttctctgacctggccatggtgcgtttgatgccaagaatgggcagcctgagtggtgatggtcagtcagtgccactctgtcagtc

SEQ ID NO: 128647 - DNA, 122 bp, Homo sapiens
gattttgccatcatgctcactgaacactgctgatggcatcttccaggattaaccatactccgaattttgaataccatcccgattcaatcaactttgacgaatgtattattgttcgtagtttt

SEQ ID NO: 128648 - DNA, 122 bp, Homo sapiens
tctgcaccttgtttagactgggatccacatcaccactgttttctgggacccactgagaaccgaattgaacccctgcctagtgttgggagctggcaccttttccctggctcacctgccagggt

SEQ ID NO: 128649 - DNA, 122 bp, Homo sapiens
ttcaggaccccttcatacgacccccttattcacgcccatggcatattctactttgcctctcggtaacatctagcaaggtcgtctttatacagaaactcgtgttttgagtactgcttgtggcc

SEQ ID NO: 128650 - DNA, 122 bp, Homo sapiens
ggaaacctcacccggctccattctaaaagtccactgctgttgagtgagatgcccccgagtcgtccggcctgggctgaccattcacgggctctggaaagaaagccttggtctctctgcggagg

SEQ ID NO: 128651 - DNA, 122 bp, Homo sapiens
tttgatagggggcctagtggtatggagcaacccatgttcccattttacagatgagaaaatcgctgctcaggaatatcaagccactcttttggggttgtgcagttattacagggcacagccag

SEQ ID NO: 128652 - DNA, 122 bp, Homo sapiens
ttttgccaagccctggagttactgaagtgaacaagtccctggtctctcgggacccattgccggttgaaacacatcccgcctcctcttccagtcctagaggccgcctcctccggaaagccggc

SEQ ID NO: 128653 - DNA, 122 bp, Homo sapiens
tacagaggttgagaggagacggctccacatcagaggcccagaaaatgccggcggctgcggcggccgagaggtcctgcttcccccaggggctggccatacccgcggccttcagcttggccttc

SEQ ID NO: 128654 - DNA, 122 bp, Homo sapiens
gagcctggctgtggcctgtggtcgggaggccccaccagcaacgcctggagcccaggcgggcgtttctgagaaatcgatggtctcaggtggtggctggtaataatcatgttgataataatcat

SEQ ID NO: 128655 - DNA, 122 bp, Homo sapiens
ctcggccccgcccccagcacacaggtcccacttattggagatgctgttgctgaagctgctcggccccgcccccagcaccaggtcccacttattggagatgccgctgctgaagctgctgggcc

SEQ ID NO: 128656 - DNA, 122 bp, Homo sapiens
ctctgtctccccatctgtggggctggggtgatcacagtggctgctgtgcaggggtatggacggctgcctcccgtgcccttcactccctgtgtggactccagccttgtcatgatttcacctca

SEQ ID NO: 128657 - DNA, 122 bp, Homo sapiens
ccaagcacccaaggtgcctgaggctcgtctttgaggagaattgaaccaaaggggagaagtcgtggccctggggaagccaggtaaggaggccccgagtccctgagcacaacaactcgacatct

SEQ ID NO: 128658 - DNA, 122 bp, Homo sapiens
tgccctgattgctcattcagagaggtccgttccctaggccactgggtgattgctggtgtgcgcttgtatggtgtctcagggtttgggatcttgcttcagaaacattctcggggcctggggca

SEQ ID NO: 128659 - DNA, 122 bp, Homo sapiens
catgattgttcatggcagcattgtttgtaactgccaaaaagtggaaagaacccagatgtccgtcaactgacaggtggaaaaacaaaatgtggtacatctacacaatgaaatattacttatcc

SEQ ID NO: 128660 - DNA, 122 bp, Homo sapiens
tgcgtggggcaggggcggcgtctacacttgtgtggtgtctacacttgcgtggggcaggggcggggtctacacttgtgtggggtgggggcggggtctacacttgcgtgggcatctggagggtc

SEQ ID NO: 128661 - DNA, 122 bp, Homo sapiens
aagaaaaagaaaaccgaagaacctgaattggagcccctgtgctgctgcgagtacatagatcggaatggggaaaagaaccacgtggctacttgtttgtgtgattgtcaagatctggatgaagg

SEQ ID NO: 128662 - DNA, 122 bp, Homo sapiens
ggccacctcagctggccactggcacagccttgccctctggggccccgttctcgcacacgccgacggcctggccgcactgcagccccgcagccttgtgggaaatgtagtctggcgctccgggc

SEQ ID NO: 128663 - DNA, 122 bp, Homo sapiens
cgcagcctgggaacaagaggagctttgtaggactctgaacaatggggcggggacactgggcgtccgacccgagggatgggggtggaggcccagccggggctgggaaccgggagggtgtcagg

SEQ ID NO: 128664 - DNA, 122 bp, Homo sapiens
ctggaaggcgtggtctggtttggagaattggtgagcggggtgttttaaagccacctctcccgaacaatacagaatctggtaggtgcagcttctgattacatggaccagggaatcctgggttg

SEQ ID NO: 128665 - DNA, 122 bp, Homo sapiens
ggaaccatagagtcctgaggaggatgtgacgactctctttcaggacgtcccaaccagagacgcagggacgtctggcgcctcagcgcctgcgccaagtggcgcgcttaaggtgagcagagtca

SEQ ID NO: 128666 - DNA, 122 bp, Homo sapiens
gggctccgtgtagggcaactgggcggggccagataagccagagtcccagggtcttcttcacgccccattaccgcccccaggttcctcgaccaaggtctggacgacaactattgccggaatcc

SEQ ID NO: 128667 - DNA, 122 bp, Homo sapiens
cgctgtggagggaagcagcttgaaatacagtgggtaggacggcggggggaccctcagtggcgaggagcagtgtgcctccagggatgctgggacgccgaaagcctagactgagacgatcccac

SEQ ID NO: 128668 - DNA, 122 bp, Homo sapiens
ggtggcaaattcactggcgttgaacagagactggactaacgagggtgaccagcacttacccggtgccacctaccattgtgctgagcctttgtgcatagttttgtatttaatacacctaccgt

SEQ ID NO: 128669 - DNA, 122 bp, Homo sapiens
ggccgctcggtgcgcagctgctttaccagttgggtcacgttggccaggtgccggttgggccgcatgtgcctctgcgggaaggtctcccggcactgcgggcacgacacgttagtctctgccgt

SEQ ID NO: 128670 - DNA, 122 bp, Homo sapiens
cgcagcgactcaaccgactgtgctctccccagactcgcagctatggcaacttgaactagccgcccagccacagcaagagtacaggaccccgctgccgccgcttggccgtctgggagttgtag

SEQ ID NO: 128671 - DNA, 122 bp, Homo sapiens
gagcaggtctcacccaggaagttctggtagcagttacggatctggttctggctggggaagcgcgggtcgaagggcggcgtcgaccatttccccttggggggctcctgggcttccacatccaa

SEQ ID NO: 128672 - DNA, 122 bp, Homo sapiens
gctcttcctctgtcacccagtctgattgcagtgatgcaattgatcacagctcacggcagccgggacctcccaagctcaaacaatcttcccacctcagcctcccaagtagctgggactacagg

SEQ ID NO: 128673 - DNA, 122 bp, Homo sapiens
gcttgcacatatgctcaatttcattttttaaatgaaatgacatttaatgagtcccttgagcgtgtctacacttgcgaacctcactgcttcacctcccatttgcgcctcactttttttttttt

SEQ ID NO: 128674 - DNA, 122 bp, Homo sapiens
agccagcttccagcaggcagggctgggaggttgaacttgagccggtttgggagccaggagcgagtgggtgacaggtcattcctgactgggaaggttgcttgacaagtcaggattgtgcctcc

SEQ ID NO: 128675 - DNA, 122 bp, Homo sapiens
tgagtcccccaagaaactattcctgggatgagcagatgattgtatccgaacctggtctgacgaggtcctgaccccaagtagctagatgggtaccctcaatacttgctggtttgccctttgcc

SEQ ID NO: 128676 - DNA, 122 bp, Homo sapiens
caagtgaaaaaaaaaacagtatggcatattctccaacaaacccagaatttctaatatttgcggtcttccttccttctttccatcttcctttctcttctcttcccttgcctacttccttcctt

SEQ ID NO: 128677 - DNA, 122 bp, Homo sapiens
ctgtgaggccgcggccgccgccgcccccgcggggccatggtgccgctctccgctctcgagcgactggaagctcccgccaagcccctcgccgctccgaacagccaatccgggccgagcacgcg

SEQ ID NO: 128678 - DNA, 122 bp, Homo sapiens
ctatgacccctttaaggcgcggccagagtcctcccgcagaaaaacgacttaaaggagacgcgtggcgcgatggcggcggccccacgcgcgggccggcggcgcgggcagccgctcctggcgct

SEQ ID NO: 128679 - DNA, 122 bp, Homo sapiens
gacccggccggtgtctgcggagaggaggggtcgccggcccgcagagttggcggcaggcggcggaagtagctccacaggcttgcgaccccggcagccctgggggctcctcagggtcctgttcc

SEQ ID NO: 128680 - DNA, 122 bp, Homo sapiens
ggcctgcacacttgctgccctcttccccactgtggcatttctcctcgcttcatcaggtctcggcccaaatgttgtctcctcagaaaagccatccctggaccccttaccttaaatagcgccct

SEQ ID NO: 128681 - DNA, 122 bp, Homo sapiens
agggccgcggggaaccggtccgggtcgggcgcggcccccgggctgcggtggggtggggtgcgccactggccacatctggtcattcctgctgcgcacaggcctcagtttccccgtctgctcaa

SEQ ID NO: 128682 - DNA, 122 bp, Homo sapiens
cgtaattttagttttaagtgtagcagccggggagaaaattgtgaaggggagtgagacaagcgttcgattacttagccaattgtagtgcacaactgaagttgcagacctgaagaagccgccgc

SEQ ID NO: 128683 - DNA, 122 bp, Homo sapiens
ccaagaggctgtccagagacctcttgttctccattcctaaaacagcataaaaacaggcatcgaggacattcaggaaaagtcctgggcacttcctcgtgaattggctgagtcctactgacctt

SEQ ID NO: 128684 - DNA, 122 bp, Homo sapiens
gcggggacacagggaccttgatggtgagcgtgtttgatctataaatagactagaggctgccggaggctgcactggctgggagccgcccccgtcggcctgtgctgaggtttctggggttccat

SEQ ID NO: 128685 - DNA, 122 bp, Homo sapiens
gtcagcgttgagtaaggcagggagggaggctgctgggcactgtcatgacgctgagagactcgtcacttagccatgaggacgtctcgcttctactgaggctgtggctctgctgaaagccacat

SEQ ID NO: 128686 - DNA, 122 bp, Homo sapiens
acaagccatctacagcaggcacttatgggaactggccaagaccaaaaagtgagctattgacggaatacagatttatgtgaactaaaaccaccaaaccacacagctggccaatcctgctgttt

SEQ ID NO: 128687 - DNA, 122 bp, Homo sapiens
accttcaaaaagaacctactacacactggaactgactagtactcctgggatgccatgccacgcagcagccagcactcggagagcagtcccctggatactaccacacagagaaaaggggcatc

SEQ ID NO: 128688 - DNA, 122 bp, Homo sapiens
ggacagcgcgccgggggcgtggcaggggcgtggcctgtccgcggggcggggagtgcggggcggggcttccgcggagcgcagcgagcgggcacatcccaggttagctgctgcgagccgagccg

SEQ ID NO: 128689 - DNA, 122 bp, Homo sapiens
ggacgtgtgagttagctcccgcttacgggtgagaatgtgcggtgtttgtctttctgtgtccgagttgtttcgcttaggatgatggcctctgtttgcatccatgttgctgcaaaggacagttt

SEQ ID NO: 128690 - DNA, 122 bp, Homo sapiens
atacccactagcaatatgcctttagaaagagacaggctggcaactgcacgttgggaaggacgcacagtgactagaactctcgttccctactgctgggagtgcaaaacggaacagccactctc

SEQ ID NO: 128691 - DNA, 122 bp, Homo sapiens
gcccggcggtggctggctgtggcctgctccacaccctcgcgctctcttctggggagtttgcgccccacactgagttgtgggcctgggcctggagggagccggaggcgtcctcttctcctccc

SEQ ID NO: 128692 - DNA, 122 bp, Homo sapiens
agtgggttttcttaggactcaccttatgtagtttccacatggcccccagagccttgacttcgtggctggagtgtttgccctcctccaagcactggtagcacacgggcatcttgcattgcacg

SEQ ID NO: 128693 - DNA, 122 bp, Homo sapiens
atctgccgtaagaggttaagcatcagtctgttaataaataacaatggggtaaccacaggccgtgtgggccgggttctccacttcttcttgtcaccatcaaatgagaaattttatttctccaa

SEQ ID NO: 128694 - DNA, 122 bp, Homo sapiens
ctggctgccataaggcactactgccttatgcgcaacacaaacacagacacagtattggaccggggcacgctttaatcgggagggctggagcagagggcggccccgccgaggggcgtggtcag

SEQ ID NO: 128695 - DNA, 122 bp, Homo sapiens
cacaccccactccttcaagttcccaaaagttgcttttccgcaccacccttctaaagaaaccggcagaaactctgctgggaggcggggtgttttccaggcgagtttcgcttaagagtgggctg

SEQ ID NO: 128696 - DNA, 122 bp, Homo sapiens
cccgtcagagtatctgaggagcctgtgaggcgttctggagctttaaggtcaggcgccttccgggagccgtagccccggccccgcccttctgcccgcgcgttcctcactgcgcatgtcgcgtt

SEQ ID NO: 128697 - DNA, 122 bp, Homo sapiens
agcaagttctgaggagcatggcgtccaatcatgagacagcccacaacgtgatctgtaaaacgtccgtgttggatgaacatgctggcagaccattcctcaatgctgccaacgacgctgacctt

SEQ ID NO: 128698 - DNA, 122 bp, Homo sapiens
tttcgtcctgcaggtcagtctcagggtcttgtgtagcagcagtagggagagaggctcctacgggatgttagtggaaggctgtgaggtttttataagaaccagagcagttgagaggggaggaa

SEQ ID NO: 128699 - DNA, 122 bp, Homo sapiens
agaccacattcccttcatcaggctgaatacaagttttagttcagggccttgtgtctttcccgcattcatttattagtcatcgagctgaatttctcaacccaatttattgcttttcatgtgac

SEQ ID NO: 128700 - DNA, 122 bp, Homo sapiens
ccatcctgtcatcatgtcttatggagaattttcttttgttcccaacaaaacaatgaaactcgcaaaactgactgtaatgattcagtctacgtgaatttaaagagcaatcaatacttaatgtt

SEQ ID NO: 128701 - DNA, 122 bp, Homo sapiens
ccaccctgcccggagcctggcactcacagcaggccggtgctaaggagtgtggcgcgggctcgactcccactgctgccggcctcccgagtgactctgttttccactgctgcaggcgagaagag

SEQ ID NO: 128702 - DNA, 122 bp, Homo sapiens
ccgggcgagaccggagggggtgctccgcacgcccgtggggtggtttggggtgtaggtcttcggttcttgggcattcactccatggctctgggaaggctgtggcccctggatctgtccctggg

SEQ ID NO: 128703 - DNA, 122 bp, Homo sapiens
ttttcggtgctgaggtgctttgctggaggagctgccagggggagctgcgcggggcaggcccggggtaccagaggcccttgctttagcggcggccctgcgtgtgccagaggcttgcagagtga

SEQ ID NO: 128704 - DNA, 122 bp, Homo sapiens
acttaatagcaacacataactgaggtgtatttagtagtcacattttattccaatgtctttcgcccattaaaacctttcacctgactgggcatggtgactcatacctgtaatcccagctactc

SEQ ID NO: 128705 - DNA, 122 bp, Homo sapiens
agccggaagcagggactgagcgacagactaggaaacgccggtttctccggggctccccagcgccccacctttaccccggaggccgccctcttccatttgctcttgggcgtcagggcggtacc

SEQ ID NO: 128706 - DNA, 122 bp, Homo sapiens
ggctggggtcaggagccagtgctgtgcccgctggcgcttctgcactgccagaaggcatgtcgtgttgcagtcggaaacgtggtgctgagctctcggcagacggcccctcctttctccccagt

SEQ ID NO: 128707 - DNA, 122 bp, Homo sapiens
gtagaagcggttccgcgtcccggcttgggtatgggtgtggcagtggatgtgtcgtctgaccgtaggttctctggtcgagcaagtctcctgcgctatgggaagctgaggaggtgctttctttc

SEQ ID NO: 128708 - DNA, 122 bp, Homo sapiens
aaaacttatttaatcttcaccgtagctcgtagctcgtactgttgtgaccgtatttccccccgtgattgcccgactgcttgagcttgaacctcttgtttctaactgccttgattttaggaatc

SEQ ID NO: 128709 - DNA, 122 bp, Homo sapiens
ctgttagcattttacgagttctttcctctacagctataaaactgcagcttcgatcgcccccgccgcccgattgcagcacggtgggggtgacgaagccgaaatgagaatgattatggggattt

SEQ ID NO: 128710 - DNA, 122 bp, Homo sapiens
cagggtgggcccctgctctgctaggattagtgtcctcacaggaggagaccccagagagtgcgctgtctccgtcacgtgagctctcggccagaaggcagccgtctgcaatccaagcagggagc

SEQ ID NO: 128711 - DNA, 122 bp, Homo sapiens
cggcgcggggactgcaggcgtgggggtacctggctcctagcagcctggctcatactcagccgtaaagtccccttcgctggtcccgaggacaggcatgaatcccggctccggaaggcggtcac

SEQ ID NO: 128712 - DNA, 122 bp, Homo sapiens
tgaactacgtgtgagttcagatccgagcgtggcgtgtgtacgcgtgagtgggagtgagtgcgaacttaagctcctgtgggccttaagcttccgtgtcaacgagtgcattagtgggtgcgcac

SEQ ID NO: 128713 - DNA, 122 bp, Homo sapiens
ccccactcctaaattcatagattcctttattcaatcatatgacaaacatgagggtatccacgctggccaaggtatgttctctattagggaagttactagctgggtttcacctcacatgaaga

SEQ ID NO: 128714 - DNA, 122 bp, Homo sapiens
tggcatcctctgatctagaaattagaatatgtcagtaaatttcccagcttaatctatactcgttggttctcactctgaaagcttatttataatgtagattgctggaccccacctcaaagtaa

SEQ ID NO: 128715 - DNA, 122 bp, Homo sapiens
caatggatttggggctggaaggaatttagagataatctagcctgaaccccttttttaaaacgacgcttctgtgaggtaactaattcatgttttgggacgtattttatcaaactcagatgtaa

SEQ ID NO: 128716 - DNA, 122 bp, Homo sapiens
ggaggcccggcgggaccccggcccgcgtctcagctataaagatagccccggcatgacagccgcggcgaagctcttctagttcatctgctggccggctctcagtccccgtggcgccccctttc

SEQ ID NO: 128717 - DNA, 122 bp, Homo sapiens
tgtcctatgtcctctgctcctcaccccctcgccacacacggggtgccgtcaatcagccagcgccgcctgccagcccagcgcacctgttgtgtgcccccactcccgcctcctctagtcctttg

SEQ ID NO: 128718 - DNA, 122 bp, Homo sapiens
ggatctccatactccacatcttgagttcttttctctgctccttgggacaaccccccaccccgagtgacaacattacgtacaaaactgctccacacactccagaatgagcatctgttcctcat

SEQ ID NO: 128719 - DNA, 122 bp, Homo sapiens
tgtgcttcctgtcgtcctcttccgtgtcgctggggctctcgtggctccggaagctcccctcgctgccctcgctgccctcctggctccccttggtggcaaactcatagtggtcgtcggctgag

SEQ ID NO: 128720 - DNA, 122 bp, Homo sapiens
cctgcgggagctggagagatgagtcgcggaggggagcagcagctgagccggccttgggtgcgcggggaccgcatgtggagatgctgtgcgggtggagttggcacgcgctggactgctccaag

SEQ ID NO: 128721 - DNA, 122 bp, Homo sapiens
ttttttttttttttaaacggagtctctctctgtcatccaggctggaggagtgcagtagcacgatctcggctcattgcaacctccgcctcccgggttcaaacgattctcctgcctcagcctcc

SEQ ID NO: 128722 - DNA, 122 bp, Homo sapiens
taaagaaatacctaacatattacagtttttaaaatatgtgctcatccatttctcttccatcggtactttctgaatatgcatcatgagttcatccaagtaaacggatcatttaaatataaaag

SEQ ID NO: 128723 - DNA, 122 bp, Homo sapiens
tgcgctggccaggagcgtgatcggtttccggtcagtggtgtggtaccgggtacccggagacgtgtatcggacggtgggccgcagccatggccgagagaaaacctaacggtggcagcggcggc

SEQ ID NO: 128724 - DNA, 122 bp, Homo sapiens
cctggcagccttggagcggcagcgccccttgtgtggagcaggggaataacaacaacaaaacggccttaattaaagctagggtggcgccggcctgtggtcccagttactcaggaggctgagga

SEQ ID NO: 128725 - DNA, 122 bp, Homo sapiens
tgctaagcccctcactgccccgggcttgtgggctggctggccgctctgagtgcggcccgccgagcccacgcccacccggaacttgcgctgacctgcaagcgccacacgcagccccggttcct

SEQ ID NO: 128726 - DNA, 122 bp, Homo sapiens
tggagacacttttttcattccgttttgatagtaactgaaagcatcagcacacaagcaggacgtgaagttaccagagtctttcccgcacatgcctatgagtcataaatgaccaggtggaagac

SEQ ID NO: 128727 - DNA, 122 bp, Homo sapiens
gcccctattctgcccaggctgtttggcagtggggacctgcagaggccgggcatggcccttcgccctttgccagtgatcggtggggaggaatgaagccaggggaagctgagtggcaggccttg

SEQ ID NO: 128728 - DNA, 122 bp, Homo sapiens
ggtggcacctcaggctgtggaatggggtggcgagtctttggaagtcacagagcccagggtcggtggcacgtgatgaggcgcaggcctggctcagggggtggtgcccacggccctcggctcct

SEQ ID NO: 128729 - DNA, 122 bp, Homo sapiens
cactgaggaggctgaggcacaagaatcgcttgaatccaggaagcagaggttgcggtgagccgaaaatgcaccactgcactccagcatgggcaacacagtgagactgttgtctcaaaaaaaat

SEQ ID NO: 128730 - DNA, 122 bp, Homo sapiens
tcgcgctcccgccctctagctgcgctcggctgagtcagtcagtctgtcggagtctgtcctcggagcaggcggagtaaagggacttgagcgagccagttgccggattattctatttcccctcc

SEQ ID NO: 128731 - DNA, 122 bp, Homo sapiens
gctgccctaacgccctccagctccaggtgaggtcggggagctggggccaaggctcgtgagcgcccctcacccccacgccccccggccgcgggcgctggagccggcggctgcgagcactcctt

SEQ ID NO: 128732 - DNA, 122 bp, Homo sapiens
gcacgccgggttttccagcattccctgagctaagactccctaatctgggctccgggtgagcgcgcattccgagacccaggatttcgctccttcatccaggttccgggtttcccctgcgctca

SEQ ID NO: 128733 - DNA, 122 bp, Homo sapiens
ggagtggaagaaactgacttaccaaagtttcctcaaaatagtgcgagggctttgactgtgcggggcagggagggtggtggtgaggtgggtgaggggaggttactgagaccgtgatcatcact

SEQ ID NO: 128734 - DNA, 122 bp, Homo sapiens
ggatgaatagattctagagatgtaatgtatattgtatacttgcagttttcgttttcgtttcgttttgtttgtttttaaatagagagagaaaaggtctcactctgtcatccaggcagagtaca

SEQ ID NO: 128735 - DNA, 122 bp, Homo sapiens
gggtcttttctagagagatctggggggtccatttctagccgatgatgcatgcaaagagttcgtgttcacaggacctgggaagcagcggagtagaaaggtgagtcagacgccatcttcatagg

SEQ ID NO: 128736 - DNA, 122 bp, Homo sapiens
catgtgctgcgaggacttccggaggaagtgaggcttttcccttctgctgttgacaagacccggattggtgagtgctcctcctgtcacggagcaagtcaggcagtaaagagcaggtggcagtg

SEQ ID NO: 128737 - DNA, 122 bp, Homo sapiens
ccagcgctgggccaagggcttcctccagcctccaggcctctggttcctccgtttcagggacgcctgacacggtggttacctcctctattcctgacaagttccgcgggaaaggggacgtcacc

SEQ ID NO: 128738 - DNA, 122 bp, Homo sapiens
tttaacacaacggccagaatgatttccttcaaaaacagcaatacgatgatgtcatttggccgtttaaaacttcctgtggcttcacgttagtcagagtctaaacaggaaaacagagccgcctt

SEQ ID NO: 128739 - DNA, 122 bp, Homo sapiens
atttcttagaatcccagagggcctgctcaaacatagactgctaggtgtttgcgattcagacgtcttgtgggaggaggagtgaggatttgcatttctgactagttcctaggtgctgctgctgc

SEQ ID NO: 128740 - DNA, 122 bp, Homo sapiens
gggaggcagaggttaagggctgttcccaccctccagtgacccagatgggaaaggcagctgcgtggacatcaaaatgacagcagagacgtgtggcttttccccagcgtcactgaaacaaagcc

SEQ ID NO: 128741 - DNA, 122 bp, Homo sapiens
ttgtccaggacacagatttcctctcccagtcgcaaacccttgggtcagactcttggaccacgtcagaccgatcaaaccggctgatcaaactttacttagaactttcccaagtcgtcccggcc

SEQ ID NO: 128742 - DNA, 122 bp, Homo sapiens
gcgcggagggggaggggggcggagcagcgggagccggggagccggagccccgggtccccacgacctgagccggctctcccatcagcggcctgaggacctggcgtccgcctcctccctcccct

SEQ ID NO: 128743 - DNA, 122 bp, Homo sapiens
gctgggggcggcgcagcagcctttattgacttcttcattctctgggtagtggtgaacagccggttctttcaggccttccagcgccggagcctcgggcgtgggcaaaaagcgtccatacgcag

SEQ ID NO: 128744 - DNA, 122 bp, Homo sapiens
gccccccaggccgcgccgtcctcggctcccccgggcagcgccggggttttgtcaggcgcgcgctgctgtttgcctggattgcgctcattctgaccctgaagccagcggccccactgacacgc

SEQ ID NO: 128745 - DNA, 122 bp, Homo sapiens
agctggcccagggcctgaggccctgtgcttccccgcacccctggcccagcctgatggcagcggccttctggccttcagcatgcaggacagcagccccccaggcctggacctggacagcagcc

SEQ ID NO: 128746 - DNA, 122 bp, Homo sapiens
tttcatttttttcctatggtcttcttagagttgtttccacgttaaagtaggaagaagtaacgaaaaaaaagtgagatttgccgaaagcaaatgaaacttgttttgcctggttctctggaagg

SEQ ID NO: 128747 - DNA, 122 bp, Homo sapiens
gtagaagtttctcgaagatcatgactggattttggcttagtctatagttcccacagcatgcgacagtcagaattaaatttcagttctgaatagaaatagaaagttttggtaacagtatcatg

SEQ ID NO: 128748 - DNA, 122 bp, Homo sapiens
tcttttccctagactgcagccagcggagcccgcagccggcccgagccaggaacccaggtccggagcctcaacttcaggatgttgacaacattgctgccgatactgctgctgtctggctgggc

SEQ ID NO: 128749 - DNA, 122 bp, Homo sapiens
ggggctcactctgtcatccaggcagaagcacagtggttcaatcatggctcacagaagcctcgacctccttgggctcaggtgatcctcccaactcagcctcccaagtagctgggaccacaggc

SEQ ID NO: 128750 - DNA, 122 bp, Homo sapiens
ctgtcttgtttcctggggtacacgggcacacgctacttgtgggggcttgctcctttgggacgatatacatgacctggtttgaaagtgaatggaaacaccactgtcctctttagcgaatagct

SEQ ID NO: 128751 - DNA, 122 bp, Homo sapiens
aggaaaattcgattctacttgagtacctccgagatccctggagtctcacttatctaagcacgtcgcctctcctcgtgtttcctcccagcatgcactttgtggctgcctttctttctcttttc

SEQ ID NO: 128752 - DNA, 122 bp, Homo sapiens
gatcttagctggtttgcttggtccaattcctgtctctcggtttcttttttcccttcccttcgctgccttcccctccctcttccctttttctttccaagagaattgagtcactccatataaaa

SEQ ID NO: 128753 - DNA, 122 bp, Homo sapiens
ctcactgcccatggcggtggggctggctggctgctctaagtgcggggcctgccgagcccacgccaaccccgaactcgtgctgccccacaagcgctgcgtgcagctgcggtttctgcccgcgc

SEQ ID NO: 128754 - DNA, 122 bp, Homo sapiens
caaacgccgccctctggtggtggagctggtgaactgcgcccaggtccataggcgggcccacgcttgagtgttccaaacgggagaagaaaaaagtaccatttaataccgaagcgaaaacaagt

SEQ ID NO: 128755 - DNA, 122 bp, Homo sapiens
ggatgatctacaagatctattggcagtaaaatagatctaataatcccaatcccaactgcgcgtgaattccctttttctttgcattgctgggttcagactttctgaccaccttaccagtgggg

SEQ ID NO: 128756 - DNA, 122 bp, Homo sapiens
ggggtccaagttttctccgttgcctttgtaatatgtagtccaagccagaacagtcaggaccgcaggtaccggtgagaaatggagtccagaatcctaaaaacctacgagaaatacggcagcga

SEQ ID NO: 128757 - DNA, 122 bp, Homo sapiens
cggcagaagcccaggccgaagccgggcgggaagcgggcgagggtgcagttgcggcggtggcggcggccttggcccccagcggcttcctcggcctcccggcgcccttcagcgaggaaggtaac

SEQ ID NO: 128758 - DNA, 122 bp, Homo sapiens
cggcgaccgacgcggcgaaggagcgcgccatggagcatgtgacagagggctcctgggagtcgctgcctgtgccgctgcacccgcaggtgctgggcgcgctgcgggagctgggcttcccgtac

SEQ ID NO: 128759 - DNA, 122 bp, Homo sapiens
ctccgagagttccggtgggttggagcctttcagcagccgccttcagactgtttgggaggccgaaaagcgggaggggaggtgaaacaccggaataaatgcccctacgaccgctcttctcaagg

SEQ ID NO: 128760 - DNA, 122 bp, Homo sapiens
gcctagggggatctcaaaatgaggtttcctgtctcagcaataattcctaagccacactaacgaaccagaacactagttggcgaacactagcaaaaccaaagggagcacatgagctgggacac

SEQ ID NO: 128761 - DNA, 122 bp, Homo sapiens
ttttctctccctttctcccttcacagcaaatattccaagatcattatttcagtaccttctcgtttcccctctaaatctatacataaaatgttttgcagaacgtacaacaacggtaggaattt

SEQ ID NO: 128762 - DNA, 122 bp, Homo sapiens
ccgtcggttcccttcttggtctagcagagccttcagctccttgatctgctcagccaactccgggttcaagtcaaactccgctgggaaggcggagatccagtacctggaggagcggggagtca

SEQ ID NO: 128763 - DNA, 122 bp, Homo sapiens
ggcacgaaggcagggacggggcggcaacgacggcgagacaaagccagggaacacctcagacggcgacgactaaccgaccctagcgcctgcagcccgcggcccagcggactcttataggccgc

SEQ ID NO: 128764 - DNA, 122 bp, Homo sapiens
cagtgagaacaggcggcccctggaggcaggcagccccgggcaggacctcgaacccgcctgcgatggggcgagaaaggtcccactgcagccctccaagcaggtgagcaggtccctccccgacc

SEQ ID NO: 128765 - DNA, 122 bp, Homo sapiens
ggaaatccctggcaatgtgatttgtgacaggaagcaaatcccatccccaggaaccccagccggccgtggcacaggggtgaggggggcaccgggcggggccagaggctggcacctggagggga

SEQ ID NO: 128766 - DNA, 122 bp, Homo sapiens
tctggccctctgcccgggctggggtgattcacggggattcgtagtggccccaaaggagcacgcagaacctcggctgctgtgcatttatcacctcttttgttcccggaggccgcaccccaggt

SEQ ID NO: 128767 - DNA, 122 bp, Homo sapiens
tgagctccgcctcccgtcacagcattaccgtgtgagctccgcctcccgtcacagcattaccgtgtgagctccgcctccccgcagagcattaccgtgtgagctccgcctcccggcagagcatt

SEQ ID NO: 128768 - DNA, 122 bp, Homo sapiens
tcaggcaatgaggggctgtctgaagcacaactggaacccctcacaaaggccatgtctgtccgaaacttcatgctggtgggtggctggcggcggagcagtgactccgtctggtcttggggtag

SEQ ID NO: 128769 - DNA, 122 bp, Homo sapiens
ggtaaattgcagagttggtggtcaaatagacctggattagaattctgactccatttccatcgaactgtgtgtccttgaggaagttgtttaatgtctctgattttcactttccacactaagaa

SEQ ID NO: 128770 - DNA, 122 bp, Homo sapiens
gtgttcactctacgatgccaacggcgccaggttttggttggtgcaaaccttcggcctccacgacacatgtttccaaaagcaccctggccagagcggtgagtcccaccacctcgaactctggg

SEQ ID NO: 128771 - DNA, 122 bp, Homo sapiens
ggaggggcagaaaccaagtgctctagcctcagccctaaattagccccttcccttcttgctcgcccctctcagacaacatagctgtgtggctgcccttcctgggccctgcctctccatgcctg

SEQ ID NO: 128772 - DNA, 122 bp, Homo sapiens
cactgcaagcttgggaggagtagtttcttaaccgctttcggccattggtcgcagggctaccggcctacagtcccagcaagcgccgggctcgggggtggtgcgcagcctcagagggaggagct

SEQ ID NO: 128773 - DNA, 122 bp, Homo sapiens
cttttgtttgggttttccagaagctttactgttataaagcaccatgctttgtaacagcatcggggtcgttgcaggaccccctgattacaataaagcgagaaagaagaactcctgacttaaaa

SEQ ID NO: 128774 - DNA, 122 bp, Homo sapiens
atacatttcattttacctccaggaaattcccaagaattcagaatgcctactttgtgttgacggttttctctggagttgcaaacactgagagtgaaatcagtttcgaaaaccatgcttcaaat

SEQ ID NO: 128775 - DNA, 122 bp, Homo sapiens
atccctggccacgtccacctttggatgcttcttgccgtcacacagtcccacacccagctgcgcaactgagcactcacagtgtttagaatcctgcagccgctggccccaggctttgactccac

SEQ ID NO: 128776 - DNA, 122 bp, Homo sapiens
ttgagcactttctaagtgctgatactgttctagtgcataatgcttattatctcagtcaatcgtcagagcagccaagcaagataagtgaggaggaaacaggcctaaaaacttaccaagacctc

SEQ ID NO: 128777 - DNA, 122 bp, Homo sapiens
cggcattttgcttagtaaataatgaaataatagtttctgcctccaccagtccaccaatcccgtttcattaggatgtctgaagattgctctgttgattatggaatttagttatgcaggtcttt

SEQ ID NO: 128778 - DNA, 122 bp, Homo sapiens
ccaggttatggctgagagatacaagatgctgatcccattcagcaaccccagggtgcttcccgggcccttctcatacacggtggtgctgtatggtcctgcaggccttgggaaaaccacgctgg

SEQ ID NO: 128779 - DNA, 122 bp, Homo sapiens
caacactaaccatcccgtggtcatacatgggcatacagtggactggcggagcccagcaggcgcccggctgagagcttccctgaccttgtcccgtgaagcccagaagttcgccttggccaggg

SEQ ID NO: 128780 - DNA, 122 bp, Homo sapiens
ccccactctaagggctaccatttgtggagagacacaggcctcatctcttagggagccccacggggaggcacaggtcctgccctcaggtcttttttaaagcagagtctccctggcctaaggtc

SEQ ID NO: 128781 - DNA, 122 bp, Homo sapiens
gccaccccctgctccacggagcccagtcccatcaaccacccaagggccgaggagtgtgggcgtgcggcgcgggactggcacgcagctccacctgcagccccggtgcgggatccactgggtga

SEQ ID NO: 128782 - DNA, 122 bp, Homo sapiens
gctccccgcctttggcggctgcgcccgggggcccggcggtccctctcaggtaaaaggaggcgcgcagtcacagtcctgcgccggtctagcgagctagggaattttcgcttgaggtttgggtc

SEQ ID NO: 128783 - DNA, 122 bp, Homo sapiens
cgccacagggtcctaaagcccgccagcccatctttccgacccggacctgggtcctagcgccgctgtgcctcctgcaactctggccaccttgcccacctggcagctccctctgcacccgcatc

SEQ ID NO: 128784 - DNA, 122 bp, Homo sapiens
cggtggggaaggctggcgcagagcgcagagatggacgcgcagagctgcagccctagcagacgctccgagtgtgtgctgctccgctcctccaggctcatttccatgaatgcagtcacagccag

SEQ ID NO: 128785 - DNA, 122 bp, Homo sapiens
gttttataagtctccattgaagaagggaatatggacaaaattattcattttcaattacaacgtcaccaaacgtatgtctagttatttaggattattttaatcagtactctttgtaagctatc

SEQ ID NO: 128786 - DNA, 122 bp, Homo sapiens
tctccccctctgcggcgtggtgcgcatgcgaggcgggaggaggccttaggcgagaggttgcgcatgcccagagggcagcgtccactgcccctaccgctcacatgcagaactcgacgctgatt

SEQ ID NO: 128787 - DNA, 122 bp, Homo sapiens
agatgcgctgccccggccgcagcccagccgccgcgtgtgttgtcaggacgatcggaaacgcgtgtgtggggagatgggtgccagtgtcgccttgtccattatccaaaacccagtcgcttttg

SEQ ID NO: 128788 - DNA, 122 bp, Homo sapiens
tccgcgccctcccctctcctttctccctctcagaaccttcctgccgtcgcgtttgcacctcgctgctccagcctctggggcgcattccaaccttccagcctgcgacctgcggagaaaaaaaa

SEQ ID NO: 128789 - DNA, 122 bp, Homo sapiens
ctgaagttcccaggagaggcaaaaaatgaggctgatgaaggtggaagagcctggatcatgcggatctttgaatgccaaactgaaaagctggttttattctctggatgacggggaaccagtag

SEQ ID NO: 128790 - DNA, 122 bp, Homo sapiens
cagccacccagggtggtgtcaaagccttagagcagaaatgcatcaatattgaaagcaaaacggagcttgttttccttggtttccatgtgaatttgaagaattgagagagaatgaaagtgcca

SEQ ID NO: 128791 - DNA, 122 bp, Homo sapiens
gtgccttggtctgggagcaagaaacacgacaaaggaagaaagactgtttgagtcccctctcggtaatgttttaatggcagagtcttacacttgggaagtttcttcagatggttagttttgat

SEQ ID NO: 128792 - DNA, 122 bp, Homo sapiens
gccgcaaccgcagctgcgccgcggagctgccgctggtgccgtgcaaccaggccaaggcgtcggacgtgcaggacctcctgaaggatctgaaggctcagtcgcaggtctgccgctggcgctgg

SEQ ID NO: 128793 - DNA, 122 bp, Homo sapiens
ccctttccattcctttccccaaccttagggcacccactgggagtgaagcgctagctgatacgtaacaccatctctccatttcccttccctgacccagggtcctggggacccccaggccactt

SEQ ID NO: 128794 - DNA, 122 bp, Homo sapiens
tttagaaagtccttggaaacagttcttatctcagatatggaagtgcgagcctctccttcacgccttcccagccctattttgtctaagtctgacaaaagtgattttatcctggtatctgcaac

SEQ ID NO: 128795 - DNA, 122 bp, Homo sapiens
tcacggagatgatgcactgagccatggcatccctaggtggtttgattcatttctgcaccccggtgtctagcaaagtgccacgtgcatgtgtttaatcaaaatagcttgtggttgtcaagctc

SEQ ID NO: 128796 - DNA, 122 bp, Homo sapiens
cgggtcctgagaggcaaggccagcgattcccggccttaggacctcctgctctagggagcacgggcgtcttcttccatttgccttccccgagcgtgttggcacaagctgcccgcggtttccag

SEQ ID NO: 128797 - DNA, 122 bp, Homo sapiens
ctcgcgctcaagttcgagaacgcggccgccgggtgagcgcgcgcccggggccgggggtggcgggggaagcagagttgaccccagctaatccccaatgttgtccagtcccccagacctggagg

SEQ ID NO: 128798 - DNA, 122 bp, Homo sapiens
tccatctccaagaaaaaaagacaaataatggagcaggaaggggctggccagacacatcatcggtgccaaggacaccagaaccatttgtatataagcagaaggaaatggcctgggccaaagca

SEQ ID NO: 128799 - DNA, 122 bp, Homo sapiens
agcgagactccgtctcaaaaacaaccaaagcaccaaaacttctggttaatttaattgattcgtcggattcagatgctggaaagtgggcctgggatatacagtaagcgatcaataataacact

SEQ ID NO: 128800 - DNA, 122 bp, Homo sapiens
ataattaaaaagttatgaccatttcagaaaactaggctttatggaagtaactttaaagtacgtggttttataaataagcatttgtaggaggctgagacaggagaatcgcttgaacctgggag

SEQ ID NO: 128801 - DNA, 122 bp, Homo sapiens
ctctcagggaagtgaccaccactacgctctcagctccgcaagtcgctggacagtcaatagcgctcacacggtgtctaccggatctggcacggtcaagacacaggaacagccgtactttcctg

SEQ ID NO: 128802 - DNA, 122 bp, Homo sapiens
ggattatcttttattttatgtcacgcagacagcaactcttcccagccctgtggaggaggccggaggttggggccggagccctggaagcagggccttgctcgggcagcttctgaccctcccct

SEQ ID NO: 128803 - DNA, 122 bp, Homo sapiens
gagcagccacctgcccagcagggttggagccctgcacggcgtcctctatgtgctggagtgcgacctgctggacgacactgccaagcagctcatcccggtcatcagcgactatctcctctcca

SEQ ID NO: 128804 - DNA, 122 bp, Homo sapiens
acatagagtgtttagacatagacacagataaagggttctttgaagacctttgatcgtttgcgggaaaagcttctagaacctagacatgtgtatgtataataatagagatgacatgaaatcgt

SEQ ID NO: 128805 - DNA, 122 bp, Homo sapiens
ctttctcacccggaggggtccaaagtcggatctcaagaggagttctgggaccccagcaggcgcccagaagctccacctccaccccggaagtcggcttaaggaggtcctcaagaccggactcc

SEQ ID NO: 128806 - DNA, 122 bp, Homo sapiens
tctctcttgtcttctggcccccagccctcggcctggcggtgcaaaccgcgcagccccgggcgcggcgcgttaccttcccccgggcaaggcgttgcgagccttcactctcccgacggacgctg

SEQ ID NO: 128807 - DNA, 122 bp, Homo sapiens
ccctggcccctgtggcgagctggcggcttcaggtgtcacaggccggctgctccaggccttcgagggggagctggctcctgtggggggagttggggctcggtgggccgctggggttggagcta

SEQ ID NO: 128808 - DNA, 122 bp, Homo sapiens
atgagatccagctcgccgctggagggaacagctctggcctcccagtgacgctgatatagacgcgaggctggagtgatttttttgataatcctgctagagacagaatgggtaaggatgggtaa

SEQ ID NO: 128809 - DNA, 122 bp, Homo sapiens
gggcgagctcagctggggaggagggatccagccgctactcgccctgctttaaatccagagcggtatcagagcccgaaggtactgtgggatcttcaggggcaccctcatccctaagcgcctgg

SEQ ID NO: 128810 - DNA, 122 bp, Homo sapiens
cgctaggagccccgggagagcgaggcctacaccgcccggccggagccccggcctcgatttcgccactttccccaaaccagagggagagcccgggggcaaccaggcccgtctgggcgagaggg

SEQ ID NO: 128811 - DNA, 122 bp, Homo sapiens
caggcccttgaaaagaaggtaacgtagagtgggtattccccgtattgattaagaatgggacggacttaccctccaccctaagagttacccgaagctcggcatccgcgattgtctaaggggcc

SEQ ID NO: 128812 - DNA, 122 bp, Homo sapiens
ccccggataaacggctttgttcaaagaggaccagagatcacccagggttgtgaaaatggccgggggttcgaggcgagcggtgctctaggggtgggaaaggggtgcgatcaggaacgggaaac

SEQ ID NO: 128813 - DNA, 122 bp, Homo sapiens
atgagtggacagtaagtggtggctctgcagatggcccctttctaataagtttaataaacccgaaattactggttatctcgtctccaatcagttctttcaaatgttttatttttccagtaatt

SEQ ID NO: 128814 - DNA, 122 bp, Homo sapiens
aagatagaactccaactctttgccctctagcacatagccatctgctcggccacactgtcccggccttgaagccatgcacgcaagaagcttgccctgctggaactgctcccccaggagactgc

SEQ ID NO: 128815 - DNA, 122 bp, Homo sapiens
tatcggttaccataagaatataaacaatgtattttcagtttacatcctcccctgcctgtccgctaaataagaaccactgggtactcctaatcgctgaaggtttcgcacaccattgcctgcct

SEQ ID NO: 128816 - DNA, 122 bp, Homo sapiens
ctttattctactctcacccgaggcccgcgcccgtcccggggagcggctctgccaggaaaacggcccgaccagtgcccggcgcctgggctgcgtccgagcccaccttcttccctcgtcgtcgt

SEQ ID NO: 128817 - DNA, 122 bp, Homo sapiens
actgagagcgttagactcaaggtgcctggcactgactcaggctccagggcaccccctccccgggatgccccacacgaagcacccgtccctagaaggtggccccaggttcgtggtcccatctt

SEQ ID NO: 128818 - DNA, 122 bp, Homo sapiens
aatccaagtgttacaccatccagttgaagatgacagatttacgatataaaacggcacccgcgactgaggactttgtaggaatggaggccgctgtcattatttcatgggtgagggggagaggg

SEQ ID NO: 128819 - DNA, 122 bp, Homo sapiens
cttcccccgtcacgggagccgcagagttgcaagaccctggggaatggaggctttgttgttcggtgggtcccacttcatcggggtaggcggcaaggccagcgggctgcagcgtgtgcctcgga

SEQ ID NO: 128820 - DNA, 122 bp, Homo sapiens
acaaaaccttagaacaggcaagtcaaaatgtcaccaaaaggtgggaagaagaggcattcacggtactggttgagtgcatagtaaataaggtacttgcacaactatgggcaacaaagagacgg

SEQ ID NO: 128821 - DNA, 122 bp, Homo sapiens
caatatttaggtttagaggaaacctgttaagtaacatttcctcaatctccccagatttaccgttctgttcttaacctttgtaaattgatgccccagtaagtggtcccatccttcaatcaagc

SEQ ID NO: 128822 - DNA, 122 bp, Homo sapiens
gaaagcacatcaggaagaggacatttcaggcaaaagaaatggttgaggcaagagggagctcgctgtgtgtgtgcctgcattgtacaaaaactgcccccagtgcaggggaggattcacacttt

SEQ ID NO: 128823 - DNA, 122 bp, Homo sapiens
ccgcggaggaatgcaaagaacacaggaagtcagtactcccagaaacagtctttgctggcgcgctcacacccaaccccatcccgcccccgtcccgtcccgccccgccccaccccaccctcttg

SEQ ID NO: 128824 - DNA, 122 bp, Homo sapiens
cgcgggtggcagcgccgcaaaagggaggacataattgggctctgtgcttggagccggcagcgcaagccgcctctagtccgggacaacaatagtagcactgattcttttaaacgtaattaatg

SEQ ID NO: 128825 - DNA, 122 bp, Homo sapiens
gctaagcacggcccagggtcctcccacagagtaggaactcccccgggctggctcagcagccgtctgagatactgagtgcacaccaatcactgtcttccaggttctgggtaccactccagccc

SEQ ID NO: 128826 - DNA, 122 bp, Homo sapiens
ggtctctgactcccctccgcacctgcttagcagtgccagccagtgtgagctgttctacagcgtgtcccgcatgcacagtgatgaccaggaaacggtggaggtcaaccatccatccccagaag

SEQ ID NO: 128827 - DNA, 122 bp, Homo sapiens
cggaatttccctccggaagatgaaggcactgtagttatgcgggtggaccctatcagatctcgggtccatcgggtcctgtgtacaccttgagggacgcccacccaacgcgcatgcgcagcctc

SEQ ID NO: 128828 - DNA, 122 bp, Homo sapiens
gggtggaaacgtagcagaggattcctctgggccggtgatttttgacccagcttctttctacggccactcggaatatgagctggcaatagctggcatgtttgggggctttagcagctcctttt

SEQ ID NO: 128829 - DNA, 122 bp, Homo sapiens
atgggcctcactggctcttctgatgccctgccacccccaccccagactggctttgagccccggaaaccttgacagctttctagaggtgtctgtcagttaggttgtgccacgcgaagttgccg

SEQ ID NO: 128830 - DNA, 122 bp, Homo sapiens
cacacacatacgggcaccaagtagatccacaaacagcaaaccgcaggggatgcggcctctcgaaaaacaggctttgaataataactgctgcgaattatgcctggcaaggggtaaggggagct

SEQ ID NO: 128831 - DNA, 122 bp, Homo sapiens
gaataatgaactgttaactggttctcatattttttttcctcatcttaccacatcttcttacgtaagaaagctgtggaagacaaccatttttcaggttaacattgaaaggaaaaaatactagg

SEQ ID NO: 128832 - DNA, 122 bp, Homo sapiens
acagccggagctggaggaggcggcgcggcagcgggctccagtgcctatcccgcagtgtgtcgggtgaagatacccgcggccctgcctgtggcagccgccccctatcctgggctggtggagac

SEQ ID NO: 128833 - DNA, 122 bp, Homo sapiens
aaggcacggaaaatctattcacccaagcccagggtaagtgatggtggatgcccactccaccgggcatcttgcttaaagggggctgcccataggtccctggagaggggcttggtccagaacac

SEQ ID NO: 128834 - DNA, 122 bp, Homo sapiens
tggggaaaagggtgtcctcactgtattccaacactcctcttcagtgacaaattcctgaaacggaaaagtaaaaatggatgcacgtgtagaacttagggaaggtgtgttagctaattaaccta

SEQ ID NO: 128835 - DNA, 122 bp, Homo sapiens
ggttacctttgccacttcatccaatccgagcatcgggtgcgtcgtgctcttttctaggagcgtggggtgccttcgcgaataaaatctgaaggcatctctgctctcgcggagcttgttctttc

SEQ ID NO: 128836 - DNA, 122 bp, Homo sapiens
agcggccaagcccggcggaacacagctccagcctagcaatttagcacgattaactgaagccgcagccccagtcaatataatagtgggcgcattatcagttttgccacaaaccattattcatt

SEQ ID NO: 128837 - DNA, 122 bp, Homo sapiens
caggagtgttaacgtgtgaagacgtgattccgcttggagtgtcttgaggacggccccaatcggtagttcatatttagctttacagataggagtcaataggattgtaaacttctggaaagccg

SEQ ID NO: 128838 - DNA, 122 bp, Homo sapiens
atgctgaggcaggataacggtgtgaactcgggaggcggagcttgcagtgagctgagatcgcgccactgcactccagcctgggctacacaggcagactccgtctcaaaaaaaaaaaaaaaaaa

SEQ ID NO: 128839 - DNA, 122 bp, Homo sapiens
gcccatggcaggagatgggggtgaaggaacagtaagaccaggagacagtcagatacacatcggatcagtggtatcctcacagtaacagaaacggtcacccccaatgtcagccacagtctctt

SEQ ID NO: 128840 - DNA, 122 bp, Homo sapiens
ctctggcatcggagccctacccggcccggctctgggcgccttggcccggcctcgtgcgtccgcggtccctactacccagcgccttcccccggcgtgccccgggctgcttgcgctgttaaggc

SEQ ID NO: 128841 - DNA, 122 bp, Homo sapiens
ggatgtggaagtaggaagatgcgttcgccgttttggtgggactcagtgtgtctggtcttacgaggtaagcatggagctgtgatgaaaatgttcacatagtacatatacatgccattttataa

SEQ ID NO: 128842 - DNA, 122 bp, Homo sapiens
actcggccccgcccgaagctccggatcctggggcccgaccatggccccgagtcggcagaccgtggactcgctcctgggcctgcctcaaaccctccgcaggtaacgcctcccgaacttgagcc

SEQ ID NO: 128843 - DNA, 122 bp, Homo sapiens
caaacggattggagactcaccccgcattctaggccggagaagcgggcgggcttgggatgccggcaggaggcaatgactctccccaggcgctgcatcctggctccggggcacaagcgcctctc

SEQ ID NO: 128844 - DNA, 122 bp, Homo sapiens
gcggtgggcggagaggcagaattaggggagtctccaggaggcgtggtgattggccgccgccgggcggaagggggcgtggggagggaaaggccgagcagcgcggtgacgtctcgctggcgggg

SEQ ID NO: 128845 - DNA, 122 bp, Homo sapiens
tggggtagaattgatggttgacctgaccaccctgtttccaacatgaacatgctgatattccgatatttattcttcccatccctttctcaggtcattatttcacccctccccatcttcagatg

SEQ ID NO: 128846 - DNA, 122 bp, Homo sapiens
agtcacagagactgagacaaacggatgccgagatccagagggtcggagaacaggcaaactcggagcagtagaccggcccgcgccccgggaacgcggccacagcggccggcgctctgcccggc

SEQ ID NO: 128847 - DNA, 122 bp, Homo sapiens
atggatccacccaaggctactgtatcagagcaaccagcaaggccgcgatgctgggggcggcggcccggcccactcggcgcgagcccacgtgtccttctttccgaacgcccccagcaaggtca

SEQ ID NO: 128848 - DNA, 122 bp, Homo sapiens
gagatcagcaggggtcattttagaaacagctcaagatggctatctggggtgaggggaaggcgacctctgtgaaaagaggaaaaaggcatatctggacctgagttaccaacaacaggatattt

SEQ ID NO: 128849 - DNA, 122 bp, Homo sapiens
ggctgaagagtgtgagaagctagacctctgcaggttaccgaagtcaagaacctcattaatcggtaacaagaagtgcagagcgggcttttgagtccatgcctgagtaagaaagtcccaaaaaa

SEQ ID NO: 128850 - DNA, 122 bp, Homo sapiens
gggaagcgcaggagcgatcagattgaccgctgctatatggacaaggttaagcctggagagcgactgcagctatttactttggagttagaggaagacagatcttgcctgaaattttagagcca

SEQ ID NO: 128851 - DNA, 122 bp, Homo sapiens
gagcatgtcctgtgctatcatatgcggatgacaaaatagccgaatacacaaatctttccacgcttgtgctgaaagatgtaaccatcaagcgccaggcggttgccatgggaacccggggctgt

SEQ ID NO: 128852 - DNA, 122 bp, Homo sapiens
ggcctcccaggaaagaggctgtggtagggcaacgagggccacggcccgaaggccacatggcgtggtgccattgggccaggctttctgcttggaggccgagggcagggcgcgaagcacgctga

SEQ ID NO: 128853 - DNA, 122 bp, Homo sapiens
cagtcgggatgggagaagggtgtcagggccactggcccccagctcggcagagggcagtgtcgggccgcgcgcaggcagggagtgggtgtggtgtgaggctggcgctggagcggtctgggaat

SEQ ID NO: 128854 - DNA, 122 bp, Homo sapiens
ggatctggagcagctccagaccattgtgtccagcgggcaggccttcagtgcgggaaggggcggcctcgaggctcccctcccccagcccccacatctggtgggctggccccagcatagctggg

SEQ ID NO: 128855 - DNA, 122 bp, Homo sapiens
acacggtagtcgatccgctgtcctccggaagacggtcacccttcgggaacctgaaaatttcgtctttgcaggtggcggcttccctacaggccagccgtccttccgggggagcccggagtgag

SEQ ID NO: 128856 - DNA, 122 bp, Homo sapiens
tttgaattttcaagtgtgaactttggtgattactcttgtccaaatgcagcttcctgccctcgtggaaaaaaaaagtctccagagacatttggacatctattgcaaaagatatttggacacct

SEQ ID NO: 128857 - DNA, 122 bp, Homo sapiens
ctctctcatcctcagcccttgcaagcctggtgctcactggggcagaacaggaggttaaggcggcacccctggttccaacccagagcctctgcgtctagcgctggccctgggtggcgtctgca

SEQ ID NO: 128858 - DNA, 122 bp, Homo sapiens
catctccgcccaccaggagccaggccagcagggaccgcgagggggcggccaggttattcacgggagtggggagaccccttaaagcgccctcagggaccggccacagtgggcggggccacccc

SEQ ID NO: 128859 - DNA, 122 bp, Homo sapiens
gccgagtgcgtggagggagccaggctccggctcgcctgatggattgacttggagatggatcgaattacaccatttgccgtgcatcggtttgttttgctcctgctctgtcccgctgctgctgc

SEQ ID NO: 128860 - DNA, 122 bp, Homo sapiens
ctgtcccattgttgcagaaacatccaactgattgcactttttcttcttctctcgtcaactcgtaactcctatctcaagttcacccacaggtctagtgactccggctggctgctgcggggcga

SEQ ID NO: 128861 - DNA, 122 bp, Homo sapiens
gtcttggtctggcagagttgttctgcagctacaacaaatacctttcagacccctgtcagtcgctctgttttctcagaatggtgtctgaacatgtgtaacctcccctagtctctgtaaggcaa

SEQ ID NO: 128862 - DNA, 122 bp, Homo sapiens
tctctcggccgtttgcacctcattagctggagtctctattaggccccgcccccatttgcccgcctctaccatttacccgcccagcctggagcgtccgggccggcaagtccagcgccggggcc

SEQ ID NO: 128863 - DNA, 122 bp, Homo sapiens
agttcaagaccagtctggctaacatggcgaaaccccgtctctactaaaaatacaaaaattcgccgggcatggtggcacatgcctgtaatccgagctactagggagactgaggcagaacaatc

SEQ ID NO: 128864 - DNA, 122 bp, Homo sapiens
cggagcggggagctgcccctcacaagcatggcgtcagctgaaaatgaagcctgtgctgtgcggagcgtcgcctgcccctcacaagcatggcgtctgcagaaggtgctgtgcggccgctgcgg

SEQ ID NO: 128865 - DNA, 122 bp, Homo sapiens
aatattcctaggaatagtcggcagcggcagcagccgcagcagccgcggatctagagcaaacgtcctgtgctttggagttagaaccagtcttttccctcctgggctgggcacggggtcagggc

SEQ ID NO: 128866 - DNA, 122 bp, Homo sapiens
gccgcctggccaagacctgtgtggccagaggcccgtgcttggtttgctgccctctgtcaccgtcttgaaatactttgcaattctcagcgaggggcctgccgtcgccttttccactttgctta

SEQ ID NO: 128867 - DNA, 122 bp, Homo sapiens
cacagtgacaatcagcctaacggtggccgtgccatttttcactccgagcagctgtgatggcgcccccatcgcccgcatcctcagcagcgccaggtggcgtccgtgttcccgcgtcctcggca

SEQ ID NO: 128868 - DNA, 122 bp, Homo sapiens
tcattggaacaagccttgctcggtcgtcagtgtggatgttcctgggtcccctagaacactcgaaatctccccaaaaataccagagagtagcggtgggtgccctgccccttgctgtacccctc

SEQ ID NO: 128869 - DNA, 122 bp, Homo sapiens
aggctgtggagcaggcggttcctggcatcctacccacctccctcctccctccctgcaccacggctaaaaggaaccacagagcagctcaaaaaccgagaagggagtgaagaacagcctcgaaa

SEQ ID NO: 128870 - DNA, 122 bp, Homo sapiens
ctggctggccccacggacccttctgaattaccttgaacatgtcgctggcaactgcagctccggcaggctcaccccagcctcgtccacgcccacaacagagaggtggccccggtagggccttg

SEQ ID NO: 128871 - DNA, 122 bp, Homo sapiens
ctcacctgacagaggtgtgtctggcaacgtctggacgcacctgggacccagagcagccagcgggaggctttcgggccccctcagcaagaggaagtgcatttgaacacctggaaacaaaatgc

SEQ ID NO: 128872 - DNA, 122 bp, Homo sapiens
tctcgccagagttctggtcccggctgaatgagaggcgaggccgtgctctgcaagagatctcgtttttctgcctcaccatggtgtaaggaagccaccaggaattaaaaatggcaccaccatca

SEQ ID NO: 128873 - DNA, 122 bp, Homo sapiens
agaattcattataaccggttagtcatccgtagaggctgtagacactgcccgcgggcggggcgcacctggcgctcctggagaggggcctgttccttgcgttgccccccaaggtgggagcgcga

SEQ ID NO: 128874 - DNA, 122 bp, Homo sapiens
tgcgcggctactacaaccagagcgaggccagtgagtaactccggcccagggagcagatcacgacccccacctccatgccccacggacggcccgggtactcccgagtctccgggtctgggatc

SEQ ID NO: 128875 - DNA, 122 bp, Homo sapiens
tgacctcagtgccattgacagccagtaccgcatctccaatctggagcccggctttcttggcggcactgtctgtgagtagacagacaacaacagtctcattgagggagggtcccaaatggagt

SEQ ID NO: 128876 - DNA, 122 bp, Homo sapiens
ggatctctgaggattcatcccacccccattcccatgcagaggccatggctcggcgcctggcgttcccgaggcactttgtaccatcttcagtgatgacacgaatgcaatggggttagtgccac

SEQ ID NO: 128877 - DNA, 122 bp, Homo sapiens
ccatttgttttaatgtttcccttcctcaaatgaagacatgttgccgattacagctcctgtcgcagcacagcaaaaggctttgtgtaaattttctaaaatgtacggacaactaaatcataaca

SEQ ID NO: 128878 - DNA, 122 bp, Homo sapiens
agaagtgaaatcgtttttagatttttcgacttcattttgtactgcatttggtagcctttgcgtcaattttggaatttaaaaaaaaggatcaaggctctgacagggtttgttcataatagcaa

SEQ ID NO: 128879 - DNA, 122 bp, Homo sapiens
cccggagcgcaggcgtaacccgacggcgctcagcccccgcctgcgcctgcacggagcatgcgcacaaccagctccgccccgcgccgggctctagctgtttccctcaggcggcctgttccacg

SEQ ID NO: 128880 - DNA, 122 bp, Homo sapiens
tttactctgcataatcaccacccgtgaggtagctacttttgttagcttcatttacatatacggaaatgtcattctgaaagggtaactgaccctactaataaatggcagaaccaggattacct

SEQ ID NO: 128881 - DNA, 122 bp, Homo sapiens
ctgccctggccctgtgctcaccccatcaggcctcctcttccgcctctctggcacccacggcgcccctgcttgcctctgtccgggtctcggaggcgcgaacaccatcccaagcctgcgaccgc

SEQ ID NO: 128882 - DNA, 122 bp, Homo sapiens
gccagccgcgcccaggctcgtctgcagaacccttgcactccctacccccacccacctagccgccgggaccatgtccaaaccttcagaccacatcaagcggcccatgaacgccttcatggtat

SEQ ID NO: 128883 - DNA, 122 bp, Homo sapiens
aaatccacaacgggcggagcccatagccggactcctggctgggcccttcatggggcgggacgcctggaatctcgaggggcgggggcctggcgcaggctcccgcccggggttcccgagctgct

SEQ ID NO: 128884 - DNA, 122 bp, Homo sapiens
gggctacgctaatgaggctactgcataatcatgagctctggcaaggagggctcgcgtctccggacacttaaggagggggacgggccaaagaaagggaggagctatgttaataagggaaaggg

SEQ ID NO: 128885 - DNA, 122 bp, Homo sapiens
actagctgcacatctgaatcacgaaacagtaacaggttcctccgtgcctgcagcaacttgcgttcaggagggcgggaggtcgaagcctctgtgtttttgatatgcatttgggaaccgctggg

SEQ ID NO: 128886 - DNA, 122 bp, Homo sapiens
ttgcctgacagtaaactgtgcccagtttctcttgcttaattaccccaggggtgcagagttcgatgaaatcttctttttctgttttcacttggggcagtgttacattactggggcttgacaaa

SEQ ID NO: 128887 - DNA, 122 bp, Homo sapiens
cagactgttggattcagactgttagtgccatttccccccagcgtggacaactgcacagtgcgaacttgctgactttccttagctgctcctgcagaatggggtttaaaacaatgcatcaccag

SEQ ID NO: 128888 - DNA, 122 bp, Homo sapiens
gccggcgttgctcaagctggcctgcggaggcgacggagacactaccgagaaccagatgttcgccgcccgcgtggtcatcctgctgctgccgtttgccgtcatcctggcctcctacggtgccg

SEQ ID NO: 128889 - DNA, 122 bp, Homo sapiens
gtcaccgcggcccgggtcacctcacccatggggctccccaagaaggtgctgtgtggggctcgagttctctctgcccgggctctgctcaaacggtcgcattccctctccctcaggcaccgacc

SEQ ID NO: 128890 - DNA, 122 bp, Homo sapiens
cccagactgtgtcctccatcaccgcagggtcggtgaggggctgggctggacaccagggcccgccctcccatcactgagctccactccttcctcattttgctgctgattctagccccaaacaa

SEQ ID NO: 128891 - DNA, 122 bp, Homo sapiens
tgagactccgtgggcgtaggaccctccgagctaggtgcgggatataatctcgtggtgtgccgttttttaagccggtccgaaaagcgcaatattcgggtgggagtgacccgattttccaggtg

SEQ ID NO: 128892 - DNA, 122 bp, Homo sapiens
tctggccgcccagacccctcaccatcggctcgccttgcccgtcgcccgctcgcgcgcccccggcagcagcaccatgttgaatcgcgtccccgggctgagctgcctcagccggcggcgctgag

SEQ ID NO: 128893 - DNA, 122 bp, Homo sapiens
aacgggcggcttcccattacattcacgttatagcaagaaggcgaggcacttggtgcatcccgtaataggatgcttgggggttggaatgagcttctttcctacatgaatgattgatgacaacg

SEQ ID NO: 128894 - DNA, 122 bp, Homo sapiens
gagggagttgagagcaccgcggctacctggcttccctgagtcccggctgccgggaacgggcgcgggggtgaataggtaagttagcgcctagtttccctcgctcatccaagaagcgaagcttg

SEQ ID NO: 128895 - DNA, 122 bp, Homo sapiens
gaaaagctcgatgtctcacagctctgtcccctcctcttccttccccttccttgtggccctcgaagctcctcccagaatgcattttgctgtgaggatcctttctaaagaagcatgacccacgg

SEQ ID NO: 128896 - DNA, 122 bp, Homo sapiens
ttaatgcagctgtgggtcttcccgcaacagtatctgcagcaagggagcagagaaagcagacgggacaggagataatgataccagtaccttctagccacatcttactctcctttctcccacaa

SEQ ID NO: 128897 - DNA, 122 bp, Homo sapiens
aaattttctcgcttatttgcagttttgcaaagttctacacacagatcagtgaaccttaagcgcccttgttcagccccacattgtggaggtttgtcagggtccctgggcagtgagcgtaatga

SEQ ID NO: 128898 - DNA, 122 bp, Homo sapiens
cttgaaaagattgaccttccgtgaagatcaaatgaagtaatgcgtgtagtgtgtctggcacgtcgtaagcgcatcacacacgtgagctgtggcaatactaaggagcagtggcaagagctggg

SEQ ID NO: 128899 - DNA, 122 bp, Homo sapiens
gaggcgccgctgcagctcgttcatctgggtgtagtcccggaccgtggtgcctcagagggacgccacattctcgataagtagtaccttgccccgcagggagcccaggctcacaggctccccgc

SEQ ID NO: 128900 - DNA, 122 bp, Homo sapiens
ccttaggaagtggaaaaccgtgtcccaaggtgtgcggtccagctcggggctgggaggtgacgctggtgggctgggagggaggggcggggggccctgagcctcaggccacggcctcgttagga

SEQ ID NO: 128901 - DNA, 122 bp, Homo sapiens
tcgcgcacccagtctctcgcagcagcgcctggcgcgacgactgctggaagccgggccaaacgcagtctttgcatgagtgtggccctggctgtgggagccgaagcacagccaccacgcgcgcc

SEQ ID NO: 128902 - DNA, 122 bp, Homo sapiens
acaatttctaagttcatggggtttcctctttttaaattgctctttaccttcgttgtccttcgtggtgctctccgtggaaacctgctttctgatctagtaagtgcttattctttgtgcatgtc

SEQ ID NO: 128903 - DNA, 122 bp, Homo sapiens
gtcagatgggagacactggactggctaacgggtgtcaggatcctgcaggccctgggataccgaaggctgtgcatggtggagggagaaggaatgcaactgcgatgccgcctctgccaccgcac

SEQ ID NO: 128904 - DNA, 122 bp, Homo sapiens
gcggcgttttcctctggctcctgcgagggcttggtttagggcttcagctctctgcgttctcggctccgggaggcctcggtgattcagccacagcctctgcctcccgttgctctgtgacctga

SEQ ID NO: 128905 - DNA, 122 bp, Homo sapiens
gatacacacttattgtggcacaaagcagggattcaaaccaaggctttgcttgccaaacgacggcacttcgatgattaggaacaggcttcattgtttatagctgtgagggccgggactccaag

SEQ ID NO: 128906 - DNA, 122 bp, Homo sapiens
catcttgctacccgctgtcaccatgctgggcttcggcttcctctgccactctcaggtgagcgtgcgccccggggtgtgcgtgtgagtgtgagtgttggtgtgtggtgatgctggcggtgggg

SEQ ID NO: 128907 - DNA, 122 bp, Homo sapiens
gtggctccagcaccatccgccagggcccacacccccttcctactcccagacacccaccctcgcttcagccacagtttcctcatctgtccagtgggtaggttggactggaaaatctctttttg

SEQ ID NO: 128908 - DNA, 122 bp, Homo sapiens
cttcaactgttccgtgggtactttgaatgcaggaaaactacaacaggccccgctgggattcgaacccaggatctcctgtttactagacaggcgctttaaccagctaagccacggagccacca

SEQ ID NO: 128909 - DNA, 122 bp, Homo sapiens
gtcaaatggactaaaaaaaaaaaagaatggactataaccacgccaaatggacgacaaccacggcaaatggacgacaaccacgccaaatggacgacaaccacgccaaatggacgacaaccacg

SEQ ID NO: 128910 - DNA, 122 bp, Homo sapiens
aaacataacaggagctgatgggtctcaagatgttgccttgaggagtgcattaacagaacccgggaagagcttggtcatcacgaggtacagtcggcctctcacccaccgtccaggtgaaaacc

SEQ ID NO: 128911 - DNA, 122 bp, Homo sapiens
tggtttatttgactagagcggcctgagaaaccggctgagcctggttacttacgatactctcgctctgttccaggggctcagtgacagctgccttcctgagccgcttcggttacctttcgcac

SEQ ID NO: 128912 - DNA, 122 bp, Homo sapiens
cccacaacaaaccttgccttctgcccttaaggaaaatggcgcctggcatagatgcgcttccggccacggagccaaacagaacagaggaggcaagaggccggaagtgaccgccctttgccact

SEQ ID NO: 128913 - DNA, 122 bp, Homo sapiens
gggaaggccccaggaccgcgcggctgagcggcctggaggctgcgggagggcagagcagggcgcgcgggagactgccgcccccgggcgcccagggcccggctccccagcgccaccgccgcagc

SEQ ID NO: 128914 - DNA, 122 bp, Homo sapiens
ccatgcccgagcctccctccgccccttgggctcctgtgtggcccaagcctcccccacgagcgctgacccctgctccacggctcccagtcccattgaccacccaagggctgaggagtgcaggt

SEQ ID NO: 128915 - DNA, 122 bp, Homo sapiens
ctagacccggggctctgccagctgtgctggggcaggagcagccctacttccagatgagcccggggactgtccccccgtgcctgtccggaaaggtcggcctcgtgggacccagggcttcctct

SEQ ID NO: 128916 - DNA, 122 bp, Homo sapiens
tgctaacctactcagtcagatacactgttctagagagcatgcctgtgatcgtctgaggaacgctacgcctacgctttaaaaattatcactaataaaatggaactcctttatttgcatttcca

SEQ ID NO: 128917 - DNA, 122 bp, Homo sapiens
gccgcaccacgagagagctttaacgcaggggccactgcagcagaatggagactcaggtggcgaccgtttcgccaccccgggcgtgtgacagcagaggcccgcagtgagggtgggaagagcta

SEQ ID NO: 128918 - DNA, 122 bp, Homo sapiens
gaagggcccccaaatggccaaattctaagggaagtacctcaaaggacaaatcccaagggtcggggcagcagtactcgcagcctctacacctttagtaccttctctgcccaggagggcgagct

SEQ ID NO: 128919 - DNA, 122 bp, Homo sapiens
ctcccaaccccccctcttttttttaaccaagtgacaaaaagtaggtctgatataaccaaccggtggaagggagctctcagagtctttgaacagggtctttttcaaatctctttatatgtgag

SEQ ID NO: 128920 - DNA, 122 bp, Homo sapiens
gagataatgtatctgatgacagttgcatgtgcagataaccggcctctcatgtatccatcccgggagtgccttttctcagactgtgtgtagtgttagtgaacttgattggtgggtgtgaagtg

SEQ ID NO: 128921 - DNA, 122 bp, Homo sapiens
gcttttgctaccatctgtccctcggctggctgaggactgccgatgcttcccaagcagaggcgtctggtccactcctggggctccacctgcctgtcactgcagcaccagcgtgcacacgatgg

SEQ ID NO: 128922 - DNA, 122 bp, Homo sapiens
ctcatgactcaaattacccaagtctgacccaagcgaaggtgcccctggagttctggaaaacgcaggaggcctccgcgggctgggtgcgccccgagcactgccatcccttttcttgtaattac

SEQ ID NO: 128923 - DNA, 122 bp, Homo sapiens
aaattcatggccatactgacaggtgatttcacagctgggaataagttaatgataaatgcacggaagactaagatggcattgtcagttcaggaaaagataaaagaaaaggcacataatcatac

SEQ ID NO: 128924 - DNA, 122 bp, Homo sapiens
ctcctgccagtagtaagagctggcacccacttaacgctccttcgcaccacactcccatcgcgtaggtgctaccatcatcactcccattgcacagatgaggaatctggggtacagccaggcag

SEQ ID NO: 128925 - DNA, 122 bp, Homo sapiens
gcactgagaagagccagctgctgaatgcgcatgtgcacggtggacatcaaagaaagggctcgtgctgggaaagcgggcggggctgagagcggccctgcagccgacgcgcatgcgctctatcg

SEQ ID NO: 128926 - DNA, 122 bp, Homo sapiens
ccggcctccgcaggtttccgaggttcccaccccgcccccgcgcgccggcgccgcaggccccgccgcctcccattggctccgccagttgctaggcgatgaacaaccgtggcctgcattggtcg

SEQ ID NO: 128927 - DNA, 122 bp, Homo sapiens
aaggggtcggggcgccccttaccaggccgtaagcggcaaccctggccgcctccggatgggcgctcggagccggctccagattcgcacccgcacctgagcccggaagctctgggatatttccg

SEQ ID NO: 128928 - DNA, 122 bp, Homo sapiens
agtgcccgggccgtggcggggggcatggatttgttgcagggtctgcagtactgagaacagcgtagaaccagtggcgatgggaggaaggggaccggtagagcggggctgggtaagcctccatc

SEQ ID NO: 128929 - DNA, 122 bp, Homo sapiens
ctgccctgacactcaacccagggcaggacccaagcagctggcactcaccactggtgctggcgtttcagctgtaggagcttagagacagggcgtcactatttgtagcctcccaagaaaggaag

SEQ ID NO: 128930 - DNA, 122 bp, Homo sapiens
ggcggggacggcagggacactcacgacttgagcgggttctgaatggcggtggccatggcccgctcggctgggccgcctccggcccggggcgccgctgccgccgcgcgcgggcccagcccggc

SEQ ID NO: 128931 - DNA, 122 bp, Homo sapiens
gctgcagctggcgctggctggtacttgctcaggccattgaggagcttctgggcgaccctgcgctcgtgcctaccaggcgccagccagtaggtgcgcagcgcctgctccagcagcgtcaagcc

SEQ ID NO: 128932 - DNA, 122 bp, Homo sapiens
tcacaatgggaatcaagtcccaaaccggttccgggttagtgccctggaattccgccccctcgtgattcacctccctgtctgtgccccgtctgtggcgcgcagctctgtcagtcaagtggact

SEQ ID NO: 128933 - DNA, 122 bp, Homo sapiens
aacccgcaggctgtgcaccctctggactgaagtcacccgtcagtcccggctgggggtttccgggaacagggcaggtgctttaaagcaggggtggccgatcttttggcttccctgggccacat

SEQ ID NO: 128934 - DNA, 122 bp, Homo sapiens
ccttcccctgggcgagtggccagcggctgcgatccgctaggaggcacaagttacagcagccgcgcaggcggtcccggcacctgctcctgaagcgcgggacgctacgggaatcgagggaacgg

SEQ ID NO: 128935 - DNA, 122 bp, Homo sapiens
agcaccccccaccacagctgcctcttcatgtgccccaggcctgctacccaggatgacagacgccatgaactgttcttccttgagccccaaactcagctccctcagttcaaatcctcaacact

SEQ ID NO: 128936 - DNA, 122 bp, Homo sapiens
acagggacctgtggctcagaggctcaggattagatcaacaaggctggggctggctggtttcgggaaagaggtcgtgggggcccctgttgacagacagctcaagcacagcaaagccctgaggc

SEQ ID NO: 128937 - DNA, 122 bp, Homo sapiens
tcctggaggcaggggcctatctcaagagacgccagttcatttgtcttcacattgaagtggcgctgcctaccccaccgtagagtcctgtggtaaagcgttcaccgctggacacagccatcgac

SEQ ID NO: 128938 - DNA, 122 bp, Homo sapiens
tcacttgtctggattccggggttggaccgcctggaggcccaacacctcaaggccctgaagcggtacccgggcaaacaccgggccccaacactgcagtcactcaccactgcaagtggaaggtg

SEQ ID NO: 128939 - DNA, 122 bp, Homo sapiens
gggtaaaatgaggagccgagctagagggagaggcagtacttgtgtgagtgcagggtgctgcgccgcccccgccgcccctttgctgactatactggtatgaaaacttgccctggctttcctgc

SEQ ID NO: 128940 - DNA, 122 bp, Homo sapiens
gacgtgggcgggagaggaagcggctggtgatgctggaacaaacatggccgctctggcgcccgtcggctcccccgcctcccgcggtcctaggctggccgcgggcctccggctgctcccaatgc

SEQ ID NO: 128941 - DNA, 122 bp, Homo sapiens
ccacaggcattccatggaaattagtgctccagtgttgatcagctccagcgatccccgagccgcggccaggattggagaccttgctcatctgtcgtgcgctgctcccacccaggtaacatccc

SEQ ID NO: 128942 - DNA, 122 bp, Homo sapiens
aaaacttttcggaaagggagcgcgaactgctagataagtcagctcccaggctgccaggagcggtggcattcctcggctacaccggacagctgcgagtttcaagagaatgactaaaactttca

SEQ ID NO: 128943 - DNA, 122 bp, Homo sapiens
gagaaaaataaatagggcctgctgtgcaaactaacattgtaatgaagatctaaatttgctcgttatcccttgaaacagcagttaggaggtacagaggggacgggatattgctgttcttttgc

SEQ ID NO: 128944 - DNA, 122 bp, Homo sapiens
tggaggagcgcttcggcacctcggacgagatggtgcagcgggcacaggtgcggcggtgggcggggtggcgcggcggtaggcggggccctgcgccagtgggcaaatcagagtgcagatattat

SEQ ID NO: 128945 - DNA, 122 bp, Homo sapiens
gaggagctggccaaaaactcggtcgtaggaaacctcgccaaggatctggggctcagcgtccgggacttgccagcccggaagctgcgggttagcgcggagaaggaatatttcacagtaaaccc

SEQ ID NO: 128946 - DNA, 122 bp, Homo sapiens
tttacccccggcctccagccaggaggccccctgctcatggagcgctcttctgggggtgggcgggggctgcgtgctgccggacagagtgcacagacctagggctcttccctccctggtctccc

SEQ ID NO: 128947 - DNA, 122 bp, Homo sapiens
gggcaccctgagcttcgtggagtctgaaataatgtctctaaacacttaagtgatcagttacggaaaacacttcccagaaatctgggaaaagcccctttaagaaggagtaaatacctccttct

SEQ ID NO: 128948 - DNA, 122 bp, Homo sapiens
ctactgagaaagtctttgtcaagctaatgaggaatcctggcacagagattacctattaggcgagccccacacaggatagaaagggctgaactttactattggcatcacgtttggtcatcggc

SEQ ID NO: 128949 - DNA, 122 bp, Homo sapiens
ttcattagcactccaaggccggcctgctctcgcctcctcctggtgagcacccctgggacccgagcagcatcctcaggagccagtgccggagccatctggcatccagcagtgctctagagcgt

SEQ ID NO: 128950 - DNA, 122 bp, Homo sapiens
ggcgtccagcggtcggctggggcccccgcagtgccctgcaccggccctccgtttcccccgcgctgccaggccccggctgtgcccagcgctctccagacccgccgctgcctggccgttccctg

SEQ ID NO: 128951 - DNA, 122 bp, Homo sapiens
gggggagccggggtgcaagagggcaggctggatcaggccgggcagaagcggaccgggctccgagtgtcaacgagagctaggtgacgaggaaattgggggtgggggccggagctgtccggaga

SEQ ID NO: 128952 - DNA, 122 bp, Homo sapiens
ggagatggggctccccttgtgcagagtcgtcacaaagtcagggaccctccatctctgacccgagctgtgggccatctctcccagctggcccattccatccgcctgctcctggaatacacaga

SEQ ID NO: 128953 - DNA, 122 bp, Homo sapiens
ctctaactgtctctctctctctctacccgtctgtatgtatatctgtaatctcttccacgtcgatagctgcctggattctgtatcgctctctctgtcacactctgtctctctatctctctctg

SEQ ID NO: 128954 - DNA, 122 bp, Homo sapiens
cggacctctgtggagaagccagcttggcacgttctttctcctccactgcaaagttaaatgcgagaaggtagaaacccagaggccatgctggcgctgagagatgagccccactcaccagattc

SEQ ID NO: 128955 - DNA, 122 bp, Homo sapiens
gacccgacgttattctcccccctcgtaacccgacacagcctagcccacctgccctgccagcgcgcacgcccacctctccgctacaggtgctgattggagagtgcgttccgaactcgcagcgt

SEQ ID NO: 128956 - DNA, 122 bp, Homo sapiens
atccagagtccccgtcaaccaaccatcccagccctggaatccaacacggattccacaggacgccctctcggtcgcattcctatcccgctagggggctggcaatggccacacaaggtttccaa

SEQ ID NO: 128957 - DNA, 122 bp, Homo sapiens
ccacaggggctgttctgccacgtggagtggactggggccagcaaagggcaacagggaagccggtgggccagctggaagtttcccaaaatgagtgctggtgtcccggccctgatgggactgga

SEQ ID NO: 128958 - DNA, 122 bp, Homo sapiens
tcccccttgccttctcctctctgatccattgccacacacgtgggaaggtgacaacccttccgaataaaaatgaaagctttcttctttagatggaacccccaaattccctcattatttataat

SEQ ID NO: 128959 - DNA, 122 bp, Homo sapiens
accagtctgtgggggcaacttggccgtgattggagccagcagtaggtgccctggggttaccgggagcgacgcgggccggggtgccatgcatccgaaagtgtgtgcagtgaagcccccacatt

SEQ ID NO: 128960 - DNA, 122 bp, Homo sapiens
cctccatctttttggtctcactggtaatatggccagtctgggtccagctggcagagcacacgggaggaggctgctctctcaccaggcaaactgaggactgagtacaggaagggtgtggagaa

SEQ ID NO: 128961 - DNA, 122 bp, Homo sapiens
ccggcctgtgcaagggcagagacaaggcccagcagggctcgagcaggcccaaacgcacgacgcagctgctgtgcctgggtctgagctgcacccacaggtgacgtgaggggcgcctaggaggc

SEQ ID NO: 128962 - DNA, 122 bp, Homo sapiens
acagcgcccagggacccctaacccccgctgaccgcaaggcgatctccgactccgaacgaacgcctcgttgcagatcggctcgatcaaccatcaagacttagaaatggaggctgtcgatggac

SEQ ID NO: 128963 - DNA, 122 bp, Homo sapiens
ttggctcgcaggtggctgccttctccctgtgtcttcacttggcctgattgccaaacccagcgccttctgagatactgggggttacaatttcagcatacgaaatttgagggcagggtgagggg

SEQ ID NO: 128964 - DNA, 122 bp, Homo sapiens
gccacgcgcgaggcatgttctcagtgtgtgtcttgtgtcatttctgtgatgcttgcacatcgtcagggggtacctaccactggaacctcctcttttaacaaatgaggaaactgaggcacaca

SEQ ID NO: 128965 - DNA, 122 bp, Homo sapiens
ctcaagaaaagatgaaatctttatttaccactgaaaacaaactcccaaaaggtttgatttcgctacaaggaaggtatctatgatcatgatcgaccttgatgttctttggttcctagagtgtc

SEQ ID NO: 128966 - DNA, 122 bp, Homo sapiens
cctttttttcttctgtcagtctgtgtatctctgtctcagggaaccgtgggtctttgtctccgcctctcccatatattagaaatatcttactttcatgcggttaagtttaagaggctggaggg

SEQ ID NO: 128967 - DNA, 122 bp, Homo sapiens
ggccccgcggcgaggtgagctcgggcggggtgggggcttccgggcttgcagcggcgggcgcggcgtttccctgtggtgacaatccggtttccgctttcggtgcgctcacggggccgtgccac

SEQ ID NO: 128968 - DNA, 122 bp, Homo sapiens
acttttgagacgaggaccaagacgttgaaaacccagaaaatcacccctccctcttaagttcgtcggatcacacgcgcggaagaggcccgaccacaggcctcccagcgcccgccgggccctag

SEQ ID NO: 128969 - DNA, 122 bp, Homo sapiens
gacagaggagggatctagaattcgtaggggagaagagaactcagaaaagatccggcccagcgcatttattttacagaggaagaaaaactgaggcccagggagggtaagtactgcaggtaact

SEQ ID NO: 128970 - DNA, 122 bp, Homo sapiens
tcctcctccttgttttgtatacccagctgggtgggaagaaggtcacagcccaggtttgcacgtggtggaggagcagggccagtaactggttaggcagagaccccgcccaccaccctccactc

SEQ ID NO: 128971 - DNA, 122 bp, Homo sapiens
ggcggccccagatgtggcaaacttggcgcagcagcgcacgggcggacagggcggaaggcccgcgtcgggctgggagatgcgccctgccctggcccgaggacgaaggaatccgagctgggggc

SEQ ID NO: 128972 - DNA, 122 bp, Homo sapiens
tcgaggagttttgagctcttagcttggtgccggggcccgcccggcgctagatgaagtgctcgtttactcggcctaagccacggtgactcgaaggtgagaatgcaacttcgcggtgcaccggc

SEQ ID NO: 128973 - DNA, 122 bp, Homo sapiens
tacgggggataaagcaacaagttcaacaacatgaagaagcaaccaggtaagcccggaacacgggacgttctgcaagacagctcacttggtctctcctgaaagccagtgtcactggaaaagaa

SEQ ID NO: 128974 - DNA, 122 bp, Homo sapiens
ggtaattaaaggattggatgacagctgatggattcccaggtgcctgggctggtcactacccgtgcactctcgcagctaggagggtccagccagggcgcgcgcaccaaggccccacgggggcg

SEQ ID NO: 128975 - DNA, 122 bp, Homo sapiens
ggcagcctgaagagagtcgctggccgtggtcgccgctagggtaaagacgggaggcaggcccgggaagggaaggtgtcggggccggtgggggacgtgtgagggagtgagccttggtccgcgca

SEQ ID NO: 128976 - DNA, 122 bp, Homo sapiens
ctcctgacgcgccgggcgggaccctgaggagccagctggcgcaggctatgggctgggcggcggttgagacagcggcggtatcgggaggggtaggtgagggtcgcgaggctgcgtgagcatct

SEQ ID NO: 128977 - DNA, 122 bp, Homo sapiens
gtccagctcaactccggctgctcgctgggctccgaccggttgtgacgtctctgggagtgacgcgccggcgcgggcgcggtgcgggtgagctggtcggcgcttggcgctgcctggaccaatcg

SEQ ID NO: 128978 - DNA, 122 bp, Homo sapiens
cggaaacttgggggcggacctgtgtctgcagggagcagagagaatgaggagaagaaggcacggctgccatggcagcctgagcaaccggggtttttaattctgagtctttgggagccatggag

SEQ ID NO: 128979 - DNA, 122 bp, Homo sapiens
atttcatttctatagtgggtgagacgacgagcccagtgagagtgaacgaacaactccaggcgcgccgccttaagagctatagtattcactgagggtttgcggttttattcttgaagtcagtg

SEQ ID NO: 128980 - DNA, 122 bp, Homo sapiens
gaccatcgatcctccaggcggggggcagtggtgctgggagccacgtccccatcgactgcgcggtctgtgctcagttcctaattggcagggccggctgcgtgagtctgtctgggagcccagaa

SEQ ID NO: 128981 - DNA, 122 bp, Homo sapiens
gggcaggacagcagagatcgtcactatgctaactgccaggaataggaatccacacacttccgcccactgcatcctggcctgaagtgctaccagtgtctgttggagacacgctcacatgcaac

SEQ ID NO: 128982 - DNA, 122 bp, Homo sapiens
cttgttggaagggatgcaaccagtagctgggtgtgagactggccttgaggaagccccagtcgtcaattattcattcattagagctttggccactgtggaggtccctacttggatacccttca

SEQ ID NO: 128983 - DNA, 122 bp, Homo sapiens
cctgacggaaagcgttgtctatttcgcagcctggccggggtgaacaagtttggcaagtgtcggaccgaaccaggtcaagccttacctgctgcccctccccaaagcggagcccaagccgcgac

SEQ ID NO: 128984 - DNA, 122 bp, Homo sapiens
tgacccctctcccgcttgagcagctgcagaaaggaccactgcacagctctgactcaaacgcggataacttcctgtcccccttccacgcacccgctgccccttacgcgaatccacgctgcagg

SEQ ID NO: 128985 - DNA, 122 bp, Homo sapiens
aatcttttttctgagtctgttttcttcatttctattaaaccaaggtcctttttaagcagtcgaatttcatccaaagccagagtgagctactttgtttgggggaacagtaacagttacctcca

SEQ ID NO: 128986 - DNA, 122 bp, Homo sapiens
acacccctatgggaacccctttggtctttatcattcttgggtgttttccactgatgactgcgggtgtgcccagtggcagctgggcctgagctgtcagcccaggcaggagacaaacaagcctg

SEQ ID NO: 128987 - DNA, 122 bp, Homo sapiens
ccccagactggcagtggaagcagctccgaggcctgggagcctagggccgttccgggttggcgggccacctcgctttctccgcgctcccggagggggcgcgatttcctcgtgctgcgcttgta

SEQ ID NO: 128988 - DNA, 122 bp, Homo sapiens
gcagccgtggagcgtgggaatgggacagtcccattttacagctctcgttcatcccgcctgcggcaggcggctcctgacagggaagagcaagctttctggacttccccacccgcggtcccacc

SEQ ID NO: 128989 - DNA, 122 bp, Homo sapiens
tattttaaattaagcagtgagttctttcagctcatcataaacatgctaaaaagcttcagccgcggcctgagcccacccccgccctttacacacacaggcagcagctggggccactcgacccc

SEQ ID NO: 128990 - DNA, 122 bp, Homo sapiens
tgcacttgaatcatcctgaaaccatcacatcctccctctcagtggaaaaattgtcttccacgaaactggtccctgatgccagtctggtcctggagtgctgctttaaggtctttgaaaagaag

SEQ ID NO: 128991 - DNA, 122 bp, Homo sapiens
tgctcagcgagctccagaagaccgagcgggactatgtgggcacgctggagttcctggtgtcggtgagtgtccccggcagacgcagggggacgtccgggcggcgcggggcgcgggtcccggag

SEQ ID NO: 128992 - DNA, 122 bp, Homo sapiens
ctggtccagagagatcttgcggatgcggcaagtggcggtgacgtgcggccgcgggaatgacgttggccgcggccccgcctcctgctttcgcggcacttgactggcttcccactatcagctga

SEQ ID NO: 128993 - DNA, 122 bp, Homo sapiens
gtattagtgagggctctttgtgtcacttctgtgcataactccgccccaagttaaaaggctcgctgctctcgacaggtcctcctcctcctcccgctaggtcctcctcctcctcccgccaggtc

SEQ ID NO: 128994 - DNA, 122 bp, Homo sapiens
tcacgccaagatccccttcactggaaaaattccacagtgtgtttccgtccgtgcctacaccggggttggcgcacatacccacacagcagcttgctggcacccagctctctgacagtgaatac

SEQ ID NO: 128995 - DNA, 122 bp, Homo sapiens
tgctctggcatccagaggggccctgagagagggtcccagagccagcatgtggttccagagcgaccaactcagaagcacctccagccaacttcacgagctgggacccagacacatgtttttaa

SEQ ID NO: 128996 - DNA, 122 bp, Homo sapiens
tggcagcggcactgggaaacccagcaaagctaaagctatgctggaggcggggacggtcagcggagaggtcccgggccccggccagggcacggcgctcttcagcgttgtggatgaagtggcag

SEQ ID NO: 128997 - DNA, 122 bp, Homo sapiens
ctcaagagggatccgtaggcctcccctgcctgccctgggcacagggacatcccgaagcgccggtcccagagcctgggctctgctgctgtttctctgtgacttgaggcaagatatcctacgct

SEQ ID NO: 128998 - DNA, 122 bp, Homo sapiens
agaacttagcacgatctggcacatggtaaattctcaagatgcttcatctagaactgaaagcgtacgggtcagagctagcgctgaacccaagatgtgggtcaccacagaccccaagctgggtg

SEQ ID NO: 128999 - DNA, 122 bp, Homo sapiens
gagacccactcgcgatgcgtctgttccacagtctttctggtgacctcaaccacagtaagccgcccggcccgcgggactgtgccacacgtagatgcttgcattttttaaatttttgttgttgt

SEQ ID NO: 129000 - DNA, 122 bp, Homo sapiens
gaaactgggcatttctccatcagccaggaaggacattggtgttgaggacaataactaccacggcttccagtgttttgaagaaatttcagatgcatagccttttggccaggtgtctgtgattt

SEQ ID NO: 129001 - DNA, 122 bp, Homo sapiens
gggctgtgggcactgatgggcaacggaccagagcctccagcactttcctgtgccaccccacgcctggccctttgaaatgtgtgccagacgcagtgggcagtcagagctccggaggccggagg

SEQ ID NO: 129002 - DNA, 122 bp, Homo sapiens
aagcacagcaagatggagcctgttgagagggcggctttggcagattcacgctgccggcaccgtgctgttcatctgagccccgagtctctgccgggtcttccaccaagcccctccgcccagga

SEQ ID NO: 129003 - DNA, 122 bp, Homo sapiens
tgtggatgcagcaggctgcttatctgagctagttcaagtttttgctttataaaatattgccgccatataattccagtttttccacacatttaacaattttatttatttcttttttctttttt

SEQ ID NO: 129004 - DNA, 122 bp, Homo sapiens
accgtgctgtgggggcgggaatccccgggcgcccgtggggtgctgtcagtgttcgccctccgcccccgtggtcgacaccgcctccctgtgttgtgaaaccttcctacccctctctggagtct

SEQ ID NO: 129005 - DNA, 122 bp, Homo sapiens
tcatttctttcacttttaatccaacatcggcagcacccgaagtggtccccgctcccccggcggatgcagcccccggatggccgttgccacgcatttttgtttaggaacctggtttttattaa

SEQ ID NO: 129006 - DNA, 122 bp, Homo sapiens
cctccaaagggtggaggccccacagggtgagtgcaggttggggatgggccgtggggttgccgggaggggaccagtgggggcttgcagtgttctcgggagggcccggggctgggggcaaccga

SEQ ID NO: 129007 - DNA, 122 bp, Homo sapiens
gaaatcactcaaggatacccgacctcattcaggggatagaggcctccttccagagggtaccggcatcactgggggttacaattcccccttccaggggccaggtggaattcaggattatatag

SEQ ID NO: 129008 - DNA, 122 bp, Homo sapiens
tttacgtgggaggcgggagcgggggctgagggcttcgtcttttctcccctctgctatcaccggttctggaccttggcctggatcatcttcccctctgctaataccccctaccccgtccgtca

SEQ ID NO: 129009 - DNA, 122 bp, Homo sapiens
ctcagcctctgtgagtcactttcctcagatcaccaaactctcccaagggtcagaatttgacgtgcaacccaggtcttttcttctgctaccgaactgactctctgcggtcataacccactcac

SEQ ID NO: 129010 - DNA, 122 bp, Homo sapiens
tccccagaggcaggggtctcgggccagagcccacaggacctgggtctaaggcaccatccgcggccgagcagtggcgctggggtctgtctgcgtcctccccgcccccggggtgagacagacag

SEQ ID NO: 129011 - DNA, 122 bp, Homo sapiens
acattcttgggggaaagcttcatttgttgtcatttgtggaataatgcaatctcatcatggcggcagttgagagttctgtgatttggatctgactcattatgacacatctgttttaaagagta

SEQ ID NO: 129012 - DNA, 122 bp, Homo sapiens
ttgggatgattcctaagctacaggcatgctttctggccacctgccaattgaacaccagaacgcaaggatattgtttattcccaaaaaaaaaaaaaaagccaattctatcttccctttggttt

SEQ ID NO: 129013 - DNA, 122 bp, Homo sapiens
ctttcggcgcatgcgcggactggagctgtgtgcagggccagcgcggagcccgagcagccgcggtgaagcgcctgtgctctgccgagactgccgtgcccattgctcgcctcggtcgccgccgc

SEQ ID NO: 129014 - DNA, 122 bp, Homo sapiens
tccactccctgacccccagacaaatcggacagttcccttttctggtagagatgcggggtgcgcttcttctgagcgtccggaatcgctccatccaaggctctgccctaaggttaagccactgt

SEQ ID NO: 129015 - DNA, 122 bp, Homo sapiens
gagttctcggcagggagcggtcttgtggggcgcagagctgactctgtcactcaggagccacggcacgcagcactgccccaagtacctccagaggggatccctgtcagcccttgaaaatggca

SEQ ID NO: 129016 - DNA, 122 bp, Homo sapiens
cctgttgactaacctgggaatcgcccgccgcctgccttgagccttgtgatgtgggcaggacggggccggggcagggccaggagcctgcggggaggcgcggggccaggcgcctgcaggagtgg

SEQ ID NO: 129017 - DNA, 122 bp, Homo sapiens
tacttctcactaaacaattgttaatgagaagaatgacaagaagtaggctaggtgcaccttcggcattccagagaaaacctgcatgagtgtctgtctgtctgtctgtctctctctgtctctct

SEQ ID NO: 129018 - DNA, 122 bp, Homo sapiens
tggtggcagacagggcagggcaggcggcttctcttcctctaagtgcaggcctcgaggtgccgacaggggtgcggtaggattcagggaaagtgaggttgggatcacaggtgcagttagggctc

SEQ ID NO: 129019 - DNA, 122 bp, Homo sapiens
gagatgactccatagattaaccccctggcttggggcaatatggagatgttatattgtcttcgacagggaagatgacataaaaattatgttcaataggattatgtggagacttaacataagtg

SEQ ID NO: 129020 - DNA, 122 bp, Homo sapiens
gcatgagaataataattaccacctcgtagggttgttctagagattgtcagaccgagaccacgccacacacccagaaggcacccaagtcacagagcctgatattgttcctggagcgccattgc

SEQ ID NO: 129021 - DNA, 122 bp, Homo sapiens
ttcctggtggctctgggggaccatgacggagatgcggataattcaggtcagggcagcagccggccggcagggggcgacaagcacactgctcatgaacggttggctctgcccacgtgcacacg

SEQ ID NO: 129022 - DNA, 122 bp, Homo sapiens
gaacagagactgtggttgctgcggatggagggaccgctgatggtggctttgccttctccccggcagatctgtatcttcgtcggggagacgctgctgttttctaactgggccatcactgcaga

SEQ ID NO: 129023 - DNA, 122 bp, Homo sapiens
tatattccctttgggttggttttaattctgtaaccaatttattaatgggtgatgggcccacgtagctgctccataaatagttgtagaattgaaatgaattacattgcttaccggactgaaat

SEQ ID NO: 129024 - DNA, 122 bp, Homo sapiens
ggtgtgttttctgtctattgaaccctttcctttcgacgtctcttctgaatattgactcatcgggttgtagaaatccagggacagagttgacatcactgggcattttagccaaaaagcagtgc

SEQ ID NO: 129025 - DNA, 122 bp, Homo sapiens
aggccgagctccgcaccccaccccccggcagcctctgactcccggctcggctcccgcggtcggggagggttggatttcacactttgttctcgaggccgcaccattgattaagcccgtcgggc

SEQ ID NO: 129026 - DNA, 122 bp, Homo sapiens
gctcgtgcgtgtgggtgtgtgcgcgcctgtgcgtgtgccaacagtgcagccacatcggagcgcgtgtgctccgagtgtgatggccgcgtgggccggtgcagggtgtgtgtggggatgggggt

SEQ ID NO: 129027 - DNA, 122 bp, Homo sapiens
cccgaagcttcaagaaaatactggttgggcacttagctttccctgtggttgccaatcccacgcaggccgcctctagcgtctcgattcgcttttctctgacctggaacctccgccaagccccc

SEQ ID NO: 129028 - DNA, 122 bp, Homo sapiens
ccagggcagccaggggaaccctgccgagtgcctctgggccgccacagaccgcagagcccgcgggagccttgctcacacagcctcaggtccactgtggtcttgggggaaagccctgtcctggg

SEQ ID NO: 129029 - DNA, 122 bp, Homo sapiens
caaatttaattttcaatttaagatttcggaaagttatcttgtcttggttgccaatttaagcgaatgtttgatttcttactggggcatgaaaatgtagctaccaaaatgaaatagccatagta

SEQ ID NO: 129030 - DNA, 122 bp, Homo sapiens
cagacttccgcgtcccccgcggcgctctcccgcgtccccttggagatcgctccggggtggcggggacagctggtgcttttcttgtctgttgtaaactttggttcgttattattatattaggt

SEQ ID NO: 129031 - DNA, 122 bp, Homo sapiens
cgctgtgccccagggctcggcgccattctttggtaggagcggctcctgccgcagcgacgtcgttttagagttgcattcttccggcaaaacagtctgggttgggtttcctagtggtctggtgt

SEQ ID NO: 129032 - DNA, 122 bp, Homo sapiens
ggttacctcgcgggccgctgccgggcgcttgcaggtgctgctgttccaggagcgcagcttcggaggaaacttccccgcgctccggggcaaactcccgcgcactcctggcagccgtgaggtgg

SEQ ID NO: 129033 - DNA, 122 bp, Homo sapiens
ggggtacacacgcgacgcgggaaccgctggcggcggcgggccgctggagcgggttcgggccgctgctcctgcagcagaccctgtgcctcagcaccgcctgcagcacctgggaagacttcacc

SEQ ID NO: 129034 - DNA, 122 bp, Homo sapiens
ccctgagctcccttttcctggcagtggggctggattctagggaaaggggtgacacacagtcgctcctgccttgactgagcccagtgggcggggcttcttggaaggctgacagtgggattaag

SEQ ID NO: 129035 - DNA, 122 bp, Homo sapiens
caggggagccaacatcccctgctttggaggacggacgggtcgggtcgcagtgagcagctccgtggtgtcccctagttctacactcagaccaagagagggctgtgagggctgtgctctttttt

SEQ ID NO: 129036 - DNA, 122 bp, Homo sapiens
cctgacaaaggaaaatgtgtgtaccagacgcttgagcctaaccagtccaatgtaaatttgcgaccaggcacaaaaataaaataaaataataaaataaaataggccaggctcggtggctcatg

SEQ ID NO: 129037 - DNA, 122 bp, Homo sapiens
ctcctacagcctgatgcttaaccctttccatttcctctcattccattcatgggtggacagcgaccacaaagactcatggggcttccctgggagaactttgcacttgatggagcacctcaatt

SEQ ID NO: 129038 - DNA, 122 bp, Homo sapiens
actggcaaagtgaaaagatacagtcaaaaatctagaatttctttaattttgcttctctgacgagttgtgaagcaaaatacctgaagtgagtctttgggtaggggaagggtattgagaccttt

SEQ ID NO: 129039 - DNA, 122 bp, Homo sapiens
tcctcccgcgcccgctctgctctaggatgctgcggcaggttctgcacaggggcttgaggacgtgtttctcccggctcggccacttcattgccagtcaccctgtcttcttcgcctcggcgccg

SEQ ID NO: 129040 - DNA, 122 bp, Homo sapiens
caggctggagtgcagtagcacaatctcaggtcactacaacctccacctcccgaattcaagcgattgccctgcctcagcctctggtgtagctggcattacaagtgtgtgccaccacgcccagc

SEQ ID NO: 129041 - DNA, 122 bp, Homo sapiens
atttctaacatcactacaacctacatcctctccaggctacaattgaagttgaaaagtgcacgaggtctttacaaagcctcgtacagtgaatgcgtctgcgcacgtacagtcctcgtgcaccc

SEQ ID NO: 129042 - DNA, 122 bp, Homo sapiens
tcagtttccccatcggtacaatggggatggtggtaagcacatcagtgtctcctggggcagcgatgaagatgaaacgaagatgaaacgggttaatccaaggctggcagaggcgctggggaatg

SEQ ID NO: 129043 - DNA, 122 bp, Homo sapiens
gcaggaccgctctagatcccctgacaggccggaaaataacccccactcactatttgggcacgcgctcgtacgcagaaactcgcacagggactcgcgtggacactttatggcccatttcctcc

SEQ ID NO: 129044 - DNA, 122 bp, Homo sapiens
tgggttttccaggatgggtaatacattgaaaggctgataaaggccgggttcggtggctcacgcctgtaatcccagcactttgggaggctgaggcaggtggatcatgaggtcaggagttcaag

SEQ ID NO: 129045 - DNA, 122 bp, Homo sapiens
taggtcagctgttagctgtgttgggcagggagcatagtttataactggactaaccccttacgttggtagatttattaatccatacttagacaacagtagtagctcttatttattaagcatta

SEQ ID NO: 129046 - DNA, 122 bp, Homo sapiens
gcctttgctcgtggcctcgggaaagaccgagcccaagggggcagggctgggacccaggcccgcacaaatgctcccttcgccaggataaaacactcactttttccttccttttacctccactg

SEQ ID NO: 129047 - DNA, 122 bp, Homo sapiens
atgagtcctgcctggaggagggtcttggaaatgacagcataaaaatgacttacttacctgcgtttttttattaccattaaaagggaaaggttcaaagcaggaattacaaaaccacaaggcac

SEQ ID NO: 129048 - DNA, 122 bp, Homo sapiens
cggcgcccacagtcaggtaagctcacctggggtaacctgggaagtcagacctgcccagctcggagactagctgccccctcaccctcccctgtctgagctctcagcactgcacccaatctctg

SEQ ID NO: 129049 - DNA, 122 bp, Homo sapiens
tagggggtcgaagtgaggtttccttgctgttttctgctcctgggtgggtgcccgaactgccggagcgagattacaggtctgggtggtgtcggctgatctgtggagtgcagggtttgcaaaat

SEQ ID NO: 129050 - DNA, 122 bp, Homo sapiens
gtggggccccttctgtgtggggctcgcctgaagccccagactcaggtccatttgctctcccggagctgggaaggaagctttagctgcagcccctggaggctgctgggttggtgtatgcccga

SEQ ID NO: 129051 - DNA, 122 bp, Homo sapiens
gtggtggacgccagggctgaactgtgccacagagagccttgtgatatcttttaaaaaggacgaggcatctttcctttcaaaggaaaacccatgtttcagaaccactagggagtaagtagcca

SEQ ID NO: 129052 - DNA, 122 bp, Homo sapiens
ttgagcaggcaaaacagaacaaaagggcacactgcacgcgggtctgacaccagaagaccccggtcgtcctatcattcccgaagggttaacatgctctcgaggaaaagcaagtgattcgccta

SEQ ID NO: 129053 - DNA, 122 bp, Homo sapiens
cgtaatccacctgcctcggcctcccaaagtgctgggtttacagtcatgaaccactgcacccggcctttgatcttaattttcaatatgagacccatcatgaatttgggcatcacctctgcaca

SEQ ID NO: 129054 - DNA, 122 bp, Homo sapiens
taacggtccccgcgcggctccccgaaccggaagtggaggtgagctgtcgcgggcggcgcccggccttgctcaacgcccagcagtccccaccgtcgctgccgccgccaccgccctcggccgct

SEQ ID NO: 129055 - DNA, 122 bp, Homo sapiens
aaaaggccaaatctattccattgaatacaatgacattgttactcttgcttcttgcacaggcgcagtgcaggactgctccgagcacgcctacgcgcgcattttctccccttcctctccctctt

SEQ ID NO: 129056 - DNA, 122 bp, Homo sapiens
ggccactccctgcgcccggggaaacagaggaaagcacagtcccggtggccccaacttcgacgcctcctggtgcgcttgcgcaagagcctctgccaggacaccgacaccggtgctggggccgc

SEQ ID NO: 129057 - DNA, 122 bp, Homo sapiens
gcgggcggcgaagggaattggagcgtggacctctccaggcttttcattcgctggttctgccggtgtcccgccttttccatctcctcattggctgtcgcctccgggcctgcgactttgctcag

SEQ ID NO: 129058 - DNA, 122 bp, Homo sapiens
gagtggaccctccgggcaggacggggcggattaggggtctggcagggtgggaggggctcacgcctgatctcggacttgatcagttctcctggcgtctggggaactgaagaagccggagttga

SEQ ID NO: 129059 - DNA, 122 bp, Homo sapiens
atcgcctgagatgtgggaagcgtctgtgccccgcggccccgtctgggatgtgagagtgcccggccgcgaccccgtctgggaggtgaggagcgtctctgcccggccgctccatctgagaagtg

SEQ ID NO: 129060 - DNA, 122 bp, Homo sapiens
ttggccatgccccgtggctccaaagccgcgaggacagcactccattgcgacgtctactcccgagcctgaatgtttcgaaaattatcttcgtcttgctgggttcgctgctgaactggggaggc

SEQ ID NO: 129061 - DNA, 122 bp, Homo sapiens
ggcaggacggagggcgccccagatctgtggaagtggacgatctgccatttgccatcccggcggtgccagacacgggtctcctccgactgggcggtgcgtgggatgccgccagcgtccaggta

SEQ ID NO: 129062 - DNA, 122 bp, Homo sapiens
agctgccattctcatatctaaaccttccagccccaagtccctcattccctccctccttctcgcacctgctggcagcgggggctccaatgaatggacaagttccatgaattcttgccccttcc

SEQ ID NO: 129063 - DNA, 122 bp, Homo sapiens
cacactgtgtcggggtcgggctggggtgttctgtcctggggtgtccttgctgtccaaccccggggctctgaggggcacactgcgtcagggccgggctggggtgtcctgtcccagagtgtccc

SEQ ID NO: 129064 - DNA, 122 bp, Homo sapiens
ttttactcagaaatggtcatgaccctatcatctttcatcggaaacatttacttatactgacggattatgatttttgttgttgctgtttgttgatttctgtttgtttttcctagtaggtgttt

SEQ ID NO: 129065 - DNA, 122 bp, Homo sapiens
ggcaaggcaaccgtcgagggccacgtcgtgggcatcaaacaaattgggaaaggccagggccgttggcctggtggagtttaacgtccagtctggaagacaagacaaaggaagagggaaaacac

SEQ ID NO: 129066 - DNA, 122 bp, Homo sapiens
tatgaaaaaacagtgactacacatattagaatctgtgtgtgcatatttatatatttgcttcggataaatttaggtgaaactgtaggatcagaaaatgctcattgttaatggtttttgattac

SEQ ID NO: 129067 - DNA, 122 bp, Homo sapiens
cccgccagcccagctaaagcagacggctcgcactgcgacccgaaggtgaggttgatcggccgcgctggggccccggcttcggggcaggagctgcagcccctcctcttggttcggtcggggaa

SEQ ID NO: 129068 - DNA, 122 bp, Homo sapiens
cctgttctgcccactgccttctgctccagtttcagtcgagcacaggagccctgaaatgagcgctgtgcctctcctgccctgtctgtagtcacgtagggctggagccaaacaactgcatgtgg

SEQ ID NO: 129069 - DNA, 122 bp, Homo sapiens
ctgtggcaatgggccaggatccccatgagactcagaaccccgtgatccatcagtcattcccgggtcaggaccagcccagagcaggtgcacaggccctgcttagtaataaggtagaaatcgag

SEQ ID NO: 129070 - DNA, 122 bp, Homo sapiens
cggagggcgcgtctttccggcttctcgccaggggctggcttgggggcttctggcccatctcggtccccgtctcctagccccgaggggggagtccgcggcggcccaagcccttgtggggtcca

SEQ ID NO: 129071 - DNA, 122 bp, Homo sapiens
ctcttaggtgtggggctccggggaggcctaggtttctctatcttcccgttgaacactgaccgtgaagactccagtgttctggcttgacctggggcgcccggccagattaacaggctcacgca

SEQ ID NO: 129072 - DNA, 122 bp, Homo sapiens
tttagccgggaccgggaggtttgagagtgcggcggggtggggaggggaaaaaaacaaaaacgctgcggagcgttttcgactttgcaaagctgttgatgttggtgggtccaagttcccggtgc

SEQ ID NO: 129073 - DNA, 122 bp, Homo sapiens
gcctccaagactcctccgcccactccgcacccaacttataaaaaccgtcctcgggcgcggcggggagaagccgagctgagcggatcctcacacgactgtgatccgattctttccagcggctt

SEQ ID NO: 129074 - DNA, 122 bp, Homo sapiens
aattaaattaattgacaggtccaaatgtgagtggacaggtggggcagcaggagctctgcacgccactggtgggagtgttttttggaaagtgcactttgtaagagaatttggcaacactaaca

SEQ ID NO: 129075 - DNA, 122 bp, Homo sapiens
cctccccggcctggaggctcagctccgagttctcctgcttcttatagttggacaccaccacgtactgttccaggatcatgggctcggcggtggcgtcggcacctggcgagggcagaaagcac

SEQ ID NO: 129076 - DNA, 122 bp, Homo sapiens
ttgaaaatgtgaattttacttttctagcaaaagaaaagatataaaacaataatacaagaacgaaattgaatcctagtctgggaatattctgaggactggcagtttttgtggtgtttcttgtt

SEQ ID NO: 129077 - DNA, 122 bp, Homo sapiens
agacgctggatggaactgactgtgccccatgctgtcctggggggttccccatatccatcccgggacccctgtcagtgttatccaggctgctgttttcattcaccaggtgcttccctcttaat

SEQ ID NO: 129078 - DNA, 122 bp, Homo sapiens
cccctttttagcaatgaagaaactgagaggttaagtaatttccccaaggtcacacagccacgaagtggagtctgggtatgacccccaggcagtctggctccagtgacctgcctccttagcca

SEQ ID NO: 129079 - DNA, 122 bp, Homo sapiens
gaacaattagatgctggcgcggcccggagaggctcgcggatgcctggccgcgcgcctccgcgggacgtcagcgcccgcggcacgatctgctgctgtcactatcagtatccggcaggagcccg

SEQ ID NO: 129080 - DNA, 122 bp, Homo sapiens
ctctggacgacacagctgcggggggtcagggtcggggcactcacacccttggaatgactacgtcccggggttcggcgggagggggcgtgcttccctgcccccccttcctatctgcttgccct

SEQ ID NO: 129081 - DNA, 122 bp, Homo sapiens
gttattaactcttgcgtgtggggggccgagcccctgacggctaaaccaggggaataaaaccgccttctccactgacagcccttaacccattgctgacttatgttctgggtcctgtttggaca

SEQ ID NO: 129082 - DNA, 122 bp, Homo sapiens
ctgtaccctccccaacgtcgcctccccacaatgatctccacctgcttggctgcagccaggcgggccttaagcacgtcaggcctccccacactggccgcctgagccccgtcctccccaccttg

SEQ ID NO: 129083 - DNA, 122 bp, Homo sapiens
cttgtcctgcagctcccggagcttgtttgacatttaccatctatccagggaggcagaggccggtgaacttaggctcactgcggtgctgagggtcaatggaacattccaggccaacttccctc

SEQ ID NO: 129084 - DNA, 122 bp, Homo sapiens
tggtcggcgcagtgcgtagcttaggagcctcgaggacagctgggacccgacgggcaagggcgggcctcgcgggcaggctgggcagccctcagggaacaggtccgtgcggcccacgtgggtcg

SEQ ID NO: 129085 - DNA, 122 bp, Homo sapiens
cccgggacccctgaggacagagcccctggtgacagactacctctttgcaaaggtcctgtccgcccgcaagaggagacctctgggcgccagtataacacagaccctggtccctgtcctgtctc

SEQ ID NO: 129086 - DNA, 122 bp, Homo sapiens
ccttccctctcagctactccccagagcacagcccaaaggtcacttcctcccggaagctgccgccctgtctccagtcagggtaatgaccctcgggccgccgcgctctcccggggccgcggctc

SEQ ID NO: 129087 - DNA, 122 bp, Homo sapiens
gacccccagccacgtgcgtccctcgcattctttaccggggccggggtggcggctacggaccgtcagctgggcccagatggagtcttgggagccctcaagtgtctcctgtccttgcccgcgcc

SEQ ID NO: 129088 - DNA, 122 bp, Homo sapiens
agcggggcagaggaggaggacaaagcaatgatttcagagctggaggtgctaaattaccaacgttcaagagggtgggagaaatgccagtttccaccgtgctgtgctgagacctgctctgtggt

SEQ ID NO: 129089 - DNA, 122 bp, Homo sapiens
atagaaatatttttttaaagtggcagttctgttttcatttctctgaacccaattcatttccgttatttctaaatttttctctcttcttggtgtccacttagggctacgcagcttgctcctgg

SEQ ID NO: 129090 - DNA, 122 bp, Homo sapiens
caggatccccagggatcagggccacgactcagtcgtagggcgccccagagagtaacacagcgacaggttctcatttgcaaccagggtgccgcacacgactgttttatggcagatgttgccat

SEQ ID NO: 129091 - DNA, 122 bp, Homo sapiens
cgatcctgaccagctcacttctcagggatgcgctgcacctgctgggcctcctggaaccagcgctcggcttcgctcggggagcacggcggtgcggggcagcgcatcagagcccggactcgggg

SEQ ID NO: 129092 - DNA, 122 bp, Homo sapiens
cacccctgtaaaccaccctccccacccactgcagctcagtgtggggctccacacaggtcacgacccaatcccccaggcaggggcccagtcccccatctcaggctctatctcacgacctgcaa

SEQ ID NO: 129093 - DNA, 122 bp, Homo sapiens
cgctctcgagactgcggcttctcgggcgagagcgcccagtgcgcagccgcattccgagctcgccccgccccaagcccagtctcaggctctctcggcccttgaattacgcctgcgcggaggct

SEQ ID NO: 129094 - DNA, 122 bp, Homo sapiens
gaatggacagagagcagacacaagcacatgggaggttttatgagtcaggtttgaaagtggcgtacatcactcggctcacattctattggcttagaactcagtcacatggccttgtaataccc

SEQ ID NO: 129095 - DNA, 122 bp, Homo sapiens
gctgaacgctgctgaatcacacagcaccgtgtctacctgcgaggcagacaacgtcactgccgagcctcctctgtcatgcagcattggcttgtaattgtaatgcatgttgtccgggtaacctg

SEQ ID NO: 129096 - DNA, 122 bp, Homo sapiens
agaggtgctgaggaagggctgggacaacattcggagccccagctccacgtctccacaggccggcaaaacagaagaggcttgtagccaagctacttaggtctacagtgcctgtctctttggcc

SEQ ID NO: 129097 - DNA, 122 bp, Homo sapiens
tggttaacaataacattactcgggaaccaatggactccaaggggtggagacggcgtagaacgaccgaaggaatgacgttacacagcaatgtggcaccacaggccaatagcagggggaagcga

SEQ ID NO: 129098 - DNA, 122 bp, Homo sapiens
tcacaaacatcccttttctggcttgagaaagctggtggaagcagctcagtgctctgtgttcgatttgttaggtcttgctcagtgtgcagaactctgctggcagctgagaggggaagccggaa

SEQ ID NO: 129099 - DNA, 122 bp, Homo sapiens
gtagaactatttggtgtgtatatttagataataatcctctgaaatacatatctcaaatttcgagcgaggtaccttttgagaggtatatttttatagttcaagttttttgtccacaaaaacat

SEQ ID NO: 129100 - DNA, 122 bp, Homo sapiens
aggaaactaaagtctaagtggtcaggtaacttggcctgaagttgcaaagctaggaatctgcggagttgaccatgacgatgctaaagcgctagagcccattttctttctattgtgtcacatcg

SEQ ID NO: 129101 - DNA, 122 bp, Homo sapiens
cgccgccgcccggtgattcccatagagaagacaactctgtgctgcctctccaagagctgccgctcggctcgcgctcaccactgccaccacaacgacagccgctcggtggtgactcccccaac

SEQ ID NO: 129102 - DNA, 122 bp, Homo sapiens
cgacaacaacagactccgacaaagaaccatcaatgatgctgagacttgtgggtcagtgctcggggagtagcaggctgtctgcacagtcccagattatctccctaccagatacctgctaatta

SEQ ID NO: 129103 - DNA, 122 bp, Homo sapiens
acacgcatcagaatcacatgggtgttgggcagcagagggaagaggcaagcagaccgactgcgtgactgccaaagccaagtcacaaaaaggcgatgcaatttctacctcattatagggagtac

SEQ ID NO: 129104 - DNA, 122 bp, Homo sapiens
aagctgattttctcaaacacagataggaccacactgttctactgtgtctgcagggtaaagcgtctgctcctgggatggctgttgaggcccttttgatctggctgatctgtccttcccacctc

SEQ ID NO: 129105 - DNA, 122 bp, Homo sapiens
agatctcccaggtaagcccatctttgtgtggcaggatccacaggttaggctgggagggtccgggagcagaacgtggaagccaaattctgacgggcgcagcaggggtggaggctgatggcacc

SEQ ID NO: 129106 - DNA, 122 bp, Homo sapiens
ttgggctcaggctccctggcgccagataccctcggaatccgggatccccggctggcgccacggcccgctgggccaaggtcggtgcttggtgggccccatgatctcatctctcctttcttcct

SEQ ID NO: 129107 - DNA, 122 bp, Homo sapiens
tcatatgccctctgggagggcaggggacactgacttgtgttgtgggtgccttgcatgtcacgggtgctcagtgaatgcctgttaagcattaggggagcacaaaggagggaagcctctgtcca

SEQ ID NO: 129108 - DNA, 122 bp, Homo sapiens
attgttatgaaaggccagcctggacgtgtccatgggctggatgatattgttatgaaaggccggccttaccgtgtccgtgggttggacaacgatactattatgaaaggccggtctggccgtgt

SEQ ID NO: 129109 - DNA, 122 bp, Homo sapiens
ctcccaccctccttccctcctcctcttcccagctcccccgccctctgctgctcgcagcctcgccagtgagaatctactgtaagtgtgagttgcttcgacgaagtcacacacccacggaggga

SEQ ID NO: 129110 - DNA, 122 bp, Homo sapiens
tctatgagaatgcaccactttgatcattcaagaaaattagctagtaaagttcatctgggccgggcgtggtggctcatgcatgtactcccagcactttgggagaccaaggcaggcggatcacc

SEQ ID NO: 129111 - DNA, 122 bp, Homo sapiens
gcttctgtcgcccagtccttgcatgactcatggcggtggccacacgggtttcagggataacgggatgtttagaaaatcgctgcatatcggagtttcctagcacgttccatttatactgaacg

SEQ ID NO: 129112 - DNA, 122 bp, Homo sapiens
agccgcgattggctgagtcggcacccagatgcgctgtcgcttctgctattggctggcactcggtggacggagacgggggaggggcttgcgagaggcgggagggagagcgaagtgtgtgggca

SEQ ID NO: 129113 - DNA, 122 bp, Homo sapiens
tcttaatctttcccgagttgctcatagcacccctgttcctgtcgctagctctccattcctcgaactgccagcctcagtctgtgccagagatgcccccatctccgcagtgccagggcggtggg

SEQ ID NO: 129114 - DNA, 122 bp, Homo sapiens
aaactccgcggcccgcaagcccggctcggcccggccctgctctgttctgcccggaggagccgcccgtaagtgacaagagacccgctgagggggcctcccctgcaccgcccaggtggggacgg

SEQ ID NO: 129115 - DNA, 122 bp, Homo sapiens
gctaatctgtgccctaacttgttaaatatatactgatccctaaaaactctctctcctgcacgtgaaacgctaaaccaggttaaaagttccaacacaacacgaaagtaattcttttgttaaat

SEQ ID NO: 129116 - DNA, 122 bp, Homo sapiens
ggggctgcggggcgaggtgagagcgggcgggcttgggagccggcaggtgcgggccgagggcgggcacagcggccggcggagctgaggcgcgcggcggggaaagctcggccggcctcccgggc

SEQ ID NO: 129117 - DNA, 122 bp, Homo sapiens
cgatcagatttggggaggtgcggggcgtctaaatacagttgcactgtgtctcagcaggcgcgcgttcggccagtatccccatctccgtttcctcaacaaaggtagtgctggggaaactgagg

SEQ ID NO: 129118 - DNA, 122 bp, Homo sapiens
agccgcgcggggatctggggtttctctgggacagcggcggcggcggtgggcggaccgtggcgcggggacgagcggccggttagcggcgtgtcggagccggtgtcacctgcgggagaggaagg

SEQ ID NO: 129119 - DNA, 122 bp, Homo sapiens
cggagtcagtgattaagccggctccaagacaaagcggaggccgagcccaggaagcaagcgcgctctccgccccgcctggagggagggcccaaccacagcacagccgcgctcactcctcaccc

SEQ ID NO: 129120 - DNA, 122 bp, Homo sapiens
tcgaagaagagggtaaaaattgggagttccaggggaggccaatggcattgagcagcagcacgaaggtcagaaaaggtgcaggacccaggcccttggctgtgagaaccgtgtaacaaatgttt

SEQ ID NO: 129121 - DNA, 122 bp, Homo sapiens
attttaaaaaataaaaatacataaacctctgtctgtgagtgcccgtcttgccctctgccacgtttgttccgggaactgccgccttgctcccttgcctgcatttctctgcgtggttcgctttc

SEQ ID NO: 129122 - DNA, 122 bp, Homo sapiens
ggctaaaagaaaggcccaggtcagcctcatccttgagacttagcgcccgcaaaagttgggcggggctggttggaccaggttgcattgaggcggcgcagggccctgctgagggaagaagggca

SEQ ID NO: 129123 - DNA, 122 bp, Homo sapiens
ataatgtctgtgtttctctcccacctgccactggaactggagaatgcactttattctgggcggggggtgagtgggggaagacccaaccctcctttctcgctgcccctaacgcatgcacggtc

SEQ ID NO: 129124 - DNA, 122 bp, Homo sapiens
tccagagtgaggcggggctgatgggggtcgcggaagctgccgtcgcttgtgtccagaacccgtcttaaaagaacccgggccagcatccccagtcgcgcgccctcggcccgcgtgagctctcc

SEQ ID NO: 129125 - DNA, 122 bp, Homo sapiens
caaaacctgcctttccttttgttcctaaacagttacaagataaaaggccgcatatctccccgggtggcatccctcaccctgaaaatgtaaattaacagcttatctttatgagtgtgggacaa

SEQ ID NO: 129126 - DNA, 122 bp, Homo sapiens
agactctcatgtataccattaaaaacaaaattatatgccttttctcctgttaatctgcctcgtgccagtgatttttcactgaaccttcacagggcaaagacggaagtttccccttggctccc

SEQ ID NO: 129127 - DNA, 122 bp, Homo sapiens
cagcgttgggtacgttagagatttaagtcttttccccaactccaggtagctccacagatccgccttccttcccccaaacccccgagaccccatctccacaacttcggcctcagtccccagat

SEQ ID NO: 129128 - DNA, 122 bp, Homo sapiens
aaataaaaagtccaagaggagtctttgcctccctcatcattaaaataaattttaaaacaacgtaactgtttactaaattgaaatatttcattgaaatgcttcattgatagctctgattcctt

SEQ ID NO: 129129 - DNA, 122 bp, Homo sapiens
agtttaggtcctgcctcactgtccgggaaacgcgtgccctcgggggagcctttgccaagccggtttttcccgaaggtgaccagatgctcctgggccactgcctctgagacctcagggaacgg

SEQ ID NO: 129130 - DNA, 122 bp, Homo sapiens
tgagatgcagactgggttgctgtagtatttgggagctttgtaaggggcgtgtggaagaatcggatcctccaccatgctctgctttgccagcctaggtggcaggatgcctggaactcttgaca

SEQ ID NO: 129131 - DNA, 122 bp, Homo sapiens
gcgcggtcaaagtgcaatgatttttcagttcggttggctaaacagggtcagagctgagagcgaagcagaaggggctccctgtccggcccacgtgccctttccctcgacgacagtcgagggct

SEQ ID NO: 129132 - DNA, 122 bp, Homo sapiens
aacatgggagggacaaacaggaaaaccattctatctatccacttaattagtactaattaacggaacaaagttattaaatagctctcagtgctaagtcaagccattattcagaggcctttttg

SEQ ID NO: 129133 - DNA, 122 bp, Homo sapiens
tgtgactgtggctgcgtggtgctgactctgggtgatcaagtgggcgcttgtgactgtgcgcgctcggagtggatgtgtgtgtcctggacgagccgcgttgtgtgtgcggatgtggacaaccg

SEQ ID NO: 129134 - DNA, 122 bp, Homo sapiens
taattcaagttcacattatcacttgattggattattacaaaagcttccctaccaatcggtcgctcttacaccctgggcagcctcctccgatggcccactccccgcctctttcactttctgga

SEQ ID NO: 129135 - DNA, 122 bp, Homo sapiens
aatcaatagaaacaattctggaaaaaacattaaaataagcctttttttttctttacctttcgtcctaaagaaagcagcactgatttatccacttctctctctttacaattgaaacctaaaat

SEQ ID NO: 129136 - DNA, 122 bp, Homo sapiens
aaaaggaataaacaaacaagctgataaacaaacagcgagcgaggtagatgaaacacgcggcgaagatgaagcatgctgggcacgttccaaccccgcggtcttaggtacaaagcccattaact

SEQ ID NO: 129137 - DNA, 122 bp, Homo sapiens
ataacagtgagtatgcctgagcgtgtgtacggggctgggcagcgggggatgtcaccaacccgccgtcacgtgtaaccttgggcggacgggtcatttacacgtccacctccgtctcttctctc

SEQ ID NO: 129138 - DNA, 122 bp, Homo sapiens
agtaccaatttagtccagcacgccaagagtcaaagttccaagtctcctgaagggagccttcgagtctacttgccccccgccccccccattttgcagacgagacaccgaagccagagaggaga

SEQ ID NO: 129139 - DNA, 122 bp, Homo sapiens
gtgctttaactgaactacttatcttggtaaccactgctttgtgttttgtcttcaggattgcgctggtaaagccatgtttcatctcctgttacaatttttcaatgaaaggcttcaagatcctg

SEQ ID NO: 129140 - DNA, 122 bp, Homo sapiens
gtcgcgccgagaaaggtgaggggctcccagcccagcgaggagacggcggggctcgggacccgggcgggcggagggcctggccccaccgcacacacggccacgcgctcagacgtggacacgcg

SEQ ID NO: 129141 - DNA, 122 bp, Homo sapiens
ggggagccggggcggggggactggccgggcgccgccgggatctgctggccaagcttcccgcgccgcagactcgctttcccgcggctcccggggccccaaccagaccccgaagctgggattct

SEQ ID NO: 129142 - DNA, 122 bp, Homo sapiens
atcaagtgctctgaactgtgtgggtctctggttgctctccgactggctcccggtaataggcgggagcctcccgactccttccgaaatttaagccatgtaagggtgcgccctcctgtataaac

SEQ ID NO: 129143 - DNA, 122 bp, Homo sapiens
agcaaggtctccaggacaacaatggtcttgcagcttttacttacaggctaacaggctgggcggtaagctctgatgacaatagctgttttgcttctgacttactcattttcaatgccctttta

SEQ ID NO: 129144 - DNA, 122 bp, Homo sapiens
gggagggaggcacagtgatgctctgggtgctgacctttgtggggagggcacagtgatgctcggggtgctgacctttgtggggagggcacagtgatgctcggcgtgcttacctttgtggggag

SEQ ID NO: 129145 - DNA, 122 bp, Homo sapiens
tggaattgctttagtttgagtgtgccttcctgaagtgagttgaggcgagttggcgcagcccgggccaccagtgggctgcatcacttgttcctctttggagttgggttgggtggtcttgagat

SEQ ID NO: 129146 - DNA, 122 bp, Homo sapiens
tgcgctgggtcccttgggggagcgagctggcatcggaggcccttaccccaggaaaagcgccggaaataggttccttgggaagctggggcctgggcccgggcggtccgggtctctggactgct

SEQ ID NO: 129147 - DNA, 122 bp, Homo sapiens
accgttaacgtcaggaaatgacagatccaacgctcctgcttggggcagcgtggaggccagcggaggaactgcaggagcctaaaggagatggcgcgcgggcctggctcaggagagcagccgtc

SEQ ID NO: 129148 - DNA, 122 bp, Homo sapiens
tgcgcaaaaatcgccggggtgcgtttggggaaaggatcccaggccaggtcccaagagaggcggcggcagcccacttccttgaagagctggagattgttcaaagggcactagaccccggctaa

SEQ ID NO: 129149 - DNA, 122 bp, Homo sapiens
gacgctggtcactgagtgcttcatggcctacctgtatccgctgcagtggcagcaccccttcgtgcccatcctgtcggaccagatgctggatttcgtcatggcccccacgtccttcctgatgg

SEQ ID NO: 129150 - DNA, 122 bp, Homo sapiens
ttaggggtagcgcaaacaaagttctgacactaaactttactgagccctgcatcctgcccacgacccccccagaaacacctacgcaccactctcctagccgccgcagccccgccagtctcgcc

SEQ ID NO: 129151 - DNA, 122 bp, Homo sapiens
tgccttgctcctgtgtgttctccctgcaagtgggggctgcagcctcctgcctggcctgctcgtttgcacagggcacctctgcacaagccagggtgtctgcaactggagcagctcaagcttag

SEQ ID NO: 129152 - DNA, 122 bp, Homo sapiens
cattcaagcgctatgtgcaattgacacaaacttgtgggctaaagtgcaagccatttttttcgcgtttgaatctttttctctgtccctgactcctttcttccccctactcccccctcctcctt

SEQ ID NO: 129153 - DNA, 122 bp, Homo sapiens
taatctgtttctggcctgattcccgcatgagtattagggtgatcttaaagagtttgctcacgtaaacgcccgtgctgggccctgtgaagccagcatgttcaccactggtcgttcagcagcca

SEQ ID NO: 129154 - DNA, 122 bp, Homo sapiens
tccaggtctcagttaacagtttaggtttggggatgtcccaccctccagagctccagtgggcgtcctcctgcatgggggcccctactaaataaacaccagcccccgccatctggccctaacgg

SEQ ID NO: 129155 - DNA, 122 bp, Homo sapiens
ggtgtctgagggcagttttggaatcaatctcccacagatatagagggacaactgtatatacggtttggtgtcataagaggttttaggcatccaccatggtactggaatgtatccccctggat

SEQ ID NO: 129156 - DNA, 122 bp, Homo sapiens
aaaaaaaaatcccgagtgttgactttccatgctgctctgagcattttgaatgtaacctaccgctgagcctatgatcacacctgactctgagacagcagggggtagccccagcactttccaca

SEQ ID NO: 129157 - DNA, 122 bp, Homo sapiens
gactgtaggtaccttgtcttaatcccctttgtttttatttttttctgtccccagggcagccgtgtttgcttttatggattgtgtagcacacagctctaaagagtgcctagggttgaacagtg

SEQ ID NO: 129158 - DNA, 122 bp, Homo sapiens
cgtcctcaccttcaccactgttgctatttccttccactgttccggacgcgggtccactcccgtgggattgtgggcgcaggcatgcagaagaagaacactctgctctggtattttctaaagag

SEQ ID NO: 129159 - DNA, 122 bp, Homo sapiens
aacactgatgcacagctgtggaaggtggggtatctgggattacatgccgacatccaacctcgctggacctatccggccccaggcattgcaccaaggactgagatacactcgtggatttaatc

SEQ ID NO: 129160 - DNA, 122 bp, Homo sapiens
aagtgaaaatggcaagccttggatcaagggtgtgtgccaagaggaagcagatgacagcatcgtggctgtgctccaagtccagacacagaactcttctccacaggtgactttctcttggcaga

SEQ ID NO: 129161 - DNA, 122 bp, Homo sapiens
ctgatctggcggggaggagggaggggcggatggggtttgctggagaacttgaccttgcttcgctcccctcaaggggcagctgctgggagaccaagtgtcaccggctggcaatcagggcccca

SEQ ID NO: 129162 - DNA, 122 bp, Homo sapiens
cccctgcaattccgctttcagctggaggccttaggcgagtcagctgcccaaacgtgggatcggggctcctgctccagcggccctacagggatttcgggaagtaccatgtgcaccagcgcctt

SEQ ID NO: 129163 - DNA, 122 bp, Homo sapiens
ggaggattggttgagccccctgaggctgaggctgcagtgagccatgacctccagcctgggcgacagagtgagaccctgtctcaggggaaaagaaaagtcccctgcttgtgctaacttttggt

SEQ ID NO: 129164 - DNA, 122 bp, Homo sapiens
gccgaggctgccgggcgcgtgagagtctcacaatgacaatgtccgggaaggatttccaaacgtcagggttaagcatgggagcgattctcgtccccgccacacccggatccgccaggacagag

SEQ ID NO: 129165 - DNA, 122 bp, Homo sapiens
tgccaaggcggcgtcagctcgggctccggcggccgctcggcgcgcggtggcggctggtggcgaggaaaaaatgggccattgcccgagcgatcagtccatataaggctgggctccactcacga

SEQ ID NO: 129166 - DNA, 122 bp, Homo sapiens
tgcgaatgcttccgagtaaccaatcggtgcgcacactcccccggccccaccacaagagggcggtgtgactagcaaatgaagcgtagaagacccatcagcagtggaggttgctggggacaacg

SEQ ID NO: 129167 - DNA, 122 bp, Homo sapiens
acaccgctcaccgggctgtaaataaaagtgacgacttggaggagtgggggtcaaggctgccgggagggaaaaggcttgcccattttagaaaccgacttggagctcggaagagcaaacgtagt

SEQ ID NO: 129168 - DNA, 122 bp, Homo sapiens
ctctcctggggcctgtcctgcaggactgcccctgagcagatcggcctcttcccgggcgcccggtgggcccctcgaccccctttgaggcagggagtgagataactgtgattccctgtggaggg

SEQ ID NO: 129169 - DNA, 122 bp, Homo sapiens
gtctttggggtggtggaagcggagacctctgccacactgggggctgcctgatgtccggtccgggaaggatgccctgctgtgtttgctcgggacaggtaagagtttgtggacctcgatggtct

SEQ ID NO: 129170 - DNA, 122 bp, Homo sapiens
ggtgtcgaataggaggacccatgtagattcgcagatggcctggatgggaggaagggcagacggtacatgtcccagcccacatagatgccccttgctgagggtagcaggaccttctgttgaac

SEQ ID NO: 129171 - DNA, 122 bp, Homo sapiens
cttcctgtcactgcactgcacagatataagtacccccattgctaatggggtgctggcgtgcgcagctctgagcactctccctcattcatcttaaggataatgcaatgccaatgcagttaaca

SEQ ID NO: 129172 - DNA, 122 bp, Homo sapiens
acatgttccctgagagcctggggggtggggaacccagctccagctggtgacgtttggggccggcccaggcctagggtgtggaggagccttgccatcgggcttcctgtctctcttcatttaag

SEQ ID NO: 129173 - DNA, 122 bp, Homo sapiens
tccacatcccatctcccaaatgcaaaatctgagctcacagcaatttgggaggccgaggtgcgcagatcacgaggtcaggagttcgagatcagcctggccaacatgtgaaaccctgtctctac

SEQ ID NO: 129174 - DNA, 122 bp, Homo sapiens
ccacagcctcagccggggtttctgtccgggccctgatgggtccccagcagggagaaacagcgtccggcgcgctgtggcgctcggcgaacgtgcgctgagttcaggcgttacaacggggtcgc

SEQ ID NO: 129175 - DNA, 122 bp, Homo sapiens
gagtaggaggaaagtcgggcgggaagggcgtcaggaatgtccgtgacacgtgaatggggccgtgtgcaaaccttgtatgacatcactgagacacctagcggaaaacagctaattctttctaa

SEQ ID NO: 129176 - DNA, 122 bp, Homo sapiens
ttctcaccactctcgttcgccttaatctgagtggttgtgggtgagcggcggccggggcagcggcttcccctggacctggtgttcggtcctgaacccctgggcaggcctccccttctggggca

SEQ ID NO: 129177 - DNA, 122 bp, Homo sapiens
cccgcccccgaccacttcagggcaaggcgggcttagtcttaggccctcccctttgagtggcgttctagaccactctcttcgaccctccaaccacgcggacccgggtactgccaagctcacac

SEQ ID NO: 129178 - DNA, 122 bp, Homo sapiens
ttgtatgactcacaacctcccagacctgccttaggaatgaaattcagacctccaaactgacgaggccacaggaggctggagtgggccagagtggactgtaggaggcaggagtgagccgcagg

SEQ ID NO: 129179 - DNA, 122 bp, Homo sapiens
cagaagcagcctccactagggggcttcggcgggaggattcccgggggcgtcgcctgcttccgccgccgcctccttcagtgaaagtcccttttgggtccagctgccacagccaccgcgctccc

SEQ ID NO: 129180 - DNA, 122 bp, Homo sapiens
gctcgcccgtgcgccgaggtcgttgggttttagacccagagagcacgttccgtaagctcccggcccaaatcccctcggaaaaattaatcacaaccaccagcggatgcaaaatgtgtgcctgt

SEQ ID NO: 129181 - DNA, 122 bp, Homo sapiens
ctggcaggtgagacccgctctgctgggcagtgtggctgacaagaggaggctctcggggagcgctctttgtccctatgctgtggcctcagccagggcttctgagaacgtggacaggacgctct

SEQ ID NO: 129182 - DNA, 122 bp, Homo sapiens
cccaggctctgctgccccttccatgtccttgtgtaagcatccatggacaaagctgactcacggggtgtgcacagctgcagggaggccaggaaacaggggttttattctagagggccttgtgc

SEQ ID NO: 129183 - DNA, 122 bp, Homo sapiens
cctgtgtatccttgggcacgtcacttaacttctctcagcctggttctcttctgcaaaatgcgacaggaatacagtgaggattaagtgaaataatgtttgtaagcttctagggcaaggctggg

SEQ ID NO: 129184 - DNA, 122 bp, Homo sapiens
aacagttctggcttcttgctgtaggaccaaggggttgccctggaggaggggtgggggccccggcctcggcatggctactctaggaagagccactgctactcaaggagtcactcagccccttc

SEQ ID NO: 129185 - DNA, 122 bp, Homo sapiens
tctcagggaccctggagctgaaacccaagtaccacctgcatctgccatgtgcatagttcacggagaaacaaaagcaagactcctcttggacttccctattccacttgattgcttgcacagta

SEQ ID NO: 129186 - DNA, 122 bp, Homo sapiens
tccttacctgttgattaatcgtcaagaacaccctcggcagcccgaaagatggtggcgcggcggccaaagccatgaaccgtcttctgttgtttgcagagttgatcttggattattgcgggggg

SEQ ID NO: 129187 - DNA, 122 bp, Homo sapiens
gctgtgtgaacgtcctccatctgcagtgtgaggacagcgaaccctagtgtgagttaaccacgtaggaagagtttgaagtcagacatgacattcagactgaggtcctcaaaactgaggggcat

SEQ ID NO: 129188 - DNA, 122 bp, Homo sapiens
cgagcttgaagctctttgcacatgcacatgccctgctgtctacctgcagtgctcttcccgcgcacggccacaggcctgggaggccgtccggttaagtacccctcctacggttccgattctac

SEQ ID NO: 129189 - DNA, 122 bp, Homo sapiens
taggccccctcagtggcccctccttctcacctgggtctcgggtcccctagtgagcgagagcgtccccagccgcctacctggccatggccaacggagtgatcccgccgcccgggggcgcctcc

SEQ ID NO: 129190 - DNA, 122 bp, Homo sapiens
gacagacagacagactgggaacaagatgacaaagcccaaggaccccaagaccatcatcctcgactcttccccttcctctatccacagctcatacatccaaagcacacagactgggtcctcac

SEQ ID NO: 129191 - DNA, 122 bp, Homo sapiens
agtccaaagtcagagcagggaagttcactccatctagagttgaaggatggtaaaaccacacggaaaagggagtggacaggaggggtacagaaccaggctaatgagacaatctgccaaccaca

SEQ ID NO: 129192 - DNA, 122 bp, Homo sapiens
gcgggggcggggggtagggggtcggttaaagtcccgagtccagggcccggatggagggggcggagctgggcttcgccgggagtgcccggatggagagggtgtggcctcggcgggagcggaat

SEQ ID NO: 129193 - DNA, 122 bp, Homo sapiens
gacactttgcaactcctggagcacccgccaggatcaaagccatcaccaggtgcaggtgggcgccaggccctctgtgggtgggcactggtcctcagcaccgctcaccgccgccgccgggcagg

SEQ ID NO: 129194 - DNA, 122 bp, Homo sapiens
tacacgtgtgtttttcctgctcctcatcctgccccacccctgctccagagctggctccctcggggacatctgcccctgacctcactgatttagacatcagaggaactgagattcccctagaa

SEQ ID NO: 129195 - DNA, 122 bp, Homo sapiens
gggcacaggctgtttgtggaaagccaagtggagcaacttccttggtcaccccttgagggccggaaagttgggagtttgtgggtgggggtgaaatgaagagctgggctcctcctctcttttct

SEQ ID NO: 129196 - DNA, 122 bp, Homo sapiens
tcctacatctgttatctttcttgcctacaactcttttatgtctgaagctttttgtcttggcgattgctttgcaacattcacaaaggacaccattaccctaaagacctcaccagtggatcctg

SEQ ID NO: 129197 - DNA, 122 bp, Homo sapiens
agaaagggctgtcaggtcagcttgaaaggagagaggggaatccgataaccttttagttagcgaatgctatacagcagtccagctaataagggaggtttctatttgggggcctgaatggccct

SEQ ID NO: 129198 - DNA, 122 bp, Homo sapiens
cacccctaatgctagcgccactgctgatgcggctgccaggcgggggaaaagtgttgtgtacgtgcagattgctgatgcttctcccataatgttttgtaggaagtttccatgcttcttcggtt

SEQ ID NO: 129199 - DNA, 122 bp, Homo sapiens
tagtccgaggctggaggggcggagccggatccggcctcctgaggtgcctttcgtgtctgccgacccagtcccagggactagcctggggaggaagaatggaacccctgcagttagaggttcct

SEQ ID NO: 129200 - DNA, 122 bp, Homo sapiens
cggtctccatcgacctggaccggaacggcctgcgcttcctgggcgagcgagccttcggcacgctgccgtccttgcgccgcctgtcgctgcgccacaacaacctgtccttcatcacgcccggc

SEQ ID NO: 129201 - DNA, 122 bp, Homo sapiens
tgcgcctgtgctttcctgcagccctccgctgtaccagctgagccctgtacagaatctgagcgtcagagttgcagacccaaccttgccaccttgcaaatcatcccttctctggaggcctcagg

SEQ ID NO: 129202 - DNA, 122 bp, Homo sapiens
tcagagtgctgggaatcacacacaatcgtggctgagaagagagaggctggctttttgtgccgaggtccagttctccgtgtcagagtccatgtcatgacccactcccgtctggagcctcaccg

SEQ ID NO: 129203 - DNA, 122 bp, Homo sapiens
tggtccagacccccaatctgcccagagaagccatgacaggagactggtgattggtgcaagcgacgtgggatgaggtaatctctcccccacccctttttctctagcatccgtagactgtttgc

SEQ ID NO: 129204 - DNA, 122 bp, Homo sapiens
tgggacagtgattggtgccgagaatgggccagagaagcaggtctgcctggagcaggcacccgaggccgcgtgcaggggcggtcctgggccaccaacccctggaagctgggccaggagcttcg

SEQ ID NO: 129205 - DNA, 122 bp, Homo sapiens
aatcttgcccttcacctctcctccttcctgctgctaggaatgtcattgtgatagagctgccgcagtcatcttgcagccatgaggtgatattaaagggagaagccaatgttagaaatggtgga

SEQ ID NO: 129206 - DNA, 122 bp, Homo sapiens
gggggcctggggaggcgaggggagctctatccccctttcagatcctccgcagcgccttcgcgggtcctggaccctcacgggatcgtcccctttcgcaactccaagctcagccgccgggtttc

SEQ ID NO: 129207 - DNA, 122 bp, Homo sapiens
gagagtgagcatgacaccatccagggaacaggcacgacagtgcccaggacagggtggcaccgagttttttcaatatcccaagtctttcagttttttttttttttaaatgcatttattcttta

SEQ ID NO: 129208 - DNA, 122 bp, Homo sapiens
tttaaaaaagaaaagattccgcccactaaacttgataaaagtatcacactggcccttccccgggccctggccaggctgccacgccttctcccctccccctgcgccaggtccccaaatccaga

SEQ ID NO: 129209 - DNA, 122 bp, Homo sapiens
tttagggaaagctcttggagggcttgactggagtagctgtcctggtccctaaacacagcccgagcattttgggggaaaggacagggaggactggaaggaagagaggtaagcaccagagccat

SEQ ID NO: 129210 - DNA, 122 bp, Homo sapiens
acgggatgcagcagcgacgagggcggcagggcctgaccccaggtccctgtcgaggccggccggacccccgcggccccggggctgaccagccaggctctccaaccacctccaccgcacgaccg

SEQ ID NO: 129211 - DNA, 122 bp, Homo sapiens
ttcgaggtggttggggatgtggtgctgggttatttcccactggggacacaccagggccgccggtgcgcaggcgcggcttccgggcgtggccgcgaccggtcgttaggacccagcgagtcccc

SEQ ID NO: 129212 - DNA, 122 bp, Homo sapiens
atgggtcagtgttgaagcctacacggagctctggagccagagactcctcaaaccctgtctcggatgcccttaacctctctggggccacctgcttctgctggagtttagtcagatgcgaatgt

SEQ ID NO: 129213 - DNA, 122 bp, Homo sapiens
gagtcaagacagaacaacaattctgtgaatttgaaggtggagggtaggatggttctggggcgcagttgaaggggaagaagtacacatcactgaatgaaggagtggaagcctatggtgaatgg

SEQ ID NO: 129214 - DNA, 122 bp, Homo sapiens
aggtggagatccagtcctcggaagcagcctctcaattttatcctctatgagtggactcctcggcgctcagtgtcaacactctggtttagcaataatgggtttaaaaacaaacaatttgatcc

SEQ ID NO: 129215 - DNA, 122 bp, Homo sapiens
ctcagtgaatgcgtgtggaatccatgatcagtgaacaatgagagcagcagggccggctcacggggcccacgcgggagacttgggtgggagagggtgccctttgagggggggcgtggaggggc

SEQ ID NO: 129216 - DNA, 122 bp, Homo sapiens
tgtggcaaaggtgtctgggagctgaccttgcttatgcatccgagggctggggccacagggcgggcttgtgctaagcaccttcttgcctagtgcccaacggcttggaggatttccagggccaa

SEQ ID NO: 129217 - DNA, 122 bp, Homo sapiens
aagaatcaatatcaacccagttgttcaaactgaaacctgggtatcaactgtagcttgtcccgtaccctcatgctcattcctaaaatattcaattcactaccaacgtctatcaattctaactt

SEQ ID NO: 129218 - DNA, 122 bp, Homo sapiens
ccccctccctccccagtcccctgccacatccccagaagtccccgcctccgggtccgtgcgcggggtaggctggctgtgatctcgccgcccccgcccctgcagacttcatcgtgttcgtggcc

SEQ ID NO: 129219 - DNA, 122 bp, Homo sapiens
gtgggacttgggggaatccgagccaatgagccccaggatcaagaacttctggattggaggcggggtataaacagggctggtggacttggggaattcaggactgcgagtgaggatgatcaccc

SEQ ID NO: 129220 - DNA, 122 bp, Homo sapiens
ctccttggggagtaactgcgactcctgctgttgcttctgctacggcttctgctacgactacggcttcgagatcgagatcttccataacttggacttctgggcccatcaactttaacccggat

SEQ ID NO: 129221 - DNA, 122 bp, Homo sapiens
ctactaatgtatttaaaacccagcaatctggtggctcatgtcattatattagcaagaaagcgccaatcatcattcccagggctagaaccctggaaaaagcagtgggaagcaaaatctttgag

SEQ ID NO: 129222 - DNA, 122 bp, Homo sapiens
ggacagggtttgagtttacgagtgtctaagaccttgaaccttcctcacagaggcagaaggcggttatgctctgaattcctggctccctacaacaaggcagcaccctgtgatattggtcatta

SEQ ID NO: 129223 - DNA, 122 bp, Homo sapiens
cccgggatgttgctggagccggcaggaactgcaaactcaccgcgcgcgtccctgcacacccgcacctgcgcctcgagaactcctggccagttgaatacccggtctgccgccgagcttcgctg

SEQ ID NO: 129224 - DNA, 122 bp, Homo sapiens
tttcccatggcatgcgctgttctgatgggttattgctgctgatagcccttgtttttataacgaatagccaaagcaatgtcaagcaccaccagtcagtcccttgggggaaagtcggggcattt

SEQ ID NO: 129225 - DNA, 122 bp, Homo sapiens
gaggagagaataggcttccttaatgggaatgccagagaggtgccctggggttggaatccccgtccttctgcatctggcaagccacatgtcctctctgggcctgggtcccatctgtggactgg

SEQ ID NO: 129226 - DNA, 122 bp, Homo sapiens
cttcccatactgctgtgaatcatgcatatgcctcatctgctgctacttataataaaactgcgtaacaattacctctttaaaaatagatgtttttcttctgttttcagtagtgttcatggtat

SEQ ID NO: 129227 - DNA, 122 bp, Homo sapiens
gtaaccctcctgccttggcctcccaaagtgctgggattacaggcagttattttgacaatacgattatgatggttaaactgagacgtgtgccaggaaggttagggtgaatcagacagattaga

SEQ ID NO: 129228 - DNA, 122 bp, Homo sapiens
cccggaggtgacgtcactcgacaacccagtcgatgatgtcatcattggatgcgagaggggcggggcttggtagtccctcaggggagtttaaggacctggggtgtaggacccatggaaggctc

SEQ ID NO: 129229 - DNA, 122 bp, Homo sapiens
gtttgtcctcccggttcctctgaaggagttggtcagtagaaccatggcctccattgactacgtcctcagagtcgcagctctcttcagtcgagctccagtcacagaggacggttgtggtgaga

SEQ ID NO: 129230 - DNA, 122 bp, Homo sapiens
aaacataaaaatggaatatcttcagtcacctagatacttctcgtccgatcatgaagtaaccgccaacggggaaagaaaattcccctttcagcaacagtgaggtctctcttctgctctttttt

SEQ ID NO: 129231 - DNA, 122 bp, Homo sapiens
accgggcaagttatagagaaacgccacactcttagactaattaaggagtcctttattagccggcgactgagagatggctagcgctcaaaattctctcagccccgaagaaggggctaggtttc

SEQ ID NO: 129232 - DNA, 122 bp, Homo sapiens
ctaggagcccctgggagctcagggacacaagggtgcccattgccccctgctggcagcccacgtgacagtctcactatccgccccgcaatcgtccccctgtgtgcctgacagtgaacaaggca

SEQ ID NO: 129233 - DNA, 122 bp, Homo sapiens
acagctgatcgatgtgttcttcttcctgttcctctttgcggtgtggatggtggcctttggcgtggccaggcaagggatccttaggcagaatgagcagcgctggaggtggatattccgttcgg

SEQ ID NO: 129234 - DNA, 122 bp, Homo sapiens
tcctcctcccgtttgttattgtttcttgcaaggcttttccactgaggttcaggacttttccggaagttaccgtgctgtcaaatccctccgccccctgcaggaaacggaatccttccgcagct

SEQ ID NO: 129235 - DNA, 122 bp, Homo sapiens
tcatttaatcatcacacctacctcgtgaggtcccattttctggagcaggcaggggctgcccgggctggcatgtgacagagctgggaactcctgcaccgtcccacagtcacctcgtctcttca

SEQ ID NO: 129236 - DNA, 122 bp, Homo sapiens
caggtgacagcccggaagctgcggaagcggatgagggaagggcggccgtggccctgggggcggcgggagctgctttgcctccaccgatctccctgtgcggccctcatgtgctgtgctcgctg

SEQ ID NO: 129237 - DNA, 122 bp, Homo sapiens
caacgtggagctcgagcaactcagctgcagagtaagagctcgcagccgtgcgtgtttccacgtgtgggagcgcctctcattcccccaccacacacgcccagtttccgcttctcgcccccaag

SEQ ID NO: 129238 - DNA, 122 bp, Homo sapiens
gataccttggtaagctttctcacgcttcttcttctcggtgtcgatgtactgctcagacgccgccttgatcttctgcacccaggcggtcctacgggagaagcaggggcagccgttggccgcat

SEQ ID NO: 129239 - DNA, 122 bp, Homo sapiens
tgatttctccccacgcggttgtgcggtggatctggcggctcctcaggtggaggccggggccgtccattccctgctgctgggtggagatgttgtctccagttcctgcctttggcctccaggca

SEQ ID NO: 129240 - DNA, 122 bp, Homo sapiens
tctcccggaaagcggtcgggcaacgatgacgacaatgacgcgccggctctgcccccgccacgagcggcgcttcccgatgatctcacgctgctcgccacgccccctgctccttaactcttctc

SEQ ID NO: 129241 - DNA, 122 bp, Homo sapiens
caggcttcaggttctaagctcggtggtctgggaagtcccgggaagagaagaactgagccacggtcccaggaagagaaaaacagatagtggccaggctccatgtgtgcccgccctgctctcct

SEQ ID NO: 129242 - DNA, 122 bp, Homo sapiens
cttaagctgaggtagccctgggactaaatatgccatcctcttgtatcaagatggagaagacggccgaggttcagggaaagagcccagtggaagaacccaacctagtgagaggaaaacgggca

SEQ ID NO: 129243 - DNA, 122 bp, Homo sapiens
cccagtttctttaacaaaaccaaatcctcattttacatccccaatgaagcaaaacaaagccggataggacacagaccacagggctcctgctccaccggtatctcattcaacctcctttatcc

SEQ ID NO: 129244 - DNA, 122 bp, Homo sapiens
tgtcctcatcacaggtcaccggcggcacagccctatttttcttgtggagtgactgggaaccgctgtgctccgggagccagggtgaggcacagaattgtatttctgcagccagatcccctccc

SEQ ID NO: 129245 - DNA, 122 bp, Homo sapiens
agtaggcttggataggaggggatgctgatacttcttcctaggagaacagaaacaagagaacgagagagtgtacacagtagggaagacaagaattcagagatataataactaatacttatttg

SEQ ID NO: 129246 - DNA, 122 bp, Homo sapiens
aacccagaatgagattctactacacacctgttagaatccgggctgcgcaggtggcgtcagcgctgccccacctccaggaaggaacctgggctgcgtgtggctggcggtctcctagcgactag

SEQ ID NO: 129247 - DNA, 122 bp, Homo sapiens
tacaattttatcttagttatcatttcaactcttcaattttgttttgcaacctacagtccacgcaaactgaacttcctgctcagctgaaatacagcaacttgagatgcagattgctcatgcag

SEQ ID NO: 129248 - DNA, 122 bp, Homo sapiens
cctgggaagtctgaaaacatcatagggcttgtgactggggcctaataaccccgaggacaacgtggtgggctgagcgaatacctcaatgtgcgagagaacgaaaagctcgaaccacgaccgtg

SEQ ID NO: 129249 - DNA, 122 bp, Homo sapiens
gagggaggcaaagcgccctggagccgcgtcccctgccttgcaagttagttctccaacacgcgaaaagggtagagagaactgatgcggtgacagaagcattgggtgaagttcacttggcacca

SEQ ID NO: 129250 - DNA, 122 bp, Homo sapiens
accttttagatcccttgaggcctcttgggttcttcatgtaggaaattaccatgcactcaccgagatttttgtctgttccaccgtgaactccccatgaatccctgtaaagtgacccagaaccc

SEQ ID NO: 129251 - DNA, 122 bp, Homo sapiens
atctctactaccacctcatttctgaagtccacttctcagtcctcagcattatcttgcccccggctcgtgtgtgcccactatgcacagaatgtgtgttcagagtccatctcattttaaggcac

SEQ ID NO: 129252 - DNA, 122 bp, Homo sapiens
aatggatttaaattagaaacactaatgactatattagcatattttgtgctcagtgggagacgccaatggaagggttctttgggtacatttggagagagataaacagttgagtatcattaaca

SEQ ID NO: 129253 - DNA, 122 bp, Homo sapiens
gagggggcggccaggcagaggcgcccctgccttccagatggggcggctgctgggcgggggcgccccctgcctcccagacggggcggcggccgggcggaggcgctcctcacctcccagatggg

SEQ ID NO: 129254 - DNA, 122 bp, Homo sapiens
ccagcactccctctttcctttccacagcagcaaccacaggatcctactagcacagatgcccggctggtctttcaaacagaatcctcaacgcccccctccaccaccaccaccacaagcctcca

SEQ ID NO: 129255 - DNA, 122 bp, Homo sapiens
ccagcaacccttggtgcggggacaggacgggccaccggagtccggagagactacaagtcccggcaggcatggcccagacgcagggactacgagtccccgaatgcatggctcccagcttgcgc

SEQ ID NO: 129256 - DNA, 122 bp, Homo sapiens
gacgagcaactctgaatattctggggaaagaaggatcaggcaaggaccagtgattccctacgggaaagtaatgacttctgactggaagctcctaccaggaatttctgacaggagaccaggga

SEQ ID NO: 129257 - DNA, 122 bp, Homo sapiens
ggcgcctgccgcctcccctgcgcggatcagccgccgccgcccgccgcccgccgtcctctgcgttcctgctcgcgatccggcccttcgccgcgaccctgtcctgtcccacccctccccttctc

SEQ ID NO: 129258 - DNA, 122 bp, Homo sapiens
gagcagccagtccctgcctcagccctataagcctgtaagtccctcacagggtcttctttccgtcctttctgctgtagttccccttcactcctcctccgtggacaccagtttcccttatttcc

SEQ ID NO: 129259 - DNA, 122 bp, Homo sapiens
ttcttttagcaaacctcattactaaactgaattgtattgtgtctcttttccccattccttcgcatacatacccccaataatttatttgaggtcagagacccctatctttctcacttttgtag

SEQ ID NO: 129260 - DNA, 122 bp, Homo sapiens
cagaaatgagcatcttgctggctgaggagtggctggatgacaaatcgtcagaaaaggtgacgcgagaaggaagccaggtttatgaccacgagtgagttctttaatttgacaaagacagttct

SEQ ID NO: 129261 - DNA, 122 bp, Homo sapiens
acttgagcgccggccccaggctgcggggtctgccgggcaatgtggtttgccagacgttagcgtccgggaaggaagagtttttcgccaataggctttcggcattaggttctcccgccgagcac

SEQ ID NO: 129262 - DNA, 122 bp, Homo sapiens
gcggagccctggtcttttagagcctcatgtgctcatcgtggccactgacttctggaggctcgtccccagtctagggctcttcagggtggctttgggaggagtcaggatgtctctgatcacag

SEQ ID NO: 129263 - DNA, 122 bp, Homo sapiens
aaggtgcataggtttgtcatactataaaagctttctttaagaggattgaaataccttctccgggtcattgttaattcttagttgtgaaataccttcttcaggccattcttttcagtgaaaga

SEQ ID NO: 129264 - DNA, 122 bp, Homo sapiens
ctcggcgctcacctgcggagagaaacagaggcgtgggttctgcctggggggccgactccccgggggtgccacctgcaagtccccaccaggtccagggcttggactcaggagactgtgagtcc

SEQ ID NO: 129265 - DNA, 122 bp, Homo sapiens
gcccctgcccacatttagaaagatcctataatttccagaccgtcctggtcaataataatccgagagaaaccttaatgtttgatttcttcctcgttgtgatttgtggcttgtggagctcaaga

SEQ ID NO: 129266 - DNA, 122 bp, Homo sapiens
gcacagcccggcatcctcccggactccctctgccccacagtctgacccagacccctctcccgcagtgcctccccagacaatccacctgctcaaagaccctgagaagaccctgggaggagctg

SEQ ID NO: 129267 - DNA, 122 bp, Homo sapiens
gcggagggaggaagcgcagccggggaacgtggcgcccgcgttcctcccgcccgggggctgcggctgggctgagtgtgtctttaaatctgagccccccgcccctcgcggtggggccgggactc

SEQ ID NO: 129268 - DNA, 122 bp, Homo sapiens
gcgtgtcacactaaggagtgacacacaagacccagactcttccctaggctgggagagactcggcggttgaaagcagggaggcgctacaggagagaaagggctgaacccccgcttccgcagat

SEQ ID NO: 129269 - DNA, 122 bp, Homo sapiens
ccccagccctggtgcagcctcctgacttcaggcccgtctctgcctcagtgtgaactgtatcggagagatgtcctcccagcgtgggctgctgtcctgcgggtgagaatcataacgtggtcatt

SEQ ID NO: 129270 - DNA, 122 bp, Homo sapiens
ttgaaggcggcctgtccctccagcaaatgcagaacagtgtctcaccttggcagctgctcacgtgctctcaggcatcagctgtgcaccccacctggccctcagctcagtaggcaggactgcca

SEQ ID NO: 129271 - DNA, 122 bp, Homo sapiens
aacagtagggcattacatttgtgtgaattaaatgtgaacttctgtattacgttgcggcgtcggcagtcctgcgttccctggagtaactgtacgtatctgcctttgctgggaagactgtgggg

SEQ ID NO: 129272 - DNA, 122 bp, Homo sapiens
ccccggtctacgccgtttcccattggtcgctgcctcctcgcgtcatccctccgcgccggccgacgcgccagccaccacgtctcgagtgcaggcccagtccactgtagatgcgcttccggcgg

SEQ ID NO: 129273 - DNA, 122 bp, Homo sapiens
gcttttcagcacccgggacaacagcagcggcgcccggagagacgctctccacccgccccgcgctcgcgtccagtcgccggctctgtgctctcctgcccgggctttctctcacccgcccggcg

SEQ ID NO: 129274 - DNA, 122 bp, Homo sapiens
aaatgttcagacttcttaaatacggacggtctctgagccttcttagaaagcagagtgggccggggagatggtgcaggcagatgaaatcaagaatgcaggggagatggatggttgtgattggg

SEQ ID NO: 129275 - DNA, 122 bp, Homo sapiens
tcgcctgaacgtccccgatcttacctaagagagaacccctcctacgtctgcgaagtgctccgaactgatatatgacaatatctactttggatcacgtgctcagagagagagagactaagacg

SEQ ID NO: 129276 - DNA, 122 bp, Homo sapiens
gctgaggtgcagaaacttctgggaccccacgtggagggcctgaaggcggaggagcggcaccgcccggtgcgggactggatcctacggcagcggcaggacgacctggacacgctggggctggg

SEQ ID NO: 129277 - DNA, 122 bp, Homo sapiens
tggggggaagtatgggggctggaagtcggcattgggggtgtgggacagcggcggggcgctcgtgtagggagattgacctacagtgcccagctggggcaaccgtgccgtcccgttgctggtgc

SEQ ID NO: 129278 - DNA, 122 bp, Homo sapiens
cctccttgcgcttctgcctctagctctctgctgccctctagccacaacatctgtccttgtcgtggctttccgcaggcagaggcattgagaatggaactctgttcaacagatccagttgaact

SEQ ID NO: 129279 - DNA, 122 bp, Homo sapiens
gagagatattgaagttttcctgcacttggatgttgtcgggcggcgttggcacagggccagcgctcaccgccaggcaggcgctcagcagcaagagcagggccccgaggctcctcatggctatg

SEQ ID NO: 129280 - DNA, 122 bp, Homo sapiens
ccttcccagccctcggacccgtctatccgccagtccttccgccgcctcctctcctcgccgcgtctgcccacggaccctggctctgctcccgggctccccatccgtccacctaccgctggacg

SEQ ID NO: 129281 - DNA, 122 bp, Homo sapiens
aaacccaggtgcaggccttcgatgtccattgttctcattccttcagatagttacttccaacgaatctgcactgtggctgtgaaataaaaagcagtacctgtttgttcaagttattaacagtt

SEQ ID NO: 129282 - DNA, 122 bp, Homo sapiens
ccttcctctctcctcccgcccgggggccgggaccgcgctgtgcccacggagggaactgggcgtctctggcgcactggggctccagctgcatgatcccagctcagaccttaagcctcagtggg

SEQ ID NO: 129283 - DNA, 122 bp, Homo sapiens
accggagcctgtgacgggcggagggcgtgcggcgcgctgggttagttacctggcgctgggcggggcaagcgggaggcgggggcggggccggggtgacatctcaggctgtgattgggccgcgc

SEQ ID NO: 129284 - DNA, 122 bp, Homo sapiens
ccctcagcaggcttcatctcactgaagcaggcccgagtggtggctgctccagagaagccccgctcccaggtccctcgcacaagaagccggaggcgggagagggtcggtcaaggtgaaaacaa

SEQ ID NO: 129285 - DNA, 122 bp, Homo sapiens
gtcaaatgacagttttgccattccagattgccaaaagagccagtggccagtctagggcaccgcgccgtctggcatctccctggaggccctgggcctggcccgaggctcagcccggatctgca

SEQ ID NO: 129286 - DNA, 122 bp, Homo sapiens
cctcacccagtttgtggccgagtcacctgacttagggcagctgacctacatgctgggccccgactggcagtttgacatcactgaccttgtgaccgagttcatgaaggtggaggagccgaaaa

SEQ ID NO: 129287 - DNA, 122 bp, Homo sapiens
gccgcttcgccctctgcagtcaagatgctgggcgcgtcgaggactgggtaagattcaggccgcttccttctgtgcgtctgggaccaaagctcaggaccgctcttagaggagcagattgaaag

SEQ ID NO: 129288 - DNA, 122 bp, Homo sapiens
gaactcagtgcttccctggcacagcgggaggatttggaccagccctagccagaagggaatcgcacatcctcaaggaacttgagtttcttggcaagccttaccaccatgggctgaagtactct

SEQ ID NO: 129289 - DNA, 122 bp, Homo sapiens
ggccctccgagctcttcctggaccctcctcggctccttcagttcagggctcagctgggcacgtgggcgcctccttggctcctccggctcaggcctctcctcgagctctgggccctgagtatt

SEQ ID NO: 129290 - DNA, 122 bp, Homo sapiens
tagcgggcggaggagtatttaagaccgggcggagttggaggtggccaagggcagaatgagcgggattcagggcaccaggacctacccaggcgcgggggacacctctgaccttaagtacccct

SEQ ID NO: 129291 - DNA, 122 bp, Homo sapiens
aaaaataaaaccccacgagattaaaaatagtgtgaaaaaaatatcctaaagggaagactccgtgggagaaatgagaaccctggggaaagcacttttccagatagctaacaagctttcaatat

SEQ ID NO: 129292 - DNA, 122 bp, Homo sapiens
ttcgcggacttgaggagtggaccgaccgagcgctgtgcgtaaaaggaccgctggggcacacgcccgagcgccaccggagctaggagaccgcggcccggaggtcggcgagtcgggggcaggcc

SEQ ID NO: 129293 - DNA, 122 bp, Homo sapiens
gtcccaggcgcggacagggaggggctccatgaaacgcagcaaggtttggccagagcctgccggggtcatggagcctctcccggcttcttcaggccactctaattacagagtctgtggtaggt

SEQ ID NO: 129294 - DNA, 122 bp, Homo sapiens
gcaaagcaggaagtgcaagtcccaccccataggagcagctgggactgagtacccatgacacgcagatgcctttaccagggtggctggtggcacaaggccccacatgaaggagggtccgtgtt

SEQ ID NO: 129295 - DNA, 122 bp, Homo sapiens
gcggcggggaggcttgctcctgtctcgggtctccgctggggacatcaggggacacgtctgcgagcagagcagtgcttgcccggtctcctgctgctgtaatgcccattcttttttatttcttt

SEQ ID NO: 129296 - DNA, 122 bp, Homo sapiens
cccgggccccaggagacggagctactggagacggagggctactcggatccctgccgccaccgttcttctctcctcttttgcaaagtgtagaaatcgccttttagatatacataggaagataa

SEQ ID NO: 129297 - DNA, 122 bp, Homo sapiens
ggggcaggggtgctagagatgcctctcttctttcacaaacctcctgtgctggcctgctcccggagtgctgtccagaaagcctcttcaagaaacccattacaagtgaccacaaagaatgcccg

SEQ ID NO: 129298 - DNA, 122 bp, Homo sapiens
caggtgagctcctgccaatgggcccaatctggaaagaagtctaggaactcctcgctgtcccgcacgccgcagagcagcctgaccacgcggtgcggaggatggaaagctctctgcagcagggg

SEQ ID NO: 129299 - DNA, 122 bp, Homo sapiens
cctgcctcgtctgtgggacattctccttccgtctcactccccagagcaggcgacggcccccgcggcactgccgagaccgggaggttgcagcaagacactgaccaaacatcttcaggaaacaa

SEQ ID NO: 129300 - DNA, 122 bp, Homo sapiens
tacatgtgactgtatgaatggcatgttacggggcaatgtgaatgtgcactgggtttgtaccggcctctaacctgggtttcgtatgtgccatcaaagtcatccaggaggcgagtcaggccaaa

SEQ ID NO: 129301 - DNA, 122 bp, Homo sapiens
cttactttcccagaccagactgtcgagcaggagctaagactccttttcccctctgctgaccgccactacaggagcggttgaagccagacgaccaccttgtggagttaaactccgtaaccagg

SEQ ID NO: 129302 - DNA, 122 bp, Homo sapiens
aggattccagcagccctgacagccctgacccaccagggcactgagccagctctgtgcctacgaagacagctgtctgctgaaccctttctgggtgcagcctgctgggtcctaactcgagtctc

SEQ ID NO: 129303 - DNA, 122 bp, Homo sapiens
cgtaggtcggccagggtctacgggacacacccagcagcccaggagatcctgctaggcgagcgtatccagggactgagtcagagaccatttggaaaaaactggaaagaagaggtgagcacagg

SEQ ID NO: 129304 - DNA, 122 bp, Homo sapiens
tgtgatggttctaatccatccaacatccacccccgccctcagctatctaccctgagcaggcgccgctcacactcgcgggccgtctccaaccccgcgccagccacccgagggggcgttctcag

SEQ ID NO: 129305 - DNA, 122 bp, Homo sapiens
acccggcccaactggtacccaaattcctcaagtagaaagagagcttcagacgattttcaccggtatctcctcgcgagtattaaaagagccgctcagaaacccataaacttgtctaagatgac

SEQ ID NO: 129306 - DNA, 122 bp, Homo sapiens
tttgctgtggtcacttgtgggcctgggagagcccagccctgctctggcccgcccccatctcgccatctgtggaacttttggtttcaagcagctgcaagagttgccaagaggttgaaagaatt

SEQ ID NO: 129307 - DNA, 122 bp, Homo sapiens
gctgccaccgcacgccatatggagaggtggccaggggcggaagaaaagggaaaatcgatccggagcaagcagccccgagccggggtctcagccccagcctgaagaccaccgcccccgagcac

SEQ ID NO: 129308 - DNA, 122 bp, Homo sapiens
aaaaaataaaaagaaagccgcggctgtaaataaaggcaaatccgccactctctgaggggccgtttgtcctcccctccttggccccgtccttcccgccgccccctcccggctcccgggccccg

SEQ ID NO: 129309 - DNA, 122 bp, Homo sapiens
agagaaatacacacttctgagaaactgaaacgacaggggaaaggaggtctcactgagcaccgtcccagcatccggacaccacagcggcccttcgctccacgcagaaaaccacacttctcaaa

SEQ ID NO: 129310 - DNA, 122 bp, Homo sapiens
ctggctggaaggtgtgataggaagtgggtgaactgaaaattcgctttggcagagtaacatcgtctaattctgtctgtttgcaagtggagcgtgggggaccgatgtttctcctgggtagttag

SEQ ID NO: 129311 - DNA, 122 bp, Homo sapiens
ggtgggcgttgcctcgaggggtgggagtcaaggcctcagacggtgcccaggtcgtggggccggcaatgtggggaccccacgtcccagacgggcggcttcccctggcccccccacgggcaggc

SEQ ID NO: 129312 - DNA, 122 bp, Homo sapiens
tttaaggccccttccacgtccccatccctcccagaaagtcacaaagcctcaggaagtgagcgctgggtgggagtatacggctcattaagttcaccacccccaagtccctgctgcagagaggg

SEQ ID NO: 129313 - DNA, 122 bp, Homo sapiens
gaggcttcaaagaggtctagtaaatgagggttgaaaagattgttgggttcaggaactagacgattacaaattttgagaaaaccgtttccatttaatagaggggcagaaatcactttacatag

SEQ ID NO: 129314 - DNA, 122 bp, Homo sapiens
ggcgccatcactcacttggacaagttgagcttccctgcggccaggtggctctgcaccgtccgccagcggcctctccccgccttgccaccgctgcccggctcgctgggggcagccccgccgct

SEQ ID NO: 129315 - DNA, 122 bp, Homo sapiens
gcagaaggccagtgagggtggtcccactgcacagtgatcccctctgtgcatctgctcagccgaggctgccagcgatctgaataaacctccctactagcggtcaggtcttgaattgaagcgtg

SEQ ID NO: 129316 - DNA, 122 bp, Homo sapiens
cactgccctccgtggggacgtctgcactcacagtgtcctcggcactgccctccgtggggacgtctgcactcacagaatgtcctcggcactgccctccatggggacgtctgcactcacagtgt

SEQ ID NO: 129317 - DNA, 122 bp, Homo sapiens
ggaagttttggacctattataggttctcagtaaatgtaattcctttccctctgtaccatacgctactcttcccaagtcctgagcctcatagtcacccgagagggagcagggtggggatgggg

SEQ ID NO: 129318 - DNA, 122 bp, Homo sapiens
acctcaaatgatccacccaccacggcctcccaaaatgctggggttataggcgtgagccaccgcctccggctgttatatttacaatacctaagttaccccttggttacggcacactgcagaaa

SEQ ID NO: 129319 - DNA, 122 bp, Homo sapiens
caaccagcaccatgcccatgatactggggtactgggacatccgcggggtgagcgagggtccgctggacggtgggacgagggcgcaggggagggaagtgcgaagcagctgcgggacggactct

SEQ ID NO: 129320 - DNA, 122 bp, Homo sapiens
tgagtgagagcatacgacgtttggtttttccattcctgagttacttcacttagaataatacggaactagactgattttaaaagccgagcagaacaagtcacaccctactataaactctaaga

SEQ ID NO: 129321 - DNA, 122 bp, Homo sapiens
cgctgggtggcccgctggctggctggttggctggctggctggctggctggctggctggctcgctggctggctgcccggctgactcctcactggggcttcctgtagggctggacaaaggacat

SEQ ID NO: 129322 - DNA, 122 bp, Homo sapiens
gcacgggccagggctccccagggagagcacggcctggcaggtgctgctattgtctcagggcgcaggggccttccgcggaggtctcccggcagggaggcagggcaccggtcagcacgcggcag

SEQ ID NO: 129323 - DNA, 122 bp, Homo sapiens
tgagcaaagacagatgagggtacagaatgacagacgctgcacccggtgtgacggtgtggccggccgcacagttgcagccgtcaagtcctgcaccccctcgccactcccacaggtggagacaa

SEQ ID NO: 129324 - DNA, 122 bp, Homo sapiens
ccgagtcttgacgctggtgggcgggcctcagggcacactaaaccaatgggctaggtggggcggggcgacggtggtggcggcggcggcagcgggttcggttgcgcgtggcgcacggggtggga

SEQ ID NO: 129325 - DNA, 122 bp, Homo sapiens
ttgaccacgtgtcacaggccagtatctagaaagcgatgtctctctgcctgtcatctccaccggcatggacgggcgctgatcaaaccctcaaacatttattaatttgaacagtcaccctactg

SEQ ID NO: 129326 - DNA, 122 bp, Homo sapiens
gcaactccctgcctcctccggtagtctctctggactctccaagtgacttgctgggggcaccgggcgcggggagggcaggcccccggggtgacgcaggtgtgtactttacagccagagaaggc

SEQ ID NO: 129327 - DNA, 122 bp, Homo sapiens
caccgcgactttctactgccccatcgcccttcctcctatggggtctccaactgcttcctccgaaaatagggcctgaacttcctctagtgacgtccccacccaaggctcatggctgccttcaa

SEQ ID NO: 129328 - DNA, 122 bp, Homo sapiens
agtgtgtcactttattgccaaaagaagacacaaacgatggagtacaatggtaggagtctccggctgggttctcagggattttctcaggaattatgttttgctccaagtcgtttcagttgacg

SEQ ID NO: 129329 - DNA, 122 bp, Homo sapiens
ccatccctgtgcatggatcccaggcctccagcccccgccccctgctccccaggcgcaagacgttccagaatgagccaagggggctcctggttcctttaccagcctccatgtcccctgcctaa

SEQ ID NO: 129330 - DNA, 122 bp, Homo sapiens
aacgacacggagggggacgtgccaagtgcgaacccacaggggcagagctttttagggatccgctctacctatttacatcataaattaggtttgtgctagccacgtaggaattaatccaggga

SEQ ID NO: 129331 - DNA, 122 bp, Homo sapiens
ccaggtaaactgcttcagctacctctctagggtgaccacacagttcactttccctcctgacgctggctgtgggcaactctgttttctctgcagaaaaggaaaagaaagcaatcatagctaac

SEQ ID NO: 129332 - DNA, 122 bp, Homo sapiens
accattctggagccatctaagcctccccaacgcctacggggtgtaaatctaagtatagcacgcaaagaccagcaatccgactccagcctagcgctgctgtgtccgttgacgtcttgcgctgg

SEQ ID NO: 129333 - DNA, 122 bp, Homo sapiens
gaagcaggacggatagagggaacacatgtggaatggctgttctcctaccccagagggtgccggatgatgttgacagcacggctgcttccctctcccctgcagcttctgtccccacccagcag

SEQ ID NO: 129334 - DNA, 122 bp, Homo sapiens
taataatcatttatatttgatcccatctcattaagaggcctgggcccctgacccctctgacgtttccccatcccgggtgccgtggggcctgtgggcaccagaaagccagtgtccctgacagg

SEQ ID NO: 129335 - DNA, 122 bp, Homo sapiens
tgatgaaaagacaccagggaaggcagtgtgggaacaagacttgtttgtgtagaggaaggtcggaaaagacacctttcagacctgtgccctcccatcaacagacagcacagcactcacactgg

SEQ ID NO: 129336 - DNA, 122 bp, Homo sapiens
ggtggtaatgaggcttgggtggatggtgcagttacaaaatagcccaactcctctgcaggccgggcccgtccgcccgaagtggccgccgcgtcgccttccagcggtccggaggtgccgcggtc

SEQ ID NO: 129337 - DNA, 122 bp, Homo sapiens
ccgcccgccatgttaaagctttccacggcttgtcactccctcagaaggaagcccgagccccgcgcacgtcttccacgcgtgtatttcctcaagtctgagacgctcgtctcttttcatgtcct

SEQ ID NO: 129338 - DNA, 122 bp, Homo sapiens
gtgactgctcttacaagacactgtggtaggtatatggaacagaatggagaataagaaagacgtaatatctgttctcgatctaactttcaactggtgtgtgtgtgtatgatatgaaggagttg

SEQ ID NO: 129339 - DNA, 122 bp, Homo sapiens
ttgaacccgggaggcggaggtcgcagtgagccgagaccatgccactgcattccagcctggcgacagtgtgagactctgtctcaaaaaaaaaaaaaaaagataattgggccactttacatatg

SEQ ID NO: 129340 - DNA, 122 bp, Homo sapiens
cacttgacaactaaatgcagttctaaattaagtcggctgcatggcccgcgaggcccctgccgagcactcagaacccactctgcagcttgctctttcctcttgctttctcactactgccccca

SEQ ID NO: 129341 - DNA, 122 bp, Homo sapiens
gcctgcctgtgggctcgtcgggacactagagagcaggcattcccgtggccgcgggagagccgcgttcctggctggccattcccgggccctctagaagggagcggctgagagctctttagccc

SEQ ID NO: 129342 - DNA, 122 bp, Homo sapiens
cggagctggccctgcggggcccggcgctcagaagtgatgaattgatcagatagacgaggccgggcttgtccccggccactgattatcgaggcgattctgatctgggcacggccaccgggctg

SEQ ID NO: 129343 - DNA, 122 bp, Homo sapiens
ctcctcaagtctgggtcattctcctttgagcattcgtccaggcatttccctctgcccacacgctccttcctcctgcccaccaccccctcccttcaggcgcttcggttttttatccgctcttt

SEQ ID NO: 129344 - DNA, 122 bp, Homo sapiens
gcgcccagccacctgtgtccttttgatgtccgttcatcactgcatgtgtgtgtgcatgcccgtgtaggtgtgggcgtgtctgtctctgtgagcccttccttactttctggctctgtgctcat

SEQ ID NO: 129345 - DNA, 122 bp, Homo sapiens
cagctttaaaaaggcaggaggcagagcgcggccctgcgtcagagcgagactcagaggctccgaactcgccggcggagtcgccgcgccagatcccagcagcagggcgcgggcaccggggcgcg

SEQ ID NO: 129346 - DNA, 122 bp, Homo sapiens
ggagtttaggctgtagtccctaagagagtctctagaaaccctgcccctagttttaagtttcgcccaatgaaaaaacaaaaggagagggacagaaggcgggtcggtgacgtaatgcgggttga

SEQ ID NO: 129347 - DNA, 122 bp, Homo sapiens
cctaagtgtcactttgctaaggcaatacaatggatttcaacaaagaaatattcgtttccacgtagtttgatactgaaagcagaaaactttctttttactgcatgcaggaaatggttttcata

SEQ ID NO: 129348 - DNA, 122 bp, Homo sapiens
cccttcggccccagagcaaaggatttccccgcttccggcgtggcccaaagaatcaagacccggtcagcaatggagcccagaacctctggcccccgccagtccagtgccgtttcttctacacc

SEQ ID NO: 129349 - DNA, 122 bp, Homo sapiens
gtgggggcagaacaggctctggaatggggttaggagtcatggttccagcgtgggctccaccgccaacttgctcccaaaccccagtttcctcaatggtcagagtggagcaatagttcacacct

SEQ ID NO: 129350 - DNA, 122 bp, Homo sapiens
gtgtgcagatgggatgggagggaagaggggagggagccagggctgaatttacagaggaagcgctacagcctgtgactctgagtgaaatgggaatccaggtcactgtgggggccacctggagc

SEQ ID NO: 129351 - DNA, 122 bp, Homo sapiens
aagaaagaaatctgattccaatcctgtctctgctagttcctagccagcaagtcatataaacgttctaagcctcaaattccttacccatagagcagagttaataacaacaattcattacaggt

SEQ ID NO: 129352 - DNA, 122 bp, Homo sapiens
tactatttttaaaacttttctgtagctataagccgttttttctgaggaagtcgaggagggcgaatatctttctggaaaggccagagcaaatgcacgcaagagctgagaaaagattggaaaac

SEQ ID NO: 129353 - DNA, 122 bp, Homo sapiens
tcacagggaaactgtcaggagccggggagccacgccgcgcgtgggaagcgggggctcatgcgtggtgccatgatccgccccgcgctggggagaacatgaggactagaactcagagttcatgc

SEQ ID NO: 129354 - DNA, 122 bp, Homo sapiens
ctgactcccacagcctattgtattaaccactgggatagattgccacatcaaaatgtatcacgtccccttaccaactaaggaatccatatgaatagcagcctgccaaaagcatgctaacacaa

SEQ ID NO: 129355 - DNA, 122 bp, Homo sapiens
gccctatgattgggctgtgacgcgtgagcgcattaatgacgtcactgcggctcgggagagcgcgccatgaggtcataagagcctttttcctccaggaagagagataccgcgatccaaggaaa

SEQ ID NO: 129356 - DNA, 122 bp, Homo sapiens
cctcctcctcctcctcctccgcggcggcagcggcggcatcctcttcctcctcgtcgggcccgggctcggccatggagacggggctgctccccaaccacaaactgaaaaccgttggcgaagcc

SEQ ID NO: 129357 - DNA, 122 bp, Homo sapiens
ttaagtctggtggaaagagactgcctagcgttcctgcggcaggaaaacaaaacatcgtggcgcaaagtctccctgcactcgccggcccccagcaggagacccgggctggcggccactgcgtc

SEQ ID NO: 129358 - DNA, 122 bp, Homo sapiens
aatttcataaatatgtcactatccattcatctttaagacttgagtactattttttatgtgcggagcactcttcactgtgttttctattatttatcttctatccttaggatctctgcttgaaa

SEQ ID NO: 129359 - DNA, 122 bp, Homo sapiens
gtgtgcgtgtgagagagagattagagggcggggaggggagaagagaggaagcaagctaaccggagagagagcaggtgagttttcttttgcagaacagagttaatgaagtggcaactctgcct

SEQ ID NO: 129360 - DNA, 122 bp, Homo sapiens
tgggtaccagacaatatggtctccagaagtttctcccattctgctgccctctccagatcacgcacccccccgttctacttgaaaacaaaatctacttgtcatcctaaagtctacttttctaa

SEQ ID NO: 129361 - DNA, 122 bp, Homo sapiens
atgcaagtccattctttttatttccccgcttccctccctgtgtcttacatcagtccctttcgtattccctttggcactgttcacagatgtgactcttccttccttcatccgtcctcactaat

SEQ ID NO: 129362 - DNA, 122 bp, Homo sapiens
ctgcactgctcgtcatggtgacaggatggcctgccccagatgagtgtcagtgtgtgtgtgcgtgtgtgtgtgtgtgtgtgtgcttttgctgcatttcttctgtcttgcttttgtcatctctc

SEQ ID NO: 129363 - DNA, 122 bp, Homo sapiens
cttcccgatgttgttcctcaggatgttccacaggctgatgttactgctgctcgggcagggcgccggcaggcacgttcttctccgggacttcgcttcccgaccactatcaaggacaggccctg

SEQ ID NO: 129364 - DNA, 122 bp, Homo sapiens
gccctcccccgcgcgcctccgctctctgggacgcctggccaaatgcggggcggtctctcgcgggccattggcttgggccaccgttccgagtcagctcctaggatttccccaggctttgcggc

SEQ ID NO: 129365 - DNA, 122 bp, Homo sapiens
ccacatgaattaacgaaactcaattcgcagcttaggctttggctcagccacgtgcgcatgcgtgcgtgtgcatgagagagcgcgcatgctggggaagaatggagaaaaacaatgaacaaaca

SEQ ID NO: 129366 - DNA, 122 bp, Homo sapiens
ttggacccagagacaaacacatatagagggaagatcatatgaagacacacagggagaagacggccatgtgactggagtgatgcattacgagccaaggaacgccaaggattgccagctaacac

SEQ ID NO: 129367 - DNA, 122 bp, Homo sapiens
agcgtctttgctacgccgcgcaggagtgtgtctgcttctctgtgcatctacacgtgtttgcgtgtccctgtaaagtgggttgagtgtgcggctgcggctttccgcccttggctcacactctc

SEQ ID NO: 129368 - DNA, 122 bp, Homo sapiens
cagagagagggcgaggagagggcggggcctcctcctttcacaggagcagagcggttcccccgcccccgacagcgctttctgttgctaggcgacctccgtgcaatcccgcctgattatccctc

SEQ ID NO: 129369 - DNA, 122 bp, Homo sapiens
gcagcagcaggcaggcagctctcattccttgtgggtgaaccgagcagctccttgggccgccggagttgtgaccagcctcaacttcggtgaacaggtgcctggaggaaggaggacggcattgg

SEQ ID NO: 129370 - DNA, 122 bp, Homo sapiens
tggagaagaaagtcctaagaaatacccacgtggataccatgtgtcaagcttatttctccccggctccatggagaggtgacggcacaccctactgaaggcaggggcagctaccttgctgcagc

SEQ ID NO: 129371 - DNA, 122 bp, Homo sapiens
gctgggggcgggccctgtgatcgggcggggcggggcctgctaaggggcggggcctgtgcgcggaggccgctcgcgaaccagccgtggggaactggtccacgtgggctcggtttgaccgcagc

SEQ ID NO: 129372 - DNA, 122 bp, Homo sapiens
gtttgcagtcatttatttattgtccgctgcaagctgccccgagacaccgcgcagggaaggcgtgcccctgggaattctccgcgcctcgacctcccgacgacagacgcctcgtccaatcatgg

SEQ ID NO: 129373 - DNA, 122 bp, Homo sapiens
cgacttcttgggccagggcatggccgagaacaccagccacaagtcctagcggccgctcagcgtccccaccttcaagtgcactcctgtctagggcttccctttgagccagggccgggtgtagt

SEQ ID NO: 129374 - DNA, 122 bp, Homo sapiens
agcctgctgggagaaggaggtacctgatgaacagcgagctcctccagtcctgagcttggtcgcccacgcagagttctagcccgccctgggccgcgcggctctggcccttggcgcggccgata

SEQ ID NO: 129375 - DNA, 122 bp, Homo sapiens
gggtctagtcaggtgcttgaccttttgtaggtaagtggcttacagtccccttctaagggccgcataatgttgagcctaggttcaaatctctgtgtgtgatcttaaacctcttagtgttaggt

SEQ ID NO: 129376 - DNA, 122 bp, Homo sapiens
cccttcaggaggccaaggcaggaggatcacttgagcccaggagtttgagaagagcctgggcgacatagtgagagcccagctctacaaaaagtacaaaaattatccagccatggtggcacgca

SEQ ID NO: 129377 - DNA, 122 bp, Homo sapiens
cattgagaatatccacctaagacatatgatattgttctggggtcaccactaaaaaagaaccgttgggtaagaagcacaccccaaactctgatcacatctccagaatcacatagcgtctccag

SEQ ID NO: 129378 - DNA, 122 bp, Homo sapiens
ctcttccttctggcaacagccagagaaagtctgttatccacacaatgcctttctgtctttcgtaagtatgcaatgatgaagatgcattacttgtcatttctgaaaacaaaacaattattaag

SEQ ID NO: 129379 - DNA, 122 bp, Homo sapiens
tgaacttgtctaaatgtgtttataaaataaagctgcggcccagggctgctcctggcggagcgggaaggtaatatgtttttaattggagagattgggggaaggaggcagcgggccagggtgag

SEQ ID NO: 129380 - DNA, 122 bp, Homo sapiens
gtaacacaaggcaagaaacagcctcccccacgtgatacattccaaccaatttttacaaaccgaagcctctgtctcctggcttgcagatgttttcaccagtgtcgtattttattttcatgcaa

SEQ ID NO: 129381 - DNA, 122 bp, Homo sapiens
tgggatcgaacccagcaaggtgagaaatccgggcggggtggcagatggggaggccttccccggggaactccaggagaggggaggacagcgagggccccgggcgcggcctctcgtgtgccccc

SEQ ID NO: 129382 - DNA, 122 bp, Homo sapiens
accgatgctcgactcgtgcatgccaagctgttctgcaatgaggtctgaagacgatgcctccggcacaggcaacctctcatcaagatgctcatccagcctgaccagtggtcccaagtgttgtc

SEQ ID NO: 129383 - DNA, 122 bp, Homo sapiens
ctgaccacttgtggttattaaaagtctcctagggcttgtgaaagaattaaagggaggagacgctgattttcattgtcttggcccaattccaagtttgataattaggagtcctcctccctctg

SEQ ID NO: 129384 - DNA, 122 bp, Homo sapiens
ccccttcgttccttgtaaataaatcccgcccccggaaatgacgtctccaccttcgtgggtcgcgccggataaggtgggctttgggcggggtgctgctgcagcggcgcttcctggtggtcagg

SEQ ID NO: 129385 - DNA, 122 bp, Homo sapiens
ttcctggtttgcacaaacggtttagggcattcgttccggtttcagggtggggtatgccgtcgctcccctcctccccgccctgtgcttttaaaagttaggaaacaaaaaagagcacccattgg

SEQ ID NO: 129386 - DNA, 122 bp, Homo sapiens
cgggaattcgcggtgtccccgggggagggagacgcaaaggcccttcctggaaggcgacaccgtcccgggccgttgcatttgtgagagagagccaaggcagtatcctccaaaggttgggcctg

SEQ ID NO: 129387 - DNA, 122 bp, Homo sapiens
ccctgtcactttacagaccctgaaacgatggccagcagccgagtcactagacagcagagccgggaagcagcggctcctggaaacatcgtaggcctcgcccctccggctcagggcggcgccgc

SEQ ID NO: 129388 - DNA, 122 bp, Homo sapiens
ctgcgcagtcatgtcttaagaatcctttgcgctctcggtgcccccctccacgcccaggagcgtgggaaccctgcttaagggctttactagggaaaacggtgctggttcactggggcgcgttt

SEQ ID NO: 129389 - DNA, 122 bp, Homo sapiens
atctttgatgcctgctcactgcacaggccccttcctctctccccgcacctcctcccacaacgcctgcagatctcagatgcgtttgaactacagtaaccccaacccagctcgcggcaagcagg

SEQ ID NO: 129390 - DNA, 122 bp, Homo sapiens
ctgaggaagaggaagtctgccgcagccaggttgaggatgtagatggagacggcgttcctgcgcatgcggaagcccaggagccagagcacaaccgcgtttcctgtcagcgtgacaagggaaat

SEQ ID NO: 129391 - DNA, 122 bp, Homo sapiens
gagcattacttgagcccaggagttaaagaccagcctggcccacatagtgagaccttgtcccgacaaaaaaattacagatattagccaagcatggtacttggaggctgaagtgggaggatcac

SEQ ID NO: 129392 - DNA, 122 bp, Homo sapiens
ttctcctgtgtaaatggtacccttatcgctgcctggggaaaccaacgcacgtgtggcccgcgctgagtagtttggagccagacagactaggttcgaaccccagctccaccggaaatagccgc

SEQ ID NO: 129393 - DNA, 122 bp, Homo sapiens
aataaattcctctgtccttatcggaaatgcacctggcccccgcttcggaaaatgactggccgctctctccttgcagcgtgttccgcagctgtaggcacctgtcgtcctgccttcgatggctc

SEQ ID NO: 129394 - DNA, 122 bp, Homo sapiens
tgttagggtgactcaccactgctgttgtggccccgaagcagctgtagacaatctgtaaaccggtgggcgtggctttgttccaataaaacttgatttataaaaacaggtatggcggggcccag

SEQ ID NO: 129395 - DNA, 122 bp, Homo sapiens
actgcttgttcctcttctgcagttccttccctcacatcctccccatcccccaaatccctgcggcaagggcgagaggaaacttcaaaggcacttctgaataaaagaacacacggtgggacatc

SEQ ID NO: 129396 - DNA, 122 bp, Homo sapiens
gacagtcagcaggcaaatactttgctaaagctaagtggcattccaagtgtcagctagatccgaagagataattgtggcctatacatcagcagcaaatacatgtctgtttacttactgaccat

SEQ ID NO: 129397 - DNA, 122 bp, Homo sapiens
ctcagggagacagaaccacaaaaagaggattttaataaattttctagcagatatgacatccgacagattattttaatgcaaagcagatgaagaactaccctatgagtctaaactacacccat

SEQ ID NO: 129398 - DNA, 122 bp, Homo sapiens
tgtttagcatagaattccttcagttagagaactttgtttgcaagtgacagaaaacacaaacgggcttaagcaaaaaaggaaactgatgaaaaccaaaggatgccagattcagctgcaacttt

SEQ ID NO: 129399 - DNA, 122 bp, Homo sapiens
aggttggtaattagaagaagctcaagttccaccggggccttgcctgtaaaatgctggagacgtttacccggaggccacagcagactgggaacatagcacggagggcaggcatggtgtggcac

SEQ ID NO: 129400 - DNA, 122 bp, Homo sapiens
ggctccttaatcagctgtcagatgcccggtgtttttgatagttatttgagagaataaaaacggaggacaagaagcctcggaagtgaaagtagagtccgctcctttactcaccattctgatga

SEQ ID NO: 129401 - DNA, 122 bp, Homo sapiens
tccgcctcccagggcccgcctcctgagcgcagcctgcagcccggactcggccccgcctcccggaccctggacccctccccaagtgggcccgtcctaagttccgcctcccagagtccgcgcac

SEQ ID NO: 129402 - DNA, 122 bp, Homo sapiens
gccggctgctcaggtcagaggaagcgccccttcccccacactcccctccacgatccgggacgtcagggtccccagcccctccgcccgaagctccccaaggagcacaaaaccaagccgcagct

SEQ ID NO: 129403 - DNA, 122 bp, Homo sapiens
tttgttcccaagtcattaaacccaatttcaacctcaaatctgttaacccagtcctaactacggcaaatgctgtggccctatatcagataccagcagggacagtctgtcatcttaaaatctcc

SEQ ID NO: 129404 - DNA, 122 bp, Homo sapiens
tgaccttgtgatccgcccgcctcagcctcccaaagtgctgggattacaggcgtgagccaccgtgcccggcctagattcatttcttaaatggcttgaacccccatagtagttcttccttattc

SEQ ID NO: 129405 - DNA, 122 bp, Homo sapiens
ggcaaaaaaggaaatggatctgccccaagcacagctgtttcataaaagcaacgcgcggctcgtgtggaagccaaaggagtggatctcatagaagtggagcagaacagaggtggggaaggagg

SEQ ID NO: 129406 - DNA, 122 bp, Homo sapiens
gccacactggcctccagcacgttctcggccgtggtcttgccgtgttgctccttgaggtgccgcctaatggcaggcttgtgggcgaagcgcacgtcgcagtaggagcagcggtagggccgcgc

SEQ ID NO: 129407 - DNA, 122 bp, Homo sapiens
catacatgttagggctcctctgacccctgtcgttccttaggtttctcaggtgttcccttgcgtgaggattttcaagaagcatcaagagtgcagccttcagggtccagggagcgggggcgaga

SEQ ID NO: 129408 - DNA, 122 bp, Homo sapiens
gaaaagctaccccccaaagtcctggagctgtggtaagtcttctttgctgactcatcagatcggttcagaaacgagaggattttcatctcctctcctaaatacctactcttttccccttccct

SEQ ID NO: 129409 - DNA, 122 bp, Homo sapiens
tggccccttcatggcacagcgacagctttgccatcagccggcaagcatgcggggtgtggacgacacagccggagagagcagaggccaggctcatgaatcggacaacgagctcgagttttcaa

SEQ ID NO: 129410 - DNA, 122 bp, Homo sapiens
ccggcgggaccataagggcttaactcatatatttaacccccctccaaaaagtaagtggcccgtgtggtgtctccgctccgcccgccgccccctagccccagtccatccttgtgtctgactct

SEQ ID NO: 129411 - DNA, 122 bp, Homo sapiens
aagttatacaggctcagggcctacacccctttgagtgcagcgcctgcagttggaagaatgcgcatctgcggagctggtgcccgccgtcaggtggtcggcagccccatgcgccgcgaacccgt

SEQ ID NO: 129412 - DNA, 122 bp, Homo sapiens
cagtttgcagtcgaagaaactggctcagaacgtgaagggtccatggtcactgagagtgggcggcggcgccaggagtccgccctggatctgcccgactccttccactgtgccagtttgccctt

SEQ ID NO: 129413 - DNA, 122 bp, Homo sapiens
gcaggcctcaggccggagcagccccatcatgccgagggagcgcagggagcggtgagtgcccgcgccgcggggccggacgggacgggacgggacgggacgggtggcgtgggggaggggcggcc

SEQ ID NO: 129414 - DNA, 122 bp, Homo sapiens
gcacgcaaacaggaaagacttcagccaatggcaggccgcctatgcggggcggggccctggcgctagccaatggtaggcagtgtagggtgaggggcggggcggtgcctcagctgtgggccgcg

SEQ ID NO: 129415 - DNA, 122 bp, Homo sapiens
tctgtgcagacgtctgggggcgggaggaggacgggccagcagggggcgcccaggggccagcgggaacctcagcaccgcccctcagtccttcaaggtctatttcttgggaataaagacatttc

SEQ ID NO: 129416 - DNA, 122 bp, Homo sapiens
tctccttctctcgtgctgggtggtgccgttcccacggctccaggcccttcccaaagtcgccgtcggacttgtccttgaagccactctcgcagccacactccttcagctcctcccggtgcgcc

SEQ ID NO: 129417 - DNA, 122 bp, Homo sapiens
ctgtgactgcccgcagactcgggggacccggacaaggagagcccgggctgcaagcggcggcgcacccgcaccaacttcaccggctggcagctggaggagctggagaaggcgttcaacgagag

SEQ ID NO: 129418 - DNA, 122 bp, Homo sapiens
cctcgagagagtagacatttaccgaaagtttcccaaaagaaatgaatggagtcgcttgtgcgccgggtgtgggtcctggcagcggtcctattgtgctgtgtatctttaatgaagctataaca

SEQ ID NO: 129419 - DNA, 122 bp, Homo sapiens
caagcgatcctgttggcttagcctgctgagtagctgtgactagaggtgtgctccgcagcacgcggctaatttatttttactttttttttttttttttgtagagacagggtttgccatgttgc

SEQ ID NO: 129420 - DNA, 122 bp, Homo sapiens
ggcagcgcaggccgacggcggtgctctcgctgcagagggctgctgagaatggaatcagcacggtccctcacagatgcagcgggcgacactgggccacgggggcactgctcacggactctgag

SEQ ID NO: 129421 - DNA, 122 bp, Homo sapiens
cattcacacaccaaggccctgctcacctttggaaagctgggggactgagtggggagggcacggtgtggtgtcagcctgagcccactggatgaccctaatcaccaaacatctgcttccttctc

SEQ ID NO: 129422 - DNA, 122 bp, Homo sapiens
ataaggcctcagaaaagatgacaccacacccccccagacactagctcttcagaaacgccccggtttacctctgaagctggcggaggaagtgttccaggagttgctgaataggtgtgctctca

SEQ ID NO: 129423 - DNA, 122 bp, Homo sapiens
tggtagtgactctcatctggggtcccaccttagtgaatgtaccttaggtctttgtatgaacgcaaatatttgtataaacacttaatttaaaaaatgagagctgatgtgcgcctgtaatccca

SEQ ID NO: 129424 - DNA, 122 bp, Homo sapiens
gacgaatcccctccctgcattctcggacagtgccacgtcctccggctgccagcggggcagcgccgctaggtaccgctgcgcgccgcccccgcttcccgccagcagcctcacctttcccggcc

SEQ ID NO: 129425 - DNA, 122 bp, Homo sapiens
caagaggagagcgaggcggatttgctccaagaggagagcgtggggcgccgtgctgggcctcgcagggacggatcctctcgggcggtcccctctgactccctgcccgagaggatcagtccttg

SEQ ID NO: 129426 - DNA, 122 bp, Homo sapiens
cgctttatttttctttcaaatctttttctcctaatcttttaaaataaggaaaggtgcctccgtgttgggtattataattgtattcaagtttttgcaactccattcaaaaaagtacgtatttt

SEQ ID NO: 129427 - DNA, 122 bp, Homo sapiens
aggcccactctgtggaacaataggaaggtcatccagactagtggggacattgggtccagacgggggtagggctttctcacatctagtcaagggcctccagcaagcttccagcaactgaattt

SEQ ID NO: 129428 - DNA, 122 bp, Homo sapiens
tctcctagtgtgccaggcagtgtcaggcagtaaaaatgtaagcatatacactcttgccctcggaaagcctttacactgtgtaggatagaaacaagtaaatatacatcatacactgtcaaata

SEQ ID NO: 129429 - DNA, 122 bp, Homo sapiens
ttccctgctgcagggctccagagaagggtgcagctgtgactccttagtaactgggggatgcgtgctccaccagacaacaggggtctactacataccccagctgctagaacatgtcctaccac

SEQ ID NO: 129430 - DNA, 122 bp, Homo sapiens
tggtttgcttgtgcacttttggggactctgcgggttctgccgctcctgcatcttatgtcccgcttagattggcgctgccctaacccccgccccccgacggtgtcactggcttcctagggcag

SEQ ID NO: 129431 - DNA, 122 bp, Homo sapiens
ggcaagaccgagaactgcgcggtcctgtcaggcgcggccaacggcaagtggttcgacaagcgctgccgcgatcagctgccctacatctgccagttcgggatcgtgtagccggcggggcgggg

SEQ ID NO: 129432 - DNA, 122 bp, Homo sapiens
ttccctagcccacttccctccacttccagagcccagctctgcctgggccactgccatccccggtcgcatacttggagccttttgccagccttctgatgtcggttactgcaaaatccaggctg

SEQ ID NO: 129433 - DNA, 122 bp, Homo sapiens
ccggcacgccaggctcctttgcaagagctggcgcggcagctttggagtgacccgtggaatcgcgccggggagcgagcccggtggatccagcgcgctggagggagagggcagaggaaaggagc

SEQ ID NO: 129434 - DNA, 122 bp, Homo sapiens
aacgcgacggccctggcgccgggaaagaacgtggagatccacgccgagggcgcccgccaccgcctggttctgcacaacgtaggttttgccgaccgtggcttctttggctgcgagacgccgga

SEQ ID NO: 129435 - DNA, 122 bp, Homo sapiens
catcttgagcggcctgacttcccgactgctgtgtgggacccaggtcagcagaacactggacgctggcaggaggcactcaggggtggcgtcgacgcaaagcgcagagcccaggctgggaggat

SEQ ID NO: 129436 - DNA, 122 bp, Homo sapiens
gctgcgtggtggataaggagctggtcagaaaggtcgttccatcttaacaactaaaacctgcgtcttcccatgactgaccattaccgacgcatcacggcaagtcacttcccggtgtgaacccc

SEQ ID NO: 129437 - DNA, 122 bp, Homo sapiens
tcataggtggcattgaaggtcaacccaggcagcctgccatcagcatgaggacctttagggcgggctctaaaataggggggtttgggaagggcatctggaggaatgcagaggactgagaagag

SEQ ID NO: 129438 - DNA, 122 bp, Homo sapiens
gaagcgagagcaagtgaatgtctcagtccccaggtggcggtggtggccgcgggggcgcgacggcggggcgggggcgctgctgctgcgggggcaggaagcggcaagggcggtggcggcccgct

SEQ ID NO: 129439 - DNA, 122 bp, Homo sapiens
tgaccagatgtcactttcattgcaatcttagatttggcaggttttggctggtttgtttaccgcatactgtttctcagcagggtcttgatgacctgtatcttgtgataccagtcctgccaact

SEQ ID NO: 129440 - DNA, 122 bp, Homo sapiens
ttaactgtttacaggctgtgtataagtgtgcatggatgtctgagtgtgtgcaaattaaaacggaaatatgtgccggagtatgatacaaagtacaggaaagtactcgggctttggagtctgtc

SEQ ID NO: 129441 - DNA, 122 bp, Homo sapiens
agcgcctgggcgagtgacatctgggccggaccagctggtgctgcgcggcgcaggtaagggcgtgcgcgggcagggacaggggtaaggggtgccggggcgcggggatacagggaggcctgccc

SEQ ID NO: 129442 - DNA, 122 bp, Homo sapiens
ggtgtgggaaacttgagaggagagccttgcgcagcttcttctgtttacctggtgttggaccgagcatcagcttgctctctaccacactaggaggtagggcggtgggggtttttaactcccca

SEQ ID NO: 129443 - DNA, 122 bp, Homo sapiens
gccgggggtccaggaggcgacggtcgtggggcagggacagctcacggaggagcccggcagcgctcagacctccgaggtgaccgtcaggctgtttaaccttcaaacacagggccgcagcgctc

SEQ ID NO: 129444 - DNA, 122 bp, Homo sapiens
tggggagagcaggtctagaatcatccagggatgcggaaggggctgcttcagaaatctagacgtgccacttctaggacttttctcattcattgcttcattcatttattcaacgattcaatgct

SEQ ID NO: 129445 - DNA, 122 bp, Homo sapiens
gtaaacttggagactcagcaagaacagctggaacccaagtacccccatttaaggatttgccgggagctcctgcttggcatacaaagcctcagaaggttgatggtgagggatggagagacatt

SEQ ID NO: 129446 - DNA, 122 bp, Homo sapiens
aggtgactcgagcatttagacacaagcgagaggatcatggcggatggccccaggtgtaagcgcagaaagcaggcgaacccgcggcgcaataacggtgagtggcggaggggaccggggagcgg

SEQ ID NO: 129447 - DNA, 122 bp, Homo sapiens
aggcaaaggacgcaggaggctgttcggtatttccagtaaacttaccctaagaagccaaaccgtccctctttcttcgtcatttaaacatcttctgccactaatgttttccttttcatttattt

SEQ ID NO: 129448 - DNA, 122 bp, Homo sapiens
gcaggtaaaccgtgatccttcggcctgtttccccttctatcaaacaagggatgagatactcggctcatcccgcacccagactgcacacacctccagtctaagggaggagggtaggagctctg

SEQ ID NO: 129449 - DNA, 122 bp, Homo sapiens
agtccagatattggcttttccttggatacttttgtgtggctctcccagtacagtcagatccgccgccgcagcctagcgctccaccccgggttttgcgtcctcccctcacctgcctttcagtg

SEQ ID NO: 129450 - DNA, 122 bp, Homo sapiens
ctcagaaaagccctgaatagtgtcctactatacctgtacaaatacaatcttcaatcaggtcgtgattgtctaaatttaaatgtcttacatggaaattccatccaactcagtaaacattttat

SEQ ID NO: 129451 - DNA, 122 bp, Homo sapiens
gaacaagtcccagtttccccatctctgcagaatagggataataattgtactgacctcattcggacattagaagaattattaataaaggagagaatttatatcaagcagttagctcaggccca

SEQ ID NO: 129452 - DNA, 122 bp, Homo sapiens
caactttgccaccctctcaggctgggcagacactacccccaactcggctccgtctccgagcgccagctgggtctgaggcgtctgttctgggctcttctcgcccacagacgagagggtcaggg

SEQ ID NO: 129453 - DNA, 122 bp, Homo sapiens
ctccccgccgccgcggcaaggccagggcgaaagggacaagtgcgctgctggggtcctctgcgctgtgcgggtccgggactcagggttcccggctgctaacaaggctgcgtagcttccccctc

SEQ ID NO: 129454 - DNA, 122 bp, Homo sapiens
tgttgactagatagatatctccttacaaaatttaccaactcctcttcttacaggagactacggttagattttctctctctcttagtcttaatatgtacagtaagaaatcctatcattatttt

SEQ ID NO: 129455 - DNA, 122 bp, Homo sapiens
agctttacatcggcaacctcaacgagagcgtgacccccgcggacttggagaaagtgtttgcggagcacaagatctcctacagcggccagttcttggtcaaatccggctacgccttcgtggac

SEQ ID NO: 129456 - DNA, 122 bp, Homo sapiens
ttattctggtatcaataaaaaggaactgttactatagtaacagatattccacttggtgcacggccacttccacgatgcggaacatcatgtccaagccacacgcttgagaggcacaaataaat

SEQ ID NO: 129457 - DNA, 122 bp, Homo sapiens
cacacacagttatacacacagccaaatccagagaaacgggcagacaacagcagccaaccacgtgcgcacacacacttccagccgacactgaaaacacagacaaccctcggaagaggccacgt

SEQ ID NO: 129458 - DNA, 122 bp, Homo sapiens
ggcactgggggccacagtgctgatctcagcagctccattttttgtcctcttccttatccccgtggagtcgaactctccccggcatcgctctctacttcagatcttgctcagttttgcttccg

SEQ ID NO: 129459 - DNA, 122 bp, Homo sapiens
ggtttatcgcaggctgcagtgataatccctgcggagagtaagggccggcctgggtgtcagcgcagggctagatcccgcctagcagtgggacgggacaggtcggggaggggcctaaaccaatc

SEQ ID NO: 129460 - DNA, 122 bp, Homo sapiens
gcaggagagcgtgttggggccgggactctcctcccgtggacctgacaactctgccttccccggtgtggtctcgctgttccctttgagagtgcgatgctgccgcttcagccaggacgttctca

SEQ ID NO: 129461 - DNA, 122 bp, Homo sapiens
agaccttgattcctgtcctgacaccagactagtgttggccttgggtaagttgcttaacttcgtagggcatttgctactttacatgtaaaatttagctacttcatagatttattttggggatt

SEQ ID NO: 129462 - DNA, 122 bp, Homo sapiens
agccgggtgaggggactaatccctctgtaacggttgtcagtctgaaagggcatcctcactcggttctgggctcacctcgtctagttccgaagtcctgggcagtccgctcactcgagctgtca

SEQ ID NO: 129463 - DNA, 122 bp, Homo sapiens
cgcgtgcgtgaacgcgcggccgtaatatatgctgccattaagaatccgtgcagcttccagcgctccgggcgcagggacgcatgtgttgctggaattcaatccgtggggggaatgcagattgg

SEQ ID NO: 129464 - DNA, 122 bp, Homo sapiens
tggctcggtcgcccggaggcggacaggacggagacgggacgtatggacgggacggacagacgcgacaggacggacgggacgggtagagaagcagtgcgtcctacccggagggctccctccca

SEQ ID NO: 129465 - DNA, 122 bp, Homo sapiens
tcagctgacgtctctccccacccatgtcacttccttttaaagctacaagttagcagttgccgagagggaagagcgagctggtgtaatatgagtcactcccttccccttccaattagtgtaag

SEQ ID NO: 129466 - DNA, 122 bp, Homo sapiens
gcacagcctggggcaccacccggcctggtgaggatgatcgctgtgcgcgcgatgcacatgcgccctcaacacctctgcacattcatgcacgtgtccatacatgggtgcacacacgtccttac

SEQ ID NO: 129467 - DNA, 122 bp, Homo sapiens
ccgcttatctcccctgggcctggcaggagcaagcatttgaaccccttggctagcttagggcgcaggacttcatccccaatctctggcgtcgttactggcccccaaccctggtctacctgcag

SEQ ID NO: 129468 - DNA, 122 bp, Homo sapiens
gagcatggaaggtaggagcgtgtgccgggtgcagggtgctccatgatcacccgaggggcacggctctgagcatggaaggtaggagcgtgtgccgggtgcagggtgctgcatgctcacccgag

SEQ ID NO: 129469 - DNA, 122 bp, Homo sapiens
ctcagtcccgtccctcggagcaggccaagctcgggcggcaggcagctgccttgcaattctcggagtttcaggaactggacaggggaaggttggcttgcgatgtatttctctgggttcgtttg

SEQ ID NO: 129470 - DNA, 122 bp, Homo sapiens
tggcgaggacacggctgtgcccaggagcgtgaggagacccgtgacccctggtcaggtgcacggtcccctgcagacccagaccggcctcggcgcccacctcccctctccccgcggccgtggac

SEQ ID NO: 129471 - DNA, 122 bp, Homo sapiens
tgtgaaactgctagtaaaacataaacctgaaaggcattactcccagctctaaggcgacatcgctgtcattaaagaaaacctgtgcctgagttggctgagtaccttcttgcagagtcctctgt

SEQ ID NO: 129472 - DNA, 122 bp, Homo sapiens
gccctcacctggtgtgcagggcctgccaggcggcgtcgatgtcggcatagaggttcctctcggaaggcctgcccgcgctggcaccgtagccggagtagtcgtagaagatgttgcaatggagg

SEQ ID NO: 129473 - DNA, 122 bp, Homo sapiens
cgtcacttccactttagtctctgttagaaatgactcattaaggccaggtgtgggggctcacgcctgtaatcccagcactttgggaggccgaggcgagcggatcacgaggtcaggagatcaag

SEQ ID NO: 129474 - DNA, 122 bp, Homo sapiens
tgttacagttcttgaaggcggcgtgtcaggagtttgctccttctgatgttcagatgtgttcggagtttcttccttctggtgggttcgtggtctcgctggctcaggagtgaagctgcagacct

SEQ ID NO: 129475 - DNA, 122 bp, Homo sapiens
cggagccggcgccgtcagtagtcggctgaggacggaggcggggctgggcctgggatggggcggggcctgcgctggtggggcgggcgggggaggagacacggccaagcgcccgagtgggggcc

SEQ ID NO: 129476 - DNA, 122 bp, Homo sapiens
gagcgtgcacccagcgttccgccctttctacgctgggccggttatcgacccggcccagtgcgcaggcgcgggaaagttgaactaataaagtttgtacgagttcagtggaggagaccgcaagt

SEQ ID NO: 129477 - DNA, 122 bp, Homo sapiens
agcgtgagaaccctccagggactgcaccacgcgcccacagtctctctgcgcatgctcacacgcgacctccccacaaagctactccgcgggcctgcctggctactgagtcgcgaaaatatatc

SEQ ID NO: 129478 - DNA, 122 bp, Homo sapiens
cagactcgactcccggcttggttttggtacgccggtgaccagattcggctcctagaggtgcgtttggagggagttgtttcatctaccataaaaatcagtgagaacaccagtgacggggcact

SEQ ID NO: 129479 - DNA, 122 bp, Homo sapiens
tcgggccccgcggggcccgtccgctcctccagccgctgcctcccgggcggcgctcgccggcgcggcggcaaagactgagacagctccgctgcccgctgaactgcatcctcccggcggtcggg

SEQ ID NO: 129480 - DNA, 122 bp, Homo sapiens
ggccttgagggacggatcgcgactctagaaatccagggggctaagctctggggggcaatgcgacctttgccatttgcccctttctgctgcgtcgtcagcacatccacctgctttacttcccg

SEQ ID NO: 129481 - DNA, 122 bp, Homo sapiens
gacccttggctgggtccactctgcagactccacctgaggagacccacccagggtgaagctcggtgcccaggcctgaactgagcccggccgggtgcaagggctgaggtgtgaggtcggcccag

SEQ ID NO: 129482 - DNA, 122 bp, Homo sapiens
cctttgtttgccagggctcctttcttcgtgccctccgggtcttgggagcacagtagttatcgggagcgtcgcctccggcgtgggctctcgggcgcgagtttcggacgaggcctgggcgcggt

SEQ ID NO: 129483 - DNA, 122 bp, Homo sapiens
gtatcgtccagaccggagcaccgccccaccgctagcgcaggagacctgccggggaagtcgcgtgtcctgacctgcaggtcagtgagggaaacttgcagggtcccgagctctgggggtgaact

SEQ ID NO: 129484 - DNA, 122 bp, Homo sapiens
cgcagcctggggcattggagcccttcgccatacccctagtgcgtcctcaccccctcagcccgtgcttcccagggcgggtatcctcggaaggcccggccctcacagccttggcaggccaaggt

SEQ ID NO: 129485 - DNA, 122 bp, Homo sapiens
ggtgctgggataagcaaatccagggcaagcaggagggggaagtggcacactcacgcccagcggaagcttctggatccagtgccagagccagcacagcagttctctgcctgtgttccacgtgt

SEQ ID NO: 129486 - DNA, 122 bp, Homo sapiens
gggctgaatgaattgatgagagtgatttaacttaaaggactggggcattatctgtgggcccgggtatactagcttcacttttgaggaaaagtgaagctgggaaatgtgagatctactcagtg

SEQ ID NO: 129487 - DNA, 122 bp, Homo sapiens
gtggtcaggggacctgctcccgggcacacagtgcgtgatgctgagcagggcttggctgtccggagccctgacagtaccgtcactgtgtgctgtgcagggtcaacaccgtacctcaccggcct

SEQ ID NO: 129488 - DNA, 122 bp, Homo sapiens
aaggcgggaggaggaggaaaggcaagacaaggacaagagagctccagattcagacaagcacgggccaagacgggcttcctgaggaagactctactagccccaggtcccacattctcaaagga

SEQ ID NO: 129489 - DNA, 122 bp, Homo sapiens
ctcacctcggcctcccaaagtgctgggattataggcatgagccactgcacctggttgggacgtgcttctttcagatgttcaagtccaacacagaagccagtgtggccagggaatcagtaaga

SEQ ID NO: 129490 - DNA, 122 bp, Homo sapiens
cactgtggaattcccatgcagataagtgagtccaccagaatggtgcaagctccccagaagcggggaagccactgatgtcacatcctggattggcacttggtggaggccttggtgtcttgatt

SEQ ID NO: 129491 - DNA, 122 bp, Homo sapiens
acaggctaagctgaccatgctcaacacagtgtgaaagatccagggccaggtgaagaaccccggctacccgcagtcggaggggctcctgagcgagtgcctgatccgccaccagaaggagctgg

SEQ ID NO: 129492 - DNA, 122 bp, Homo sapiens
ggccggcccagcggatcaatagcaatctggggtgctagggagggcgccatctgagtagttcggaagaactgaacatgatgagttgccggctgcttcctgagtccttggggaagcacacgcac

SEQ ID NO: 129493 - DNA, 122 bp, Homo sapiens
tccccagcacctgccttcttggctgcccctccacctttcaacataaatgtgacacttggccgggcttggtggctcacacctgtaatcccagcagtttgggaggcagaggtgggcggattgct

SEQ ID NO: 129494 - DNA, 122 bp, Homo sapiens
acgcgctcgcgaaaccgcctgcgcgcgtcttaggctccttggcattggaactaccactttcggatccactctcagtgcctacaccccgaaagggcctgaagaagagaaacactcgcagaaaa

SEQ ID NO: 129495 - DNA, 122 bp, Homo sapiens
ctcaccatccccacctcgccagtaaaaccagagcccaactggatgcgctgatgggaaggacgcggccaacactaacctggagaccaagggcccaggctggagcgcagatgctgccccgagtg

SEQ ID NO: 129496 - DNA, 122 bp, Homo sapiens
gccagcgaatcccgctcacctggggattaacgagcaggcccggccatttcccagggccaccggtgctccctgatctcagtgtctccgtctgtaaaatgggtataaccagagccagcctgtgt

SEQ ID NO: 129497 - DNA, 122 bp, Homo sapiens
aggatttagctagctggtgacgccggagcacgaagttgtacaggtagccagcagcacccacgcgagcccgcggttaccctggccgcgcggctactgtagagtgggctggcggcgagcgggcg

SEQ ID NO: 129498 - DNA, 122 bp, Homo sapiens
aagtgccggtcaggccgaggttctggttcgaagaggaacaatccccaggagctgtgtggccggagcaggaggaaactcccgggacagcagaggcagcccccgtcgtcgtcgtcgtcgtcaac

SEQ ID NO: 129499 - DNA, 122 bp, Homo sapiens
tttcctgtgccaaggtgaaaggcacctaagcattgagcattaccagcgatccggagatcccgagcacagacaattcgcactagaaccacgcaggagaaagcaagcactaagaaaacaaacac

SEQ ID NO: 129500 - DNA, 122 bp, Homo sapiens
tctggtcaacccaattagcagagtgcatggagtgctctggccccattcactcctcaggatcggaagctccgggtcttgttgatacgtcctggagtggctggcagatgtcatttggtctcccc

SEQ ID NO: 129501 - DNA, 122 bp, Homo sapiens
acccaggcctccgaggtgtccctagggtggctccggggcctggctctgaaaaggatggcccgcttctgcccagacgctgccctggtcacgctcacagcagcccgggtgactcagggtgacac

SEQ ID NO: 129502 - DNA, 122 bp, Homo sapiens
cagatgcacatcgtggacatgctgagcaaggagatccaggagctccagagcaaaccggaccgcagcgccgaggagagcgaccggctgcgcaagctcatgctggagtggcagttccagaagag

SEQ ID NO: 129503 - DNA, 122 bp, Homo sapiens
taatttcagattcccaaaggagaaaatttaattggcccagctttagtcagttgttgaactcgggtgaaatcaaccatggccagaggggcaaggttatttgggacatacatagctgtcaggcc

SEQ ID NO: 129504 - DNA, 122 bp, Homo sapiens
gggatggcttttggcttgccgttgctgaaaagcaaacaagatatagccaagaaattgtgccgttgttgcctggttggaaggaaagttaggggcgcatattcggttcaagatgaccttcaggg

SEQ ID NO: 129505 - DNA, 122 bp, Homo sapiens
tttgactttgatagctcgtcacttaaaaaggttcttttatatttatgaaaaaaagcatgacgtcaagccagggggaaaaattgatatcaacatttaagaccaaactcgtagggcttccaaaa

SEQ ID NO: 129506 - DNA, 122 bp, Homo sapiens
ctgcccgggcgtgaggcccctcggcgcgggcggagcacgaccacgcagccacgacccggccggttattcacccgccaggccctgggaatacaaggccggcttcaaaaaaaccagggcacccg

SEQ ID NO: 129507 - DNA, 122 bp, Homo sapiens
taacgtttagagaagatggattactcactgacatctttgaataactgccacttctaaggacgccattcagagcagagcattagcagaatttcaccatgctttggggattaaaatttttaggt

SEQ ID NO: 129508 - DNA, 122 bp, Homo sapiens
ggcaattattctacttgtggccaattcaagcctcattcagaggtctgaagtgtttccccacggtacttacctggcaggaagtaaagtggccaaagccagaagtccattgtcccttctagagt

SEQ ID NO: 129509 - DNA, 122 bp, Homo sapiens
tcagagagctgcaaacatgattccggctcacgacagtcctttagcggcactggcctttgacgcaagtggaactaaacttgccacggcttcggagaaggtgagtctgcttttccccgggggag

SEQ ID NO: 129510 - DNA, 122 bp, Homo sapiens
ctggatatctgtgaccaatgtttacctacgcaatgtttttgtatctgaattgcttatgtacgttttttattatattgacctaacaagaagatcaacttatgctggtatggtgatggttttgc

SEQ ID NO: 129511 - DNA, 122 bp, Homo sapiens
aggactcttgtgaaagtgactgcagtttgctcccaaatgaatccacttggaggaaaactgcggggatgaggtacatttcctggagagctcatgtcattaaaaaatacataaaacgtggattt

SEQ ID NO: 129512 - DNA, 122 bp, Homo sapiens
cgacccagccaggtgtgtgcacactcgcggtagtgctgacacgccagctccccgctgtctcggccccctccagaaactgcttctgaggctgaaatgttgggtgctgatgagcatggaagaga

SEQ ID NO: 129513 - DNA, 122 bp, Homo sapiens
attatccacatttcacatggagcttagaggacagggcgagggtccacactctccttactgcgctctgccgcggtcctgccccgctgtgccctcgcggcccccttagagccactgccggcgca

SEQ ID NO: 129514 - DNA, 122 bp, Homo sapiens
cttgcatgtttcctgcgtgctgagcaattccatgattcatagacttgtgctgcatctgggcggccagcatgactggaggccaaatgcagtttctttccttcagaaatggaaaacaggagctg

SEQ ID NO: 129515 - DNA, 122 bp, Homo sapiens
acgcgcgcataccccgggcctgcgcagagcaggtgccctgactccactttgcccgcaggccggggccagggcctcttgaggagaccaggccacggcacccagcaagtgcccaggcgcacagt

SEQ ID NO: 129516 - DNA, 122 bp, Homo sapiens
gcagggagtcgcttcattttatagcagcgtcttgggatggggccgcctcttgggtctcctcgtcaggcctaggtggggaggttccagggcccggcgctccggtcaccggcctatcattcccc

SEQ ID NO: 129517 - DNA, 122 bp, Homo sapiens
gttactctttaacgtatccacccaccttgggtgattagaagaatcaataagataaccgggcggtggcagctggccgcactcaccgccttcctggtggacgggctcctggtggctgtgctgct

SEQ ID NO: 129518 - DNA, 122 bp, Homo sapiens
aagggagtgttattaattagtaatgtaatttatcttctggaagccctttcctttgatggccgctgtggtacagtttataagcctccaaacaagtgctcaaagaaaactgttcaaaccacaat

SEQ ID NO: 129519 - DNA, 122 bp, Homo sapiens
aagggaagtggaaggaggggctcaggagaacagacccgcaggagggtttaggagcctgcccgtgtgcaaaggcactgaaccaggcacggctcccgggtgctctgtaggggaaaggcaggcag

SEQ ID NO: 129520 - DNA, 122 bp, Homo sapiens
cataccaaggacaaatgcttgagttatagaaacttttttattactattattattacaaagcgacccaaagatcttttaatttctttgattgtttaaagtagctgtgtggaaacataacatct

SEQ ID NO: 129521 - DNA, 122 bp, Homo sapiens
aggggtcaaactagggtggcatgggagcgtgtggacacaggcatgcaggagaggccaggacgctcagagggagggccgggcggggaagccacatgtgcgtggaacgggacagagagccagag

SEQ ID NO: 129522 - DNA, 122 bp, Homo sapiens
agagcaccgctggcctctctgccctctctgcagcattgcctctcttgagcccaagcctcacgttccccaaaggtgccctgggggtgagggcaccatgctactccctgccctcctctttggga

SEQ ID NO: 129523 - DNA, 122 bp, Homo sapiens
caggcagtgcagtgcagtcccgtttgcagtatctggaaagcagatctcttgggccatggccggcgtgactcaaatggagacaaaaaaaccttccatatttggacaaagagcccagagaggcc

SEQ ID NO: 129524 - DNA, 122 bp, Homo sapiens
aaaccaacagcacacagcttccagcgcatgctcctttccccaagaccttgtgggggaacccgccgccagcgcggagccaccgtgactcgtagcctgacttccgtttccgggggcggcttccg

SEQ ID NO: 129525 - DNA, 122 bp, Homo sapiens
gggaaggggctttcggcagccagggtggaggagctccgaagctgacagagcagagtgggccgcctccagtgccacggggaatgaatgaatgaggcttacccttgacagagcccaggctctgg

SEQ ID NO: 129526 - DNA, 122 bp, Homo sapiens
tgtaagaacatagggagaaggtggccgtctgcagcctagaagagagccctcaccagaacccgaccatgtggctccctgagctgggacttccagcctctaggactgtgagaagtaagtgtctg

SEQ ID NO: 129527 - DNA, 122 bp, Homo sapiens
acaaaagtcaaaagatgcccagtgcatagaaaaatacaaatcactgtagtcaatatattacgggactgatcttgggacttacatggtgatgatgaagtcctgaaatgccatgcccacaaaag

SEQ ID NO: 129528 - DNA, 122 bp, Homo sapiens
ttaaaactgtgattaaataagagtatctttcaaggtttggctaaggagagctaacatttccgtgctgtgctgttaatcaaaggaacttcttcagctggttttgttttgttttgttttgagac

SEQ ID NO: 129529 - DNA, 122 bp, Homo sapiens
tcctggaaccaatggaaagccagccttggcgattggcatctcaaccagccagtaggagcgcgcagcggcttcgcagggggactgttaacgtcaatgggaagggccctccccgggaagtccca

SEQ ID NO: 129530 - DNA, 122 bp, Homo sapiens
tgcggcatattgagctgaccatatgttacagtgctgttgaatggctgagtgattcatgcccgtcacattctagtatatcaattaaagctccttgaagtctgcatgatttgtgtctctgttat

SEQ ID NO: 129531 - DNA, 122 bp, Homo sapiens
gtctgtgctcatgctcctctccaggtcacaatttgcgctgaagtttctagacccgtcattcgtgcccattacgaattctctcacccaggaactccaagagaaaccttctaagtggaaattta

SEQ ID NO: 129532 - DNA, 122 bp, Homo sapiens
ggcccagactgacctcacctccgcccgcaggagctcccggacctaccaggtggtgttgggcgagtacgaccgtgctgtgaaggagggccccgagcaggtgatccccatcaactctggggacc

SEQ ID NO: 129533 - DNA, 122 bp, Homo sapiens
ctcgcgccccgttcttccaggacaccaggcgacccacccgctaccctttccccttcagctcgactctggagggctacgctgctccgtcccccgccaccccggggtcccttcgagcccagcct

SEQ ID NO: 129534 - DNA, 122 bp, Homo sapiens
ccgggacggtcggggatggttccacagaggacccagccgtctgccccgagctgggcgctgcgcggctgctccgggggaagcttggtgaggaggagtcgggccagccggtgatgcctgcgcct

SEQ ID NO: 129535 - DNA, 122 bp, Homo sapiens
ttgcaatgcccaggcccatcctcaaattaatataactgcagaccaacttttgggggttggcgactgggctggtttagatgcacaagtggtcatgcaggatgatgccatagaacagcttagag

SEQ ID NO: 129536 - DNA, 122 bp, Homo sapiens
cgtagtaaggcagtgctgtgggggtggctgccgcggccccgccctccatgctgaggcaaacgctgcaagaaagagcagagctcagaggagcagcgcacagcaccccgagatgcgcacagccc

SEQ ID NO: 129537 - DNA, 122 bp, Homo sapiens
gctggccgaggctggggccggggccttggcagctgtggattttggctgcccccgcggtcccggatccgtgctgctgatgtctgcttggcccgctggttgcctctctgtggaatctgtccctg

SEQ ID NO: 129538 - DNA, 122 bp, Homo sapiens
caactagttgtctatcagtttctctactcacatacatctgccttttccagactgccagcgcggagcactagtttgactttgggtgctcttcaaatagctggcattgataaggcattcccaga

SEQ ID NO: 129539 - DNA, 122 bp, Homo sapiens
cctgggacccacctagcgcagcgggggtgagcccagtttccaataacaaagtgcccgggccgtcccaaccctggccctgacagctaacgagctgcagccggctcggtgcgcggccgggaggc

SEQ ID NO: 129540 - DNA, 122 bp, Homo sapiens
ggtcgcttggctccagccaggaaggccgcccccattgcgggctgcgagcagtgagaaagtcggtcatcattcctttcccagacccaggtcaacctcactgcccccactgatccacaagacgc

SEQ ID NO: 129541 - DNA, 122 bp, Homo sapiens
ctcaagaaatcctcccacctcagcctcccaagtagctgggactacaggcatgcaccaccacgacatttatgagtaatgtgacataaatgagccacgacagcatgagtaaagtgagatctgaa

SEQ ID NO: 129542 - DNA, 122 bp, Homo sapiens
cagaggtcctggatcgggtaagccaggggcctaacaaggaaggcaggatgcatgggaacccgcagagatgacatcagagtagtgatatcacagcctaacatccgatcagagatgcaatgccc

SEQ ID NO: 129543 - DNA, 122 bp, Homo sapiens
cgagcgggtgggtgcgcccggagccgccccgtcccccgccacccccaggcagtgggggtgcgttttaaggcccgccctagatggggggcagggtgcgccctctaccgccctccaaagcgccg

SEQ ID NO: 129544 - DNA, 122 bp, Homo sapiens
ctctaaccccctagaaggacagcccactctgcccctgctcccctgccccacagcctcctccgctcccacatttctttggctacatgttgggtgttgccacagtgtactgtgaactcaccagg

SEQ ID NO: 129545 - DNA, 122 bp, Homo sapiens
tatctctatgtctatgtctatacctgcctatgtgttatatgtattatatattagagtgctcggacggattctagtgttttcctaagatgtttgttaatggcatggtaatttgatttaaagtg

SEQ ID NO: 129546 - DNA, 122 bp, Homo sapiens
gctgcccttccaggcccgcatggtgtggactcttagggcttctctccagtctgggactgccgctgcacttgagggccattgtcgggccaggatggcggggttggggccgaggggggcgctgg

SEQ ID NO: 129547 - DNA, 122 bp, Homo sapiens
cctcagtgttcccctatgtaaaatgggcatatcgacacctatcacacaagccctgggcttcgcagggctggtgaggggatcaagtgaggttcctggatggaggaaggagggaactgtgaagt

SEQ ID NO: 129548 - DNA, 122 bp, Homo sapiens
acagagctacaggatgaagtattgaagctaaaattgggattaaccttgaacaaagatcgtcgacgggcggccctcactggaaacctttcgcttggcctgccggcagcacagcctcaaaatac

SEQ ID NO: 129549 - DNA, 122 bp, Homo sapiens
gtggatacagtcgcctgtgctcggattctattggcccacagagtcggtattcttcgcgggcgaatcccagaatgcaccgctctgagagggctccaggtccggggcggggtgggggggggggg

SEQ ID NO: 129550 - DNA, 122 bp, Homo sapiens
ggcgccggggcggggagcaggaagccggggcgggctgggtctccgcgcccaggaaagccccgcgcggcgcgggccagggaagggccacccaggggtcccccacttcccgcttgggcgcccgg

SEQ ID NO: 129551 - DNA, 122 bp, Homo sapiens
ccccgggtcagcgcgcgtgcaggaatcgcgagtgagttccatggcgtccccgggtcagcgcgcgtggggtcctgtctcgctggctcaccactggtggccagggcatgtctcccccagccctg

SEQ ID NO: 129552 - DNA, 122 bp, Homo sapiens
gcacattgtcccaccggtggggaaatccttccccgaggccaagagaagtataggaggcagcgacggcaactgcaccgacggcaacggcagctttttaccccgaagcacggtggcagggaggc

SEQ ID NO: 129553 - DNA, 122 bp, Homo sapiens
gagggcgcggggagggccggagagcccggggtagttttccacctctctcatttattccgccgccggagaaagccgggttcgcagcgccgaagcgcttcccggcgggtgcgcggcggccacgg

SEQ ID NO: 129554 - DNA, 122 bp, Homo sapiens
ttctccctgaagatggcctgtgcattgtaaacaccgcgtccccttgtctggaagctgccccgtaggaaacggttggacacaaatccttgctaatgagagctggcccctgcctgggaccctcc

SEQ ID NO: 129555 - DNA, 122 bp, Homo sapiens
ggaactggggctgcgcgtgatgcttgcgggccagctcgagttccgggtgggcgtgggctccgcggccccgcactgggagcggccggccggcctgcaagccctgggcagtgagaagcttagca

SEQ ID NO: 129556 - DNA, 122 bp, Homo sapiens
ttggccaagaagccaagttttaatgggtacacaagtgcataggaattggagagtggggagcgtgagttgactattggtcagggactgtcaacggaagggaaggaaccaatgatgggagtgag

SEQ ID NO: 129557 - DNA, 122 bp, Homo sapiens
tttggcagtgggaaggggtgtgcgtgggtgtcctctccttcactctttccccagccctgtcgcctcccaccccccttccggccgcggcagtttccgaaatcgcccggcggccgcgaattcat

SEQ ID NO: 129558 - DNA, 122 bp, Homo sapiens
ttttttactttgactataaactcatctgcaaccaaaatatagactcccacacaataataacgggagactttaacaccctaatgtcaacattagacagatcaacgagacagaaagttaacaag

SEQ ID NO: 129559 - DNA, 122 bp, Homo sapiens
ggaggccttctggactggggagcgctgtgagcaattctgccactgccaggcctccacccacgccgtgtgctgctccccgtcctcctgtgggccggggcagagatgtgagaccctcaggggca

SEQ ID NO: 129560 - DNA, 122 bp, Homo sapiens
aagaggggagagtggcgggccgctgaataagcttccaaaatgatggtgagtggcgtctcgcgcatccgtcgccatcagctgccatctggccggtggccggcgccgctcggcctgggcttgct

SEQ ID NO: 129561 - DNA, 122 bp, Homo sapiens
taccgttatatgctttgtctgccatatcgcatttaaacctcatgtcagttcggtgaagtccgtatagttctctttatgtttttaccattacactactacattcccctggggtggggcgaggg

SEQ ID NO: 129562 - DNA, 122 bp, Homo sapiens
acattgaagccagccgcagctggcccgggcagctgctcctcctgggcccggggccccggacgctcggacaaagccaggcagcgttggcagccccagacccgaccccaaaggcctgagactgg

SEQ ID NO: 129563 - DNA, 122 bp, Homo sapiens
agacaattatttcattgaatctttaagcccctgagtaaagttaatctttactataatctccgttttggaaactaagccaagacatggcgaggctgagtaatttatccttggtcaccaactct

SEQ ID NO: 129564 - DNA, 122 bp, Homo sapiens
gagaaaaatcttggggctagtttacctccatactctgcatcctatcgaacgataggagtccgaaactctcactgacttcagaagaaaatttttcacccacccctataaatggaggtgggtga

SEQ ID NO: 129565 - DNA, 122 bp, Homo sapiens
tcagcccctagcgcgccgagcacggctaggctcacgccaaacaggccctcgatacggccgcggctctgctccagcagctccgccttctcagctggcgcagtgaactcgtccagcaccgcccg

SEQ ID NO: 129566 - DNA, 122 bp, Homo sapiens
cggatcggatccccggtgcaggcctccctgccagcagcgcagatcctccttcccaccctgcgtttcctacctgggtcctgttgctcccgttggcttacggaaaggaaactcggtctcatttc

SEQ ID NO: 129567 - DNA, 122 bp, Homo sapiens
gggagttagtttggagagcaatttgcaaaggaatattaactttgattcccgaggtcaccgcgggaaaaggggttctgggctgcagagctcttcctctaggtggcggactttggcaccaaaca

SEQ ID NO: 129568 - DNA, 122 bp, Homo sapiens
tgcgtgtcccgctgcagatccgctggctcagggatgaggcgcagggcaggttctgggttacgtccccacaccgcggggaacccaggtgcgagcggggcgcagctggcctgccaacatccttt

SEQ ID NO: 129569 - DNA, 122 bp, Homo sapiens
ggttatttttgtgattgtctgtcttgctttgggtttgggggatggggttatttgcatggccgcctgtcctgcttgggagaatggcctttttgtatggccgtctgtcctgctttgggaaatgg

SEQ ID NO: 129570 - DNA, 122 bp, Homo sapiens
ggctaggatgcgcggctatacggagccggaggcccggagagacctgggggacctaggacgcgccggggcggggccagagcctagagggggtggggcccggagcggtgggagaggctgttagg

SEQ ID NO: 129571 - DNA, 122 bp, Homo sapiens
aatatttcgccgaggggaaaaaaaatgtctaccagcggaacccgagtttagtccgggtgccgagcagcgcctcttggggtatccttccacggggtggggtatccttccacggggtgaaggct

SEQ ID NO: 129572 - DNA, 122 bp, Homo sapiens
tgttttgacagcacccttacatctatcgggttacctttgccacagctaatgaatcctcagcgttgctaattaggatgtttaacgaaaagggaacattgaaggatctgatctacaaggtacct

SEQ ID NO: 129573 - DNA, 122 bp, Homo sapiens
tttgcggagggctcatcccgggccccagagataaatcccagtgaccctgaagcagcaccccgacgttccgctcccagcagccacacccaccaggccctctccggcgtctgctttccacaatg

SEQ ID NO: 129574 - DNA, 122 bp, Homo sapiens
cctgaggtaaaaatcgcctcctgcatctcttcctggggtaaaattcccgcccgctggacacgtgaccactgagcctgcactctgtgcttccattggccagaccaggccccgccccttgggct

SEQ ID NO: 129575 - DNA, 122 bp, Homo sapiens
gggtaggacccgcgcgacccgcacctccccttgccctctctggagccccactgcccagatcggaaaaaggagagtggcatcatcccacctgccttcacccgggtcccccgaccaatcggccc

SEQ ID NO: 129576 - DNA, 122 bp, Homo sapiens
gaaggataggagaaacttcttttgggacagccgtatggctgcattttggagaattatctacgtaagtgaggtacccactgagggacccacgttcaaatgtatgtgtcaggggtctggtgcca

SEQ ID NO: 129577 - DNA, 122 bp, Homo sapiens
cccttccccgccccgtcactccctctgccccgcctgcacagcttcttgccaattcattcccgcccctaccgcccctataagccaccaggtcgctccagtttggtgccagcgcctggagggag

SEQ ID NO: 129578 - DNA, 122 bp, Homo sapiens
ccaccgagccccgcttcgctcctcccgcgggccagccaccagcacgcggacccgggcgggcgcaggccaagtaactttgcggcgcccgcgccccgccccgccccccccacgcccggccgggc

SEQ ID NO: 129579 - DNA, 122 bp, Homo sapiens
ttcaagcccgcaggacttaagaaattcccgagtgtttcaccaggaattgaggaatctactcggatccctttcagggatcccggggggaggggaacttcccctttggggtccccagtcctact

SEQ ID NO: 129580 - DNA, 122 bp, Homo sapiens
gctgtgcgggggcgggtccagcaagccctggcaacggagatcttcccagacgagacagagcgaccgttacttcccgggctgctgtgggtctggtgtctggctctgtggccccgggctgcagg

SEQ ID NO: 129581 - DNA, 122 bp, Homo sapiens
caagtacaatgcactggtgatatgggcttgaggagtcagaggatgaaactgaggttgccacggtttaccagcatccttgtttgatccttgaattacacattcatggggcagaccccacagaa

SEQ ID NO: 129582 - DNA, 122 bp, Homo sapiens
ctagtgatgagagaagcattggtcacctgatcctgaaaagccctaagtctctggtgggggcggaaaagcccggctgaagtgaattcaagagtttgggggcagttcaggagattggggggcgt

SEQ ID NO: 129583 - DNA, 122 bp, Homo sapiens
caataggagccagccaggaagtacctctctgagcggttggtgccgggtataaaagaaggccgcgcagccacggctgctcacgacgccgcggatcccgaagcctgtgtagcagtgagacatca

SEQ ID NO: 129584 - DNA, 122 bp, Homo sapiens
tttttaactgattttccatgccacatatttgtaaatctatttcactgtgttctgggagcacgaaagactggtgctacattaattcaagcatatattagagggaaatggatataaactttctg

SEQ ID NO: 129585 - DNA, 122 bp, Homo sapiens
ttgcctagtgcaacccatgtcaaattcctgcttgtcttgtgtggatgaaacacggaaagccgggattgtacagagcctgaccccagcctgcatgccaccctctacccatgtgcctctgtctc

SEQ ID NO: 129586 - DNA, 122 bp, Homo sapiens
ataaggtgtgggacagctcctggttccacagaggatcgagcatgggggcaggtggtggaccgaactggagaggaaggactctcgcgatggggcagcaagtaggacgggcggttccagacgag

SEQ ID NO: 129587 - DNA, 122 bp, Homo sapiens
acttcccctgggtcaaagggtctggtaaggactgggagtcccagggcaaggctcatgggccgcgccactcggtaaagcccagagagagagcaagcccgtgttctgctgggggtggggagggt

SEQ ID NO: 129588 - DNA, 122 bp, Homo sapiens
ggtatggagctccaggctcagagccctggcctggtagggtcagcccaaccaggggtgcagcgggcggaggggcggcaggcggaggccaagtgtgcgtagggaagcacggagaggtaaactga

SEQ ID NO: 129589 - DNA, 122 bp, Homo sapiens
ctcttccccaggcctcgccctctccctcctggacccaccggcaatacttacgggtcccgccgccgccgcagccgccgtcgcctccagttaataaaaataacgccgtcctctccacaatggaa

SEQ ID NO: 129590 - DNA, 122 bp, Homo sapiens
ctggcggcacaggagcccacggcgtggctggggaggctcaggcatggcgggctgcaggtccggagccctgccccgcggggaggcagttaaagccgggcgagaaatcgagcgcagcgccagtg

SEQ ID NO: 129591 - DNA, 122 bp, Homo sapiens
acctcattgtctcaggacgacattcctctgactgtagactgagatagctactcagaagaacggcaaataggagaaaatggaacagcacctgttcactatgtatattaatttcatggtgctgc

SEQ ID NO: 129592 - DNA, 122 bp, Homo sapiens
atcacgggcgctttcaacgacaagccccctacattatcccagcaacttttgacattcttccggccgatgccctccgcgggagccggcggggacccctgggaagccggctaaggcccgtcccg

SEQ ID NO: 129593 - DNA, 122 bp, Homo sapiens
ctccctagccccagagcgcagtccgtgctggtgggagcgtggcgactagttgcacagcaacggtccaggaagatgagtgcctgcgggaggaaggccctgaccctgctgagcagtgtctttgc

SEQ ID NO: 129594 - DNA, 122 bp, Homo sapiens
gccaggcaggagccaaaggccgggcgaaagaaccccttgaatacccgctttttacctatacggagcaagtcctgagataagcacacacctgcataaaatcaaccctaattccacattaataa

SEQ ID NO: 129595 - DNA, 122 bp, Homo sapiens
ggagaacaggctctttaagctccctgagtctagttacagaagacttcctggcagtaacaccgtgaataaaacaaccacaagcttccaggagatgagacttctaggctctgctccagacaaca

SEQ ID NO: 129596 - DNA, 122 bp, Homo sapiens
gcctcaggcgctcctctttctgctcgccgaaggccgcgatggtgccataggtgagcttttcgttgggggtggcatggcgcttcagtcagcagccgcagacgaaaaagtagaagttctggtac

SEQ ID NO: 129597 - DNA, 122 bp, Homo sapiens
ccacttgcacccagcctcggaagcggaagctgactgtggacaccccaggagccccagagacgctggcgcccgtggctgccccagaggaggacaaggactcggaggcggaggtggaagttgaa

SEQ ID NO: 129598 - DNA, 122 bp, Homo sapiens
actcctgtcgaggccacctcggcagccccgcagcccggctgggcgtattttacttgagcacgaagcttcctggcccagctgtggacttgaacctacctggtagcaaggctgagagccccggg

SEQ ID NO: 129599 - DNA, 122 bp, Homo sapiens
aggctaaacgtgcagtgagtcccgctctcagaggtatctgcgccccgcctgcctccgccccgccccttgttctggtttgtccagtcccacagagtcccacagtcttcatgtaaatgaggcac

SEQ ID NO: 129600 - DNA, 122 bp, Homo sapiens
tacctttgtctacatgctcatttcaggtcagacatttgatcaacatcattacacaaaccccgttccaaacatgctcaaggaaaacacataaacactgttccagacatgctcaaggaaaatac

SEQ ID NO: 129601 - DNA, 122 bp, Homo sapiens
ctgggcttatttaggaagcgaagttagcgccacacatttggctccagaaatttgttctgacggcgcggccgacgccctgcagggtcatttctgaacgcattcccaaatatcctggtcctcaa

SEQ ID NO: 129602 - DNA, 122 bp, Homo sapiens
gaggggcggggccgcggggcctggaagcagcctccgggatctgcaagtctggaaaggccacgttgtggaccttggcgcagaggttatgggggcgacccggagcggatggtttcaggaaaact

SEQ ID NO: 129603 - DNA, 122 bp, Homo sapiens
ttgttttgagataatgagctaccgatcacagggggagtttaagcaaggttcaatgagaagcgatcaagatgctgcacagttcagccctgggtggggagctcaagtcaggtttctagccctct

SEQ ID NO: 129604 - DNA, 122 bp, Homo sapiens
atctgagaatattctttgtagtgggcagaggctctgcgaaagccagcgatggggtggggccgggagaagagcagctgccatcactgtgtcatccatgagtcgtcccttccgcctctcgagtt

SEQ ID NO: 129605 - DNA, 122 bp, Homo sapiens
gacaacactgggttgggggggggttcggttctaacttgaacttcatcggggtggcgtgttcgcgtcacgtggccgtgtttgtgtgagcagggctgccctgcacctcctcaacatgctgagaa

SEQ ID NO: 129606 - DNA, 122 bp, Homo sapiens
ttcactggttcattgaggtaatgtgtctcaataaggtgacacaagcgggagccgtttttacgcagttccaatagtgaccgattcacgtgttttccaagtgtaagacacactccatcgcattc

SEQ ID NO: 129607 - DNA, 122 bp, Homo sapiens
ctcctcctgccggcgccgggctagcagctgtagcttccagtctgggatggtggccatggtcgtcttgaggtgagggtagggagcactggggacagagaacaggaaggagaggctccagagag

SEQ ID NO: 129608 - DNA, 122 bp, Homo sapiens
gtcactctttaaacacctacacatatgctattaatttttatccccaatatgagtttgtcacgtgtgcaggaaaggtatctttatttcagaagagctaagtaatttgcttaaagtcacacaga

SEQ ID NO: 129609 - DNA, 122 bp, Homo sapiens
gaccaactaaagttgtgttcagccttatcaggacacaaattaaatctgcctttacttcttcgaagcttaataagaactcaaggaccttcatccccagtatttcttttgagttcgctgaagtc

SEQ ID NO: 129610 - DNA, 122 bp, Homo sapiens
cctgcacgcggtgcccggagaacgcggccagggcgcgtgtctcctcagcctgctgagctgcgcatgcgctgctggctaacggctctgctcagcgcgattctactgagagaggcctgagtgtg

SEQ ID NO: 129611 - DNA, 122 bp, Homo sapiens
aaccatttttatgggtacaatttagtggcattaacattcaaaatgttgagcaaccatcatcgctatccatttccagaatttgttcatcccaaacagaaactatgtactcgttaaacaataac

SEQ ID NO: 129612 - DNA, 122 bp, Homo sapiens
catcaaagaggcaattgtgtgaacgaaataacacagtaacatgtcacattccatttacatcgatttatcaaatccaggaagaagccttcgcactttccggactagtgatcagcactaggcca

SEQ ID NO: 129613 - DNA, 122 bp, Homo sapiens
cgggaatctgggcgcgcagactcggcccgggtcgtcgcggcctcaggacgcagcccattccgcctggcacgactactgggccgcgtcttgtcagtctatcagcttctgagcccaggaatggg

SEQ ID NO: 129614 - DNA, 122 bp, Homo sapiens
atctgattggcttttggactcttctaggccacccattgtgatacgacattattacatccccgtttcatgggtggactcgtcgctagggaagtctttgccgacagaaaatcacccttccgcgg

SEQ ID NO: 129615 - DNA, 122 bp, Homo sapiens
ggcgaccacgaggtgagataccgcgtagttagagacagtcggaggcggggccgggaaggtcgggtttggttcctacacagcagaggtgaacattggagcgcctgctgttcactggatgattt

SEQ ID NO: 129616 - DNA, 122 bp, Homo sapiens
tccgccgcatggtctggatccctcgcggtgtctgggttcagccatgctcagcctctgtgtcggtcaccagcctagaaaccctggagcaccccgggccggaacccttccctcagatctgtcgt

SEQ ID NO: 129617 - DNA, 122 bp, Homo sapiens
gaattgttacaaatgaagttatgctttggtcaatgttagtaaggacctatgatccataggcgtaaaactccaggacagggatgagtagttttgttttcttcagcctcttgtagaaatcccac

SEQ ID NO: 129618 - DNA, 122 bp, Homo sapiens
tccacacacactcccccagcagctgttcccacagcagtacccacagacacccagaagtcacgtagtgtgaccctcggatcttcgggccacgcgagtaccccgtcacacgcacacgcgcgtac

SEQ ID NO: 129619 - DNA, 122 bp, Homo sapiens
gcgctggctcgaacctggacagcccatgggagatgctgctcggggctggcctggtggtgccgatactcgcctctcgcagaggctccaggcaagtcccagagaaggtgaggctccctgggagc

SEQ ID NO: 129620 - DNA, 122 bp, Homo sapiens
cttccctcttgtgctgcagaagaggcctggctcccatacagcagaccaagcttcctgtcccggggccagggcaccagcacatgttccacggccggcagcaactcttccaggggctccagcag

SEQ ID NO: 129621 - DNA, 122 bp, Homo sapiens
aaaaggtcaaaaaaaaaaaaaaaaaaaagaagaaatcttcagaggggtcagtaaagccttcgctcaaggaagatatgggcacttatgaggagctatttgtccactgagagagagaaagaatt

SEQ ID NO: 129622 - DNA, 122 bp, Homo sapiens
tctgaggggccctctgggactgcagtaggtcacacatgctccctgcttattagcatagaacgccccggtgattcatgcaatggaatgtttcagccaaggatgtcacctaatagaggatatgt

SEQ ID NO: 129623 - DNA, 122 bp, Homo sapiens
cggacccccttaaaagttgtgagcccttaaaagggacaggaattgctcactcggggagctcggttgttggagatgtgaatcttgccaaagctcctggccgaataaagcccttctttctttaa

SEQ ID NO: 129624 - DNA, 122 bp, Homo sapiens
ccacctctaccccagctcaggtcctcattcccgcaccccccggccgcagggacggcgcggcgcacccacctcccagaccccgcgactgcggttgggccccgcggcttcgctcaaccacgcac

SEQ ID NO: 129625 - DNA, 122 bp, Homo sapiens
tcctgccctttgtgtgacagccgctgcggcgaaggggcgggcgctgggtgggggcggagccgcggcgggcggagcagcggggccggggcggggccgagcgcggcgcagcggagcggggcaga

SEQ ID NO: 129626 - DNA, 122 bp, Homo sapiens
cagcccggtgcttggggaaaccagaactaagtgaaagactttctctctgagagcaaagtgcgcaggtgacaggagagaagggcagaggaaagaaatgggttggaccgatccgagaacgggca

SEQ ID NO: 129627 - DNA, 122 bp, Homo sapiens
atgattttattcttacttttaatctgttttattctttaagcatgtattaactgcctactacgtactcaacactgtgctatgtgggaaaaatatactagaacaagggatggtcaactttttct

SEQ ID NO: 129628 - DNA, 122 bp, Homo sapiens
aaactggtgagagagagactgggattccagttacacagctggttggtgacagagccgggtcgtgcacctcagtcgccctgactctggagcccaggtgctttccactgcccttccctccctcc

SEQ ID NO: 129629 - DNA, 122 bp, Homo sapiens
cgtaacagcgtcagggaagttttttcctggctgacagccgcagatgatgaccgaagacaacgtcttaactgagacgggccaatttggcaaatggactgctttcctccccagtgcgggcacct

SEQ ID NO: 129630 - DNA, 122 bp, Homo sapiens
ggaagggtctattatatctgtattgtatgcaaaaggtcatatgtctgtctgacaagcttgcggagacattttaacattcattcttgggagaagaagtatccgtgccgttactgtgagaaggt

SEQ ID NO: 129631 - DNA, 122 bp, Homo sapiens
ctcccatgtgtgtagctgaggcaggggtccatcctctgtgccagaagcctactggcagctcgccggtgcccagggtgacacccaaccagacaccaggaggagcaggagtagcctttctacat

SEQ ID NO: 129632 - DNA, 122 bp, Homo sapiens
ccttcagcacaaacgcttctttcaaacttctgcacgaacagacttgaccaaactttaacacggcttctagcagactaaggttgtgtccctggggcaacctagccttcttttaagttcctgtc

SEQ ID NO: 129633 - DNA, 122 bp, Homo sapiens
tcccaaacaaacctgtgtgtgtatgtgtgtatttttctagcttaataattctaaaatccacggttaggctttttcaggaaagtctgaaagtcacaaaacccctattatgctctttgagaaca

SEQ ID NO: 129634 - DNA, 122 bp, Homo sapiens
catatcaatgcaacctgccatgatcaccaaggctggggaagagagcggtggagtatcaaacgtctgtgcttaaatgctcccacctggaagtgacatacatcaaagctgctcacatctcatta

SEQ ID NO: 129635 - DNA, 122 bp, Homo sapiens
atttttaaaaaaggacttggcatgtgtcgatttatgtatgcccagggggtggtagaaccacgctcctgcaaatattaggggataactgtatttgaaagaaactgaggcttaaaattaaggct

SEQ ID NO: 129636 - DNA, 122 bp, Homo sapiens
ccattctgggttgagttgcgtattgggtgccttctaggggctggggtctgtcctgggcaccggtttggttggtggccgctgcccttggcgctcctgttcctgctctggccccatgccagcct

SEQ ID NO: 129637 - DNA, 122 bp, Homo sapiens
tttccctgcaagccaagctctgagttaagcactatgctaatttaaacgctaactggaaatcgttccttcttcaggaacagtcaaggggagaaagtgcttggagagagggaaacttttacagg

SEQ ID NO: 129638 - DNA, 122 bp, Homo sapiens
tgcacagtcacctggcgggacagaggctggcggagggacgggaacccaggcggggcgagccgcgggagagtggagggcaggcgcctgggctgggggcggggaccaggcggggcagggggcag

SEQ ID NO: 129639 - DNA, 122 bp, Homo sapiens
gtcgccgcgaggggagttctgcgcaagtacggaagctgaggttccgcgcttccgggaggccgtccgccccgccccctcgcgggggcgcttcattggtcatcggctcgcgctctcgcgctctc

SEQ ID NO: 129640 - DNA, 122 bp, Homo sapiens
ggtccagggcatccagccccggatctcgaacgccctcctcgcccctcgccccgcgtagcccggctgcgctccccgctccccgcccggcgtccacctctcgagcctgacagccccgccgcccg

SEQ ID NO: 129641 - DNA, 122 bp, Homo sapiens
ggactcagaagagggacgggcggagaagatggcccacgggcacaaggctctgtgacgccacgtcttccagaagcagcagcaccccctccccaacgtcacatctatcccgtttccaggcaaaa

SEQ ID NO: 129642 - DNA, 122 bp, Homo sapiens
agcccagataccccctgggctcactctgggtcacactgggcatagaggccttagtaccttcgggagttttggggactcccagcatggggtaggattaagtgcttggcttccaggtctgaaag

SEQ ID NO: 129643 - DNA, 122 bp, Homo sapiens
gtagagtttgaaccataacagttacaatgatcttttgctgaattttatctctactgcacacgtatttaaacatggccaggcacggtggttcatgcctgtaatcccagcactttgggaggccg

SEQ ID NO: 129644 - DNA, 122 bp, Homo sapiens
attggctttaaggtcccagtaagaactctgtgtgtccttcacctggtcacccgctgtgaacgacctgccgccctgtgttatcctcctgtcggttttttcctgaacatttgaagctaagttgt

SEQ ID NO: 129645 - DNA, 122 bp, Homo sapiens
ctagcattgaaatactctaggaaaaaaaaagtggggtggggaggcaggataaagcaagcacgacaaaatgcagatggctgttaaagtgggttggatggtgagtccttttctgtatatctgga

SEQ ID NO: 129646 - DNA, 122 bp, Homo sapiens
cgcccgggcaagcccagcagatgccccgtcaggagtactcgcagaggtggccgcagcctgcgggacagtgggagctgccttccagccacttcatgatgtgctgcaggtggccgccgtggctg

SEQ ID NO: 129647 - DNA, 122 bp, Homo sapiens
gatcatcgacgccaaccagccgggcacggtggtggaccagttcaccgtctgcaacgcgcacgtgctgtgcatctccagcatccccggtgagcagctggagtgggcgtttccactcgggcgcc

SEQ ID NO: 129648 - DNA, 122 bp, Homo sapiens
cggggaatttgaggccagataacgggaagtgtgagccgattggccggacttctcactccacggcccagccgtttacggatcgcggaggccatccatcaaaagaattacaccaatcagcggcg

SEQ ID NO: 129649 - DNA, 122 bp, Homo sapiens
gccgctgccatagctaaagcccgggtcctggtaggcaggcgggaagcagggtgggggtcccgggtactggtaggggtagccctgacccagaggccagggggcagccgggtggggcagcgggg

SEQ ID NO: 129650 - DNA, 122 bp, Homo sapiens
cggcaaaacaagaactagaacccaatcttccagcccgggtgcctagcagtgtctccaatccgcagcgccgggtgctacggctgtccgggcataaaacatggtcccttagctcatgatgctta

SEQ ID NO: 129651 - DNA, 122 bp, Homo sapiens
atgctgttttaactgaaaacatatcactgtacttttatttgccaatcttttgataggagccgtaaacctttctttgagtattatctgtttattggaattcagcctcggttttctcacataaa

SEQ ID NO: 129652 - DNA, 122 bp, Homo sapiens
gggacgcagagacagctgctgtccttgggcaaaacgggtcagggtctcccacccctcattcgctggaacacattcccaacaggttgactacttgaacctttttaaaaaacaaaatggctgta

SEQ ID NO: 129653 - DNA, 122 bp, Homo sapiens
cagtgtttaccaatttcaaatgcatgcttttttttaagtgaagaagggatctttgaggtgcgctgtaagttatttaacaatactgtggaaggaattcaagttcctccccgccccacccccac

SEQ ID NO: 129654 - DNA, 122 bp, Homo sapiens
tgtcatgatttcagaaaacgatagcagacgtgcaggtgctaataccagagagcttacctccgaataaaatggtgccttctaaacagcgactatttacatgttttagaatcctttcttgggca

SEQ ID NO: 129655 - DNA, 122 bp, Homo sapiens
ggcgacgctgattggcttctctagatatccaatacccaatgggagtgggaagtggggacgcgtcacgagtatcctggaagaaggacccgacacaagttgggagaagaagtgaaactcagggg

SEQ ID NO: 129656 - DNA, 122 bp, Homo sapiens
gttaggcaatgcccctttccttgttcatgtttccttggagaataagtgatcctctcagcacgctatcactttatcattaagaatagaacttgagaaatcaggcttttagcagcccaaggttg

SEQ ID NO: 129657 - DNA, 122 bp, Homo sapiens
atgaggaccacgtccgtcttgttctcgaagatgtcgtgcagggtgatgatgttggggtgccggatctcccgcaggatgttcacctcccgctcgatctcctcccggctcaccccacgccggct

SEQ ID NO: 129658 - DNA, 122 bp, Homo sapiens
ccagtaatgctctgtacgaatgcccagaacacggatgagtgtcagccttcagcaggaatgcgcttgagcttctgtgtacctgttaattgcccagggaaatacaattgtcatggaattctttg

SEQ ID NO: 129659 - DNA, 122 bp, Homo sapiens
gccagccatttgcgggaggcgggccctgattggccggggggatgcgggggatgcgggcggcggggttaagcgcgtcgccaccgcccccgcctaggcgagagcccagagagctgaacctgcat

SEQ ID NO: 129660 - DNA, 122 bp, Homo sapiens
ccgccgcccggcttccttcctggccgggagttgggggcggggggcgactctgagggccgccgacctcgcccttggctccggaagagtccaggcggcctccgcggcaccggatttttcctgcc

SEQ ID NO: 129661 - DNA, 122 bp, Homo sapiens
agagggcggcacgtttcagggcaagaaacctacccaccggcttcgggggggtcctgggcccgaggcctagcacccccgcccgccctcggtcccgtcccggaggcagctcggctgagcttacg

SEQ ID NO: 129662 - DNA, 122 bp, Homo sapiens
ggcagaggactacccatatggaccagtagagaacaagatcaaagttctacagtttctagtcgatcagtttcttacaacaaatattgctcgagaggaattgatgtctgaaggggtgatacagt

SEQ ID NO: 129663 - DNA, 122 bp, Homo sapiens
tgtgatttccctgtagactgaggagcacgtgcccacatgtattctgagctcaaagccatgcgaagtcacagcagctgccctcagaggcctgtgatcttgagggaaaaataatattcacccag

SEQ ID NO: 129664 - DNA, 122 bp, Homo sapiens
agagaggaccccaggacatctgaaagccaggaaatggtgcgtgtgcatagccggttgtcccgagacggggtagaggctgcctggaaccggccggaaccggctgcggcgggacccgggcctcc

SEQ ID NO: 129665 - DNA, 122 bp, Homo sapiens
atttaatccaaattggtgagggtttactaagcattgcgggattttccaggtatgaattttcggcatgtataacactgagattgggtattctgacctccaaatattatagtctgaagagactt

SEQ ID NO: 129666 - DNA, 122 bp, Homo sapiens
agtcgaggtggtctggagtaaacgaatctgccttcctcccggggtgaaggcgatggtgaccgggttcacacgtgagctgcagtacagcagttctccgtggcctcggctggttcagaaacgag

SEQ ID NO: 129667 - DNA, 122 bp, Homo sapiens
cccctaccttcagccaaacacacccatctatctctggaaatagcacctctctcctggttgcgtggagcaggggaagaaaacctttcagtaaaagagagatggagagcgagagcgggagagct

SEQ ID NO: 129668 - DNA, 122 bp, Homo sapiens
ggcgccccgtcgcgccccacatacgcggggtgcactcggcggggccgggcgggaacatggcgcctgccctccactcgggaccgccacagaaaaatcgggggtgcgtgcagcgtcagcacagt

SEQ ID NO: 129669 - DNA, 122 bp, Homo sapiens
aaaaatcttctgggaatcatccaaaaactgcacttttaaatgtagcattctcagcgaggccgttgggctgcaagcaggctcagagtgctgtgggtgctttctccaggaatttcactcccagc

SEQ ID NO: 129670 - DNA, 122 bp, Homo sapiens
acacgccgcatagtaaagcggcagagaacttgcatcaggcgtctctgaccaccgagcctgcgaagacctagctgattacgaccaggaaacaggaggggacatggcccaaggtgggcggggcc

SEQ ID NO: 129671 - DNA, 122 bp, Homo sapiens
tcctggacagcctctcctcatctagtacagccactgcttgcaaatccccatcctttcccacggcctggaatgacctgccccaccatctccagtggccgcctccaccatgaagccttcccaga

SEQ ID NO: 129672 - DNA, 122 bp, Homo sapiens
atttcgaatgggcagtgaatggcctcttctgccagccacaggcaggatgctccttgatcacggcatcccccggcggtagtacagggtgagcttgcaggagggtctgcaagtgcagacagcag

SEQ ID NO: 129673 - DNA, 122 bp, Homo sapiens
cttgaacttctggcctcaagccatcctctcatttcagcttcccaaagtgctgcaattacacgcgtgaaccaccacacccagcccctgcttgtttttcaatgtgcctactccaccatgttgct

SEQ ID NO: 129674 - DNA, 122 bp, Homo sapiens
atagggaatgggccccagagtgtagtagaagtggctgccatggtgaggtcctgttacacacgcttcaggctgttgccaccaggccttatctggccatctgtgcatatctgtgaggacagttg

SEQ ID NO: 129675 - DNA, 122 bp, Homo sapiens
ggcttcttaacatttgctgttctgtcttccacaccctaaggtttgttaaacgagtgaaatcggtggttaattagttagtggttggtctaccatcggcatcaccggggtgtccagtggggtgg

SEQ ID NO: 129676 - DNA, 122 bp, Homo sapiens
cagtccccactgctggcagtaagtccccagcagtgagctgtgtaagcaccttacattctgcgcttggttgaaaacagcaaggcaagcatccacttgagaaatgtcaacccctaggaaatccc

SEQ ID NO: 129677 - DNA, 122 bp, Homo sapiens
tgagctactgtgggcagagtggggcaagaaactctttatcatcttctgagtctgttaccacgacacaaggccacagcttctccttcattatccttggagagaaggaggcttgaccaaggggc

SEQ ID NO: 129678 - DNA, 122 bp, Homo sapiens
cggcggcggcgtgcaggaggcaggcggcgtgcggcggcggcggcaggcgagtgtgcagtgcgcgcagccgccgatgggcggggagtgagggactcgcggcgcgccgccggcggggctagagg

SEQ ID NO: 129679 - DNA, 122 bp, Homo sapiens
tgtccagggcccgaacgtgggtgcgggctgggggcgcagcggcagaaacgcggccttagacgcgcgcggggggccggtgtcccccccgcccccacggcaccgggagccgctcgctcatccat

SEQ ID NO: 129680 - DNA, 122 bp, Homo sapiens
tcaggcccgcccggagaagcccacccggcccccggcccccactcagtcgcgaggccccgccggcctggagatctgcgcccccgggatccatatttcaaatatgatctttggaacggcttcca

SEQ ID NO: 129681 - DNA, 122 bp, Homo sapiens
taaacctgggtctgtccttcccagaggcacagtctgattctgcccggagtaagacattgacgggagctgggggcttcgtgctggggctcatcatctgtggagtgggcatcttcatgcacagg

SEQ ID NO: 129682 - DNA, 122 bp, Homo sapiens
ctgggcaaccctcacactctgtgtgaaatgttgccccaggatgatcttaatttgtgtcaacgagagctgctggggtttatgttttgaaacataatggatgtgagcgcctccaaagctccatt

SEQ ID NO: 129683 - DNA, 122 bp, Homo sapiens
accgcagcggtgtggggagcggcctcagacacctaagggtaggaccggccggctcccccgcgacccccagcgcctgggttctctcccggcctccccgaggcgtggcctaccccaggcatggc

SEQ ID NO: 129684 - DNA, 122 bp, Homo sapiens
agctggttccgctcctgggttctggccatgaagcccacctcaggcccagaggaggcccggcggccagcctcggacatccgcgtgttcgccagcaactgctcgatgcacgggctgggccacgt

SEQ ID NO: 129685 - DNA, 122 bp, Homo sapiens
gccctagctacacgtctcacactgatggcgtcacggcagtggctggtccagatgggctgccgctgccatcaatcacatctctgaagaggtatatctaactgcttcatgctgacagggggcct

SEQ ID NO: 129686 - DNA, 122 bp, Homo sapiens
tttctctgctcccacacccctaatgatcaacatattcatttttttatttagtatatgtcacgcagcaatttatcaaaagcttttgttgtgaaaacacttttcttaaatacacaattaaaaga

SEQ ID NO: 129687 - DNA, 122 bp, Homo sapiens
agtggaatgcaggtgtcaggctgaaagcctgtggcatctgagtttctacataaggaattgcggtcaggtcctcgtgtatccaaaacccattctttcaacaccagccttgggtgagacagggt

SEQ ID NO: 129688 - DNA, 122 bp, Homo sapiens
aggattatctacaagcagtagctgtaggacttggcactctgccagccagcaagaacactccggtgtccctctccatgccagctgggccagtggctcacacaggttctgggcaagctgtgtgt

SEQ ID NO: 129689 - DNA, 122 bp, Homo sapiens
gtttaaagctgggagagcatttaggaagctaatgtgaagataaggggaaaaagcagatatcgtctgacctagagcctcagctgtgaaaatagagctgactcaagagatctatgtcagcctgg

SEQ ID NO: 129690 - DNA, 122 bp, Homo sapiens
tgctaacgcctggccttggagagagatgtctgggaggaggagggggggacgtgcaagggacgattggggggtgcattaagaaagaaacccatggaatatgaaagctgtgacggggacagaaa

SEQ ID NO: 129691 - DNA, 122 bp, Homo sapiens
tcaggggattagttctcagggcctggtccgctagaagccaaatgcctgtgcccagccacccgtgacgcctgcaacaggcaggagatcccccaacagttactcccagccttcattccacaggg

SEQ ID NO: 129692 - DNA, 122 bp, Homo sapiens
gttgagggggatggcagggcaaggtgcaggctgcaggctctcctggagtggggcagctcccggccaccccgggctccctcaggaagcaagaggctgactcggaggcggctttaaagtcaggc

SEQ ID NO: 129693 - DNA, 122 bp, Homo sapiens
ggcgccggctggagctgccgctcggggtccggaggtgcctgctccatggctgcagttcggcgcggcgaacccagtgcgcctgcgccgccgccgcgcccgcggccaaccagtctctcagctag

SEQ ID NO: 129694 - DNA, 122 bp, Homo sapiens
gtgcaggtggcactgggccacgtcacgctcgcgggctgtgtaaccggtagtgtcctggagcgggtaggaggcgtcccgctccttgtcccgatacacagcctcccgattctggtaggcgcctt

SEQ ID NO: 129695 - DNA, 122 bp, Homo sapiens
gcggcgggcgggcggcgggcactggggagccgggcgcaagggcaggccaggccgggagggcggatggcggtggggacggcggtggcctcgggccgggcgggcgcccagatatagcggctcag

SEQ ID NO: 129696 - DNA, 122 bp, Homo sapiens
tcagcccagttggcttttcaagttggaactgctaatacaagggatttgcgtccatcctggcggctggggtcgtgggccaggccagcgggctctcttaagggtaataacacgtttgctggcaa

SEQ ID NO: 129697 - DNA, 122 bp, Homo sapiens
ccacccacggggtgctaattattgaaatattctgggagctggggggcccggctgaactcccgccttgatccctccttcccaccaggcatccggtcttgggatgtcgatcctggcgtctgcaa

SEQ ID NO: 129698 - DNA, 122 bp, Homo sapiens
atctagctagagtcggggctcttagcagtgctctagatacttttcaggtcctgaacttctcggattagcaagaccctaataggctatttcctcttaactctttgcatcccagcaggatccca

SEQ ID NO: 129699 - DNA, 122 bp, Homo sapiens
catccacacacccaggcccagggtcagccatttcggcaacttgcccatatgtgttttacacgttacgcacatgcctttgtgttttctgcccaccgttttgaagaaagcagcagacactgtga

SEQ ID NO: 129700 - DNA, 122 bp, Homo sapiens
aagagcacatgacatgtggctgcctcccctttcagaaacaagctgagtaacccagcctgccgtttgtatgtgagagcctgctgagatgaagaaatcacttcatgaaaataagcaaagaccac

SEQ ID NO: 129701 - DNA, 122 bp, Homo sapiens
gggaggggccattccgtgtctccagcctgctgggcagcagcgacaggtggagctgtccgccgcgtccccccacactgctcctcctctcagctgggtcctttctgcccaacccaagcccctgt

SEQ ID NO: 129702 - DNA, 122 bp, Homo sapiens
cctcagatcagagtgttttaaatcatcacgccctggcttatccctggtcgagccaggacacggggtgcttcagtgggtctgtcaccctctctccttgaagcatgttgcttttatttatttac

SEQ ID NO: 129703 - DNA, 122 bp, Homo sapiens
agtgggaatcgggggtctaggccaggcttgttccaaagcaggctcagtgcctgacgtccacgccccaggccctgcacacgtgatatgcatatgagcacacacgaaaatcccagagacaggca

SEQ ID NO: 129704 - DNA, 122 bp, Homo sapiens
tgcagcggtgcggggcaggtgatgagcctctgtgaactactaaggtgggagggggctatacgcagaggagaatgtcagatgctcagctcggtcccctccgcctgacgctcctctctgtctca

SEQ ID NO: 129705 - DNA, 122 bp, Homo sapiens
attaagtaaaaaatttaaaagtactaaaatttggtttttataagccaaaacaacttactgcgaatgctaatgcaatattctactggccgcctccacacccggcagagcttgtgtgatgtaac

SEQ ID NO: 129706 - DNA, 122 bp, Homo sapiens
cttccccccgggactggaataaccttcttcgtgctctccggtggctgagaaagcagctttcgctcttctgtggtagcgtggaggtgaggtacatctacctccaccctcccggcaccagctca

SEQ ID NO: 129707 - DNA, 122 bp, Homo sapiens
ctggacttgtgattgtggctcctgcttgggctgctctgggggaccctccagcttccctgccgggtgcccaggtcaccccagagctggggagatgcaccctggaggcagggagggctccctgg

SEQ ID NO: 129708 - DNA, 122 bp, Homo sapiens
agctgctccagggcgtaaagagatgacacctatctaaggtgtttttagaataaatgagagcgcgctagtggaatggttgcccagggcccagtgcttagcaagtgctccataaaatagtggca

SEQ ID NO: 129709 - DNA, 122 bp, Homo sapiens
catccagaattgtgtatagggtcagtattcaggagaccgggcttctggtcctggctgcaccgccgtggccttgagcaaggccctgtccccctctgggtgccatccctcagtaaggagaggcc

SEQ ID NO: 129710 - DNA, 122 bp, Homo sapiens
caaggacagggcaggcttgactcagggcccagtttcaagagagctgcccaccggcttggccggtctagcaggcctgacagtgaggggagcctgggggggtggcgggaaagaggggagtgatg

SEQ ID NO: 129711 - DNA, 122 bp, Homo sapiens
attctaccctgataaagtattgcactgaaaaatttagtatgggccgagcatggtgactcacgcctgtaatcccagcactttgggaggctgaggcaggcagatcacaaggtcaggagtttgag

SEQ ID NO: 129712 - DNA, 122 bp, Homo sapiens
gataactaaggaatttgacaggagcatttagtaggacctgtaaagaaattaaagcaggtccgaggtggagttttgtaaactatatgcctgaatagaactttctgtttccaagggaattgtta

SEQ ID NO: 129713 - DNA, 122 bp, Homo sapiens
acttctagctccagctctgcaaaaggtattggaggttcttgggctaactccgttccccctcgcgcctcagcctttgtatctgaaaaatggtgattgaaccagatcagtggttctcatccatt

SEQ ID NO: 129714 - DNA, 122 bp, Homo sapiens
ggacacagagcgcggtgtgtgggaggcgtggacagggacccctggtgactgcccccccgccggcctcagtagtcacacctgcacccgaatctctgaccgagagctgcaggtggctggccggg

SEQ ID NO: 129715 - DNA, 122 bp, Homo sapiens
tgcgcggcatccgggtccccgaaatgcagacgtggcagaagaagtggcccggccctaaagcgtggaggaggaacttccgggggtgacgggacggccccctcggaaccggaagtggagcctgg

SEQ ID NO: 129716 - DNA, 122 bp, Homo sapiens
tcactccatgaagggggcgaggaagctctctggagctgccttattagtgactgatgagctcgaatcccatcaggagcatccacctttgagaccttgtcacctcccaaagcccccatctccta

SEQ ID NO: 129717 - DNA, 122 bp, Homo sapiens
ttcccgggctgggtatttgcctcgcaccatggcggtaaggaggatggatagggcggggtccgcaccagcaaagctctccaggggctgtgagagtgaaaactgagaaagaacattaagggata

SEQ ID NO: 129718 - DNA, 122 bp, Homo sapiens
gtgggcgaagcgtacaatcccttcacctttcgtcacccagaggcacaagaatccagttcgcgccaactgacctgtttcttccttcctccccggcactctgggagtcctgagattgccttgct

SEQ ID NO: 129719 - DNA, 122 bp, Homo sapiens
tcccctactggaggatgaggacgccaaaacccagagagggtgagtaactgccccaagtcacgcggctaagagacagggccagcttcagaacctgtgctgctcagcatgacatgctgctgcct

SEQ ID NO: 129720 - DNA, 122 bp, Homo sapiens
gcccagccccgggagaggacttgaggttgtggcgagtccctggcgctggcgtccgggctgcgggagcaccggtcagggggtggccccatggggtctctgaccagcggagctcggattaggac

SEQ ID NO: 129721 - DNA, 122 bp, Homo sapiens
tcttctgtcctatcctccgacttctgctcactcccactattcactcctggtctccattcacgactgtggcttcaacgactaccttggtgttgcagagtccaaatctctctttctactccggc

SEQ ID NO: 129722 - DNA, 122 bp, Homo sapiens
caccagaacatccagagccgggcgcccaagctgctgccctgcctgcactctttctgccagcgctgcctgcccgcgccccagcgctacctcatgctgcccgcgcccatgctgggctcggccga

SEQ ID NO: 129723 - DNA, 122 bp, Homo sapiens
atgcgctctgtggcttgggcccctgcccctgccacagttggcagggggccttgcctgtggcgttgcagctgagcacacgcaatcattaaccttttctacgtgtaagagaatttcaggcacaa

SEQ ID NO: 129724 - DNA, 122 bp, Homo sapiens
ttcagcttctttaaagagtttgaaattagtaatttcagtagagcagctttgctgttgcgtcgtactgctcagagcttagtgagctgaagccttttgggaaaatagcatttggggagagactc

SEQ ID NO: 129725 - DNA, 122 bp, Homo sapiens
atttcatttgcatcgtgttcaattaaaaacctgaccagctcccgcctgcctggcgctgcccgcccagcctggtgaaaatgttggttgggcatgacagccttcccacaccccccccacgcccc

SEQ ID NO: 129726 - DNA, 122 bp, Homo sapiens
taattattaaacgaaagaggtgtcattttttggcagggctgcgccacagggcttaagcatcgtcactatgtaaaaaagaggagggaggggactgtgcagggtctttagggtagggggagata

SEQ ID NO: 129727 - DNA, 122 bp, Homo sapiens
tggctggtgctcatggttagggatctgctctcacttccagctctctggctctgtgttctgcgctgtgggtgctatttatattcccagtgagtggaacggggggaatggcccaacaaccttga

SEQ ID NO: 129728 - DNA, 122 bp, Homo sapiens
agcacgcaatgtcggtcattagttatctttttatggatatgttctatctcttcatctatgcgacaggatcctagagagcaggggtcacatcttattcatctttgtgtccccttagcactctg

SEQ ID NO: 129729 - DNA, 122 bp, Homo sapiens
actcagctcttccgtttcttctgatggttgacttttggagtgaaggccatttcttctatgcgaagggtctttccgaggctagcctctctagccctcaagcatggccatattaactcttgtca

SEQ ID NO: 129730 - DNA, 122 bp, Homo sapiens
ccccatgctagcgtcaggggacaaggattccagctcaggcctgtccacggctgtgtgacccggcatgggttaagctctctcaaggcctcagtttcttcctctgcagagtgtgggatgggggt

SEQ ID NO: 129731 - DNA, 122 bp, Homo sapiens
cgagcgcgggaggcgggggaggttagggaggggatggagagccgggagagccctggaccccggaatgagatgccgcttgcagagtcctgggtttaagctctgatgtctggagagccccggat

SEQ ID NO: 129732 - DNA, 122 bp, Homo sapiens
cccacaggatccgtggctggttgtcctgggaagctagaggcgatccccgaacctggtgagcgcaaagacacactaaggaagctaaggaaacctggcatcggaaaggaaagccattgggatca

SEQ ID NO: 129733 - DNA, 122 bp, Homo sapiens
aggaggttctcccccggggaaccgaatgggaccaaggcagtgcgagtagctcgggcatggcgccaacctccaatcccctccccacgagctccagccagcagccggtgtccccccgcccccct

SEQ ID NO: 129734 - DNA, 122 bp, Homo sapiens
ggcagaggctcctcggaggactcccggcacacagcctgctcctggggcagctctacctgccgtttggcccagtcttcccaccatgctggcaccagaaaggcttcactgcaggagaccgggtg

SEQ ID NO: 129735 - DNA, 122 bp, Homo sapiens
tcttctggctaactccttggagaaatgtcaaaatcccttgggcttctgtgaacttggaatcgtcacaacttgtgattgctcttcccaggcgcttttaaaatctcttagtacacaccttgcct

SEQ ID NO: 129736 - DNA, 122 bp, Homo sapiens
ctccttctccaccacattccagcctgtcttttgagtcctcaaatatcctggagcacactccgctccctctccccagtgaagtcttcccctcactgctcctggctggcttctccaccttcagg

SEQ ID NO: 129737 - DNA, 122 bp, Homo sapiens
ccatggctctgtgcagatgggattccgagtaggcagtgctgctcgccccgcagcaggcaccggctgccggacacaggtgggagacggactgagcacaaggggcacgaggagccccatgccac

SEQ ID NO: 129738 - DNA, 122 bp, Homo sapiens
ggagactgcaaggataggcccaggtcggtgcgagggacggtggtggggcgggggtcggaacgtaaggaaagcccagtctgagaccccaaccccctccaccccatcccccactcctataccgg

SEQ ID NO: 129739 - DNA, 122 bp, Homo sapiens
cctctggagccgggacaaaaaacacagcctcccagaaactctggaaactgaggccagtcacgtcctgagaggctcatggacccacagccacggacgcacaaatgcaagcccatgcaccaagc

SEQ ID NO: 129740 - DNA, 122 bp, Homo sapiens
gcagggactcctaaaatggccacagcaagctcactggtgtctcaaggacggcggctagggcggtgggcagaggccagggtgctcactgccttgtggctcgttggaggaactggaggtggggc

SEQ ID NO: 129741 - DNA, 122 bp, Homo sapiens
aggctcctggccgtattgttctccttctcctcgtgataactccgcagtggaggtggattccgtccaagacgcccaacgtggctccgcgtagcaatcagcgctgcaatcctggcggttacctc

SEQ ID NO: 129742 - DNA, 122 bp, Homo sapiens
ctgggagtgcgggtaggaggccaaaggtcagcacacgcagcccaaggagagctcggctgccgccgggcccagcgctcagaaatcaccaggtggacggcagcgcagcctactgaggcggggcg

SEQ ID NO: 129743 - DNA, 122 bp, Homo sapiens
tgtcccatgtcagttagcaagccaccaaagtccataagggatcctgtggggtggaaggtccgcggggcctgcttccctgttgctggtgcaggcggagtgtctgaaggctgcacgcatctggg

SEQ ID NO: 129744 - DNA, 122 bp, Homo sapiens
gtggggcggagttttggttgggtgttttcctccctagtctttttaaacttttggaaataccgcccaccccaaatctgttccatcaaagatattctccatccagttaaccatgccagcaaccc

SEQ ID NO: 129745 - DNA, 122 bp, Homo sapiens
ccgttctctctgaagaaaggtcttggagagcccggccggggctgcggtcggttaaaccagcgcttccggagctttccctggtcgccgggcgttccaggccggcgccggccatggctgccggg

SEQ ID NO: 129746 - DNA, 122 bp, Homo sapiens
cggctcaggaccccacctccgagggcgcctccgttggggccatggaggccgggctaggcccgcctaccgcagcccccaggggagttgtgtcagaagctgcggagtcactcggggggacactg

SEQ ID NO: 129747 - DNA, 122 bp, Homo sapiens
gcccaagccccggccgtcctctaagccgcaagttatttctgcgcccgagagaggcgggctcggataaagtcgggacgccttctggtacataaagtttcatctgctctcctcgctcgcacggt

SEQ ID NO: 129748 - DNA, 122 bp, Homo sapiens
ggtggggtgcaaggtgtgagtgcaggtgcagcactcactttgcctctggacctcagatgccgggaccttggtctgttcaataatggggcaggaccgggtgatcaccaaggtccctgaaagtt

SEQ ID NO: 129749 - DNA, 122 bp, Homo sapiens
cttgcccctttctaatccgctgtgacgcccggatggtggcgacagtgctaatgaaggacacgctggtgttggggctacaggagtggttcaggaggctgataacagggaagatgcctgtggca

SEQ ID NO: 129750 - DNA, 122 bp, Homo sapiens
atagattgttgcctttaaaatggggcgtgagcccggaagagatggttgtgtgggtgagtgcgtggagtttgtgtgcctccgtagacctggtttccacgtgcgcacttgtgaggggaagactg

SEQ ID NO: 129751 - DNA, 122 bp, Homo sapiens
cgctcctcggagcagctgggggaggctgggccttgataatcgccccagagacccacggtacgtgacggcacccacagcgctggaaggcaggatctgtgtctgtgccccattttgcaaacggg

SEQ ID NO: 129752 - DNA, 122 bp, Homo sapiens
gactgtggggcagagggataaaatccaggcgcagttccggcctgtccagtcgtgaaaactcggcccttaccctgactgactctgacaacgaaaacaaatcagatgatgagaacggtaggcct

SEQ ID NO: 129753 - DNA, 122 bp, Homo sapiens
tccagtttcagaaccacagtgctgcaccccgctgcctgaagagacatcctgggaaatagccggaaagcctcacgcccgcatcatggctgggggggaggggggtggtttgctggaaatagacc

SEQ ID NO: 129754 - DNA, 122 bp, Homo sapiens
ctctcctccccgcgcccaaggcagacccagcaccttcatgccttccactgccgcttgcctcgcctgcctcgctcgcctcgcctcgtggctggcactccgccctctgtctgctgctccccacc

SEQ ID NO: 129755 - DNA, 122 bp, Homo sapiens
gaggagctgcttactcaaaccagaggtcaggaaagccttcccagaaaaaaattacgtcaacgctaacaaaacaaatatatattggcttgaatataaaatgacagtgttttaacctgagtaaa

SEQ ID NO: 129756 - DNA, 122 bp, Homo sapiens
gcaagagagccgggacagcaccagctccgcttcctccagcccagcaggctgcagcggcggcggccagaacttatcttttaaagtattgaatataatatgcgttttagaaagttgttcagtaa

SEQ ID NO: 129757 - DNA, 122 bp, Homo sapiens
acccagcagacgctgcctatgcggactcatcacgtgggaaggcttgcacgccatggtttacgtggacttaacggttggaaaaacagaaacgtggccgggcacggttgctcatgcctgtaatc

SEQ ID NO: 129758 - DNA, 122 bp, Homo sapiens
acattgcttctgggtggaggccatgggcagccgagaaatgaagtaagacttgatgtttcccggcctggccaggagtcactcggtccctcaccaacctgagtgctgacagctccccgcagcaa

SEQ ID NO: 129759 - DNA, 122 bp, Homo sapiens
aactgctgacataatttgctgatgattcagaattggctatcagcagaattataatcctggcgaagatggaggaaaaaatatagagagacctcctgtgacaaaaaatgagtggaaaattgtca

SEQ ID NO: 129760 - DNA, 122 bp, Homo sapiens
aaaaaaattattcagagtgtacccatatcccctcccgctacctctcacccctagttcctccgattattaacatcttgtattagcgtgctgcatttgttacaactgataccagtgttggcctt

SEQ ID NO: 129761 - DNA, 122 bp, Homo sapiens
ttttctgcgaggtttcagctggagggagggggaaaaatcctctcggagccgagcgagctgcgagccctgcttgtggatgtgaggtttccagccactggtagagctgctgcggctgagccatc

SEQ ID NO: 129762 - DNA, 122 bp, Homo sapiens
gcagcgtgcgccatgggtgtggcatttgcctcccgcttgctcccctcctctgcctgtgaacgccgtctgacgggtcttggcatttgcccccccagagttagccccgtgccggatgaacaagt

SEQ ID NO: 129763 - DNA, 122 bp, Homo sapiens
ggccttctcctacaggtttccggtgacccttgtgtctgtgtcacttccttcagaaatcgacgtggccgtcctcggaagtacccagtgagcgctcccatggctccccctgcagttgggggcgg

SEQ ID NO: 129764 - DNA, 122 bp, Homo sapiens
agaaagtttgggaagtttcacacgagccgttcgcgtgcagtcccagatatatatagaggccgccagggcctagggatcacacaggatccggagctggtgctgataacagcggaatcccccgt

SEQ ID NO: 129765 - DNA, 122 bp, Homo sapiens
cacagcaactgggctcgcgcaccacatgctgggccagcagcttcaatcgcctccgccacccgcgcccaccgcccaccaagctgccaaagcgagctgagcagaattcgaggttggaaagaatc

SEQ ID NO: 129766 - DNA, 122 bp, Homo sapiens
gatggggcgcagagcagtgcgatcgaagagggttactgtgggactgcacaaaagcaaacccgtcggaggagttttgccagaaacaccaccgcctgcattgcgtcggacctgaccatttccaa

SEQ ID NO: 129767 - DNA, 122 bp, Homo sapiens
ggagtggagtggggtgggtgggcagcacttcgttatgttcgtagattccggagtctgtctcgatttctccagcggagtcacttcctagctgtgtagccttaggcaaggccctgaaccacaca

SEQ ID NO: 129768 - DNA, 122 bp, Homo sapiens
ggttcctttttagagctctgagagaatagtttcaggtcactccctatggcttatagatggcggtcttctccctatgtcttcacattgtcctccttctatacagcctatccaaatttcctgtt

SEQ ID NO: 129769 - DNA, 122 bp, Homo sapiens
cacagaggtaacccgatgctatgaacagtgaagccacttgtcccggtgccccagcctgagcggcagagcagggactggccgggcctgactggcgggcgtccccacacgcgctgcactgttca

SEQ ID NO: 129770 - DNA, 122 bp, Homo sapiens
tttcgctgccttttagaagtatctctgggggccagatctgggcttcatcagcttttctcccgacctcccacgaacgcgcggcaaccgaagcacgcggtccccggcggcgcgtttgcaaaccc

SEQ ID NO: 129771 - DNA, 122 bp, Homo sapiens
taaaactagagcacagaagcatttttttcccttaaaagaatgtgtgttagtgacagggttcgcagacattaaaatacttatgctgccatagaaaataaggatctgttttctgattaactttc

SEQ ID NO: 129772 - DNA, 122 bp, Homo sapiens
agttcctagagcacaagaagttctttcatgccccgacaacctcacacaatatttccttggcggggaacattctctaaggctcttcaatatgcctgccgcttaaaaggcacttattcagaagt

SEQ ID NO: 129773 - DNA, 122 bp, Homo sapiens
tgatgcatgcagcccccagtcacgttccccacgcttgctcgatttgtcacgaccctttcacgtggaccccttagagtgtaagcctttagaaaggccaataatttctttttcagggagctcgg

SEQ ID NO: 129774 - DNA, 122 bp, Homo sapiens
gccgacctgcgaaggaaacatcacgacctgtttgcataaagaaatgcaaacctgaaacaccgggcacgtgcggtttaggggagcgggcagtctcacacactactgagttgtttcccagcagc

SEQ ID NO: 129775 - DNA, 122 bp, Homo sapiens
tacgctagtcacactccgccgagcagtaggaagactctgtccccatagagcatagcacgacgaagctaaactttcctccccacccctcgccaagggacaggcgaagctcctactcagaattt

SEQ ID NO: 129776 - DNA, 122 bp, Homo sapiens
aggcagttccagccgccagggtccctcacacaacgctgaaagcaaaatacacgtatttgacgtgcctcagagctgacgaagcacccaaaagcagccctcactaaaggagtcgaaagaaaaag

SEQ ID NO: 129777 - DNA, 122 bp, Homo sapiens
cttaacttcctcaggaaagtttctagaaaactataagcaaatgcccaacctcctgagatgcggacatcgctatgagtgcaactagaaaagggttccagtgatgtgaggaaacgaggcaaata

SEQ ID NO: 129778 - DNA, 122 bp, Homo sapiens
cagagacgtggcctcctccagagacccttggccacagcccctgcccgctccgtgctgggccgaggccaaggccctggcagccctgcctgcttgcccgggtcacgctgcccacccacggggaa

SEQ ID NO: 129779 - DNA, 122 bp, Homo sapiens
ggagcgcgcgtgtttacacttttgctacaccaggcggaggaaacaagcgctcgctgaccccgggggattccaaaccgttactccgcccgccggggtggggccagcgcaacggccgagcctgc

SEQ ID NO: 129780 - DNA, 122 bp, Homo sapiens
ccctcctcggtccctcctggcatttcttttctgtcccaggcgcagagatcctcttctgggcgtctgttccggctatgagaagctctccgcaccctgaaagggagtagaaaaacagaggggat

SEQ ID NO: 129781 - DNA, 122 bp, Homo sapiens
ctttcaggagatgggattggcttgggggcaacaccctgcataccagacattattttacaacgaaatctttatttatgctttacccttgaaaatgtaaaatcctcctgcacgttttgggtaca

SEQ ID NO: 129782 - DNA, 122 bp, Homo sapiens
taattcgcgaacagtcgggagaacaaacagccaagcggcgctgcagtggccgcacttgcgcgcgtctcaatcctgggggctctgcgcgcccgccccagtccctcgccccattgactcagtgg

SEQ ID NO: 129783 - DNA, 122 bp, Homo sapiens
tcctgggccctggacgtggccgacgcgttctcagtgtccgtgaggccggggcaggagtggcgggggtcgccccgaagtgggtgggaatgagcggcccgaggtcctgaagtcggggtccgccc

SEQ ID NO: 129784 - DNA, 122 bp, Homo sapiens
atctttctttgttccatagcttcctttcattcatccattaagcaaatatttctcaagcaccgttttagaggttgggactacaatactgaacataacaggcaagagaccctgccctcatagtg

SEQ ID NO: 129785 - DNA, 122 bp, Homo sapiens
ctcctccggaccaggacaggtaaaaccggtctgccaggtctcagggggagcgggtggagacgtcccacctcacctggctgcgctccgactcaggctcagccggcaggttctggggcaatggg

SEQ ID NO: 129786 - DNA, 122 bp, Homo sapiens
ggccacgcttactaatttcgaccagtcgatacagaactttttcaggctcttctcaacacgcgaaaagatctcgttgccagattttgtacccgtcatgggcaccgtgtccagaagttcttcgg

SEQ ID NO: 129787 - DNA, 122 bp, Homo sapiens
gggagggtggtgtgcacacggggctcacttgcacgtgtacatctccgtgcgctcgctgcacgtgttgcacttgacatagcagcaccagtggaacttacagttgcactgccacacgcgggcgt

SEQ ID NO: 129788 - DNA, 122 bp, Homo sapiens
ccaaagagctgagagtgtttactttctggtatttcacagaccgtcagctgaacctgctctcggacaaagagaggagctcacgggtcctcagcaaggcggggcacttgatgggctatggagac

SEQ ID NO: 129789 - DNA, 122 bp, Homo sapiens
gggtgatgagccccaaaaagggcttattagtcccggttttgcatgtgaaaagtcagagagcgataaagccatttcattccccatcgacctggcactcagcgctgcaggggtcagaaccccac

SEQ ID NO: 129790 - DNA, 122 bp, Homo sapiens
ctcctcccagaaggagttgggagatgagccttccgcaaactcctgacctgtgggtccgtccgttcaacggccaaaggctggcggaggagggatcccctgcctttctcggaacggaacggagc

SEQ ID NO: 129791 - DNA, 122 bp, Homo sapiens
agggtgagggccacgcgctctgtgtggatgcggagtctgagctgccgtcagaaatccccgcggaagcactgaatctggatttcacagagctttgggccggagatacctggggctggtcagca

SEQ ID NO: 129792 - DNA, 122 bp, Homo sapiens
ccgagctaaagctggcaggccacgtgaactgaaggctgaggccacatgaactgaaggctgcgcggccctgcgggagtggaggtgcggtccaagcccgcaggcagacacaccacgcctcgtca

SEQ ID NO: 129793 - DNA, 122 bp, Homo sapiens
cttcagggcacacgcccctcggcgctgccctcgcaggacgtcggggcacacccactccggcgtctcccctttaagcaagcctgagggcagctggctttctaggacccgcggaacggttaaac

SEQ ID NO: 129794 - DNA, 122 bp, Homo sapiens
gtgcgtgagtgtgagtgcgtgtgtgtgtgtccacggcgcgggccggagcactcaccatctcgccgggggagcgaggccacttcggggtcggattggaaatgttgaggcttcgcttgcttcct

SEQ ID NO: 129795 - DNA, 122 bp, Homo sapiens
gggcgcgtcccggggggaagacgccaccgccctggagtctcaggggtcctcgccccatcccggtccaggccgtttgtgtatctttgtaaactggcaagcgcggtaacttccttccctgaatt

SEQ ID NO: 129796 - DNA, 122 bp, Homo sapiens
cttggtgaggcaggcggacctggccctgtgggtttgggggttctgtgccagctctgctcacgtcttcgtgtgtggaggggttgtgagttaggctgtcagaacagtgcgggctagaggcgcac

SEQ ID NO: 129797 - DNA, 122 bp, Homo sapiens
acgctgacctactttctggggccgatgtgtttgcagccagaggtaccgcggagccaagcccggagcctcggggagccgccagcgagcgcagactgggagggagccggccgggctccccgcca

SEQ ID NO: 129798 - DNA, 122 bp, Homo sapiens
ccaggcccaattaagagatcaggtagtgtagggtttgggagcttttaaggtgaagaggcccgggctgatcccacaggccagtataaagcgccgtgaccctcaggtgatgcgccagggccggc

SEQ ID NO: 129799 - DNA, 122 bp, Homo sapiens
tccccaggacccagcacagggcctggcagcccaagtggcattggggactgttgaagggatcgggggccgagtcctatcctgacatgcctgagctggaccttgcttggcagactttgtggctg

SEQ ID NO: 129800 - DNA, 122 bp, Homo sapiens
gagaggttacttagtcacacagtaagttgccatcatgctctatagcagtggttctcacctcgggacgatggggccttccaggggacatttggcaatattttgagacacaactggaggtgggg

SEQ ID NO: 129801 - DNA, 122 bp, Homo sapiens
ccattgccctgcctgtgcccgtcatcgtctccaacttcaactacttctaccaccgggagacggagcaggaggagcaaggccagtatacccacgtcacttgtgggcagcctgcgccggacctg

SEQ ID NO: 129802 - DNA, 122 bp, Homo sapiens
tgtggggaggagctgctgtctgggtcagcagctgccctgctggagggagagggggtgctgcgctcatcccctgaactcagattggatagccccgggccagcgctggaggaggagcagaggca

SEQ ID NO: 129803 - DNA, 122 bp, Homo sapiens
aagggaggggtggggggtgaggccagaacctggctgtctagccagaaagaagcccctcagcgcaaagcgggggcgcctacccccaggcctaggggtcggtgtcgggggcactgggagagggg

SEQ ID NO: 129804 - DNA, 122 bp, Homo sapiens
caagttgtagtgttgttgttttcagcctgctgctgctgctgctgttgcggctaggggaaccgtcgtggggaaggatggtgtgcgaaaaatgtgagttaaggggccgcttctgcgggaggagg

SEQ ID NO: 129805 - DNA, 122 bp, Homo sapiens
gatcatgccactgtactccggcctgggtgacagagcaagactctgtctcaaaaaacaaaccgtaagctgaatatgggggtgggcacagcacaagtggacatgactttcaggcccaggatggc

SEQ ID NO: 129806 - DNA, 122 bp, Homo sapiens
acctccccgcccggtccatctggatgttgaaggaatcctagaacccccgcgggacagctccgctccagggtccctagcgacacccgacgtcacccgcaatcctcaccccggccgccgaacct

SEQ ID NO: 129807 - DNA, 122 bp, Homo sapiens
ctgagcccacccttcgcggccactagggaacctcaggagaggccgctgtggtggggtgggcggatccccccggagcaggcccaggcccctgctcctgagctctccggcagcgccgcctgctg

SEQ ID NO: 129808 - DNA, 122 bp, Homo sapiens
attacagtttctcaaattcgccacctatgtgaagacacaaaatgaaaaccctagagaccccgccaggccctcatttccttctcatccccaaatttgtccctccaggaagtgcagccaggaaa

SEQ ID NO: 129809 - DNA, 122 bp, Homo sapiens
cgagaggcacagatgccaacaatgattgtcaggaatcaatgggaaagcgtgtttgtgcagcgctattggcatctgatgtgtttgttataattggctcccgccagccctgtctcctttattaa

SEQ ID NO: 129810 - DNA, 122 bp, Homo sapiens
ctcgtcagggaagagtggcggaggctgggggcactctcttgctaaggggctcagggcgtccgggtgggcataggggaggtgggacgtgtccaagcgcccagggtctcactcctccacagcca

SEQ ID NO: 129811 - DNA, 122 bp, Homo sapiens
agcgctatgggagactggagtctatctcacctctgcaatctcgaccataagagacaggtacgccccgggggggccagttcagagacctacccctaggtgcgcattctgtttctcagggacat

SEQ ID NO: 129812 - DNA, 122 bp, Homo sapiens
atagcccttcccctatctcccaggcagatccaagtttccccaacctctcagagaatatgacgccctgcccagcattcactcggttcctgagctcttggtggagaaggtgtctgcaaagagcc

SEQ ID NO: 129813 - DNA, 122 bp, Homo sapiens
gacctaaatgctaacctgctgttgccttgactccagagacacgaaactgaagctagccctcgcccctctctgggatcccgcgctgcgctgcgggtagctgcccgcagggaggcccaacctgc

SEQ ID NO: 129814 - DNA, 122 bp, Homo sapiens
ggaattatcttaggccgggcggccgggagagccgtatatctcccgcgcctgttcccttgtcgagcctgaatatgctgctgtcagactcgcttaatgaaaagtaacgcaccgctgattacagt

SEQ ID NO: 129815 - DNA, 122 bp, Homo sapiens
agctacccacaccctccttgcatagtctggcagacagaagccacacaagcaagttagtttcgttttcctgaagaacactttgcattttttttcttagttttcaaccagattgctggataaga

SEQ ID NO: 129816 - DNA, 122 bp, Homo sapiens
accagaagtttggccaggcccagcctccttcccctgggtttctgagttttctcaacctgccgtttcctctgagctctgttcctgctctggggcctctgggccaggttgaacaggggaggagc

SEQ ID NO: 129817 - DNA, 122 bp, Homo sapiens
ggcctccagagtgcactgaggggggtctctacctttcacaacgatgtccgggtcgtcctccggcagccctttctccgggatgaggctccaagtctcctcccagctctgcagcctgggccaga

SEQ ID NO: 129818 - DNA, 122 bp, Homo sapiens
cctgtcaccaagtcccctgcacaggggaagcagggggctgagggggcaggaccagggggacgaggtcatccttccccggagaacccctcaggggccgggcgcccttccctcccgggcaccaa

SEQ ID NO: 129819 - DNA, 122 bp, Homo sapiens
gacttgggctccatctcaggtctgccccatgtcgccctcaacctccagccaccggtcctccgtgtcccccatggccaggcacggcttgcagacatctgtcgttggctcctctcagccgtcgt

SEQ ID NO: 129820 - DNA, 122 bp, Homo sapiens
cctgttcccatcgggctgtcccccatgggagccgcactccctggttagatgagttctcagcgccattccagaaagggtgagggagaggtgaccccaggcagcccgcctgggcctctgctcac

SEQ ID NO: 129821 - DNA, 122 bp, Homo sapiens
agtcctgactaggaaatttagaggccaggcctcgcatggggataatggatgggcacaggacgtgggggagcgataatggacgaaaacccccgtctcagtgatggcgtgggctagagaaggca

SEQ ID NO: 129822 - DNA, 122 bp, Homo sapiens
gactgtgcggagtgtaaaagacatttccttaggaaacagacaaggcagggccaggagttccgcggttttttttccgtgcagaaatcactacccggcgacggctcagggcggtagagggcaag

SEQ ID NO: 129823 - DNA, 122 bp, Homo sapiens
ccgggacgagaagcccatcaggctgactgctccattagggagcatcgcaagctcggggtgcgaaagcttccccgccgccaaccagccagccctgccctgtgtagacgggtcgccagagcgcg

SEQ ID NO: 129824 - DNA, 122 bp, Homo sapiens
gagtgcccagcccctctcctgcatggatcccagagcagcagacaggaggtgctgcctgctcgccttacactgaagcccgctggtcaacaagccttcttgcatagagcttctaagctcactct

SEQ ID NO: 129825 - DNA, 122 bp, Homo sapiens
tagtccaggaggaagggagggagagggaatgatgggttaattaatttaatatttattgagcgcccacggtgtgctaggcgctgcacagaccattcggaagacacggtccctgccctctagga

SEQ ID NO: 129826 - DNA, 122 bp, Homo sapiens
agtgacgacacccccagaaatgtgggcttcagggctggccacagggtaccctcagaagcccgcagcttagtcggcctttttcaggaagatctggaagagccggacccagggtcagcagggcc

SEQ ID NO: 129827 - DNA, 122 bp, Homo sapiens
gcccgcacttgtaggtgaggccgtctccgcagttgaagagctgctgtgctgtgagtccgtcgtctggcacgtaggacgtgcccccactaatcaggtagtcggccatggccaacacaggacac

SEQ ID NO: 129828 - DNA, 122 bp, Homo sapiens
cctagtatatatgctattagatcctttgcccttacttgtttgacagtggtttacccaatacgtgctttttactaatccctgagatacagaactccagtgattacaggtctaacatgagtgga

SEQ ID NO: 129829 - DNA, 122 bp, Homo sapiens
tcagaggatgggtggagagcgggcttggccggaactgaattggtagaggtaaaaggggaacggaggaccttaagctctggccacttcggcccagcgaacccactttatttttgtccaaggaa

SEQ ID NO: 129830 - DNA, 122 bp, Homo sapiens
gcctccgtcttgggggcgtggacccttgggctgcgcttcctttcccgcctcgggtctccgcgggttctgcaggaaccttgcttcctctgacttggtccctggtgtctctgtgtgtcggacag

SEQ ID NO: 129831 - DNA, 122 bp, Homo sapiens
ctaggtctggaccccaatatttacgaagtcttcatgagtagaatacgaacattctcaggccgggtgcggtggctcacgcctgtactcccagcactctggggggaggccgaggcgggcggatc

SEQ ID NO: 129832 - DNA, 122 bp, Homo sapiens
gatgagctcaccaacgtgacctcacttcagagagcactcagatgaaaggaagtgtgatgtcggtgagtcaagggcagaggcgagacacccgcctctcaactcaagtttccaggcagagaaaa

SEQ ID NO: 129833 - DNA, 122 bp, Homo sapiens
gttttctgcatcttgtctttcacttttggcttcacttgtggctctgagcatttggggaaccgggtgatgtcccttgctgtgccctctgtgctgctcactgggtactctgttggatagaggga

SEQ ID NO: 129834 - DNA, 122 bp, Homo sapiens
ccggggtcgcacagcacgcagcagtgttgcccaaggggcgcggcgaggcttccggctctgcggcctgcaggtagcgcgaaagtcctgcgcgtcccagatgcccaactaaaagcttcgctgcg

SEQ ID NO: 129835 - DNA, 122 bp, Homo sapiens
gaacagtgcgggggcaggtttccgggctcattcgctggaaagtgctggggggcaggtttccggctcattcgctgaaaagtgaggcggggtttactagctcactcgctgaaaagtacggaagt

SEQ ID NO: 129836 - DNA, 122 bp, Homo sapiens
aggaaacagaaattgaaccgtttattagcctaggtctgggtttcaggcattgcggaggcacgtctggggagctctatgaggggaaacaagcccctgactggctccttgccccccaaagaccc

SEQ ID NO: 129837 - DNA, 122 bp, Homo sapiens
tccttttggagagaaattattattgctgcgcagcctaagaagtagatctacctctaacagcgtgatagacgttaccatggcttgcatctgccctcagccaccagcctttgagtgatctgggg

SEQ ID NO: 129838 - DNA, 122 bp, Homo sapiens
ccattcgggggctgattttgtggcgcagtttcagggtgaacacaggcagcagcatgatggcggcggcttaggggaggagggctggaagctggagacaagcgcagcggagctggcctcacgcg

SEQ ID NO: 129839 - DNA, 122 bp, Homo sapiens
gcgggcgggcggtgtgagcgtgcagagaggatcccaggataatccggcaggtaccccaagcgtgacctggcaccccaacccagaccccaactataaccctacccccgagccatcctccactg

SEQ ID NO: 129840 - DNA, 122 bp, Homo sapiens
cctcctcgctcctgcaccctgccctgccaatctccatctgcctctgctcacagctccctccgcctggagaactcttctacagatggctccaggtctcggttccactgctgcctcctccagaa

SEQ ID NO: 129841 - DNA, 122 bp, Homo sapiens
cactggcaggtttgcaagctttctcttcatgagggtccgtccacagagctaggtgacaaacgctcagtccaggatctctgcaggttcctacacgggagccggagagcgcctgcgcgtcggag

SEQ ID NO: 129842 - DNA, 122 bp, Homo sapiens
agagaccttggtgagatgggtaggatcctggccaagcaggactgaggaccaccaatgctgcgccctcctcggaagacctcgctgcctggcctgcatgctgattgtctgggctcctgccctgc

SEQ ID NO: 129843 - DNA, 122 bp, Homo sapiens
tccatttcccaggttaccccgggacaaatccgggggcggaacttcagaggtccacgctggcgcctgcgcgtgtggttgaggatgggctggcggcgggtccgggtccgctgcctggcgctgcg

SEQ ID NO: 129844 - DNA, 122 bp, Homo sapiens
gggtgacacacggcaccgggaaaatcgggtcactcccacccgaatactgtgcttttccgacgggcttaggaaacggcacaccaggatattatatcctgcacctggctcggagggtcctacgt

SEQ ID NO: 129845 - DNA, 122 bp, Homo sapiens
cagggggaggtagggcgcgggacggggctcgagcagagggcactgggacagggcgggcgccgggagagggcggccaggctttcatttaaaaaggataaggcatcacgcctgtaatcccagca

SEQ ID NO: 129846 - DNA, 122 bp, Homo sapiens
gttgtcaatagaaaaggtgttggatattgctgaggctgaaatgagataaactacactctccgagaatgaaaaaggctgtctttgttgtgggcaaactgcatctctgcagaccttgttatctt

SEQ ID NO: 129847 - DNA, 122 bp, Homo sapiens
attttattatgggctgaagctcagaaggctcccaatgctgaaacgctcgacctataaccccggagtcactttccaactgcgctctcacccagggtcattatatcccaaacggaagccaatca

SEQ ID NO: 129848 - DNA, 122 bp, Homo sapiens
gaagttgagcctctgagcccattgcgccccggaatctgggaggcggcgtgaccaggtgcccgggttccatccgctggggctgggcagcccccctgcccccgcccagtacagaggctcctgcc

SEQ ID NO: 129849 - DNA, 122 bp, Homo sapiens
gtcccccctcctccccggggtgagtgagagggcaccatccctggggcaagggcccccaggcgcaggatgcacgaaccgagggacacaccgccgccagactgacctggtgtggcggtcgggcg

SEQ ID NO: 129850 - DNA, 122 bp, Homo sapiens
acagctgtgtggctgaaatatctgggtggacaggtgcaccctacaccaatgggctctgaccgcagtagactttcccaaatctgatcacctctcctaggatgtgtgagccaagtgagggaaaa

SEQ ID NO: 129851 - DNA, 122 bp, Homo sapiens
taacttcagcgggagtgaacgacaggggtgggctccactttatccagtgcactcggaagccggagggcccccaccaaaaagagcaaggggaaccctcgccctcaacaaggcctgcatctccg

SEQ ID NO: 129852 - DNA, 122 bp, Homo sapiens
gctccccacccctggtgaccgagactccattttctgtctttgtgggtttgctgctcctgacgtttcgcatgcgtggagtcatacgctgagaggccttttgtgtgtcgcttctgttgcccagc

SEQ ID NO: 129853 - DNA, 122 bp, Homo sapiens
aaatcgaaaggcttaaatcagaggtatttcccagtcaatagattccttctcattgtttcacgtttaccgtcatttcctcatgattacttaaggcctattcagggcaacattttaatcccagg

SEQ ID NO: 129854 - DNA, 122 bp, Homo sapiens
ctggcttcccagaggattggctgtgtggccttggtcaaatgacataacctctcagagcttcggttttctcttaagatatggatttagcagatctattgtagagataaacacattgtgtctac

SEQ ID NO: 129855 - DNA, 122 bp, Homo sapiens
ctcttcgtgtcaggagtttttctacctctccggagttctttggctctcaggaacctagcacggcatcacgcgagtcccggctcaggtgaggggggaataaagggaacaggaagcgccttttg

SEQ ID NO: 129856 - DNA, 122 bp, Homo sapiens
ggatccagctgctgcccatctcttcctcttctctaggcccctggcatttcagggggcaggcgttcaagtgatgggcagtcaggactgacacggaagggagacagagaagagaaaaaaagagt

SEQ ID NO: 129857 - DNA, 122 bp, Homo sapiens
gcctggcgtctcgaccctccacgctccaactctgcctcttccttgctctatagacctctgcgtcctgataagtggctctccggggcacccttcgtgcatatcggctatccagctccacctct

SEQ ID NO: 129858 - DNA, 122 bp, Homo sapiens
aaacccacactcacctacacacacctttcccaacacagcaagccagaggcagccctgccccgagtggtctacccccacgccccaaggcccagaacagttctcaccgccccatgagtgaccaa

SEQ ID NO: 129859 - DNA, 122 bp, Homo sapiens
agaactttactacatttggcttcccaaggatcccaccacctccttctaatcagtgatcatcgaggaaacgcattgtattcctattcactatttcaaagatcaggcctacctcactggcatat

SEQ ID NO: 129860 - DNA, 122 bp, Homo sapiens
tcaagcactggtatttcctcctcctctgtgggtccaaactgacgccgagtggctgagaagcgaagagcgatggccacggccagctttaggttaaggatggccaggctcacgatggagacccg

SEQ ID NO: 129861 - DNA, 122 bp, Homo sapiens
gcaggcccaggactctggggcttctcactgctgcccttgcctcctgcggctcagtgcaggcgagcagctcagattcccggcccccgtgcagcccccggacggcccccacacggccccggacg

SEQ ID NO: 129862 - DNA, 122 bp, Homo sapiens
gatgatggagccctcataaatggggttagtgcccttataagagaggcccaagggagctcacggcaagaaggcaccaactctaagccagaatagcagccctcaccagacaccaaatctgccgg

SEQ ID NO: 129863 - DNA, 122 bp, Homo sapiens
ggaaggttacctttctccccattcaccaagccttcctggtggtttctctgccacctagagcgccaaacctgccatctttactggtcttctagagaaacaggcctcgtggactagatctttcc

SEQ ID NO: 129864 - DNA, 122 bp, Homo sapiens
ctgcagaagccctgaggtcctgtctcaaccagaatccagcacccaggacaagccctccagcgacttcagaccttcccgctcccgaccccgcccgcccccgagaggcgtggtcaaggcggggc

SEQ ID NO: 129865 - DNA, 122 bp, Homo sapiens
cactggcatctctctctgcgatcccagcccttcagtgtcaatcagcacatgacttacaagcgtccagcacctttctggtgctaaggaggatatagagattaatatgaagtagtaataattgg

SEQ ID NO: 129866 - DNA, 122 bp, Homo sapiens
cttccacttctttggggttgctgagatccttttgattgtggtgatggcctatgattgctacgtggccatttgcaagcctcttcattatatgaacattatcagtcgtcaactgtgtcaccttc

SEQ ID NO: 129867 - DNA, 122 bp, Homo sapiens
ctctctacacccttcaggtctcagcttaagcaataactcctcaagaagcctttcctcatgcggggttaggtcagcacccccatcccatcgaaggggaataggaagtcatctggggatttaag

SEQ ID NO: 129868 - DNA, 122 bp, Homo sapiens
ccgtcggtcagtgagtccggattcgtgccggcaactgtgggcagccttgagaccggggctcggtttgctggtgatttttccgaagttttacaaaataaagagggcgaagtgccttcgcggcg

SEQ ID NO: 129869 - DNA, 122 bp, Homo sapiens
atccacatgatgtttccccaatctgagtgatgcatttgaggcagaaattgtgcccacagtcgatggtgacaggtttctgcagaatgtccaggcagatggggcagatcacttcctcttgcagt

SEQ ID NO: 129870 - DNA, 122 bp, Homo sapiens
cccggcgtccccgagagacgcctccagatttgaaaatcaattcagcttcgggagtaatttcgcccttcccacagtcacgctccaatctggaatcgaacctggtctttgggcctggtggggac

SEQ ID NO: 129871 - DNA, 122 bp, Homo sapiens
gccaagcggccggctggacccacagtccccgcgccataggcgggtcggggctttcagactcggctccagccctcaaacctggtagccttggaggtcagcttgagatgactgcgcttcctgcg

SEQ ID NO: 129872 - DNA, 122 bp, Homo sapiens
cccgctcggctctccaccgcgctctcctccagccgccgcccgcgccgccgccgccgcccccgcctcctcgcggcgggtcacgcccccactgaaacccgagccgtttcctggacggcggcgcc

SEQ ID NO: 129873 - DNA, 122 bp, Homo sapiens
gcgaggggctccgggagcgctggggtgaggctccgggcggcagggcaaccaaggcctcggcgcacgaatgcctccgcttggcaccaggcgatgaggagcgggaggccggacggggcacgggc

SEQ ID NO: 129874 - DNA, 122 bp, Homo sapiens
caggcttgactgggttgaacgataccagaggggcaggatcagagcacaggccggtcttcccggcccagccaggggcactcactggcctgactgcagttccggcagctcagaggttgtcacag

SEQ ID NO: 129875 - DNA, 122 bp, Homo sapiens
ggggcgtgcccctcaccggaaattagcagaggggcgtgtcccacaccggaagtcagaaagcggagcctttcttacaccggaagtcaatgaagcgggtctttcctacgctaaaaaccactgag

SEQ ID NO: 129876 - DNA, 122 bp, Homo sapiens
agtcccaggacctctgtctgtctgcctgcctgctgtccttcgctggaggagcagcactgccgttgcctccgcagctgggttgctccgggagctgagtccgagctgctctgtggggggacagc

SEQ ID NO: 129877 - DNA, 122 bp, Homo sapiens
gacaaggagatatgttaaagcccaaaggccaggcacaagacgcccaggagggactagtcgcgagagagggcaggaggccagctgggtacccggccgccgcccgtagccccagctcacagccc

SEQ ID NO: 129878 - DNA, 122 bp, Homo sapiens
tgccggcgcctttctgaatcagagatccctttagaaaccatgaaagctgcagacccctcccgggaaaacgcacacaccctcctggagctcgccttctgcagccgctccgggagcccgcccct

SEQ ID NO: 129879 - DNA, 122 bp, Homo sapiens
aactgtaaaaccgattattttatatcaccgttgctaagatttaatacatctttttcctgtcgtttaacacaggacattgagttttagcaaactgaaggttgtccagagtttgaaacaaaccc

SEQ ID NO: 129880 - DNA, 122 bp, Homo sapiens
cctctgcgggttcccagggggaggcgctcgagggtgaagtacaaacccatccccaggctgcgaaagaaaagtctacgagctggcctctgtgggagggtcagggcccagggtataaacataga

SEQ ID NO: 129881 - DNA, 122 bp, Homo sapiens
gccgatgtttctttagccaaaggcagtgggctagtttagacggcctttcattcccggcagcgcctgtgggtgcgtgtgacctgggacagaggggcaaaggaacctggcagagcgagcttggg

SEQ ID NO: 129882 - DNA, 122 bp, Homo sapiens
tggcgagacccctgctctcacccacccaggacttctcgctcccaggccgggtcctctcaccgtcaaggcccgccccctgccaacggtcctcacccattagccgaaggccccgcccctcacag

SEQ ID NO: 129883 - DNA, 122 bp, Homo sapiens
gagtgaggcttggagaggaatctgtcagcctcgagggccccagcgagaaggctggcttcccgcagcgaagctttggaagagaaccggcgtcccatgacggttcgtccctttggggtctggcg

SEQ ID NO: 129884 - DNA, 122 bp, Homo sapiens
ctacctcccagtgcctgcccagggctcccattcaacagggcctgcttctgaccagagagccgtggccacaggctgtctgaaacaagcagcctgtgtttcagactgagcctctgcccaccctc

SEQ ID NO: 129885 - DNA, 122 bp, Homo sapiens
gtcaaacggcgaaggggcactgagcgttttttctttctcccgtccttggcggcagcagctcggttccggctacggggctgagcccgtctctcagacgaggaaactggggtccgagaggtgag

SEQ ID NO: 129886 - DNA, 122 bp, Homo sapiens
cacccccaaaataacccctccggggggtgagaggcaattataaccccagcgagcggagggcgcgggggatgggcgccgggcgggcgggggcggggagcgcggcgcgggtccccaggtggcga

SEQ ID NO: 129887 - DNA, 122 bp, Homo sapiens
tggagctgagggtggaaggggagtgagctgacgctcggaaggtgtcttgagattatcatccgctgacggtggaagcggaacccgcagatgctcagcaggtatcttgatattatcatctgctg

SEQ ID NO: 129888 - DNA, 122 bp, Homo sapiens
gccttttctcttcgtggttttcctcaccatctacttcatcagtgtgactgggaatggagccgttctgatgattgtcatctccgatcctagactccattcccttatgtatttcttcctgggaa

SEQ ID NO: 129889 - DNA, 122 bp, Homo sapiens
tcatgaccaatttccagaacctcaaaacacaaagcaactgcttattttcctgagctgctgcgtgagtcagtgattcccagtgttgctgtgcctgaaaacccaccactaatgtcagcgccttg

SEQ ID NO: 129890 - DNA, 122 bp, Homo sapiens
ctagaactactggcggcagcttctttcgttgacgtgggctacaatggttgctaaaacctgcgtgccagaagccagaggtggggaggcgccatttgctaaaccggaactggttaaaatctcag

SEQ ID NO: 129891 - DNA, 122 bp, Homo sapiens
cctgaggctcacagtcaggccggatccgggtgaggttgtagtcggcccgcagggagcgcacggctcgcgtgatgcttagcgccagctcaagggcggcttctgcctcggggtccttccaggag

SEQ ID NO: 129892 - DNA, 122 bp, Homo sapiens
attaagccaacacatatgttttgaatgaatgtgtgcacacatgcatgagctggcggcagtcggggttggggtaagcacgaaggcccagctcagttctctgcatgtgacctcccatcttacgc

SEQ ID NO: 129893 - DNA, 122 bp, Homo sapiens
cccttaataaccatcgccctggcaggagaggggtgccgaattccgtctcctgcgtgcctgcgtgtgtaatgtgccgagcaagtgatcctaatgatgcattcagcacaccactccccaaagac

SEQ ID NO: 129894 - DNA, 122 bp, Homo sapiens
gagccccgctcgggtgccgctaagtggaggtctgggaagtttcagctgaagagcgttctacgggtctggcgtggctgacaggaggcgccggaccccagccccccagccgcaggttggagagg

SEQ ID NO: 129895 - DNA, 122 bp, Homo sapiens
atataatgacagttctgtaactgcccagggagttcaccttgcccgctacctagacagagccgatttctcaagacaggggaatagcaatagagaaagagtaattcacgcagtgtcctctgtgc

SEQ ID NO: 129896 - DNA, 122 bp, Homo sapiens
cagtctgaccccaagttctaccttctctgtagggcactgtgtccctgacctgcccactcacgattgtcatcacccttcttcttgcatttgccaactcaattcatgtatgtttaaacaatatt

SEQ ID NO: 129897 - DNA, 122 bp, Homo sapiens
ggtcaaagccacagggaacctgccatgtggatgctgcagcggggtgtggatcagccaggccgcctttcactgtgttctgttttccctcccagctttagctccgccaaaatgaaacactcatt

SEQ ID NO: 129898 - DNA, 122 bp, Homo sapiens
gccacttccccaaggggccacctccatggctgcagccgcgtcacctccgtcccatcatctcgctggttaaacgtggaaaaacggggtcttgagctctccacggtctcccctctggttgggcc

SEQ ID NO: 129899 - DNA, 122 bp, Homo sapiens
tcggtctccggctctggcctctccgctccgccgccgccgccgtgagcgagcacgtacgcacggaccgacgtcctgcgtcgcttcccagctaccccctgggctccgcccccaggaccgcgcgc

SEQ ID NO: 129900 - DNA, 122 bp, Homo sapiens
caggacctgttgtctctgcgacgttgccagtccggagagctcggagggccaatgcagccccggattcaacaagatgcgaaaggacttctaaagccaggaaccggcacccagccacggccacc

SEQ ID NO: 129901 - DNA, 122 bp, Homo sapiens
gggctcaagaatcctcccacctccgcctcctgaagtgctgggattacaggcgtgagccaccgcacccagccccaggagtcccttttgaatcagggttgggcaccaatttgacccatactgaa

SEQ ID NO: 129902 - DNA, 122 bp, Homo sapiens
ggaccccggtacatctgaaagccgggaaatggtgcgtgtgcgggaccagatgtcgtgagacgggggaggggctgcctggaacaggcgggaaccggctgtggcgggacccgggcctccctgtg

SEQ ID NO: 129903 - DNA, 122 bp, Homo sapiens
ttgtgtccccgcagtgtcgaggcgcgggccctggcaggtcctttctcgaggcagggggcacggtagcacagggagcttctctttgtgggcgggcgcgaggcccgctagggggttatactggg

SEQ ID NO: 129904 - DNA, 122 bp, Homo sapiens
ccgctcggacggccctggggagcgtccccggacggaagcagtgcgggcgggactgtggggcggcccgggccctttcgagcccctgccgggcaccgctggcgacgttggccccgggacccctg

SEQ ID NO: 129905 - DNA, 122 bp, Homo sapiens
ggctcccggccgggaccctccacccggcggctggcggctcgtgaccccgccccctcggcccgctctgggcccgcctcccgccggctggctccacccacaatagcgtccctagcgcgatggcg

SEQ ID NO: 129906 - DNA, 122 bp, Homo sapiens
taactccgcagagtgggcagaattccaagcaaggagagtctcgggaggcagcctttcacccgccttttgccttttcacccccaaaactgtcggccccacgctcccctcccccagcccgctcg

SEQ ID NO: 129907 - DNA, 122 bp, Homo sapiens
ctgacgcctgcgcggcgcaaacgctcccgggaggtgtagtttgcgcctatttcgcgcaggcgcgctttcccgcagcggccgcctgctgctctttgtggcagtcgcagtccttttgtgggagt

SEQ ID NO: 129908 - DNA, 122 bp, Homo sapiens
agtccttcttggatgagaacaggttctgctgcctcttcaaaatcacaggatatcctttcccggcctacagtcagcctgacaatataagcaatgctataaatattatagcacatactgagaaa

SEQ ID NO: 129909 - DNA, 122 bp, Homo sapiens
ttctcagtttaggacgaagacccgccatgacaatggcgggaacgctggagtaaaacctcacggcggccagcatgaagtttttcgccagatttgtggccccacccccaagtacccacgcggag

SEQ ID NO: 129910 - DNA, 122 bp, Homo sapiens
tcaaagggcattaaaatacagaggcggactcaaacgaagatggccgaataggaacagctccggtctacagctcccagcgtgagcaaagcagaagacgggtgatttctgcatttccatctgag

SEQ ID NO: 129911 - DNA, 122 bp, Homo sapiens
cacagaaaacattgtataaaacaaattgcacaataaaaccataaaaaacatgatgtaggccgggcgcggtggctcaagcctgtaatcccagcactttgggattccgaggcgggcggatgacg

SEQ ID NO: 129912 - DNA, 122 bp, Homo sapiens
cattggggcccacagctcccttaggactagctctggatcctcccggcgggtaagggtggacggggattgactgtgcccctcgaagggcgcagacccctgggtgtgacccctccctatcttgt

SEQ ID NO: 129913 - DNA, 122 bp, Homo sapiens
atattgaacgggaaacgtttcatctctgctcccgcctcattaatgggccgtaccggcggacggtgagagccctggtcttcacattaaagcaccgagctgaaatccgggctcaggtgaagagc

SEQ ID NO: 129914 - DNA, 122 bp, Homo sapiens
tatcaacacaagtcagtaatcttagcattcatacagagactttcagtaacttgatagtttcgtttaggcaattataggaaatcattcccttcctaggagttaacaacaggtacaaacattgt

SEQ ID NO: 129915 - DNA, 122 bp, Homo sapiens
aagaaactcgaccccgtctacctcggttcagtggaaggcattcatttgcacaacgctgtgcgcatgcccggaagccttaagtgtttcagcctccgacaggggcgtaattaaaggggcaggcg

SEQ ID NO: 129916 - DNA, 122 bp, Homo sapiens
gtcccggctgcgcggggcagttgtgcgcacttgggttcttcacgcgggacacacgtggaacgccgacccctgcgcccctggccgctggcaactggcaaggccgggaacagaaagtgtaggga

SEQ ID NO: 129917 - DNA, 122 bp, Homo sapiens
cagccgcctgggcaacaagagcggaacaatgtctcaaaaaacaaacaaaaacaggccgggcgcagcggctcactcctgtaatcccagcactttgggaggccgaggcgggtggatcacgaggt

SEQ ID NO: 129918 - DNA, 122 bp, Homo sapiens
ccgagctccccaagctgcaagtgggcttcatcgacttcgtgtgcacattcgtgtacaaggcgagtggttcacgggtgttccgagctgactggggcagggtggctgggagcaggcaagggggc

SEQ ID NO: 129919 - DNA, 122 bp, Homo sapiens
gactgcacggaggctgccactttctgatggtgagtgactctaggcctcaagtgattcagacgccactgactcttgctgcagaaacttttggtactagggaaacagactcttccattcacttc

SEQ ID NO: 129920 - DNA, 122 bp, Homo sapiens
gccccatggtggcgcgcccgaggcggcgagggacggctgcccggcgtgcgggggccgcggcggacagctagctctcggaaggccggacttccagcgctacgcaccgtcccgggtgcggcggc

SEQ ID NO: 129921 - DNA, 122 bp, Homo sapiens
ggattgccttcccggcccttatgactttgggcaggtcacgacctcctggttttcagtctccgtaacatctgtaaatgtgaagattgaaaatactgcgtggaaaacactcaccgcttcctggg

SEQ ID NO: 129922 - DNA, 122 bp, Homo sapiens
cagtttgatctcagactgctgtgctagcaatcagcgagactccttcggcataggaccctccgagccaggtgcgggatataatctcatggtgtgccgttttttaagcccgtcggaaaagcgca

SEQ ID NO: 129923 - DNA, 122 bp, Homo sapiens
ccaactcccaggttcaagcgattctcctgcttcagcctcccgagtagctgggactgcaggcgcctgccactactggctaatttttgtatttttattagaggcggggtttcaccatgttggcc

SEQ ID NO: 129924 - DNA, 122 bp, Homo sapiens
tctggggcttacgctttaactggaaaagatttgaagttgagtaaagggacgccgagaggacggttacaaatggggataccacataggagtaatttgttaatcgattatgagggcctcaaagt

SEQ ID NO: 129925 - DNA, 122 bp, Homo sapiens
aggcgcagcctttcagggtcttccccatgccctaaacaaaagtcacagacaccacccaggcgcagtcgctctggatcctcccaacctaaagctaaatctagaacgccacccagacgcagtcg

SEQ ID NO: 129926 - DNA, 122 bp, Homo sapiens
cagactctctatactccaagtatagatgaatctaaaaaccaaggcacttttagaaaaaaacgcaggaaacaaagcttttgatgttaatgactttactttgagatatgatggaaaaatattac

SEQ ID NO: 129927 - DNA, 122 bp, Homo sapiens
ttcaaaaactgatttattagattctgataacatatgttcacattatttgttacaacagcccgtcccaccctccactgaaacttggctcacactttgaaaaattcttttgttgcaaatggaca

SEQ ID NO: 129928 - DNA, 122 bp, Homo sapiens
gtcagggaagtcatggcagcccagctacgtgtaagatgaaccaatcttgacatactatgacgtgttctgaaagactttaaatggtatcccaatagacagagacgtaaggatgcacgaaccag

SEQ ID NO: 129929 - DNA, 122 bp, Homo sapiens
cagaagcacgcgggtgacagggtgtggccagtgcaccaagcagaacggccaggcaagctgcgcccagacacatgtcggagtctcgtgtggccactgggtccgcctcggctggaatctgccat

SEQ ID NO: 129930 - DNA, 122 bp, Homo sapiens
atcttgtttaaatgatcatgtcttcaaatccatataccacaggcctgcaccctgcacaggcgctcctggcccacacccctcactgctgggcaggagccttactgggattcggggaaggtgcc

SEQ ID NO: 129931 - DNA, 122 bp, Homo sapiens
acagggaaagtagcggggatgcgggtgtggagtgtgaaaacctggatcactgacgaccctcgggcgggaggctgtttgggggccttatccaggacgtgcgcaggaaggtcccgtggtacccc

SEQ ID NO: 129932 - DNA, 122 bp, Homo sapiens
acgaggaagtcgtaggagacccacctcagatgctcgggtgcacatctggggagagtcaaccgcccagcatggcttttggctttgggggattccgttcctttgctgctgccttggccacaggc

SEQ ID NO: 129933 - DNA, 122 bp, Homo sapiens
ccttagccggcaactcaggggagagacgctctcaaacgaccgggagtctcaggggagcgacgctctcaaacaacccggagtgtacagctgccatggtcacccacgctccctcttaggccacg

SEQ ID NO: 129934 - DNA, 122 bp, Homo sapiens
cgtgtggggagggctttgtagagtatgcctggaggtgggacttgtgagcccctctccacacgcaggtgaagagctttgccaggccctccatcgtggacaccttttctaataagcccagaggc

SEQ ID NO: 129935 - DNA, 122 bp, Homo sapiens
acagaggaagcaacagctttttagtgaattgcttgttaaaaagtcaatcatggccaggcgcggtggctcatgcctgtaatcccagcactttaggaggctggggtgggcagatcacttgagga

SEQ ID NO: 129936 - DNA, 122 bp, Homo sapiens
ggcgcacagcaagggggttggaggtggggtcgccctctcccacgcggctgggtttccaggcggtgtcctgggccgagccgcttggagatcctagatcagcatgtgggtgggaaagggcgccc

SEQ ID NO: 129937 - DNA, 122 bp, Homo sapiens
aagggcacccccaagctaacatagctggctaagaacctgctcgactgccctagcacctgacgccttgaaggaatactagccacttttccctccttgagctctcagtcccctctgaacactgt

SEQ ID NO: 129938 - DNA, 122 bp, Homo sapiens
ggcggtcagggaggtgacgctgggacctgagcctcagccagcttggcgggtgagcccctgcgctcagcccctgcgcccacgacgacgggcaggcaccagcagagtggcctgaattccggccg

SEQ ID NO: 129939 - DNA, 122 bp, Homo sapiens
gcaggggaggcaaaggttgcagtgagccaagattgcaacactgcattccagcttgggtgacggagcaaaaccctgtctcagaaaaagaaacgtaactacaaagagattaaatcatattatgc

SEQ ID NO: 129940 - DNA, 122 bp, Homo sapiens
cgcacggtgcgcactgctcagccttcgcccccgtgggcgaaaggctgctgcggtttcaggcggctgcttcgtgactaatgaccttgcgcagagttgttaagaaaaaagagaaacccgcgctc

SEQ ID NO: 129941 - DNA, 122 bp, Homo sapiens
ctgagggcccctctgcgtgttcacagcggaccttgatttaatgtctatacaattaaggcacgcggtgaatgccaagagaggcgcctccgccgctcctttctcatggaaatggcccgcgagcc

SEQ ID NO: 129942 - DNA, 122 bp, Homo sapiens
atgcaggtgagaaatgattggggccaatagcaacagtggcacttctcctgaggcatctatcgtacattgccttgttatttgtgtacatattttaaaatttcctgaaatgtcttacctctctt

SEQ ID NO: 129943 - DNA, 122 bp, Homo sapiens
cactgcccacaggacgcctgtctctgctgtgtggtggtgacctctgcactgcccacaggacgcctgtctctgctgtgtggtggtgacctttgcactgcccgtggggacgcctgtctctgctg

SEQ ID NO: 129944 - DNA, 122 bp, Homo sapiens
cacttctcttgctttgctgctattgtgtcattgtatataaacatgatttgctgaaaatggcggaacattgcagcatgctgagatttaagtatccttgtgaccactgaagatggaccattttc

SEQ ID NO: 129945 - DNA, 122 bp, Homo sapiens
cgccgtccttgtgctgtttttggcgtggctactcgcatttctgtacctgactttcgagtgcgaagggagagtctttctgggctgtgttttggtttctttaagggaaactgaggccacacgtc

SEQ ID NO: 129946 - DNA, 122 bp, Homo sapiens
aaaacagcagaaatgtattatcagtctagaggccggaaggccaacgtcaaggtgtcagggcggggctcccccaggaggatccaggacccttccggcctcttcctgctcctgggggctccagg

SEQ ID NO: 129947 - DNA, 122 bp, Homo sapiens
ggcagggctcccctctctagctcatgtgtttctgtgaggtcacgtttctccacaagagcacgtgctagcttcataagtagaaaagaggaagaaagaattgtgaacgaacaccgatatttagt

SEQ ID NO: 129948 - DNA, 122 bp, Homo sapiens
gaagcgcattaaaacggcgccctctggtgtcagctcgcggcggccgggtaaaagcagtggcgctgggggtagagttctactcgccaccctgttcgcaaactgaaagatccccgagtttagaa

SEQ ID NO: 129949 - DNA, 122 bp, Homo sapiens
aattcttccagttgtggggcctggccgcctgattttcagggaaatggctaactgctggggcgcttctgatagcagaaagcttttcagagatgggctcctggggtgagaggatcctggttagg

SEQ ID NO: 129950 - DNA, 122 bp, Homo sapiens
tacagcgggctggacagcggaccctctttgggaacagccactttacacatttattgggaacggcaccaatagccctgaaaattagggaacagcaggggctgccaaatatatctcaatcaaaa

SEQ ID NO: 129951 - DNA, 122 bp, Homo sapiens
ttgttggagatgtcacactgcagtgccccagccagtgaaggggctccaatgcacctgcaacgaggcaggggtggaggggaggctgcccaaaggatggcgcccggagactcgaaggccgcgag

SEQ ID NO: 129952 - DNA, 122 bp, Homo sapiens
cagctttacgcggccgtagggcgcccggggttgagtggtgtcctagcaacaggtgggcgccgactgcggcggggcagggcgctgcaggtgacttcggccgggggtccccaggcccaccccat

SEQ ID NO: 129953 - DNA, 122 bp, Homo sapiens
gcccaggagatcaaaaaggatgcgctctctacattcttaaatgccacagtcccctaccaacggcttaggtggaagcacagctcccacatcagcactgatgccctggcgcggccagcactgcc

SEQ ID NO: 129954 - DNA, 122 bp, Homo sapiens
ggaattctccaggtggggtgggcaggccggcgggtgttgaggtctctgtgcatgcttgtgcgtaccctggactttgccgtgaggggtggccagtgctctgggtgcctttgccagacaactgg

SEQ ID NO: 129955 - DNA, 122 bp, Homo sapiens
agccgctgcacgccaggcagtcgtttagcgagaccttggccttctccagcctccgggtcccgccgtcctacaagggagaagaacccggtgcacaggggccccctctgcacgaggacatggag

SEQ ID NO: 129956 - DNA, 122 bp, Homo sapiens
actggccgttgctgtggagacgcctggtgagttcctggaaggctggtttgaaggcggtgccggggtgggggtgaggctcagcagagcccggggcacaggccggaggggctgcaggcgcgagg

SEQ ID NO: 129957 - DNA, 122 bp, Homo sapiens
agcccgagcccgagcgcggccgccgcctgccgggcctcccctcgccgcggccggccgccgcgctcccgcccgggcgcccagctatgtactccccgtactgcctcacccaggtaccggccgcc

SEQ ID NO: 129958 - DNA, 122 bp, Homo sapiens
ttgcaggcatctttcaatcacagcaagtccctaatcactcaggaaccacctctgtggtttcgcattagggaaaactgctgccttctcaggtctgagggcaatacaaaaggtgcccccaaaat

SEQ ID NO: 129959 - DNA, 122 bp, Homo sapiens
ctctcggagtgctgcctccagccaaggtgtgtgtttatttgattgcttttggtggcgaggcgcggggctcgggctcgtcgcgcgccccatggccggggagcgcatccgccaaccccgggcgg

SEQ ID NO: 129960 - DNA, 122 bp, Homo sapiens
gtgccctgagtgaggtggcagaaggggtgagaggccatggtgtctttggggctggtggtccgggtctggccatctgtcacctctcaggcgtgcaggcactaatccctccaagcctcagttgg

SEQ ID NO: 129961 - DNA, 122 bp, Homo sapiens
aggaggcacccagtattcccacctccttacaacagtgccttgcacagaacaggccctgcgcggatgaaacttagcaaggagagagattcttcctgttgtatcaatataagaaacgggttcca

SEQ ID NO: 129962 - DNA, 122 bp, Homo sapiens
gggtcaccgggaggaggggggaggctcaagttacagaacagcctggtaggggctcaaagacgcccatcctggaagaggccccagcactgacctccgtgggggtggagatgaggaggatggaa

SEQ ID NO: 129963 - DNA, 122 bp, Homo sapiens
cagtgctgctgtagctggtctgagttctagggatgtctttaattggggtgggggagaaaacgtcattatacctgacttggtgtaggaggatagctttaggtgtctgtgtttttgaatgtctt

SEQ ID NO: 129964 - DNA, 122 bp, Homo sapiens
gacgggcacctgtatgccatcggcggagagtgtctgaactcggtggagcgttacgacccccgcctggaccgctgggactttgccccgccgctccccagtgacacgttcgccctggcgcacac

SEQ ID NO: 129965 - DNA, 122 bp, Homo sapiens
ttttatctatccatggctttagtcattggaaaatactaggctgggcttggtggctcatgccggtaattccagcactttgggaggccaaggtgtgcagatggcttgaactcaggagttcgaga

SEQ ID NO: 129966 - DNA, 122 bp, Homo sapiens
gagcctgtcaagaggcaaaggaatccatgtagtagatatcctctgcttaaaaactcactacggaggagaattaagtcctacttttaaagaatttctttataaaatttactgtctaagattaa

SEQ ID NO: 129967 - DNA, 122 bp, Homo sapiens
gtccatactactgactttcccggtaactattccggttatgatgatgcctgggaccaggaccgcttcgagaaggtaagtggggccggagttgtctggggagggttatgaaggccagaccttgt

SEQ ID NO: 129968 - DNA, 122 bp, Homo sapiens
cttctcaccgttctccagccaagctcgcccccacggctgcctgattccttcctgggaacacgtggggggacttttaaaaggcgccacctactccgagtcctgacccacccaactctcccagg

SEQ ID NO: 129969 - DNA, 122 bp, Homo sapiens
agcccgcctgcgccccctttatacgcgcgggccccacccccgtgcgcgcgggcccggccgcgattagcataatgtagtattttcagtttcaacaacaccacggcgattggcggccgccccgc

SEQ ID NO: 129970 - DNA, 122 bp, Homo sapiens
gaaatgggtagagggggccgaggaaaggccgcagggggccgggagagcatcgggctgctgcggagaggaacttgcctgcttggttgctcacaaaggcagagaagacacagcccgcgggcgct

SEQ ID NO: 129971 - DNA, 122 bp, Homo sapiens
cagccgttccttactgttcctcacaggggacccccgtggaggacaggcaaaaagtttagacggcggtcgcaggttgaacgaagctcccgaggggtttcatgatatatatacataaccttggg

SEQ ID NO: 129972 - DNA, 122 bp, Homo sapiens
caggcccccgaggaagggcagcaccgacccgtcatagtccagcaacaagaggctcggggccgcagccgcggagcagcagctcgggtgcgggccgcctccaggatgcagtgggggcagcggct

SEQ ID NO: 129973 - DNA, 122 bp, Homo sapiens
ctcacctgcgcgccgcagcccccgtgttcaccttgcgcgcgtccctgcagccgatcgccgcgccgcatcctccgagatgctcagactcggctaacagagcccggcgctgccgatcgcgagcc

SEQ ID NO: 129974 - DNA, 122 bp, Homo sapiens
tgtgttacatctcctgcaagtgatgcatcagaagctttgatgaagatgtctcttttttgccgttacctttccaaaaaagaaaaaaaaaagtttatacattttgtatcaccttgcccaagcat

SEQ ID NO: 129975 - DNA, 122 bp, Homo sapiens
tcagctgcagatgctctttcattgtttctttctaatcagcttctaagaatgtggcttaaacgctcagctatttccaggtggttggcatcatttattgagttgtctgctagagttatttcata

SEQ ID NO: 129976 - DNA, 122 bp, Homo sapiens
gaccgcttgagctcaggagttgtgtgcgctgcttcacctgcagcaagactgtgggcaacacgtgggaggcctacctggggctgctgcagtccaagtacgctgatggggacgccctgggcctg

SEQ ID NO: 129977 - DNA, 122 bp, Homo sapiens
tctgttctcttgagagctcaagctgggtatcagcttgtccatctttcatgtccaggagatcgctgtctgtagaaggaaagaatgaggctgataaggaagagaaccagagacaaaagatgaag

SEQ ID NO: 129978 - DNA, 122 bp, Homo sapiens
gataaacatgcctcggcctccttcccctacctgaaagccgcttctgccggcgagagaaatcgtacacaatctctgctctggatgtacaaaaagtctgaaattgcttggagaccaggcgggag

SEQ ID NO: 129979 - DNA, 122 bp, Homo sapiens
ggtgaggaggggcagagacaccaatccaagagtccccgcagtttatacataccacaggcacggaaagcgccaggaggggaaagaacaggatgtttaccagcaccttccacaggcagccacgg

SEQ ID NO: 129980 - DNA, 122 bp, Homo sapiens
tagccctctcaacggccccagcccctgtgactgtagcatccggctgagctgaccctgaggcgttatctgaccaccccccccagcaaacacgtgtgtccagaaacaggagcctagaaaaatag

SEQ ID NO: 129981 - DNA, 122 bp, Homo sapiens
aagctctcatgtgaagagacgacagagcaagcttggcttagtaaatcctctctgggagtgcgaacaaccaccaccacaaccacaataatgacaaccgcattgcataagagccctggacttac

SEQ ID NO: 129982 - DNA, 122 bp, Homo sapiens
caagagacctaacaccgggaaacctgaagagaggggcaggacgtgagagcggagttgaagcgagtccttggagagacttctgaaggtcactccggtactcaagtgctggagaaagagaccgt

SEQ ID NO: 129983 - DNA, 122 bp, Homo sapiens
cagcaatacagcgaatcagcggctttcgggaatacatttttcggaaaaagacttcttcctcggttttctgctctgcacacgttgaaattttccccagtttttcctgcagatcgggagtcgag

SEQ ID NO: 129984 - DNA, 122 bp, Homo sapiens
aattttggagtagcattctccagggtgggccgaatggtgttgtttgagggatgtgttctgcgtgttattagagggagataggaaggcctggaagattattcacatggctgagcccaggattg

SEQ ID NO: 129985 - DNA, 122 bp, Homo sapiens
gaggctgaggcaggagaaccacctgagcccagaacatggaggttataacgagctgagatccggctactgcactctagcctgggaaacagagcaagactccgtctcaaaaaaaaaaaaaagta

SEQ ID NO: 129986 - DNA, 122 bp, Homo sapiens
cccagcaccccggccgggcagtactttttttttttttgcatacaccagttctcaggatatcggaatccggtgcacagcagcttcttcaggtttgaggttccggatgcctgggggcggagaaa

SEQ ID NO: 129987 - DNA, 122 bp, Homo sapiens
agttgacttgtttcatggtgagggctccttgaaacactggcaccaccaggtacttcaggtcggtggaagcaatctcttccaaatcttcatttcggctgaacaactcgagctgcgataacatt

SEQ ID NO: 129988 - DNA, 122 bp, Homo sapiens
tcccagcctcacccggccgcgaccgcagcccagtccgttaccctggtctcgggacctccgcgcatccaagattcccgcggacccgttgcaccgtatgcccgcgccagagacgctctgcgccc

SEQ ID NO: 129989 - DNA, 122 bp, Homo sapiens
cattggcgcccgcggtgaagggcagcttccgcttgctggctcgctccctcacctccttcccgccatcgccacgctccagttttggggtcttggttagagaaactttatctttatcctagaaa

SEQ ID NO: 129990 - DNA, 122 bp, Homo sapiens
cagagaaaatacgtctatttggagaccactgcacatttttctttaggccagtccctctcccgcttccattctcctcctcatttcatcctttcctctttttcttttaagggaacagaaagaac

SEQ ID NO: 129991 - DNA, 122 bp, Homo sapiens
aggaacaatctctccaccgagtgagcaaggcccctcccatgtcaaagaatcaaacacgcacggttcatattgagggtacaactggaagcttgtgcttgttttctgctggacttcgctcacgc

SEQ ID NO: 129992 - DNA, 122 bp, Homo sapiens
gactgccaccaaagtcacagaaaactttcacacctctcatctgacactgtggcctgtgcacgactccaagcactggggaagccttcgacatcagaatatgaatggcacctgttcttccgggg

SEQ ID NO: 129993 - DNA, 122 bp, Homo sapiens
ccagggctccatgagggtgttttggcctcgctgggaggggcggggagaatgcggccggggcgctccgtatgcatccatgttcggccgggcccaccccagcacccctcctttgcctgtcctcg

SEQ ID NO: 129994 - DNA, 122 bp, Homo sapiens
cctggctggtggggggcggagtggggagtggggggactgtgccgctgccgctgcatccggcgggggcctgctggggtggttcctggaagaggccacacccagtccctccctccgtgggatgg

SEQ ID NO: 129995 - DNA, 122 bp, Homo sapiens
gcacccgcacgcaaactacgggctggagcagtctaacagaaactctctcaaagtcgctcacgggttgccattctaggtaagatttgtgaataaaactaattctttaaaagcctgagtttttc

SEQ ID NO: 129996 - DNA, 122 bp, Homo sapiens
attggaagaggatttgggtcccagtccaagaatccatggtccccttggagctgtgctacacgggcctccttcctgcaaggcagcaccatccttcttccggtccaagtttggtcagaaattct

SEQ ID NO: 129997 - DNA, 122 bp, Homo sapiens
ctgcagacgccctggttggagcgtctggggccagatgttatagggcaagctaaaaataaccgggcaggccagccaccatcgaggaaggggcatgtgctggacgcggacacatgatccgaggg

SEQ ID NO: 129998 - DNA, 122 bp, Homo sapiens
agtacgtgagtcacaatctcaatggttgacggtattgcaagagagccacaattttgtctgcggactgtgcttttcagtgcagtcacagcctcacatgtgtactgaatcttggtctgagagta

SEQ ID NO: 129999 - DNA, 122 bp, Homo sapiens
gttggtctaggaggcttcgaagtgcgcctgcgctggttggggtgggagtttaaggtgacacgtggagagcgcggcggacgtccttacctccagaggaagtggggattttgatagttcgggct

SEQ ID NO: 130000 - DNA, 122 bp, Homo sapiens
agggcccgggcagccgggtcagccgctggtgctggttgtttctctgtcaggcgtgatagccgcagggcgtggagcccgggagatttgcgaggacgtatggaaatgtgtgagaacagactaca

SEQ ID NO: 130001 - DNA, 122 bp, Homo sapiens
tccaggctcgggctccctgagatcgctgggaccttgctggagggatgcgggttcaaggcccgaaggaaaggtcctgccaaaacaggagtgcacgggcggcccccaccccggtggacccccca

SEQ ID NO: 130002 - DNA, 122 bp, Homo sapiens
acccaaaatagcattacttgaagtgcctttccccctgtaatccgactccatcgtctttaacgtgtttggaattgtgtacacagtttattgttattggtttccttagcctttttagaaccaag

SEQ ID NO: 130003 - DNA, 122 bp, Homo sapiens
gttcttgctgtgtgcgcgctttggcaggaagaggctgtgtgtgattgtagagacgatgggcggaaaaacagagaagagagaggtacttggaatctatgtaattgcagtgtgccccagtgtgc

SEQ ID NO: 130004 - DNA, 122 bp, Homo sapiens
tgatttctcaatcaacgagactcaattcctattcatgactgactctgaaattcatttcttcgcagagaatactgtgggggtgcttcatgagggatttactggtatgaaatgaataccacaaa

SEQ ID NO: 130005 - DNA, 122 bp, Homo sapiens
caggtccccctccggcccctccctgctccgtagggcacgtagacccggatccccagctcccggaccccttccgactgctcccttcgccactcgcgcggcttccactcctggactcggcctcc

SEQ ID NO: 130006 - DNA, 122 bp, Homo sapiens
actgctgtgcacccatccccatggggggcagggcgtaccccaagcgctcggccctgctggcggccttccagtcagaaagcttcaaggctggggccaagttaagcctggtgcgggtggactcg

SEQ ID NO: 130007 - DNA, 122 bp, Homo sapiens
ataaaaaccattctgattctgggcactggtccggaatgtgtaattctggcccagcaggaacgcagctgtgttgctggaggcccttcctgggaaggctctgacagagcctctccttcagccct

SEQ ID NO: 130008 - DNA, 122 bp, Homo sapiens
cgagagcccaggcagctcctctgtaccgtcccgccctgagtggggccctcacttgccacccgttctctggagaaaccgtgctcaaggacacacggccagaagccacccgccccacatcctgc

SEQ ID NO: 130009 - DNA, 122 bp, Homo sapiens
gtgcccgagggccttgggactcggttctcttttcctgggcttgtgggctctggggcatcacggcgggtcgggacgacaggctacaggcggagacgcagccggggcttgcctgatgtgcgagt

SEQ ID NO: 130010 - DNA, 122 bp, Homo sapiens
tcaggactcgattttaaggacccaggaggtggggcagaagagaggactgtgtgcctttaacgagagggtgcctgcttcgtgctataaagccaaagccattaaaaatagatttcttttctgct

SEQ ID NO: 130011 - DNA, 122 bp, Homo sapiens
aatggggaaaggtgacgccctgtgctgctggggccattcctccaggccactgtgcggccgcggccattatggccttggtgacggcaagtgcgttcccagcaaccacagcagacaccatggcc

SEQ ID NO: 130012 - DNA, 122 bp, Homo sapiens
tgctctctgataggctccaccttcaccgtgggggtcctgttagtcaagatgctctgagagcgcacggccgcaaaacaaaaatggtcgctgcttagcccgccccctggtttccactccagagt

SEQ ID NO: 130013 - DNA, 122 bp, Homo sapiens
ggagcaaattgaacatgattatgtgctaaatctgaactcagactaaatcaattcaagcagcgttagctaggaactgagtcatagctgttgttgcagccgagtgcttatgtttgcaaaaagca

SEQ ID NO: 130014 - DNA, 122 bp, Homo sapiens
ggcccggaaccgggctgggtagagtgatgcggaccctcctgctggtgctgtggctggcgacgcgcggaagcgcgctctactttcacatcggagagacggagaagaagtgctttattgaggag

SEQ ID NO: 130015 - DNA, 122 bp, Homo sapiens
aaaataagttcttatctgattgcggggctgattgcaaagccgaaggactagagtggccagcgagtcgggcggctggatctggagttttggagaaagggccactggctcatttctgggcacgc

SEQ ID NO: 130016 - DNA, 122 bp, Homo sapiens
ccaccccaccccaccaaggatgcccaggataccgggcatttgccactgcaagatgtgagtcgttgctaagtttgagggtcacattcctccaggtccaccccgccttgcaaaaccggctcacc

SEQ ID NO: 130017 - DNA, 122 bp, Homo sapiens
gtgccgggagacttggcggggacgttccactgcgcaggaagtggcttcaaataacttacacgcgtcactgtgtcgattagctgctccgtgacaggcactatggtaggagctgaggctacaaa

SEQ ID NO: 130018 - DNA, 122 bp, Homo sapiens
aggggccttcagtgggtgccgttcaccttccagcctaatccgtgagaaagcgagtgaaagcgcctcccattatcccagccccaggaccatctgacgatgggaataggatttgtttcctggaa

SEQ ID NO: 130019 - DNA, 122 bp, Homo sapiens
tccgcgcggaggtgggaccggcgggttgggaacggagttggggcccgtcgggggccggcgcgtggagggtgggaggatccggccgctgccgggcggatgggagctgcgcgaggagacgggcg

SEQ ID NO: 130020 - DNA, 122 bp, Homo sapiens
cccggaaggtcgtcagctcaggctccaaatatgtaacagtgagtttctaagtgagtcacacggacgcggttggtttccagtgaggcataactcatcgcttcactcttctcaacggttccctc

SEQ ID NO: 130021 - DNA, 122 bp, Homo sapiens
actggaataggcacaaaattacagcatcccaaacccagcgtgggtcacaagaagaaacctcgaaagcaaaaactggagtgcagtagcagcagcagcctccctgggcagatgcacttgagttg

SEQ ID NO: 130022 - DNA, 122 bp, Homo sapiens
gtcgtgtgacgctgcatgacgggaattgtagtcctcaaattgctagcttccgatgccatgcgctgcgactggaacgccaattcccaccatgccgcgcgctcacagctctcaggggctgtcct

SEQ ID NO: 130023 - DNA, 122 bp, Homo sapiens
gacctcagtataggccctgcaccgttttggcctcttgaagcccaaaggttactcctgtaacgctgggggagcgttgaacaacaaaggaccggggtggggcgcaagggaacagaggagctgct

SEQ ID NO: 130024 - DNA, 122 bp, Homo sapiens
ggcagaaagctcaccccagatagcgtggtgtggaggcaccctattgtgctgaactcccagcgtcttggctctgccgtcaggcatggtcccatggggctggacttgtaacatcttcctccgct

SEQ ID NO: 130025 - DNA, 122 bp, Homo sapiens
tacattgtccaatcaggctactttgtagaggaaaatcttcaacactggtgagtctgtaagcgcacgccctgctcaaacacggttgaatctgtgcgtgtacatccacctgcacatatatgtct

SEQ ID NO: 130026 - DNA, 122 bp, Homo sapiens
ctgcctccccgtgataaggcacaggcggtccccgggcgggggatgcctgagacctgggagcggggcccgcccctggcaccacctgattgggcatcctgcccctcccctgccagctcctgccc

SEQ ID NO: 130027 - DNA, 122 bp, Homo sapiens
aaaggtgaaagaatgctgctctttcctgctggatttctctggcagcaacaaccttgtatgcgctggaggacaattccagccctcctccccgccgccccccccgcccccactgttttagaaat

SEQ ID NO: 130028 - DNA, 122 bp, Homo sapiens
gttatgtttggtctgggtgggatcaatgattcttaaagaaagaaagaaagaaagaaagaacgttgctctggcccaggtgatgctgatttgcagtcaggattggaagtcacagctttaaagca

SEQ ID NO: 130029 - DNA, 122 bp, Homo sapiens
ccaggtgaaccctggcctagttcccagctaccccagaagggtcttagcgctcacgtctcacgcccagactcgaatgtcagtgtaagaatcaggtgtctgcaaagactaatcgaaacatattt

SEQ ID NO: 130030 - DNA, 122 bp, Homo sapiens
tctgtgcagatggaagggtctgtctgtacttcccgatacggtagccacagccgcatgtggcgactgagcacttgaaatgtggccagtgcgactgaagaagtcaattttcaattttatttcac

SEQ ID NO: 130031 - DNA, 122 bp, Homo sapiens
acagagctcacgccccagtgggagaggccccaggggccctgcatgacttggatgtgagcccggtgtgcaccccaccccatcctcagggccctcctgaggaccccggcatagttcctagggcg

SEQ ID NO: 130032 - DNA, 122 bp, Homo sapiens
taaaaagaaaaagagctgattctcctgcctcagcctgcggagtgcctgcaattgcaggcgcgcgctgccacgcctgactggttttcgtatttttttggtggagacggggtttcgctgtgttg

SEQ ID NO: 130033 - DNA, 122 bp, Homo sapiens
ctcctcacttcccagactgggcagccgggcagaggggctcttctcatcccagacgatgggcggccaggcagagacgctcctcacttcccagacggggtggcggccgggcagaggctgcaatc

SEQ ID NO: 130034 - DNA, 122 bp, Homo sapiens
gagagggagccccgcacttttctccccgcggagctgcgctgagtctgaaataggtgtacgcgtcagcggggcaggaaacggaaagacagtgcagtaattggtggaaagctggaagtgggcac

SEQ ID NO: 130035 - DNA, 122 bp, Homo sapiens
ttttgagacggagtctcgctctgtcgcccaggctggagtgcagtggcgagatctcggccgcgatcttaatggagttattttggagtgataaagtgcaaacttacagagcagcggaatcaaca

SEQ ID NO: 130036 - DNA, 122 bp, Homo sapiens
ttgggggcctgggtcaaagagatttgtctgtcccttgctgcccatctttaagtaataaaccgacttcacataacttgttgtgtgttggtgtgttctgtctcattgaactcagacaaataggt

SEQ ID NO: 130037 - DNA, 122 bp, Homo sapiens
tgttaaacccagcaaaggttgtgaggactctttcgctcttgtaaggaaatgtctcaggcccgaggccactcttttttctcactctgtcatccaggctggagtgcagtagcacgatcacagct

SEQ ID NO: 130038 - DNA, 122 bp, Homo sapiens
acctggatcccaagcgatacgtactcagctcagtgctcccttggggttccaggaacccagcgccttccctcacctcatcctttttcctgccccgcctgtgctcagctgcggctcagtgggcc

SEQ ID NO: 130039 - DNA, 122 bp, Homo sapiens
cctcagcctcccaaagtgctaagccgccgcgcttggccacgatgattaggtttttatgcacgtgtgagagatacgcctcccttaaaccttgttgcgaccttggcgcattacctgtctgatat

SEQ ID NO: 130040 - DNA, 122 bp, Homo sapiens
aggcagcaaggctggcagatcagttctggtctcctgagaaatctgaggtaaaatacaacccgctcttatgaaaacagacacaaggtagagaagagggaagggaaaactgggatgtcaagtgt

SEQ ID NO: 130041 - DNA, 122 bp, Homo sapiens
taggattttatccgaggtaacgaccccaggatcacaattttgtagctgaccgaagcacggcgagaaaattcctccgcaagaaacgggttccggccacgagcctataaaaaacgggtggttgg

SEQ ID NO: 130042 - DNA, 122 bp, Homo sapiens
tggggcgtccagcttctaggtgatgggatctgtccagccccggagacaagcttgggtccccgcttgatgaatgctggaaccccgtctccccggacttttcagggagctggccaggggtcggg

SEQ ID NO: 130043 - DNA, 122 bp, Homo sapiens
ccacggttctaggggagctggggtggggtggggtggggtggggcggggcggggacagctgcgcttgcagggtggacgcggcctcctgggcgccccccagcccccagccccccgccccggctc

SEQ ID NO: 130044 - DNA, 122 bp, Homo sapiens
ttcttgccactttctcttttcccttgcctctaggcatcctcctttccaggggaccacaagcgctctccccctccctctttgagaaccatgacaaccaccgattccccctccccttcccctgt

SEQ ID NO: 130045 - DNA, 122 bp, Homo sapiens
aacaagggctccaaacctagtttcagagtctgacacacaggaactttcgtatacagcacccggttatacacagctttctccctcgtccgccggattcagtgtctgtcgttattgggttcata

SEQ ID NO: 130046 - DNA, 122 bp, Homo sapiens
ctctgctgctgctgctgcggtggcggaggttcgacctgctgtggccgccaagcccgggcgcgcaagaagaaactcagcaagtcagacatcatgctggtgcagagctccaatgtacccagtaa

SEQ ID NO: 130047 - DNA, 122 bp, Homo sapiens
agttctctacaggagaatcccaggagtggaagtggaaggcagtagaagacagggagggcacgcctctgggaacacgggaacatgggtgggcatgagatccttgaataagacagcctgaagtt

SEQ ID NO: 130048 - DNA, 122 bp, Homo sapiens
ctccaggcctcgaggtgactgcagcagcgctttgtgatgacctgccttctctccctccgccgtggttctccacacacactttcgcaaaggggaaattcttgggtccccacaggaatgccacc

SEQ ID NO: 130049 - DNA, 122 bp, Homo sapiens
ccggttttctcccgtagggccttcagccgttcctttcgccgcaacgcctcttcctctagccggcccacaccagccgtagttgcctccatcttgcccgcgtacgcccctccttttctcccgtc

SEQ ID NO: 130050 - DNA, 122 bp, Homo sapiens
tggtaaaggcgaggtgctgtggggatgcaggatatggaattagggaattcgggacggaaacgtagcgtttaggacaaaggggattcactggggacttccgcggcctttgcccagatgcgcct

SEQ ID NO: 130051 - DNA, 122 bp, Homo sapiens
gattaaagccgcgccacttcccctcctttcaggcatacccatcactcacaccccggggtgcgtccaggcccaggagactccagcctcccgcctagaacagctgcctccctcagaaagagccc

SEQ ID NO: 130052 - DNA, 122 bp, Homo sapiens
cgttccgatttgttccagtgccagggtccgttagaagatgacatatctattggctgaagacgtctgaaaggcagcaaacggagggggccgcccccggcgctcgcgcggttccttctgggaat

SEQ ID NO: 130053 - DNA, 122 bp, Homo sapiens
aaatgttcatctggacggggacaggatcgggaaccgccgggcagggggtctgcgcggcggcgtcctcccctccccgcccggctctcccgctccatccccgcggcctggccaagggcagcgcc

SEQ ID NO: 130054 - DNA, 122 bp, Homo sapiens
gcacagctgtcggacgggatccgctagctgcgcaggttctgggagcatcggggcagcaggcgcagggcggggactaagccagggaagtcccctcccacctccggtcctttgtgcccttctag

SEQ ID NO: 130055 - DNA, 122 bp, Homo sapiens
ggcatcggcctttaccatggtgggcaccgggacggtccaggtgtcctgagcgggaaaggtcggcttggtctccatacagccttgggtcccactcaacagagcctgagcatgaagtatgccct

SEQ ID NO: 130056 - DNA, 122 bp, Homo sapiens
gcttctgggttttccgcaactcacctgacactcccaacaccccgaccccgtcccggggctcgctgctgccacctactgcccaacccgaatgaaatttcagacgcatgatcaagcccagttta

SEQ ID NO: 130057 - DNA, 122 bp, Homo sapiens
tccccgcggcgaggctgcctggaggaggagcgagcggatgctgccctcgcccgccgccgccggtgctgatgcggttgctatggttatggaaccccgcaactgcccccctctccgtgcaacag

SEQ ID NO: 130058 - DNA, 122 bp, Homo sapiens
ttacacacattgattcataataccggcattttagagaaaggagtcttgggacagcggctccgtacaaatgcatttctgttgtctagggctattttcgtgttgtgcttttctgcagactttca

SEQ ID NO: 130059 - DNA, 122 bp, Homo sapiens
gctgggaccacaggtgcgcgccaccacacttgagcccaggaggttgaggctgcagtgatccgtgattgtgccatggcactacagcctgggtgacacagggagacctgtctacaaaaagaacc

SEQ ID NO: 130060 - DNA, 122 bp, Homo sapiens
gggcaagtgccagatcctgagagcgcatgagacgctttcccggagccgacgaaggggactcggagctgcagcctgcacgacccctgcagcctgtgctttgcccacccctttcaatagatgga

SEQ ID NO: 130061 - DNA, 122 bp, Homo sapiens
gaaaaggcaggcaggatcctcccctcgagctccggaggaagtgcggccctgcccactcctcgccttccggcttctggcctctagagctgtgagagcaatttcctgctctttaggcccctggt

SEQ ID NO: 130062 - DNA, 122 bp, Homo sapiens
cgccccccctcctcccccctcgccggtcccagagccgcagctgctgcgcccgcgcgctcccggggacattctaaccgccgccaggtcccgccgcctctcgccccgctattaataccggcggc

SEQ ID NO: 130063 - DNA, 122 bp, Homo sapiens
tttaggctcgagcctggcccacgggctctgtggcagcgctttcctctgaggtcccgacgccgcccgtgtccttccgctccaacccctgggctccctcagatgggccagctcttctacctggt

SEQ ID NO: 130064 - DNA, 122 bp, Homo sapiens
gtggggaaggaaggggccttgtgtaaggagccttggagccaggattgggcctgcccctggcgcctgggtcattagtcccctgcccggcaaccctgcgactcagaactgcctcccggagtgga

SEQ ID NO: 130065 - DNA, 122 bp, Homo sapiens
ttcaggtattaggtggaaggaagagttatccctccttttcctgtttagtttttcacaatgcgggtacctcagcccttctgaggtacccgcattatcacccaggtggtagtgctaccatatca

SEQ ID NO: 130066 - DNA, 122 bp, Homo sapiens
attcaaaatgaatgtactttctcctcctcctcacattctgtgaggccattaggcaccaggcgagcagtgcaggctctggaaacaacagaagtgtccctaaaccagtggacaattgaagacac

SEQ ID NO: 130067 - DNA, 122 bp, Homo sapiens
ggaggtcatgggggtggcagggtcgaggggctgagaggaccatcagtcagcctcacagggcgaagtcaccgtgagtggtgatggggaggaagccagtgagccaagggtcctctgtgaatcag

SEQ ID NO: 130068 - DNA, 122 bp, Homo sapiens
gccggctcagtctcttcttgtttttccaaacttcaaggtccaggcagccctctgcagggccgggccccattgctccccgcgcggcattggaggtggccgcccggagaggagaaggccaacgc

SEQ ID NO: 130069 - DNA, 122 bp, Homo sapiens
gtccttccccttccccagaacatggcctgggagtggctctcaggggaagtgggtcttgggcgccagccggtggggccgggccctcaggggtgggattcgcactgggacagttccagaaggca

SEQ ID NO: 130070 - DNA, 122 bp, Homo sapiens
tggtccctactcgtggtaggaagccaatgagggcagcccaggctgcagacgcgaattgaacggaagcgtgtgtgcagcggcgtgtgggtggtaagctctccctccactgcgctttcaggctg

SEQ ID NO: 130071 - DNA, 122 bp, Homo sapiens
gatgggagcccagttggggacgggttgagtttgagacgattttcgaccccagtggagagccgaagggagctggacacaaggcagttcagcacagaggctctggggccctgcagcatggagac

SEQ ID NO: 130072 - DNA, 122 bp, Homo sapiens
ggagatgagcaagacagctagcttttcacaagagcaggaaaggctgggtgctgcgactcacgcctgtaatcacacagcgttgggaggcagaggaggaaggactgcttaaggccaggagttcc

SEQ ID NO: 130073 - DNA, 122 bp, Homo sapiens
ttacatgaaaagtatgactcaagtgagggtctatctatgcaaagtagaactgagtgtttccgacatacgtatacattacatctattaccagctggtgctcacagggttttgcgggaagggga

SEQ ID NO: 130074 - DNA, 122 bp, Homo sapiens
ggactctttggagaaacagctttcaggttagaggcagaaagcatataaaatggacttgaccgagctctataaatcagaaaataaagaagctttcaaaggtactggggtgttgtttaaagtac

SEQ ID NO: 130075 - DNA, 122 bp, Homo sapiens
ctgcgtgggcccagcaaaaacctgagtcaggaggcggccaggcaaggtcagtggagggggcggggcccgaagcggaggcggagcttgggaaagcctggcgtgagggcggggcggggccagag

SEQ ID NO: 130076 - DNA, 122 bp, Homo sapiens
atcaagttcttgtgactcagtttgggacagaagccgagagtctccagcaataaaatttctcgcaaattcatgcaaaataggacacctttaagccactcactttatatacttgtgtagatttt

SEQ ID NO: 130077 - DNA, 122 bp, Homo sapiens
ctcccttgcccttaaaattccaactgatgccataggaagcgtagcctgtctcaagagtttcgcgaatgctagcgaacgggaaatgcacgaatttccagagccccttttatacaggatctatt

SEQ ID NO: 130078 - DNA, 122 bp, Homo sapiens
gaagacaggaacacagcaccgtttttagtaccaggagacagcgacagcttggcgtcagtgcgatgcgtgacatttccgtgtgtaaggtgtgctgctgcctggtggagtggcgcgcgagcacc

SEQ ID NO: 130079 - DNA, 122 bp, Homo sapiens
ttttgcttgctgggagatgtagtccctgggttggccactttagttcatcgttgctaccgccggcgtccagaagactacagttcccagcaggcccagggaaagacaggataccctgggtcggc

SEQ ID NO: 130080 - DNA, 122 bp, Homo sapiens
tgaaaagaatctgggtcaccgatctgcactgccttggctgttccaaggtgattttcttttcgtatgaatacaggtcctagggatgagtgttttaaatacccaaaaaacaacaacaaaaagca

SEQ ID NO: 130081 - DNA, 122 bp, Homo sapiens
gtcttttgctcctctcacccctgcggcagactgcttgtttctgaactgttggagagccctcgattctcacaagcccaagcactggtgtggtctgcaatcttggaacaacttgaggacagaga

SEQ ID NO: 130082 - DNA, 122 bp, Homo sapiens
gaggtgggatttacctcagtaggattggcctgttttagtcaagggtttaaagtatggagacggcagttatgctctctagtgtatccttcaggcaaaagaaagaccttaatttttatgaggaa

SEQ ID NO: 130083 - DNA, 122 bp, Homo sapiens
tattctcacttcctagcctttgctagttcagtctttctccctggaatgtcttcgtctgcacgtctctacccagctttcatctttctgtgcctagcctggcttctgactctgttatgacactt

SEQ ID NO: 130084 - DNA, 122 bp, Homo sapiens
acccccacccaggcagccccacggcccaggagatagctcacagctgccccctggcccgctcgagcagcacacatcagtggggtccaccagaaggcatcccgggcgttgatattccccccagc

SEQ ID NO: 130085 - DNA, 122 bp, Homo sapiens
ggactgagaggggaggggacagagagacattgtaggcagagccccgcccttgcccataaacgggaagtgctcctgcctgagaggaagctcagcatagaggaaggaaggacagcagagacaac

SEQ ID NO: 130086 - DNA, 122 bp, Homo sapiens
gaggacttgaggagggtcgatgcctttactgaccttctgctgaatgaaatacatagctaacgcgaattggtctttgcttaacttccccgtttgcctcgtatcggccagggccctgggagaaa

SEQ ID NO: 130087 - DNA, 122 bp, Homo sapiens
ctactagccggtgcaggtttcttctagcgcgtgtgctggggtacctggtcgtcatggaggcggtattgaccgaagagcttgatgaggaagagcagctgctgagaaggcatcgcaaagagaag

SEQ ID NO: 130088 - DNA, 122 bp, Homo sapiens
cgctcccgtgtgggcccgcaggagaagcggtgatggagagccgagctcgccccttccaagcgctgccccgtgagcagtctccaccacctcccctgcaaacgtccagtggtgcagaggtaatg

SEQ ID NO: 130089 - DNA, 122 bp, Homo sapiens
gtagggaccaaagaaggggcgggaggaagactgtcacgtggcgccggagttcacgtgactcgtacacatgacttccagtccccgggcgcctcctggagagcaaggacgcgggggagcagagg

SEQ ID NO: 130090 - DNA, 122 bp, Homo sapiens
cgaaagaccctggactccgcaaacgtctggccgcggctcttgagctcttctattaagtttcggtttctgaagcttacgtttagtttcgatttcttaagtttcagtttctgagcgctcggcat

SEQ ID NO: 130091 - DNA, 122 bp, Homo sapiens
cttgggatataacaggtgaatgcagaccctttaaatagtggatgtacactcagatatttccgaattacataaataacactcatagtagacacacattttggatacccaaaagaatatacaca

SEQ ID NO: 130092 - DNA, 122 bp, Homo sapiens
ggggagacgggtcccgggggcgcaggcgcgggccccagacacagcgagctccagagagagcgcagcgccgagcctggcagctctggctccagcaggaagacgcagcccacggccagcgccag

SEQ ID NO: 130093 - DNA, 122 bp, Homo sapiens
caaggaggacctgcgggacgggctgcccgtgctcatccccaaggaggatagcctgctgtacgcgggcagcgtcaggaccctgcagccacccgacatgtgaggcctgggcatggtggggcagg

SEQ ID NO: 130094 - DNA, 122 bp, Homo sapiens
cgcccgggcggccagagggtgcagggggagcgctagtgcctgctgggatggcccacgtaccgctttgccacctagccagaaaggcaaggtgccccctgtgtcctcagcatgaaccaaaccgg

SEQ ID NO: 130095 - DNA, 122 bp, Homo sapiens
acgactacttccctagctttccagcaccaaatccagcggccccacccggccacgcccccacgccaggccatgacccccatatggctcactgcgcaagctcacacccagtcccaggaagcgag

SEQ ID NO: 130096 - DNA, 122 bp, Homo sapiens
cttcgtttctcaacacatggactttcctcatctgccacgtattggccacagtcaagtagccggttcccttttctcgtgcataaagtggagttattcataattacttcacagaattaagattc

SEQ ID NO: 130097 - DNA, 122 bp, Homo sapiens
cagtcgcacccaggaggacctgcctgtccaacatcaaggaatgatcaagaactcccatcccggttccacgctgcgcgtccgccatccgaaccggcctcgcccctccaggccgggtcccgacg

SEQ ID NO: 130098 - DNA, 122 bp, Homo sapiens
gatctataacactctctccgagtgaagacacagaggtgatgagatcgggtaacccacgggcgcccgagccccagccgcgcaagctcacgattgggccagaagtgaggatgaacaagcattta

SEQ ID NO: 130099 - DNA, 122 bp, Homo sapiens
ttcttcgccttctcctcggctgtggagccctggtggggggtctgcgcccggtcaccatgacgacgccggcgaatgcccagaatgccagcaaaacgtgggaactgagtctgtatgagctgcac

SEQ ID NO: 130100 - DNA, 122 bp, Homo sapiens
ggacacttggcttgtcacctctacacctttaataagactcgggttagatgttactatgttcgttagatgcaactatgttcgttagatgatgttcaatttcaagacttacacaatctgaaggg

SEQ ID NO: 130101 - DNA, 122 bp, Homo sapiens
atggtgagtttgggggtggtgtctccagcctgaaggaggggcagggatttggcaaagttgcgcctgaccttggcttttcctgaggaaggaacctggagcaggatccttcctgaggaaggaac

SEQ ID NO: 130102 - DNA, 122 bp, Homo sapiens
aaggatatatttttgttctcttcctcagtgaacttgaaatgattggattattttgtaatacgtcgatactacttttagaagcttttgaataactgtgtcaaagaagctttagaagaggtttt

SEQ ID NO: 130103 - DNA, 122 bp, Homo sapiens
caggcaggatgcggaggtcaccccgagtcacagcggcgctggcagcctgggccatctccccgcagcgaacgtaccactgcggccgcagcagaggctctaccacgtccttcgaccggctgggg

SEQ ID NO: 130104 - DNA, 122 bp, Homo sapiens
ggcaggcctccaatagagcctgctaggcggattggctgctacgcggctgggccctgtttccggtacctaggcgggcagccatggtgaccggcgagcggcatgcgacgccgcctctgtggcct

SEQ ID NO: 130105 - DNA, 122 bp, Homo sapiens
accgggcgggacggcgagagcgtccctgtcgcctgcagctcctgctgggtgatgcggggacgcggctccctgggaaatcgtgttagcggctccagggctggtccacggcggccttgggagcg

SEQ ID NO: 130106 - DNA, 122 bp, Homo sapiens
atggtgttggcgccctgcgggctcctgctcaacctgaccggcaccctggcgcccggctggcggctggtgaagggcttcctgaaccagccagtggacgtggagttgtaccagggcctgtggga

SEQ ID NO: 130107 - DNA, 122 bp, Homo sapiens
cacccagaaagtctggctgttgtgtccattctcttaccctccagactatttcatctgttacgcaaacattgaaaccaactttcaacatcagtttcctataaaatttccctctcattattctt

SEQ ID NO: 130108 - DNA, 122 bp, Homo sapiens
ccgctcgccgggaattgcgcagggctggcggggcgggggaccgggagagcggcctgctcccggggcacgaagggggccggatcacagacccttaacccctgacctcatctcaggtgcctccc

SEQ ID NO: 130109 - DNA, 122 bp, Homo sapiens
tcggggaggcctctaaggctcctccggccagcaagcccacccctgcaccagtccccaccccgactggggcagccagtcctctagcagcagcggctgcccctgccacagaagcccctcaggcc

SEQ ID NO: 130110 - DNA, 122 bp, Homo sapiens
cccaccactactttcccttcagaattcagctcatgcaccactgcctccaggaagccttcccggagctcccaaagcaggttcccaaagcactgagaaaacctcttcagggcagtacagagggc

SEQ ID NO: 130111 - DNA, 122 bp, Homo sapiens
gaacagaaggagcagagtcccagagaagtgtgagcgagggcctgggtgccctcctggctccgccacctgagtttaagaaagtagggattttgagatcacctttgtgtgcctattgaaatctc

SEQ ID NO: 130112 - DNA, 122 bp, Homo sapiens
atggagctccaagcagggcaagctgccaggcagtgtcaccaccaggcccctcgactgggccgctgtggtgacatttacagaaaactctacatgcttagggtacagtcagaattaaacactct

SEQ ID NO: 130113 - DNA, 122 bp, Homo sapiens
tttttgttgttgtttttagtagagacgaggtctctctatgtagttccagctggtctctaacgcctgggctcaagcggtcctgcctcctcagcctcccaaagtgctgggattacaggcgtgag

SEQ ID NO: 130114 - DNA, 122 bp, Homo sapiens
ggagaccggcggggcagctagtttctggctgtggattctgattaatgggccgcaggcgcacggtctgcaccgtccggctcgttgctagtggctcgctcgggagccgccgcactcccggggct

SEQ ID NO: 130115 - DNA, 122 bp, Homo sapiens
ttaggctggtggtttctttcctttcctttcactgttcacaggtagcattccattgccccacgacttccataatttctgtggaaagtcactcatgtgtccagttttctttctcctttgaaagt

SEQ ID NO: 130116 - DNA, 122 bp, Homo sapiens
ttcctgcctgtggatttgtgcattctggacacttcgagtacgtggttcctacatcccgctcgtttgtgactggctctgtcactcagcgtcacatctttagggtccatctgtgccgtggcggg

SEQ ID NO: 130117 - DNA, 122 bp, Homo sapiens
ttgggaggctgcagcctttgttctcctgcgaggaggctgctgaaaggcctgcagttcttccgttgaattccggcccctcccagctctccactctggctggcacccagcaggctggaggagat

SEQ ID NO: 130118 - DNA, 122 bp, Homo sapiens
tggaagagacacctattacctaggctcctgggggaagtgacagcccgtggatctggcctacgcctctcgggcctctgtggcctcagagcgtctgggccacactgtctgggaagaggtaggtg

SEQ ID NO: 130119 - DNA, 122 bp, Homo sapiens
gcttttaaagcagtcaaacacatgaaaaccagacttttcttagagctctagaacttccttcgtggtactcaaggcttcctgggaattccttcgtcgttctcaaggctgtcctggagcttcct

SEQ ID NO: 130120 - DNA, 122 bp, Homo sapiens
gtcgtggagtcttagctctggatctcacagcatctgcaagtcagagggcaacagaggctgcgacagtcaccgggaactactagagcagaggatactaagcaatgaagatggaccctgagctc

SEQ ID NO: 130121 - DNA, 122 bp, Homo sapiens
gcgtcatgtaaaagccctcacccatgaggtgtattcacgcccagtgggtcctccaagcctcgcccttctggcctcttggagctcggtcccgcagtctcgatgcatcagcgccgtgtcctctg

SEQ ID NO: 130122 - DNA, 122 bp, Homo sapiens
ggacaggaccgaggtgtttgaagatttctttcttttcagaataccgggtccgcatgcaaccgcccccacccccaccccaggtcctagcttcattccctcccacccctccccaggactcttac

SEQ ID NO: 130123 - DNA, 122 bp, Homo sapiens
gagaaaagggggagaaggcgtctggtgaccccatctgagcagctctctcctgacgtttaacgcaccccaaagcaagcggggcgcacagcactggtgattggcaaggttcgaggcccctcagc

SEQ ID NO: 130124 - DNA, 122 bp, Homo sapiens
tcgggtcagaatacggggtgcgaaggcgcaggctgagggcaggcctgggatagtggagtacggatccacatcccatgagcccccggggctaccaagactggaagaaagcgcgggtagttgaa

SEQ ID NO: 130125 - DNA, 122 bp, Homo sapiens
gagttatcagcccatgtagtgaaggttacaggaaatacactcccagggaagtttgtatatcgctagaaaagtagaggctggggaagaaccctggggatgaccagcatttgaacagctggcag

SEQ ID NO: 130126 - DNA, 122 bp, Homo sapiens
ctgtgattccatccggagagaacacacgcaggggccccgacatgcaggaggaggcgcaggcgcaggacagacggacagaggacaccacggtctaagctaagctcgcggcccggggcgccatg

SEQ ID NO: 130127 - DNA, 122 bp, Homo sapiens
ctgacgtgggccgcgcctggctgctggcgggacagtgtgttatctgcctgcggacgcttccggccacttggcctgggcctctgcccttagcgctgtgttttcccggccaagccccccatccc

SEQ ID NO: 130128 - DNA, 122 bp, Homo sapiens
gctgatccacctgtgtcggcctcccaaagtgctggaattacaggcgagagccaccgtgcccggcctcaccctttgatttcttgataaggaaactaggtccaaagagattgtcactaattaga

SEQ ID NO: 130129 - DNA, 122 bp, Homo sapiens
taacactcaccatgaagatctgcggctccactcctgaagtcagcgggaccaggagcccaccgggaggaacgaacaactccagacgagccgccttaagagctgtaacactcacctcgaaggtc

SEQ ID NO: 130130 - DNA, 122 bp, Homo sapiens
ggatagggctcgaggcatcccgcggccgggtgagggtcctggaggacattgtcctcttcccgtctttgcagctgcccatggtcctgaaggtgcccaggctgaactcctcacctctggccctg

SEQ ID NO: 130131 - DNA, 122 bp, Homo sapiens
taagctcgcggcccggggcgccatgcgctgggaacggggtgcgcaggttctacgagaggacgccctgtctgctcagagctggctttgtaaggtgtgaaaacaggagtttttaaaagacacga

SEQ ID NO: 130132 - DNA, 122 bp, Homo sapiens
tgcccccccttgcagctgcacagggacgtactggaaggacccaggccggttctccatcctcggctgggctcaggcgccgccgggctccttttccgagggggctacgttgcctccgcccccag

SEQ ID NO: 130133 - DNA, 122 bp, Homo sapiens
tcttgaagagtgttaaattgactaactgaagcaaagtaaaaaattttaattaagaaaaaacgtggctgtcttcccacagctgcctcagtagtggcagccctaaatggtgtatttatttgcat

SEQ ID NO: 130134 - DNA, 122 bp, Homo sapiens
tgtggtcctgctgttctcctgcctccaccctagagctagagccacagggccccactccctcgctgagctgttggggagccaccgaggccataaacgtcctggttaatgcacacgtgtgtcag

SEQ ID NO: 130135 - DNA, 122 bp, Homo sapiens
ccagtgtcagaaacgactctggagtcagatggaactgggtttgaattctggttctgcaaccgcctagatgtgtgaactttggcaagttacctaacttttctgagtcttggttttctcatcta

SEQ ID NO: 130136 - DNA, 122 bp, Homo sapiens
gtatttatgtgcctataggcacactgttgtacagtagatctctcgaacttattcatcttgcgtaatgcagggtacctgaaactctaaccaaaggccctcactcactgcctactctccggctc

SEQ ID NO: 130137 - DNA, 122 bp, Homo sapiens
gctgtggccgtgtctagctgttcgggtgtgctgtggtcatcctccctgcgcacctacagccgcagaccgccggtggggggcgggggatgccgggctgccgcatcagcgcctgcggcccgggg

SEQ ID NO: 130138 - DNA, 122 bp, Homo sapiens
cagtggaaggggaagccgtgctcctgtggggagagccaccacccacccaggtgctccagacgttcccgccgtgcgtctgtggtggccacgtctcatcctcagtggctgcacgtctgttcctt

SEQ ID NO: 130139 - DNA, 122 bp, Homo sapiens
atggtcttggctggcagagtgctgagtggggcctgagtgaatgaggctaaaacgcttggccgaagccgtccatccccaatcctgagaacagagttgtctgtttctctttcgggggtcaggtc

SEQ ID NO: 130140 - DNA, 122 bp, Homo sapiens
ttacctcttgatttccctggtcccaggctgcaacttcagctcgctccgccatggggcgcacgtccgccagcctctgtgagctcagctaagtatgatgcctaggctagagagctacgtccggt

SEQ ID NO: 130141 - DNA, 122 bp, Homo sapiens
tgagacatgaacgctagaggcctcggtgcagtctggtgctcccaggaggtgagacgtgaacgctagaggcttcggtgcaggctggtgcttgcaggaagtgagacatgaatgctagaggcctc

SEQ ID NO: 130142 - DNA, 122 bp, Homo sapiens
ccggttggccggctgggcgcggagcagagccgacacggctggcgggggaggcggtggaggcggacaagcgaggacgtttctggagaggagaagggaggggaggggaggggatagggggaggg

SEQ ID NO: 130143 - DNA, 122 bp, Homo sapiens
tgaactcctgacctcaagtgatccgcccatctcggcctcccaaagtgctgggattatagacgtgagccactgcacccggcccagtttgttctatactcaaatgttatgtgagaaaacttggc

SEQ ID NO: 130144 - DNA, 122 bp, Homo sapiens
ggtagtgagcaggaagcctgggggctgagctgggctgcctggctttgacatgggcctgtgcggggctggctgtgtggccccgtgagggttactgaacctctctgtgcccagcctcctgtttg

SEQ ID NO: 130145 - DNA, 122 bp, Homo sapiens
ggagaccgcgcctggctcaggtgtgggaccccatccttcctgtcttcgcagaggagtcctcgcgtggtgagtatgcggtgaggacgttttttttttaaagatcacgttcattccccgtgctt

SEQ ID NO: 130146 - DNA, 122 bp, Homo sapiens
gaccaaccacaaattcagggcttcctactaccccctcagactagagtgagtcacaaaactcgggaaagtgctatattcacgattatacaaatgaacaaccagattgaagaggtacatgggga

SEQ ID NO: 130147 - DNA, 122 bp, Homo sapiens
agccacttgtgaccagggaagcccagcccacacctccacggccctggcgcagggcgggcgcgacttagttcacgacaacctagtttctgcccccagttccaacttggggtcagccagagaac

SEQ ID NO: 130148 - DNA, 122 bp, Homo sapiens
ctacacacgtaataatgttgcatgggacgtgcatgtgccgtcttttcacgcacacttgagcgcaggaaacactggcaagagctggataaattaggttgattgtatcagtagcagtatcctga

SEQ ID NO: 130149 - DNA, 122 bp, Homo sapiens
ggcgtggggtcatgaagcccccagcgctcgtctcactggcgggccagcctagtccctctgcggcagtgacagccagtggttttccccgggtgtatccctgggagatgaaaaagagcagggtt

SEQ ID NO: 130150 - DNA, 122 bp, Homo sapiens
ggtgcgggatataatctcctggtgtgccgtttgtgaagcccgttggaaaagcacattattcgggtgggagtgacccgattttccaggtgccgtctgccacccctttctttgactaggaaagg

SEQ ID NO: 130151 - DNA, 122 bp, Homo sapiens
cacggcataccgacgcacgcagtacgtgttctggggtttgatgatgctggcgatgacctccgtgagcctgtcctgggggatggtgtcgtacgcgcccgtcacatccacctgtgtgagtggag

SEQ ID NO: 130152 - DNA, 122 bp, Homo sapiens
cacgagttccccagcccgcaccagccgcgctatgacacagcgctggccggcttcgacggccgcctctacgccatcggcggcgaattccagaggacgcccatcagctccgtggagcgctacga

SEQ ID NO: 130153 - DNA, 122 bp, Homo sapiens
cgcgaagccgtcgtcggtcaccacggacgcctgggtgcagcagcgcacggctcgctccagcgcctcgctgctgttggccaggaacaggcccgccacgtccgtctggttgcctagggccggat

SEQ ID NO: 130154 - DNA, 122 bp, Homo sapiens
gccttacatccggggaagacgagccaggcctgtcttggtaaacatctgccttagagcgaacgctcggcgttctggagagaatgtgggacccgaggcggagggaagagacggctgacatcact

SEQ ID NO: 130155 - DNA, 122 bp, Homo sapiens
cagccctaagaggatccccgtgtaggaggcctctgtgagtgtgcatgtctgcccgacagacgccacaatcccaggagcaacattataaactgaaataacgtgaagttcttctttacttaaag

SEQ ID NO: 130156 - DNA, 122 bp, Homo sapiens
attattgatcaaaggaccaaataagcacacactcactcagatcaaagatgcagtgagggacggcttgagggctgtcaaaaatgctattgatgatggtaagatcctcactgtatttcaattct

SEQ ID NO: 130157 - DNA, 122 bp, Homo sapiens
atatgtagcccaagggggaggtgcatgaatatgcctggagtgcagctttgcctgcacttacggtttgggacacctagaactgaggagatccaactcttgtccagccctcaaaactgggttga

SEQ ID NO: 130158 - DNA, 122 bp, Homo sapiens
agaagacagaacatctacgattttttttcttttcaattctcttcctacaactaattcatccgaccttggaagtttggtcttactaaaaacaaaagttagctgttcttttacaacctcctctt

SEQ ID NO: 130159 - DNA, 122 bp, Homo sapiens
tgtagcaccattcccacggagtaacagccggctccattttcataaccccttggagtgaggcgtcacctccctgtcctctttcctctaagaactcagttgtgtgccagacctcaggaggtcgt

SEQ ID NO: 130160 - DNA, 122 bp, Homo sapiens
ggcggagggcgcattaacacttgctcgccaggttggtggaggcggggcggattctgctggcggccgcggggcggcgagagtgggggctctttaagcgcccaccaacgcgggggcccgagggg

SEQ ID NO: 130161 - DNA, 122 bp, Homo sapiens
acacaaaatgtaccatcttaactacgtttaagcgtacagctcagcggcattaagtgcatccgcgataccttgtggccatcaccacgtcgactgccagagctctttcatcttcccaaactgaa

SEQ ID NO: 130162 - DNA, 122 bp, Homo sapiens
tcctcggtgagggtcgttccaaatcgtggccgacagtagcgggctgcaccctccttagatcgcgtcgtggccagcctcagctgcagaaccccgccgggcgcccgggagccctgtcccgccgc

SEQ ID NO: 130163 - DNA, 122 bp, Homo sapiens
gtctcccattggggttctagccgagggttccagccaggactgcgtgatctgggggcagctcggagagctctcccgacccagtatcgggtctataaatggagataaagatcagcacctggagg

SEQ ID NO: 130164 - DNA, 122 bp, Homo sapiens
atcacagttacaaagtgacgtgggtaggattcaaacccagcaggctgcctctagagttcacgttctcacttaaccaaagattaaaatccgtcttggggggtttgacacctatctgtccctgc

SEQ ID NO: 130165 - DNA, 122 bp, Homo sapiens
tggctgcccatccaagcctcaggctctgcatctgtggatttggacagccaagccctacctcgcaggacaagcgtagcgagcagcgtcattgttgccaggctgggccgagggaagcaggaagg

SEQ ID NO: 130166 - DNA, 122 bp, Homo sapiens
tcagctgtgctcccactcacttcccgggattggagagcagccataggcctctcattggaacggaggaaataaagaggatatggatggggtggaggtgagagagggaaaaattaaacacgcag

SEQ ID NO: 130167 - DNA, 122 bp, Homo sapiens
ccagcagacccccccgccttgggtttccgccaggacctaaatgcagtgtctgagttgccgcgacagtgcccacagagccccagatgacacgcgttcattttacttcacatataaattagaga

SEQ ID NO: 130168 - DNA, 122 bp, Homo sapiens
ccattccacaggaaagatttccccagcagcaaacggaaccactgtctcctctcctcttaccgccttgcattatccagtgtcatttctttgcctttatgagatatcattccaagaacagagga

SEQ ID NO: 130169 - DNA, 122 bp, Homo sapiens
ggcctctttggcaagtggtttgtgcatcaggagaaactttccacctgcgagccgaaccggcgccgagtgcgtgtgtttctgcctttttttgttgtcgttgcctccacccctccccattcttc

SEQ ID NO: 130170 - DNA, 122 bp, Homo sapiens
agtagcaacacgtttccaacacgtttgttaagcgggaacggaagtgagcggaaaggaatgcgtttggtaaatcccactttaaggatttcgtaatcctcccagggattcccaccacccgcact

SEQ ID NO: 130171 - DNA, 122 bp, Homo sapiens
acgcgagcggtagacgccaagcatccgcccactgtcctctcgtgactcgggctactttgacgcaccgggatgcggctcacctgacattcggcaccaacccttgccaggaaggaaaaccaact

SEQ ID NO: 130172 - DNA, 122 bp, Homo sapiens
cacgctgtcttcgctgttctcccacccgcttgcccagctccgggtagcagaaaaccaagccgacctacacctcttacccaggctgtcgcagccaggccggcctttcgcggtaatagcggctc

SEQ ID NO: 130173 - DNA, 122 bp, Homo sapiens
gaatttgctttgtggggagctcttcagaaggaaggcgtccaggcttgagatcagtcagaccgcaggggccccttgctaagctgtgagacctggggtgagttagctgcttctgtgtgcctcat

SEQ ID NO: 130174 - DNA, 122 bp, Homo sapiens
agaataaagctgtaggaaagacaacgttaagactctctgcaaggcaagaccagccaacgacgaggcgaccccgtggcaggctgggcggcggaggccgcgcggggaggttttctcgagcgtcc

SEQ ID NO: 130175 - DNA, 122 bp, Homo sapiens
gcggctgccacggtggctgccactgcggcagtgtcctgctccatgccgtgggagcgggaacgagtagggggacaaggcaggggacgagggctcctgggcggcggcagtggctgcactggaaa

SEQ ID NO: 130176 - DNA, 122 bp, Homo sapiens
ttgctttcatgggtgtctcagaaccactgctaagtcaagcacaggctgagagtatatcttcgggcaaaaatggctggaaaaagatctgaaggaaaattaagaaatattaggctgggcacagt

SEQ ID NO: 130177 - DNA, 122 bp, Homo sapiens
gaggtggaagcaaaacccgagagatcgccgagcgagggggaggtgagtgattggcggaaacgggggaccgccgccacctagcagatcacccctgcctgcccgagcacagccacctcagcgtt

SEQ ID NO: 130178 - DNA, 122 bp, Homo sapiens
tggatcggatgccggccccagcctgggagacgtgcttcctctgcagcctgtgatcaggagcgaagtgtagagaccagaatcgttcagaggcagggctggtccctgttgatttatgactcagg

SEQ ID NO: 130179 - DNA, 122 bp, Homo sapiens
ttttcctaggtatagtcaaatagtacttatacataaattattctgttaagcagaaaaaggcgtattaattagtactgtgtgagaagtggaattgaaacacaaacttgcagatcttttgcttt

SEQ ID NO: 130180 - DNA, 122 bp, Homo sapiens
ccctagtatctgatttggaagactcaattaagggtttaaaagcctgcagaaggcgcgggccgccacgcctaactggttttcatatttttttggtggagacggggtttcgctgtgttggccgg

SEQ ID NO: 130181 - DNA, 122 bp, Homo sapiens
ggctggccagtgccagtcactgtcaggatgcaggagcctcttcttgtcggtacatgcctccgccctctgtaaggatggagaccggaagtagcatgagctggcaggggcggcactgcctagcc

SEQ ID NO: 130182 - DNA, 122 bp, Homo sapiens
ttgtgtttttgtttcccatttctgagcattctctctgaattacagccgtgaccgccgtatcgcagcgtgtttgcccagcccggtttgagttgtaagctggtgaaatagaagaatccttgtga

SEQ ID NO: 130183 - DNA, 122 bp, Homo sapiens
cagacaggcagcccgggccaggatggttagtggcccaggggagagctgcaaacctggggacgcaaggggctggtcggcaagtgcccccgggaacacccactccggcgaggcagaatataaca

SEQ ID NO: 130184 - DNA, 122 bp, Homo sapiens
aaacttcttggagctctggctttatctccttaactatgtgatcttgtttcacaaccctggcgttactgctattttcccacatcccagtcatgccttatgatgacaagctgcatttttaacat

SEQ ID NO: 130185 - DNA, 122 bp, Homo sapiens
ctcgggcacccggccgccagttcggatgcttccgatcctcggggagccggggcgctgcgccggagtcacttcagcccatgttgttcaggtgacacccggggaagagcagactccagtgtgca

SEQ ID NO: 130186 - DNA, 122 bp, Homo sapiens
atggatccccggcctcagtccctactctgctttgggatagtgtgagcttcattttgtacacgtgtgacttcgtccagttacaaacccaataaactctgtagagtggagttgctggcttagtg

SEQ ID NO: 130187 - DNA, 122 bp, Homo sapiens
ccagactgccgagcccccctctctgggccgacgccagcccggctgtggactggagaaaaccgcaaggccacctgcagaaagaaaagaaggccatcgcgcctacgcagctgagcacccatact

SEQ ID NO: 130188 - DNA, 122 bp, Homo sapiens
atacttctttttttttttcttctgagagagggtctcactctgtctccaaggctggagtaccggcatgatcatggcttatacagacttgacctctgggatcaagcaattctcccacctcagcc

SEQ ID NO: 130189 - DNA, 122 bp, Homo sapiens
actgttggccggaaattgccggtaggctgccgtggcctgaccctactacgtgcacaactccgcaggcattaggggaggggtcatctgctctaattaggtaacaggggcaagtgggattaaag

SEQ ID NO: 130190 - DNA, 122 bp, Homo sapiens
gataaacgcttccgtcggctgtgacaggttctgaggcgcccagatctactggacatagcgcggctcagaagcctcagagacctgtccgcacagttcctgaagttagcaacaaattagtgagt

SEQ ID NO: 130191 - DNA, 122 bp, Homo sapiens
cccgctccgccgggaaggtgccgaggatcccgtcgtccttggtaaaccccaggatggcctcgatgctgtgaagtcgcgaggtgctcccgcccgggctgcggagcaggtggccggcaagcgag

SEQ ID NO: 130192 - DNA, 122 bp, Homo sapiens
ggtgaggcctgtgggccatgactcctgtttgtgaagagattataatactgtcaagaggcacgttaggggaaatcacaaaagtaaacacatttcttctcccagcccctttctatttttgcctg

SEQ ID NO: 130193 - DNA, 122 bp, Homo sapiens
attcggatgtcacggctcctaaatcaccatttgatgggtgggacagtgtccagtccaccccgacccgccggtcctcaccgcggcagagccggggctgggtggcggggacgctgcctctgcag

SEQ ID NO: 130194 - DNA, 122 bp, Homo sapiens
aggaggcagctgacacccccgacacgcggcacccctgcagtctcggctcctccctcgtggcggactactccgactcggagagtgagtgagcgatccccatcctggagactggacccgctcta

SEQ ID NO: 130195 - DNA, 122 bp, Homo sapiens
gactgaccaaggctgggtatgtggagggaaagggcgggagagacacgtcgaggagggctccgcacccaggcccgcacgcacacccgccacccttacctggcacagcggcaccatcccgccta

SEQ ID NO: 130196 - DNA, 122 bp, Homo sapiens
tcattctgtaaccatatctttatctttcgtttgtgacacttccacttaacttgggccactcggttaactcttgagtcttagcatcgtttggaacccttatcgattttcttatttttctccac

SEQ ID NO: 130197 - DNA, 122 bp, Homo sapiens
aggaagcaggcagatgggaaatgtaactaagctaagatcgctgctgagggccccaggcagcgctatttccaaaagtaatacttcttaccactgggcccagaagaaagtctagaaagcggagg

SEQ ID NO: 130198 - DNA, 122 bp, Homo sapiens
accaagcccggggtcctcaggaaggacgtggaggagcgtgtgaggacacggtggcactagcgtgaccctggggatggcacactctactcaccatggctcctgggactccaccctggaaagga

SEQ ID NO: 130199 - DNA, 122 bp, Homo sapiens
tgctgtgaaaattcagtaattttatttcatacttggtaacatgttagccatttgcgctgtcgatcactgttaattatgaggtcgggtttagctgaaggcattatgactccatggcaacagat

SEQ ID NO: 130200 - DNA, 122 bp, Homo sapiens
tcccttgggagatcaatcccctgtcctcctgctctttgctccgtgagaaacatccacctacgacctcaggtcctcagaccgaccggcccaagaaacatctcaccaatttcgaatccggtaag

SEQ ID NO: 130201 - DNA, 122 bp, Homo sapiens
cttcgccgcggccgctcggccatttctcggtggggggactcctcaagctgccagaagatgcgctcgtcaaagccgagagccccgagaagcccgagaggaccccgtggatgcagagcccccgc

SEQ ID NO: 130202 - DNA, 122 bp, Homo sapiens
acgactcccaccggagccccggcagcaagagccccgcaggcttcccagcgccctgggctgcggcttccacgctggaccggcactggcctaacgacacgagagtggtgcccccacaattacag

SEQ ID NO: 130203 - DNA, 122 bp, Homo sapiens
atgtgggaatggcactggggtcatccttgattctgttgtaccccacaccccactgcaggccggcaatagatgcacctgaaggcacagacaacagacctgcttagaaagtgatgggcaagcac

SEQ ID NO: 130204 - DNA, 122 bp, Homo sapiens
ttttgcaatcaccactgacttggagctccacagaaaaaccagaagttccaaaatagcaatcggaagagaacttggtttcagtcccttttccattaatgcctattttccacaaccacataacc

SEQ ID NO: 130205 - DNA, 122 bp, Homo sapiens
ggtacatcggcatggcgcaaccaaagcaagagagggtggcgcgtgccagacaccaacggtcggaaaccgccagacaccaacggtcggaaaccgccaagacaccaacgctcggaaaccgccag

SEQ ID NO: 130206 - DNA, 122 bp, Homo sapiens
aatttggctgtggtatttcatgtatcatccctgcaaatcacaggtaccatggccggcaggcggattactcaacaggcttatgacactcctcggtgactaatagattctttttctgtttgtgt

SEQ ID NO: 130207 - DNA, 122 bp, Homo sapiens
ggtggacttcatccacaccaagctacaggatgaagaggctcagaagggaaatttcttaatcgtgtatagtactctaaccacatcctgcccagaaaggatgggctgagctgtaggtcactgtc

SEQ ID NO: 130208 - DNA, 122 bp, Homo sapiens
ggtggccctgtctctacagaccggcaaactgaagagctactacacggacctggaggccttcgccatggtgacagccggcctgtgccatgacatcgaccaccgcggcaccaacaacctgtacc

SEQ ID NO: 130209 - DNA, 122 bp, Homo sapiens
cgttgccctacagtggagccctgccctggagctctgctccgtcgccctaaagtgtagccccgcctccttgatggggttgagtccaatcccctggttctgggatagaccccgcccactcattc

SEQ ID NO: 130210 - DNA, 122 bp, Homo sapiens
cggtttcctgtaacccgtgtgtgtcccgtgtatgtaatgtgacccggtttcctgtaaacccgtgtgtgtcccgtgtctgtaatgtgtcgcggtttcctgtaacccgtgtgtgtcccgtgtct

SEQ ID NO: 130211 - DNA, 122 bp, Homo sapiens
atccaaaccaaaacacccgacgccacagcgcgcgcccctcctccgggtccccgcccggcgcgtccagccccgccagcctctatgggcatgcaacccagccgcgtgcctccctccggctgcaa

SEQ ID NO: 130212 - DNA, 122 bp, Homo sapiens
gggaggacaggctatgtctcttgttccttggtgggtctccggtgcttggcccagccaccccggaacatgcttgagacacagatgagtgggggaatgaatgatgctcccacggtgcacaccgc

SEQ ID NO: 130213 - DNA, 122 bp, Homo sapiens
ggcctaaagaagaatagaaagagcccttgtggtatcagtggctcctcagggaggcaggtgcgcgcgcagccagtctagggtttgcgtgaggcggggaaagaggtgcgatttcttctcacccg

SEQ ID NO: 130214 - DNA, 122 bp, Homo sapiens
gaaggctcctccaggcagggcttgggtgaggcaggcgaggtgccagtggttccctgggcacggggcagaatcggaggaggacatcctctttctgaggttaaggaggtaggggctggaggcct

SEQ ID NO: 130215 - DNA, 122 bp, Homo sapiens
aagcttgcatccctcctcctcctcacggccgaggcacgtgccaaaccgggcatgggcccgcggtgagtctctgctccgtgttcctagccaccattctccagggaggggtggaagcagagtgg

SEQ ID NO: 130216 - DNA, 122 bp, Homo sapiens
gagtatgaactgcaatgttaaatcagcttaacaataacccatgttgggcacagtggcttacgcctataatcccagcactttgggaggccgaggtgggtggatcgcctaaggtcaggagttcc

SEQ ID NO: 130217 - DNA, 122 bp, Homo sapiens
ttattcctttcccaggaggcaactgctttggatccttttagctaaccagcggtgcagcgacggattctgtgttggtgcagtccttcttgctgtctcatggttgagcacccttcccactgggg

SEQ ID NO: 130218 - DNA, 122 bp, Homo sapiens
gcttcggctttcgagtgtttctagtcaggagctccactctcttcccaattaccatgagcccgttccaaggtccccaggttttctctcgcagcatcggcacccccttgcagccccgctccagt

SEQ ID NO: 130219 - DNA, 122 bp, Homo sapiens
cccccaggcagttgttgctgaggtccagctcacgcaggctgtggttggccaacagggttgcggcgaggctgctgcagctgctgtcactcacatcgcagtcggccaacctgggtgaagcaggg

SEQ ID NO: 130220 - DNA, 122 bp, Homo sapiens
ttgtccttggccaggcctccctatggaacctaggtctggagagcaggttgcggctctctgcgacccttctggggtgcgcagtggttgagtaagccggacgcacaagtctgagctggcgctgg

SEQ ID NO: 130221 - DNA, 122 bp, Homo sapiens
agccgggcaccaggcggccccggccccggcgtcggcgtctcacctttccgatgctcgccccggggccgtcccacatggatttttacaacctctcgtcgccttggccccgggcggccaggagg

SEQ ID NO: 130222 - DNA, 122 bp, Homo sapiens
gaggcatttctggttgacaaaatgtacaaaaaatgtgttaaaaagtaagtgccactgaaacggttgcaatgatagctactgtttaactccaataaggagaaggtttcatgatgcagagtcaa

SEQ ID NO: 130223 - DNA, 122 bp, Homo sapiens
gaaaggaaagacagaggccagaaaggacaaagatgcgcgggacgaagaaaagacagaggccggaaaggacagaaacacacggaatgaagaaaagacagaggcccggcatctgtggcacaacg

SEQ ID NO: 130224 - DNA, 122 bp, Homo sapiens
tgtgttatattctagtgtttataaaaatgccagggtctcacaacagtgatcagtgaatatcgctcttcactgttttgtctatgataaatttttagcatgagagtctaggtcagtcataagag

SEQ ID NO: 130225 - DNA, 122 bp, Homo sapiens
agatgctcagaaatcgtcccgccagatcacccatgatccttccacatataattcggccaccggaagaaattacagaggaaggtttggagaacatctgcagcaactctcaagagaagatatat

SEQ ID NO: 130226 - DNA, 122 bp, Homo sapiens
tacaaaccagacaattgtgaccctggttattcaccaggaatggagagcgatctatttacacgagacaaatggagagccaggtacgctgaaaagaactgtggcggaaataagcatgtcaaagg

SEQ ID NO: 130227 - DNA, 122 bp, Homo sapiens
gcagggtcccaagagcagcccagcaggacaaagcagaggggcaaaaccggaccattgtgccggatctagggaatgttgctggtgactgctagcttgtctgtccttagaggaaaaccaccaga

SEQ ID NO: 130228 - DNA, 122 bp, Homo sapiens
aggcgcgatgcgtggtcctgccacggagatcttggcgggtgccctcaggtgaggagattgcgaagtttggcaaaaccgggttccgggcaccggaatttctagacgcttccagatgcccgtgg

SEQ ID NO: 130229 - DNA, 122 bp, Homo sapiens
gttggaggtcagttattgatggctcccgtaggaccagtgcccccagtgtctgggtgtgtccgaatgtaaactgctatcagcctggcctataaaggcagtttacctgcttgtaaaggcaaatt

SEQ ID NO: 130230 - DNA, 122 bp, Homo sapiens
ctgcctctcccgcccaccagctctcctccagtccccggcttggtggggccgcccagggcccgttgcccgaggccagcaagggagacctgccctccgattccggcttctcagatcctgagagt

SEQ ID NO: 130231 - DNA, 122 bp, Homo sapiens
ttgcacctctgggccacatcctgggcagccaacatagcagcatatggtgaggattcatctcggtctgcctttaccttcatcccaccagtcacacggcagatggtttccctggggacaaaagc

SEQ ID NO: 130232 - DNA, 122 bp, Homo sapiens
tcttcacgaagtctttcttttcaagcttactctgtcatgattttggtgtctggtcatgcccggaaatggaatagaaagacctaggattctcccttcaccctaagggaaatccttgcttcgct

SEQ ID NO: 130233 - DNA, 122 bp, Homo sapiens
ccccagctaagaggtcgagaagcagccattttgcttgtagtccggaaggactgcaaatcccggcatccctcgcggcagcggccctctacacacaacaaatcccggcatgcccccgagcggcc

SEQ ID NO: 130234 - DNA, 122 bp, Homo sapiens
gggggaaaaggtgccgaccggcttcgaagggaggcgacggccgagacacacggtccggcgcgagccaggcgccccgcgacgtgcaattttattttgcaaaaggtgcacccaacgccagtccc

SEQ ID NO: 130235 - DNA, 122 bp, Homo sapiens
ggaggcagggcgggcaggggcggccccagatgtggcaaacttggcgcagcagcgcacgggcggacagggcggaaggcccgcgtcgggctgggagatgcgccctgccctggcccgaggacgaa

SEQ ID NO: 130236 - DNA, 122 bp, Homo sapiens
cttccttccttctatccatccatccatctttcttgtctttctgacagagtttcgctctgtcgcccaggctggagtgaagtggcatgatctcggctcaccacaacctctgccccgctcccccc

SEQ ID NO: 130237 - DNA, 122 bp, Homo sapiens
tgggaatgcgaaagaaaaaggacccctctcctgttccctttaaaataattctttgaggcgcggcgtgtctcagccgcctccctctgcccgcgcacctcttccctcgtgacagccagaagggc

SEQ ID NO: 130238 - DNA, 122 bp, Homo sapiens
ggtgatctgcccgccttggcttcccaaagtgctgggattacaggcatgagctactgtgcccggccaagttttaagttttaaaagtgagactgtccctggctgtgtgaacctatagaaagctg

SEQ ID NO: 130239 - DNA, 122 bp, Homo sapiens
agggagcgtggggggcccgggtgtctctcgatggtgacctcgctggccctgcagagtgtccgagttcctcatgggtgaagtggacagcagcaccctcctagcagtgcctcctggggactcga

SEQ ID NO: 130240 - DNA, 122 bp, Homo sapiens
gggagacgtgagttctctttcattctgcgcctctcattggctctctgaccttgtgcggaacgcgtcctttagctgacctcagctgcattttttagaagatggagattgtattcacagtgact

SEQ ID NO: 130241 - DNA, 122 bp, Homo sapiens
ttccacccagtccatgctgcctggaacttccctgacagagaatcattctgggatcattctcgagaacttggcaaatatctcaacactctgacatcacattctcttctacagtcaggatcctc

SEQ ID NO: 130242 - DNA, 122 bp, Homo sapiens
cataggggcggtggttagggaagtggtagtgcggtgaagcaccactgaaggtgagcgtggcgaagtcaggagccctctttagagccaaaataaggtttttctctcgaagtagtgagattgca

SEQ ID NO: 130243 - DNA, 122 bp, Homo sapiens
atcccgggacactgcccctccagcccgggtcgagggatgcccgggtgcgggccgagagagcgcccaacgaccgccggctccctccctgggcgcccttttcaggtactgcgcctggaccacac

SEQ ID NO: 130244 - DNA, 122 bp, Homo sapiens
cccacccgacctcgccctcctccctggccggccttcccacccggaggggctcctcagccacgcactgcgtccagcaaaaccactaagtcagggaggccagggcgggcagcccattcatcgtc

SEQ ID NO: 130245 - DNA, 122 bp, Homo sapiens
ccgccacagccctgggcctggcacccccagtcgcccgcggcctccttgtggtggcaccggcgtccccgctggagctgctggaggccacgcccaagcgtggcagctgctcctggcctgggaac

SEQ ID NO: 130246 - DNA, 122 bp, Homo sapiens
ttcaggtagttttgtgtcttgagtcttcgatcatttgcttaaatgatcatttgccgggtgcggtggttcatgcctgtaatcctagcactttgggaggctgaggcgggcagatcacctgaggt

SEQ ID NO: 130247 - DNA, 122 bp, Homo sapiens
tggagtctcggctgtagcccccgttggggcctggttccgctgcagaagggatatgtgtggcgtctaagtcagcggcagggcgctcggctggctgccaccagggcccgctccccctccagtat

SEQ ID NO: 130248 - DNA, 122 bp, Homo sapiens
ccggaggggcaagttcagtcccggggctggcggttggcgggaccggctttagaggtgatgcgaccaccctggaccacgtgcagcggggagaaactgggcaccgtggggtggagggagccccc

SEQ ID NO: 130249 - DNA, 122 bp, Homo sapiens
gcacctgaccgagcaccagcgcacgcacaccggggagaagccgtacgcctgcaaggagtgcggcaaggccttcaacaagagctcctcgctcaccctgcaccagaggaaccacaccggcgaga

SEQ ID NO: 130250 - DNA, 122 bp, Homo sapiens
gcggtgcctcccccaccctcgctctaacaccacagtgtggtttggacgtggccacagtgccgtacaaaccacagtgtgctgctggggcgggagcaggaccggggtgggttgaaaggaagaga

SEQ ID NO: 130251 - DNA, 122 bp, Homo sapiens
gcggagatagctgggaccgaggcgcgtgcgtcgcgacacggaccccagaggcccccaccccgaaatggtcccgaggagagggattgcccagactgcactctacacacgatccctcttttcta

SEQ ID NO: 130252 - DNA, 122 bp, Homo sapiens
ctgggaacgtgcgagtcataactttccaggagaggggcccagggcgctggtcctgcagggcgtggaaccctctgctcttcctgagcaggctttgtccccgggtcgacacggggagctcagcg

SEQ ID NO: 130253 - DNA, 122 bp, Homo sapiens
ctgtacccaggcagaggacatgaagaaattgccctgtgacaggagccagggaaaccacagcggagggctggaggctggggtgctggttttgctggctcggcctggttcccagaatgcaaagc

SEQ ID NO: 130254 - DNA, 122 bp, Homo sapiens
acccccagcgcggtcgtctgtaccctcccccgggagagcaagccgggcggcctgccccgccggagcagcatcatcaaggtaggtgggagaagggcgctcatcgcccaccctcagccgtcctt

SEQ ID NO: 130255 - DNA, 122 bp, Homo sapiens
cctttccgagtcaaagaaaggggtgacagacagcacctgtaaaatcgggtcactcccacccgaatactgcgcttttccgacgggcttaaaaaatggcgcaccatgggattatatcctgcacc

SEQ ID NO: 130256 - DNA, 122 bp, Homo sapiens
ctttatctataaaaccgggtcactctgcagcttccactctgagagttactcaaagctcggcgtccgtgatggcctatggggcttccgaggcgatcgggcagcatcagtcttcagccgctaag

SEQ ID NO: 130257 - DNA, 122 bp, Homo sapiens
ggtccacgggcccccattccctgcctattccattagccattggaaatctccagtcagccacggctgcaaatgggtgtcctggggctggcaattgactgataagtcccagagccctcattcca

SEQ ID NO: 130258 - DNA, 122 bp, Homo sapiens
gacgggctggagcggtggacacgtggtctgggtcccgcgggttcccgggggcgactggaccgtccccccagccccactcctgctgcagcagctgcaaggtctgcagagccaccatttggtgg

SEQ ID NO: 130259 - DNA, 122 bp, Homo sapiens
gggccttcctgggagcgcacctcgctgcctgtagctagaagatcagaaaaggaacaaccgcgagtgctttgcagtctcgcttttttgggggtcttctcaaatagccaccttcattcgctctt

SEQ ID NO: 130260 - DNA, 122 bp, Homo sapiens
ttcctaaggcctgcctgactccggcgagacttcccgggagatccggaccgaccgcggaaccgagctccaagaatgcctgcgaggaggctgtgggtcctaccctatcgccgcttacgcagtcc

SEQ ID NO: 130261 - DNA, 122 bp, Homo sapiens
tttttttttctgtcccggtccgctcaaagtttatcggtctttcccggcggtcggggccgccgggctttgtagttcgccagtccgagctaccccaccaagaccgcgagcccgaggagtcgctg

SEQ ID NO: 130262 - DNA, 122 bp, Homo sapiens
tccagtgagaggacaagctgaggctacatgtttagcacaaatgcttttaattgttaccaacgatgatttattcatatttatgcaatgccacacacactggggacttttccatgtgaggacac

SEQ ID NO: 130263 - DNA, 122 bp, Homo sapiens
ctccacagaagccacagccaagccctggggcccagtcatcctgcagcagtgaccactccccggcagggagtgcagccaatacagacagtggtgtggaaatgactggcaatgcagggggcagc

SEQ ID NO: 130264 - DNA, 122 bp, Homo sapiens
agaatactcatccccaaccactctagtttaactgctaaagtcagtgttgcaaggatcccgcgctctccaatgcagtgaatttctgagaccagtttggcaattttgcttggcagcctataact

SEQ ID NO: 130265 - DNA, 122 bp, Homo sapiens
agagtttaaacctggtattgaaactgagctgaatgacgctgcatatgtactttataccaccgtttgtaacgtgggtgccacagcccgggctgtgggtcgtccagtctttttttgggacggat

SEQ ID NO: 130266 - DNA, 122 bp, Homo sapiens
ttcagaattgctggttgatgttaggcccctcctatctgtgctctctcagctacagtttcccgtttgagcatattcattcttttttatttttgctctgaacaaaaatattagagttacaatat

SEQ ID NO: 130267 - DNA, 122 bp, Homo sapiens
tccggtctgggacggagctgtagcggcactgtaactgcgagggcagcgccgcgtgtgtaacggcgggggcgtgtcggcgggaaggacaatcgggccgggactcgcggtgtccgggtgaccgc

SEQ ID NO: 130268 - DNA, 122 bp, Homo sapiens
ttttaaaaacttcctctggcatgcagcaattgataagaacttgcaaagctgagaaggcaccgatttaaaactcgcgccaacgcggctgcgcgccttgtcctccgcccaggaaccctggaggc

SEQ ID NO: 130269 - DNA, 122 bp, Homo sapiens
attgctaagatgcgcatggtggccctcaaggccggctggcagcagcgcaagcgctcggagcgcaagatcaccttaatggtgatgatggtggtgatggtgtttgtcatctgctggatgccttt

SEQ ID NO: 130270 - DNA, 122 bp, Homo sapiens
gtcatttcccagggggatgcggccccccagtgccaaccttccaaagttcaggtgagttcacgacgctcggatcctagtggggtcctcctcggtgtcaaggagcaagagaggccgtagcagct

SEQ ID NO: 130271 - DNA, 122 bp, Homo sapiens
gcgactggggtgggataggtcgggtccggtgtgaactggctgcctagggtcggttccctgcgctttctagaatttgtgggggaaaagcaagaatgaccgtccctctgcctcgtgctcttttc

SEQ ID NO: 130272 - DNA, 122 bp, Homo sapiens
gacgagaatcgtgcttttttccactgtgccaatacccagtgggggattccctggtgtgagcgcctggggataacgggggtgtcttctagtctgcatttacagtgaggaactcggctacgcca

SEQ ID NO: 130273 - DNA, 122 bp, Homo sapiens
gttacctgggctcttgtgaaacagagagaccaaacgctgggagctgttgccccgcgcattcgatgggtgtaaggcaccccagtgtaaaccacaaggcctaagatcaggctggggtgccctgg

SEQ ID NO: 130274 - DNA, 122 bp, Homo sapiens
aggccctggagctcccacccagtgtcgacagccctccccacggtccaggggcaccctcgccgcctgcagccagctcctcgctagggcagacggcgatcgccagcttctccaacagaggagcc

SEQ ID NO: 130275 - DNA, 122 bp, Homo sapiens
tctgttgtggtataaatgtgctgttttctttcctcttctccctgactttagggaactgctcgcagaaagaagaaggtggttcatagaacagccacagcagatgacaaaaaacttcagttctc

SEQ ID NO: 130276 - DNA, 122 bp, Homo sapiens
cttcacgtgcacagacatacacacatgtgcacacaccctcatgcatgggtgtcctagttgcgtagagggtcagcccagcgaaaagcaacaaccccaagactgtgaaagactaacatccattc

SEQ ID NO: 130277 - DNA, 122 bp, Homo sapiens
tgatgttactaaactcagtgtggtttcaaatgacttgagtatttctaaaaatctgctctccgaggaggaagatttgctatcactgatgatgtcatttaaaagaatgtgactcagactcttgt

SEQ ID NO: 130278 - DNA, 122 bp, Homo sapiens
cctctgttcataggagggaaataattgaaaacacctgaaccttacataccacttgtttcacgtgttcctattacaaatctttgaggaaaagaggttgggagggaagtctgttaggggtgaga

SEQ ID NO: 130279 - DNA, 122 bp, Homo sapiens
aggcctccacgtgctgctcttcgggctggcggccagcgcgcaccgggacctcggcgccagcgtcatggtggccaagggctgcggccagtgcctcaacttcgactgcagcttcatcgcggtag

SEQ ID NO: 130280 - DNA, 122 bp, Homo sapiens
aaacaggctgcgtaaccagtgcgcacgcgccgggctgggccatcctcctgggcgtccgcacgtggcttagcgtttaccaacaatctggctccgcccagtcccacctcctaactctggcaacg

SEQ ID NO: 130281 - DNA, 122 bp, Homo sapiens
gacacaggggacgaaggagtccgggattagctcctgcactgattgtacacactgggccatcgccgcagcacaggcagcggcggcgcccgccctccggcccaccctgcgaggttatcctgcgg

SEQ ID NO: 130282 - DNA, 122 bp, Homo sapiens
tctgacttgcttgtcagcctgcgaggttccgaagggaacttcaaagtttccccgggcagacgcaggtctggtagacgtcttggaggccagggaggtgccagtagctggaggagcgccgggag

SEQ ID NO: 130283 - DNA, 122 bp, Homo sapiens
aggctatggctgcccgcccccatcgcaggggcgcagtcaatggggccagtttcaaaatggcgccaaggcgaagtggcctcagtcgcgggggtgcggggaccacaacacgggctgctgctcta

SEQ ID NO: 130284 - DNA, 122 bp, Homo sapiens
cgccgccgatccgggcggggtgaggggggcgctgtaattgcagcgcagctcgggttcccacgctcctattgttggcgactttgtttccaattcccatcacgtgtgctaattagttagcgctg

SEQ ID NO: 130285 - DNA, 122 bp, Homo sapiens
ttaaggtggggccaactctgtagtgcaatttctcatccagagccccctcctgatccctgccgtgagaccaggatggaggtggcacccagctgagatcacatcctcacttagttctgtctggt

SEQ ID NO: 130286 - DNA, 122 bp, Homo sapiens
ggataaactgagcctttgtgctcaaggctcagattacagggcacctcctttctgatgtgacgagcatatttttaacccccttaggagaacaatttgcccctcttctatgcctccatcatttt

SEQ ID NO: 130287 - DNA, 122 bp, Homo sapiens
ggagggcgaggggaggcggccggcggtgcgggagccggagggggaagggctggctgcgcgcgtccctgactccccagctgcgtcccggtcccggcctgcggctgcgtgtccggcggcggagg

SEQ ID NO: 130288 - DNA, 122 bp, Homo sapiens
agtcgtccgcgcgcggctttttcttcaggacagcggaggcacaccgtgctttgcggttcccggaagtccttcaggcctcagacctgtcagcccgccacactccagccagtcccttccgatca

SEQ ID NO: 130289 - DNA, 122 bp, Homo sapiens
atagctgagaggctataaagaaagaacccaaaggatcatttgctcatttactcactcattcgtgcattcagtaaacatttaccaagggtctaccacgtgccaggtattgtacaaggcagaca

SEQ ID NO: 130290 - DNA, 122 bp, Homo sapiens
ttcaaggtcctctcagccgggcctctcacccaccccgctggccgcagccggaggctgccacgcggacaccgtctcaagcctctgagcattgctctgagcctctgcctgcaatgtccttcctc

SEQ ID NO: 130291 - DNA, 122 bp, Homo sapiens
cgtgcccatgctcgtgtctcctgtgtgtcggtgccatgtgcacacgggggcccagttcctcgtgcacacatgtgcagccatccttgtgcaagtgtgtcctgtcttatcttgcctctgcctgt

SEQ ID NO: 130292 - DNA, 122 bp, Homo sapiens
gccttgggatccttgagctggtctcttgtgggccctttttatacctggccccttctctctcgctgcttctcctcacctgtttctctgcatgtttaggcctggggccactgacgggcttgtgc

SEQ ID NO: 130293 - DNA, 122 bp, Homo sapiens
agactcaaacttaactgaaagttgttttctgtcactgtgccgcttagggaattctcagtgcggtgataaatattcatggacttcccaagtgttgtgtgtgcctggaggccagtttttcactt

SEQ ID NO: 130294 - DNA, 122 bp, Homo sapiens
ctttctaaatctccagcgagctcacacttgcctgatggaatctaaccgtcatgccctccccgtcttggcaccccaacaacttttgcaatattatcatgacctggcaagaatgtgctgtttgc

SEQ ID NO: 130295 - DNA, 122 bp, Homo sapiens
gaagcattgtatttcagtcaacaaacgaaattggtttcatttttattttttgtaagttttcgccaaactctatgcatatatagaggctgggcaagaaagaaatccagaaatatggcatatgc

SEQ ID NO: 130296 - DNA, 122 bp, Homo sapiens
cttcccccaggcgtctccctcgtcggactcctcgtccctcccttaaaattgccggtgagtcgtcttccttgctggaaaagaattagggttatgatgattttgagggcaaatcagtgactttg

SEQ ID NO: 130297 - DNA, 122 bp, Homo sapiens
ctgcccgctccgactaccgcggagagcaccggggagagccttttggggagccccggaacccgcggtcgccaccgcggcggcggccccaggctggaggcgtccgggcgcctctttcctccagc

SEQ ID NO: 130298 - DNA, 122 bp, Homo sapiens
ccccgcgctccgagcgccgcccacccaccggagtagccaggcatcccagtgctcggggttcgggactctggaccagaaatgtgggcagcagctgggtacctgcgacttctgccccgtacctg

SEQ ID NO: 130299 - DNA, 122 bp, Homo sapiens
acacgattgttaaagtacacaaatacagtggcgatacaaacgcacagctcggagactggccgtcagtgcacagctgacacgacgtcctacctacgtctcctgcacggggcgacggggactag

SEQ ID NO: 130300 - DNA, 122 bp, Homo sapiens
gcttactgcaacctctgcctcccgggttcaagcaattttcctgagtaagcaattttcctccggagtagctgggattacaggcacctgccaccatgcctggctaatttttgtatttttagtag

SEQ ID NO: 130301 - DNA, 122 bp, Homo sapiens
tttaatttcgatttattcacgaaggactaaaggacactgcaagggcggggagggagtgtgcgcctgcgctctgcgcctcctagagggcagtcaagggcttctggctgacccgagcggagatc

SEQ ID NO: 130302 - DNA, 122 bp, Homo sapiens
cagggaagccttcacagatcagtcaataaatacggtgccatgggagtgccttgcacaccacgggcactcacatcttgaatgctggtccactggaggcccttgggttgggcgggagcaaggcc

SEQ ID NO: 130303 - DNA, 122 bp, Homo sapiens
gtgggtggaccgatgggccacactgcttatgactcccggcactgggtcgggatgatgaaccgcctgctccacagaaccccctactgtgaccggggtcacagctgagtgtgttcaagctgaaa

SEQ ID NO: 130304 - DNA, 122 bp, Homo sapiens
atggtcagtgaagtaaacgaacacatacatgatcctggggaccgctcttcaggactttcccggttcctatgcccttcactgcttctgcatcgcctgtcaacacagcaaggaaattttgtggg

SEQ ID NO: 130305 - DNA, 122 bp, Homo sapiens
tgcctctgctcctctgatgaagtcagcacacaccttttccagggattttatgttgcggctcgttagagtgattcaatttcggtgaactgccacctccagctccacgcgtgtttttccggtaa

SEQ ID NO: 130306 - DNA, 122 bp, Homo sapiens
attctgtcttgattcttctgcactggccctcccaaagtcagagaacagaatccttcacagcgctaggcacctatttaatgcaaaaaatactgtagaattgacttctctcccatctcctgtct

SEQ ID NO: 130307 - DNA, 122 bp, Homo sapiens
ttggggggtctcgtccaccgggctgtgagtcttccaggggggtgggggtgggagtcattgcgccggctctgaccagagccacctcgatcagaaagtgctggaaagaaacagacctggcttcc

SEQ ID NO: 130308 - DNA, 122 bp, Homo sapiens
taaagagccagccagcccctcttgcacctctggctcttgagacccccatggcagaggggccgggacccccccgcgctgcggggagtaaagagccagccagaccctcttgcctccctgactct

SEQ ID NO: 130309 - DNA, 122 bp, Homo sapiens
gctgtttcctggaactcagttttctgtcgtagatgatgttttttatctggccctttgtttcgtgactaattgcaccctcttcaagctcttgttacatttggaaacctgcccaaatttatcag

SEQ ID NO: 130310 - DNA, 122 bp, Homo sapiens
ttactgcagaaccaaatgaccaaagctgcttcttttttttcccttcctctcccacaggtccgaaggtaggaaagttcccccaatggtctcccctttttcctcccactgtcatgtcctccaga

SEQ ID NO: 130311 - DNA, 122 bp, Homo sapiens
tgatttctactagttatttagattcatagttcttcatttattttatatcatcctaccgtgcgattttgaatatgaattagagatcaatttattgcatttactgaacaatttatttaaacaat

SEQ ID NO: 130312 - DNA, 122 bp, Homo sapiens
gagaaataaggcctgttttgtaagctactgtggggaaccccttactctcacacaagtagccgttatctgattataagtcaccctcagttcttattttttgaagggaagaggttaaatacaac

SEQ ID NO: 130313 - DNA, 122 bp, Homo sapiens
cagcatggatacgcgggacagagggatgattcacctcctgagcaggatggagcgggacagcgagagatttcactgcgctgctcagaacagcgcgtgatttaaaacttgtgaatttgggcggg

SEQ ID NO: 130314 - DNA, 122 bp, Homo sapiens
gtccttgccgtcactccgctgcgtgggcggggctctgagggggcacaggtagaggcccttcgcgaagggattagcatagtcccaccccccggcgcgagcctcgggccgggcgctgattgggc

SEQ ID NO: 130315 - DNA, 122 bp, Homo sapiens
agtagaacaacagcaacgtaacaaagaaaatgtcagtgttttcacagcaccaatctataacgctgggaggccgtcccgctgtcagcgagggctgacaatacaatagctttcaaagggatatt

SEQ ID NO: 130316 - DNA, 122 bp, Homo sapiens
gtttaggaaaagtatctttctcattcttgcattgtcagtaccgatacctggtgtttattccgaactatctcctcgattagcctggagagtgagtggtttggccagggctataaactgcagga

SEQ ID NO: 130317 - DNA, 122 bp, Homo sapiens
agggtttggataacccatggactgaataatcagtccccaaataatttagagtcaactacacgtaaactttaagcagcagccaagggagggcatggagttggaaagccaaggtgagagagacg

SEQ ID NO: 130318 - DNA, 122 bp, Homo sapiens
cagcctctttaaagaactgaccagctctctggtcagggtcggcgacctcagcttcgactccgacagccagtttcccctggatgaactcaagatcgaccccctgaccctggacggacagaccc

SEQ ID NO: 130319 - DNA, 122 bp, Homo sapiens
gatcacatcacaggactctttgccgacactccccagtaccagcctggagactggtagctccgctgggtgggattcagaaaagcaaaaacaatcactacagtttggttctcaggaagccccat

SEQ ID NO: 130320 - DNA, 122 bp, Homo sapiens
cccagtgggctgctctgctgagtgatgccagggcacgggcctggggctttgaaccgcgcccggccaaaaccaccctgcagcgggccacctgccaggccaagcccctcccacccgagaccccc

SEQ ID NO: 130321 - DNA, 122 bp, Homo sapiens
agcctggtttacatttacatttttgttagtaagtgctgagttgtttacaagcaatgttgccgtgcgaaccttgaaaatagctctgatggggaattttgaaagtgccaagctaaagctcagaa

SEQ ID NO: 130322 - DNA, 122 bp, Homo sapiens
ctcatcaaggatgtgagagcagttactgggatatccttggcttccctgttggtttgccaacgagagctccccttcctcctttgcctccaacctggtcttctttggaggttggcttcccagtg

SEQ ID NO: 130323 - DNA, 122 bp, Homo sapiens
cctttggcaaataatcagcacccaattaattctgaatttcccattgtttgctccagctgtcgagctccttgcacgagcaaagaatgattgttcaatgttttccttgtaatgaactgtgagag

SEQ ID NO: 130324 - DNA, 122 bp, Homo sapiens
tctgtgtcctccccgcactggcttttagggaaagagagtctcgtgggtcatccggcctgccggctctgtgtcctccctacactgacacactggctttcagggaaggggagtcttgtgggtcg

SEQ ID NO: 130325 - DNA, 122 bp, Homo sapiens
ggtgcataaaaagattcgacagaatctaacatccattcatgatttaaaacagtccttttgcgggtggcggcgagcgcagaggacgccatgaaggccccgggcacacgactagagtaccaggt

SEQ ID NO: 130326 - DNA, 122 bp, Homo sapiens
tggccacagagaacgtgagaagccattgccagtgtcatcatgtggtaattgggaagtttccgtgaaccgctgcagcagggagtttaaagaagatcagcagaggccaaagactccttagcggc

SEQ ID NO: 130327 - DNA, 122 bp, Homo sapiens
gagttgagccattctcctgggtacacatgtagtggcatctccttggagttttaattctctcgtgatgacttcagtagaattttgactcttgcagtttctccctgtgaatgttaattaaggag

SEQ ID NO: 130328 - DNA, 122 bp, Homo sapiens
ttggcctgagtgtgtttctcgtttcggccctgcagttgtgggcggtggtgagacgcgttccgaaacaggaccccgtcacggtgtgtggccctcgatgaccccccaacagggtgtctggagtc

SEQ ID NO: 130329 - DNA, 122 bp, Homo sapiens
aacctccaaggttcctacaaaaccgtttgcagcttttgcaaaccgccttaaagtcatcagcgccccactgcggaattcaaagctaagctgtcacaattgttaacaccttctttgaccagcct

SEQ ID NO: 130330 - DNA, 122 bp, Homo sapiens
ctatttatctcttttctgaatgttttggggccctctgaaccaaccaaaaagtcaggtatccggagggacaatttccagattgccataaattattttgccaaaatgatgactcaaaaggcaaa

SEQ ID NO: 130331 - DNA, 122 bp, Homo sapiens
taataatcctttacctacatctcatgtaactcttttgttttctaatacttggctggtccccgcagtttggggacattcagggggtaagtgcatgataataagaactacttactgctgaaact

SEQ ID NO: 130332 - DNA, 122 bp, Homo sapiens
ctctacacacattccctaggtgaccttgaggtccgtatcccatctgtacaatgggcaaaccgtgatggagcgcacccctgcctgctccacaggacatcgccaacgcctggcgggggctggag

SEQ ID NO: 130333 - DNA, 122 bp, Homo sapiens
gctcaggtgaaagatgccttccctgtaccgggcgaagaaagattcctctacagggaagcacgtcatagccaacagaattctgtacagacattaaagtaattaaagtaattcctgtcgttctt

SEQ ID NO: 130334 - DNA, 122 bp, Homo sapiens
ccaggcaggaagtgacatctttgcagcaagagggttagactggggcatgtagccagatcccggggagcactcgagctggggaggggctgtcagccacctggctgagcaggagtctggggtgg

SEQ ID NO: 130335 - DNA, 122 bp, Homo sapiens
taagtgatacttgatattgctctagacggtttcttccacttccttacggtttgtcacgtgcggatggctttgccaaagccatcctgttaatagttgatcacatgttgatgagaaccttttct

SEQ ID NO: 130336 - DNA, 122 bp, Homo sapiens
ggcccccgcggagaggtgagtcccgtcttggcagtgcccgagctggggcttgagccggaccgcactcacgacgtgggcctgggctagattcccgagtaggccaaggaggcccgcgccgcgct

SEQ ID NO: 130337 - DNA, 122 bp, Homo sapiens
ctgtcaccatgctgaagccgacatccgaggctcagccctccccaaccccctgccgggctccggagcctgggtcccccaaccaaaagcctgttgcctccccagccaacagcagccagaaggga

SEQ ID NO: 130338 - DNA, 122 bp, Homo sapiens
tgcgccctgcggggcccaggagactcggtcctccctgggctcccccaggcctggggtggacgttggaataaagtggggacaacacgatgagagaccccagccctggaggtgccctcggccaa

SEQ ID NO: 130339 - DNA, 122 bp, Homo sapiens
cctaacacataagaaatgcgcaggaatcaaacgcaaactggtgaaccaactagagggccgcgggggcagaagtgtccggcggggatccggacagcgcatccggaagcgccatgggccaacgc

SEQ ID NO: 130340 - DNA, 122 bp, Homo sapiens
cagctctcgctccagctcccgctctcgccgtggtgggggctactaccgttccggccgccacgcccgctcccggtcccgctcctggtcccgctcccgctcccgctcccggcgctattcccggt

SEQ ID NO: 130341 - DNA, 122 bp, Homo sapiens
gcctgcggtccgctgcccgggggttgggggcttgggaggggacggccttgccccgggaagcgtcccgcgcggccgttctgctcgtggaagggcgccgcctggcgacactagcgcggggggcg

SEQ ID NO: 130342 - DNA, 122 bp, Homo sapiens
cccatcagcccctgcactgggcctcatggaccctggccaccctggttcgagccgcaggtgcgcctcgggcccgctaggggtaccccaaggcagacagaaggcccatgagggaaaggtgagac

SEQ ID NO: 130343 - DNA, 122 bp, Homo sapiens
ctccaccctttgcctgttccccccacccacccccatcaaatccggtttgtgtgtggtgtgcgtgtgtttgtatacacacacagttggctcttggtaagaataatattagctgaaaacaggaa

SEQ ID NO: 130344 - DNA, 122 bp, Homo sapiens
tcaccacttctttgccagtctagatccgtcctggtgccttactgtgcatacagttctactcgtctcaggtgaggaggccacttaatttgtaaaagactgaggaaggggtaggatcaccacaa

SEQ ID NO: 130345 - DNA, 122 bp, Homo sapiens
tcccagatcttctcggcttatcggctgaagactgacactgcccgatcgcctcggaagccccgtagaccatcacggacgccgagcttcaggtaagtctcacagtggaaggtaagcccgtcccc

SEQ ID NO: 130346 - DNA, 122 bp, Homo sapiens
cgaggggctagcgggagccggcacaagagggtcgaggagccaggaaccccaaacgtccggcgccaggcgctagccaagctgctgcgcgccccggcgcccagctggctcggggacagccgctg

SEQ ID NO: 130347 - DNA, 122 bp, Homo sapiens
aacttcacataaaggattccggacctgcactgttcactaggtttagtatctctcccttcccggggtagtgccgacaatactgctgattcttactcttactttaggtttgatgagccaagctt

SEQ ID NO: 130348 - DNA, 122 bp, Homo sapiens
tgacacccactcacgcgcatcacctctcaatctcggggcccacaacctgacccccactcacgcgcatcacctctcaatctcggggcccgcaacctggcccccactcacgcgcatcacctctc

SEQ ID NO: 130349 - DNA, 122 bp, Homo sapiens
tatgggatagcgccaccccttttcccaggaaaagtgtttcaaggttccagacctggagctcggttagagacccggggtcggaagccaacgcagccaatggtcgtcgatgtttttgtttcctg

SEQ ID NO: 130350 - DNA, 122 bp, Homo sapiens
agccattttcctaatccttcgcccgctctccacggtcatcccgtgtatccctcgagacgccgcctcccacagctcgtgcttctcccaggttcggctccgacaaggccagagcggcgtctgcg

SEQ ID NO: 130351 - DNA, 122 bp, Homo sapiens
cgagcgacatggaaatggcgtggaatggggagcgcatgggagtcccacccgctccgcctgcgggctggtagttgagacctcctaggagcgggaatcattgctcaaccagcctcactcctgta

SEQ ID NO: 130352 - DNA, 122 bp, Homo sapiens
ccttcctcagtctagcttccttctaggttcttacagctgctcccaccatgctgtttcccacgggtaagatgcttcctctttatcagtctagctctagagtagacaaaaacacctctccttgg

SEQ ID NO: 130353 - DNA, 122 bp, Homo sapiens
aaggcaggcggagagcactgctgatggattccccagcactgcactgtgcgaggcccagggcggggaccccagcaggcagcgtggtagggtttgctggggatgacaggcaggcgcacaggcgg

SEQ ID NO: 130354 - DNA, 122 bp, Homo sapiens
ggaggcggggctcgcagcggggaggggtctgcgcgcctccggaccagagttcggaaaccccgcgctgccccctcgcagccccttgtctctggcgccgagcccctggactcggcttgccccgg

SEQ ID NO: 130355 - DNA, 122 bp, Homo sapiens
atgcctcctccatcaccccatgcaggcccaggctgaggaccctctgggagggaggagagccggggcctaggaggaagggccttgtccctgaagtttgaaagggctctcaaccccttctccaa

SEQ ID NO: 130356 - DNA, 122 bp, Homo sapiens
ggagctgggaactgagggacgccacgtccttggccagcttaatggccttcccctcggcctcgttaagcatccctgtgacgctctcaacttcattctaagggtgccaagagactggttagtca

SEQ ID NO: 130357 - DNA, 122 bp, Homo sapiens
ctcagtcaggcgaggtccagaaaggcctgacttgcctggcagcctcaacggacttgtccccgcagcccttgcggacctcctggtcgtcatggcgactgtgaaatgtggggtggggagcatgc

SEQ ID NO: 130358 - DNA, 122 bp, Homo sapiens
aaaggcaccgactggtgtttggtattctggagaaaccccttccgaaactggaaacggagtcgctcctttggcctgaggacgcggttcattgtcctggatcctgaccgaggctggtgcacctg

SEQ ID NO: 130359 - DNA, 122 bp, Homo sapiens
gaagccccgccgctgcaggtccctgcttggtcggcgcggtgacggtgtcgctggcggcggcgggggccttcctttggctgcccggccatttaatcagagctattatcagacagggcttgcag

SEQ ID NO: 130360 - DNA, 122 bp, Homo sapiens
ttcccagctgtttcagctttttccgcccgcaccgcggcgatgcgttcggagccgccgaggcggcagcgccatctgctgtctactttttaaattgcaggatcagatcctctcggtctctccag

SEQ ID NO: 130361 - DNA, 122 bp, Homo sapiens
ccagaggtgcagaggccgaggtgcctgtgtgcgtctccgtgcagtcattgtgcaggtcagcgctcgtctggatgacgtcaggaaggagagaaaggcagggagaacacgtgaggagtgtgggc

SEQ ID NO: 130362 - DNA, 122 bp, Homo sapiens
cacctcctcgcagagccctagccccaaacttaccgtccacttcctggtttcagaagcttccgttttgcctgactcgcgatcgatctcttcttgcaaggcctttcgcctcacctgagcaagaa

SEQ ID NO: 130363 - DNA, 122 bp, Homo sapiens
cctatctcatgagccctggaggcaggaagaggccaccaaggtggattcaaaagccctttccgacagttatgttttgagaatcttaattttctgggatctgaagttctttgatgaaagacaga

SEQ ID NO: 130364 - DNA, 122 bp, Homo sapiens
gcggagcaaaagaatgcggctctattctcgcaagggaaattataaaaaagttcatgttcacggttctcatccacatgaccgacagcggccaatggaagggccgaacaactcataaagttgta

SEQ ID NO: 130365 - DNA, 122 bp, Homo sapiens
gggccgcggggaccgtgcgcgcgtccccctcccgggcaaggccgggcggcgggcgcgccgcggcttctggggtccccgccctcttgtccgccatcgcctgcgggagcctctggcctggaggg

SEQ ID NO: 130366 - DNA, 122 bp, Homo sapiens
agctggccactcagtggtttcttggtgacactggatagaacagctcaagccttgccacttcgggcttctcactgcagctgggcttggacttcggagttttgccattgccagtgggacgtctg

SEQ ID NO: 130367 - DNA, 122 bp, Homo sapiens
taccggtgaaaatcacctaaagctccctttctacttgaggaatttgggtgctggttaggccgggtagagggaaagacctcctcaagggggtctctagcttcttcttccggtccgttggctga

SEQ ID NO: 130368 - DNA, 122 bp, Homo sapiens
ccagttgcccggtggtgtaagtgtggcatgcgtcagacttgccgcatggagtaccaaatgcgcagcccacaaacctacttctgtcttttggatttaaagcaccgtcacctcctaaggagccc

SEQ ID NO: 130369 - DNA, 122 bp, Homo sapiens
agtcatgaccacaatccaaatttagaacaattctatgacttcaaagggatgccttagagccgttccctggaaccactcctctgttctctctgtatctactggagggttctaagcagaaaaga

SEQ ID NO: 130370 - DNA, 122 bp, Homo sapiens
actcgggaagcgcaaggggtcagggagttccctttccgagtcaaagaaaggggtgacagacgcacctggaaaatcgggtcactcccacacgaatattgcgcttttcggaccggcttaaaaaa

SEQ ID NO: 130371 - DNA, 122 bp, Homo sapiens
agtggaatggtggggaccttggtatgttatggggtgagcgtgtctccaggagcaggtgagcgtgcgcctgataagataactgccctggcaatgtccttctctactggggcaggtcacctggg

SEQ ID NO: 130372 - DNA, 122 bp, Homo sapiens
tcggtgctgagcctctgcccccctgaactggtcctgagccaacaccgccggctgggctgccgctcagctgcagagggagggagacccagcaagagccaccagctgcatctcaatgcggctcc

SEQ ID NO: 130373 - DNA, 122 bp, Homo sapiens
agcgcgctcccacccaccggcgagtcaaggttgcgttggggagacagtgaaccccgttcccgacatcaggggcctccccttggggaaactgaggcccctggccagctgcgcaagacctgggg

SEQ ID NO: 130374 - DNA, 122 bp, Homo sapiens
acctcccagaaggcagcgagaaccgcacatgtggctaatctttcagcggaaaaggtgtcgcgcacgcgcagagagcgcggctccggcgcagactcggcgcctctcctcaaggccccgctcgc

SEQ ID NO: 130375 - DNA, 122 bp, Homo sapiens
atttcatcttgctcacagcctgggggtctgtcccaaaacagccctgtcaataggatgttccgggtatcacctggtttgagtatttggttttagacgggcgcccagcttcttactgttatatt

SEQ ID NO: 130376 - DNA, 122 bp, Homo sapiens
tggccttccacttgagaagcactgattcattcattcagtatctacagatcacttactcagcgccaggtacacggaacaacaaaacacagatgctactactgtggagctcacattctagcaga

SEQ ID NO: 130377 - DNA, 122 bp, Homo sapiens
ctgcactgcaagatggaaggcgccacgtttgaagggcagcatggagccattgtggtttctcgttccctcaggaaacacccagaccctcacctgggggagaaagagggtcaaagaagacaaat

SEQ ID NO: 130378 - DNA, 122 bp, Homo sapiens
ctctaacaatgtaaaccacgtatctcttatgaggctgacaagaatataagtgaaaatggtcgctttgagactgcaccaccaatcaaattgaaatatgaaattccggaaagagctggaaagca

SEQ ID NO: 130379 - DNA, 122 bp, Homo sapiens
cgggcctcgctacatttaatccacagtcacaacaaacctctccagtgtgtcccacagagccgctcactcagccacactcgccacctcggtgtcaccacccccctccagcctcatgctcactg

SEQ ID NO: 130380 - DNA, 122 bp, Homo sapiens
ccctcggagagtggagggcgcctcggagcatcctacccagcaaagagctgcttcctgtttcgcctgtattgttagttctacaataaacacttatcaatatccaaaaggctgcgtggaatgtt

SEQ ID NO: 130381 - DNA, 122 bp, Homo sapiens
aaaccagggctgcgccaccacccacccggcctatctcccatcttatctccccagctctgtcgcctgacccctgcaccccaccaaatcgcagcctttgcccggtgccctcaccgcctcggttg

SEQ ID NO: 130382 - DNA, 122 bp, Homo sapiens
ggattaggacacctgccgagcctggagtaaacaggtaatgtcaggcaggtcctggaaccccgggaggcccaagttcttgctgcgggaagagggattagcagaatgataacgcaggtctgttt

SEQ ID NO: 130383 - DNA, 122 bp, Homo sapiens
attcatcgctatagtttgctgctgtaacaaattactacaatctggtggcttaaaacaacacgtatttagtatcttgcagttctggaggtcagaagtccaaaatacatcacaccgggttaaaa

SEQ ID NO: 130384 - DNA, 122 bp, Homo sapiens
ttgatgctcgttgacttacggacgtttctgcctgagcgctgtctcaggcctcctggggctcgctctccaccagcgattcctccctcagtttccacgtttgcttctgtgaccggcctttcctt

SEQ ID NO: 130385 - DNA, 122 bp, Homo sapiens
ggcagcccccgggaacccctgaggatgcggaggtgggcccgagagctgcggcttcgatgccggggtgggagctaggcaggccgcgcgccgccgcagtcctgtcgcagcgcgtgccctggtcc

SEQ ID NO: 130386 - DNA, 122 bp, Homo sapiens
tagaaagcaccataagctatacatattcttgtctctcctaagcttttaaaaaaattttaacgggatttaccctgggaacataaattcatctacaagagaaattagagacgtttcaaggaata

SEQ ID NO: 130387 - DNA, 122 bp, Homo sapiens
cctcgcgccgcacgctcgggatgcccatcaccaccgacactatgggggacggaggcccgacgctggaaagggtgcgggggccacccgtccccccaccccgtgctcctccctgtctgcgccca

SEQ ID NO: 130388 - DNA, 122 bp, Homo sapiens
gtcttatgtgccagcctcctacccctctatcctgctaacttgactcaacttgtaggacagcgcaggtgccatttacagggggacttccttgacctcctgagccctattctatacaaccagag

SEQ ID NO: 130389 - DNA, 122 bp, Homo sapiens
tgtaggcgtagggttgccttgggagttttcacagaaggtcagctgagcatgcaagaacaccgcctcagtcgtcctcctggcaacaaagcttgcggtgaaggctctttgattgggtcttgctt

SEQ ID NO: 130390 - DNA, 122 bp, Homo sapiens
gcaaggctgcagaggtcagcaagacaggaggtgggagcaagagctgcattttctgggtaccggcatatgtcgggcagaatggtaaatatttgcaggagctcacagccagcctggacacgggg

SEQ ID NO: 130391 - DNA, 122 bp, Homo sapiens
atttcggcagccagagttcccgggttggccttttgcactggagaataaagttctgcctctcgccgggagctcagcgggttcctggggtggcaggcgacgcgcagggagacggtaacgcatca

SEQ ID NO: 130392 - DNA, 122 bp, Homo sapiens
gcagaaaggaagcttctgaggaatgctctagtgtttcccagagtcagggtatatgaaaggcgctttagaaactgtggtgtttgtactgttgctaacagtacagatgttaggcaaagagccta

SEQ ID NO: 130393 - DNA, 122 bp, Homo sapiens
ctggctccgctgtgcccacggggcctccaccagagaagtgtgagactccgggttcaggaacgaggggcactcacgcatggctctgctatgcccacggggcctccgccagggacgtggagcgg

SEQ ID NO: 130394 - DNA, 122 bp, Homo sapiens
tctgggccctttaaattttctccctggccagcaggcatgctgggctttgccagtagagggcgctggggagccccagcagcggggaggttccgcttcctgcttgccacgtgctcacagagtag

SEQ ID NO: 130395 - DNA, 122 bp, Homo sapiens
cgttgtgctttggtcaccatagtgacttctgtctgaagcctcaaccctgcggttattgctcgatattcattcataataaggccacccctgagttttccgcccactgggggaccgagtaccac

SEQ ID NO: 130396 - DNA, 122 bp, Homo sapiens
gggcggaggcctgcgtggaaccagtcccagaagcggccatggtgcagggctgagggtgaccgtcgtggggacgtggactagtctttcctcctgtccagccttcggtgtccttggctggaggt

SEQ ID NO: 130397 - DNA, 122 bp, Homo sapiens
tcacgtgctcagtgagctcttccctacatccctttctaaaatagcaaccccaactggacacggtatctcatgcctgtaatcccagcactttgggaggctgaagcaggcagatcacatgaggt

SEQ ID NO: 130398 - DNA, 122 bp, Homo sapiens
accctccccttggggtgctgagcctgagcttggtagctggcagcatgggctcacctcctgcgccactgctgccaccagcgggacttaggccacgccacggcctttctgcctccatttccctg

SEQ ID NO: 130399 - DNA, 122 bp, Homo sapiens
gaatccgctcccgctcaccaccactgctggggtcgtcactgggctgcccgaggtccggggcgccccgaatgttcatcgtttaccacgtggccgcaggcctgcccatactccccccagctggg

SEQ ID NO: 130400 - DNA, 122 bp, Homo sapiens
ggcttccaggacggcagggcgggagctctgcaagccaatccctccctcgtgccacctccacgcaacgccgttaaattcagatgctacgctaaaagcagaggaaggaaaaatatctgtgtcac

SEQ ID NO: 130401 - DNA, 122 bp, Homo sapiens
gcctcttttaaacgcacttttccaggatcggggccacatcctggagctgttctgcctggccgggtgtatctctgggtccctgcctctggagcccctctccgtagatgtgtctgtccatcctc

SEQ ID NO: 130402 - DNA, 122 bp, Homo sapiens
gagtgtcttcatttttgttcgtttttgtcgtcattcctcaaagaggaaaaagggctttgccgaataaaggggctactgtcccagggattttccggcttaatttaggagggctgagaagagag

SEQ ID NO: 130403 - DNA, 122 bp, Homo sapiens
tgttttaccagagctgaccgagcctgaggagctggcctcagagcagaggcctggatgaagcgaggagcagcgtggctcgttgggtaggagggtcagctcggccgtgggagcggccagggcac

SEQ ID NO: 130404 - DNA, 122 bp, Homo sapiens
gtgtctacgttggatgaagcttaggatacaaacaagggaaaatgagactagagagagccacgatatcattggcaaaagacttggattgttgtgtttactgctcatgcttcatttgatggaga

SEQ ID NO: 130405 - DNA, 122 bp, Homo sapiens
gccctgggaaacaggcagacattttatttcttttatctgactcctttctcttgagactgccggcacctttctttctctcgcaatccaggggcagagcaatgggaaagccccgcgcttttctg

SEQ ID NO: 130406 - DNA, 122 bp, Homo sapiens
gggcgccggtgctgttgccttcaggtgaccacggattcgccatcgtgagttccaggtgggcgcgcggggcccacgtagggcaggaggccagccccggggggatcgggcccgggactctgcgg

SEQ ID NO: 130407 - DNA, 122 bp, Homo sapiens
gagggggacaagtcctttgctctaggaaagacggataaaaagcagcctgaaaggggctagcgaagaggaaaggcctgtgacttgattacaagaaaactggagcaaaagcagattatcaagtt

SEQ ID NO: 130408 - DNA, 122 bp, Homo sapiens
gaagactgcggaggcaccaaggagtgcgggccccccctgtgctggagttggaggcttccacgatctccaggcttaagtcccagcgccccagggcaggggccgtaacggccgctggtcgaggc

SEQ ID NO: 130409 - DNA, 122 bp, Homo sapiens
acctccgagaggcctcttctgacttccaggctggatcagggccctcgaatttccctgggtcgtagaaaagcgatcattctcttgtcacagactatgcgccttggggccgagaccagaattca

SEQ ID NO: 130410 - DNA, 122 bp, Homo sapiens
ggcctttgtgaagggaaactcgctctgggtcactctggtggtggcggggctggtacgtgacgcggccaccccacgggcgtgatgagacacgcgaggctggcgtccgggcatgcgcgggccgc

SEQ ID NO: 130411 - DNA, 122 bp, Homo sapiens
gagcctctcaccctcccacggccccacgcggtgtcctttgctcagcacctcccagagcaccgggcagaggcacccagaaaaccgtcaccacctgatcccgcagagaatcgcccgtcctctcc

SEQ ID NO: 130412 - DNA, 122 bp, Homo sapiens
ggagtcctaatggatgagattagtgtccttataaaagaagccccagagagctgccctgcccgtaccaccatgtgaggacacagcaagaaggtgccatctatgaccagaaggccctcaccaga

SEQ ID NO: 130413 - DNA, 122 bp, Homo sapiens
aactgatagacatagacggcagagctaacccgttaggcggcttaggcctgtcctgtggagcgtccctgcaggggactccagtcagcctgagtgacgcgatccaaagaacgctcccgggtagg

SEQ ID NO: 130414 - DNA, 122 bp, Homo sapiens
gccccagcccggcctcgcccactgcctctctcctgccaaaggggcggggcaacgaggcagcgcgcccggaaggctttcaagtgggaatcaagttttgagcacgagcaaatggggttcagact

SEQ ID NO: 130415 - DNA, 122 bp, Homo sapiens
caaaaccttggtggggactggggtaccagggagtctgaggctctaatcagtatttcttgccgtcagtaggcaggatgtctaggagctgcctgaggtcagggtcaaggcctgatgttgtgagg

SEQ ID NO: 130416 - DNA, 122 bp, Homo sapiens
catctaactacgtcttcccaataacacagcggggcaaaacgggaagacgaagaacgagtacgattatatccctggtttataaaaggggagaaactgaggctcaaacatagatgtcacttgtc

SEQ ID NO: 130417 - DNA, 122 bp, Homo sapiens
aacgagccggagagacttgattgggccattcacgcctcaggatgaggactggccagtctgcgcctggagggcgggccggtcccgctgatcacgtgacacgatttttgaaaggtgattggctg

SEQ ID NO: 130418 - DNA, 122 bp, Homo sapiens
cagagctatggaggagacgttgcactggactgctgggtgtgcacaagggggcaggaggggcgatccccatggggcatggccactggccatgggaaacacaggagggaggccaggcagctggc

SEQ ID NO: 130419 - DNA, 122 bp, Homo sapiens
catttccgggattccaaacggtgggatgaagataactacccatgggacctcagacagagtcgctcaaggtgtatgttccagagggggggcaggtcatgatttttaattactctgcaagcttt

SEQ ID NO: 130420 - DNA, 122 bp, Homo sapiens
cggctcattttattaattcttggtagagaccaggtctctctctgttgcccaggccagtctcgaactcctggcctcaagcgatcctcccacctcggcctcccaaaggactgggattacaggta

SEQ ID NO: 130421 - DNA, 122 bp, Homo sapiens
acaccagacacacacacacacacacacaaacacacacacatacactccgcggtgtctgtccgtctgggatttgtgtctcaactgtttctgcccagtgtgtaaatatttgtgggggcctggtg

SEQ ID NO: 130422 - DNA, 122 bp, Homo sapiens
gcccataaggggtcaaaatttgctgccaaatgcgtatgccaccaacttacaaaaacacttcgttcgcagagcttttcagattgtggaatgttggataaggaattatagacctctagtagctg

SEQ ID NO: 130423 - DNA, 122 bp, Homo sapiens
ttctaggccttgaccatttaaaataacattataattcagtagaagttgcagtggttcggccgcagctacctctctgcggcggcgcgtcccctgtgcttggtacggctcagccagtctccccc

SEQ ID NO: 130424 - DNA, 122 bp, Homo sapiens
tagccccttccctgaagctcattcacctcatatgtgaattatcatcagacacatcagtgccgccaataactcaagaaacgcagccccttttatgagtcattgtgtcagcattcacaaataat

SEQ ID NO: 130425 - DNA, 122 bp, Homo sapiens
acctgaatatccttggctatttcctctggatacagataatgccttcctccaatggatcctcggctcacctgatgattgtgtgaaactggccagagaaagcagagggatttttcctggtgatt

SEQ ID NO: 130426 - DNA, 122 bp, Homo sapiens
tacactgaggacacatctaaacacagaatttacaattgtgcatgcgaaactttacacttacgttagttgcctcaacctttcccctttcccagtatgctgcagttaggaatgatttgttccaa

SEQ ID NO: 130427 - DNA, 122 bp, Homo sapiens
aactagtgatagaaactggcccctcctaaagtagtatatggcccccaaacctgagctcttcgtgctaagggcaccgaaccacttcatcttggtggctggataaaaagtttgtattacactat

SEQ ID NO: 130428 - DNA, 122 bp, Homo sapiens
gccatcacagctcctttctgcctgccggtctgtgacatttcttaaaggccctacaggagccgggatgtcagcacttcctgttgcctgcggccttctgtacacagggcctttaatctcaacca

SEQ ID NO: 130429 - DNA, 122 bp, Homo sapiens
gcagctaaaactcatacaactgccttggctgggcgaagtccttcccctgcttcagggcgacgcggggagggagatgcgcctttcagtgaaccaggtactaccagcacacaacggcctagtag

SEQ ID NO: 130430 - DNA, 122 bp, Homo sapiens
aatgaggaatattttatggagaggtctatagaatctttgagaattcgtcgccctggaatacgtttggcttttgcagctgatttaattgctaacaggaagaccccggtcaagagaggggagcc

SEQ ID NO: 130431 - DNA, 122 bp, Homo sapiens
agtaagtccctctagggctcttgttatacttctatctggggctgtgttatttggaatgaacgtgcagtattgggtcttaatcattacgcaaacaccacctttctcagctagcatcatatcaa

SEQ ID NO: 130432 - DNA, 122 bp, Homo sapiens
tattatagaatcatagccttctgtatctgtttccaggattgtttcctgggctatgcccttcgactggctgggaagcaactaccagcctttggcaattttagggcatttctgaccatttgtct

SEQ ID NO: 130433 - DNA, 122 bp, Homo sapiens
agccgctccggagcagccaggggaactacagggcccaggaggcagcgcacaggcccggggcggccccgacggtggtgggtgtgcgagcgcaggggccgggcggcgcgggcgccgggcgcggg

SEQ ID NO: 130434 - DNA, 122 bp, Homo sapiens
ggtgctagaaggaaagaagtggtatgtttatgactgcccaatggcagaccattcaggattcgaaaggttatcttccttcctgtctaaatgcatccaacattgaggaggaagtcagcacaaag

SEQ ID NO: 130435 - DNA, 122 bp, Homo sapiens
gccggcgagggcgggcgggaggcagggagggggcgggaggggagccaggggcggggcctgcgctcaaggggatgccaatcaaagcatcaacttcaaattgtgtctgaaagccccgccgccga

SEQ ID NO: 130436 - DNA, 122 bp, Homo sapiens
ccgggacttggagaagcactgcagagacatggaagaggcgagccagcgcaagtggaatttcgattttcagaatcacaaacccctagagggcaagtacgagtggcaagaggtggagaagggca

SEQ ID NO: 130437 - DNA, 122 bp, Homo sapiens
gcgcgtctgctggcgcctggtggagcaagtgccggaccgggccatggaggctgtgctgaccgggctggtggaggccgcactggggtaagcagccaggctgtcctccagctgcactggcttct

SEQ ID NO: 130438 - DNA, 122 bp, Homo sapiens
tggatgatagttactgggtggggtggatagtgtacttgtgtgggtcaatggacaaatgggcgggtgggtattttgagtggttagttcacgtggattggaaagataaaaggggtgagtgggca

SEQ ID NO: 130439 - DNA, 122 bp, Homo sapiens
atagcttcaaattcatgagacattttcatgaagagatatgcagtgggagagagaagcagacgtgtttccagtttggtgtttactttctgtgattccagagggaggggttcccagagtgactc

SEQ ID NO: 130440 - DNA, 122 bp, Homo sapiens
ctgcatgtgggccggcttctgaaggggtcagcgtacttccccacgtacccaggagctagacggaaagaagtaaggagccactggtgtggctttgtgctgcctctgagagaaggtggacacgt

SEQ ID NO: 130441 - DNA, 122 bp, Homo sapiens
gggatgtgggcattcgagccagggtctgactccagagcccaagttctgtttctcgctctacgcgcctgtcaaagactctggtttccgccggatggactttcagcaggtccgaggatgtgaag

SEQ ID NO: 130442 - DNA, 122 bp, Homo sapiens
gaagcaatttgagggtgttccagatcacaccaacagcggatgctgcatctgggtagttcacgtacccgaacaaaaattttaaaaatttggtgtggcctttgccatccattcactcctcaaaa

SEQ ID NO: 130443 - DNA, 122 bp, Homo sapiens
ggcagggcggtaactccacgctgcggctgctatttatagctcccaggccaggctgtgggccgcgtgagccggcgaggccaggccctgttcccctcctcgctgtccctgaggaacggggtctc

SEQ ID NO: 130444 - DNA, 122 bp, Homo sapiens
ggccaccgccccttaccgatggtggagatgtgcgaggagtggaactcgttgtcggtgaagcggcacagcaggcaggtcttgcccaccccggagtccccgatcagcagcagccggaacagcac

SEQ ID NO: 130445 - DNA, 122 bp, Homo sapiens
aaaacaataagggcatatgtctggtgtgtgtgtgtgtgtgtgtgtgtgtgtgtgtgtgtacgcacatgtgtttataaagataacagctgtaggaatgaatgagattgagggtgggggggtgc

SEQ ID NO: 130446 - DNA, 122 bp, Homo sapiens
gctccctgcccgcggaggaggccgtgggttgcgagcgggagcctggggaccccggctaggcgtcccctgccgctccccaaggagggagaggacagagtgggcagagtgaggaggttggggag

SEQ ID NO: 130447 - DNA, 122 bp, Homo sapiens
gatccggatagggttggtagagaactgaaggtaagaatgatagagtggtgtgaagaaagccgtgctcaaactgtcccaatgcttagagctcaatgacctcagtcaggtaagttgtttgctct

SEQ ID NO: 130448 - DNA, 122 bp, Homo sapiens
cagctgcctccgcccgcctcgggcccgggcggacgttttgccgccccggcgacgtcagcgcgtccggcgttgcttggctaccccgccgttcccccgtcccgctgctgctcacctccccgggt

SEQ ID NO: 130449 - DNA, 122 bp, Homo sapiens
gcaggcagcgatttcgaagcaaacacatgggaggggggcatgcgactttgtttccgggagcggagctccccagagcccgtgtgtgtcactgccagtctcccgggaccaaggcggagctcaca

SEQ ID NO: 130450 - DNA, 122 bp, Homo sapiens
actattttaaagggtataatttcaactggagacttggggagcttgattttgacttgattgcgaagcatctgtatagctcatgttgtatgtccagtttatggctttgtattatagaaatgtat

SEQ ID NO: 130451 - DNA, 122 bp, Homo sapiens
aattcctgccaagattctgcaattcagcctaaaactttcatctgactggtacaataactccgttttcttctctctgcctcctgtaccccctcacataccactaccctagagcttcacattta

SEQ ID NO: 130452 - DNA, 122 bp, Homo sapiens
ttcaaatgttactacagtgactcagatattatctaaacttaaatgtaagccatattcaatcggatattacctataagcatgtagatgttaccattctccagatatgtcccacagaaataagc

SEQ ID NO: 130453 - DNA, 122 bp, Homo sapiens
tgcgcaggcgcggcagcctgaggggctcgccgggaaatgtggtttagcggccctcacctccgcggggcgcaaaccctgcagctccggggcaggctgcggggcgcgcgggccgcactttaaag

SEQ ID NO: 130454 - DNA, 122 bp, Homo sapiens
tgttacgtgggggagagaataaaactccagcgagatccgggccgtgaacgaaagcagtgacggaggagcttgtaccaccggtaagaggagcaggaggaggaggcaggagccagagagagccg

SEQ ID NO: 130455 - DNA, 122 bp, Homo sapiens
gggctgacaatgggactggatccctggttacacggccctacgcggtggccctgcggtaaacggcctctcagcccaaacccaccctggttactgagcatgcccagaactccctcccgggccac

SEQ ID NO: 130456 - DNA, 122 bp, Homo sapiens
ctgccgagaagtgctgggcacaggagcgagcagccggcttagcgggccagggcgtttttacgagagcctcctgggaagtttcttcctggaaaaatcattaaggcggactgatcccgattaga

SEQ ID NO: 130457 - DNA, 122 bp, Homo sapiens
agcaggaggaccgcagagcgcaccctgacggaagcgttcacactcaagtgtttatggttgcgtgtcttcttgcacagggatgtctgcgtttccaataccggcttctggacaggactcactcc

SEQ ID NO: 130458 - DNA, 122 bp, Homo sapiens
tcgttctgtaggaggacggagtcccagagaactacaactcccatcaagcacttgggggatcgccgcggctgagggagagactatggcttaggaaccaccattcgcgtgaggctctgctcccc

SEQ ID NO: 130459 - DNA, 122 bp, Homo sapiens
ccgggaggcccgctgtatgagatggagggcgggctaaaggcgggacgagactcgattgagcgcaattatgaccaatcaccttgcggaatattcggcctatagcgaaggaggagctcagaaca

SEQ ID NO: 130460 - DNA, 122 bp, Homo sapiens
gaaaaagaaaacgttttgctggcaacttacaaagtacaactagcactcccatctccaccgcgcggcaaaatgcacagcctcggcaggtcacgccggatcagagctacagaataggtgtcaga

SEQ ID NO: 130461 - DNA, 122 bp, Homo sapiens
cgtcctccatccgcccgtcctccatccacccccaaggagccggcacgtccgtcctccatccgcccgtcctccatccgcccccgtggccctgctgcagctggtgtggggctctgtccaggcct

SEQ ID NO: 130462 - DNA, 122 bp, Homo sapiens
ccgggctccggaggccaggcggaccaagctaggggtgccaggggaggctcgaggttcccgcggcgggaggtgggtccctggaccctggtgtcctgctgctgtcccacacatgggccgccttc

SEQ ID NO: 130463 - DNA, 122 bp, Homo sapiens
gatccctcccatctcacagtacctcacaggtctcttcccccgagcagtgcattgctggagcgaggagaagctcacgaatcagctgcaggtctctgttttgaaaaagcagagatacagaggca

SEQ ID NO: 130464 - DNA, 122 bp, Homo sapiens
ctggggtccgagccctgggccgcttgcggggcgcgcagccggggagaggagctgggcgcgcggcctgggccccccacctgcccgaccccagggcagccaagcacccgcggccttaaaagtat

SEQ ID NO: 130465 - DNA, 122 bp, Homo sapiens
ggaggcggagaatgcaatgagcacagatcatgccactgcactccatcctgggctacagagcgagaccctgtctcagcaaaaagaaaacaaaaaaagatgtagtctcatggaggtcaatagcc

SEQ ID NO: 130466 - DNA, 122 bp, Homo sapiens
ccgcgacccgagtgctgggaatcgcccagtcccttcccctggaacgctgagagacagcggcgctggccaatcgtgcgggggggatggcgagggggagggagggggcgctcggaggagcccca

SEQ ID NO: 130467 - DNA, 122 bp, Homo sapiens
gtttggagccatgcacctcccaccctttgatataagacatttggctcacacttgcttgtccgccagtgcatatctgacaaggagtttaaattggcaagaaatgagtgcagaccaggcaaggc

SEQ ID NO: 130468 - DNA, 122 bp, Homo sapiens
aaaagcaatttcattaagtctgacaaagcggctctcccatgtgcagacaagggagtgtctcgccttaaggtcttatagtcagaggagatcagaagaaaccttctagggggcagtggtagata

SEQ ID NO: 130469 - DNA, 122 bp, Homo sapiens
cttccggggccggcgcccagagttccgggagggtgcaggcaggagagggaaaggcagcagcggcggcagctggaggatgaagaaggagcatgtgcttcactgccagttctccgcgtggtacc

SEQ ID NO: 130470 - DNA, 122 bp, Homo sapiens
tttagtgagctcttactacctgccagggacggtgcaaggtgcaaggtgcggtgcaaggtgcggtgcaaggtacgttccaagcttatcagctattgctaatgatagccaatacttagtgggtg

SEQ ID NO: 130471 - DNA, 122 bp, Homo sapiens
tgtctgaaggtttagcaccttggttggtgcagctggggcgttcacagatcgtcactgcttcgagatcaggttccagcaacttccagagctcaggagtaaattgccatcttttcagattggct

SEQ ID NO: 130472 - DNA, 122 bp, Homo sapiens
atgacatttttgatgctaggagctcgggaagaccacggcagggaagactttgggagccctcgccccgcttggcggtctgtcggtcccgattcacacagtgtccggcagcccaaggggagcca

SEQ ID NO: 130473 - DNA, 122 bp, Homo sapiens
gagcggccgcccgactccgggacgctcacctcccggccggcttccgggatgggtctgcagcgacacacacatatcccctgggacctgcttcccggcatcctccccgcgcgagcgctcacttc

SEQ ID NO: 130474 - DNA, 122 bp, Homo sapiens
ggccctgcttcttcctcccggtgcgcccactcaacacaggggctccggtcgtgcggggggcgcttgctgggcggaggcactgagtggagaaacacctaacaggtgtgactgcaagttgatgg

SEQ ID NO: 130475 - DNA, 122 bp, Homo sapiens
cggaaaaggaactccctgaccccttgcgcttcccaagtgaggcaatgcctcaccctgcttcggctcgcgcacggtgcgctcacccactgacctgcacccactgtctggcactccctagtgag

SEQ ID NO: 130476 - DNA, 122 bp, Homo sapiens
tctccgggcgccctggctctgattggcaaggaggccacccttttgccgggcggaattgcacgaagccacgcccacccactgaggagccggccaatagacggacaggtgtggcccagccctcc

SEQ ID NO: 130477 - DNA, 122 bp, Homo sapiens
tgatgcctaaaacgctaagtgggtggcggagacggagatagggcaacgcagccaggcctccgttcccgtgtctggacctgggcctgccctcgggaccctcttcgtccactggctcccccagc

SEQ ID NO: 130478 - DNA, 122 bp, Homo sapiens
tcacacacgctcgtggaaggagaaaaccgctcaaacaactggactcggcccgtttcctttcggtaacctccccacagcccaacacgctgtccccagacgctgcccgctcccaccccggtccc

SEQ ID NO: 130479 - DNA, 122 bp, Homo sapiens
tcaccttcttcgccggcagaattgctacgctgaaagccaggccccgggaatcagggcaaacgccactgaatttgaaactggcgggtcccctcagtgaaaggctgccggaacaacccccgccg

SEQ ID NO: 130480 - DNA, 122 bp, Homo sapiens
atcacagtgcttgggccatagaaccaggcagctccgagctgaccgatcttcccgaaagcccgtgcccaggggactccagtgggagggtctcattctttaaggtctctggcgtgctgttccag

SEQ ID NO: 130481 - DNA, 122 bp, Homo sapiens
tgatgacggggacagcatgtatcccacaaagctgtggtcaggatgttagtgccatcttttcgaaacacccatgcaggcccaccctgcatacctggcagcttcctactccccagcacccccag

SEQ ID NO: 130482 - DNA, 122 bp, Homo sapiens
gggacggagcgaggacggctcccacgcgttcggaaggctggcctgggacaggaagcgaggcgcggcggcggccgggttcctcacctgtgtccggagtgggtggtggcggcggacggacgggc

SEQ ID NO: 130483 - DNA, 122 bp, Homo sapiens
catatccgtagcctccaaagccagagccatatccgtagcttccaaagccagagccatatccgtagcctccatagccacagccagaaccccgtctgcagaagctgccacatccacagccatag

SEQ ID NO: 130484 - DNA, 122 bp, Homo sapiens
gagagttccagagcctgcagaggaggcggcgggtaccagggttttcctctggggctttggcgccccccacgctgctctcaggagagggaacaatctttggggtgcaggtggcagctggggct

SEQ ID NO: 130485 - DNA, 122 bp, Homo sapiens
ttggcaccggtgcccagaggtgtagggggagattcacaggcgaagctgttcgcaaagtaacgtgagatagaaatctaaatcctgaacagagaaaggaagctgcccaagtttccaagagcctc

SEQ ID NO: 130486 - DNA, 122 bp, Homo sapiens
tgtgaacttatcctgctgattccgtggtgtctggggcaggtcctgactctgggaccaccccgcaagccttcacctggtgactttgtgatctgggagcttcagctcccaggccagtctccatg

SEQ ID NO: 130487 - DNA, 122 bp, Homo sapiens
taaaacacatagacacaatcataactttatattgctaatatgtaaatgaaagcaccattccgatgcaaacaaaaaataaaaagctgctaatgaccaaaatttattacagacttccccccaac

SEQ ID NO: 130488 - DNA, 122 bp, Homo sapiens
cgccacgccccctgccctgaccctattggctgagccgacgtagttcccataggccctccacgtaagacccgcctcgagccaaaggaagctgttggtctgggagaacgtctatcatggtgact

SEQ ID NO: 130489 - DNA, 122 bp, Homo sapiens
tgaagactagccgaaacagggacgaggttaaagcacctctccataagacacgcccaccagcgccatgtcagtttttcgttgccatggcaacaacaggacattatcgacttctttcctctgta

SEQ ID NO: 130490 - DNA, 122 bp, Homo sapiens
cagaaacatagctcctgagagcgcgggacttggacacggacctcggcgggcgggactgggcggggcggggcatcagaactcaggtgttttttatttacgcgtcagggcttttcttgtttaat

SEQ ID NO: 130491 - DNA, 122 bp, Homo sapiens
acttagaatctgcgtctcccacctgcttttcccaaggctgcagcttcccctggacaagagcggagcctgggctcccagtgccaggttactagcccaggacctggcccctggcagatgctggg

SEQ ID NO: 130492 - DNA, 122 bp, Homo sapiens
tggctttcttaaggaagtttatgagaagccatggaaagagcagcctgggatcagagcctgcgctgctggttctaccctaacgtctggcttactaccacatttgccctacagttgcattgctt

SEQ ID NO: 130493 - DNA, 122 bp, Homo sapiens
cagtcaatccacctgcagtgcacgggggacagctcgcatttcggtatgctaagaatagtccgggttgcgctaagagcccgaatgcgaagggtatggaagtcgttctctgcggaggccccgct

SEQ ID NO: 130494 - DNA, 122 bp, Homo sapiens
caacaaacacatttgtcactatgaaaggacaacaacgaatggccatgagtcagtctgtggcgggaggtgtggggagaaaggccttgataggctggggtcttaatttgccatttcccttgttt

SEQ ID NO: 130495 - DNA, 122 bp, Homo sapiens
aacagagaatctcactgcaaattttaaatcccactgtaaattccgaaattagacctgcgccgcgaagaccgcccaccagcaaaatgccaagcgtatttctttaaaaactggaaagccgtgtt

SEQ ID NO: 130496 - DNA, 122 bp, Homo sapiens
ataccttacttttcagccacaaagatattgctactcagagtgtggtaagtgagctagtaccgttgtgagaacttgttacaatgcagaatctcaggccaggttccagacctactaaatcagaa

SEQ ID NO: 130497 - DNA, 122 bp, Homo sapiens
cctcctgcccagttgctctgtgcctagacgtggctcgccaatctgtctcactggtgagaccgacctgatgcgcacctgccgagttttatgtgacccccttacagcagcttttctcccgggtt

SEQ ID NO: 130498 - DNA, 122 bp, Homo sapiens
cctcccttgtccagaaaacgtgcggaggaagcacatgtgggcgctggtctggacgtgcagcggcctcctcctcctgagctgcagcatctgcttgttctggcgagtgggcctgggatagggcg

SEQ ID NO: 130499 - DNA, 122 bp, Homo sapiens
atgtgcacaccacagttcaagaagcatttgtgtacaatgcaacacacagagacaaagagacggaaaacatgagaggtcaaaagacaaagacagaatgagaagatccaatatacatctaatgg

SEQ ID NO: 130500 - DNA, 122 bp, Homo sapiens
caaagccacagatgattcttatgaatcaggccatcctgtggggactccgtttgctagagacggatccgccccagcatcacccccattggcagaaaccaacccagccagagtccccaggcctc

SEQ ID NO: 130501 - DNA, 122 bp, Homo sapiens
ttcacacaaataaagcaagattcctcctgctgtgccccacaccccagggcaccccccgcccggggagtgcagtgattcagtgtactcaacagcacagagaccaaagaataaacaggaaactg

SEQ ID NO: 130502 - DNA, 122 bp, Homo sapiens
tgaaagaagcttacctggaagctctgttctcatatacctgaaataaggccagctgaggagcgtagggctttactagtgctgttattaaattttggggaaaaatgcaagttcccaattcagcc

SEQ ID NO: 130503 - DNA, 122 bp, Homo sapiens
tcaccgtcccttgtccaattatcatattcatcacccgcaagatatcaccgtgtgtgcactcgcgtgttttcctctctctgccgggggaaaaaaaagagagagagagagatagagagagagag

SEQ ID NO: 130504 - DNA, 122 bp, Homo sapiens
ccatggtactgagaatccatcctgcacctcctcaccatggaaactggcaagcctcataaacgaacagcagtgggtgctgaaagcagcaccaaatggagatttggattccagccccccagtga

SEQ ID NO: 130505 - DNA, 122 bp, Homo sapiens
ccgcctcaggccccgggccccgggcaccgggcccgccctgcgtcctgaacctcggcatcccgctctccggtccacgggaccctgctctgcggaccgccgacctctccgctcgcggctggcct

SEQ ID NO: 130506 - DNA, 122 bp, Homo sapiens
ggtctgttgttcacagctgtacttttaatgcctagagcatttgtaaaacaaatatatgaacgaatgaacttaaatagccaagcttatatggagggatttatagattcacaaaatattagact

SEQ ID NO: 130507 - DNA, 122 bp, Homo sapiens
gcacgcactcttccccgggggaaagtactgtggacacatgtaccagctcaccaaggcccccgcccacaccttctggagggaaagttgcggagcccggtgagtaagcccttgtcctcagctcc

SEQ ID NO: 130508 - DNA, 122 bp, Homo sapiens
ctgacaaagccttcaaggcttttctggacgcccggaaccccaccaagcagcattcctccacgctggagtcctacctcatcaagccggttcagagagtgctcaagtacccgctgctgctcaag

SEQ ID NO: 130509 - DNA, 122 bp, Homo sapiens
ccatcccctcggcggtggcggcagctgcagcggcaggccagatcgccatcctgggcctggcggggacaggaaattctgtcttgctggtcagcggcctcaacccagagagagtcacaccccaa

SEQ ID NO: 130510 - DNA, 122 bp, Homo sapiens
ttccggaagggtgttaaagcttaggcgtgagattttagcgttaatacttttctacctttccgtccctggtatggctttgatgaagacttagggctttcacctgtagaaaacagttttcactc

SEQ ID NO: 130511 - DNA, 122 bp, Homo sapiens
caggctgagagctttcaaaggctgcctttgtagcacggctttgattgggccgcgggccgccgggcaacaggggtaactcagatcgcctacaagagccccttgtgatcacaggaacagcccga

SEQ ID NO: 130512 - DNA, 122 bp, Homo sapiens
tccctgccacctgactttgttttggagtgaacacccggcacattcctatcccgctgctgccgactgccctgcaggagagggtggccagtcctaactaatacgtccagctattaaaaagaagg

SEQ ID NO: 130513 - DNA, 122 bp, Homo sapiens
ccaaagatggtgcccttcgcttcctctctcggcagcacgcaggtcccgggagcctctacccgacctctctatgatacgtcctccagccccgctcccgacgtgaggggcggggcttgcctgga

SEQ ID NO: 130514 - DNA, 122 bp, Homo sapiens
aagaaatctaggatggagccagcactgctggcccaacatgtctgtgagagaacctaaaggcgcctccaggaggaagcgtctgcatcttttccttgttttttttttttttttttttggaggca

SEQ ID NO: 130515 - DNA, 122 bp, Homo sapiens
ggtgcagattttgatgatgcacagggcgcggcctgacagtgcgtgtgtgcgcccaccgggcgctgctgccagagtttgcggggttcagggagcgggaggagggtctgagagaccccaaagcc

SEQ ID NO: 130516 - DNA, 122 bp, Homo sapiens
ctgcgaaaacagaaagaagtttcacctaactgggcatgtgatagcctctgcagagagccccgaggtgactccctctcccgctcccatctgcagtttcctgacctgggtaatctgactcctct

SEQ ID NO: 130517 - DNA, 122 bp, Homo sapiens
ccgcttcacacgtctttgtgctactcgaaacaactgaggagccccaggagccttcggtgacgggggttggggctgtggacattgatcagatgaggaattaaggctcagacgctgctgcaaca

SEQ ID NO: 130518 - DNA, 122 bp, Homo sapiens
gtgtgtggaagaactgggactgccctaccttacgctaatgctgtgaggattagtaagtgtcggaaaatccctctgcaaatacgaaatgctttgtaaataataacaagctacttgagcagtta

SEQ ID NO: 130519 - DNA, 122 bp, Homo sapiens
tggtcccagctgataactagtgacctggtgtcctaatgatcagggggctggtgcagttgacgctaaaggggacaggggtcccagctctcccatcctcacccccactctccactatcctcaca

SEQ ID NO: 130520 - DNA, 122 bp, Homo sapiens
agctagtcatttacattaggtatatctcctaatgctatccctcccccctcccccaacccacgacaggccccagtggatggtgttccccaccctgtgtccaggtgttctcattgttcaattcc

SEQ ID NO: 130521 - DNA, 122 bp, Homo sapiens
agccagctgcgttgggtctggtagaaagagataaaggacacagtacaaagccaactttggcgctaatccctggttcttccatgttgtgtatatagtgaccctgaggtcttttctgctccttg

SEQ ID NO: 130522 - DNA, 122 bp, Homo sapiens
ccccagccttgctgccactgtgcagccgcctaggagccagactgcttactcggcaggaatcggcggctctgggccccgtcggcgagcggccaacaggcgcgcgcgccccgacaccccgcacc

SEQ ID NO: 130523 - DNA, 122 bp, Homo sapiens
ctgagtaaatgttcttatttagcttggaatcaaaatacggtctttgcaagaaagccgtagcgggtcccaggtgcttgtctttaggttcagcctgatgcttctttttccgactaatcatctta

SEQ ID NO: 130524 - DNA, 122 bp, Homo sapiens
gtatcccaccacatccaactaatttgtatttttaatagagaccaggtttcaccatgttggcgaggctggaaatttgtattatactggttctaaatgtattttcaaaaacagagatcatcatc

SEQ ID NO: 130525 - DNA, 122 bp, Homo sapiens
tactaagcagagacttgcgaggcacacagagagggaatgaggcggaaccgttcgggggctcgttgacactgcagagcctcccgcagcatcgctgccttaaatcccgcctttccaggcgtgcg

SEQ ID NO: 130526 - DNA, 122 bp, Homo sapiens
gccgcgaacgcgctaatcctcgactgcggcggccctgcctccgcgcgcgggggccgggggcgctgcagagagggccccctgtgccccccaccccgccccgcgtcctcctgccccacccgcgc

SEQ ID NO: 130527 - DNA, 122 bp, Homo sapiens
cttttatttgcacagtcctattaattttaatgcctaaagcagtgttaatcgcatgacccacgtgaaaagattttaaaaattgctttgttagaaaatgtaatagacttgtcgttaaagttttc

SEQ ID NO: 130528 - DNA, 122 bp, Homo sapiens
caaaaaacgctacaaaaacgatgcgattagccagcccgacaacagcgcttcattgcgctgcgaggcacatgaactgcagaggtacatgagctgcggaacaattcacacctaagatgcactac

SEQ ID NO: 130529 - DNA, 122 bp, Homo sapiens
gataccgcaaggaagcctcccaagaaggcctctctcaccccagaagcccccaaagctgtccgggacaagctgtaatgccccatgctttggagcttggtgcccgtttctctcgcggaagaccc

SEQ ID NO: 130530 - DNA, 122 bp, Homo sapiens
cctgaatcctgttgaagctggagaggccttggcaaaatggctcatcacgttcaggccctccgggctgagttgtcagcagtatcaagggaggggcctgctctatccccagaaggatcaggatc

SEQ ID NO: 130531 - DNA, 122 bp, Homo sapiens
gtgctgagcagctggccgggatgcggggttggggagttggggcggactgcgctcagatcccggctcccagagagccccagggccggggcgagggcagaggccgggccggggcggggagaggc

SEQ ID NO: 130532 - DNA, 122 bp, Homo sapiens
catgatgcttgttcttataaaactcagtcaaaaatggtagatggaagcccagttgctgcacggcctgcttgggcagacttggcatattggcagggtaggacaaacaaaaactttgtaagttt

SEQ ID NO: 130533 - DNA, 122 bp, Homo sapiens
aagggcgccccggaggggaggaaaggggtgcccgggtgggggtgccgcagggacggattccgggggagcaggccacaagcccacccaccagcccactgtgcctgcccagcagagaaggaggc

SEQ ID NO: 130534 - DNA, 122 bp, Homo sapiens
cccgttttatgtgtgagtctttctgcgtgagaacccggaattcttcatggttccgagggacggatccctgactttgctgttaatagtgttaaggtctgtggtgaggtcccgtgtctcacgag

SEQ ID NO: 130535 - DNA, 122 bp, Homo sapiens
tgtgaccccatccacgtcctgccccagacacccaggagctccagtcctctcccctttccgcggactggaagcttctccagggcttgagatgtccaccttcccagcgattcctgcccgggaga

SEQ ID NO: 130536 - DNA, 122 bp, Homo sapiens
aagcaattcaggctaccctgccttttgtgctggctagtactccggtcggtgtcagcagcacgtggcattgaacattgcaatgtggagcccaaaccacagaaaatggggtgaaattggccaac

SEQ ID NO: 130537 - DNA, 122 bp, Homo sapiens
gggctggcctggggatgtggggtcccggcctgggtgctcacggacggcggcgccaagccccgcagaagctgcaggagcccgagtcagtgggaggaaaaggttgtctcatttccttcgatctc

SEQ ID NO: 130538 - DNA, 122 bp, Homo sapiens
gtttctctctcctcccagagcgccctggtgttcacgtccgtctgaggacggacggtgtggcgacaggtgtggaggatgcagtatggccaggttgctgtgcgttcccccagccccagggcagt

SEQ ID NO: 130539 - DNA, 122 bp, Homo sapiens
ggatgctgggctgaacacaatccctttgccctgttccaagggggctgggagtcaaggagtcgggagctgagaggagtcctcttcatgctgcaaaaaggctagagaaacgtggtgctcttgtc

SEQ ID NO: 130540 - DNA, 122 bp, Homo sapiens
cagggccatactgcactcagctttacatgcagctggtagtccaggtgatacagacacacacgtttccaggcttcaccatggccacctgtctagatctcagaatccagaggcccaaagccaaa

SEQ ID NO: 130541 - DNA, 122 bp, Homo sapiens
cgagctgctcaggcaagagctgaacacgcggtttctggtgcagagcgccgagcggcctggcgcctccctgggcccgggggctctgctgcgggcggagttccatcagcaccagcacacacacc

SEQ ID NO: 130542 - DNA, 122 bp, Homo sapiens
tggagcgagaagggtgggctactgtggggtaacctggggaggagctccgggacccgatcccggcctaggactgggtggagaccctctggctgggtaaaggcgcggcagagctggcgcaacag

SEQ ID NO: 130543 - DNA, 122 bp, Homo sapiens
ttcagtgtggctgaaacacagctttgccccaggctttggcacttccagccccaggagaggcgctgaaccccagcaaaggaatgtgttccctgtgggcagccggtgcccctggtcactgcagt

SEQ ID NO: 130544 - DNA, 122 bp, Homo sapiens
taagtgattgcacagagttcagggcaaagctcagcgaagtgccaagggactggcgggcaccggaactgtaccagctgctctgcagcacacgtgcacacactggttgctctgcaacacacatg

SEQ ID NO: 130545 - DNA, 122 bp, Homo sapiens
cggctggagacgacctgattcttccatccctttcccctgtgtgcaggttttactgggctgcgtgaacttgctggatgattctagaaagctgacaggggcagggatgtgacaccgatttccac

SEQ ID NO: 130546 - DNA, 122 bp, Homo sapiens
gcggcgggcgtgagcgcggcccctgggccccgcgcggcgcggtgctgcgaggaggatcctcgtggccttgccccgccggcggctttccagaattttctacgattacgaagttttggcattca

SEQ ID NO: 130547 - DNA, 122 bp, Homo sapiens
ggctctgagtcatccaaaagggtaagcattctcaactctgcctcctgctccccccagccacggggtgcctggggacattgccatcaccctgtcagcagtgactgtaggcagatggggaaaga

SEQ ID NO: 130548 - DNA, 122 bp, Homo sapiens
tcctctccagttgcaggtcactgtccccatggtatgtgcctgtggggtcgatgccatgttcgtcactgataacctcccaaaactagagagagaggtggtcggaagagttgagagaggggaag

SEQ ID NO: 130549 - DNA, 122 bp, Homo sapiens
gggctgccgggtggcggctgaggttggcagtgccgagctgccccgaggcggcgggaagcgcgcggcgcgggggctagtgggggggtggggaggaggaggaggaaggaggaggaggaggcggt

SEQ ID NO: 130550 - DNA, 122 bp, Homo sapiens
gaggacatttgtcccgtgtctccgggaggggagcgcctttaagccgaaaccccgccctctcggtcgtcctggcaacgcctcccccaacccggggctcccacatttcagcaggtgccggagct

SEQ ID NO: 130551 - DNA, 122 bp, Homo sapiens
gcggagtcgcggtgacccgggagcccaataaatctgcaacccacaatcacgagctgctcccgtaagccccaaggcgacctccagctgtcagcgctgagcacagcgcccagggagagggacag

SEQ ID NO: 130552 - DNA, 122 bp, Homo sapiens
gaacacaagtctgtcaaaaagccagtggatctttggccaaggaagaattattttctactgcgtcacactgattgcaggacttatctgattgcaggattttattactgatttaaaaaataaaa

SEQ ID NO: 130553 - DNA, 122 bp, Homo sapiens
tcctagagctgccttcctgaggctgctctaccaccttccccctaagataggactagattacgctgcgtctccccacaccagcttccttcttccagcctgtgtcaggtaactcaaggccatct

SEQ ID NO: 130554 - DNA, 122 bp, Homo sapiens
tcctgcaggctgttggcactgcccaggctgtcatcgtccaggctgggggagctctgcagccgaccccgcggcgctcccaccccatccagacccccatcctcgcggcccagtccgtgcagccc

SEQ ID NO: 130555 - DNA, 122 bp, Homo sapiens
tggcgggcctgcgcgatcaatccgcaagctccctgtgatgcagaatgggaaggcagttcccggcccaagtgcccaacgtgttctggccagtttaaaccccactgcgaaccggggaagtggcc

SEQ ID NO: 130556 - DNA, 122 bp, Homo sapiens
tcttccttaaatatctgccattaacctgcagggtagaatgagagggggaaaaacaaaagacgtgagaatcaaactaaagacacaaacagccactcagaggcacagcatgcactgtctaattt

SEQ ID NO: 130557 - DNA, 122 bp, Homo sapiens
atgtttttaaaaaaaaacacaattttacatatccccaaataaaatgtgacactactaaaacgtggtgattgaacatggagtgaatggcttttaaatacttctgtgtttgaagtgtaggaggt

SEQ ID NO: 130558 - DNA, 122 bp, Homo sapiens
gattccctccctgccccctgcccccaacaccatgggttgggacgagaagcaaagttaaaccggggtcagacacatgggaggctccaaaagccattcgcagtccggtctattttccacctcgg

SEQ ID NO: 130559 - DNA, 122 bp, Homo sapiens
gggccagagcacgtgatgcttggagcaccacctttactgtgggcacccttctcattcatccgcggtttcacgggccgccacttcgatctccaacaccttgaccgtatgccttcgtgagcgag

SEQ ID NO: 130560 - DNA, 122 bp, Homo sapiens
aggaactcccgagctgagatgcggaaagcaccaggccgtagggacctcaccgcagcgggccgcagctcaggactcggagcaggtgggccacaccatgccgcatgtttccagctgccaccgca

SEQ ID NO: 130561 - DNA, 122 bp, Homo sapiens
cggagcggcgcagacggcggcagtcctgctcagcctctgcccggctccgtactccggccccggcctgcgccctcagaaaggtggggcccgaaccatgagctcctacctggagtacgtgtcat

SEQ ID NO: 130562 - DNA, 122 bp, Homo sapiens
gtgagcacccaggagggtgcagtgctgaagagtcttctgcttggtataggaagaaaggaacgtgtttcccaatcttgcctttattttgagtagttggaccagagggattgcagctgggccaa

SEQ ID NO: 130563 - DNA, 122 bp, Homo sapiens
cccgtgccctcaccaggatcccagacttagagtccctgccctccccgggatcccagggctcgatcctgtgccctccccgggatcccagggctggagcccatgccctccccaggatcccaggg

SEQ ID NO: 130564 - DNA, 122 bp, Homo sapiens
cagtggctgcagcatttaaatgtccggcacttagggagaggggtgcagtcgcggagcagccgctgctcccggcatctagaggggcccaaacccccgcgtgcccaggccgagccccgcgcgca

SEQ ID NO: 130565 - DNA, 122 bp, Homo sapiens
ttattaggtgtgcaaccgtaagggcagcagtgaatggcgcctccaaagggatgatcagaacggaggtgtgagcagcctggcagcaagggtggtaaggccccacagtggactggaggggtgag

SEQ ID NO: 130566 - DNA, 122 bp, Homo sapiens
ggcccgcctcgtcctgcgtgtcgtggttgaactggttgggcatgtgcgtcaggttgtagccgatgccgcggcacatgggcaccgtgatttcctggcacaccggggccttggacgcggcggcc

SEQ ID NO: 130567 - DNA, 122 bp, Homo sapiens
tggcccgcaaggacgagggctgcaagcttgtcaccatcggctccggcaaggtcttcgccacgacaggctatggcatcgccctgcacaagggctcccgctggaagcggcccatcgacctggcg

SEQ ID NO: 130568 - DNA, 122 bp, Homo sapiens
gcaggccgggaggcttctcttttggcttcagccacatgtgaaggagaacctgtcaagctccggctgatgaagtcttcagaagggctcagagtcaagcggcagaactcctggtgccatctgct

SEQ ID NO: 130569 - DNA, 122 bp, Homo sapiens
ccatagttcggggagacccacagggaaaacaaaacaagaaacagagaacttggaaacggacgctgattactttgaacgtttgctcaaccgaggaagcaggaactgttcggccccatctcaag

SEQ ID NO: 130570 - DNA, 122 bp, Homo sapiens
agacccttctttctttcccactctatcctgctgcctggaaaggttatgctgacctgaccacgggctctggctcagtcttggccaagagaacagctcagccataccctagacgtaggatagtg

SEQ ID NO: 130571 - DNA, 122 bp, Homo sapiens
gttgctgtagctatcttaccacagcaaggggagagccaaaaggtgctagaggccatcatacggaacctgaaaatactgccaacacaatggagttcaaagcaaggaaagaaaccaaatccttg

SEQ ID NO: 130572 - DNA, 122 bp, Homo sapiens
tagtgtctgtcctagtctgacgcccaggcccctagccccggcccgcttagtcgcgggggccgctgtcctcccatccagcagtctagcctatttggagggctttctgtttcccagtgggtttt

SEQ ID NO: 130573 - DNA, 122 bp, Homo sapiens
ttttctggaataaatttagagaaaacctaagtgtttcctaggggatgcttaccaactcctcgcccctcccccgcccgccctcttttattttaattgtgactcagggttaaatacaaactact

SEQ ID NO: 130574 - DNA, 122 bp, Homo sapiens
tcaccctcatcccactcacagccgccgctcccagtggttctgtacctccaggccttcacacgtgctgttcccgcatcaaagcactcttgctccgactttctgggtctgctcccccggtcaca

SEQ ID NO: 130575 - DNA, 122 bp, Homo sapiens
atgcccagtccccccacactggcaccaacgcaccggattcatccctccctccctgcccgacgatgcccagtcccaccgcactggcaccaatgcaccggattcatccttcctccctgcccgac

SEQ ID NO: 130576 - DNA, 122 bp, Homo sapiens
gttgtgagcctcagagctaaaatctgctcttgcaacccgaagttctggggtgtgaggctgcggagcgagagcttcggaagcgcccgcgctcacagacacacaccccacaaacacaaacccac

SEQ ID NO: 130577 - DNA, 122 bp, Homo sapiens
ttcgccggtcgctggacaaccggccaattaggtaggaataatccaggccgctgcagaacacgctccccactgcgctgaggagcagcagtttgctgtcgtctgtggctgcgttgcagagcgct

SEQ ID NO: 130578 - DNA, 122 bp, Homo sapiens
cgcggctattccaggcgggccaccacaggggctccaacagggccgtctcccactgcctgacggagccttcgctctgagcagcagctgcagcagcagtgagctcacggcgctggccggccggg

SEQ ID NO: 130579 - DNA, 122 bp, Homo sapiens
gctgtccaccaacgacttcgctggggaggcggccctcggcctaggtggcgtcactggtgtcgcccggccccaggtgggcgggggtgcaagggctgggcagcctgtcaccctgcacctgtgcc

SEQ ID NO: 130580 - DNA, 122 bp, Homo sapiens
ggcctccttcccagaagagctgagagatgcaagggaagccgggtccacggggtcctaccccgtccaatgatgacctaagctgtgcagtcaggcagacagatgccttaatggggccccagcgc

SEQ ID NO: 130581 - DNA, 122 bp, Homo sapiens
cactgcgggggaagttgcaggggacactggaggagacacggtgggctacaccgagacaagcgctaacgtgaagacgatgggataaccagcacggccaagccaggctcctcttgcagttctaa

SEQ ID NO: 130582 - DNA, 122 bp, Homo sapiens
cttctccccaacgccagatgagaactctgaccagaactccaggagctcctcccaggcatccggtgagaaggggctccagggagtggctgcttggctcagggtctcagaggttggagcagggg

SEQ ID NO: 130583 - DNA, 122 bp, Homo sapiens
tgaagtaaatgtcccggtgtcaggagaagcacgacgcggtgacacgctagctaccagcagcgctgcgcgtaaatgagagcaagtagaagtgtagttagctcttcctgctgtcttttcacttt

SEQ ID NO: 130584 - DNA, 122 bp, Homo sapiens
cccgtctcctgtcgcccacaggacccgcgctcgaccctggcgaaggtgcaccggcagcggcgcgacctgctgaacagcgcctgtagccgccactcacgccggcagcgcctgctacagccgga

SEQ ID NO: 130585 - DNA, 122 bp, Homo sapiens
tttttttttgagacagagtctcgctcttgctgcccacattggagtgcagtggtgtgatctcggctcactgcaacctctgcttcccaggttcaagagattctcctgcctcagcctcccgagta

SEQ ID NO: 130586 - DNA, 122 bp, Homo sapiens
cccaggcccctgggacacacgggtggagggaggctcccgtgagcgggcaggctctggcctcggctcccagccctgatctctctggagacgtcacaggccttggtcctactgggtaggccctg

SEQ ID NO: 130587 - DNA, 122 bp, Homo sapiens
ataatatttcctcgttgagcactgaagaaaagatccttttccttataaaaattacagtttcgtggtattttggtcctggcatttattgagcacctgctctgtgcctgcggagcacttctgcc

SEQ ID NO: 130588 - DNA, 122 bp, Homo sapiens
ggctccacaccccgatgtacttcttcctcagccacctttccttggtggacatctgctactcgtccgccatcatccctcagatgctggctgtgctgtgggagcacggcacaaccatctcccag

SEQ ID NO: 130589 - DNA, 122 bp, Homo sapiens
gagctcgctcccggtggacaggaagacctctgcctcatggcacagcacgcggggcttgcccgccgccaggcccccgagagggcagcagaagcccgccaggtagcggacccgcggcgcggcgc

SEQ ID NO: 130590 - DNA, 122 bp, Homo sapiens
cccggcgttctgcctggagggggcgggcagcagggctggccagggtgaagcaacctgtgccgagcggctgcaaaggccgcgtctccccagcacggagcacatcactgacgtcaagcgcggcg

SEQ ID NO: 130591 - DNA, 122 bp, Homo sapiens
ctgagacggcaatgggtgcgccctttgtctagacggcaggagcaggagccaagatttaaacgtcagtgcctcgatccaatttccatgtaaatacactgcctgcgaggtgcgtggactcggga

SEQ ID NO: 130592 - DNA, 122 bp, Homo sapiens
gaagatgaggtttgtcaacccaacaggaacatcctttttcacagaataatctgctcagaacgccaaactatgttttggtcacgctaaactcctgtgttgtggcaagtcatagagtgacagct

SEQ ID NO: 130593 - DNA, 122 bp, Homo sapiens
ggctgccgcagcgtggagcgagcgggatggggcgtgggccgggcctcaggcgcaggcggccgttggcggttggagaagggggaagggtgagggacaggaacctggggggaggggaagaggcg

SEQ ID NO: 130594 - DNA, 122 bp, Homo sapiens
gccgggcctggggacgcgaggcgctgtgagctccctcctgctccgaggagccagggaagtcgccccgccagtgcttagggagggggaagggagccggcgggctgggaggaagacggcttaat

SEQ ID NO: 130595 - DNA, 122 bp, Homo sapiens
cctggaatttcttattacatttctctccaaaaggtatcttgggagtttcttatagggatacgattacagcctagttccaaattgtctcacttttccatcttaaaaaagaaaccataggaact

SEQ ID NO: 130596 - DNA, 122 bp, Homo sapiens
aatgcccggccaatctgatcgccgattggctgctgtttccgccattcatttcagtttatgcgcctgtcactgccacgtcaccccctcccatcgctcttctcatcatccttttccgccctcat

SEQ ID NO: 130597 - DNA, 122 bp, Homo sapiens
tagagggcaggtgaggacgatgtggacctttctagaaatacatgtggatgtttgcaaatgcgaaactgactggtggaaagggtgaacatgaactgatgatggaagtctggccctcatggacc

SEQ ID NO: 130598 - DNA, 122 bp, Homo sapiens
cctgggccctcgaatccagattgggcaggagacggtgatcacggtggatgccaaggcagccggtgaggggaaggtgacatgcacggtgtccacgccggatggggcagagctcgatgtggatg

SEQ ID NO: 130599 - DNA, 122 bp, Homo sapiens
acccggccatcagtcgctggagtattgattactgagcaattctagccgatcgggttcgggcgcttcagagacaatgtgcttccctcacaaaacctgtaatgagcagttcctatacaagacta

SEQ ID NO: 130600 - DNA, 122 bp, Homo sapiens
cccgcccccgccgcgtacctgaggctcccgccgagacgcgctcctgggccgtcgcagccgcgcggtgacatcagagccccgggctctgactccgaccccacctccaggctccggccgcggcc

SEQ ID NO: 130601 - DNA, 122 bp, Homo sapiens
ggaaatgaaggtgtttgaaaagttacccagtcaggtggtgggagagccaggcccggtgcccggcagtcttgctgctgagctgctgtcactgttctgcctttgtggtcttcacagggttgctc

SEQ ID NO: 130602 - DNA, 122 bp, Homo sapiens
agcaagctgtgtttacacaaaccctcttggtgattctgatacactcctaagttggagaaccgcatgttctgactacatgaggtagggtgggtcttcccatacataaaatgggagttagacac

SEQ ID NO: 130603 - DNA, 122 bp, Homo sapiens
ctcaggcgcggccctgctgccacccccttgggggctcggagcgcgacagcagcttggggacgcctcccgcgcccagcacggtgcacctgggccctgaggtcctggccgaaacgcgccaagtt

SEQ ID NO: 130604 - DNA, 122 bp, Homo sapiens
ggggatagtggtgcgaaatagccctgcttccctgcagagcattgggaaggacccaggaaccgaatgccagaggtggcggggagtcagggagctgtgagccatctggctgctgctgttctgag

SEQ ID NO: 130605 - DNA, 122 bp, Homo sapiens
atactactgcggaattcctgttaaacgcgctgatttaataaagtcttcggtttatccaaacgggctacacaaatgattaatccaaactccaaagacctagaaagaacaggcggggccgggtt

SEQ ID NO: 130606 - DNA, 122 bp, Homo sapiens
tctgagcacacttgaacctcacacccgccccaggggtagctccttggttcccttcagccccgatgtgtccctcgtgctttgaaatggaattacagttttggttaaaaacatgccttttccga

SEQ ID NO: 130607 - DNA, 122 bp, Homo sapiens
tgaaggcgggtaagaggtcctgccgcccgaggaagacgcgggagggaggcccgcccctcgcgaatcccgcggctcctggagccctgccgcccgccccctgcgaacccaggccccgccgccaa

SEQ ID NO: 130608 - DNA, 122 bp, Homo sapiens
gttctgcaaaccctccctacggcggctctcgggtcctggagcgagacgccgggtgcacgacgccagaatcactgaggtgccggctccccgcggtgaaggctccaaggaacgcgcctgggccc

SEQ ID NO: 130609 - DNA, 122 bp, Homo sapiens
taacacgtctgattcatgaggttgtaagttctcctgcagaacaagaagatagaaaactaccgcttttatccccacggagtcatctctggggaataaagaacgctcacagaaagaagagacag

SEQ ID NO: 130610 - DNA, 122 bp, Homo sapiens
ctccgtggattggtttgtaatatcccagcagagtgcagggggctccagggcccgcaaggccgcgcctattagcatgtacgtgacacaggaccatccgcagaacattttattgtcttcaattt

SEQ ID NO: 130611 - DNA, 122 bp, Homo sapiens
gaagtctttcccaatctcacagagaaagccctagtatttcccagtgaccccaggattccacgttggggtggccaaagaaataggtctctcagggctttgccacagcctccagcccatccttc

SEQ ID NO: 130612 - DNA, 122 bp, Homo sapiens
ttttaatgaatctacttcaccctgtccttaaatcctctcacgtcaatcctctacctctgccgtctgattatgctacactccctcatggagaaccctctggtggcgcccttccatgtaccttg

SEQ ID NO: 130613 - DNA, 122 bp, Homo sapiens
gataaaggagccgaggccaagaggggagagagaccccgccccccttaagaagagaagccgcggcccctgcaggacgggggtaagaacaagagactgagggagccagactcctgggtccccca

SEQ ID NO: 130614 - DNA, 122 bp, Homo sapiens
tttctttgtattgtctttttttttttttttttactttcttccaattaaataacccagtttcgatcatgaaaagggcacttgtttctacaggagctgtgtccagcttcctcagttccaagtac

SEQ ID NO: 130615 - DNA, 122 bp, Homo sapiens
gagatagctgggccagcctggctcccgccagttcgtacagcagaacaaatgcgtccagctcgatggctgaagtgctgcaacaggtggctggcagaggctgacttcatcactcaggcatcatt

SEQ ID NO: 130616 - DNA, 122 bp, Homo sapiens
aggcaggagatgcacattttcttttaaacggctttcttgtctgcctctctgcggagtgaacgtgctctgaggcaggaagtccacagggccttttccaaccatcctccaggggcccgcaggga

SEQ ID NO: 130617 - DNA, 122 bp, Homo sapiens
ccagcgtgctcagtgggtgttgctgtggccaaggcccagtgcttctgggctggctgagggcggctttgctggggttgtccagggccagactggggctgggctaggacccgcccgggctgcat

SEQ ID NO: 130618 - DNA, 122 bp, Homo sapiens
gcaggagcgagagccggctcgctccgctgggtcccgcttgggttcaggacgtcaacgtagcgagctctggttcctgctgcaaaggggagggaagcaaattgaggtgaacgcgccaggtggcc

SEQ ID NO: 130619 - DNA, 122 bp, Homo sapiens
gtccatgcggccgggcgggagggcgccccgggccccgcaccctcccgcccgcacaccccgcgcggcccgccaaggccacttacttttggggccgccgacctcccaattccctcagagggaaa

SEQ ID NO: 130620 - DNA, 122 bp, Homo sapiens
gccaggaacagagctcagaaagagaagattccaggggcgaagggatggggacaggggtttcggttttgcatacatgacatctgtggggcctgttgcatctccagatggagacttctggtgag

SEQ ID NO: 130621 - DNA, 122 bp, Homo sapiens
tggccaccctctgtgtggtctccctgaaaattggtggttctcaccagcagcttctcggttcgtcagctccactgccctctgcccatacttcccactgtcagcctccttcccctcccaccccc

SEQ ID NO: 130622 - DNA, 122 bp, Homo sapiens
gagatgggaggatggcttgagcccaggagtttgagaccagcctgggcaacatggcaaaaccgtctctacaaaaaatacaacaagttagctcagtgtggtggtgtgcacctgtagtcccagct

SEQ ID NO: 130623 - DNA, 122 bp, Homo sapiens
cgttccctgggggcggtccctccttacctggtaacacaggatggtttgctgcaccagccgcgcgtacccgtccaagcggaccccggaattgctcctgctccgcatctccccgaggctcccag

SEQ ID NO: 130624 - DNA, 122 bp, Homo sapiens
tccagagccggcagggtgtccgctgtgctcctgatccagcgaggcgcccattgccactcccgatggatcaggctaaggtcttgccattgtttctgcatggctaagtgcctcagttcgtccta

SEQ ID NO: 130625 - DNA, 122 bp, Homo sapiens
aatgtggttggtaggggtaggttggtaggtaaggctgtgtggggaaacaaccaacagagccgtttctggaagtaggaaaactgaaagcagatgtccttgtctccttgtctccagtgttcttc

SEQ ID NO: 130626 - DNA, 122 bp, Homo sapiens
aaaaaccactgagtgtaccattttttattctcaaggggcttgtcagcacagcccgctggtcggaagtgctaagctggagaaaagccccactgtggtcaggacactgccacttcccaggtgac

SEQ ID NO: 130627 - DNA, 122 bp, Homo sapiens
acctcgtgatctgcccgtctcggcctcccaaagtgttgggattacaggcatgagccactgcgcccagcctcaactatttcttgacatgtggatcaaaaaaggaattaaggagaagaattttt

SEQ ID NO: 130628 - DNA, 122 bp, Homo sapiens
ctcgcggcccggcctgacctgttaatcacgtccccacggctcttctagcggggacaccgccgtctgcaggctccgtccccaccgtgcccagaccccgggaagtttgtcagtcagcaccctga

SEQ ID NO: 130629 - DNA, 122 bp, Homo sapiens
aatgctttgcctttagccactagcggagccgcccgcctgagggagccctccgggagtgagcgcacgcaaccgtgcagtcagattcctccgccgaccgcggccctctctcctcgggctttgcc

SEQ ID NO: 130630 - DNA, 122 bp, Homo sapiens
caggaagacagtactggctggactcacggaggaagctgcgcgacaggagacgggcggcggcgaggccgctgctgccggagaccatggtagcgatgtcagcggcagcggcaagggttgcggtc

SEQ ID NO: 130631 - DNA, 122 bp, Homo sapiens
agctcacaaagatacaccccctactcagaggcatatggcatacctcagacacggccaattcgaagatgtaaaccccaccacacataaacatccagcctacaccccaactcaaacacacactc

SEQ ID NO: 130632 - DNA, 122 bp, Homo sapiens
gagatgggaaatttagacttattttagacattcagttttaaacatgttgtattgaagtatcgttgacataagcaaacaaaggaatcaaatagttaagatgttgagaacagccctgaggagag

SEQ ID NO: 130633 - DNA, 122 bp, Homo sapiens
aggctggggaaggggcgggtgggagcgggagacgccctgggaagccgtgagaccgctcggcgagggctcgggaccaccagggagcgacgggggacccctcggctcagagcccgagggcgcga

SEQ ID NO: 130634 - DNA, 122 bp, Homo sapiens
gcagatggtcagatcccaagaagttctaaactctgtcagatcttattccacagcctccagcgaaagtacttacccatgactcactgcctttaaagggtaaaaacacattttgctgtatgtct

SEQ ID NO: 130635 - DNA, 122 bp, Homo sapiens
ggcctccgcccgcgtccatctgcccgccgcccgcgcctgttccgcagcccgcgtccgcgccggccccacagctctgcgtccgggtaagcccccaccccgcctggggtccccctcgcgctcgc

SEQ ID NO: 130636 - DNA, 122 bp, Homo sapiens
aaatgccatagctacaggactcaggcctgatgagcttccagctgagcactgggtgtcactcgggctttacctgcttatcttcaggatctctcttctggttaggaaccctatgcctattttgc

SEQ ID NO: 130637 - DNA, 122 bp, Homo sapiens
acctttgcattgtggggcgggaagttttctgtggccatctccggcgttctttataggcagcggcctagccgagagaaactacaactcccggcagggttcgtgcttgctcgtcgcgatttcgc

SEQ ID NO: 130638 - DNA, 122 bp, Homo sapiens
ccacctttctatccgtgacaaaggtttggatcccaagacactaaacccagaccttaatgacgttgccattagggctccgaattaagcaaaccgcatccccattaaagaagaattgattctgg

SEQ ID NO: 130639 - DNA, 122 bp, Homo sapiens
ccaatggtgaggatgggaaatacgcacgtcattacccgatgggacggtgccagctcccctcgtccaccgacgtgggcccgagctagggttctgagccggatccggggggaaccgcgcgtcta

SEQ ID NO: 130640 - DNA, 122 bp, Homo sapiens
cctgctcgcctgtgcgggtgaccacggactcgctggggggcccctggccgatggagttgacggccgacacccagatctcgtactccgagttggggctcaggccgccgatgctgtaacgtgtg

SEQ ID NO: 130641 - DNA, 122 bp, Homo sapiens
tgtggttgtgtttgtcagggtgatgttgtgtgtccatggaactgtgtgtctaatagattgcgtgtatgcaatattgtctctcactgtgcttgaatgtgtcactgttgcgattgtatcactgt

SEQ ID NO: 130642 - DNA, 122 bp, Homo sapiens
aggcagatgactttggcaaggggtggtgtggcgggggctggggttactccgtctgggcgtcgtaattggctccccccgccttcttcagctcgctcttgatgaaatcttcctccagctccttc

SEQ ID NO: 130643 - DNA, 122 bp, Homo sapiens
tggactcaagcgatcctccctcctcggcatccctggactataggcgtgagccaccgcttacgggcgaagacttgcttgtccgtgtccttgccatctaagtgggtaagctatctttcgataaa

SEQ ID NO: 130644 - DNA, 122 bp, Homo sapiens
tcgcctgcccccgggcagctctggcagaggaagcctggccctggcgcgtctcctcaggagcgctcatgacgggcacgggcgtcacaaacacaccaacagaaacaacctgtttccatcgcaag

SEQ ID NO: 130645 - DNA, 122 bp, Homo sapiens
gggagtgaagtattccagatggaagaggcagtacgtggccaagaggaaacagaccatgtgcgctggagaaaaaggatggccagacttgcagaaacctggaattggtgattggctttagaagt

SEQ ID NO: 130646 - DNA, 122 bp, Homo sapiens
aaaggtaaactgaagggataagcaagagcacagccatacaaacgccatcacgaggcagcacgctgacaaccgctgaatggtgggatgggcagatgagccccttttgcgttctaaagagaagt

SEQ ID NO: 130647 - DNA, 122 bp, Homo sapiens
aataagaattagtttagattttctaatctaacccagtttttctagatcttctagtctagccggaagaagaaaaaaagatgtgttggtatgtgcatgtatgggcacggtttttcataaatgat

SEQ ID NO: 130648 - DNA, 122 bp, Homo sapiens
atgtggccaccgagtgggaactcatccacttttgccttctttctacccaggtcaaagatgcggatcttggcatcaggaacccctcggcagaaacgagattttgggtacggcttgttcttaca

SEQ ID NO: 130649 - DNA, 122 bp, Homo sapiens
tccaggaccgcagctccggctggcccgcgccgccattttggattgtgtgagtttccgggacgttcggagggtggcctctctcccaccgggttccgcataccccaggcaccggcccgcatcca

SEQ ID NO: 130650 - DNA, 122 bp, Homo sapiens
agtttgtatgcagaagcaaggcctcctgataacttcctgttgattcaatagcgtctacaccgaccatctgagtattcagagggcagagacccatgcaagtcactccttcagcccctagactt

SEQ ID NO: 130651 - DNA, 122 bp, Homo sapiens
gcagaaagccaagaagctccctagtttacttcatggagcccaaaagacaacaactggtgccgacaggtgcctttggaagttagtgtaaagcagggctaacaccaggagaattggtcaaaatt

SEQ ID NO: 130652 - DNA, 122 bp, Homo sapiens
ctgcaacatcaccgacaaagagcatgaaaatgtgaatgacaggactctaaaaagaacgcacgtttactccgagagcggaaacaagaaggcgggtgcggcctcactccttcccggccaggcac

SEQ ID NO: 130653 - DNA, 122 bp, Homo sapiens
cgtccccgccggtgtccggccggctggccttaaaggggacgcggtcagagtggcagctcgcggggtggcccccgctccggctccgccccatttcacgcacctcgcccctccccatgcttcat

SEQ ID NO: 130654 - DNA, 122 bp, Homo sapiens
aaaagaagagaagtgggcgagggtcccagcatccagtttgctgtattcaattaatcctcacgtttcctgtatactcccatgctcaactgtgtatcatatcttctcagtctagacagacactc

SEQ ID NO: 130655 - DNA, 122 bp, Homo sapiens
gattctcgacactcacagagagcttgaggagtccgaggatcccgagaaacacgagaatcccgaggaacccgaggaggtcagggagcaagaccagagagacgagtccgaggaatgtgatgagc

SEQ ID NO: 130656 - DNA, 122 bp, Homo sapiens
acagacactggcaattctgccctggatcccccctttctgagactctgggacaattcatgccgaaaccgacgagagaaaatgcagtctcatgatcaaattcgccaggcacatttaaaatcatc

SEQ ID NO: 130657 - DNA, 122 bp, Homo sapiens
cccaggtggaggcagtcataagcattataagccgccttagtgaccaccagggacggaaaccgttaattatcacgtttcctttcatctccaggggccctttggcccgtgacacaagaggcttc

SEQ ID NO: 130658 - DNA, 122 bp, Homo sapiens
tgggattcatggtgtgagtctccaggaagtcagcttaggctggaggaagagccctttttgcggagtggaaaggaggtgtgctccagaaagccttgcacacactgcaaggaggaaggcgggga

SEQ ID NO: 130659 - DNA, 122 bp, Homo sapiens
atcttatctggaaacggtcttcgctgacgtcatcaaggtaagaggaggtagtgcgggagtcgggtgggctctgagccaaacatggtatgtccttcttagaagatgagacacagagacacacg

SEQ ID NO: 130660 - DNA, 122 bp, Homo sapiens
ccggcggcgtctgccgtgcaagacctggcccagtggagcagagcctggaggttcaggagccgggtctggaaggctccttccggtggaagaggggcccggagccagccggcgcctggcacaag

SEQ ID NO: 130661 - DNA, 122 bp, Homo sapiens
aggcctcctggaacttcctggacagcttctcgatgacgctgtagctctccacgtaatcgacgtgttcgtcctgcggctcgctggcgatctgccgcagcgtggccttgtccacgctgcccact

SEQ ID NO: 130662 - DNA, 122 bp, Homo sapiens
catcatcacctccctccagtctgcgtcatcgcggtccatactccacaccgtattgtacatcgcgctgtcaggggcaggtcgccaggagatatatagaaggcatatattttttatctggtatt

SEQ ID NO: 130663 - DNA, 122 bp, Homo sapiens
ggcgccgctgtccccagcgcacccccactctgccctggcggtcacactcgcccccgactgcgaccccgccccgccgctagcctggctgccttcctacgtcccccacattgtatcctcatccc

SEQ ID NO: 130664 - DNA, 122 bp, Homo sapiens
gcaccgtcctccagtttgtgaccaacctcaccaaagagtttgagatttccgacacggacacgcgcatcggggccgtgcagtacacctacgaacagcggctggagtttgggttcgacaagtac

SEQ ID NO: 130665 - DNA, 122 bp, Homo sapiens
tctctctcaaatgagtggggctcttatcagttatgaagggacttcccttgggacttgtcacgacaccatacagcagagatggcaatttgagggcagtttcttgttctgctttgccatcttgg

SEQ ID NO: 130666 - DNA, 122 bp, Homo sapiens
gccgcgttagagccatgtttcccttagtgcgggagaagcgcacatcagtgacgtcacggacgcgccgcgacctcgcgtacggtggctggcgaggctcagtacggtgtgtggagctggagcac

SEQ ID NO: 130667 - DNA, 122 bp, Homo sapiens
tgcccgcgcctgggtgtgcccctcagtgggtccctcggccggcctgctgtgcttttatgtcggtctccgattgtcctggagggtctgtgcctgtctgtgctcatctgcctccttagccccga

SEQ ID NO: 130668 - DNA, 122 bp, Homo sapiens
agcaactcggggaggagccaagatttgtaaaccaagatgcgtctgagacagatctcaatccgtttagtggtttattttgtcatggttgaggatgcccacaggaaaaaaaaaagagacacaag

SEQ ID NO: 130669 - DNA, 122 bp, Homo sapiens
atcctgggctcagagaccagaagggtggtgggtggcctggggagctgcagtgcgcagccccggggtgctgggcggccgcccctccctgggcgggccgtccactcctcacctcctgcttgccc

SEQ ID NO: 130670 - DNA, 122 bp, Homo sapiens
agcaaagccatcacgtgggccggatccctcctgcctcttggctccgcccgggcctctgagcggccctggcctccagacacaaccgctcctgggaagccgtctgagggcagccattgggcgtg

SEQ ID NO: 130671 - DNA, 122 bp, Homo sapiens
cccagtaggggcggccgggcagaggtgcccctcacctcctggatagggcggctggcagggcggggggctgtcccccccacctccctcccggacggggcggctggccgggcagaggggtcctc

SEQ ID NO: 130672 - DNA, 122 bp, Homo sapiens
agtgaggaagcagcaggtgatctgccttacttcactttatcctctggttttagggccagacgccagaagccatgtgtcaattttaccctttcttttttttttttttctttttttttttaaac

SEQ ID NO: 130673 - DNA, 122 bp, Homo sapiens
gtggttgttttcttttctctcagggtttcgtggctgtcccaacaaaaaatcccgatggcacgatgaacctcatgaactgggagtgcgccattccaggaaagaaaggggtaaggggcgctgcc

SEQ ID NO: 130674 - DNA, 122 bp, Homo sapiens
ggtagatgaaatctcacaggtagcagccctcagaaagaattgatggtaaatacttcttttcgacctttaaaggtgtcagagcctcagttaattgttcctaaatctaaagagaagccccacat

SEQ ID NO: 130675 - DNA, 122 bp, Homo sapiens
agtgacagactgctggaaccagaccccaatctcacagctgcagcaaaagagccaggcagacgcagctgaaatctggccaaagactctcaggctccagggaaattaacctacccaatatgcaa

SEQ ID NO: 130676 - DNA, 122 bp, Homo sapiens
ccctgccctttgcctcgttgttcactgtggcctggcagggacagcgggagaggtgagccccggccgagagccagtacttatcagtgccaattctgccccagatgctgagctaccactttgcc

SEQ ID NO: 130677 - DNA, 122 bp, Homo sapiens
aagtgccttttgtaggctcttgcttcagaatgcaagctcattcatgaagaaatgtaccaacgtttctgtcattaaatacaaaattatgctgtctgatctgtctgattaaacctttaatgaaa

SEQ ID NO: 130678 - DNA, 122 bp, Homo sapiens
gcagggaggcttgaaatgggaggttgaggcgcccgtggtgtggcaggaaaacagaaacggcgtggcagaggtcctaccctacaggcaaaagtgcctgtccacagcgcatgcgcgggggccag

SEQ ID NO: 130679 - DNA, 122 bp, Homo sapiens
acagacaggaatgaaccccgtgaaccaaccagtggatccagcatatgagcctctgccaaacggtccacgcagagccgcagccacgttcctctcgagaggagagcgagacattctccagggtg

SEQ ID NO: 130680 - DNA, 122 bp, Homo sapiens
ctctgcgctggcggctgtggggggcaggcgctcaggaccccaattccctccaagttgggccgcggtgggggcgggtggaggtggcgccgggcagctggcggccgctcgctggggctgggttt

SEQ ID NO: 130681 - DNA, 122 bp, Homo sapiens
gcccggactgaggctcaggctgaggccgcccggagtcgccgccgccgccgcgccgagggccgagtcgcgctgacttttaggttccggctgctgttcttccatgctcggccgccccgccgccc

SEQ ID NO: 130682 - DNA, 122 bp, Homo sapiens
cagaggctccgaggactttgtagcgactgtcccaagcgtccagttcgatgcttctcagggcggcttgctttaagggcccacccctaaatttgggttgtaaaaatttttgaggtaatgcttgt

SEQ ID NO: 130683 - DNA, 122 bp, Homo sapiens
gctgggattacaggcgtaagccaccgcgcccggcctgacagcttttatccagaaaactgtcgccagtaaaggttcccgtctcagtaaactgtaaacgacagtaggcccacagaaggttctaa

SEQ ID NO: 130684 - DNA, 122 bp, Homo sapiens
ctccccgccacactgcctcaactccctcaccccctcccaaaggcagagaactagcagggccggcttcctccaggaaaggctcccaggcctagctgggagcacacaattgaccctcagcccct

SEQ ID NO: 130685 - DNA, 122 bp, Homo sapiens
cctctccctggtgtttaaagggcgtcggtgcacgtacagcgagggcttacatccactttacgggatccggagcggaggaaaagggccatttctcttcccttatctgtttatgatgcgatatg

SEQ ID NO: 130686 - DNA, 122 bp, Homo sapiens
aatataatgctgtgtattcaatagatggttaataagtgcaaattaaaccagtaagtgtctcgtcaatgtagctttggaaagctgcagaagggatagtgaaaacatgggtgggtcctgggatt

SEQ ID NO: 130687 - DNA, 122 bp, Homo sapiens
ctcgtgcgccacctccaggcctggacgctgccctccgtcttctgcccccaataggtgcgccggaccttcaggccctggggtgaattcagctgctcctacatcagcttccggaaccaccaaaa

SEQ ID NO: 130688 - DNA, 122 bp, Homo sapiens
gctgccgctcgcagatcagacaggtccggatgcccttgcaaccgcattcccgaaggacttcgggggtctcggcggcagccgccgccatcgcgccgtccgcgtggccagtgcgcaggcgcggc

SEQ ID NO: 130689 - DNA, 122 bp, Homo sapiens
tgctgcttttagcaacacctgaagaataggctgggtaatattccatagcctgcaatgccccgtggtactctggagaaaagcactctactccagggctgggccagataccaagtgattcatgc

SEQ ID NO: 130690 - DNA, 122 bp, Homo sapiens
ctgtttccccagaggaccccttaccttgtttttgttgttcagagctgaggcaggaagccccgtaggaaacccgattaggtgaagcatcttcaagtccgattagaccacaggtagtcattaga

SEQ ID NO: 130691 - DNA, 122 bp, Homo sapiens
aagaggtagcgtggccgagcggtctaaggcgctggattaaggctccagtctcttcgggggcgtgggttcgaatcccaccgctgccagtttgtggtagttttgtcacttttgtcccctatggg

SEQ ID NO: 130692 - DNA, 122 bp, Homo sapiens
acccctccgccacttctgggggctgacccagagccacacgtctcatccacccgaaggcgacggcaccaggcagtgaggacacacgaccgccaccctgtggtcatcacgcaccctccagcccc

SEQ ID NO: 130693 - DNA, 122 bp, Homo sapiens
ggactccgcctgacccgggtgcctcacccttcggagcccatctcgcgtagcgggaagctgcgcagaccccgcaccagcacttcagcttccccgggcagcagcagttccaggtctcccatatc

SEQ ID NO: 130694 - DNA, 122 bp, Homo sapiens
aagctcctggagcaggctcctacaggccgactgtgggctgctctctgctgcgagaagctccgggtgtgtctgtggtctgagtcccacatgggacattccagcacagccatggctattgtgag

SEQ ID NO: 130695 - DNA, 122 bp, Homo sapiens
tcgggtcacggcccttaacaatagcttactcgggtgactcggcatgtgccaccatcagagcggttggcattcatcattactctcagatgtccctaccaacacaggcttcatcagaggcaggg

SEQ ID NO: 130696 - DNA, 122 bp, Homo sapiens
agtgagcaaagatagctaaatggcattattcagcccagcgcatgaacggctcagattgcccgcgcgctggggtgccccctgccggccctcggcagcgcctcgtcctgggcctggccctgggc

SEQ ID NO: 130697 - DNA, 122 bp, Homo sapiens
gttcaattcttcatcctctatttgcaagagctaatcatagtgaagggtgcacgaagcaaccgttctttgtgttcagagtgaaataatggcttgtcatccctgagagtacgaaggctctgtac

SEQ ID NO: 130698 - DNA, 122 bp, Homo sapiens
tacttgtttaaaagtcatgagcaatttgaatatgttttgtttgcccttgcaaaaggatgacggtgcattgttttaggcaattctatttaagaagtgtcctttttaacactggttaggttgag

SEQ ID NO: 130699 - DNA, 122 bp, Homo sapiens
aggaagaagcccgcacggggtcacggggccgactgcggcacagacattggaactcgaccgcgcgtgttcccggagtctgagtcgttttgaattatgtcacgcaggggccttcggtgggagga

SEQ ID NO: 130700 - DNA, 122 bp, Homo sapiens
atggagaagccgtcgtacatgacatagaagacgtacatgaaggcggcttcgaagatgacccggaagaagatgctgcttgtgtaggtccaccacagggagccttcgatgcggaccttctgggt

SEQ ID NO: 130701 - DNA, 122 bp, Homo sapiens
gaacagaggaggaggcctgagacagctgcagagagaccctgtgttccctgtgaggtgaagcgtctgctgtcaaagccggttggcgctgagaagaggtaccgggggcagcacccgcctcctgg

SEQ ID NO: 130702 - DNA, 122 bp, Homo sapiens
ggaaaggtccaggtcagggaaggggtacgcagtgggccgggactggggcgcgagggtggacgccgaaaggcatggagtctgcaggccgcactgtcccgcccctgtcactgcgggcgaggcct

SEQ ID NO: 130703 - DNA, 122 bp, Homo sapiens
catggcccgtgaccacataccaagagtggtgccaagagaggtaggcggccctggcagctgcgggagggggcagctgtctgcagcccaggccagagaataggggcttctttattcctgcccac

SEQ ID NO: 130704 - DNA, 122 bp, Homo sapiens
cgggggtgccggggtggggaaagcacagaatcttcttgaggccctgggctgagtgaggggcgcacaggaggcgggagctgcacgggtgactgtggggtggcggccgtggccagagcgcaggg

SEQ ID NO: 130705 - DNA, 122 bp, Homo sapiens
gctgtggccgcacgccctgctgggacttgtagtccactcccgagtcccattcccgatccgcgcagactcacacggcctctatctgcccttcggtcttgctgaagcccagcccagtattcaat

SEQ ID NO: 130706 - DNA, 122 bp, Homo sapiens
tccaccgcccgcatcctgaccccctggtagccacaatgctgcaattgatgtgctgattcacgaaacaacacctattgagcacctgctgtgctgaacactgtcctaccttccaggggtggagc

SEQ ID NO: 130707 - DNA, 122 bp, Homo sapiens
acgagtctggttcagaaaaggtcaggtcggaacccacccagagacaccggctctaggcagcgtgatccgaacaataatttgttctcgccaaagtgacatttttccaatttgagtccagcatt

SEQ ID NO: 130708 - DNA, 122 bp, Homo sapiens
tttttcctacaggaagatgagtctttccctggatcaagtgtgggagaaagaggggaagaccgtggaactggttctgagcaaaagtgtaagttacactattatggaaaagatctatgcacatt

SEQ ID NO: 130709 - DNA, 122 bp, Homo sapiens
tcctttaatgccgaccttcgcaggattctgttcgcatagcccggtggagttctccagccccgcgtaggccctcctgaaatttacccagagtgggcgcggccatcccggcctcgggacagggg

SEQ ID NO: 130710 - DNA, 122 bp, Homo sapiens
ggcacagcccgagccgcacctggggcccaattagcctggagcgcggccgggtgtgttgaacgtagcaaccgcgggcggcgggcggcgggcggcgggcgtctggggcgggcggcggccgcgct

SEQ ID NO: 130711 - DNA, 122 bp, Homo sapiens
ccgcactgaggcggctgcagtgctgacaccactcagggcaagggtgtccgacggctggagcggtgagtgggggaggtgaagcgggcatccgcggggagactttcccccgctgctggatttct

SEQ ID NO: 130712 - DNA, 122 bp, Homo sapiens
tggggccagaaagagcttctcctcatatttggaatggatccagcgttccttctcttccctcgtggactttattgagggttttgtctgcccctggctgctcccttcccagatgctgttggcta

SEQ ID NO: 130713 - DNA, 122 bp, Homo sapiens
caaagcatgttcctctgaaggccaggaaaataaatcagaacagcccctggcttggaggagcggtgtctagactccctgttgagtctatagttttcctttgttagacaacagtttgggccatt

SEQ ID NO: 130714 - DNA, 122 bp, Homo sapiens
cggtgaggcttcaggccacgcatgcttccttcattcaaactggcactcactgcggcacaccggccctttttgagcacctgggtgcaaagacaaaatgaacagtcattgcttttgctttcgga

SEQ ID NO: 130715 - DNA, 122 bp, Homo sapiens
tctcgtgaatggcttttgtggccagtttcttcccggatgcttttccacgggttggattttcgagtagtgtgctttgtaggaaccgtggtatggacacctccttactttcccccttctccttc

SEQ ID NO: 130716 - DNA, 122 bp, Homo sapiens
ggccaggacccagcagctattgctggccactctgcaggaggcagcgaccacgcaggagaacgtggcctggaggaagaactggatggttggcggcgaaggcggcgccggcgggaggtcaccgt

SEQ ID NO: 130717 - DNA, 122 bp, Homo sapiens
tgcaaacaagctgcaacagcgggctcggcgggaggaaggagaaagaaggggaggcggcagcggaggaggagcagggcacataaaccagggcacttcagttgtctcatgtttccttctgttga

SEQ ID NO: 130718 - DNA, 122 bp, Homo sapiens
gccgcgtacaggagggagggtgctcactggtccaggtgagcacgatggcggcgggaccagcggccggaactgggagggggagacgcctctggggagacgtccaaggtggagccagcggagag

SEQ ID NO: 130719 - DNA, 122 bp, Homo sapiens
taggcccaggtatacagcacactcaagaagctcccaagaggtttttatgattgagaataccggtgaagtgatttgccccaatctggtccagctctgagccactcccagcacccaggtgaagg

SEQ ID NO: 130720 - DNA, 122 bp, Homo sapiens
catgtggggtgtgtggcacgctagcgtggagctcatctgaacggacccaggaggcctgctcgtggctcttcaggagttctcatgggcaaatggcaccaggcacacagcaattgctgagggtc

SEQ ID NO: 130721 - DNA, 122 bp, Homo sapiens
cagaccccctcggacagtaatctgtctcggatttcccaagcaaagatggacgggcactcccgcttatactgggctattttgcttacaacttctggagtcgctactctcggtttactaccacc

SEQ ID NO: 130722 - DNA, 122 bp, Homo sapiens
tcgcagcctttcgcttttatttttgcacattcgctttttatttgccggtggtgctgctgacgggccctcggagcggggctgtgtctggacacttctgggagccttggacggctctggagagg

SEQ ID NO: 130723 - DNA, 122 bp, Homo sapiens
gcagtgagggagagtgaggatggcagagaccagtgccctgcccactggcttcggggagctcgaggtgctggctgtggggatggtgctactggtggaaggtgagccaggcagaacctggggtg

SEQ ID NO: 130724 - DNA, 122 bp, Homo sapiens
atagccttattggtgaggttggtgattatgagtttgtacaggtaataagaagcagccactcgtttaatattgaggatcccttctgtgctctgcactggggaattagaaaaggtgtggatgga

SEQ ID NO: 130725 - DNA, 122 bp, Homo sapiens
ttcaggtcctgctcctgggactcagcgctgcgcctctgggaagggccggtccaggagctccgcaagttgcgggagaacctggcgggtccgtggtccagcgaggcctgggattcagaagggat

SEQ ID NO: 130726 - DNA, 122 bp, Homo sapiens
catgaccataacacatcaaaaagttgactttttgcagctcggctgtgcctcatcttcccacgaagccccgacaggcacatccagtgaggaaccacagtgggagtcctgtggcagggtcaccc

SEQ ID NO: 130727 - DNA, 122 bp, Homo sapiens
cagcccttcctcgcaggcctggccggggcaacccagtgggcctgatgctgcctggcacctcgaggccccagagccagtgagcagacgctcgctcgcccatctccctagagtcccgctgtgca

SEQ ID NO: 130728 - DNA, 122 bp, Homo sapiens
cgggctgcgcgggccggaaccgcgccagcccagcgggctgaagccgggcagaggcagggacgcatcctggccccctgcagccccgaagtgggggccttcagggagggaagtctgcagtgact

SEQ ID NO: 130729 - DNA, 122 bp, Homo sapiens
ctgacaaagaaggagggggagaaggagaaagaggaagacgaagaagaaaagaagaagagacggagatgtttgtatttttgtagtccaagttcttacagaacagagttcctggttaggcaagg

SEQ ID NO: 130730 - DNA, 122 bp, Homo sapiens
cacaggggagcggctggatggggaggcggggcggcgcactcgtgggccagaggccgagctcgtggtcatgcggcggctgcacctgtccgagcgccgagactccttcaagaagcaggaggccg

SEQ ID NO: 130731 - DNA, 122 bp, Homo sapiens
cgcgcgtctgcgctaaagcgcaggcaccgctgagcccagtgaaactacaactcccagtgacgccacagcgacgggcgttgcccggcgggggatggactgcgcgccgccttccgaccagcagc

SEQ ID NO: 130732 - DNA, 122 bp, Homo sapiens
ttagcttgtttgaaacttgaaaagatgttgggcttaatttactggcagtgaggagacactcggggtttctttttggcataggaatagcatgatgtgcattatgtatgtagagttgcacatta

SEQ ID NO: 130733 - DNA, 122 bp, Homo sapiens
cttctctttgccggtctggtgcactggcttcttcctacttgtgaccaaaacctgcgccgccgcggagcatgcccagtctttgcgtccgctagctcgccgctcctgggcgcgatcctgcgctc

SEQ ID NO: 130734 - DNA, 122 bp, Homo sapiens
cccagccctgttctacagccctgagggacactacctgtctagcatcaaacaaggccaacacgagcctgctttgggctccgttctgttatggcagttacacagacagacctccaaggagaaac

SEQ ID NO: 130735 - DNA, 122 bp, Homo sapiens
ataagtaatcatttgtagaactaatactaaatgaaggttaaaacacagagacaggctgggcgccatggctcacgtctgtaataccagtactttgggagcccgaggtagaaggatcacttgag

SEQ ID NO: 130736 - DNA, 122 bp, Homo sapiens
tctaagttcttctctgctcctgggagccattagcttaggtagtcaggaaataccctaggccgggtgcagtggctcatgcctgtaatcctagcacttcgggaggccgaggcgggctgatcact

SEQ ID NO: 130737 - DNA, 122 bp, Homo sapiens
tccgcagctgagggggcagctccgcggcggcgtccggggtctccagtagggctgacgctccggtgctcgcacaatcccccgcctcggctggcaacgggcgtccctccactccccgagtcccc

SEQ ID NO: 130738 - DNA, 122 bp, Homo sapiens
ttcgacctgcccacgtggggacgtgtatcacgcccctttcatagaggatgccactgagtccgcctggaggaacttcctggggtcgccccatacctgcctccgactaaccctactgccccaca

SEQ ID NO: 130739 - DNA, 122 bp, Homo sapiens
atggccactcataaaatcacaaactaccgtttgctctggaacactcttacctccttacttcgcctagtatctatcaacttaccatgtcaataccggcttcagatttcagcttaattagcaat

SEQ ID NO: 130740 - DNA, 122 bp, Homo sapiens
agagtccatccctgaatgctgcagccaagtctgcgcctccgcgtccactcacggggccaccgagcagtgatttggagacctgtttcaactatcagcgggggccaagggatccctgagccaga

SEQ ID NO: 130741 - DNA, 122 bp, Homo sapiens
ccggcccttccgctcggagaggtactccctgcctctaactggtggcgcgttggcggaggccgacgaaagcctcgggtggggcgtgagcgccgcggggcattctggacctgctttgccttagg

SEQ ID NO: 130742 - DNA, 122 bp, Homo sapiens
cagaacctgggtaaggtgaggagcagcccgggcagagtcccagaggccctgggagggtcccggtgatgcaggggggtaaacaagccaccagcggagacagaaccagtgtgcggggcttggag

SEQ ID NO: 130743 - DNA, 122 bp, Homo sapiens
cctggctacccacaaacccctccctccagcgatatctcggtcccgtggggctggctaaaccggctgaaacctggcgggtcacccagagaaagctagaagagcccggctcccgcgcgggcgcc

SEQ ID NO: 130744 - DNA, 122 bp, Homo sapiens
gctccacccaccactcccaggttcgctgagtccctccccagctctctcctgttctcctcccgcaagatctctcacggtatcaaaataccagacacgatccagggcaataacaggcctgattt

SEQ ID NO: 130745 - DNA, 122 bp, Homo sapiens
gagccacccgccggctgttatctggggctgaaggctgcggtaatcgatgggttatttttacgcggtaatagggccctgtgattgctctattaacctttagacctgtctgagggactctccgg

SEQ ID NO: 130746 - DNA, 122 bp, Homo sapiens
acactctttaccctgccccttttgctttgtatctgataaataacagtgcagccagacattcggggccactaccggtctccacgcattggtggtagtggtcccccgggcccagctgccttttc

SEQ ID NO: 130747 - DNA, 122 bp, Homo sapiens
ggacccccagcagcagcagcagcaggacacgccgggcggcgcccgcggcggccacagcgccgccccagaagcagcagcagcagcagcagccggcaggtgccatcttccctcaaggcgcatgc

SEQ ID NO: 130748 - DNA, 122 bp, Homo sapiens
gggcgcggacaagcccagagggcgagtggggccgggcgtgcggcagggaccaggctggagcgcatggccacgtgggtgaaccccgacccgcggacaggggcccaggaccctctggcgggagg

SEQ ID NO: 130749 - DNA, 122 bp, Homo sapiens
ctctctcatccagtgctaatgataatcgccgtgatgatatcaatatgactggcaacaacacgcgctgagtgctcacttcgggactggcattattgcaaacattcagttgttggaggtgcttc

SEQ ID NO: 130750 - DNA, 122 bp, Homo sapiens
cttcgggagccgtggaggtacgaacttaagacatgcctattttattaatttacttccaaacgcaacgaaaggtccatggacaatttgtgggccatttaattcagggcccccaattcgtacgt

SEQ ID NO: 130751 - DNA, 122 bp, Homo sapiens
gtttttctaaaataaagagaaggattatcagagaggagagggagggggcctgaagggggacgggcagagacttagtgtggccagaggtacaagcagagggaagaaaagacccttttctagac

SEQ ID NO: 130752 - DNA, 122 bp, Homo sapiens
aaaattctgctctttggagaaattacttttctaccattcaaactgcacatggccaagagtcgtggctcacgcctgtaatcccagcactttgggagacagaggcgggtggatcacatgaggtc

SEQ ID NO: 130753 - DNA, 122 bp, Homo sapiens
cctgaggttagggtgctggaggatgagacagctgcaggaagcccccctcccccatccacacgtcacacccaccgctccttgggcctgggcttaggagaaaaaaggggaaactggattctggt

SEQ ID NO: 130754 - DNA, 122 bp, Homo sapiens
gctacctttaagagccggaacactgactgcgaaggtttgtggcttcacccctgaagtcagcgagaccacgaacccaccacaaggaagaaactccgaacacatctgaacatctgaaggaacaa

SEQ ID NO: 130755 - DNA, 122 bp, Homo sapiens
gcagtgggccccacagtctgcagcgcggccacgcgctccgtggggttgttgagctggatgcgctgcaggtagacgtggggtcggcccctgtgcgccagaaagtcctcttgcagcagcacgca

SEQ ID NO: 130756 - DNA, 122 bp, Homo sapiens
tgaaattattgagagactctaagctaattttctaaagtatgcagaggcacttaggaaagccgggagctgagatgggaacctaagcatttcactgacatcattccatgctccccacatatggc

SEQ ID NO: 130757 - DNA, 122 bp, Homo sapiens
tcttcatccctctgctgggccgtcctcttatatcaccccccgccccatgcccggccccagcgccctggggtgcaggcggagccgactctgggacacccccgcctgcatttgcggttctggtt

SEQ ID NO: 130758 - DNA, 122 bp, Homo sapiens
gcaggactttaacccaggcctcctaaggctgtagccagagctctttctacagccctgcaacgtgatatggctgcttggttgacaagccccctttagaggactagggggctgggcatcttcaa

SEQ ID NO: 130759 - DNA, 122 bp, Homo sapiens
ctaaaggtgcggcgatgcggcagcagccccagggagccgcgagctcacttagtgggggtccgcccccactaagtggtgctcaggtctttgcccagcctggtagggggcaggcggacccgagg

SEQ ID NO: 130760 - DNA, 122 bp, Homo sapiens
gttgattgtggtggtccagctgggagcaagctatgggcgggagtggccgcatctcatgggcggctctgagggcaggcgaccttggtggaggctgtcagtgtgacccaggtgtaaaaatagcc

SEQ ID NO: 130761 - DNA, 122 bp, Homo sapiens
ccgcaaccgcggcggcgtccagcgtgtggagggcaagctgcgcgccagcgtcgagaagggcgactactacgaggcgcaccagatgtaccggaccctgttcttcaggtacccgcgcccggccc

SEQ ID NO: 130762 - DNA, 122 bp, Homo sapiens
atctctcctttctgtctccttcctgtagcagctgtgcttcccctctctggtatgtacacacgcacacaccttctttatgccaggagcttttccagatcttcactacaaaatgggaagtctgg

SEQ ID NO: 130763 - DNA, 122 bp, Homo sapiens
ggccagatgactaagtcagcaaacacttagggaacacgactgtgtccgctgcgcgtttcccggagtagacacaagggtgaatgaacaaagaatggatttcggtcactgaaagtggagaggta

SEQ ID NO: 130764 - DNA, 122 bp, Homo sapiens
aaatgtgtttttaatcactccacggtgaagcttttccgcagtgagagcaccagacaagcccgcaccggcccgtggccctgccccttccttcccactccttcccggccccacccccctctggc

SEQ ID NO: 130765 - DNA, 122 bp, Homo sapiens
gggaggggcacgaggctcctttgctcccgcaggagcgtcgaatacgtatggaatacgcgtcggtgtggatctggcctcagcttcctgagcctgaatcaatgcttctaatcacgtgggcgctc

SEQ ID NO: 130766 - DNA, 122 bp, Homo sapiens
cggctgggggaactaaactttcatcctccatctcccggtcccggacggccccctagaacgcgggcaaggtatctaggccgacggcccctcatggggacccaggccttcttactcttttgggg

SEQ ID NO: 130767 - DNA, 122 bp, Homo sapiens
ccccaccctgctgcacggagctcctgcaaaagcaaacctgagaaccttggtgagtacttccggagacccggctcctgggacggcttctggcgctgctcctgcacacacgactctccaacgat

SEQ ID NO: 130768 - DNA, 122 bp, Homo sapiens
gcggtccccaacccctgggccacagactgttaggaaccaggctgcacagcagcaggtaagcggtgggcgagcaagcattactgcctgagctccacctcctgtcagatcagctgcagcattag

SEQ ID NO: 130769 - DNA, 122 bp, Homo sapiens
acaatctctgctcatagagttcaggctagcagggatgggagggagtggcaggaagagaaacgtaaaacctggtacacagatgagtaactgaaatactgacaaactgcattacctgctgggaa

SEQ ID NO: 130770 - DNA, 122 bp, Homo sapiens
agtgggtggaccttccacagaccatgtgaagcctgagcccagcatctggtgcaggttctgcgatgacattgcgtggatgaccgggaggcggcccagcccctactggcggctgacctggaggg

SEQ ID NO: 130771 - DNA, 122 bp, Homo sapiens
tgagacgtgcacacttgatcgcccactggctagtggaggatctggggctacaactcagtacgcccctgcgcctggctctgtgagcgggccccagcaccacaggccgagtttatactcagatc

SEQ ID NO: 130772 - DNA, 122 bp, Homo sapiens
tccaggcaggaatggaggcagaaccagaagaattgcttcctgggagcaggcaggcggcgccgagtcctgaacaaaggcggccgagaaggcacagcaagcacacgtggttggccacagcactg

SEQ ID NO: 130773 - DNA, 122 bp, Homo sapiens
tcaaaatattttcaaagtttgggtgcgagagtaagtctaggcatcatcattaatcttgtccgttaggtacagaaaaaggcaaggcctagatctctgaaagtatcttttctaaaaatgcagtg

SEQ ID NO: 130774 - DNA, 122 bp, Homo sapiens
cgcagggcttaggcagacgtaagctggtggccctgagcgcccaggcgtggggaggatcctcggacccgcggacagtcaggatccagctgcccgcgtttcatgccccgggcactgtcatgatc

SEQ ID NO: 130775 - DNA, 122 bp, Homo sapiens
ctgatctgggaaggctagggtagcccccaactgcctaggcggcagcacagccgctggggacgcagctcccacccggcctcccctccgcagagctgggaccgtccccccaccccccatccttg

SEQ ID NO: 130776 - DNA, 122 bp, Homo sapiens
tgggggcacgtttctcagccttgctcctagcagcctggcttccagccatgccaggcctgccgccccacagggcttctgtctgctgtgagcactgttgtccctttggctccctctcagggctt

SEQ ID NO: 130777 - DNA, 122 bp, Homo sapiens
aggacagctgagcacacacagtgaggagggcggctgagcacacacagtgaggagggcggccgagcaccacccaggggtcctcggcacacacagtgaagagggcggctgagcacacacagtga

SEQ ID NO: 130778 - DNA, 122 bp, Homo sapiens
ccggcactcctcagtactctcaacgtcacgaaaaacaaggagagacaagccatcataaaccggaagacactaagaagacccggaggatagatgtcatcgagcgtcctgaatgggacccagga

SEQ ID NO: 130779 - DNA, 122 bp, Homo sapiens
cagcggcggaggcggcggctcctgcggcggcggctgcggcagcgacggcggcggcggcagcggcagcagcctgcgcagtgccttctgggaacggaatccccagggctgcccctggcccccat

SEQ ID NO: 130780 - DNA, 122 bp, Homo sapiens
accaactggttcatcaccctaatgacgctgacccttttacaaggctcctttcatgtcagccgcctgggagtgccatctcagcattaagcctaggaaagctgacacatggcgccccagaccct

SEQ ID NO: 130781 - DNA, 122 bp, Homo sapiens
gggcacgagcgctttttgccggaacgtgtaggggtcccccgggagacccagaaaccacagcgcctagctgccgggcgcgcgctgtagcgtggggtcaaggcgaacgcgctcgtcagagcacc

SEQ ID NO: 130782 - DNA, 122 bp, Homo sapiens
aggtgttagcaaggtacaagcctcattttcctgagaaatacctggcgggacggagaagtgcggtgagaatctatgggctctcattctgtgtccacatttgggtctgtaaaagctggaagctc

SEQ ID NO: 130783 - DNA, 122 bp, Homo sapiens
tgtgctttggaagctctttagtttaattaggtgccagttgtcaattttttttttttttgtcgtaattgcttttgaggactcaggctgatatctagacagtatttcctaggttttgttccaga

SEQ ID NO: 130784 - DNA, 122 bp, Homo sapiens
gagtcagatgagaaaggtcatgaaaaatagtcaaaggatgacttttcctgggtaaatagccggatgtccaagaaatgaaaggctggtctggcagcagcacatcgtctaacagttggtagtca

SEQ ID NO: 130785 - DNA, 122 bp, Homo sapiens
cctggggcgcaagcttgtgggagggaaaattggattccccgctagacaaatgtgattacccgtgctgcctggacccaccccattcaggaccagggcataaatggccaggtgggaccagagag

SEQ ID NO: 130786 - DNA, 122 bp, Homo sapiens
ttaaatgaaaagtgattgcaaaacctcaattacttttgcaccgacctaatcattggctgccgcgggctctgtgggaccacatctacgaatgtatcgttcatggccgttgttccttgtggaat

SEQ ID NO: 130787 - DNA, 122 bp, Homo sapiens
agtcccattcccatgaagaatgcctgtgtacttaacatatcttaaagaatgcaaatgattcgggagtctccatatctgtaggggcccaatgaaacaaaaagtaatgaagatcaagttgttcc

SEQ ID NO: 130788 - DNA, 122 bp, Homo sapiens
gtcttctttccgccggtggaaaactggactgtggccagggctggcccccaccgctgtggccggcactccattccggaacctcctggaccctctatctgactctcgctgtgggacagggaccg

SEQ ID NO: 130789 - DNA, 122 bp, Homo sapiens
cccacagtaggtgagagctgctgttgatggacccagcacttgctcgcagacctgagagtccggggcagggatgtagcctcttagataaaacatgcagcagcacaaaaccagaatacatgaag

SEQ ID NO: 130790 - DNA, 122 bp, Homo sapiens
agagaccgggagtggacagccacaggcagggcttcttaaccagccgcgcctggctccctgcgcatcccgtatcccgggtcctaagagataaaaggtcaggggagattttgagggtttgatat

SEQ ID NO: 130791 - DNA, 122 bp, Homo sapiens
ctggaagatgaaagagactatacaagggaccgggtcctgggggcctgagcctcctggacccggcatacccccagcttactcaagtcccaggcgggagcgtcttcgttggcccccacctccca

SEQ ID NO: 130792 - DNA, 122 bp, Homo sapiens
tgggggctcgtccccaggatgcgatgaggttccatgagcgtggtagggatggttgaggcacgggcgttggagggtgtggcccggtggcccctgtccaagggttggctgtgagggcctgggtg

SEQ ID NO: 130793 - DNA, 122 bp, Homo sapiens
cactgcgaggaggttcttacggggccgtccacaccgtgggggacccgggccttacggggccgtccacacccgcaggggacctgggtagcaggaggttgtgtgccatctcagccaggggagag

SEQ ID NO: 130794 - DNA, 122 bp, Homo sapiens
cccaccctgttgtagcccctcctaccccctccccatccaggggctgtgtattattgtgagcgaataaacagagagacgctaacagccccatgtctgtgtccatcacccactgctaggtagtc

SEQ ID NO: 130795 - DNA, 122 bp, Homo sapiens
ccgtcgttcatgtcgattctctcagtcaatcaaaacgctgccacagcaggctttgggatgcggcgtctcgatgtgtgtgggcgtgtgcagggcggttgctgatattagtcatgagcgctggc

SEQ ID NO: 130796 - DNA, 122 bp, Homo sapiens
ctggggaccaccaataggatgctcagccggaggtggccctgcgcgtgacgcagcggtgctcggaggcagggggcgtaggggccgggctgtccggcgctttagcttagcaggcgacgttgcgg

SEQ ID NO: 130797 - DNA, 122 bp, Homo sapiens
aataagtcacatttcttttccaggacttagtctctggatctgtaaactgagaggtgagaccggatggtgctgacatcctgtgggctcgtgggactgagtgagacctctgggagctctggtgt

SEQ ID NO: 130798 - DNA, 122 bp, Homo sapiens
ggtcctcagcgaagcccctcatggtggcccgcagctcggggttctcggagttggcaaagtcgatgagctgcttgaccagctggtccgccttgtcccgcagccgggccgtcttgcgcgtgtag

SEQ ID NO: 130799 - DNA, 122 bp, Homo sapiens
aatgccctggcgagcctggaaccccttgttcttgcccctgctggctctgcgattccatgtcggtgaggcctgtccacgctgacggatgttgcctcccgtttctgcctgagaggggtaaatga

SEQ ID NO: 130800 - DNA, 122 bp, Homo sapiens
gcgaatgcaaacacactgtgctgtgtgcaagagtcataaagaattacaaggcagcatcaccgtcctcataaaatggcaaggcaggcagcaacctcagaagccaaattaaacacagtcagcat

SEQ ID NO: 130801 - DNA, 122 bp, Homo sapiens
aggtgggaagagcccagccggggctacaaattgggtgaagcgctgaggttttagtacttccgtttgaggagataggcaaaggttatgcaggtttttaatggcaggcctgagacaggaactca

SEQ ID NO: 130802 - DNA, 122 bp, Homo sapiens
gaggggcgcgcaccccagcctaatgcccactgcggacaaagaggacttctgtttaaaaagcggggtgtgtgagtgtcagggggcgaagcgctggctccggggccaaggagaggtggcaggag

SEQ ID NO: 130803 - DNA, 122 bp, Homo sapiens
gcgggcggcgctggccaccccttggtgggaggcagagaagcattgcttctttctaaagtacggctaaaataaaaggtatctccaggctaggcgcagtcactcatgcctgtaatcccagtatt

SEQ ID NO: 130804 - DNA, 122 bp, Homo sapiens
ggagcaacatcccagacaagtaaagtaaaataaattgatttacatcatccagagcagaatcgagaacacattccctgtgctaaaggaatcagagctctactaagggtcatagcagatatcat

SEQ ID NO: 130805 - DNA, 122 bp, Homo sapiens
gcgcgatcccgaggaggactgaaaagagactgaaaagcagggctgaggagtggcggcaaccggcagcgtccagctcccgcacctcgctgcacatcgcacctgagccccgccgcgaccgcatc

SEQ ID NO: 130806 - DNA, 122 bp, Homo sapiens
gtaatatcatccactcgacgatggttggtggtggaccttgcctgttcaagtctgacctgtcgatgtgctgagaggcaagcagcagcaggaacaaaaaagtcaaataggaggctgtgtggcag

SEQ ID NO: 130807 - DNA, 122 bp, Homo sapiens
tgcattgaagacaggaatgcccgtctgggtgagagtgtgagcctcaacaaacgctacacacgactgcgtctcatcaaggagcaccggagccagcaggagagggagcaggagcttctggccat

SEQ ID NO: 130808 - DNA, 122 bp, Homo sapiens
caagtcggtctgtctgcttccggcgttatgtgggttccagcaagagcacaagtcccagggcgcctaaggtccattcagaaaccaaaataaaatgggcgagccagggtaagaaaggagagcac

SEQ ID NO: 130809 - DNA, 122 bp, Homo sapiens
tgtaaaatatgactggctcttgattacattatttaacactggtgaagcagaatcagtggtcgcccctccacctgtctgcctcatttgccttgctcaccattaagagtcaagctccactgcag

SEQ ID NO: 130810 - DNA, 122 bp, Homo sapiens
ctgagagtagaattccctgcacttcctttcctggttggaatttatgcacttatgcctcatcgcaaaccacagaaaagatacacctgtgtcacgctgctccttccccgaccgatcttgtgatt

SEQ ID NO: 130811 - DNA, 122 bp, Homo sapiens
tgcagatagctccccattccttgtcctgaaagggcctgagcagggcctcccttccagtaccgtggggtgtggagggggagggttgggatggggggcctcggctgctgattcttggggaggga

SEQ ID NO: 130812 - DNA, 122 bp, Homo sapiens
tattcaagcttattcaaatgaatttgagagtctactaacagccctggctacataatttgccgggtgcagttcaaactgaaaatgcagggtccttttcaaaaattattaagcatgtcaacatg

SEQ ID NO: 130813 - DNA, 122 bp, Homo sapiens
taataacagtaatttaaaaagccaaaccgctctgtagggtattcgcctacaagcagcgctcggctcctggccttaaaaatgccgggagaagactgacaatcaggccaccactggtgcccact

SEQ ID NO: 130814 - DNA, 122 bp, Homo sapiens
ccctcatacagtcatcacagcagagacacactccaggaagccttttgcagaacagtgaaccggcctggcttttgttgtgtatgtttgtttcctttttttttacgtttaatgcaagtgttgaa

SEQ ID NO: 130815 - DNA, 122 bp, Homo sapiens
gagcggccctagcaatccggtctgaggggagcagtgccctcgtgtggcctccaggagaagcgcggctcttttctcagcccggtcctttgtatgctctcattgaacaagtatttattgagagc

SEQ ID NO: 130816 - DNA, 122 bp, Homo sapiens
gtgaacaatcagagagatgtccctgcaatggggaggctgccttccgtagtccgtgaccagcgccggagttttgagtccacggataaaacgtgtctcctttgtctctaccagaaaatgaaagg

SEQ ID NO: 130817 - DNA, 122 bp, Homo sapiens
cccagcgccccagaggaagggtgagagtcctctgggagctggcaggcgccagttccttgtcgctcacggttaagcccgtgtatcacttatttgtctcaagtgcttatggagcagtcttccaa

SEQ ID NO: 130818 - DNA, 122 bp, Homo sapiens
acggaaagagctaaggattgtggggtagcgaaccccggggccggaagcagtgggcgtacccgccggctgtagccgtaagacgcatgcgctaggccgggccaacggagcccgcctttacctcc

SEQ ID NO: 130819 - DNA, 122 bp, Homo sapiens
tgctgacgtcccatgcctctacggggatgggatgcgatggtgtcaggcctctggcttgggcgccgcccctcggcgacgtcactgggtactgtgacgtcactgggtgctgtgacatcagggca

SEQ ID NO: 130820 - DNA, 122 bp, Homo sapiens
ctgtagtcccagctactcaggaggctgaggcgcgaggctcacttgagccctggagacggacgttgcagtgagccgagattgtagcacggctctccagcctgggtgacagagagagatcctgt

SEQ ID NO: 130821 - DNA, 122 bp, Homo sapiens
gaatgtgagctctgagggggaaggacctcagcacccactcgcagactcccttctccgctacggtcacagtgaggtctacaacttgcagccattctgcagtcttcagtttgcagttctcagtg

SEQ ID NO: 130822 - DNA, 122 bp, Homo sapiens
ccccacaggcaggaggaggtgtcgttagctccacagtgagggaaactgcggccgggccgtcgtggatgctgacagaccccagcgggccgaccctcatcccaacccagccccatcagcagggg

SEQ ID NO: 130823 - DNA, 122 bp, Homo sapiens
ggagtcctagcctcactggctgggtccatgacgcaaccttcccactgacacccagtgtagcggacccggtggggaggggcctgaagcagctaccgctcccagaggccccatctgacacttta

SEQ ID NO: 130824 - DNA, 122 bp, Homo sapiens
gctgcctccccgcggggcagggctccagacccgcagcacaccatgcctgagtctccgccccgccccctaccttgggctcctgcgtggcctgagcccccgccacgagtgccgccccctgctcc

SEQ ID NO: 130825 - DNA, 122 bp, Homo sapiens
atctcaggtgatccgcccaccttggcctcccaaagtgctgggattataggcgtgagccaccgtgccctgcctcattcatcaattcttaatcgatgcctacagggtgccaggcaatgcctaga

SEQ ID NO: 130826 - DNA, 122 bp, Homo sapiens
gggagggaagtgcgttgtagccccagattctctttcacaggaggctgagctgagggggaccgggcgaggagcagggcgtcacccactgcgaagggctaactccgtgcctttctctgggtagc

SEQ ID NO: 130827 - DNA, 122 bp, Homo sapiens
gtaagggggagttcatcagaccagatgagggtggcctgttcggtgctggacagagcaccccggggtgaggaaagcagcaaggtgcaacccaaagccggcaaaaaggccatcagatgtgactc

SEQ ID NO: 130828 - DNA, 122 bp, Homo sapiens
tgttttccccgtgctcgcgttctgagatggaaactgttccacgtgcactgagatgcagctcggtctttctaacagcttcgtaattatttaatcatgtggattaacttcatccgaggaattca

SEQ ID NO: 130829 - DNA, 122 bp, Homo sapiens
ctgagtgaatgcagtggacaggatacaggcaggtgattgggagcccagtaggactgaccccggtgggattagtagagagaagtagtgggagataacttggggtcatgttgtcattcacagtt

SEQ ID NO: 130830 - DNA, 122 bp, Homo sapiens
gttttcataatggagggctttggccttctgcaggacaatcatccaaatgtatctgggcagcgggtcgctaggagaccctaggaggaaaacccgtctttggctcttgccgttttcactcttta

SEQ ID NO: 130831 - DNA, 122 bp, Homo sapiens
ctctagctccagaagggactgggtcctctccgagttgcagtgcaggcaccacatggcggccgcagtgggagcgggccgggccgggagccgggacccaggcccagcagaggccgccgactccc

SEQ ID NO: 130832 - DNA, 122 bp, Homo sapiens
cccgtcaagggagtgtcagcggtgcgcacgggtttgacaaatcatagttcgctgaaagaacgaggtgcccgataactgtgacttaggcgcactttattctgtcttggtcgtttttatttggg

SEQ ID NO: 130833 - DNA, 122 bp, Homo sapiens
gcacttggaactggatctggcgactgtgccggcgcgccgcctctgccgcggtcctagcgccgctcggcttcacgctccgcaagtcccaggcgtctgcaggaaccgccatcaccacccgcacc

SEQ ID NO: 130834 - DNA, 122 bp, Homo sapiens
ccggagctcaccaggtagttctcatcctggaaggcgaagtgcagctgcgtgatccaccgccggtccccattcaccaacacgtccctctcctcacggaagcacgacacctgcagggcacccgg

SEQ ID NO: 130835 - DNA, 122 bp, Homo sapiens
gcagtgggggcagccacagctgcctctgcaatgcttgtaggacccacacacagtggggcacggaggggcagaggccgcagcccctttgccatgaatccaaagaacctggagtgattctgcag

SEQ ID NO: 130836 - DNA, 122 bp, Homo sapiens
ccgcggccagctgcctccccagacccgcaaccccggctgggccgggaacctgcaccgcggcgctcgtgccccgctctgcgacccctgctccgtgacggccgcactgcaccggggtaccgcgg

SEQ ID NO: 130837 - DNA, 122 bp, Homo sapiens
agtctcactctgtagagttgttctgttttgtgaccagactgtacccctaccagccaaaaacgtccaggaggattgtgttgctgcagcaacgccaatccctcccaattgcaagaaaagcaact

SEQ ID NO: 130838 - DNA, 122 bp, Homo sapiens
gtggacgctgggacgcgtttgtagctccggccccgccgttccgacccccgccgccgtcgccgccatgacggggctagcactgctctactccggggtcttcgtggccttctgggcctgcgcgc

SEQ ID NO: 130839 - DNA, 122 bp, Homo sapiens
tataatgctggcaaattgccagagaataaaaatagctctttggatttctgccttccaccccggctgatggcaaaggagagaggtggcagtacaaaatcaccaccttagccaccaactggtgg

SEQ ID NO: 130840 - DNA, 122 bp, Homo sapiens
gtgaaggcattgctgtcctggaagacgttattgagggcgtggagggcacaaagctccctgcgctgtttctcatggtagatttgtgggggtgctgcctggggcagctccaatgattcagattt

SEQ ID NO: 130841 - DNA, 122 bp, Homo sapiens
gggcagagcatgccagccgcgccttcaggaacgtggtccacttcctctgcagggtccgtgcgccccccatatcgccctggcagacggcaaggggacactgccggtcagccccgctgggccag

SEQ ID NO: 130842 - DNA, 122 bp, Homo sapiens
cccgggggtccagaccctgcacgcatgatggggaaggtggaggcttccccctcagctccgcggagagaagctgacactgccaggctggaaccttccattccggcccagcctcttcctccctc

SEQ ID NO: 130843 - DNA, 122 bp, Homo sapiens
aaaccacataactggataaagaaaaaaccatctccgacagccttggaggcgggatgaaggcgtggcccggtgggcgtgaccaacagcaaaagtttaagcgttattggctgtattccttagtt

SEQ ID NO: 130844 - DNA, 122 bp, Homo sapiens
cagtggggaaggaaacagggtccatgttttggctgaagccccttcagctaaagacccccccggaaagagggagagccctattcccctccaccgtgcaccccggcactgtgctgtagccatgc

SEQ ID NO: 130845 - DNA, 122 bp, Homo sapiens
tcatgaataactaacaagggcgaggttcctggagcccaaactcaggcctcagccacccttcgctccaagctgaagacaagaaggggctggagccgttacggtgtggggaaggggagggtgta

SEQ ID NO: 130846 - DNA, 122 bp, Homo sapiens
gctcccagatgtaaagaacgcgacttccacaaacctggattttttatgtacaaccctgaccgtgaccgtttgctatattcctttttctatgaaataatgtgaatgataataaaacagctttg

SEQ ID NO: 130847 - DNA, 122 bp, Homo sapiens
ctttccttggtggcactttgctatctcacaaatcatcctgtttattggtttccatggttacgcctcccccccaccaccaccacacacccatcatgtcagctcaagagagcacgggctttgcc

SEQ ID NO: 130848 - DNA, 122 bp, Homo sapiens
ctagggaccctgtatctggcaccggacagcacctggctgctcaggacgaatgaatgacggcgtgatcctccacagcctgacttaaaggcaggttccccacggctgagaacgcagggaccagc

SEQ ID NO: 130849 - DNA, 122 bp, Homo sapiens
accccgccgctccctccgagggttctgcggaagcaggcggcacagcctgcgaggggctttcgtttcccggactcagccgcatcgcctcggctcgggcgcgcctgcatcctgccgcccgtccg

SEQ ID NO: 130850 - DNA, 122 bp, Homo sapiens
ctctgagatagacaccaagggaactgctgggtcataaatccaattttttcaaagtaaatccgcttgcgaacccggaaccaagtcgatttttcccgccccgccagttccctgttcaggagagt

SEQ ID NO: 130851 - DNA, 122 bp, Homo sapiens
cggggctgcgcgttcgtctgtgcggcggggtttgggaatggaggcgtgaggaccgcgcatcgagggctccacaggctgggcggggggcgtcgttggaggggggtaggggagaaatgcgcgcc

SEQ ID NO: 130852 - DNA, 122 bp, Homo sapiens
tgcccccaggctctgcgcctgtcccagggcagttgcaatgcagcaagcgtgttactgttacggaggcaagaaagccagcgccttcccacgcacgcacacaggctaggtggcctcttctgcac

SEQ ID NO: 130853 - DNA, 122 bp, Homo sapiens
gagatgaatcagacctagccctgccctcatacaatgggataatttaggaatcagagagaccgaggggttgaggaggatttattattattattattattatttaggtgaactggcccagtcag

SEQ ID NO: 130854 - DNA, 122 bp, Homo sapiens
agtaaatcatatggttggagtagatgagacattactaaccacaggtcattggactccaggcgatttttgagcccttacctcaagcaacgttaaaaaccacaaggatcagatggcttggcaaa

SEQ ID NO: 130855 - DNA, 122 bp, Homo sapiens
ccacccgaagcgctctcccactgaactcccgcccattgaggttccgcatggcactaagcgcggtctcctggtcttggtattcgcagaagccatagcccttgggttttcccgtctctctatcg

SEQ ID NO: 130856 - DNA, 122 bp, Homo sapiens
ccaccccccacacgctccggcccaccccacccagcgcccaccaggcaggccacagccgcacgccacagggcgaccctctggtcgggtagatggctcagcagctccacgtccccctgggcggc

SEQ ID NO: 130857 - DNA, 122 bp, Homo sapiens
caatgtaaaaaatattggaaagccctgcttcaatacatatttttcatgctttctggccatcgggcttctttaatacactctttctatgtttggagaaatttcccacttgaaaaccagcctcc

SEQ ID NO: 130858 - DNA, 122 bp, Homo sapiens
ggagcccgtcctgggccagcgtcacctggtgcccgtcctgggccggcgacacctggagcccgtcctgggcctgcatcacctggtgcccatcctgtcccacacctggagcctgtcttgtgcca

SEQ ID NO: 130859 - DNA, 122 bp, Homo sapiens
tctccccaccggccacagacatgccgcccaccgctgcaccgcgacttcacggaaaacccacgagccacgctcgaagccccgcctccagagctccgaccaattacgggagttctctattgcct

SEQ ID NO: 130860 - DNA, 122 bp, Homo sapiens
atcgtgtgacggagaaagtggcctgcccacctgatgggcgtgtgggtatgtgtgggtgcacgtggacgcaagggggcaggaagggttggatccatgccagggacagctttgggcggcggtaa

SEQ ID NO: 130861 - DNA, 122 bp, Homo sapiens
tagtatatgacagacatcacaggagtggtctgcagagcaggactctgtacatgatatgtgcgcaagtatttgacaaaaataggcatgtgaatgctgagttattgtgttcctgctggtgcatt

SEQ ID NO: 130862 - DNA, 122 bp, Homo sapiens
gtcatggcagattggctgggcaagacgatgagggtcctgttgcccacagaggccctgctgcgcttctgcgtcacgtggaacaccaactcgcggcactgccacgaggcccaggccgtgctggg

SEQ ID NO: 130863 - DNA, 122 bp, Homo sapiens
ctctgcagcatttcagatcctcctcaatgacctggtttagggaggcagacataagcgccccgtgagtagagttagagactttctcagtggctccctacaggaatgatattaccttgggggtt

SEQ ID NO: 130864 - DNA, 122 bp, Homo sapiens
cttcccttcccggtaagctcgaaggacgctgagcccgtgcagcccctgttgttactgtgtcgcttgttcttgtttcccctgcagtacgcactttataaaaagatgacacaggctgccatcct

SEQ ID NO: 130865 - DNA, 122 bp, Homo sapiens
gtgattactgctcggaacaaggactccaggatacaagaggtgcttggcccctcctcttcacggctgctggaaccctcactgggttgcctctgtcgagtgaagttgatggtagtgggaaaggc

SEQ ID NO: 130866 - DNA, 122 bp, Homo sapiens
cttttctgtcagccaagaggtgccaggtaggtaaggagcatactgggtaactgtgtactccgtgcccaggcctactcatgcctctgtgggctgggcactgatgcaaacttctgccaggcatg

SEQ ID NO: 130867 - DNA, 122 bp, Homo sapiens
tctggaaaatggagataaactcagctcattgttttgtgatgtccgaaattatgtactacccggtgcacagtaggtgcttaataaacatgagtcctttccttcaaaggatctgggcttcagag

SEQ ID NO: 130868 - DNA, 122 bp, Homo sapiens
gctgggcagcggccagggagaggggcgacctacgggggcgggtgtggggacgccggactacgcgtcaggagtcccagatgggcccagacccccattccccgccccgggccgcagtgacgtca

SEQ ID NO: 130869 - DNA, 122 bp, Homo sapiens
gggattaggaacgaattctggatcgtgacttcggttttctcgccgtgcagttccttttcccgccccccttcggatccctccgacctgcggcgggaaagtcgcgcgcctgcgcactaagcatc

SEQ ID NO: 130870 - DNA, 122 bp, Homo sapiens
cacatttcttacacaactctgcagtgtagatagacatgtatagtcattactgggctgacacggtgggactgagacctgctagtgccgtggttggcatctatgattagtgaggtccaagatca

SEQ ID NO: 130871 - DNA, 122 bp, Homo sapiens
tgcacttgtccttgtctcagagggcaatctctgggaaaatatgtctgatacctctgaagtcgaattttcaaaatccacctttttctttataaagatgcctttaacatgccttagaatgacat

SEQ ID NO: 130872 - DNA, 122 bp, Homo sapiens
cacgaggctgaagcggtttctccacttcttgctgtcctcctggtgctggaagaggttccccgagaagacgatgcgctcgtccagtggcacctgtgggcaggagcgggtggggagtgaggccc

SEQ ID NO: 130873 - DNA, 122 bp, Homo sapiens
tgacctcgtaatccgcctgcctcagactcccaaactgatgggattaaaggcgtgagccaccgcgtccggccgttcgtgtctgatttctatatgtgctgccgaagcgagcactcgtgtctaat

SEQ ID NO: 130874 - DNA, 122 bp, Homo sapiens
gctgcccaagccggccaggaactgctttgtgtcagctgaataggatggtaattcaatctgcgaatgggagccgttggcacacagcacgcctgtcataatgagtcacaggggggacaagcacc

SEQ ID NO: 130875 - DNA, 122 bp, Homo sapiens
ggtgctggcaaaacagtccttgccctggggccggttcttacccaggtccagagaaaccaacgcgggatgtcagacttcaccaaaaggactttctggttgcccctggctggcttcctggaggc

SEQ ID NO: 130876 - DNA, 122 bp, Homo sapiens
ccccttccagactgtggaagctttgttttttcgctttttgcagtaaatcttgctactgctcgctctttgggtccaggctgctcttatgagctgtaacactcacggcgaagatctgcagcttc

SEQ ID NO: 130877 - DNA, 122 bp, Homo sapiens
tctccgatgtatattggtgccagtcacttatactgctttcagatgattcaagaataacagcgatttgagaaagctgtccttaagttttctcttctgtttttctgtataatattatttttaca

SEQ ID NO: 130878 - DNA, 122 bp, Homo sapiens
ctaccataacattagtggactgtatttttaatgatcggtgaaaactttcagcctagacagcgaatatatcagcttggaaggaattgctaactgaacatctataatcatttcctgaaaatgtg

SEQ ID NO: 130879 - DNA, 122 bp, Homo sapiens
cattgccagcccagttctgaatacgtttcactcaggcttctgtcaaaggacattttacagcgccttccatgtcacacttttctctttaccataagggtcagagaaaagttttaatggtaaat

SEQ ID NO: 130880 - DNA, 122 bp, Homo sapiens
cacgcagcgcacctggcgcgggcggctcacctggagctggcggcgctggcagcaggtaggcgcgcaggcggctgacggcactagcgttgacgcagagcccgcggccgtccagcagcgcctgc

SEQ ID NO: 130881 - DNA, 122 bp, Homo sapiens
tgtgctggtaccagggccccagctactgatgaagtggcaggagtccacagaagcctacttcgaagttcccggggcttccaggggaggtgagaacacaagtgatgggagagcctggggaggga

SEQ ID NO: 130882 - DNA, 122 bp, Homo sapiens
gccctctggtgcgtctttttcactcagtgtccttttggggggtccccgggccgtgtggtgcgtgctggctcggctcagtagcgctgttacaggcttacgagctgacgtggctgggaactggg

SEQ ID NO: 130883 - DNA, 122 bp, Homo sapiens
ccaagggcgcagcagggcatggcacgctggccactcagctccgggctccgacctcatgaccgtcaggttttttccagggaccccctggccacagtggacctcgccagcctcaggagcccaga

SEQ ID NO: 130884 - DNA, 122 bp, Homo sapiens
tggatgccgcaagattccatacctaggggacagagccctcccttagtgatgctgtgtcaccgaggatgtaagagtagaaacctttagctcacaacacctacccaggaaggaaggctggaaca

SEQ ID NO: 130885 - DNA, 122 bp, Homo sapiens
gatcagccgacaagctggactgcggagagctgggagcagaggggaggaggagagatagctcgaacgtcaggatcccagagcgcagggttaggaccgcccccctttgtgaaaccagctgcgta

SEQ ID NO: 130886 - DNA, 122 bp, Homo sapiens
ttgtagaggcaaccgggcgttttaaagagaatgaaggaattaggatgggactgatgacgccgagggggactgagcaactttttcaggtttgaaaagcctcaacatcaacgcgcgacggcgct

SEQ ID NO: 130887 - DNA, 122 bp, Homo sapiens
aagacgaagatgatgtacagaaaccacctgcaaaacccaagagcagaacagagctgcccccgactcacctcacccagccccatccaattccctcactcaaccttctgtttccaaagggaact

SEQ ID NO: 130888 - DNA, 122 bp, Homo sapiens
tcacccggcgctggcggctgcgctggcagctggatcgacggactggctgggggtgcgaggcgaggccgccgggctgttttgaagctctgggctgggactgcgcgccctccctccaccctcta

SEQ ID NO: 130889 - DNA, 122 bp, Homo sapiens
cctttcttgatggttataaacactaaatatgttggaagtaaacctcttagctgcttcacacgtattggccactcgagaagaatgagttccctttggcttgctttatattcccactgcacagg

SEQ ID NO: 130890 - DNA, 122 bp, Homo sapiens
agcaggccaccgggaagtcacgtggccggctgctgcctctttgtggctcccgcgagagtccgccttccgccgcagttgcgacccggcagcttgcggttagccgttctttccgcccagttctt

SEQ ID NO: 130891 - DNA, 122 bp, Homo sapiens
tggtgggcaggtcgtagccggcgctgatgaagttgggggcgtagagctgcagctggaacgcggtgagccactggctcacggcctcagagctctggaagacacaaggcacccactgcaggctc

SEQ ID NO: 130892 - DNA, 122 bp, Homo sapiens
ggctagggcgcgagggagggggcactgtgaccccggcggggcggagggcgacagggcgaccgcgcgccctctgccgggacgcccgccctgccctgccccgccgccgccgccgcccgcgcctg

SEQ ID NO: 130893 - DNA, 122 bp, Homo sapiens
gggatctggctctgtcccaggccctgtggggctggcagttgagtaagcagtcaggctgggcgcacccatccctcccccactccccactgcccagcacagtgcattcatgcagctgggcccca

SEQ ID NO: 130894 - DNA, 122 bp, Homo sapiens
ctggagaggggataagaaataaacggtgcatttactttcagtccacagtagtagtaacatcgttagttactacgtgcgaacattctccattctcatcaacttctcagatcccacaagatttc

SEQ ID NO: 130895 - DNA, 122 bp, Homo sapiens
attgacaccaatggtctcacgagccctgcactaaacatttctcctgctttctgttcctcccgtctctttcaagctccgaggttcagctgcagaattcccagctgtccatggagagtccccac

SEQ ID NO: 130896 - DNA, 122 bp, Homo sapiens
ttcaaaatgtcctcattaaaaatattccataaccaaaagtaaaagtccagatgatacaaacgtaaatgtcaatcattttggtgaagttgacaatatggtggtacatttttggcagagcagta

SEQ ID NO: 130897 - DNA, 122 bp, Homo sapiens
ctatgctctcttcctccccttccaggtgaacctgaacaccatcaagcgctgcctcctcatcgactacaaccccgactcccaggagctggacttccgccactagtgagtgtcccagcaggatg

SEQ ID NO: 130898 - DNA, 122 bp, Homo sapiens
gcatgtaacatatctcataataccaagtaactcataaaacaagcagtgagagacatttatcggacaaacacttcctcagatcacttcatctgcctgagagaacagacctgccataatgggcc

SEQ ID NO: 130899 - DNA, 122 bp, Homo sapiens
aaactaaaaataaaccagacatgatggtgcatgcctgtagtcccagctacttgggaggatcgcttgcacacaggggtttgaggctgcagcaagctatgactgcaccgctttactcactacag

SEQ ID NO: 130900 - DNA, 122 bp, Homo sapiens
ggggcgctgctttcggtaggtgccagcccccgtgccagcaggatgggctgacctgtgtaccgccccctcccacccccttccccattcccatcccctcccccgcctcctgcgcgctccggccc

SEQ ID NO: 130901 - DNA, 122 bp, Homo sapiens
ccctgtcccccgggttcactagacccaattccttcctcagccgaacatgtctggagcagtcggaggaacagacgtggagaagaggtcgccacgaggccccaccactctccttcctcacctgc

SEQ ID NO: 130902 - DNA, 122 bp, Homo sapiens
acagctattacaatgaaggcataggaggcatatttgtcacattcatgaaggatgcaaagccgaaaaggaggccaggagcaggtaactgatctgttgaatggtagagtcaagactcgcaaaag

SEQ ID NO: 130903 - DNA, 122 bp, Homo sapiens
agatgccggccttcaaatctcgagcccgtggggagagtgacctgcctgcaacccctcccccggcaaatagtctctatgggggaatttattctggactcaccttcaaaattaggggtctggaa

SEQ ID NO: 130904 - DNA, 122 bp, Homo sapiens
cgagggaaccacaggtctttgtgtcgcgtgcagcagcagctggcggcgtgaggaccacaccggcgccagagccgtctccctaggtccggagactttcaccccgagtttcccttccgcgtctg

SEQ ID NO: 130905 - DNA, 122 bp, Homo sapiens
gacacgtcagcttgagctctgggcaatttcagcctggcagtctcgcggcccggggaggggcggcgggtgtctgcagacgggctctagggcccagcggccgggcgccacggcgggggtggagt

SEQ ID NO: 130906 - DNA, 122 bp, Homo sapiens
ctttcgaaaggccaccaagaccaccgagactgctgagaccgccaaagccaccaagaccgccgagactgccaagaccaccaaggccgccggctgctcccggtggctccatgcacccggcagga

SEQ ID NO: 130907 - DNA, 122 bp, Homo sapiens
ggctgtccccacgtgcattctaggtcaacggtgcggtggcagaaccctggggctctcccccgcggaactcggccctggccgaggccccaaccacgctagtaggaggaggccgagcatccctc

SEQ ID NO: 130908 - DNA, 122 bp, Homo sapiens
gcctttcttttcttgccttccatctctggcccaccgctaaatttccaccttgtacaaaagcgctagctgcagggcgagggctgggggcgcggcgcagagcgctctcccacgcgccggggatc

SEQ ID NO: 130909 - DNA, 122 bp, Homo sapiens
gggacgcctcaggctgtctcggtcaggacctacagctccggttgttgtcccaggctcttccgcgaggtgctctcctgtctcctgaccacccccattcctccccactccagctcctcagcgag

SEQ ID NO: 130910 - DNA, 122 bp, Homo sapiens
gttacagacccaggtgcacatgttggtcctgggttgagggtgccaggtgcttccttgccccgggagaagcacctgagtctccaggcgggcctctgaccgccgtgactgagcatttgggccac

SEQ ID NO: 130911 - DNA, 122 bp, Homo sapiens
ggcctcagggaccaacttgccaacagctggacttgatcactagctggcaaactgagctcacgtatcgggtggaataacaagcggactttgctctctgctgtgcaaaacgctgtttttagagg

SEQ ID NO: 130912 - DNA, 122 bp, Homo sapiens
aaatagtctactttccggtagcggtgccagggcagtggcctaatacggaactccatttcccggcgtgcctcgcggaggccgctgaactcagaagcgggaggccggttccggttgcatcagcg

SEQ ID NO: 130913 - DNA, 122 bp, Homo sapiens
tccggcagcgcttatcctgatcagtggctcttgaacctcctggggggactgcggaatctccggggctgcccgcctgcccagcagcaccttcagcagcctctggccgggctttcctgccacag

SEQ ID NO: 130914 - DNA, 122 bp, Homo sapiens
aacttaagactgccacccccatgtcctctgcctgctgcagggagagggggggaggggcagcgctggggcctcctgtttaaaggttggcactttcacagaagagttagcagctgggggtagag

SEQ ID NO: 130915 - DNA, 122 bp, Homo sapiens
ggtacaaatcctagctccatccctttttgttctgtgaccaggtgcaggttgtgtgacacacggtgcctcgctcagtggccccgcgtgaaaagggggatgattatgattatagcccctcctgc

SEQ ID NO: 130916 - DNA, 122 bp, Homo sapiens
tcactcggctctgttcggctcctgctcgggaagggtgcgcgggggcgagtcctgcgcatgcgccctcaattcctgctgctctcagggctgcgctcagcctcgtgttttcacttccttttcag

SEQ ID NO: 130917 - DNA, 122 bp, Homo sapiens
caaacacccttactttcctctaaccacacccgtgcattcggcacaatgcctttcttagcacgttctgggtcccttgatccagagaacaatctgcctgactggatttactgacacttaccacc

SEQ ID NO: 130918 - DNA, 122 bp, Homo sapiens
ggccagcacagcgggcgggggcctgaggactcgaggactgaccggggccagcacagcgggcggggctctgcccattaaatacactttcgcgtgtttcttttaacaacgtgctcctttcacag

SEQ ID NO: 130919 - DNA, 122 bp, Homo sapiens
acagagacgataaaaaggcctcctcgaggccagaggtgcccaggccaggcctaggtggcccgcacctgcgagcctggccagcctcttccgggtcaggtgaccgcgcgcggtcacgtgacccg

SEQ ID NO: 130920 - DNA, 122 bp, Homo sapiens
gttcaagaaaatgaagtactgcatgcgacgagcaagtttattgaagagggtgtgaggtcgcggcgcctgaccctcattatgtcagttactactaaatgaaattagaacttcactgccctttt

SEQ ID NO: 130921 - DNA, 122 bp, Homo sapiens
agcgcactgacacgaaggacagacaccacaaatcgatcaggaagtgctggacgcacatttcggagcagtgtgcgcaggtggctctatatggggcctggagatgacacaacagattgcccgtg

SEQ ID NO: 130922 - DNA, 122 bp, Homo sapiens
ggaagctgaggtgagaagatcgcttgagcctgggaggtcgaacctgcagtgagccacgatcgcaccagtgcactccaccctgggcgacagagacccggtctcaaaaaagagagagagagaga

SEQ ID NO: 130923 - DNA, 122 bp, Homo sapiens
tctagaacgtgtccatcactgcggaacgtactgagacttcctgcgtcggtggaaacattccgtcatctacaccggccagtcctgtagcaacggcctaggtggtttttgaacgtgtgtgtgta

SEQ ID NO: 130924 - DNA, 122 bp, Homo sapiens
cagggagcgcgcactgccgggtcgcacgaggcccaggtgaggagccacagtggctcaccgcgtggatgtggccagcagagctccacacggccaaggaaagagcccaggaaaagccccagtga

SEQ ID NO: 130925 - DNA, 122 bp, Homo sapiens
tggggaaggactgtggaaggtgccagagcacacccacagccaggttcttccctcgggagccgtctccctggcaggttctgcatcttagaggatggtttctccaccccagcagctgtccccga

SEQ ID NO: 130926 - DNA, 122 bp, Homo sapiens
aggcgtgagccactatgcctggcctgattccagcttaacttcattttaactagccgacctcgttacaatgacctcatttaacgagatgacctctataaagaccttatctccatataagagca

SEQ ID NO: 130927 - DNA, 122 bp, Homo sapiens
cggcgaggccaggcgtttcggaagtcggggctccagctcagctgtcctcgggcccctcgtcggggctcccagggtccctgtccacacaccaagttcttgcaagtctctgtcgaggctcgggc

SEQ ID NO: 130928 - DNA, 122 bp, Homo sapiens
ttgaagggtgtttagaacgctcgcggttttttcctatgataatgtttcacagaatcattgcgcatttggttctttacacccaggcctgaacatccatcacataacttcccaggagtcaggct

SEQ ID NO: 130929 - DNA, 122 bp, Homo sapiens
agccgggacctggggggggtcgcttcccccgtgtgctccaggccactgagaggctgtggccgggtcctctcctgtgacctcactggccacatggatgagctccgatgataactggcagcgcg

SEQ ID NO: 130930 - DNA, 122 bp, Homo sapiens
catcccccgggtctgggtctgcgaccgggacaatgactgtgtggatggcagtgatgagcccgccaactgcagtgagttgcctggcctggagcccagcttccctccccagtgtctgctgctca

SEQ ID NO: 130931 - DNA, 122 bp, Homo sapiens
tccctcagcgaagcgcggaagagagaacgaagaggcgccttccacttcctctcgctctaacgccggcacccgccccgcgcgtccctcgcccccgctgccccgccccctgcagggcgtggcca

SEQ ID NO: 130932 - DNA, 122 bp, Homo sapiens
ctgcaaaagtttgccggcttccgcagtgatggatcaccgttttagtggcatttaaatccccggcgctccgccgtctaggtgacgcgcagtcgcccccccaggcagcctaggcggcggcagct

SEQ ID NO: 130933 - DNA, 122 bp, Homo sapiens
tggctggagaagcctcaggaaacttaaaatcatggcggaaagggaagcaaacacgtccttcgtcacatggctgcaggaagagaggtgcccagcaaaagggtcaaaagccccttttacatcca

SEQ ID NO: 130934 - DNA, 122 bp, Homo sapiens
aaataaataaataaagtagctttttcttaatcacatcactcagttttatgatcttagtaacgcatatcagaatttgtacttattttcgggtgggcatggtggctcacacctataatcccagc

SEQ ID NO: 130935 - DNA, 122 bp, Homo sapiens
tcatatcgtccttcacagctcaggtggtgttggcggcagacagcgatccgagcccggaggcgctccacgatagcactgtgcactctcggggtgactgagccccctccaaggagccccgcccc

SEQ ID NO: 130936 - DNA, 122 bp, Homo sapiens
caacagcctcacgcccttccgccccatgcccaccgccgcccagcttcagccctcccgagccggagggacgggacgcccaccaagaccactccttgtgaaatccccccgcccttccccaacct

SEQ ID NO: 130937 - DNA, 122 bp, Homo sapiens
tggcaggtgtagagccctgccaacctctcgatcctgaagctccccttccagcctgagaaacggcaggttcaagtcccactgggagaccaaagcggggagcggctcagtttgccggcttgctc

SEQ ID NO: 130938 - DNA, 122 bp, Homo sapiens
cttggcgggggctgaagtgggaggattgcttgtgcctgggaggcagaggttgcagtgagccgaggtcaagccactgaactccagcctgggcaacagaacaagacactgtctcaaaaaattaa

SEQ ID NO: 130939 - DNA, 122 bp, Homo sapiens
ccttacacccccgctcccagacaccagagccctgtcttcaccgccttacaccccagctcccggacaccagagccatgtcctccccggctcctggacagaccccagcgagaagcacgtgacct

SEQ ID NO: 130940 - DNA, 122 bp, Homo sapiens
aacgttacaaaaccaaatgccagaacccatccaatgtttagaaagcctggggatgtgccacgtcccccagggatccagcacgcacccaaagagacactgtcccggcgaggagcctggagcct

SEQ ID NO: 130941 - DNA, 122 bp, Homo sapiens
aagtccggcagaactcctcgacggtctcggccgtgggggtgttgccaatgtcatggttgccgctgacaaggaccagtgggatggccctgtccactgccctaagcactcgcttcaggtcctcc

SEQ ID NO: 130942 - DNA, 122 bp, Homo sapiens
gcagccagcgcccggtggaacagggctttctggaaggtggctgctctctgaccatgtcctcggtgccagccgggtcaggggctgctgtccacacttcccacttaagccagtatttaagacag

SEQ ID NO: 130943 - DNA, 122 bp, Homo sapiens
gatctctcactctgcccctcccagcccccacccgtgagaaccggccggcgcgaaacgtcacgcagcctggtgacgtcacagtactcctggccaggtggcctcaacctgaaacaactgtcttc

SEQ ID NO: 130944 - DNA, 122 bp, Homo sapiens
ggctcggggctggaaacagacctcacggaatcctggctcggggcaggacacagacctccacggaactgtgggtcggaagctgcccttccgccagccgccttgctcagcgtatctgagcgacg

SEQ ID NO: 130945 - DNA, 122 bp, Homo sapiens
ctttagagccttccctcgggataggatgaaatactgagatcctagaaaggattcacaaaacgtgtcactcatcagcgcagattcaccgattcacccctagatgtgtgtgggatttggatggc

SEQ ID NO: 130946 - DNA, 122 bp, Homo sapiens
ttcccacttcctcagcttttctcccgccggccttgcgctctggaggtctcgccccggcgccgcctcctccaggcagtcctctagactgcatccgccatgggcctggacgctgctcccggggg

SEQ ID NO: 130947 - DNA, 122 bp, Homo sapiens
gtgcgggggatgtagttccggttgggaggggcgtggctgaggactgtgaagcaatcggggcgaggccgggtgtctgttcaactctcccgcgtatcgtctgtttcttcggcggcggacagtgt

SEQ ID NO: 130948 - DNA, 122 bp, Homo sapiens
gacctgacttccagcacgagtcttgattgcttttttttttctcgagttcgaggcggagcccgcgaaccccatctcctcagagcgccaccccctcagcttcgcccgttgggcagaattttcca

SEQ ID NO: 130949 - DNA, 122 bp, Homo sapiens
gaggaggaggaggtggtggtggaggaggaggcagggggtggagagagagaaagcgcacgccgagaggaggtgtgggtgttccgcttccatcctaacggaacgagctccctcttcgcggacat

SEQ ID NO: 130950 - DNA, 122 bp, Homo sapiens
cagatcctggctgccttcctcctggttactgtttgtggcagttttgcctatttgtattttcgacagggctgccctttatggttccccatggctgagtacctgtttgcctggtataatcctgg

SEQ ID NO: 130951 - DNA, 122 bp, Homo sapiens
tcttcttcgccagagacgcctgagaattcacatcagggacacttcacatcagggacaggccggggcagagaccctgacctgagggagggacgagggttgccacgaggaggtaggaaggagcc

SEQ ID NO: 130952 - DNA, 122 bp, Homo sapiens
gcgcgaccgacgcaaggtgccggtgaaaggcgcgaggccggccaggaggcggtaacgggacgggagctgtgagggagcggaagcggaaacggcgccgctccagaccccgcccggcctgcgcg

SEQ ID NO: 130953 - DNA, 122 bp, Homo sapiens
cgtcaagaacgcacagtaaaggaggcggcaataaaggaaggcgtgaatgtgtataggtaacgcaacggttcagagaaaaggagaaataaagatcggacagaactcacaaggctttaagacag

SEQ ID NO: 130954 - DNA, 122 bp, Homo sapiens
tgcctcctggtattccttcctctcattgttctgctttgtttgtaggaagccagacacaaacgaaatcactgcagggacttcagggagcaaattcccgaaggcacaagctgttcttttcccct

SEQ ID NO: 130955 - DNA, 122 bp, Homo sapiens
ccccgtggggggcatcagaatcctgccgcccaacaatggcctttcccaggagagcccatgcgcagggcatggatgaaagcaagctggagagggagagaggatgggaggcgaggaggcagcct

SEQ ID NO: 130956 - DNA, 122 bp, Homo sapiens
taacacaaatgttcgatctatgttctcttccttcaaaccctacatataaagacatggcttcgaactgcatatggccagtaaaaatgtacacaggtctgctgagagacagtatataccagctt

SEQ ID NO: 130957 - DNA, 122 bp, Homo sapiens
cagacggggtggcggctgggcagaggctgcaatctccgctctttgggaggccaaggcaggcggctgggaggtggttgtagcaagccgagatcacgccactgaactccagcctgggcaccatt

SEQ ID NO: 130958 - DNA, 122 bp, Homo sapiens
cgacccgccccgcactggctgcctgggggccacgcccactctgcccggtgaatcctggcccgaccaatggcagccacatgccccaccccctggccatggtgattggttcagagaagggcttg

SEQ ID NO: 130959 - DNA, 122 bp, Homo sapiens
ttggcgtctgaggtaagtttttgtttctgggcggcgttcggtggtgtcccggtgcagccacgcgagagtagaagggtggaaaggggaggtgcccagtgaaatggagcctgtcccgtgcactt

SEQ ID NO: 130960 - DNA, 122 bp, Homo sapiens
aaggactcacagggggccacagagggggtctcagaggggtccactgtggccctaagaagccggaacaggcttgatcttgccccacttattcctctagataccactgctcatttagacacaca

SEQ ID NO: 130961 - DNA, 122 bp, Homo sapiens
ctcagcctttaaaaggaagggaatgccgacacctgctgccacgcgcaggaacattgaggacgctctgccgagggaaacgggccagtcctaagacaaacaccgcatgattccactcagccgag

SEQ ID NO: 130962 - DNA, 122 bp, Homo sapiens
tccgcgccatcttggttgaggacgagtgccaggcctggaggggcggggccgggcgctgcccggtagggcttgtggctggaaccccaggctaggcctttggggaaacgggaccctcaccctca

SEQ ID NO: 130963 - DNA, 122 bp, Homo sapiens
gagacgagctgcctcatccaatgcgccccggtggcgggggagtctgggtgcacgtacaggcggccaggcatggcgggctcagctttgcccgtcacagacctagatgaaggagaggtgtacta

SEQ ID NO: 130964 - DNA, 122 bp, Homo sapiens
tgtgcaaagtcagagaagagaaagattaagaagggtgttgttctggtggtggtggaatttcgcatacctcagggcttagtaaaaaccatgagttgttctgctaatggacacagaccatctgg

SEQ ID NO: 130965 - DNA, 122 bp, Homo sapiens
gtctctaacacagttcttcttcttcttctttttttgttttctgacagagtttcgctgtgtcgcccaggctggagtgcaatggtgcgatctcggctcactgcaacctctgcctcccgggttca

SEQ ID NO: 130966 - DNA, 122 bp, Homo sapiens
tctccacttccgcgtgggtcttggccctgggaggccagtggccgaggctggtctcgcgggcgctcgctccaggagtggcgcgtcccctcagcgccctgtgcttcctcgcagggatcgactac

SEQ ID NO: 130967 - DNA, 122 bp, Homo sapiens
cgcagggcctgctctgcctcccccgtgtttcctcggggttctgcgtctgtgaccggggtgcggagcactggtgtgcagttctctgtctcgtgattcgtgtaacagtgagtgctgcctgcacc

SEQ ID NO: 130968 - DNA, 122 bp, Homo sapiens
gcggcaggacccaggcgacgtgactgcagtcaactaactggtgtcagaacctcaactacccgccgtctttttttttttttcttcttatttggagacggggtctccctctgtcgcccgggctg

SEQ ID NO: 130969 - DNA, 122 bp, Homo sapiens
tattaattttattgtatctcacccagcatggtggctcacacctgtaactccttggcagatcgcttgagcctaagagttcaagaccagcttgggcaacatggtgaaaccccgtctctactaaa

SEQ ID NO: 130970 - DNA, 122 bp, Homo sapiens
acacctgagcggccggcacaaaggccctagggaagtgtgggggtacccttggtctcaaagcgctgatccgcctgtgccccctgacctgccagggccggcccccgcttgggtcttggagggcg

SEQ ID NO: 130971 - DNA, 122 bp, Homo sapiens
accctcacccaaacatcccctttccttacatcctttggtctctccaggttttgacaagcgcgatctgtctgcttccccaagaagtgtccctgagaattctttaagtagctgggaggtggaaa

SEQ ID NO: 130972 - DNA, 122 bp, Homo sapiens
agctaatgcatgccaggcttaatacctaggtcataggttgattggtgcagcaagccaccacggcacacgtttgcctatttaacaaacacgcacatcctgcacatgtatcctagaacttaaaa

SEQ ID NO: 130973 - DNA, 122 bp, Homo sapiens
taatttgaaataagatggcataaatgagtatcaataaatgagtattaaaataaatgtaaacgggttaaataagcaattaaaagacaaagactcttggggaacaaaaatttaaggctcaagat

SEQ ID NO: 130974 - DNA, 122 bp, Homo sapiens
tcgtaggcaaaaagagctgagcaggctgggaacagcgcgggtgggcaagggtcagcactgcgggcaggcgggtgggtgttagggggcagaaatcctgcagccgagggtgcagtagaacacag

SEQ ID NO: 130975 - DNA, 122 bp, Homo sapiens
aatagagaattacattatgccctccagttcaaggtgcagccaagttggcccaaaaagagacgctaatctccagcaaagtccggagagaacagagtaagatttgagcagtggatatcagtggc

SEQ ID NO: 130976 - DNA, 122 bp, Homo sapiens
tactgaggcagaagcaatgagatgccagcgatccacaccacaggactactccattaccctcgaggagtctgtgggtgaagaaagcccctcagcagcatcctccttgataacttcctaacaac

SEQ ID NO: 130977 - DNA, 122 bp, Homo sapiens
tcattggattcttcacaccagctggtgctgaaggttcaggggttgaagttgaaagaagcccgtggggtcctccataaaggactcaaggtgctggccttccaacagcctggtaagagtggctt

SEQ ID NO: 130978 - DNA, 122 bp, Homo sapiens
agaatctagaagcctgggttcttgatccttagtcagtagaaaggaatagcagaggatgtgcgcatgagtgtgaacaagtgtgtttgatgagtgagtatgtgtaagtttgcatgtgatgtgtg

SEQ ID NO: 130979 - DNA, 122 bp, Homo sapiens
ataagagagaaaaacgccagaaggaaaggaggatcccgggcacccatccaaagctgactccgtgggactacaaggtcactgtaagagagtgtctgaaccatgctctggcctcaaatgttcgt

SEQ ID NO: 130980 - DNA, 122 bp, Homo sapiens
agcgacactctgagagatctcctgagcctccctttctccttgcccttggaaaaatggagacgcagctacaaatccctcatctcagtgatgggttcatggcaggggaagacggtgagggccac

SEQ ID NO: 130981 - DNA, 122 bp, Homo sapiens
ggggcgctgaggttctttgagcggcgtgtggacctgaattccctggaaacaggctggggccgcgaggggcctccgctccgggcggggtccccagatagccccgcctcgaataaaaatgacga

SEQ ID NO: 130982 - DNA, 122 bp, Homo sapiens
agcggcttcaggagcccagacctttgggggcccaccttccgcagctttccattggccccacggtggaagcccgtaggttcaggccctccgaacacagctcgctttccacaccagcggggccg

SEQ ID NO: 130983 - DNA, 122 bp, Homo sapiens
ttagaccccggctcttccctttgcgtaatagttgtaatcatgtcccatggtctcctaaggcgtcggagacaagcaagactgcgtggaagggtttttacacgaaaaagaaagcattaaacatg

SEQ ID NO: 130984 - DNA, 122 bp, Homo sapiens
atccccggtggctgtagaggacccctagctagaggtctcgagctctggcagaggaggacccgggcgggggcagggtctggcgggctctcaggccaggggcactcgtgatccagaggccgccc

SEQ ID NO: 130985 - DNA, 122 bp, Homo sapiens
tatggtctcagctggcttctctctccttttaggccattctccttgctttgtcccttggtacgctttaaacttaacagttccctaagactggttccagagcaaggtcctgcttccctgctatg

SEQ ID NO: 130986 - DNA, 122 bp, Homo sapiens
ctaagcagcaggttgagctggagacttctatgataatctcacctttaacctgtggctctgcggtccccaggctcaatttccgaaggctgaggatcgtgacaggctctgttggcttggttgcc

SEQ ID NO: 130987 - DNA, 122 bp, Homo sapiens
acggaaatagcaagcagcgtggcaggcaaccccactcctggccagggccagcacagcagccggcctccgagcctctgtgtgggcctggctcctcctgctgaaatgcttttctctcgaacccc

SEQ ID NO: 130988 - DNA, 122 bp, Homo sapiens
agttctatgagcttttgctatgtacttattctgtgcaaattctgcaagggatgtcttgaacggatggttctttcttgcattgaatgcaaatagtaatttattttgattgagatagttttgga

SEQ ID NO: 130989 - DNA, 122 bp, Homo sapiens
cttggggaacccaggaggggccgggcgggtgcaggacccgcatgagggattccgagagcacgatgtttaaatgttgggggaaaaaatggatcaaagcgatgtgttcccagggagcccctgtt

SEQ ID NO: 130990 - DNA, 122 bp, Homo sapiens
gtgaatcacaaactagcagttgggcattcacagagaaacgtgcagagtgaatcctttaaacgagaaacaagacctgtgcttggtgaatcaggaaaaaaagaagaagaagaaaaaaaggggaa

SEQ ID NO: 130991 - DNA, 122 bp, Homo sapiens
gctttctgcctggctcactgctttctcagcaagttccgggaggactatgtcctggggttccgaaaagggctggggaatgtccaggcacggataaggcacacaagctctctggaggaaaaggg

SEQ ID NO: 130992 - DNA, 122 bp, Homo sapiens
tgcctctcaaaaaactacaataaaaacaaaccaaaattgggtttgatggtctcacttcatcgttaacataaaggaaaaacagtaacacttgtgtcagaactatactcctgccaatggcaaca

SEQ ID NO: 130993 - DNA, 122 bp, Homo sapiens
ataaaaacaaaatccacctactgaaaaagaagcaccaacaggccttcgaatccacttgggcggcttcttcagaggcagcactatactatgctgagcagtctgctgtggaatttgtaacggag

SEQ ID NO: 130994 - DNA, 122 bp, Homo sapiens
cctggccagcccggccagcgtgtggtagggtttgtggcagtggaagcactcaaagccgcccggggctcggggcatccgctcagccccaagcagtttttccggagccccgtgccggtctgggc

SEQ ID NO: 130995 - DNA, 122 bp, Homo sapiens
ctctgtcacccaggctggaatgcagtggcctgatctcagatcactgtaacctctgccttccgggttcaagtgattctcctgcctcggcctccctagtagctgggattacaggcatctgccac

SEQ ID NO: 130996 - DNA, 122 bp, Homo sapiens
ctgtcatgtcgctagtgggcatttcctttagtatgctaatttattataattagtgtataacgagcagagaggacaaccagagattgcttttgtggtcacgtgggttttgattgattttcact

SEQ ID NO: 130997 - DNA, 122 bp, Homo sapiens
cagtgccccctccttttctcattgccctggagacctgggtgatcaccggagaactgccctcggccccgcaagtcccgtcttgactcagtggccctagatccgaggttaaaccggaacctagg

SEQ ID NO: 130998 - DNA, 122 bp, Homo sapiens
gctaccggctgctgtgaaagcagacgttcacacactcttgggctccttcgggcggcaccacggaagcaacctgtccacactcctgatccgtcgtgggcgcccagaccctttagggcgggtca

SEQ ID NO: 130999 - DNA, 122 bp, Homo sapiens
ttcacttcaattcctcctaaaagaaccagctgcatgcctgctcaggctcagctcactggacgcttgtgttgtggagggtgacctaaagcagaatctctgaaaaagagcatcaacaaagactt

SEQ ID NO: 131000 - DNA, 122 bp, Homo sapiens
cccgaccgcccaggaagcgcgagcttactggctccagaagtgatgatgctgggtggaagtcgcagcatgtgaagagttgccggttgttatgggattaaaaaagatgaaagggtaaggtcttg

SEQ ID NO: 131001 - DNA, 122 bp, Homo sapiens
gctcagctccctgaagcggcggcgaaggcggcggcggcggcggcggcggcggcagcagcgcggctcggtctctggtccattcactccacgctttctgcagccgccactgcagccgcgcggcg

SEQ ID NO: 131002 - DNA, 122 bp, Homo sapiens
tctagtgtcctccagctacaatgtgaagtggggcattcgcagacaagacacttctcaccccgggcagccttcctgagacttgggggacaagcttgccatggactttaggtttctatttattc

SEQ ID NO: 131003 - DNA, 122 bp, Homo sapiens
gatcatataggaccctcaggtgcttgcgagagcatatggtatgttctttgcccctgggaacgttctcttttggacatcagctgaatccttacaagctctagtgttgctctagtctagactca

SEQ ID NO: 131004 - DNA, 122 bp, Homo sapiens
gttccatttacgtctgtgccggcagggatgcccggctcttgttcgggcccgtgatgttgacgtgtgaccagtccctggtgtggccccgtgaggccccctcacaccagacaatcccccgcgtg

SEQ ID NO: 131005 - DNA, 122 bp, Homo sapiens
gcctccacgattccttggcatgcgtgtcactctgggcaacaggctggtcggccacgactgcgcaggcgagaggcacagagcgactggagactgtagtcccccggtttccctggagaccaggc

SEQ ID NO: 131006 - DNA, 122 bp, Homo sapiens
cctaagctgcctccctccctagcattggcagagagatgggcaggtggcctggaggatgggcgctggggcaggcgcggtggttcccaggcctgtgtctctctcctgtaatcctccagagatcc

SEQ ID NO: 131007 - DNA, 122 bp, Homo sapiens
attgcagagaggaaggaagccgaggaggggagcctgcagtgagggcgtcctggggttctccggttctcaccacccttgggccacgccgtctagtccacacctgaggagttggtcaggtagaa

SEQ ID NO: 131008 - DNA, 122 bp, Homo sapiens
gcatgtattaaaagcagtagcctgacagcagaagaaagttaacaggaaagagttaggacacgaacaaagaaatggcgaaggaaaaatcagaaaaagaagggcagatcttgaaatgtcagctt

SEQ ID NO: 131009 - DNA, 122 bp, Homo sapiens
cgcctgcccagccctcctgctctggtgactgaggaccgccaggcaggggctggtgctgggcggggggcggcgggccctcccgcagtgcaaggccgggcctggcggggtgaggtagtaggttg

SEQ ID NO: 131010 - DNA, 122 bp, Homo sapiens
cccggacctgcagggtagctgagcggctggagatgtcattctcgacaaagggtgacaccccggcgatgtagtcaggggcgaacacgttggttttctgcctggccttttgggagagtcgcagc

SEQ ID NO: 131011 - DNA, 122 bp, Homo sapiens
aggttcctgctccttctcccatcaccggggctggatcctggcgctgctcccctcctttcccgcctcacccacctggcagcagctgtccctgatgttaacaaggtgcacctgaaccagtgcct

SEQ ID NO: 131012 - DNA, 122 bp, Homo sapiens
aaccctcttccaagaggtgagtgtgggagacagaataacggccctcaaaggtgtcacatccgaatctccacctgtgaacactcctcacatggcaaaagggactttgcagatgagaatagaaa

SEQ ID NO: 131013 - DNA, 122 bp, Homo sapiens
gctcacgaagtaagaatggctgggccaacgcttctctgcagaggctgcaggtgcggacaccgacagccatgcacagtcctcccaggaatattcttgtatctgctgtgtcttgcttagccatg

SEQ ID NO: 131014 - DNA, 122 bp, Homo sapiens
aatcattggatggggagcgaagacgaccagacgtatgactacggttactccgattgctcccgaggctgctgctcctcttttgatccataggcttgcgatgctgtgcatcttctatagtcacg

SEQ ID NO: 131015 - DNA, 122 bp, Homo sapiens
agggtgcctgcatctaggctggggctgccctcactgcagccctggggtggggggttcctccgcctccaggggcgcccgcagcgtccttacctggctcctcccgcgtcctgattgacctttac

SEQ ID NO: 131016 - DNA, 122 bp, Homo sapiens
tgcaaagcccaacctggcgttccgaggggccctgcgtggcgtcaggggagacccaacccgcgtcccgaacccacctcaaccttgggaaggacccagccccggcatctggagaagcccaaccc

SEQ ID NO: 131017 - DNA, 122 bp, Homo sapiens
tgtgagaatcctgggagttggtgatgtcagactagttgggtcatttgaaggttagcagcccgggtagggttcaccgaaagttcactcgcatatattaggcaattcaatctttcattctgtgt

SEQ ID NO: 131018 - DNA, 122 bp, Homo sapiens
agccccgaacaagagggggcagcctggagcctggaaaggtgccagtgcaggtggggcccacgcccagatttctcctgctgactgttctgatgattcacccccacatcccagcctttttacct

SEQ ID NO: 131019 - DNA, 122 bp, Homo sapiens
ggctgaggatggcatttctccaaaaggtaaccctggccccttacctgggccctggagtgccggggaccacatctgggaagcgtccgaggacacgtggggcaggagtggagggcacccctttg

SEQ ID NO: 131020 - DNA, 122 bp, Homo sapiens
tttctactgaacatacagactgccaaatgtggtgacttaagtattcccaaggccagaaagcgtcaaatctataaacagtttatgaatgagtataaattttcaacaatcaagaatgagtactt

SEQ ID NO: 131021 - DNA, 122 bp, Homo sapiens
gcccctatcaacatgtcttgaaggtgtggccactggccgtttgcatcacctttctgtctacgtagcacctgtcagtgacccctgaccccagagcacctgcccttagccttgagaagcctgta

SEQ ID NO: 131022 - DNA, 122 bp, Homo sapiens
aattcggccttcttcttcaggcttacaggtcttttcatacacaattctgtctttgggaggcgcttaacactctcttcacctaacttctaattattcctcaaaattcagttcaggtgttgtgc

SEQ ID NO: 131023 - DNA, 122 bp, Homo sapiens
gcagccgctggctctcgctgcagttcatggctttcggggagtgacacggcggctccaggacgctgctgacctttccccctgggcgaggggaagcgagctagcgagcgggccggccggcgggc

SEQ ID NO: 131024 - DNA, 122 bp, Homo sapiens
tccccaggtccgcctgtgtcaggggacgctcctgggattcacctgcctgcgtcctaggctcggggacactggcccggagctttgcctgtgtgtcaccagcagtagggggcaggtgtgcctgt

SEQ ID NO: 131025 - DNA, 122 bp, Homo sapiens
gcctccagctccaaattgccaacaacaagtgtggctactatacgtcaaggactctgaagccgtgagagagggggaagaacaacagtagagaggatgcccagctggtaagaatcgagtgttta

SEQ ID NO: 131026 - DNA, 122 bp, Homo sapiens
atctggcattccgttgcgtttctgctaagcactcccgcaccagtcctccagcgtgaatcacgccgcgctgcatcctctccatggagctctcgctccccgcgtacgtggttctgatctccctc

SEQ ID NO: 131027 - DNA, 122 bp, Homo sapiens
tccactggactttaaaaaaatcccctttctggctttttctgctgtttgtcactagtttatcgagatctctgtcctcttggattccttgatgcctcactctcctggttgtcatgacacctcaa

SEQ ID NO: 131028 - DNA, 122 bp, Homo sapiens
acctggacacagacagagacagagccaggcccggccctcccgcccccgacctgaccacgccggcctagggttccagactggttggacttgttcgtctggacgacactggagtggaacactgc

SEQ ID NO: 131029 - DNA, 122 bp, Homo sapiens
ctaccgaggtgcatcctgcaggctccttaccgcaagcctgcaaactcgccctgccgggcgcggagtgcaattaggctttggggtggtttggctctccggctttccgtagcctctggccccgc

SEQ ID NO: 131030 - DNA, 122 bp, Homo sapiens
aagcaagcgtcacgacgtgaagggactggagattttttttttcccctctaatttatcaggcgtagctcttggtagctgaatggttgtatatctgggtttggtgctgggaactgttgcatcta

SEQ ID NO: 131031 - DNA, 122 bp, Homo sapiens
tggagagagatggagagaggcggagagaggcggagagagacggagagaggtggagagagacggagagaggtggagagagatggagagctacggaaatgaacagtttcaatggcacgggaggc

SEQ ID NO: 131032 - DNA, 122 bp, Homo sapiens
ttgcttaatttttccaaagatagaacgcagtagtccttgaactacagataaaacctgcatcgtcagaggtaaacaagaaagcagatcaggcagaagacacactattacactattattaagag

SEQ ID NO: 131033 - DNA, 122 bp, Homo sapiens
ttcctggcagaggaaggacagaagggaagggctgggggctgctggtgaagaaggaccaatcgtcaaaccgagaggccagaagtccaacttggcacaatggattttcactttcttataaatca

SEQ ID NO: 131034 - DNA, 122 bp, Homo sapiens
gccacagacgcccgatttcctcggtgccatgtgggctcctagctgccgccacagagcggccggatcctaccagggtttcccagtgcccgggtacctgcaagaatcttcccaggacgggagca

SEQ ID NO: 131035 - DNA, 122 bp, Homo sapiens
cctcggcagctggcagtcgcacttctgtcacaaggaggcgggtagactttggaccagggccgaggcccgggacgtcacggtggggggtggggtctcgggaggcacgtgatgcgccgtgatga

SEQ ID NO: 131036 - DNA, 122 bp, Homo sapiens
cgcacgcgcacacaggcagacgctaggggtagagtgtgatggttcaaaaagaaaaggaaacgcttaaaggtagtgaatcacgttttgcccaggaaaacacacttgataactgaaggatgatg

SEQ ID NO: 131037 - DNA, 122 bp, Homo sapiens
ctctcacccccatcccccgcagccaaggaataaggaacccactcacagggcttttgagaccgagagagacaacagatgccttgaatgaaaaccatgaatttaatgtgacattgggggagcct

SEQ ID NO: 131038 - DNA, 122 bp, Homo sapiens
tctggcagggagagaaggggcctcccagggacttcccctcccccttagaacaggggggtgcgagctggtatggatgccctcctgggcttcctgggggctctgcccactccagactccagttt

SEQ ID NO: 131039 - DNA, 122 bp, Homo sapiens
actgcttccaagtcccagagtccggaaagctcagcaacaagtgtgccgcctgcagcctgccggccagagactcactcagaagccccaatgccagatcgggcctgtaccacacacctacccag

SEQ ID NO: 131040 - DNA, 122 bp, Homo sapiens
cggccctcagtgagcggtggctcgggttgttgttcttacgtgaacgacaggcagagacagcgcctcctcctctccccatggtgcgggaaaacccgacgggaaagtgggggaggcgcagagaa

SEQ ID NO: 131041 - DNA, 122 bp, Homo sapiens
gagaggcagccaggatcttcccttagagcccggcgagcgggcgcggccctgcctacaccccgacttcatcccagtgaggaggacgtcggacttctggcctccagagctgtgagaaaatacat

SEQ ID NO: 131042 - DNA, 122 bp, Homo sapiens
tggcgctgtggggatagggaggtcccgcgctccctgaccgatgtagggcgggccctattccggggaggtgttgggcaccaacatttttaaagccccgtgggtggttccctgggatcgcccag

SEQ ID NO: 131043 - DNA, 122 bp, Homo sapiens
gcggctgcacttgctgggctgggctgagtcccatgagccagggaggggggtctctggcgccgcgcccggacaaaacacaaacgtcacagaggcagcggcggccaatcagtggagggcgcgcg

SEQ ID NO: 131044 - DNA, 122 bp, Homo sapiens
cgttttggagagaagcccgcaggtctgtggtactgaggctgctccgagaccccggtttatcgtgagcagtcatcgccatgcgtcagctgggacagcacgggctgactgtggcagacaacggc

SEQ ID NO: 131045 - DNA, 122 bp, Homo sapiens
ctggttgagtaagggaggaggctcgtcctgaacgtgcacagccgctcctaactccgtcaacggaatttcactcaactccgagactgaagcattttattggcagcatttagaatcggggaaaa

SEQ ID NO: 131046 - DNA, 122 bp, Homo sapiens
atgagagaggaaacggtcgacggtggccgatagtggtcctactgtcgtgggactgctctgcgcgctcccggtggggcgcgcctgcgcattatgctggtctccatggcggggcctcggagcca

SEQ ID NO: 131047 - DNA, 122 bp, Homo sapiens
catccatggaagtgaatgtggacacactggagcaagtagaacttattgaccttggggacccggatgcagcagatgtgttcttgccttgcgaagatcctccaccaaccccccagtcgtctggt

SEQ ID NO: 131048 - DNA, 122 bp, Homo sapiens
agactccatttaaaaaaaaaaaaaaaaaaaaaaagaagcaccttcaggctggagaagcagcgtagctaacacaagtccagtccttgtgatgtggctggtagttggggatggccaggctgaag

SEQ ID NO: 131049 - DNA, 122 bp, Homo sapiens
cgagtcccccctgccccgcctaaccccagcttttacgctggtcctgggagaagggccactcggccaccatgcctgatctggacatccccagggaccccaccagcccggcccgtagcccagcg

SEQ ID NO: 131050 - DNA, 122 bp, Homo sapiens
ctactgctgatatggtaaaaataatggtgatacttgcacttcactggcatttgcaaaacccgtaagataatatcttacatatatacatgatttgtagctcccttcatgtagaatgattttaa

SEQ ID NO: 131051 - DNA, 122 bp, Homo sapiens
taagatcgatctggaagctgacttccttcgaacaaaatgagaacaaatcttttacagcttcgactggatatataaaatcatttagtgtgaaatggctccacaattctttatctcatttctct

SEQ ID NO: 131052 - DNA, 122 bp, Homo sapiens
agaaaagaaacttctcgagcggctccctgaggttgaggtgccccagcatctgtgatcctccgggaccccagccctcaggattcctgatgctccaaggcgactgatgggcgctggatgaagtg

SEQ ID NO: 131053 - DNA, 122 bp, Homo sapiens
ctagtcagtacaagaggatttttcacccaatatgttcatcctaagtatatttgcataggccgtgccaacatgagcataatagattgatactcaatacatgccaatgagcaaataggaataac

SEQ ID NO: 131054 - DNA, 122 bp, Homo sapiens
ttgttgccagttatagctgagaaacaaatgtggctgaagggcacccctacccacgttggccgtgaggccgtttgatgggctttgtgtgaggaatcctgagatgagctggccggggagtgagg

SEQ ID NO: 131055 - DNA, 122 bp, Homo sapiens
tcagagtggacctgcttcagcaccttgtgcaagtacacggagtagctcgccttgcggctgcgcttggtttcttgccgtccttcttctgcgccgtagtcacccacctcttggagccctaattg

SEQ ID NO: 131056 - DNA, 122 bp, Homo sapiens
ggagaggttgcattttcaagccagatatggtgagagtcttctggtgttgcatagagggcacgtctgaagctcctgaagcctggggtctcaagggagagacagagcaaagcacagctaatgga

SEQ ID NO: 131057 - DNA, 122 bp, Homo sapiens
catcctccggccgccctggcgccagctgccgactcctgcacagacatgaagcgggggccgcgcacgcctaagaagcccaagccagccaatcaacgccgcgcgcctcccagcctccgcctccc

SEQ ID NO: 131058 - DNA, 122 bp, Homo sapiens
tgggtgggatcacagggatctcccagtcaggcctcctcctatacagaagtctgaggtggccgggagagaaagaaagaaagaaaagaaagaaagaaataaggaaggaaggaaggaaggaagga

SEQ ID NO: 131059 - DNA, 122 bp, Homo sapiens
agccattaacacgggctcatcacatctgtttccagattgcttctagaacttagctaccctcgttctataagatggaatgaaaatgcgtactacatacagatcatgaaaagacgcaaagaaaa

SEQ ID NO: 131060 - DNA, 122 bp, Homo sapiens
ggacctcgtccggctggcccagctggaagcccttcgatttgacccagaatttaaatttggcgttgtccgtggagctcgactcggagccattgaggagctggacgatccgttcgtatttttta

SEQ ID NO: 131061 - DNA, 122 bp, Homo sapiens
cgggacctgcttcggatccctggagggctgaggattgaattcaggagcctagggattctccgggtcctgcaggcagagctccaactggtgggtgaaagttacaaggaggcaggtttctgaag

SEQ ID NO: 131062 - DNA, 122 bp, Homo sapiens
gcttccaaggccaattctgtcttgaagtcaatgcatgtatttactgtttgacagtaaacccgctctgccttctccacgtccaaggctgtgcattcgtctaattagcgtcgtgtatgttttcc

SEQ ID NO: 131063 - DNA, 122 bp, Homo sapiens
tgtcctggccacccacatcccatatgttgaacttgacatttttgtaagtcactgtctccacgttgaaacccacagtgggaattgtggtcaccgactggcccagcttcaacatttacaggatt

SEQ ID NO: 131064 - DNA, 122 bp, Homo sapiens
aaagttgaatttctaggaaacgtgcctttgttttttaatatgcactccaaattagaaggccggccccgtccacattttgcacagtgcctttacagatttacgtatgggctgatgaagaggcc

SEQ ID NO: 131065 - DNA, 122 bp, Homo sapiens
ggaccagctaaagttttgtttgtcgcgctgctcatattgatgaccttgaggttgccacaccggctgctgcgggctgcagagggaacaaagcccagcgccctcggggacaggggtgagccgag

SEQ ID NO: 131066 - DNA, 122 bp, Homo sapiens
acttagccaagatcttgttcagtgaggtaactggataatcagacagatgagctttgcaaacgctagagggggcgagagcagccaaaatgaagcatcagcctgccaaagctaggatgccattt

SEQ ID NO: 131067 - DNA, 122 bp, Homo sapiens
cggcgcggggctgagcccagagaggcttccagaggctgcgggacccgcgggggacggttccgaggcagcgggcgggcggggaccgggcgccgagagacccgggcgccagtgcccctggagcc

SEQ ID NO: 131068 - DNA, 122 bp, Homo sapiens
gctggcagagtactaatttaattggatgtccacctctcccatgtgagacctaagggtaaacgctaattagtttaagagagtggggcaacctggggcaaccttaacccccaaggaacatttgg

SEQ ID NO: 131069 - DNA, 122 bp, Homo sapiens
agtctcctgaccctataggcacagggcagaggagaagagggtgagtaatgattttggcagcggtggggtaaatggaaagtaagcaggacacaccaaatgggggactcctgggaacaagacat

SEQ ID NO: 131070 - DNA, 122 bp, Homo sapiens
ccctcatctagctctgttcaggagagctgcaaacacagagcccaccacaagcctccggggcgggtcaagaggagaccgaagtcaggccctgaagccggtcctgctctgagctgacagacttg

SEQ ID NO: 131071 - DNA, 122 bp, Homo sapiens
tcgcagaactcggtcggctgcggttcatgctggcagtcaccgcgaaatgcgccctcgactcgggatcgcactggaaaccttcgccacactgtgccaggtctgacctcccaggagcgcgccaa

SEQ ID NO: 131072 - DNA, 122 bp, Homo sapiens
ctatcgcacgatagtaacatttccccttctccagcccttttcatctcgaagcacttacaacgttttagaaatctcggaaccccctccaaaggagaggaggtgctctgagccttccggaaggg

SEQ ID NO: 131073 - DNA, 122 bp, Homo sapiens
gcctcccgcggcggctggcgtcgggaaagtacagtaaaaagtccgagtgcagccgccgggcgcaggatgggatccggctcctccagctaccggcccaaggccatctacctggacatcgatgg

SEQ ID NO: 131074 - DNA, 122 bp, Homo sapiens
aataagcatgcacgttggaaacgatctcgccgtctgtgtggagcgtgaatgacgcagcaccgagggcaccctggtggctgcagcagggtttgcctgtggcgttttgtctctggcctgttcac

SEQ ID NO: 131075 - DNA, 122 bp, Homo sapiens
attctactctgccagtgcctgtcttttttactggtgtatatagataatacacattcaggccgggcgcggcggctcatgcctgtaatcccagcactttgggaggccgaggtgggtggatcaac

SEQ ID NO: 131076 - DNA, 122 bp, Homo sapiens
ttaatgcacagggctagagacaaccactcagacatctggatggtcaagaggcccaggcatcggcccagcttagccactgctgatgcagggcaaatgatttcccttcttagcttcttcacctg

SEQ ID NO: 131077 - DNA, 122 bp, Homo sapiens
cacctgaagttccagccactcaggaggctgaagcaggaggatcacttgagcccaggagttcgaggctgcggtgagttgtttgagttgttgtgatcacactactgcactccagcctgggtgac

SEQ ID NO: 131078 - DNA, 122 bp, Homo sapiens
atgggacggccctcgggtccgagcgctcggactgttactgagggtcaccatgcccgacgccgtggccctcattctgctctgacatgttttggctggatcaggaatctctcggcacatctagc

SEQ ID NO: 131079 - DNA, 122 bp, Homo sapiens
cgccggcaccatgtcagcttaccctaaaagctacaatccgttcgacgacgacggggaggacgaaggcgcccggccggccccttggagggacgcccgagacctccccgacgggcccgacgcgc

SEQ ID NO: 131080 - DNA, 122 bp, Homo sapiens
cgttttcattttgccctgggcctcatgttacgtagctggtcctggtgttaggtacccggacgcaccacaaacgaaacagattcgttccccgcagagcttattagtctagtgagagaaacata

SEQ ID NO: 131081 - DNA, 122 bp, Homo sapiens
gtggtttcctgctgttgaacccatggctggccctgacggaggacacctgcggaataggcacgttgtccacaacattctcaatcctcagcgttcacttggatcttgtgccgtgattatcactc

SEQ ID NO: 131082 - DNA, 122 bp, Homo sapiens
tcctggcccccctaccccaccgcgtctcctaggtgagaaaaacacccataaccatcctcacgggcacccagcaaccctgaaacactgtgtctcgggcaacttttcgagctgcagctgttccc

SEQ ID NO: 131083 - DNA, 122 bp, Homo sapiens
cctaactaagctgaaggtcctcctggtggccttggacagctgggccacaccttcctctgccgtctaagtgccagcaccacagcttaatcagacgacaaacatgtcatggacgctacacctct

SEQ ID NO: 131084 - DNA, 122 bp, Homo sapiens
cctccccacgatgatccccgcagccagcagcaccccgccgggagatgccctcttccccagcgtggccccacaggacttctggaggtcccaggtcacgggctactcggggtccgtgacacgac

SEQ ID NO: 131085 - DNA, 122 bp, Homo sapiens
acacaagcagcctctgcagccagcctcctcaccgtttcacagacgagaagaccaaggccccgggttgccccttgagtctgggcactggagacccagtcatgctgctttccagcccatgacct

SEQ ID NO: 131086 - DNA, 122 bp, Homo sapiens
tgcacaggctaagccagccttcagaataaaaacacaatgcaggccaagcgcagtggatcacgcctgtaaacccagcactttgggaggctgaggcaggcagatcacgaggtcaggagatcgag

SEQ ID NO: 131087 - DNA, 122 bp, Homo sapiens
gacacctctaagctctggcacctgtgaagccctttaaacacccttaagccccaggctccccgtttacctcagagacgtctatttttgtgtctttttaatcggggaggggggagggggtggtt

SEQ ID NO: 131088 - DNA, 122 bp, Homo sapiens
cgaacccgcggcaagaaagccgaaatcacttggcctcagcaaggaagcagggagattgcccgggactaaggcagcagagacccagtgggtttccacactggggacccagagatctaggatca

SEQ ID NO: 131089 - DNA, 122 bp, Homo sapiens
aggtggctcctcctgaagatgcttgggctgacctgagcgtactccaaacaggggctgagacgtgaggactggcgataaaacgcccctggctcacaacaacctcatcttgccagaaacatgcg

SEQ ID NO: 131090 - DNA, 122 bp, Homo sapiens
attgtttacagcttctgaagccccagcgggcatgtgttatagggtgctcttttagtttcccgtctataggtgacttgtgttcatcagctcaattcgacccccttcgttatcacaaggacaga

SEQ ID NO: 131091 - DNA, 122 bp, Homo sapiens
agtgaatgtctgtaaacaaggctctttttccaaaacatttattaagctgaactattattacgcatgcttcattttaaaccaggacttcattagtaaatggggttgcaccccattaccaaata

SEQ ID NO: 131092 - DNA, 122 bp, Homo sapiens
atgggaggcagctgtggggtttctggctgagaagggtgcatgatggtggaggggggcaggcgccctcgagagaaccgggccttccccgggttccctgaaaaagctcccaaggccccggccgc

SEQ ID NO: 131093 - DNA, 122 bp, Homo sapiens
aagagagctgaagatcactttatcttgaaagggcaaaggtctccgtgaccaaaggctaaccgcatgtccttggaagagaaaaagaaaaagaaaacatgaaacaggctaaaggggtctctgaa

SEQ ID NO: 131094 - DNA, 122 bp, Homo sapiens
gccaagaaagggcaaaataaagcagtagcccttttatttaaaaatacagcattgttctcacgcaggactctgtgcaaagccagagagaacaggttgtgctcttatgtgtgtgtgaagataga

SEQ ID NO: 131095 - DNA, 122 bp, Homo sapiens
cggcccggctggctcagtgggcgctgccaagacccgcccgtggcgccccgcggggcggggcggctaccggcccacgccctctccaggcgagttacctgccggccccgccggccacgtgaccg

SEQ ID NO: 131096 - DNA, 122 bp, Homo sapiens
ctgagctcttgcttctcacctctaccccgtctccccggccaccagcccgggaatcccagtcggtctccttgcagcccaaccaggcctcggtgccgcaccccacagtgagcagctggggggtg

SEQ ID NO: 131097 - DNA, 122 bp, Homo sapiens
ccaacacagcgaaaccccgtctccaccaaaaaaataacgaaaaccagtcaggcgtggcagcgcgcgcctgcactgggcaggctgaggcaggagaatcaggcagggaggttgcagtgagcaga

SEQ ID NO: 131098 - DNA, 122 bp, Homo sapiens
agggaacagaaaaagaacaccccggagtttactgcgctgactctctggcggagttaacaacgtctagtctgcaacaggagctcaacaaacatgtgagcaagtgaacttgggccaggcccaaa

SEQ ID NO: 131099 - DNA, 122 bp, Homo sapiens
acctctccttccggccaagccttcgcgctctcttcccctccctcggtttctatccgctcccgttagctccactccgcacattcctgcaaggtgtccccgttaagaggaggcagctgcgccgc

SEQ ID NO: 131100 - DNA, 122 bp, Homo sapiens
cctactttggtgcccgaggaaatggctgtttgtgatgctggggaaaagtcaagatgctgacgcctaatggctgttctagcctttccaggtttgtaacatgaagatggggaaggaaatggcac

SEQ ID NO: 131101 - DNA, 122 bp, Homo sapiens
cgatcccaccgttaggaaccgggacctcaatccgcagcacccggattccgagaacagaggcgtcggggccaaatgggctgaatctggtacctcactcccacgcccccgggtggacagcgacc

SEQ ID NO: 131102 - DNA, 122 bp, Homo sapiens
tgggcaaagttaggcccagtggctctgggacccgtaaaaatgtgagcgccaaaagttccacggtgagggcctccagagagtgagagacaaaatgtatgtggaatttagcttaggactgggaa

SEQ ID NO: 131103 - DNA, 122 bp, Homo sapiens
cagctatgcctcattatatcctcttcctgttgtagtttggacacaattgaccaggattaacgttaaagtagagatcattagactgacggaacagacacttggtggcagtaagatatcaaatt

SEQ ID NO: 131104 - DNA, 122 bp, Homo sapiens
tacaatcaacccaaccattagcattctcagtgtgcatgctcacggcaaaggcttaggcgccgctcggaagggcgggtaccagtggcgagtccagggtcacccacataccatgcaccacgggt

SEQ ID NO: 131105 - DNA, 122 bp, Homo sapiens
accccaagacagccttacccagaactctcaggcttcacaggacagtgtggaagtcccactcgctgaaactcaaggccctggtgactgcatctttctgttcactccccagatactgtctgagc

SEQ ID NO: 131106 - DNA, 122 bp, Homo sapiens
ctgcacctccgggcgcggggcggggcccggggagtgacgggggcagtcgagatacggaaacgctggccctccaagacaggccagagcggccctatctggcctgcgtggcgcagtacagcgct

SEQ ID NO: 131107 - DNA, 122 bp, Homo sapiens
ttcaaacccgctcgccttaatcaattagttcgtgatttgctgcagacccctgtctctccgcgcgctggcccaataagccggccgcggggctggctctgcgcgccgcgccgcccgacactggg

SEQ ID NO: 131108 - DNA, 122 bp, Homo sapiens
gcctccacagctcccaggtggctcctaagcaccccttgggcagccacggaattgtcagagcggaacgacttggaagtaaattcgagttaagtgcagccacatcaccctgcagagacgtgggc

SEQ ID NO: 131109 - DNA, 122 bp, Homo sapiens
tacacagtaaacaccttaaagactccgactaacactgctactttgttgctctttttatatcgaactcccctcccccagcaatttttagatacattctctcaggttcctgatgttgcctgtca

SEQ ID NO: 131110 - DNA, 122 bp, Homo sapiens
aagacagaggaggtggggggtcccccaagccccagccattttgtggctcgtaggggttgtcgcttcccaagccgtgaatggcccaaacccgccccccgccccaggtcggactcctgccccgc

SEQ ID NO: 131111 - DNA, 122 bp, Homo sapiens
acaatgcatcatgataaggaatgcagtagagataaacccagaggttatgagaacccaaagcgggggatacctattccagcctgagcaagggtaggggaatcaagatgaaccctgtgggtaag

SEQ ID NO: 131112 - DNA, 122 bp, Homo sapiens
agagataaagagatgcagatgcgcaaagattcacgcagagcctgctgggacagagggtggcggcgggttcatccacacgtccacaccagcgtgtgtgcttgggtggcggcggcgggttcatc

SEQ ID NO: 131113 - DNA, 122 bp, Homo sapiens
ccatggctttaaaatccacccttaagctgatgatgtccagatgcgagtgtctagccctgacggggcccccttctgaatctacaggctcacatctctcctggatgtctcatgtggctatctcg

SEQ ID NO: 131114 - DNA, 122 bp, Homo sapiens
ggctctcccgtctcccttaggtatctgcaatcccagctgccccagaatactttgtgcctgcgcccaggcaagcccctggcccagccctttcttcttacagcctctcgcatcccacaaaaaag

SEQ ID NO: 131115 - DNA, 122 bp, Homo sapiens
gagcttggggtcagcgcctagaagttcctgttattgtcgttacttacccttgcccgctgacgtgcactttttcacccagtatctaccgtggaagaatttattttctcactgtcagcctaatc

SEQ ID NO: 131116 - DNA, 122 bp, Homo sapiens
ggcggccccgggtctcaggcctcaggcggaccgcgccccgggctcgcagccctcccgccccggctgccgggctacggggcagatggactcggagcgccccgccggtgagtagctacgacccc

SEQ ID NO: 131117 - DNA, 122 bp, Homo sapiens
ggtccctgtggttacctggtgacagatcacagaaagtcccaccctggtagaactcctgggcgtgggtcagagcctggacttgcgtcacagcaggaccaggcggctaagcagggagaagagcc

SEQ ID NO: 131118 - DNA, 122 bp, Homo sapiens
agtcctgctctgcttggccctgttacccaggacttctgctgtcactcaggatgcagggggcggggcctggcgctccacccaatcagagtcgccggggtggggcccggccaactgtttatccg

SEQ ID NO: 131119 - DNA, 122 bp, Homo sapiens
gcctcggccagcccagaccagcagaagggtcctgctcccccttactctccctttcctgggcgccgggcccttagaaagccagcccagactttccctgcgtggtactgcagattctcaaccat

SEQ ID NO: 131120 - DNA, 122 bp, Homo sapiens
cggagcgccgccagcgcatgcgtattggggatctgaggccagcgtcttgcgccgccattgcggggaggctgtcctcagagcaggtctggcgcgccggtggctggaccggccccaggagccca

SEQ ID NO: 131121 - DNA, 122 bp, Homo sapiens
gggcgcgtagagacttgctgctcccatagcaacgggaccagccaccctctacaggcctgacgggttacttccgttcaccgtcggctgagccaagaaaggccgcttccgatcctccagccccc

SEQ ID NO: 131122 - DNA, 122 bp, Homo sapiens
aaaaagtgaatccaaagcaagcagagcccacagtccagccccccggccccgttttacagacggggaaaacgcaggtccaagaggagcaagaacttgctgagcatcacacagtgcttctaggg

SEQ ID NO: 131123 - DNA, 122 bp, Homo sapiens
ttgacacgaggccaagcaaatttcccagacaaggctttattaggggcttccgttccaccacgggggagacagcaccgcagggagaggtctccggctggctccccaggggactgcgttgtggc

SEQ ID NO: 131124 - DNA, 122 bp, Homo sapiens
gattgaagcataaaagaatattagaggcagagtcagcaaatagcttgcttcagtatttagcgtgagctgattcaatagcttggtctactaaaagggtacctatataaggacctaacttaaaa

SEQ ID NO: 131125 - DNA, 122 bp, Homo sapiens
attatcccacctgacgatacagacaaacagccgacattctgcactcagtgaaaaagattccgttacaagctagggtgagttcataacgcgctggtatgagcaatcctattatttagcgtcct

SEQ ID NO: 131126 - DNA, 122 bp, Homo sapiens
ggcggcggcggcggcgtggtggtgcctgcccagaagttccgagtggagttgtacctgatccgccgccgctccggccgccgccgccgccactgccccttcctctccgctcaccctggcggcag

SEQ ID NO: 131127 - DNA, 122 bp, Homo sapiens
acatggtactactggaggtccccacacgcagacttgagccagtgccactcagggtgtctccgtgatcaaggactcacacacaaccacacacagaacccagaggcaaattgaaaccaaaaacg

SEQ ID NO: 131128 - DNA, 122 bp, Homo sapiens
cgctgctccctccctcccttgctctgaggattagacacaggagatgctgcctcatactctcgcgagacggacggagctcttcgatcgtccgattctcccagccgcaccacgggtgctcccac

SEQ ID NO: 131129 - DNA, 122 bp, Homo sapiens
tctgacaatggcttcccagggaatttgtttaaacacccaagtggcagacagcaacaaacccgcaccacaagcaacagagtgccgtcacgggagtcgtaactactttttctttctctcttccc

SEQ ID NO: 131130 - DNA, 122 bp, Homo sapiens
ggctccgcggtgttcacccgcgacccgggtatgcctgcgcaccgcgcgcctggcccgcagcgggctcctagccaagcctcatgttcccgcgccccagtcggccagtcggttctgcaaagctc

SEQ ID NO: 131131 - DNA, 122 bp, Homo sapiens
caaccggtgccttgtttccggtgcagaagcctggtctccccgttcggagccggcagtctgcgcttgagacgttaagacttgagacaggccagaggagctctcagggccggagggaggccagg

SEQ ID NO: 131132 - DNA, 122 bp, Homo sapiens
gtaaagaggccggacacggaaccgctcgtccggtgaccgaagagacggcgaggaggagcccgcgaacccgcctctgttcaggccccgcccactcgacgtaatttgcccgcccctctccaccc

SEQ ID NO: 131133 - DNA, 122 bp, Homo sapiens
atggtgtgagtgctggtcctatctgcttatcattctttagggacaagactgccctccctacgactgagccttgtctatctggcgtctccagtgcccatcttcacagctaacactgggcaggg

SEQ ID NO: 131134 - DNA, 122 bp, Homo sapiens
gcaacaaggcagaaagaatcccgggggacccaggtcgccatagcaacgggagcgctggggcgcccccgccctacgggagctgtttcccagggaacggtgcctccatggaggcggtgtgcggt

SEQ ID NO: 131135 - DNA, 122 bp, Homo sapiens
gtgctaaggggcttctccacccacccctccttcttgcctacagagggccggtggcctgttcggcaaccacgtcagctactaccaaagcgacggccggagcgccttcccccagaccttcacca

SEQ ID NO: 131136 - DNA, 122 bp, Homo sapiens
ctccgagaagggcgccgggcccacgggcgggacggccagggcggccccgcaccctctgggcgcaaatttctccagcggggtccccagcgcggccagccccagtctcgcgagaggacgtgggt

SEQ ID NO: 131137 - DNA, 122 bp, Homo sapiens
tgtgtgttggctttgcagggcgacttcagacacaagtcatcgtttgtgatctgagacccgcggtgtggctgagagcgcacagagcgcacgtgcacatacctctgctagaaactcctgtcaag

SEQ ID NO: 131138 - DNA, 122 bp, Homo sapiens
tagatgacataatcacatgggctgactttttgaccctctttttgactacctcttttaaatcgctttttgcacaaatcacagcctaagtgacagcagataacattttcttcccctctagcacc

SEQ ID NO: 131139 - DNA, 122 bp, Homo sapiens
cggggcagccgcttcatgaagtggacctcacgctggtgctgccgcgtcttggagcccttgcggggccggcccttgcgggtgaaggccatgtaccagccctcgtacttggcattctgcagcgc

SEQ ID NO: 131140 - DNA, 122 bp, Homo sapiens
ctctttttctgccagggttgtttaagctggtagaatgaggcttggctattttgctacttacgagatgacaacctccctgagaatgaagacagtccagggagccaggcgtgggtcatgcctgt

SEQ ID NO: 131141 - DNA, 122 bp, Homo sapiens
ccgtaggatgagttgtgtcagggaaaaagccccaagaaaaagctaagaaaaatagggagacgattcctcggggtcagaggtcagaatggagccaggaggtgaacccagtgtgctgccccctt

SEQ ID NO: 131142 - DNA, 122 bp, Homo sapiens
agtggaggcaaggcggtggcagtagccgcagtctccaggggagtttaaaggccgcgaaggcggtggccaagagggggccctcccccctcctaggcgggagggggggtggtgcgcacgccccc

SEQ ID NO: 131143 - DNA, 122 bp, Homo sapiens
aaagcccaggccctgcctgggcagtgtggatgccctccagtcatctcagatggatgaggccgatatgcccggtgggctctgcctagggaacaggcagggccattcctggcctgacacccacg

SEQ ID NO: 131144 - DNA, 122 bp, Homo sapiens
tttggcacaatatgttaacaacactgtgagtgctgccaaaactctgagagttctttcatgcggattatggtcttgtttacatatccagctgtactgaggccttgtccatggtggtaacctaa

SEQ ID NO: 131145 - DNA, 122 bp, Homo sapiens
gcatcaggggcatcctggttggcttcgggatccagttcagctccatctctggagttcttgcgtggcatttccaccagggggagcccctgcaggtcttcctccctctgaccaagatccggggc

SEQ ID NO: 131146 - DNA, 122 bp, Homo sapiens
gcctcctgcgggtgagagtgcctgggatacaggccctcgctgggatacgggccctcggcccggcctttgctcagggaccaggtacggagctcagtggcccaggctgcacttggtggacaccg

SEQ ID NO: 131147 - DNA, 122 bp, Homo sapiens
gcaaaggttcgcctccaatgaggtcaacgcacatgtggcagggacccagtatggtttgttcggaaacccgtttcatgcggagccagcagaagccacgttaaacgcacgcgttcttccatccc

SEQ ID NO: 131148 - DNA, 122 bp, Homo sapiens
ctatactctgcctgttgctttctgggggctttgaaaagcagctgcaaccttcagaggaagcgcagggtggttggcattggtggaagggtattgtaagtgtgtgtggactctatcagaaccaa

SEQ ID NO: 131149 - DNA, 122 bp, Homo sapiens
atgtcaggatacagctcttcatcttcgtcctcatcgtatgcttccagtatttcttcttctcggtagacatcaattctcaggtcaggtctcaagcctcctaggtaatagtcctgatcttcctc

SEQ ID NO: 131150 - DNA, 122 bp, Homo sapiens
cttttcccataatctgaccagaatggtttatgaatgttctggggagcagaaagccggccccggaggctgagaaagggctgtgccctgctcagctaggagaccacacagccgtcctctttccc

SEQ ID NO: 131151 - DNA, 122 bp, Homo sapiens
cacccggtccacagggattccatttccggccttacactccgctccacgatctcatccaggcgctgcagctgtgcagctgctctacagactgcagggacctgctgagacgaatccccggacga

SEQ ID NO: 131152 - DNA, 122 bp, Homo sapiens
ctgggggcgggggactacatcaaaggacgggttggggtcattgtctcccaatagaggctgcgaggggattggggcgactgcctgcaccctctccaaggcatgcctctcaggagcgccctcct

SEQ ID NO: 131153 - DNA, 122 bp, Homo sapiens
aggggaagagcacgatcagcagggaaagccgggctggagtcgggtggggcgggccaagggcggccggcttgctcacctcgcaggaagtacacggcagtgggccccgcgcgggtctcgtgcag

SEQ ID NO: 131154 - DNA, 122 bp, Homo sapiens
tgaccttgtgatccccctgcctcagcctttcaaagtgctgggattacaggtgtgagccaccgcacccggcccagattgtatttttagaaactacagttttgggtttttcaaacttgggctgg

SEQ ID NO: 131155 - DNA, 122 bp, Homo sapiens
caggcccagggcaggccctctatccgcagggcatcctctggtctacaagttctgtgacgacgtggctggcaccagggtctgagggctttgatgctggggaacgtccttgcgcctctgcagta

SEQ ID NO: 131156 - DNA, 122 bp, Homo sapiens
tgccccgaccttccaggtgcagagcatccgcaggatccagcagtgaacaggggtgcggcacggaggagcgcatgcgtgcttatctgcaatggaggcgctctggaggctgtggtgtgttctct

SEQ ID NO: 131157 - DNA, 122 bp, Homo sapiens
gtgacaacccgcagtgtcggggtagggatgcaaaagggaccggactcacctcaacaccaacgtccttcctgactaaaggaaaaacgaaccgtgctgtagccgcgcgcaggcgcagaataaga

SEQ ID NO: 131158 - DNA, 122 bp, Homo sapiens
agctcaagcgaccctcctgcctgggcctcccaaagcatcgggattacaagcaggagccaccgtgctcagccttcaaaaagaagaaaaaataataaaggcaagtgaaggtatgaagaaggagg

SEQ ID NO: 131159 - DNA, 122 bp, Homo sapiens
cctgttggaaaagggcagcagcgggaagagggtgctgccacagggcctctggggagcgtgcgggcacacagtaccaatctgcatgcatacacgtgtcctgtccctgcagacgggccaggcaa

SEQ ID NO: 131160 - DNA, 122 bp, Homo sapiens
acagtgtaatctcagtgtttgccaggacccacaatttagctagattaatccccacttccccgctactcccacctccttcctggcttcactcccttgcttagtctacttcaagaaaaactctc

SEQ ID NO: 131161 - DNA, 122 bp, Homo sapiens
tgacctgcagaaggcaaatgatggaccccggccacgcaagaacacacatggcgtgggctgcgttcttgtgccccagctccatggacgtgtcttcttagctgtggacccctccaaaggaaact

SEQ ID NO: 131162 - DNA, 122 bp, Homo sapiens
cgctggttaccttcccaccagcattcaatcccaggaaaacaagcgcagtgtggacagacccggcccagtacgcaaatgccacacaaaaggacaacgaaaggaagaaaaacaccaagcacaga

SEQ ID NO: 131163 - DNA, 122 bp, Homo sapiens
gagttcctgttggctgctgggatttgcatgtgatccccgacatagactatttgtgacacacgctggtatgtgtgtctgtagctgatgtcctattaatagctgatacatgaatgtcatttgtt

SEQ ID NO: 131164 - DNA, 122 bp, Homo sapiens
tgtccctgggtggggacatggccctccctcacccttgcggtgtgttctttcccccaagtacgtcctctttctggtgtgcagggattgtgggcccacttgtgagtcataaaatcaattgctcc

SEQ ID NO: 131165 - DNA, 122 bp, Homo sapiens
cagcctaggcaggtactgatgaagcacccctgatacagacggggacactgagggcgctcccgccgcgccgaacccaggcgcgcacccggtctgcgctcggctccctggagggcgcgcagcca

SEQ ID NO: 131166 - DNA, 122 bp, Homo sapiens
catggtctatgtcttacagggagcttggattgtttctctccctaatatcctactccttgacgttcaatgtcttcaatccacagtaatattatgcgttaaggagacaacaacccgtatcacaa

SEQ ID NO: 131167 - DNA, 122 bp, Homo sapiens
ttgagtgagtgctgcataggcgtcctggacgggtctttgtctttggcgcgcagaccggttcgtgagacgcaagaagaaggcagcagcagctgccggaggaaaaaagcggtcctacaccaagg

SEQ ID NO: 131168 - DNA, 122 bp, Homo sapiens
ggtcgccgggaaaggagttatttttagagggcgctttgctgtctcctctgccgcaaaggccgagacccgaggcgctgggtatgggggggttcgggggcaggtgttggaggggggttcgccac

SEQ ID NO: 131169 - DNA, 122 bp, Homo sapiens
agggaggcaggagaggacctctctgagcatcagtttcctcagctatataatgggcatcatcgtagtcatctcttcctagggcttttgtgagatgaactaagataacacacagaaagtgctgg

SEQ ID NO: 131170 - DNA, 122 bp, Homo sapiens
gaaggaaggcatggaaagttccagccggttcgagagctaggtagcaggcatggcaggaggcggggtaggggcaggcagggtcgcgagggggcgtgcggccgccgcgagccgctctgggccgc

SEQ ID NO: 131171 - DNA, 122 bp, Homo sapiens
ggggacgttcaaggtgtctcctagccggtaaagtccctgggactgaccgggctggttgcacgcttactggagcgggcacatgggtagcctgttgaacctgggagggcagcgcgatgaccgag

SEQ ID NO: 131172 - DNA, 122 bp, Homo sapiens
cgagcgagagacctggtcgggagtccggcggctagagttgattgcaaggggcctgttgctcgactgtgcgttaaagaggctagagggagcctaggtagacgtggggcgcaagctggagccgg

SEQ ID NO: 131173 - DNA, 122 bp, Homo sapiens
agggaactcggggtgcggccctcgccggccccgggccagcggccaggtccccgccctccgcgggatttactcctgtcccgcctcctcggatttagcccaggcagcctgggaggttccgcagt

SEQ ID NO: 131174 - DNA, 122 bp, Homo sapiens
cggcccactgcaacctcagcctccccagtagctgggattacaggcgcctgccaccacacccggctaggtttcttttgtatttgtagtagaggtggggtttcaccatgatggccagactggtc

SEQ ID NO: 131175 - DNA, 122 bp, Homo sapiens
atactgcgcttttccgacgggcttaaaaaacagtgcaccatgagattatatcccgcacctcgcttggagggtcctacgcccacggagtctcgctgattgctagcacagctgtctgagatcaa

SEQ ID NO: 131176 - DNA, 122 bp, Homo sapiens
gcggccccagcggctggagagccacggagaaggcgggctacgggcgacaagatggagagccggcccgagagggacagaggccgcgctggcagcgagctggggggcccacctgaccgtcctgc

SEQ ID NO: 131177 - DNA, 122 bp, Homo sapiens
acggttttaaaaagatcactgctgtctagttttccggtcctggccccgtggaaggtcacgcgcagctgaaaataattttctggatcaggaaacaggccagactgacgcgtgcccaggcggtt

SEQ ID NO: 131178 - DNA, 122 bp, Homo sapiens
tggccaatcccgcgccgccggatcaatgacacgctgaggcaccgccccttccgggcactgcgaaacatgattggccttgcggcctgtctatgcagccgctcaacccttccggcggtccaggc

SEQ ID NO: 131179 - DNA, 122 bp, Homo sapiens
taaagagacggtctcatgagatgtcatcaccacgagccgcagagggtcctacgagggaggcgtgggacatgtctgctgatgcccactgggaagtgacatttagcagagagcagaaggagaag

SEQ ID NO: 131180 - DNA, 122 bp, Homo sapiens
aagaaactgccaaactgttttccaaagtggctatcctattttgtattaccactgacaatgcgtgagagcttatctgtttgcctgttggtggacattgggttgtttccactttggggctccta

SEQ ID NO: 131181 - DNA, 122 bp, Homo sapiens
atgaggtagtcattgttctctggttttacaatatacatttagcaattggcaggatgtggacgaacctcatgggaatcggaagtagctctgaattgtaaagagaaacagccagatcagatagg

SEQ ID NO: 131182 - DNA, 122 bp, Homo sapiens
gtcaattctgccgcgctaggacgatgggacatgggcttctcttcgaggaggtaacatgtccgcgccctgagccacggctctctgggcgcggccatcttggtagatctgccgtacagaaggga

SEQ ID NO: 131183 - DNA, 122 bp, Homo sapiens
tccaggctgggaggcatcaagcatgtgtgctaatgggccagttctgcacattcaagatcccggagatgttaagtttatccaaaaatctttcaagcaatcctgtcgtttgcaattaactcaga

SEQ ID NO: 131184 - DNA, 122 bp, Homo sapiens
gaactcagtaaagctgcaggatacaaaatcaacattagaaaaccagtagcaggccaggcacggtggctcacgcctgtaatcccagcattttgggaggccaaggtgggtgaatcacctgaggt

SEQ ID NO: 131185 - DNA, 122 bp, Homo sapiens
ggagcaggaaggtatgagcctcagctgagcgaaaccctccttgcagccaccacggagggacggggcgcgtctccttctgaatgacgcaaggggcggggcgcgtggtggggcggggaaggcgc

SEQ ID NO: 131186 - DNA, 122 bp, Homo sapiens
agcccccagcctgctcctgcaaaagtctctgtttctcctgaacttttcagctgagtcaatcgggctctgggaccccgaaaccaagcctccccagtcactcgcttattcactcaacaaacaca

SEQ ID NO: 131187 - DNA, 122 bp, Homo sapiens
aaagcggtcgtggccaggactggcgcagctgccgtttcaggcgaggggcgcagaatgcagcggccgccagcctggagcgcgggccctggggccgcaacccgcgccgggcgaggtaagcacag

SEQ ID NO: 131188 - DNA, 122 bp, Homo sapiens
aactgaaacggaaagggcagggagtggtttcagggcccaacatcctgattatcagaagcacgatacacctgctgtgacaacctggccctgcctctacaacacggaaacgcccactccaccca

SEQ ID NO: 131189 - DNA, 122 bp, Homo sapiens
cgggctccgctgtcgaggcctttgctgtcgaggtctcattttggctgcttcgggtcgccacgttgcctgatgtcccagactctctgttgaaacgccacaactctgttcagtgatgggttgcc

SEQ ID NO: 131190 - DNA, 122 bp, Homo sapiens
ccctggcccccggcctggctcggctctttgccgaggtgattaggatgcgtcctccgagggcgcacggctttaacccgagttgccagcgcttttcgggccccgggcgatgtcggttgttcagg

SEQ ID NO: 131191 - DNA, 122 bp, Homo sapiens
gaatattaggagcaaaatcaccgggtggtggatgcacacccagtgctatattgggagtaacgtcatactccaccccctggagattatattcggatcaatatcacgggctgtgtgtacaccta

SEQ ID NO: 131192 - DNA, 122 bp, Homo sapiens
cgctcagcaaacgctttacttgcacaagctcttcatagcaggcctctgcaaaccagcgggcgccggggagaagggctgcttcttcactagagttggcggcgagggagcccgcttcgaggggg

SEQ ID NO: 131193 - DNA, 122 bp, Homo sapiens
cggcccagaggagttagatgacgtcacctccaggaggactcgctttttcattaatgaaaccggccggcgcgggcgcatgcgcggcaggccgccttccctctcgcttccccctcccctttccc

SEQ ID NO: 131194 - DNA, 122 bp, Homo sapiens
ggcggggcggggacgggggctgtacacacaagtgctgggggctcggggcctcaatactgtcgagggccggggctgtaaacatggccggggcggccctgcccacccctagtggtcggtaacga

SEQ ID NO: 131195 - DNA, 122 bp, Homo sapiens
agggaactctcagaccgcttgaatcttagtgaccagcaggtcaagatctggtttcagaaccggagaatgaaaaagaaaagacttctgttgagggagcaagctctctccttcttttaaggtgc

SEQ ID NO: 131196 - DNA, 122 bp, Homo sapiens
ggctctgcagtgctggccctggttctgccaaggtcacgaggaggcctcacacctggcccccggtttgcccaggccaggcatctctgggcgccagcacgtggcccctggacacacctgctgag

SEQ ID NO: 131197 - DNA, 122 bp, Homo sapiens
agagctcagggtcccggggtcctgggctagacctcttttccacacatgatgcctccttaccgagcaccctctgggtgtctcaaactcactaatggcacacagaggagggttaaattaagaaa

SEQ ID NO: 131198 - DNA, 122 bp, Homo sapiens
tgccgatggtcaggaggagagagaagagtagcttgtccttctcaaacagagaacggcacacgttgttgtagatgctcagggtgaaatggtcaatgatgtacttgatgcgcagattcagttcc

SEQ ID NO: 131199 - DNA, 122 bp, Homo sapiens
acatggtactatatactaagacaccctacactcccagttttacacgtggtagttctagcacgttccttcatttaaggagtctcttgaattccaaaatttccagattccacctgaataaatgg

SEQ ID NO: 131200 - DNA, 122 bp, Homo sapiens
aaaatatgtgtatgctttattctgaaagttagtggtgaagaaagaccagcttggtgtgaccgttgtctgatatgaatgatctcaactataattatacgttagtgtttgtgtgtggttgggca

SEQ ID NO: 131201 - DNA, 122 bp, Homo sapiens
tcaaggccggaaagcagtggagctcagacaagaagtagcctggacagctttcctaccttccggcttgcctactcccctctcccgggaaatgcactcagacaagcaactacatctgtaggagc

SEQ ID NO: 131202 - DNA, 122 bp, Homo sapiens
tgaggggaattagttgagctaattagtcatgctaagcagcattcggctctcagctccaaacgtccaggcttggttccggccccggctgtcctccgagagtctctccccggcgggcaggcgct

SEQ ID NO: 131203 - DNA, 122 bp, Homo sapiens
ttacccacacatttactaaatgtcaggcactagaacatagtagccaagacagactggtcacgactttcaaggagctcataatggagtcagtagtggtttcctgatggacctaattaaaggtc

SEQ ID NO: 131204 - DNA, 122 bp, Homo sapiens
aaaatgaccaagtccaatcagttttaaataaaacaaacaatatgactgtacatggaatgacgaaaaggaagcatcccaaagccaccatcggaagaccatcggcaacttgaaaatgccttgcg

SEQ ID NO: 131205 - DNA, 122 bp, Homo sapiens
ctctctccgcccgcctgcggctctgatgtcagtggaggtggagcctgcggcggagggacccgggattgggaggcgaggcaccgctccaaggctggggaaggggcacgggtggaggccatctc

SEQ ID NO: 131206 - DNA, 122 bp, Homo sapiens
tcaaagcccaaacatcgaaaaaaaaaaaaagacccactcttgtgctgtgtgtattgcccacgggtgggaggatgcaagtacaattacgttttttaaaactccagtccagatattggcttttc

SEQ ID NO: 131207 - DNA, 122 bp, Homo sapiens
cggcctcttgaacctagtgtcttccctattgagatgcaaagttcgatacaacatgcccatcgaaagaaaatgtgataggccgggcgcggtggctcacacctgtaatcccagcactttgggag

SEQ ID NO: 131208 - DNA, 122 bp, Homo sapiens
cctccgcctatctaggcaaactgcctctccgaaaaaatgccactgttagaggatcagtaccgaggcagtgaacatggattttcagcttcaatgactcctctcttaggtacctagccattcct

SEQ ID NO: 131209 - DNA, 122 bp, Homo sapiens
gggcgtttttcaggcccagagaccctgtagtggtacaacgtttctttggggtctagacagcgaggtagatcttaggagagcaggaaatgctcgtaaaggttacctagggggtgcagggccgc

SEQ ID NO: 131210 - DNA, 122 bp, Homo sapiens
ggtttgtcaacttcgccactgccgcacgcgaatcgacgtcgtcacgtgacggtctgcctccgcccttattaactctcagcccagcggcggtttccaggacctcagactttttgccgaggcgg

SEQ ID NO: 131211 - DNA, 122 bp, Homo sapiens
ccattgtttagaggggcctggggccggcccctcatcctgtttccctgatttttaaaaggccgtaaaggatggccatcaatatcaaatctgaaatggcattgagatgcccagtgaagaccctt

SEQ ID NO: 131212 - DNA, 122 bp, Homo sapiens
caaagcccgacccctttcctcgctccccgcccccgccctccgcggtgggagcactgcctccggaacgcactgcactaatgtggagacctcgagattctgcgaggtccctgccttgcccccgg

SEQ ID NO: 131213 - DNA, 122 bp, Homo sapiens
acttaacattcccctttccttggctttttaaccactgagatttgaaagacatgcaaataacgacctagtggacaatctttgctgatgctaaatcttcattttaggattaaaaggttttgggt

SEQ ID NO: 131214 - DNA, 122 bp, Homo sapiens
cagcggggacagagggaactcctgcaattcggagctgcggtattgcagccggttatacaacgtggggaggcagcctggctccccaaagacagcgcagcctcgttcccggagggcggcctgcc

SEQ ID NO: 131215 - DNA, 122 bp, Homo sapiens
gcgtctaattagatccaatcacaactgctttctggctctgacatcagcagcagcaccagccgcaccgccgcctggccgcttgcaaactcagctcccgtttggacggtgaagctcccaggacc

SEQ ID NO: 131216 - DNA, 122 bp, Homo sapiens
gggccagaggctcccaggaccctgagccggcgtgtcccctaggagcagtggttccatatccgctaattcagcacgtgcagtaaatgtatagaatatgacttcaccagtatcgagactgactg

SEQ ID NO: 131217 - DNA, 122 bp, Homo sapiens
gttcccgccgcccaccagcgcctggggcttcttcgatgtctccatcctccaatttcagggcgttctagcagaggcggaccaggatgtaagaaagtggttaacgtgtatgcaggtggggtggg

SEQ ID NO: 131218 - DNA, 122 bp, Homo sapiens
tcctgtagcaaatgttgtgatgtgactgaatttgggggctgaatctaattatatcgtgggcgcatagacatgccctgttattcttctgggaaaatggcttacagaaataatggaggggtaaa

SEQ ID NO: 131219 - DNA, 122 bp, Homo sapiens
atttaaaagtatgatcaagtatgcctcaaaaactagaaacatttcaaaatgtagaacaaacgttgaaaaattgttttgccaggaaagagttcaagttcagttaaggatttgagaggctttta

SEQ ID NO: 131220 - DNA, 122 bp, Homo sapiens
aacccaaaatgatgagtatagggactggagagaagcagtaaggacttttcattccagtaacggaatcaggcaaccaacaggcagatgaagcaacagacatttattagtgttttaagaaaaaa

SEQ ID NO: 131221 - DNA, 122 bp, Homo sapiens
ggttttcctggcacagaaattccagccggtccagggattccaggtggtcctggtgggccccggggtcctggtaggccagctggtccaacatctccttttggtccatatggtcctctctctcc

SEQ ID NO: 131222 - DNA, 122 bp, Homo sapiens
ttgcctccggagctatcactggggagtgggaatttggaaagttccccaactagggacacacgtgacctccttcggaaagtagttccgactgtggcccgtgtatccttccacctccttttgaa

SEQ ID NO: 131223 - DNA, 122 bp, Homo sapiens
cgacccactcattgctttccatcccaggtgccaaaacttctcgaagcaggtgcagcccctcgcccggcaggtccaggctggcccggcgccccctcgctcaccttatccaggcagttgacttt

SEQ ID NO: 131224 - DNA, 122 bp, Homo sapiens
acccccggagccggagagggcgctgcggggagcgggctgtccctcagtcccgcccctaggcgccacctgagggaaaaagactctcccttcgggtggcccagcggatttttaatcacatttat

SEQ ID NO: 131225 - DNA, 122 bp, Homo sapiens
acccacgcctccattggagaccagaatccccaccgcggaggaagcttagcttgagtctggcgccttagaccactcggccatcctgacacactgcataacagccctgatttttgcactaaaat

SEQ ID NO: 131226 - DNA, 122 bp, Homo sapiens
gaaggatagtaggacaaggggtctagtttttccctcccccacccgtctttttgttccctccgcagaaattggatctcctaaattggatgacctggtaagtagaacttccctccagcgttcag

SEQ ID NO: 131227 - DNA, 122 bp, Homo sapiens
ctgtttccacactctgctttcccacagagagatttccgcagttaggggctgctatttcaacgcagggagataaaaagaaaaaaacacttgctcttctaccccgctaaaaacactcatcctag

SEQ ID NO: 131228 - DNA, 122 bp, Homo sapiens
ggcccttcagagtacggagatgcatttctcagtgaactgggattgagtcgcagcccgctgcgaagaagagaaggcagactttttagctgccactggctgccacgatgtttttgcatttgtat

SEQ ID NO: 131229 - DNA, 122 bp, Homo sapiens
tccagacagggactgacccgggcctgtgttagtttgaaagacgtgcttcaaagcctgttgcgttaacctgtggacctacgctgtggcccttctactcgccgttcttccaacgcagatgagcc

SEQ ID NO: 131230 - DNA, 122 bp, Homo sapiens
tcctgggggcgctgatactggctatttgcagcgccctctcttgtgaaaccctgcggattccgcttgcgggaagtggagggcggtggcctccgccttttggggcttctgggctgagggaagag

SEQ ID NO: 131231 - DNA, 122 bp, Homo sapiens
ccccagcatccgccacaacgtgctccactggagccatgttggctgcgtgagaggggagcgcgcatgcgcacggagcttgcgccggctcctatgtccaagtctgggcctctgggaaccaggaa

SEQ ID NO: 131232 - DNA, 122 bp, Homo sapiens
atgggggccgcagggaagagggggaagggttaggggaacctcgaggtttccggagctccacggcagggcacagctgggaagaagatgggaccagcaccctccattggaggcagccaggaccc

SEQ ID NO: 131233 - DNA, 122 bp, Homo sapiens
agagcagcgggagtttcggggagagatcagggtcgggagggtttggggatgggatcctggcgcccaggatggggggactggacagaaaaggaaatgaggggatacataataagagggttccc

SEQ ID NO: 131234 - DNA, 122 bp, Homo sapiens
catggccgcaaacatgctgaataaggagatgatggaaacgctcattgcctatggagcaaacgtcaactgtgctgtctcttccacggggaacacgcccctgaagcttgcagtgtgcactgcat

SEQ ID NO: 131235 - DNA, 122 bp, Homo sapiens
gtcccgagctgggagcccccgggagctacaggccagctgctgccgctgcgaagctgacatcgcctgctttgcagccacaggtttcctgacctgcccgcactgttgccccagacttttccccc

SEQ ID NO: 131236 - DNA, 122 bp, Homo sapiens
tgattttgatcaagcacaggtaatcaggactgtcctcaggactttatgtggaactgacatcgcttacctactcccgtctagaaaatgctgaacagggccaggtgcggtggctcacgcctata

SEQ ID NO: 131237 - DNA, 122 bp, Homo sapiens
gctcacaggaatgctcatcacaggcttgaaagcctttgccatccacgctctccggagccccgagcgtctccaaagagcctgcccaggcttctccccgacccaggtgcttcctcccctgcaga

SEQ ID NO: 131238 - DNA, 122 bp, Homo sapiens
tctcccgcgtaccctagacgtgaacgagtgcctggagggcgatttctgcttccctcacggcgagtgcctcaacactgacggctcctttgcctgtacttgtgcccctggctaccgacccggac

SEQ ID NO: 131239 - DNA, 122 bp, Homo sapiens
gttagccggcctttctgatggtcatatccattgacggtggtgttttgctgcttcctgagccggttctgcagaacttcggccctcaaacaataatactctggtttcttaaaatgatgataaat

SEQ ID NO: 131240 - DNA, 122 bp, Homo sapiens
gcccgggcctcgaggacttcctcttggcaggcgctggggccctctgagagcaggcaggcccggcctttgtctccgcgaggcccaccccggcccgcaccttcgctttgcggtctgaccccacg

SEQ ID NO: 131241 - DNA, 122 bp, Homo sapiens
ggccgttgctcaccgttgggcaagtgctttaagaagcacgaggatgtcgagtgtcaaatgcggcaaagggctcagagctcgccgccaaggggcgtggcctccgggccgcggcggcctctggg

SEQ ID NO: 131242 - DNA, 122 bp, Homo sapiens
ggagctgccatctgtggatgtggcccacgtggggtctcctgtggctgtgggactctcccacggtgtccggcggccctgtctcctgagcgtcgggtttcgtcagttggattcagacccgcgtt

SEQ ID NO: 131243 - DNA, 122 bp, Homo sapiens
gccatattggacgcctgggtcccgagcagaagaggggatagaggctgtactgctgaattccgggactagaaacctcgcatccttgggagccggtacctgcagctccgcgaagcccagcccgg

SEQ ID NO: 131244 - DNA, 122 bp, Homo sapiens
ttgtcagatgagtcctgccactggacatgtctgttttgttcaggcagagggacctgtgtgcgtgttaacagctgacagtggtcactgggcccagaacaaggctcctgctcctcaggctgtga

SEQ ID NO: 131245 - DNA, 122 bp, Homo sapiens
cttgtacacattgtgaaagcaatggcgtgtgtcgtggagtctcctcactgctccacccaacgccaaaatgggtgtttgcgattggaaaatgtcacttagaacatgtcaggatcgggctggtt

SEQ ID NO: 131246 - DNA, 122 bp, Homo sapiens
ctacgactggcctcaagtgcctcgtgtgtatgacggcgtggaggctgcttgctccgagtccggagcaactgagagagctggagagggcaaccgcgccagctgtagtagcaaggtggggccag

SEQ ID NO: 131247 - DNA, 122 bp, Homo sapiens
cgttcctcggcgacgccatagaggtgggccttcggcgacgtcacaggcgagggcgttcggcgacgttactggggctgcacggtgcttgtagctgggcagtcttatcatcagagtggagcctg

SEQ ID NO: 131248 - DNA, 122 bp, Homo sapiens
tttgtccctgcaacatgttcatcactgcacatcctgtcccactttctctgggcttttccacgtcctctatcattttctaactatatacttcatactatatactatattatgtttattttgca

SEQ ID NO: 131249 - DNA, 122 bp, Homo sapiens
ttaggtaaagatttgggaggcctcccctcggtccttggaaggagtgcggtggtgggtcgccgatgccgcgggtccaccatgtcccctcaccttcagcttcactccagtttctgtcactcaca

SEQ ID NO: 131250 - DNA, 122 bp, Homo sapiens
ggacccagagatctaggatcacgacgtgctgcttctccagggtccgggggcccagttctccgccccgctatctcacagaggtagaagtccggggaccccaggcccctcttcccaggaaccca

SEQ ID NO: 131251 - DNA, 122 bp, Homo sapiens
tctagtaactatacaaagttttcagtgaaattctatgacgataaacacacatacccccaccgctccagagctccacccactcaacctagaaatgaaagtcagacattacaattcacttaaag

SEQ ID NO: 131252 - DNA, 122 bp, Homo sapiens
tcaggtggccacggcaatgactggggatgccagggacacactggactgtcccgagcacggcgacttccctggttttgctacctctcttccacctgcactgcactccggggctctgattttca

SEQ ID NO: 131253 - DNA, 122 bp, Homo sapiens
agaagacacaaaagccatctcgggttcatggattgcagtacttcatattgttaaaatgtccgtactacccaatgcaatctaccaaatcaatgcaatccctatcaaaatttcgatggacagaa

SEQ ID NO: 131254 - DNA, 122 bp, Homo sapiens
gggccctgcttcctgcaggcaggagtgaggggcactcctgtgatgtggcacccctgtgaccgaggtcatgtgtgatcggtgtaagggcaggaagcgagtcattggtctgcaccaggcgtggg

SEQ ID NO: 131255 - DNA, 122 bp, Homo sapiens
aaaggaggggtccatatgagattatctctaaagatcccttcagctctgtgttaatgtacacgcctagaactgcaaagttccactagccccaaagtcagggtctctaggtttggcctgatgtc

SEQ ID NO: 131256 - DNA, 122 bp, Homo sapiens
caaactcccaacctcaggtgatccacccgcctaggcctcccaaagtgctgggattacagacgtgagctactgcatgttgtttttcatttgaaattaaaattatccatgaatgtgtgaggtaa

SEQ ID NO: 131257 - DNA, 122 bp, Homo sapiens
ttccagcaccatttgctgagaagaccgttttcctctgagctgcctttgctctgcggtccacgatcagccgagtatatctgtgtgggtctatctcgtggctctctgacctgttccacagacct

SEQ ID NO: 131258 - DNA, 122 bp, Homo sapiens
gcagactctctaggagccaaggatgccctctttcttcgtgttccaccctcagttctcccacgcccttctccactccagtctcttcccaacctctgcagcgttacctcacctgtttgccccgt

SEQ ID NO: 131259 - DNA, 122 bp, Homo sapiens
cccctgcttgccttactcagagtccataaacccttcttgcacctgactctcctagccggccgaaggagtggctgtgatgacttctagcctcagcaccagcaggtggggccacatctggggac

SEQ ID NO: 131260 - DNA, 122 bp, Homo sapiens
cacacgcaactgtccagacaagcccccctcaacgggctgctgttggccatgcctgagatgcgggcaggcaggcagggagtggacagcaagacctcagatccaagcctccacccttcccttcc

SEQ ID NO: 131261 - DNA, 122 bp, Homo sapiens
atgacaccgagatgatgggctagctggttagtgagtctgcacgctgccttctcactgacacggagggagaagcccgtgtggactcagagagctccgattctcaatgacaaccggtaccgtat

SEQ ID NO: 131262 - DNA, 122 bp, Homo sapiens
aaagagcacccattggctggaaccccaagggaggcagatgcaggaagcacagagctgcaccgctaggcgcagcaaacagccgcggccgaaggcgcgggtcgccgagtgggcggcggccgccc

SEQ ID NO: 131263 - DNA, 122 bp, Homo sapiens
cggctgcctggtcagcaaacaacagcagatccgacaaccgccagtcacctcgacggtccacgcccaccgctagcctccagtttcccgcagaccggaagcccttttgccccggctcgcaggtc

SEQ ID NO: 131264 - DNA, 122 bp, Homo sapiens
actccggctcatcgattccggcccagaggagcgcccccgggcgccgaggatgggcggagacgtgcagccgcccctgagaggtcgcccagaggggtctccccaaggtcacccggagtgcccag

SEQ ID NO: 131265 - DNA, 122 bp, Homo sapiens
tccctgccacacgtgcgtgcggcatccatgcacggagagtctccccccgcccatcctctgcgtgtggggcagttgggtcaggccagctcgcatccccaggtcttcagaggagcagctgagcc

SEQ ID NO: 131266 - DNA, 122 bp, Homo sapiens
tcttctcaacttcgtgagcctgcacaggtgtctctcttctgctcacctcggcttccccatcgttacagtggggatgatggtaagagtagggctcccatagcattgctgtgaggcttaaataa

SEQ ID NO: 131267 - DNA, 122 bp, Homo sapiens
caaaggcatgatttcaaattccttcactctctcagctattctcccaactgcattccagtgcggtttctagagttttgcctagaactgtacgcgacaccccacatgtacctactcagtcccca

SEQ ID NO: 131268 - DNA, 122 bp, Homo sapiens
cctcaccgccacgtctctccagtggctcagtgtgagcatcggttcccgaggcccaggctccgggcccacttggccaagggcctcagcgcaccgcagcctacagcccagcaccctcagcgctg

SEQ ID NO: 131269 - DNA, 122 bp, Homo sapiens
cgggcgcgggcccgcggcggccagcgcttccggtcggcaggaggcggggcgaggcggaagcggcgcttgcttcaggtggagtctgttagtttttgagaaagagttagggcgagtttaaggca

SEQ ID NO: 131270 - DNA, 122 bp, Homo sapiens
gcggctcgtttgcatttcaaagctacacaatgcgggcggtcccggcgaggcgggaggggccggggcagagggagggtcttcgcctccccacccccagccccgtttccggagcccgcgatgga

SEQ ID NO: 131271 - DNA, 122 bp, Homo sapiens
gcgttgtttcacacaagatcacctaacaaggcaattcttagaacatgtagttaagggacacgtgactatatgtgaaaacaaattgtcaaacttcactttagtatggcaaatgttaaagaact

SEQ ID NO: 131272 - DNA, 122 bp, Homo sapiens
aagacgaggaagacttaggaagctccccgcactgtttcttgtacatgtgccctcaacacccgctccacctgcttccctgcctgggttgctggtaggtggttggggtgtgcagattgtaaagt

SEQ ID NO: 131273 - DNA, 122 bp, Homo sapiens
ctcaaacaagatctagaatcttagctccatgacagtaatgtggggacaaagggaatcctgcggcagtcttatgggtaaaaagagtaagaaaagttaaagccgattctcagagcctgttacag

SEQ ID NO: 131274 - DNA, 122 bp, Homo sapiens
gcccgtgctgcgcggccagcccatctacatccagttctccaaccacaaggggctgaagaccgacagctctcccaaccaggcgcgggacccggcagccctcaggccgtgaactcggtccagtc

SEQ ID NO: 131275 - DNA, 122 bp, Homo sapiens
gtctggaccccaagaggctctctcccagctccgacagctctgccgtcagtggttgcaacccgagctgcacaccaaggagcagattttggagcttctggtgatggagcagttcctgaccatcc

SEQ ID NO: 131276 - DNA, 122 bp, Homo sapiens
aacagagcatgacgttggttaaacagggttagtgctgcaagatattcaaaccacaacaaccgtggagtccctgccaactaattctatttgcaacactgcattctccaataactgcacttttt

SEQ ID NO: 131277 - DNA, 122 bp, Homo sapiens
catcagatctgccatcctacttgtagcccacagttcccatcttcttgtgaagaaaatcgacgctgctgcggctccccagccccactggcttctgcagcgtgaggctgagatgcattgggctc

SEQ ID NO: 131278 - DNA, 122 bp, Homo sapiens
ctttgtttgcaggtcagtgccatcttgtggccgaagtcatacccggctggagagctcgagcgccagcccaaaccaggaatcaaagggctcgctgggaaacatgaaattcgccacaataatgg

SEQ ID NO: 131279 - DNA, 122 bp, Homo sapiens
gacagtgtccgatgactcatataatcccccggttcgagtccctttaggccgcagacgtttcgcgccttctcgggtgtccaagtcgcgcatccatacaatgaggggtaatatactagattacc

SEQ ID NO: 131280 - DNA, 122 bp, Homo sapiens
gagcgcctggcagtgctgaagggcctggagccggacaccgattgggaggagcgcgaggtgcgacggcggcagtcggtggagctgcactcgccgcagagcctgccacggggtaccaaggcctg

SEQ ID NO: 131281 - DNA, 122 bp, Homo sapiens
caggcgccttgagcactgcgtcgcgacgggagagagctttacggcttctgttgcggctaacgggcggggcgtctggtcagcggcgggaaggcccttaggcgctcagagcgggcgggccctgt

SEQ ID NO: 131282 - DNA, 122 bp, Homo sapiens
gagaccagcactggagcagctacttgggtgttgttcatgtctcattattttatatcatggcgagtctcactctctcatgtcatcttgggctggtatggtggatttttgaactgaagccttaa

SEQ ID NO: 131283 - DNA, 122 bp, Homo sapiens
cccagcagggaggcattggtggcctctggtgtcaggcccaggcggtgttcctggaggtgacgagaggcctctgcatccagccccccgagaaggagactgccccgtggctccaggtagctgag

SEQ ID NO: 131284 - DNA, 122 bp, Homo sapiens
agggcgacgtgggggagtttatcatcgctgctgcccaagacggggcatgggccgggtacccggagttgctggccatggggcagatgctgaatgtgaatatccatttaactactggagggagg

SEQ ID NO: 131285 - DNA, 122 bp, Homo sapiens
tcaaactgttctcttgaaactgcattccttcctggaacccttacggaccagtctggttaccgtgccccattgtgtcttgggctcaagtcagccttcatagtgacccctgctggtcgaaacaa

SEQ ID NO: 131286 - DNA, 122 bp, Homo sapiens
ccccacgcacctctgggggatccatcctggggtgcggcgaccctcttggtaagcagcgagcgcctgggtccgccggcctgggtctgcagcccgtatgagaactgcggcgggtcgttccagcc

SEQ ID NO: 131287 - DNA, 122 bp, Homo sapiens
tttctatgtgtaagcaccctatagaactggaagatacttttaccatttctcctgtgctgtcgtgattagtgggagcactttgtcttgctcttgattaattattattagtgttgttattatta

SEQ ID NO: 131288 - DNA, 122 bp, Homo sapiens
tccagcggcgagaaggggcggaagtgtgcagcctccgctccgcgccggtgccgtggggaccggcacatttacctcagccattagctaatgttgagagggatagggaagaacgaaggaggggc

SEQ ID NO: 131289 - DNA, 122 bp, Homo sapiens
ttccacccacctcagcttcgtgctgtgtttgggccactagtcagggggaaggatgctgagcgacatggactttagaggtggggctcccgctggacagaatggctctgggctctccagcttac

SEQ ID NO: 131290 - DNA, 122 bp, Homo sapiens
cagcccacgttgcaggagggtgcccgcgctgctgctccctccccggcccgggccggcctgcgctgcgctgctgggaatgacactccctctgccagcactccagggccttctcttcttcctgt

SEQ ID NO: 131291 - DNA, 122 bp, Homo sapiens
acaccacaggcccgggtgaatggcccgcgtcattctctccaaatcaggctgctgtcctggcgatgggaccagctccggctgccgtccgcccatgtcatgcaattgcatttgggaggtgtgat

SEQ ID NO: 131292 - DNA, 122 bp, Homo sapiens
tcattgaaagaataacccaaatgaattagtggacattaggctacagattaacaattttcacgcctggcaggtctagcatttagtagaaacaactcaactaatattcgaaggcatatgtaaac

SEQ ID NO: 131293 - DNA, 122 bp, Homo sapiens
gatgtcaaggttagagactgaggtgagatctcaagaccagtttggagttgaaagctagatcgcagcatgaagagccattgtgaagtcttgtggatagaattattcattcattagttccaaga

SEQ ID NO: 131294 - DNA, 122 bp, Homo sapiens
ggtatccagggtaaccgcgagggggcggagcttcgggttaggtcccggcgaggttcttcccgcagccaataacgagccgtaaatccccagcccattgttgtttattgctgacccctcagcgc

SEQ ID NO: 131295 - DNA, 122 bp, Homo sapiens
tgcatgggcccaaggcttctgcttatttttaacctgggcacagtaatcagggtgggacaccgagagccagtgaggctgggcagagcccctgaggatgcccctcctccctggtccccactcca

SEQ ID NO: 131296 - DNA, 122 bp, Homo sapiens
ggaggttaggatcttgtgtttgtggcctccgcagccagcttaggctgctcggtgtcgtgtcgcagttatgtactgccatttattatgactcttagaatatagttatttcttactcttccgct

SEQ ID NO: 131297 - DNA, 122 bp, Homo sapiens
aatgaggttaatggaggcagcagagatggctccagggttctgatagcaagtgtcaggctgcgtgctctgtaggcaccagaaactgttgtcaccagtaattttgatgtggtctgagttagaat

SEQ ID NO: 131298 - DNA, 122 bp, Homo sapiens
ggctccgtgtctccagtatgctgctgggagctatcagggccacctgggccgctgaagacccggcctcagtctgtcctcggcagggcagtggctggggtgtgtgtggtacggggatcaccatg

SEQ ID NO: 131299 - DNA, 122 bp, Homo sapiens
acacacaggtgcacacacacatacatgcacatacacgacacacacactccttcctgggagcggtttctgttggattctgggcatttcagacaatactttgcttttgggaacagggacattgc

SEQ ID NO: 131300 - DNA, 122 bp, Homo sapiens
gctggagagtggcttcttagtattcttgcacagcaggtccgagtggcatccagactcaaacgggccgtgctcaggcccaacgctggcatgattcttgagtcattaggaaggattccttactg

SEQ ID NO: 131301 - DNA, 122 bp, Homo sapiens
actcgctcgagggcaacacggtggagcacaggtgccagtgctgccaggagctgcggacctcgctgaggaatgtgaccctgcactgcaccgacggctccagccgggccttcagctacaccgag

SEQ ID NO: 131302 - DNA, 122 bp, Homo sapiens
ggcacttcctctcctactgctaatttttccgtcctctttgccgggagcagcggaaagggacgttttccagcgatacaagccctttccccctgccccgcagtttggatagagccttttggcag

SEQ ID NO: 131303 - DNA, 122 bp, Homo sapiens
gaccagcctggccaacatgatgaaaccccttctctataaacattttaaaaacaaattagccgggtgtgatggcgcgcgtctgtaatcccagctcctccagaggctgaggtgggaggatcgct

SEQ ID NO: 131304 - DNA, 122 bp, Homo sapiens
ttagtcagaaggttccagtcctcgctcaacctctgatcgactctgtgcccatgagagagtcgttttatatttcatttctcacacgtggaagtgtgggcgaagaatgaggggcttctttaagc

SEQ ID NO: 131305 - DNA, 122 bp, Homo sapiens
tttatagcatttgatcaaatgtttcccgggaataacaaccactgcataaagttatatactcgcaggttactctgagacataaattaggagattgtcataagaactcatatatcttaacatac

SEQ ID NO: 131306 - DNA, 122 bp, Homo sapiens
gacagtcataaaatgctgtttattttaggcatttaaattcctttctgctcaaaggaacagcgtgaacggaatgcagagcagacgctgatcgagctggattccttttctcactgaatgctctt

SEQ ID NO: 131307 - DNA, 122 bp, Homo sapiens
tccgcaatttcctgtaagagcttaaggcgctctgtgtcaaacagtttccgggcctcctcccgggcctcaatggtgagcgctgtccttactttgtcactgctgccgtcgcggagagcacagag

SEQ ID NO: 131308 - DNA, 122 bp, Homo sapiens
atgagccaccgcgcctggccaacagcaatgatctttgagcacctatattgccagtctccacggtaagagctttcttcattttttgttttgttttgtttcaagacagagtcttgctctgtcac

SEQ ID NO: 131309 - DNA, 122 bp, Homo sapiens
tcccccattttccagagaatgctaacagactactgtcaacttgtgatgggaaattttatgcgtccacttcactgggccatggtgcccagatgtttggttaaacattattctgggtgtgtctg

SEQ ID NO: 131310 - DNA, 122 bp, Homo sapiens
gaccctttgagaacatcccagacgttgatagtgtaatcattgtatccagcaaacagcaggcgaccttgaagcagggtgagatgatagctgttaagccagttccttgcttcctgtttctcatt

SEQ ID NO: 131311 - DNA, 122 bp, Homo sapiens
cccagatccagccgctgtcagggaccaagtctcggtccggggggccgggtggggcgggggcgacaccgacctgctctccgcagcgtctgacggggccgtggttatgggggtggcagctggac

SEQ ID NO: 131312 - DNA, 122 bp, Homo sapiens
ggtagtgatgacagaggcttcactgcaggctcatggtcctgggcagaggctgctagagcccgcccagcctcagccagatgaaacatccgggaacacacacccggcacagagtctccagggct

SEQ ID NO: 131313 - DNA, 122 bp, Homo sapiens
ctttgcgttccctgtgcgccggaagtgatcccctgcgtggctgggctgctcgggttagatcgtcaggtgagggaggaagggatagccagcgcgaaggaagtgctggagtcgtgtgttttggc

SEQ ID NO: 131314 - DNA, 122 bp, Homo sapiens
ccgcccggctccgcccctgcagcccacacagcacaacgtcttaccgtgcctattaccaagcgagtgtttgtaaccatgtagttttggaacccactgcaaaattttctactggccaagttcaa

SEQ ID NO: 131315 - DNA, 122 bp, Homo sapiens
taaagagaaaggatattaaaatgtaagatgcatgatgaaaatataagtggacaggctgttcgtatttgacctatattaagtaatgtataaggtagtgttcagagtaatacttttctacatta

SEQ ID NO: 131316 - DNA, 122 bp, Homo sapiens
tgggtctagatatgaacttgtgcttgagcagcccagcgtcttacaactctgctgtgaggacggctggctgattatcaggcccagaatcacgggcttagaaacattaacaggaagtacggtac

SEQ ID NO: 131317 - DNA, 122 bp, Homo sapiens
tccgccccctaaaaacaacaacaaacattatgtttcgttttccactggagctgcaggccccgcccccaaacagcacgtggggggcgtggcgtcccggcaggggctcagtagctgaggctgcg

SEQ ID NO: 131318 - DNA, 122 bp, Homo sapiens
cacaggtttccgagagagcgcttttgcctacgccatcgcagcagctggcgtggtgcacgccgtgtccaatgcgtgtgccctgggcaaactgaaggcctgtggctgtgatgcgtcccggcgag

SEQ ID NO: 131319 - DNA, 122 bp, Homo sapiens
ataggcctggtggtcagagaggctggatcaagaatctccacagcccagcgagaagccacgcgaacacacccctgtgtgggtatccgtgacctggcggcctgcagaactcctgggccagagac

SEQ ID NO: 131320 - DNA, 122 bp, Homo sapiens
cttcctttttccttctggttctgaacgtgaaaccctgttggaaacaggtctcttgaccctcgcccttgacattcaaatggctgaatggaggagagattgctactcgcacgtcctgggggctg

SEQ ID NO: 131321 - DNA, 122 bp, Homo sapiens
aactttcctctctcttttcccctctctcccttttaccccctcctcagacgttgaatggctcgctgaccctggagctggtgaatgagaaattctggaaggtgtcccggccactggagctgtgc

SEQ ID NO: 131322 - DNA, 122 bp, Homo sapiens
ttgggctctgggggacgctggcagacccacgaatgccttgccttctccggtgggcagtgccgccacggtcgtgagggaggggagcctcctcttttggaggactatatccctcgtgcttcccc

SEQ ID NO: 131323 - DNA, 122 bp, Homo sapiens
cttagtccctagaggaaactggagatgggcgggcggagccccagggcgggtctgatgggccgggcggagccaggcggagcagggactgaccagcccctgcggcccacgctcgcattcctgca

SEQ ID NO: 131324 - DNA, 122 bp, Homo sapiens
ctccaccagctccctgcaccatatgccaaaaaagacaactgtctgggctcccctgggaagcggtggcagctgctggaggttcttgcctgggaactgggagtgtggaggatgaggtgctggca

SEQ ID NO: 131325 - DNA, 122 bp, Homo sapiens
tgtacctcacattatcttctcaagggcatacagctgaggccaggcccatgaagaagggcccgccacacacctctccacctccacagtgggaatgtccatctgtggatccgcaagctcctggt

SEQ ID NO: 131326 - DNA, 122 bp, Homo sapiens
ttattgacttcttttcgacgacgccagcgaccggaagcagaatagaggcgccagaagatgcgccatcaggatacacattggccaatcagcttcagcaatggagcgtgcaaaacaccagtgag

SEQ ID NO: 131327 - DNA, 122 bp, Homo sapiens
ttccttgcttgattccttccttccttgcttccttccgttcttgacggagtcttgctctgtcgccgggctggaatgcagtggagcgatctcggctcactgcaacctccacctcccgggttcaa

SEQ ID NO: 131328 - DNA, 122 bp, Homo sapiens
gccagttgccagcgaattcacaaatccgaccggcccctcccggcccaccgacctcgggaccgccccaggaacatattcagcactgtggccagcgccacatccatcctaccgcaaagcgccgc

SEQ ID NO: 131329 - DNA, 122 bp, Homo sapiens
ttagtcccagccctgagagcctcaagccagcgttcgcgcaacactccatgtcccgaagaccgtagtctgatgatcgaggcagagtcttcccatcatagcgtgaagaggcggctggtcagggt

SEQ ID NO: 131330 - DNA, 122 bp, Homo sapiens
ggactcgggaccatacccagggagggcgggtggcctgatgaggctggagcccagcttctccggaagctgccagcttcccttagagggtcaggatctgggctgggccttggatgtgtccaggg

SEQ ID NO: 131331 - DNA, 122 bp, Homo sapiens
ctcggcggccctggcagggcggtgcctggggtgggcgctgggcctccaggcctgcagccacgcttggcgctgtccgctagggccaggtgctgaagtgttggccgcgagcggagctgctgcag

SEQ ID NO: 131332 - DNA, 122 bp, Homo sapiens
ctgctcaccaaagtcaatactttaaccttgtgcttcaaagtcaggccgtctgcagggacccggcccattcccccaggacctagcgccgcagctggaatgcagcccgctcttccgctgcagct

SEQ ID NO: 131333 - DNA, 122 bp, Homo sapiens
gtgcacaataaagaagagaagcctctgactctgcgggaaggtctctcacagaaccaaggacgttgccacccttggctgggtgtacttgaccaaagcgagcctgactgaccctggtagtaggc

SEQ ID NO: 131334 - DNA, 122 bp, Homo sapiens
ggtgcagaggtgagaagggaggattgctggaggaatgttcctgaaactgggaggatttggcgagtccaggatttggtgaggagggatgggaatgtgatgcatatatgaaagggttgccttag

SEQ ID NO: 131335 - DNA, 122 bp, Homo sapiens
cgcaccacgcgggcgtgggggacgcgctccgcagtcgtctccagctcttgcctgtgcgcgcggccgtggctcccctgcctgcgcgcttcttcgtatctttgccattacggcgctaatgcagt

SEQ ID NO: 131336 - DNA, 122 bp, Homo sapiens
aaacccaccaattcatactatgactaatgctaggattaaacagatttgctgtgttattgccggctggtaaatttctgagtttaaggccttgtcttacacacattttgtgtcactagcaccta

SEQ ID NO: 131337 - DNA, 122 bp, Homo sapiens
ctacgaggacgccgagttgaacccccgcttcctgaaggacaacctgatcgacgccaatggcggtagcaggcccccttggccgcccctggagtaccagccctaccagagcatctacgtcgggg

SEQ ID NO: 131338 - DNA, 122 bp, Homo sapiens
tcagggaaggaaaaaacaacaaccccgaaagctaattctttccatgtccctatacagccacgttggcacagaggcacttcaggtgaaatcaacacttcattatgaccccctgatgcccaaga

SEQ ID NO: 131339 - DNA, 122 bp, Homo sapiens
acagctcgccccatggagccgccacctggactccgggaggcgccaaggcttcagcccccacgtgctcttaacatcatccgtgcaaatatcatcacagcaaaagaggcaaataacgtcttggc

SEQ ID NO: 131340 - DNA, 122 bp, Homo sapiens
tccatatctccctttgtcctgtgtgtgtggccgacgccctctggatgaagaggctgtagccgttgagctccctgtgggggcctgtttcatcccgaggggactgcgtgttgctctgtgtggtt

SEQ ID NO: 131341 - DNA, 122 bp, Homo sapiens
tttccaaaaggaatgcatcactgtcctgtcctgtgggaggatgtcttcctccagccgacccgccatccctccttggtgacgggtctgagtgtgggtgtcttggggctgtctgtaggcttttg

SEQ ID NO: 131342 - DNA, 122 bp, Homo sapiens
ggggctgaccctctgcttttccaagtgctcctcagagcctaggaaaaggcacctgttacccgcccatgccctattagtataagctccatttattacagctgcaagctctccccagcctgcca

SEQ ID NO: 131343 - DNA, 122 bp, Homo sapiens
accacttcaaacgcgctcgcgctcgccgtccagatggcccggggccggggtccgtggtgtcgctcaccgaggccgggccccacactccagccaccctgagcctcctgctcggagctgcccgc

SEQ ID NO: 131344 - DNA, 122 bp, Homo sapiens
agacaggaaacgccggtgaggtcgccctgggccatggaggcagctcgcgctactttttcgcgacctcactgtgttcctgtgtgcaacctgatgttagctctgtccaccttcagctccaaagc

SEQ ID NO: 131345 - DNA, 122 bp, Homo sapiens
cgtcctggaaaccgtccttccagagcccggcgtagcgcaggccggacacgctttcccacacgccgctgcgccccttcagcccgcccagccactcgccgcggtacgtccagcggctcttgcgc

SEQ ID NO: 131346 - DNA, 122 bp, Homo sapiens
gagtgagttcgtatattcctgaatgactcgccattttagtattttcacctatcaccgccacgcagctgacttcttaatctgtttccagctctgccctctctcactagctggaatcccgtctc

SEQ ID NO: 131347 - DNA, 122 bp, Homo sapiens
tgtgataagctgaattgcatccctccttccccaaatatgttggcattccaatctccagtacgtcagaatgaaaccttctttggagataggtgctttacagaggtaatcaagttaagatgagg

SEQ ID NO: 131348 - DNA, 122 bp, Homo sapiens
cactgcactccagcctgggcaccattgagcactgagtgaacgacattccgtctgcaatcccggcacctcgggaggccgaggctggcggatcactcgcggttaggggctggagacccgcccgg

SEQ ID NO: 131349 - DNA, 122 bp, Homo sapiens
acttcattgtttggtgagttgctttgctttgctcgttgccccgatcttctgtgtattctgcgcagaccccgcaagtgctcctgcactccctcccagccctctgctggggcttaacgcttccc

SEQ ID NO: 131350 - DNA, 122 bp, Homo sapiens
cacccggcccgttctttcttaattttgccattccagtgggtatgtagtggcatattattgcggttttcatttgatttgcatttgcctgatggctaatgatattgagcagcttttcatgtgtt

SEQ ID NO: 131351 - DNA, 122 bp, Homo sapiens
catctacagcctgagaaacagggatattaaaggtgtcctgcggcagccgcacggcagcaccgtccaatttcagtatcttcttatctgttccattccttttgtagtgtgggttaaaaaaggca

SEQ ID NO: 131352 - DNA, 122 bp, Homo sapiens
cagtgatgaggatggctccctccccagtcatctccaatttcccaaagcagctctggaaaacgtgaagttgcgccttctctttcctggaggatggaatccagagtacctgggcccttgctatg

SEQ ID NO: 131353 - DNA, 122 bp, Homo sapiens
atgcctgtaatcccagctactcaggaggctgagccaggagaatcacttgaacccaggaggcggaggttacaatgagccgcaatcttgccacttcactccagcctgggcgatagagtgagact

SEQ ID NO: 131354 - DNA, 122 bp, Homo sapiens
aagaggccctgggcacaatgaatactacttgtgctggttaaatatagtgccatctgccctcgaaaatcttaaatagagaggctaggaagtgagccctgtggttcctggactctctcccttcc

SEQ ID NO: 131355 - DNA, 122 bp, Homo sapiens
ccagaggtgatgcaacatctccatttcaaaaagtcatctccagaagatgtttattttctacgatttttttaaacaaatgggaatttacaagatgtgtgatattcttagtctatcatacatcg

SEQ ID NO: 131356 - DNA, 122 bp, Homo sapiens
tttcctgggcatttaccacaggcagtctagttggcactgcgggaaattacaaaatctaaacggtctccaaatcacaaacctccaattgtaaaaatgcacatacatgtcacatccttccactg

SEQ ID NO: 131357 - DNA, 122 bp, Homo sapiens
ggctcttggccgttttaaaagcatagcctctgctttgcaaccaaggtgtacagcaacgtgcgcatcacattaaaaagatgccttcgtggcattgtcctgctggggtcaggctcttcacagag

SEQ ID NO: 131358 - DNA, 122 bp, Homo sapiens
actcactagcatcctttgtccggaacacattcccactccgggaacttaagaggaaacagccggcctgcatgcaatgtcagggtaaattgagaacatcactgtcttagtccatatgtgttgct

SEQ ID NO: 131359 - DNA, 122 bp, Homo sapiens
agggtgtttgtggtgaagaggcagaaccgaggtcgggagcccattgatgtctgagcctgccggagggcgagggtcggagaagcggattgggtcctgggcctctgtgatgaggcaggcacacc

SEQ ID NO: 131360 - DNA, 122 bp, Homo sapiens
gaggtggcactgcccgcctgattggctggccactccagaccccccgcccactcctccactcgggtagccggactccccgccccccagcaccgcccggagcccccgccctcgcctctccctcc

SEQ ID NO: 131361 - DNA, 122 bp, Homo sapiens
ttaactaatacttatgggaggaaaaaaggaaggagaaggaaaaggagggaggaaggaaatcgtgtaattgcagaaagtttatgtctgggacccttgtgtaataatgttaaataatactttga

SEQ ID NO: 131362 - DNA, 122 bp, Homo sapiens
gcggggcggggggagttatattgcggggtccttcctcgctcaccctggttcctctcggagcggagacggcaaatggcggacttcgacacctacgacgatcgggcctacagcagcttcggcgg

SEQ ID NO: 131363 - DNA, 122 bp, Homo sapiens
gacatttaaaacaacatggaggagtgcaagatggacaggaatatacaggaaagtctgaagcgtggagtcaggcagccctttagcaatgcagctcaacaccaatactctgagagcatggtaac

SEQ ID NO: 131364 - DNA, 122 bp, Homo sapiens
gttctctgtgaactgaagactagatctgcagccccagctgcggcaggagacaaatgcccccgccaacacccggaagccgcccttgtcctctccagctgcagcctgattgcccggttttcggc

SEQ ID NO: 131365 - DNA, 122 bp, Homo sapiens
tatgagttccgaccactaagcctcatggttgggatgatcttattacaaatggacaaaagacggagactacctctggttatctgtctactaacctgtaacagaagggaagcagtgaaccactt

SEQ ID NO: 131366 - DNA, 122 bp, Homo sapiens
gctggtggatgctggggctccgaggcgacggccggggggcgggggccgaggcaggtataacggtaccggcggcggcagcgccgctgctcttcccttctcctcaggaggggggccaatggcta

SEQ ID NO: 131367 - DNA, 122 bp, Homo sapiens
caccttggtccctggatccagtagccaaaacctggggctccctaagcactgctgacctagcggagtggaaggaagttcccaggagccgagacactagcactcggctccatcgtcccaggact

SEQ ID NO: 131368 - DNA, 122 bp, Homo sapiens
ttttaaatccacagttgtggccttgcgctcactccactggggtaatgaggctgcggtgggcgcagtgcaggtcagttctctgcgcctttgtcccccgtggttctcacggtcacgggggcagc

SEQ ID NO: 131369 - DNA, 122 bp, Homo sapiens
agctgtgattacaggcgtgtgccaccatacctggctaacttttttcttttttttttgagacggagtttcgctcttgttgccaagctgcagggcaatggtgtgatctcggctcactgcaaact

SEQ ID NO: 131370 - DNA, 122 bp, Homo sapiens
tctcagatctgcactactcccctcggccgtccattctttggcccgcctttcccccacccccgctccagaccctgcacaccaggcgactggactggcgtaaatttccgcccatttgcgtcgcc

SEQ ID NO: 131371 - DNA, 122 bp, Homo sapiens
tcaacaagtggattttacaaacccattggctttggtgatgttttcttgtacgagtgaattcgtggactgtacagaattgaagaaatcaagtgaaatttttcagaagagaatttttggtttgt

SEQ ID NO: 131372 - DNA, 122 bp, Homo sapiens
cccatgccccagtcagctccagacctcatacccgcttcttggcctttgatgaaggggcctcgcaggctccagacagccgccaccctgggaagccatccctctagcggtcagatgaaacggag

SEQ ID NO: 131373 - DNA, 122 bp, Homo sapiens
tgagaccagcctgggcaacatagaagaccccatctcaacaagatacacaaagaaattagtcgagtgtggtagtgcacacctgtagtcccagctacttgggaggctgaggcaggaagatcact

SEQ ID NO: 131374 - DNA, 122 bp, Homo sapiens
agaaaacgatacgagggcggtatacactcaacacgcgcatgaacgattcatcaagccctccgtgtgccgggtctggctcaccaacctcatcctctgagctccgggcttctgcctcccagccc

SEQ ID NO: 131375 - DNA, 122 bp, Homo sapiens
ttagagcatctcttagtattaccatgccctttgattaaggtcaatgggaaactacaatagcgcaatccaggcaggactacaaatagcccagacccctcaggaatgaaggtttgggtcactcc

SEQ ID NO: 131376 - DNA, 122 bp, Homo sapiens
cttggcctctgaaagtgttgagattataggcaagccacgcctggcctactgttaggattacgctattatgttattattgttgttaatctctcactgtacctaatttataaattcaattttcc

SEQ ID NO: 131377 - DNA, 122 bp, Homo sapiens
aaatgccgctccctgcagttactgggcccagaggatcgtgtttctgtcactgactataagcgacttctggattctggggcaccccatctgttgctggacatcaggcctaagatggaggtgag

SEQ ID NO: 131378 - DNA, 122 bp, Homo sapiens
gactgcgcctccctggggcacaggttgaacagttcacctacagcactgacatggcctaagcgaatgtcctgtcaatctgagagccaggtttctccctgtcacaggaagaaactacacataag

SEQ ID NO: 131379 - DNA, 122 bp, Homo sapiens
tgtcgccggagggaggcggggagggtcgcaagcgcgccgccggcgtccaatcaggacctgcgttccgggagccaatagcagcttcgagagccgctcacctagagcggactacacttcccgtc

SEQ ID NO: 131380 - DNA, 122 bp, Homo sapiens
aggtcaaatcaccgaagcctcgggatcgtcgctgggggctgtgacggggctggcatgaaacgtccctctgtctggctgggcgatgggtcagtgctcaggagtttcaggcctttaaggcccgg

SEQ ID NO: 131381 - DNA, 122 bp, Homo sapiens
ggttccacctgtgccctccagggggcgacgttgcactaaggaggcatctgtgttcattgccgaccatcctcatccactgagcctcctccctgcagctggctgatgtagctcactgatgtctg

SEQ ID NO: 131382 - DNA, 122 bp, Homo sapiens
gttcatagaaaaccagccccggctcagggcgcagcctcagccaggcgggccaggccctcacgcagctcactcagctcaaacaggctgacgtccagcagctgcgctgcccggcccacctcagc

SEQ ID NO: 131383 - DNA, 122 bp, Homo sapiens
cttctgcctgcagcagagaaaaggaaagaaaactccgcaggggctccgttggcttctccacgagtgacaaccatgttttcccagatagaagaccggagccctgctcctttgcgatccgccga

SEQ ID NO: 131384 - DNA, 122 bp, Homo sapiens
cctatcaccaaggcagtgagagtgctctcaagaaggccaccacactcctcactgccataccgaaaagtatttctccaagacttttctttcttgactcttcactaagactttccctctttggc

SEQ ID NO: 131385 - DNA, 122 bp, Homo sapiens
aggctccctaggggaaggcctaccttgcctggaccgggttagcagcccagctctggcccgcggggagggctgggtgggaaccacgttcagattattccttaatcatgctgggaacatagtac

SEQ ID NO: 131386 - DNA, 122 bp, Homo sapiens
ctcttccagctcattcttacgcttccctagcttattaacacttctaggaagcagctccttcgggactttattattatgttaataccctattattttaaagcttcaatattaccatgtttttt

SEQ ID NO: 131387 - DNA, 122 bp, Homo sapiens
tatccttactatctaggtattcatactagcctaactccttaggctaggactgtgtccccacgaagcctttttttatcagaatctaacaaccacaaaacacatactttcacaggtagggtcca

SEQ ID NO: 131388 - DNA, 122 bp, Homo sapiens
caagcctgggcctgtttctcagcagcaccttccccagcatgctggcctacacggaggactcgctgcagtacaaaggtgagggccgggcccgagccaggaggcgcgctctatctagctgggcg

SEQ ID NO: 131389 - DNA, 122 bp, Homo sapiens
agtttttataaaacatattattaaaacacaagaaactggtgatgctgtttttgcttctaccgtgctatacattaactcttctgatatacttcatgcaaaacaatctgttttagccaaccata

SEQ ID NO: 131390 - DNA, 122 bp, Homo sapiens
ggcagtactcgctgtccggggggttgtactcgcgacagttggcgatgacccgctgcaggtcggccacaaagagcttccgggtcacgtagtagcggcttcgcagccgctcagtcatggtcttc

SEQ ID NO: 131391 - DNA, 122 bp, Homo sapiens
tccatctccttcaaaggacatcagctattgcaaagtttcagaatcctgcttctcccttttcgtcttccttcttccctctttcatgtaatatttgagttgttatctgaagcacccagctgagg

SEQ ID NO: 131392 - DNA, 122 bp, Homo sapiens
aacatctgagaggtcagtgtttgctactgaaggcaaattaggtttattcacataaggcttcgtatgtgtcaagagaaaggaaaggctcaaaaacccaaactcagaggataacagatccaaaa

SEQ ID NO: 131393 - DNA, 122 bp, Homo sapiens
cgaggctgctgctagtgagggaggagaattgggaggagctgtgaggtcagcctttgcatccgaggcttgaccctgcttcagcctggaggtgtccaaagtgaagggccaaggccaggggatgg

SEQ ID NO: 131394 - DNA, 122 bp, Homo sapiens
acgatgttaaagaggaggaggcatgagcgataggacctgctcctggctgtgtctgggccacgagatcgctgtgaaaatccaagggcctggttgcctgctccatgccgaagtgtaagcagcat

SEQ ID NO: 131395 - DNA, 122 bp, Homo sapiens
gagcgcctctaacgggtgcggccgagcggaggacttttctcccgtagcctggcagccaggcgcctggagcactgcctgactaaaacccagatgccgagtggccgccggccccttagccctgc

SEQ ID NO: 131396 - DNA, 122 bp, Homo sapiens
tccgaccccagcccgcccccagccctcccgcccagcccgcagccccctccctctgttccccgacctcagaccctgggcttccgacctcgacatcatgggtgacgcagaaggcgaagacgagg

SEQ ID NO: 131397 - DNA, 122 bp, Homo sapiens
gtgtgctgctttggacgctctgcttttagcaaccgcagctttcgcgtagcagaataaatccgagaataacgctcccaacttacactcttttctatagctgtactccgcgcgatcttttagaa

SEQ ID NO: 131398 - DNA, 122 bp, Homo sapiens
ggttgggggacagcattgtttctgtgaccgtaggcgtcgaagctatgcagaagcgttccgcggaccgcagagagatggggctcaggccagcatccctctcgctccggcccttcccgggagga

SEQ ID NO: 131399 - DNA, 122 bp, Homo sapiens
ggcattacagctagtatgaagagctactgacaagctcttgctttccttagagttgcgatacgggaggtaagcaaaggggaataaaggaagggtgaggccctgaggcctttccatctctccca

SEQ ID NO: 131400 - DNA, 122 bp, Homo sapiens
tgccgccctctcgctgctctagaccaggtggaaactcaagcctgcactcgggaacagaaccgcatctgcacctgcaggcccggctggtactgcgcgctgagcaagcaggaggggtgccggct

SEQ ID NO: 131401 - DNA, 122 bp, Homo sapiens
agtgggacctcggaattcgtagcttagcaagctccccaagtgatgctgggagtaaactaacgtttgagagtcacaaacatgttttggcaatataaccagatgggactggagaaattaaaaaa

SEQ ID NO: 131402 - DNA, 122 bp, Homo sapiens
gaagtcatgtgaaatcttacagaagagctgctaacaatcaagggcatgaatactgctttccgaatttcactaatattggccagctccttttagagttgccctggaacagagaaatttacagc

SEQ ID NO: 131403 - DNA, 122 bp, Homo sapiens
ccccgttcccggcagcccgcgcgtggcccagcatgccccgcgccgcgtcccttcccccggcgcagccccgccccgtgccgccccgcagccgccgccattttaagtgatctggaagcgggcgg

SEQ ID NO: 131404 - DNA, 122 bp, Homo sapiens
tcctgcatcagttggcatttcagtacaatccactacaagaagtggtttgtttaatactaccgtggataaataacagccaatttccccttggaaaggagctcaacccactttcaagcccaata

SEQ ID NO: 131405 - DNA, 122 bp, Homo sapiens
gtagaagagaagagaggtattttatcttactagtggagatcatccatgtacacctacacacggtacagcttaccagagtgagctcttacgtaaaattagatcgtccagtataaaaagcgaaa

SEQ ID NO: 131406 - DNA, 122 bp, Homo sapiens
tcacttcccatggagtggagaaaagcatgctgctctatatttgttccctacaacaggaagcgtgaaaacaggatttgctgccacatgtcaagtactcatgtgcctgtagaagaaaggggcca

SEQ ID NO: 131407 - DNA, 122 bp, Homo sapiens
accgccgcagactggctgggcaggatgacgatggactccacggcacccgtgagccgcccccgggcagccaaccccactcctcagtgctcctgatgcctggccctgcgttgcagcgaagcctg

SEQ ID NO: 131408 - DNA, 122 bp, Homo sapiens
gccggacccccttccgccgccgccccgggccgccgccgccgcccccgcacgccgcgcccgcgcccccgctccgccgcggagtttctgcatgactgtcacaaaggtaagcgccgctcgcccgc

SEQ ID NO: 131409 - DNA, 122 bp, Homo sapiens
gggcatttgaaggtcactttgcctatatgaccttttcagggaagagcagacttaagttttcgcaggtagacactttaaagagtttagggtaattctagagatgcagcctcctgctgttagag

SEQ ID NO: 131410 - DNA, 122 bp, Homo sapiens
gtgtgcggtcggctcagtgccacgcggtgagataggcatggttatcaacccacgccaaggcggttgtgtacctggcatagaaaacactgctgttgaatgttgtttccatagtcattcgccag

SEQ ID NO: 131411 - DNA, 122 bp, Homo sapiens
gatttttggcgctttgaaataaaattttattcttgcttagcgttctttccccgaacaagccggtgagcttccagcatctgtattttctgaatccggcagataagaaatgcttgagccaggac

SEQ ID NO: 131412 - DNA, 122 bp, Homo sapiens
ccgcagcctcgccccctccgcagcctcgccccctccgcagcctcgccccctccgcagcctcgccccctccgcagcctctccatgaccagaccagccgcttggtgtctccttccgcggccgat

SEQ ID NO: 131413 - DNA, 122 bp, Homo sapiens
cctttagcgattttaaatctaatctagcggggtagggctgcagccaaaagcacgtgagagcggcccgcggccggcggggtcccgggacaggcccgcgcggggccgaggtgccagggccccca

SEQ ID NO: 131414 - DNA, 122 bp, Homo sapiens
cgcgtcggtcacggagccccaggaggagcgtgcagcccgcagcctgggcctgggcacagccggctttatcagcagctccatcccagccccacagacaggggaagaaaaggttgggggctggg

SEQ ID NO: 131415 - DNA, 122 bp, Homo sapiens
gatgtgccaggcacatcataggctctctgcgagcacttatctaaagagtgtgcgggcagacgacaggtgattgtgattctgcacagagccctgggctgccatccctagcttagcttcctgca

SEQ ID NO: 131416 - DNA, 122 bp, Homo sapiens
cctcctttccccgccggctcccccgaagactcgctccccgccccgagccccctcgcttgtcgcctgggttccctccgtggtatgggtggaagttagaacggaaaccagaaagttgtcctttg

SEQ ID NO: 131417 - DNA, 122 bp, Homo sapiens
ggcagcggcggaaagcacgtgacggccaccgtggcctgccagcgcctggggcccagcccacgcaacaggtaagcggtgccctccctgcaagcgtgtgtggttcctggtcccgggcccaggcc

SEQ ID NO: 131418 - DNA, 122 bp, Homo sapiens
ataaggtcttaccttttaaggaggatctgacccccgtaccttccctagacaagcaacatacgcggcgatgctttaagccgctttctgcctgaaatctcggcgcattcccggggaagcagtgc

SEQ ID NO: 131419 - DNA, 122 bp, Homo sapiens
tatgggcccttttacgagaggccagtcgatgtcaggggccagactataaaaattgctacccggtgcctaggaggataaaaccatatctggagagctgaccttgaaacaccagagtcctgagg

SEQ ID NO: 131420 - DNA, 122 bp, Homo sapiens
gccaagtgcgtgggcattgatctacacgtgagtttctccacctctgccgaatggctacttcggggtgggggaagggccctcccgccgtggattgcaaggtgtttagcagcatctgtctcctc

SEQ ID NO: 131421 - DNA, 122 bp, Homo sapiens
tcaccccctctctgtcagcggacaccttattgcagctggatgagtccctccagaatgcggcgtccctgtcttcaaggcacgtactgtgaccagcacactaatctctgttactctagcggatg

SEQ ID NO: 131422 - DNA, 122 bp, Homo sapiens
acttagccatggtggacccagcgggcaggttctgcctgctttggcgggcagacacgcgggcgcgatcccacacaggctggcgggggccggccccgaggccgcgtgcgtgagaaccgcgccgg

SEQ ID NO: 131423 - DNA, 122 bp, Homo sapiens
tcctttacctaattcttacctttcaaaactcagttcaagaaccacctacctcctccaggacgctttcccaaaccactttccctagccactctcctatgtcatctggatgctccccaacaccc

SEQ ID NO: 131424 - DNA, 122 bp, Homo sapiens
acaggattcagaaggtgcccggggttctgcagcccagtgaggagttcacagagtggtgggcgacccagcagccaggggcatcagccgtgggagtgggacgctccgggagtctgagctgcatc

SEQ ID NO: 131425 - DNA, 122 bp, Homo sapiens
gaggcgtccgggtggcaggaggggccaggaacggaatatcagagatgcgcaggtcacagccgaggttgcaggcagagctgagacagctggtttaatctaatctcttatccctatgtgttttt

SEQ ID NO: 131426 - DNA, 122 bp, Homo sapiens
ctgtcaactactaaactaaattgtcctacatctctataattttgtcatttaagaatgttacgtggaatcatacggtatgcaaccttttgagatagtctcttctctcttctcccccaaccctg

SEQ ID NO: 131427 - DNA, 122 bp, Homo sapiens
acgccgggcaacttggaggtttcagggtgacgcgggagcgccccggattggccgggtccccgcgggcaggagggggcggagggaccggtctccccgaaacgcgcgcgcaccgcttcccccgc

SEQ ID NO: 131428 - DNA, 122 bp, Homo sapiens
ctactaagttaagctttacatacctcacttgcaagaggctatgctggctttctggaaatccgtaattaagttcagtgtttgtggaatggagtgtaattaacgaccattaattaacagggttt

SEQ ID NO: 131429 - DNA, 122 bp, Homo sapiens
acgagacggggtgcagcgtccgtttgggaaggcggaagaagcctgtgaggtccaagagggcggatggagaaagttccccagcaggaactccccgctagggaagctttagaatttgcccggga

SEQ ID NO: 131430 - DNA, 122 bp, Homo sapiens
ctttgtaaattaaatagctattattttttcaaacctgtcaggatatgcttatgcagttgacgcacacgtgatcatagtcatgttcactgtgtctaaaagtgagaaaaatagaatccattttg

SEQ ID NO: 131431 - DNA, 122 bp, Homo sapiens
tcaggtaaccaccagtacacagaggaagggcggtttctggagacagggcggagaggagaccgtgggtgggcatttcccagagcagcctctgccagccaccctactttgatcactttgccgcc

SEQ ID NO: 131432 - DNA, 122 bp, Homo sapiens
agcccggaagttacagtgatgcaccggaatatctgtggtctggaactctttgagatcttccggaacctaaatgtgaacgcacattgtttctctcaaaaagacaggtcttttaaaactccgca

SEQ ID NO: 131433 - DNA, 122 bp, Homo sapiens
tcatctcatgctattttctcaaattctgtgcccaagctttgcctgtgcacttgtaggccacgttctgtctctctccttggagcttgtttatgctgtttcctttgcctaaaacacttttctcc

SEQ ID NO: 131434 - DNA, 122 bp, Homo sapiens
ggttctggggtctggtgaggctggctggttgtataagatcttcctcttaagcgcaggccacgtgcagacatcgctttcgttttctgcttcttccactgagccgttctacctgcccaggtccc

SEQ ID NO: 131435 - DNA, 122 bp, Homo sapiens
gaggtgagacacctggactctgatcactccacaccaatccaactgggagacccacaatgccgatggaccaagaggattgaacaggggacatctgactaaaggtgtctccattttacaaaggg

SEQ ID NO: 131436 - DNA, 122 bp, Homo sapiens
gggagcttggagaaagaagagggggtgaaagaactctctcaggaggtggtcctctaggagcgtgtgaggccaggctcagcttcactcctcgctggctcaatagcttcgctcgcctcctcctg

SEQ ID NO: 131437 - DNA, 122 bp, Homo sapiens
ccggcaaccccgggagcggtggggcaggggctgctccgccagcctctgtgatgttcaggccgggctgcaccagcccgggacccctaggtgcccagaaacccacttcctcttgtttctgcccc

SEQ ID NO: 131438 - DNA, 122 bp, Homo sapiens
ctgggcgctaagatggcggcggcgtgagttgcatgttgtgtgaggatcccggggccgccgcgtcgctcgggccccgccatggccgtcaccatcacgctcaaaacgctgcagcagcagacctt

SEQ ID NO: 131439 - DNA, 122 bp, Homo sapiens
cgggcttccgagggagcgggcggggcgggagcctggcgggggagggaagggttcgcggggcgggagtaggggaaaggaggaccatttgttccttcggccattcccttccagacagctccttc

SEQ ID NO: 131440 - DNA, 122 bp, Homo sapiens
aagagagaaacttggtgagcacatagttgataaagttggaaatgtgtggtttgagagtcccgagtttgtaatatttttctttgggctggagaacaattatagacgtttgttctctatatagg

SEQ ID NO: 131441 - DNA, 122 bp, Homo sapiens
atagctcttgggtagattgtttttggtttactaattaagtccagactatggcaaaagcagcgtgggatagaactgctgcctgttgatgagcttgtgctgtagcagctggtgtttgctgctgt

SEQ ID NO: 131442 - DNA, 122 bp, Homo sapiens
caccatttccttgctcctaaaatgcaaagaaccagcaaatcagactcagaagatccggggcggctgccaacctcacctcttagtcaaccagctgtttgacctgtgaattaggcccgtaaaag

SEQ ID NO: 131443 - DNA, 122 bp, Homo sapiens
gggcaaaaagggcttagctatctccttccagcccttgtacaaggtcatgaatcccattcacgagagccctgccattgtgacctaatgacctcctaaatgctccacctcttaatattatcaca

SEQ ID NO: 131444 - DNA, 122 bp, Homo sapiens
cctctcctcccggcctcttcgcctgggcgggggccgcaggctgccgcggaagcctcttcccgatgctcttcgctcaggagagcccggcccaggagagggactacaagtcccaggctgccttg

SEQ ID NO: 131445 - DNA, 122 bp, Homo sapiens
atgtctgtgaggagtgtgagtgtgagtaggtgagggctcaggatgcctcgcccagccctacgcgcagtttgtctgcccagcggggccaggcgcgcccaggcgggtgtgcgggaggcgggccg

SEQ ID NO: 131446 - DNA, 122 bp, Homo sapiens
gagaagctggactggggggggctgcgtccggggcggggacagctcgctgtcatagggaaccgcgccccccctccatacatccacctcgggcagcccgccaccccccactcccaacatacaca

SEQ ID NO: 131447 - DNA, 122 bp, Homo sapiens
caggggtttggaggccttgacaaatagcttagatttaatcacagcccatgaaatttgtgccgaaattccctcaatattgctcaaataaacctcttttcaatgtgctcctgggatttaatggt

SEQ ID NO: 131448 - DNA, 122 bp, Homo sapiens
gtccactgacgtagcgccacatggtggtgtcagcatcgccgtgtcagtccactgacgtagcgcacacggtgttgtgtcagcatcgccgtgtcagtccactgacgtagcgcacacggtgttgt

SEQ ID NO: 131449 - DNA, 122 bp, Homo sapiens
tcatcagccatggcaggcagtgcatattctattccatcacagagatggaagccagggcaacgtgctgcttaggacccgcccggcattccagggccctgcagtctagctggcgtagcagcaca

SEQ ID NO: 131450 - DNA, 122 bp, Homo sapiens
cggagctcctcccccaccagcagggtgcagggggttgtgcggggctccagggtttgaggccgggccacgctttgccaccacccaccaccctctccccacccttgcttgtctccactgggaaa

SEQ ID NO: 131451 - DNA, 122 bp, Homo sapiens
gtgtggagatgcggacctggcgttaggattggggtggggcagcatggttctgacgctgaccgcagtgctgccgacctctaatatgctagggaacccagccaggccctctgtgcctccgtttc

SEQ ID NO: 131452 - DNA, 122 bp, Homo sapiens
ttactgaggcctcagtttcctcatctacaacccggggagatgaccagtacccatcacaatcgattgctatgaagattcaatgataatgcagataaggcacttaatacagtgtcccctcaccg

SEQ ID NO: 131453 - DNA, 122 bp, Homo sapiens
aacccaggtctaacgccagagctggcgccctttagattaaaagtgcagtgtccatgacaacgaaagaagttgattttgtcccacctttgctctttgcggcttttcatttgcgtttgtttcca

SEQ ID NO: 131454 - DNA, 122 bp, Homo sapiens
actgggctgggcctcatgtcacttgcctgacatccgattgtgaaagatgtcacccagaggcgggcagaggggctgtcttttccttttctcgttgctgcccagggaggagacggggtgacctt

SEQ ID NO: 131455 - DNA, 122 bp, Homo sapiens
ctagaccaggcgatgtcttagggacgggagaggggtgaggcccacggcggtcctggggagcggcccacgaccggcccacgcagagcttgtagccagtgaacaggaagtattggcgagaggga

SEQ ID NO: 131456 - DNA, 122 bp, Homo sapiens
cttggaggaaacccaaatccaggtttggttgatactgtgtaatgtgaatgcaattagtagcggtttttctaaagtagaaagagatgtagaaaaataatgcatagcaaatttaggtcagagct

SEQ ID NO: 131457 - DNA, 122 bp, Homo sapiens
agactttgctagtcctcagagacactgctgcgagggtagtgggcagtgggattagcctcccgcagagctctggcctcctccagagcttctctgtatcgggagggccaggcctgggggtcttt

SEQ ID NO: 131458 - DNA, 122 bp, Homo sapiens
gaactgaagagactaacacgcgggtcatgggcggagggatacgtttctatgggaacgccacgatctctccagtaaacctgaggccttccccatgctgtcccgccccctcctctccccgtttt

SEQ ID NO: 131459 - DNA, 122 bp, Homo sapiens
cacgaggcacctaatatggggggggggggggggttaaagccaattatgggtattcggactcgaaatagtttctaacaaggcgttttggggttgggggatgctctccccacgagattccagga

SEQ ID NO: 131460 - DNA, 122 bp, Homo sapiens
cgaggctggcaaatcacctgaggtcaggagttcaagaccaacctggccaacatggtgaagcgccgtctctaccacaaaaatacacaaattaggtgggcatggtggcacacgcctgtaatctc

SEQ ID NO: 131461 - DNA, 122 bp, Homo sapiens
caaggcggcgtcggggggccgcagggcgccagtgggggcagaggctattcctcaggacaccggcagatccatcctcatctccatctccgccaccctcctccttcgttgcctcccgggcttcc

SEQ ID NO: 131462 - DNA, 122 bp, Homo sapiens
agaggccccgggtcccgcggcccggggggcggcgcaggatgctgggcatgaagacctggtcgtctctgctccagaacctcagtaagtgcccagctcaccgccccgtggacgggagggtgggg

SEQ ID NO: 131463 - DNA, 122 bp, Homo sapiens
ccaagagcagagccaccgtagccggagtcctagcctcccaaattcggaaatccaatccaacggtctcaggaatgttttccatcccgccacgcgcctcccgaagctcccagaccggaggctca

SEQ ID NO: 131464 - DNA, 122 bp, Homo sapiens
agcccgagttcatgctgtagggccttggggagagtaaatgggttccgtgacgagtgctaccgtgaagggccagcaaaacccacgcaccccaaaaagacagacactccgatgccatggcagtg

SEQ ID NO: 131465 - DNA, 122 bp, Homo sapiens
ccctttcccaggaacagctcaggggcctggagggcgcgggagtgtgtccccaggccgggccgtgggcaagcacttcccatcgcggcaccgagggctcccggacctcgccaacccgagccgcc

SEQ ID NO: 131466 - DNA, 122 bp, Homo sapiens
ccttgtggagcaacagcgcgccccagtcgcggggggcgcgcggggggctctcgggcccggcgcccaattcctccgggccccggtacacggcgtacaccttctggttgtcaaaatccagccgc

SEQ ID NO: 131467 - DNA, 122 bp, Homo sapiens
ttttctccttctctctttccccctcatcccgtcttcccctcctcccgtcctccctcgccccgcatgctcccggcttgccgcctgcaggatgagttccacccgttcatcgaggcactgctgcc

SEQ ID NO: 131468 - DNA, 122 bp, Homo sapiens
gattgttttcccaaagtggagagaatcttcatagagaaaaagagaaggctgtttctttttcggctctgacgaaacactgaagtctgcgtaagagagactgtttgatgaccgtccctcatgca

SEQ ID NO: 131469 - DNA, 122 bp, Homo sapiens
gagctctattgaccacaagccggggtagctacatccagtgcaacggtggggtgctccaagcgccttcgaaacgtcctctacgccagcaccaactggcaaaaccttctaattttctagacgcc

SEQ ID NO: 131470 - DNA, 122 bp, Homo sapiens
gcccgtatttggtctcgggtaggcggaaagccctgccccgcccctcctcccgcctccacccgggaacctcgatgacgcccacagatgtttatcctggtgctttagcattttctgccttctgg

SEQ ID NO: 131471 - DNA, 122 bp, Homo sapiens
gaggggccctccctttcaccaaagctgaaggcagggcacagtttggggatggaagagcctcgaggtaaatgtgggggttctagaacccagtgacctcagttctggatcatgggaaagggatc

SEQ ID NO: 131472 - DNA, 122 bp, Homo sapiens
attggtccgctctccactaaccatcctccctctaactgccgtctacaattgggtgctcgccgccatcgcttttgcagtcaggcgttggattgggtgacgctcctgtcctcaacttttcctct

SEQ ID NO: 131473 - DNA, 122 bp, Homo sapiens
gccccagggtcttggaggggaccgggtgttcaggtttcgcacaagtacaggagggaccggcgaccgccctccccccgccccgggaggctccgccagggacaggcgtccccgggattggaggt

SEQ ID NO: 131474 - DNA, 122 bp, Homo sapiens
ccgacgcgcaaagtgttcgcatttcaatgagcttgtctcttcctcccacccgctgcaaggcgagccccacgggaaggggattttctttgctaggtgcacctgtgtgcatgcaggtgccggcg

SEQ ID NO: 131475 - DNA, 122 bp, Homo sapiens
tcatgtggctccgcataagtcagtctcccattcacaatgtagcacttaatctattcaaagcgatatcccaaaacatttttttctcaacagcatttccagtcagcccaatgggacatggggca

SEQ ID NO: 131476 - DNA, 122 bp, Homo sapiens
gggtggtgtggccggttgtcagtagttttcctggcggttccactttaggtttgtgaaggccggttcgacctggggagctgcgttggtcccacagggattgaaacctccccatcctgagcgtc

SEQ ID NO: 131477 - DNA, 122 bp, Homo sapiens
gtctgtcctccttggattgggtgtaaggccggcttggaggcctggcccaccagtctgggtcgcgagcctgagctccagtcggacccaagctcagtcgcggcgcgctccctcacgtgaccctg

SEQ ID NO: 131478 - DNA, 122 bp, Homo sapiens
gcactgacgctgtaaatgtaatcctaaaataatttatcttccttcaaaaatctctgccatcgtgactttacataccacacacaaaaaagaatacctggaaataattcaaatgtataacaaca

SEQ ID NO: 131479 - DNA, 122 bp, Homo sapiens
cggcccccgcgtctcacctttaattttctttccttaggcggtaaccagcgtgagctcgcccgccagaagaatatgaaaaagcagagcgactcggttaagggaaagcgccgagatgacgggct

SEQ ID NO: 131480 - DNA, 122 bp, Homo sapiens
ttgaatgaaaactttttctgtagagggattaaggctgggtgctctctccctgtgtgaactcgtatttcccactttcacttttgcttttgcccagttctcccagctgctgggtgggacatgct

SEQ ID NO: 131481 - DNA, 122 bp, Homo sapiens
tctgcgtgccacgttcaggtcatgccacgacaatttcgcagtaagccccaggacctggggcgcgttttgaagccaatggccgtgaaggggaaggagcgactccatttgggaagaagagtctc

SEQ ID NO: 131482 - DNA, 122 bp, Homo sapiens
cgcttcctcctcataggtcctcctgcctgtgaaatcccacctggcctgtgaaaagggcaccggactgggagtcaacagctgccgcctctggcttcttacagattccttaagtctaacctcta

SEQ ID NO: 131483 - DNA, 122 bp, Homo sapiens
aggcctcattgttgctggcgactgctggtgcctcttggtgttcaaattcagaagaaagcccggactgagagtggcattaggagacaggaaaatctctagagggaaagcaagggcttgaagag

SEQ ID NO: 131484 - DNA, 122 bp, Homo sapiens
acctggggggaggggaagaggcgcccgggcagtgggcggggcctgggcgtggggcggagtcgaggtcggggcggggaggtaaaggcggggccagggaggtgtggtgggcgtggtctggggcg

SEQ ID NO: 131485 - DNA, 122 bp, Homo sapiens
ctgccatcctgccattccccttggggctggaaaagaaaggtttctaacttgctttcaaagcgagttcctatcagccccgttgtgggcaaggtggggctgctacccgttctagagggcctgct

SEQ ID NO: 131486 - DNA, 122 bp, Homo sapiens
ttcaacagcaccaaacagatccctgcaaccccccccattccccgcctccccccaaccccacgcttaggaaagaaacttacaaagaaaaggtcacctggcctgaggccagcttcaatttggaa

SEQ ID NO: 131487 - DNA, 122 bp, Homo sapiens
tcgccgaggagctgctgtacctgcgcgtggtgcgtggcctaatggccgccatgggcaacacggaccacagcaacagccagcggctggccagcctcacgctggaggtgcgcgcggcggctggt

SEQ ID NO: 131488 - DNA, 122 bp, Homo sapiens
agggcgccctatgcctctctttttacatcctcagaggaagccgtggccccgccttagcaccgggaaaggtggaaacccagtttttcccaaaagcacaagacagcatttctggaaatgttgca

SEQ ID NO: 131489 - DNA, 122 bp, Homo sapiens
cccgcgtgctggccgcggtaaaagtggtagcagcggaggcgagcggagggtttcccgcggcgggtgaggcgctgggtatgctgggaaggtggggtcgctttggggttctgtgtgcagcgagc

SEQ ID NO: 131490 - DNA, 122 bp, Homo sapiens
aaggaagtgactgtgttggaccaggttgcagggttttgagtgagaggctagtgctggaatcgcattagggagctgccctgtgcacagcccagacccctctagggctgttggccgggcagggg

SEQ ID NO: 131491 - DNA, 122 bp, Homo sapiens
gtttggcaagaaagctaaagaactctgctccttccctgattttgtaggccatgaggaactcgtgctttctcggcttatttcctcctcgtctggcctctaatcccgcctctgccaccgccgag

SEQ ID NO: 131492 - DNA, 122 bp, Homo sapiens
cccgcccccggccctagctccgccccggccctagctccgccccggcccagcactgggccccgcctctctcgttggtttgcccgtctccctcgtcggtttgccggcttcccgcgtgcgccgct

SEQ ID NO: 131493 - DNA, 122 bp, Homo sapiens
cccgccctctccgtgggcctgggggcgtggcctgaggggcggggactcgggggcacaccccgagccgcagctcccaggtgcgtgttaaaagctggaggggggatatgtgatcccaggaccaa

SEQ ID NO: 131494 - DNA, 122 bp, Homo sapiens
aacaatcctcccgcctcagcctcccagagtgttgggattacaggtgtgagccactgctctcggccttcattgacagcttctaatcagaggcataacgtggtcagatttctatttgttggtag

SEQ ID NO: 131495 - DNA, 122 bp, Homo sapiens
ttccttcctgtcgccatctttgttttcttcccattgaaaaaccatcctgtctgatgtggacgttcaggtctgctggttggcggtccgggcccagagtgcagcagagctctgggttaaatatt

SEQ ID NO: 131496 - DNA, 122 bp, Homo sapiens
ggtaccacaccctggtgttccccgcttctctttctattttatgttcacccacttgtcttccgagaacagccatctgcttaggaggtgagctctaaaaggcctcaccaaaagatcttttgtca

SEQ ID NO: 131497 - DNA, 122 bp, Homo sapiens
ccggggcaaggggtgaagcgctaagcaaggctgatcactgtcctcaatcatcacccaacccgcgcacagaagccgtggccccacgctctcctatccccgccagctccagactcgccccgctg

SEQ ID NO: 131498 - DNA, 122 bp, Homo sapiens
gatgtggtagtgaaacagatggcaatctattctaccacaggggatgatacagtcatgcatcgcttaatgacatgagtactttctgtattgttaggcaatttcctcattgtgtgaacagcata

SEQ ID NO: 131499 - DNA, 122 bp, Homo sapiens
cttccacgaggaggtggagcagggcgtgaagttctccctggattaccaggtgaggccgggcgcccggcagcgctcccttctccctccactcccaggtctcacctggacactggctagcccct

SEQ ID NO: 131500 - DNA, 122 bp, Homo sapiens
ccgcatttatagttttgaggaatggagatccaaacaaaacagtccacaagtcatcttggacgctgaagtgtgcagaactgctagggcatctacccaatcacatgggggaattgcgggtacct

SEQ ID NO: 131501 - DNA, 122 bp, Homo sapiens
tgcaggtggggctccgggttctgcttcttgaaggcggcggcggggcgagaaatgcaaccgcgtgggccccgcctgctccccccggtcctgtctttcctcgacgctcgggaggcgtcccgcag

SEQ ID NO: 131502 - DNA, 122 bp, Homo sapiens
tgtgactccactgggacgtcctgagtcattggcagtctcgcttggcatccattctctgaccgccgccggctttccacccacctgcccggctcatcacctctgactcctgcgggccttccagc

SEQ ID NO: 131503 - DNA, 122 bp, Homo sapiens
aggacagtttcactcatttattcaccgagtcaatttttattaagcgccagccaacgaggacgcagcggtggaagagcagcagcaggaggctgcgaaggacgcaggcagtgatagtgcagggt

SEQ ID NO: 131504 - DNA, 122 bp, Homo sapiens
attagagacaggaaagtcaaatcttactaactggagagtttagatagtgagctgtgccagcgactctgtaaaagctgtcagaagtgagacaagaatgctaagcaatggagatcaaatgcaga

SEQ ID NO: 131505 - DNA, 122 bp, Homo sapiens
cgccccggtccccgcggatacctgttgctcttcggggccgtgggagctgccgggagcccacgctgaagaattccgcagcacgcccgccagctgctgcgcctcattcctcactgactttgagt

SEQ ID NO: 131506 - DNA, 122 bp, Homo sapiens
gcgtggttttgcgatggggtatgtgtaaaattcgtaggacattttctggaaagtatcaagcgttcattcagtgctactttgtttcatagtcgtatccctggagttacttagagttggtcgct

SEQ ID NO: 131507 - DNA, 122 bp, Homo sapiens
aaatgagttcaaaatgagatttttttaaatggactaattactccaaccaaatactgagatcggcccttacctctgatgacatttttaacacagcttgtaaaaatccccgctagaatgaccta

SEQ ID NO: 131508 - DNA, 122 bp, Homo sapiens
atctttgtacattagggatattagtcctccatcaattcatcatctccttctggtctagcacgtgtttttcacgtttatattgttgttttgtttcattttctatttggagtgggaagctgtat

SEQ ID NO: 131509 - DNA, 122 bp, Homo sapiens
caaagaaggtggcctggccaaagccgcatttctgctggggtcctgaagattaggggaggccgcccaccctgagccaggcattggcagtcactttaatttctaagctcacttctcagcaatgt

SEQ ID NO: 131510 - DNA, 122 bp, Homo sapiens
cctagatgttgcaaggctgcttagcagtgggaccctggtgccaggcagccccacactccccgccaagccctccccaagcccaggcagggcccaggaaccagccccacggtccagggacaaag

SEQ ID NO: 131511 - DNA, 122 bp, Homo sapiens
aagacgtgggccgtcaccgtcagccttcggtacttgaagagtggttatccctgctgtgttcgcttaatttatgacgaatcatacagggacatccagtttttcagtatcaaatactgctttgg

SEQ ID NO: 131512 - DNA, 122 bp, Homo sapiens
tgtaaaaacaaagcagtgatgataataagactaagttaacttgggatcagaaggtaccatcggcataagcaaagatacagagttaatgtgaccattgtacataatctgtattgttgagaatg

SEQ ID NO: 131513 - DNA, 122 bp, Homo sapiens
ccttttgacgggtgggaatctgggcttgactgtgtcgccgtccacagcaggttgctacagcgggttcagcaatggcacctggtccatcgttccccgctcaggatttttccccgagctgtttg

SEQ ID NO: 131514 - DNA, 122 bp, Homo sapiens
taacactcaccgtgaaggtctgcagcatcactcctgaaacctgtgaaacaacgaaccccccggggagaaacgaacaactccagactcgccgcctgaagagctgtaactctcacttcgaaggt

SEQ ID NO: 131515 - DNA, 122 bp, Homo sapiens
gcttccaggaattggagggatgccaccgttctgaatgacggagatctcgttggccttcatcgccagcccgttggagagcgctgctgcatactgattccagaagctggaaggatccccacttc

SEQ ID NO: 131516 - DNA, 122 bp, Homo sapiens
cagcactgatttaattatcagaacaactttatggccacgtgtgcgtgaaagcccaggaaacgacttcaaacaaaactgcattcggtaatttaaaactaataataattattataataatagat

SEQ ID NO: 131517 - DNA, 122 bp, Homo sapiens
ctttgcagtgaaagtatttatgcgctatcatcactacctccgtcagtatgcaagcgtcaccgttgctactacagctaatctacaagccccaccatctccacctccaccagtttctattaaac

SEQ ID NO: 131518 - DNA, 122 bp, Homo sapiens
accaatagccaaattcccaaaacccgtgaaggaccttagtcccctttataacaatgtttgcgtggaaaaataagagttccagtgtcaacacgcatctcattgccccattacctgaaactgtt

SEQ ID NO: 131519 - DNA, 122 bp, Homo sapiens
cctgctctgcagctgcacagcgttttccaaggtgtgttctctcggccactccaggggaggcgtgaccacccccaccccctaacgatacagatgaggaaacccaggcccgcagcagggaagtg

SEQ ID NO: 131520 - DNA, 122 bp, Homo sapiens
tctcacggagcaaagaacaggaggacgggggattgatctcccaagggaggtcccccgatccgagtcacagcaccaaatttcatgcgcgtccctgtgaaaagaccaccaaacaggctttgtgt

SEQ ID NO: 131521 - DNA, 122 bp, Homo sapiens
tgcggaggagccggcgcgggcgggccggggagggggcgctgcgggcagacggggcggggccgtgtcgggctccgcccccacctagggacctgggaacccggacacccagagactgggcagtt

SEQ ID NO: 131522 - DNA, 122 bp, Homo sapiens
tattagtgttattaatattattgatgagttacctactttaaggatcacgggcgctttcaacgacaagccccctacattatcccagcaacttttgacattcttccggccgatgccctccgcgg

SEQ ID NO: 131523 - DNA, 122 bp, Homo sapiens
ggcaaatcataaatcctacccagtcggcagcatccagatgagccacaactcctttctcagcgcaaccaggccatgggagtgctccatcccctgcctcgcagttactgattctccaagccggg

SEQ ID NO: 131524 - DNA, 122 bp, Homo sapiens
accccatctcgctgccaccagaaagggtgtgggtacactggctgtggtgctgggcactttcggcgccagctggctgcccttcgccatctattgcgtggtgggcagccatgaggacccggcgg

SEQ ID NO: 131525 - DNA, 122 bp, Homo sapiens
tgaacccctggtttctgccggtgtcgggtctatcggggctcctctgggctcaggggttgccgccgtccgcccgccagctgaccgggagcccagggccgctccatcgcctgggtgggtctctg

SEQ ID NO: 131526 - DNA, 122 bp, Homo sapiens
aactttgccaaactcacttgttgagcaagaagctcagaaatggagatttctaggaccctccgcatctggctgcaaatcccagacacaaaccatccaaggagatcgcacctttgccttccact

SEQ ID NO: 131527 - DNA, 122 bp, Homo sapiens
agtgacccacctgccctttcctttctgggttcagtggaagggagggccaacagtgtagtgcgtacttaacaagtcagtatttcacattgaactcatcacatgtgtccatggagggcaagcaa

SEQ ID NO: 131528 - DNA, 122 bp, Homo sapiens
ctctggggaggatcttggagagagcaagcagctgagcatgagcctctggttggggggcaacgcagtgggaaagagggggcgggacccccgggcccccagacactcaaccagagccaaccttg

SEQ ID NO: 131529 - DNA, 122 bp, Homo sapiens
acagttgctctggcaacaagacacactgggaggaagaggggaataagctttactggggaccgcgtagctaaccagaggtatccggctctctctggtccttctgagtcctggaagatttaacg

SEQ ID NO: 131530 - DNA, 122 bp, Homo sapiens
gagtgcgagcgcgcgccaggcccacccgggcgctgctcttcatgtccccgcggtcgaagacggccacatacgtccccaagaagacgtcaccgaggatccagaagggccctgcaggcggaggg

SEQ ID NO: 131531 - DNA, 122 bp, Homo sapiens
caacaggatctacactagctagtttaaacaaacagaataaaatggctcacaagtcacaggcgtggaggtcaggactacggagcccccaaaaatgcccatttttataccttggagcagctgcg

SEQ ID NO: 131532 - DNA, 122 bp, Homo sapiens
agctattcaatatggccgaggcgctgggaggccccagcccgggcctccagtagggtcccccgcccccaggcaggccgccacccagctccaggctgaccttgacgcgccgcagcctgccagcc

SEQ ID NO: 131533 - DNA, 122 bp, Homo sapiens
gcaaagagcacttccggggatgaagcaacaggaagtggcttacgaaatccacctccaggccgagtgaccagtttacaggaagtgtggtgggtgaatcttccccagggcacgaggcaatgtct

SEQ ID NO: 131534 - DNA, 122 bp, Homo sapiens
cccctcccattcacgcagcggacgtgacacgtgcggcggggtcacgtgttgttgttgggccgggaaagctgcttccgggtcaatgcaggacactgggctccggcggccagagtgggggacta

SEQ ID NO: 131535 - DNA, 122 bp, Homo sapiens
acgaactcactgagaggaatgaacaactgtggacgcgcggccttgagagctgtaacaccgcgaaggtctgcagcttcactcgtgaaaccaacaagaccacgaacccagcagaaggaaaaact

SEQ ID NO: 131536 - DNA, 122 bp, Homo sapiens
ctacattttatactttttacttttagttttctccaatttgcctgtcatccttctctgtatcgttccaattttactatatgtgctgccaaagcaagcactacttttagcttcccaactagtga

SEQ ID NO: 131537 - DNA, 122 bp, Homo sapiens
acaaagagggttgagccactacgagcgggagttaccttggactaacagttgtatcttcagcgagcacaagtcctggaatctcccacgcccatccctttttttagcgccacaaatgcagcctc

SEQ ID NO: 131538 - DNA, 122 bp, Homo sapiens
cgcaccggactgcgccgagcacgccccgccccaccgtctcagtccgcccgccccctgccccggaccacgccccaagctcggctccaataggctctctactgaccttccctgatcgcggggca

SEQ ID NO: 131539 - DNA, 122 bp, Homo sapiens
ggcgaggcttttgaacctgtcgccaagccagtacctcagagagaaggaaatgcagagggacgagaaggatgcatggcgcctgcccccagttagatgttcttcagataatctgcaaccaagtg

SEQ ID NO: 131540 - DNA, 122 bp, Homo sapiens
caggtgagggaggtcacttggggtgtggcccagcaggcaggcgggactccagactgggaacggaagtcagccctgctggggctgggagctgaagcatctgttccttcctcgcgggtgtgaga

SEQ ID NO: 131541 - DNA, 122 bp, Homo sapiens
gcagcgaacacgtttctatcgcgtgagctacctcttccggggttcctgggtgacaagttccggatcaagaatcacaaagcgagcagtcattcttcctcttgccacacccacagggcccgcac

SEQ ID NO: 131542 - DNA, 122 bp, Homo sapiens
tacaagagccccttgtgatcacaggaacagcccgacgtggccctaatttgctctcacagacggacatctgaacactgtttcaggctggtttgtaacaacgaggcaattagttgtgataatca

SEQ ID NO: 131543 - DNA, 122 bp, Homo sapiens
taacccatttaatcctcacaacagcactatgagatcagtacattgtctccattttacagacgaaaaagctaaaggctagagaggttctctaccctgctcaaaaataaggttacaagctagta

SEQ ID NO: 131544 - DNA, 122 bp, Homo sapiens
caagttgtgcacgcgtttgtcctataaaagcgaagtgagtggattcccattttggaatcccggtgtctccaacctcgagttggagaaccatgttgagtcagttccccggaaccttacaaatg

SEQ ID NO: 131545 - DNA, 122 bp, Homo sapiens
tttgcaaatttaaattaaagtacttagagcttaacatagccagtgtttgagctcagcactcgatgacaggtagtgggaataaggtaatctcaaagcacattcaaatatttaagtttaggaga

SEQ ID NO: 131546 - DNA, 122 bp, Homo sapiens
gtagcggagattgaatcgcatgttgacgtctattacgatgattaatgttcttgtcattcccgtcactagcaggtgagaggctgggaggcctcaggtgggaacatacctttggccaaaggcac

SEQ ID NO: 131547 - DNA, 122 bp, Homo sapiens
tcaggtttcccttggggttgtgagtacacgaccagtgagtacagctttcacacacccctgcgatttcttccctgctctcgaggctcttatttaaaggagtgatttggggcatcttgtatgca

SEQ ID NO: 131548 - DNA, 122 bp, Homo sapiens
aggaccctgtcctccccaggtcacagaattaataaaagcttctaccggcatgcagagccgcgatgaaaggttgcagaacaaagtcattaaagtgatgatatttacactgagccatgcaaagc

SEQ ID NO: 131549 - DNA, 122 bp, Homo sapiens
cacgtgcgcgcggtacctggagaaggtcctgctgggacgcctttccttcctgcggcgccccgagcttgcccggccgctccctcccgcggcagcgcctttcccacggttctaggggagctggg

SEQ ID NO: 131550 - DNA, 122 bp, Homo sapiens
cggggtccgaccgagccgccccgccccgcccgggccacgtgacttcacctgcttgccccgcggccccacgaaaagttggcccgcggcgacttcctgcagggaccccaacccaggctgcgtct

SEQ ID NO: 131551 - DNA, 122 bp, Homo sapiens
tttaatagaatccagagaatccatatcctccatagtatgatgggcggtagcagccatatccgtagcctccgaagccagagccatatccatagcctccaaagccagagccatatccgtagcct

SEQ ID NO: 131552 - DNA, 122 bp, Homo sapiens
aacattagaatcccaggagcccttcccacctggagagcttatgactactgatttgttaaacgtagggattggggggtggggtgatgtcttagttaaaggttctaaatatctacatattggca

SEQ ID NO: 131553 - DNA, 122 bp, Homo sapiens
cctcccccagaaagccttccaagcctgcaaggactcttgctgacccacctcctctggattcgaggacccttacttactgctgctcaccatgtgccaccaccacgcatgcatctggtctctcc

SEQ ID NO: 131554 - DNA, 122 bp, Homo sapiens
gaccatttttagcccctgtaaaccaggtcgccgccatttttgtgcgtgtgttccgtaatacggaagccgcgaggagcctttaggccctttctttctttttttttttttttttttttttgaga

SEQ ID NO: 131555 - DNA, 122 bp, Homo sapiens
gggcaaatgagtgagccccagccagaagcaagcgcccccgctgcccctgggcagtgggctcggtaccgccacgcacccgtcctatgtgttacctggtcgctgctcactggagtgaaagccat

SEQ ID NO: 131556 - DNA, 122 bp, Homo sapiens
gagtgggcagaactcacaaactggagagcatgcccctgtctaatgcctttcaaaccacatcgccttacggcccagcaacttagcacctagaaatcgacccaggaaaattgaaaacacttgtg

SEQ ID NO: 131557 - DNA, 122 bp, Homo sapiens
gcgggctggaggagttcggggggaagggggggtctcagaatcgtcacgaagagtcatgcccggtaacccgcccaaggcagtctcaccactcaccgcgccgccctcagcgacctggacatgaa

SEQ ID NO: 131558 - DNA, 122 bp, Homo sapiens
tgcccgcggcagcatactctaggcttatctccgtgtgtgtggccctgaacccagaacacccggaaatacaagtgcaagtgcaaggagcccatgaacagaaagaagaagaaggggacggggaa

SEQ ID NO: 131559 - DNA, 122 bp, Homo sapiens
ggcccgccaaaccagcagcctcaccccgcggtttactccgctgcccaccccactctgctccgggggctggcaggcttttggccccacgccaagcccagctcctatctgcaacaagatttatg

SEQ ID NO: 131560 - DNA, 122 bp, Homo sapiens
aattatgtggttacttatgagtctctttctggacttaactgctcctagcaaattacagtccgcttttaatctaatttgtgaagctcctgtaaatgtaagggtctatctacccaggtgacatc

SEQ ID NO: 131561 - DNA, 122 bp, Homo sapiens
aaacgttatccattcagcgacgctggcctgggaactgtccaatcaggcacgcagctggagcggaaagggcggcttccgggatgtggcggggtctttgtctctcgctgcagtcggagtatggt

SEQ ID NO: 131562 - DNA, 122 bp, Homo sapiens
cgcggtagatggagccggccaggccggacacccgctccgacatcacggccccggagccgccgggctcctcctgatacaccacaccgtcctccagctccatggtggcaagcggacgggcgggc

SEQ ID NO: 131563 - DNA, 122 bp, Homo sapiens
atgtttaggtggtggccaattttttgtcctttaacaaataggcatctccaagtgcccttgcgcaagggtttcctcagggtaaataaccatgaagtgaaaacagaaatagctacgctgagaaa

SEQ ID NO: 131564 - DNA, 122 bp, Homo sapiens
tgttggtcaggctggtctcaaactcctgacctcaggtgatctgcctgtcttggcctccggcgtaacactttttaagaccagtgtaacagaaagagaatgtagccattctagccaccgttaaa

SEQ ID NO: 131565 - DNA, 122 bp, Homo sapiens
ttttacaagaatgatggcccggtgtttggcgagctgaggagtggatcctccccctgccagcgatattagggacgatgaggagcacgtggcaataagacggcaagggtttggtcccctcacac

SEQ ID NO: 131566 - DNA, 122 bp, Homo sapiens
ggcaggactctcacgacagtcactctcggcccgccatgctctgtcgctgccactgcggggcgcacgagactttcccctgggcacagaggtgctttatattttaaaagttggtcaggtgtcac

SEQ ID NO: 131567 - DNA, 122 bp, Homo sapiens
gccagcagcctccctggtctctctgaccctccccctgagttcgttcaccaaaggcagtaacggagacaccccctcaacacacacaggaagcagatggccttgacaccagcagggtgacatcc

SEQ ID NO: 131568 - DNA, 122 bp, Homo sapiens
catgtgcacacacagactcccaccttgacagagccacctgtcacagcccaagcagggcctcggtagaacctggaggcagagggggaccattttgccccagaaacccagcaggaactccctac

SEQ ID NO: 131569 - DNA, 122 bp, Homo sapiens
cttggtaacttttattacaaggtaaaacaaaactgatgaaagtggctgacataccggggacgtgagcagaacggcttggccacttccttaacatggccccgggttcacccgctagtccggaa

SEQ ID NO: 131570 - DNA, 122 bp, Homo sapiens
tgcgctaggctgggcgaggtgtttcaatagaggacggagaacgggggcggggaggggaggcgggggcaggaagcgatacaccaaatctcgagactgtaactctgtagcttatgctttgacga

SEQ ID NO: 131571 - DNA, 122 bp, Homo sapiens
tcccgcccaggagcgcggactcgggagcctagacccgacccgatgtccgcggattcccgccgcccacgcagaggcccgctgcagcgaccaacaggactcacgtgttttgtcggaaaagaaga

SEQ ID NO: 131572 - DNA, 122 bp, Homo sapiens
cagctcggcaccgcaggtcctgaggaccccccattcaccccttggtgagatttttggcagcgactgccgccggatgcccctgtagagtcagcactgctccctggggtgggaactcccgaagc

SEQ ID NO: 131573 - DNA, 122 bp, Homo sapiens
gacactgatttgttgttactaatgctttaaacaattataatgagtcatctttttgtttgccgtagttccagagtttacaataatgtatatccaaaatgtggcccagtggaatgcttctctga

SEQ ID NO: 131574 - DNA, 122 bp, Homo sapiens
ttttaccctcaaaatgtttcttgggtgttttttgtttttttagacagggtcttgctctgtcgcacaggctagagtacagtggtgcaatcatggctcactgaagcctcaaactcctgggttca

SEQ ID NO: 131575 - DNA, 122 bp, Homo sapiens
ccgcgccaggccgcccgcacacccagagctcgcccacggttggcagcgcccaaggttgcacggcatggcccgcttaagtgccactcagccctaatgtttttatttatgaagtaacttaactt

SEQ ID NO: 131576 - DNA, 122 bp, Homo sapiens
cggcgccttcaaaatgtacccctccagccccgcggcctaccctgatctcccgactactgccgtgctacctggatgtctaataggcaccttgaacctgatacatcagatggtaaatctcgatc

SEQ ID NO: 131577 - DNA, 122 bp, Homo sapiens
atcctgatcctaggatttcaaaggccctagattaagacagctactaaaagaagtgataagcgagtccatcagagtaggtgagaccacctagggaagattgcacatcacaaggagagaagagc

SEQ ID NO: 131578 - DNA, 122 bp, Homo sapiens
ttaaagtcggagcggaaaataaagcacgcacgcaacccaatttccggagaaccgagattgcgacgaacaaccaggaagcggctgggttgagagctgtccccggttctccgttctgctctcgg

SEQ ID NO: 131579 - DNA, 122 bp, Homo sapiens
tagggttgctttttaagacctcagcagctattctcatccctcctttggaacacaactgtccgtaagatgccactgggggtggagccaaaatggcccactagaaacagcagcaattggtggct

SEQ ID NO: 131580 - DNA, 122 bp, Homo sapiens
gcgcagacacccagacaccggcggcctcctcccaccaggctggcagtcgctgagccctggcgcctccttaaagccgcagctccgccccgaccgccccgcccgccagtccgtcctcagaccct

SEQ ID NO: 131581 - DNA, 122 bp, Homo sapiens
agctacgggtctcgcacggctgcgtcagcaagatcctggcgcgatacaacgagacgggctcgatcttgccaggagccatcgggggcagcaagccccgggtcactacccccaccgtggtgaaa

SEQ ID NO: 131582 - DNA, 122 bp, Homo sapiens
ccgggcatggccttcacactccccacgaggcaggacagccccgggctagggtgaggggcacgcgccgcaagtcctgcctctgctcccgggcggccccctccagcctccgccggccccgcccc

SEQ ID NO: 131583 - DNA, 122 bp, Homo sapiens
ccgacgtggcgttgttgcctaattaggttggactgtgccagccccagcggagcccacgcccggcccttgcgccggcagacgtgtcggggcacggctcctgcactcccactgccgcaggaact

SEQ ID NO: 131584 - DNA, 122 bp, Homo sapiens
ttaggtctccacatgcactgatcagtttctcccctctgttaaataaatcctcccagctaacgcttattgggtgcttttccacactaggcactgcactaaacatttgacgtgtttatctcatt

SEQ ID NO: 131585 - DNA, 122 bp, Homo sapiens
acccagagttcacgggtccaatcacccagcaggccctctgggatgtggaagggctggccgcgccttcggcaaaccctctgttcccatggccccaccggaaagggctgagtgcttgcctgctg

SEQ ID NO: 131586 - DNA, 122 bp, Homo sapiens
agtgtggactggagccgagatggaggcctcatttgtacctcctgccgtgacaagcgcgtgcgcatcatcgagccccgcaaaggcactgtcgtagctgtgagtcgccatctaccctgaccttt

SEQ ID NO: 131587 - DNA, 122 bp, Homo sapiens
actgccctttcacagatgagtctgagactcaaaaactgtcactagcgtaaggttgtccagcgagtttagtggctgggaggctgaggggtagacagggcggctagcgatgtggggcaggcctg

SEQ ID NO: 131588 - DNA, 122 bp, Homo sapiens
cgtcgcatgccacacaccacacatgcacacacacacttgcgggccctgcaaacacgcgtgcgcagatgccagcacacacggccctacgcgcagcacacacagtcacacacacgccctcggcg

SEQ ID NO: 131589 - DNA, 122 bp, Homo sapiens
catgtcctggagggatccatcatggcaaccgtagctgctacctgccctgctcaagacttacgatattagacctctttacttaccatccttcatggttgccaaaatgcaaaagcttatccaaa

SEQ ID NO: 131590 - DNA, 122 bp, Homo sapiens
aatgtaaacattgaatggcagacgactcccttccccttgaaatcttcacaaaagtgtgtacgagaaagtatgtacatcagcacttcagaaaaggggcccacaggacgtgtgcggggtgtgca

SEQ ID NO: 131591 - DNA, 122 bp, Homo sapiens
gctctgcagtgcttagtgacaccaccatcaatgaccgtcaggtatcaggtctgttctgaacgttagtctcgatgataaatgttggggaggaagggggacagggtagggggcaggagtttttc

SEQ ID NO: 131592 - DNA, 122 bp, Homo sapiens
agtgaaaatctcggattccaagtcagaaatcaaagaatgcagttccaacttctcatgcctcgtcttttctgaaaagtgatcccattttctgtcatctctggatacttcctaatgaactccag

SEQ ID NO: 131593 - DNA, 122 bp, Homo sapiens
tgtctccacctggaattaactgttgcccacctgaaattaactgttgccctccctatgctccggtggctattgcagtacaggcttgctctgtgaagggctttcactgtgaagagtgtttaact

SEQ ID NO: 131594 - DNA, 122 bp, Homo sapiens
tttagaaagtttattttgccaaggttaaaaatgcgcctgtgacacagcctcaagacgtcccgaggctgaggctgaagaatcacttgggctcaacagtttgaggctgcagtgagctatgattg

SEQ ID NO: 131595 - DNA, 122 bp, Homo sapiens
atacctctgtccatcaagggcccgcctccgcaattgagccaaccagggctggcgggagggcgcttccttctggagctgggtcctgactagggaccgcctgggtgaggtgaggacctggtggc

SEQ ID NO: 131596 - DNA, 122 bp, Homo sapiens
agtgggtcaaagggtatgaacagttttgaggttctttatacatagtgccaaactgccttccggaagattgagtcaatttgtcctcctactagctatgtttctcctccttctgtaatactgag

SEQ ID NO: 131597 - DNA, 122 bp, Homo sapiens
gggctgcgttgctggtcacattcctggcaggtatgggggcggggcttgctcggttccccccgctcctccccctctcatcctcacctcaacctcctggccccattcaggcagaccctgggccc

SEQ ID NO: 131598 - DNA, 122 bp, Homo sapiens
gagtcaggtaccaagggttgcctgtttagactaacacactgcctcttcaccacattcctgcgagataaataccatcatccttattattaccatcccattttacagaggaggaaactaggcac

SEQ ID NO: 131599 - DNA, 122 bp, Homo sapiens
gttgcgggccgcggggcgggtcggtggggaggagggtgcgggggaagggggaatcgaaggcgccattggaaacgttgtaaaatgcttggagcgccctctgctggaatatattggtaaaacag

SEQ ID NO: 131600 - DNA, 122 bp, Homo sapiens
agattagagagaggctgagagatcctaagcttggataccgtagggctctcccaccttgtccgcaccccggataccccaagaaagacgacgacctgtccggcccccaagtcccaaaagctgga

SEQ ID NO: 131601 - DNA, 122 bp, Homo sapiens
gcgcaggggctgtgggcccccggcaggggtcctgtcggaagctggccgcgcttctgtttgcgttcccaggaccctggcattgtctctagttgctgcttgtgctctctctttgcttttggttt

SEQ ID NO: 131602 - DNA, 122 bp, Homo sapiens
cggcactgaactcgcggcaatttgtcccgcctctttcgcttcacggcagccaatcgcttccgccagagaaagaaaggcgccgaaatgaaacccgcctccgttcgccttcggaactgtcgtca

SEQ ID NO: 131603 - DNA, 122 bp, Homo sapiens
tgccgagctcgcagaggccgccccggaggtgagttctgtgcgctcaccccaccccggggccggctaaggaactgcagcctctttggaaacgtaattgaactatatcagctgcagtggctgga

SEQ ID NO: 131604 - DNA, 122 bp, Homo sapiens
ctgcggggcgcgcgcccgcctccgcgtccccttaggattcccgcccaccgcgcgggcgcgcgtcccgctctcgggggcagccgccgggcctgcatttcttgcagccctcaaggcccctcggt

SEQ ID NO: 131605 - DNA, 122 bp, Homo sapiens
gctgtaagacgctgcacaattagattagaggagagggctaggggtggccgcgaaccccctcgcaaatctgttgacttcaccgcagggctgatgcgcgcagcatagaggacgcttgggagcgc

SEQ ID NO: 131606 - DNA, 122 bp, Homo sapiens
cttgatagctcatataatttttctgcccccctacacttagccaaccttacctggaaaacacgcaaccacgtaaaactctgaatttgatttctactgccattccaccaaaacagatgaatttt

SEQ ID NO: 131607 - DNA, 122 bp, Homo sapiens
aaaactgaggcacgggggatggtgcggaccgccgtggcccctccatcatcagtgacagagcgctccgcgcggggccgcggaggtcccttaatctgcaaaggcccccacgcggcgcgctgacg

SEQ ID NO: 131608 - DNA, 122 bp, Homo sapiens
gccaagtttctttcttagggtccgctattaagcggtagtggggtccagcatggttgtgagcgggtaagggtgatcgtagtcatggcttaaaaggtccagtcttgcggttcatgctgtcttca

SEQ ID NO: 131609 - DNA, 122 bp, Homo sapiens
cgcacggcctgcgctcccagcatgcacgagttggatggatgagggtggctgctcccaggccgcgcccgccttcgccgaaggtgctgggcttggctctggggcccccgcgctctcgggcagct

SEQ ID NO: 131610 - DNA, 122 bp, Homo sapiens
gcaccaaattcctgagccacctgctccgagctcgatttccctttcaagctgtgtgttctgcgggggcagggagagctgcaagggctcatctttcaggacgtgctgcaaaggccctttgaagt

SEQ ID NO: 131611 - DNA, 122 bp, Homo sapiens
agctacaagtaacctgcagaataaaaggttaactgctatgaattattaagtagccacttacgtgaaatgtgaacattctctctataaagacaattcctcataaaattgtctgtctgttatcc

SEQ ID NO: 131612 - DNA, 122 bp, Homo sapiens
gaccccaaccgggaaacccagatgccttgcacatgaggaagtgacaatgggagccgaccccgggtaggggagagaggctggagcctctccatggattggagttgttccctttactggtttat

SEQ ID NO: 131613 - DNA, 122 bp, Homo sapiens
ctccccggcacccaccgggctcattcccccaaaacactccttgagcagaatgagtgaagccgtgaacctcaccctcgcaggcaccctgggccctccggagctgcgcccttccccgggagccc

SEQ ID NO: 131614 - DNA, 122 bp, Homo sapiens
tcctcctgcctcagcctcccaaagtgttgggattacagtcctaagccaccgcgccaggcccggatacccttttagaagggttggctttccctcaggcctcggctatctgcgctcccctctta

SEQ ID NO: 131615 - DNA, 122 bp, Homo sapiens
gggatgctgagggggtgtgtccccacatgattggctcaggcagctcagccaatcctagctcgttaaacgggaagcacttaaccaatgaggggcgaaggcagcaacgaggaattggaggggcg

SEQ ID NO: 131616 - DNA, 122 bp, Homo sapiens
aagggtagctggatggtaattctctggacccttcctcgaaattaaacagagatcactttccgcccctcacccttactgtgttgctgtagttgacattaatagactgcctgtatggtgaccac

SEQ ID NO: 131617 - DNA, 122 bp, Homo sapiens
ggaggagatcgaagaggaggtccggcagaagaaatcatcacggaagcgcaagcgagacagcgacgccggctcctccaccccgaccaccagcacccgcagccgcgacaaggacgacgagagca

SEQ ID NO: 131618 - DNA, 122 bp, Homo sapiens
gagcagatcctggtccagctgctggcgggtgccgctggcaaacacggcctgggcaggcagcggggccagctggtgctgccggcggtagtgctcctggcgccggtacacgatggcctcgaata

SEQ ID NO: 131619 - DNA, 122 bp, Homo sapiens
ctgcagttcccccgtctagataaatcggctctgtctaggcagcgggcaaggtgaacccaccggacggttacagtgggggagtaacttggtgtgacggtaacaatgatgaagatggtgatgat

SEQ ID NO: 131620 - DNA, 122 bp, Homo sapiens
aagagcatgacgagttcttccaggcttgggaaagcacgggtaaatgcccgcggtcctgcgcgccagcggggagcagtagagacttccggcgtcggctgctcgcagggctagagcgtcgaacc

SEQ ID NO: 131621 - DNA, 122 bp, Homo sapiens
acttctccatccgaacacttgggatggatgtgaaggtggagcccggaaagggaggggcgccgcccaccaagtcctggttctggcaggcaccctggcccttgcgggtcctcggtactacacgc

SEQ ID NO: 131622 - DNA, 122 bp, Homo sapiens
aacaccatttgttccgtggaacgtgctttatttccacaccacacgcagagcttattaccccgccagcagctcagggagcaagacggctgggacctggggaggcggagggacgacgcggccca

SEQ ID NO: 131623 - DNA, 122 bp, Homo sapiens
tgcaatggcattcctgtctcccgtcccaggaccccagaagattatgactaccagaaaacacgccagtctttgccctgatctggccagaggcccagagggtacataggcggtgacagagtgag

SEQ ID NO: 131624 - DNA, 122 bp, Homo sapiens
tctgagattacaatctacttgaatcacagcaggtacaaaatcagggactgaaacagttatcggtttcagcgtagcaaaaaggacaacaggttcgtggattttagatcaaaagctttttaact

SEQ ID NO: 131625 - DNA, 122 bp, Homo sapiens
attctcaggcccagcccagacctgacagatcagactctctggcgggggtggggggacagccgccccgtctccacagctctcccaggattcggatgcagctggagtttggggaccactctgtg

SEQ ID NO: 131626 - DNA, 122 bp, Homo sapiens
tgataaaagaccattagattttaaactgtacagccttccaaagaatctaggctcacgctccgcacacctcttggaggaatctattacacactggctcatggctggctcctttgaatggcatt

SEQ ID NO: 131627 - DNA, 122 bp, Homo sapiens
gcacacgcgggtggctgtggttgaactgactctcgggtttccgctcctggctgttcaagccgattaattgcagtggcctctacagttacctagtggctgctcccggatacggacgcacgcga

SEQ ID NO: 131628 - DNA, 122 bp, Homo sapiens
accgagggatcgataactaatttcaccgcggcagccgccccagttttttcccgataattgcgcgccggcagctgcgagcaaggcccccagcccggcgcgcagccccgcccgcgcgcgatcaa

SEQ ID NO: 131629 - DNA, 122 bp, Homo sapiens
ggtgatggggcagcaggggtgactccaaagacggggctgacgcagggggctggcagacagcggggcgtgctgggaggcacttcgagagagtgttgcccaggagagtggtgctgggctccgat

SEQ ID NO: 131630 - DNA, 122 bp, Homo sapiens
gacccgggctgcttcctgggagaggattacattttctccctgctccacttgactttcttccggaaggagcaggtctcgcaggatcggggccaagactggaagagttcaggtttgggagtcgt

SEQ ID NO: 131631 - DNA, 122 bp, Homo sapiens
aggaagcctcccgccaaacagatgagggaggaggaggaggggagaggccagagagagaagcggctttcgggaaggaaagtgtgatctagtaggtggaatagtcctctccaaactttgacctg

SEQ ID NO: 131632 - DNA, 122 bp, Homo sapiens
aaaaccacccagctaaactccccaggccccagaaactctaggataataactggtttagttcggtttggtttggcatttttcaagtatgtatgatcccctccttcctaaatatggtcacatgg

SEQ ID NO: 131633 - DNA, 122 bp, Homo sapiens
ttcttttccaggctgaaaagtcttccactaagaaggcagtaattgaatgctgccctggctcgtcctagaatcatttctcctccatgatggaagcccagtgattgttcagttaacgcattgta

SEQ ID NO: 131634 - DNA, 122 bp, Homo sapiens
tgacagtggctgtgggggaggggaaaaagccaccttccctgagcaccacctggatccccacgcagtgctgcgtgcttcatgcccagacctcatttatgcaaggatggggcttggcagcccct

SEQ ID NO: 131635 - DNA, 122 bp, Homo sapiens
tgcagccacccctaagaatgaggaaatgggagcggggtggggggctgggttctgtgttggcggttgccgtggctttgctccgagttctggagccaaaccgcccactccctgagacggctagg

SEQ ID NO: 131636 - DNA, 122 bp, Homo sapiens
ccgcgcctcggggtgcctggctcagcctcaggcatgagacctgtaccagcccccgggagccgtgcggggccaacaatgaggagcagaatgcaaggggcggcctcgctcccctggccaccgcg

SEQ ID NO: 131637 - DNA, 122 bp, Homo sapiens
gagaaccgttcccagaagactgcatcccggtggcggagccgagggttgaggctgcgagtgcgcgtgctcgcgtgcgcggagactctctttcccgtaggcagatgggagcagagcgcggctgg

SEQ ID NO: 131638 - DNA, 122 bp, Homo sapiens
cctccccgccgggcagggctcgggacctgcagccctccatgcctgagcctccacccccgccgtgcgctcctgtgcagcccaagcctccccgacgagcgccaacccctgttccacggcgccca

SEQ ID NO: 131639 - DNA, 122 bp, Homo sapiens
ttgctaggagcttctagccaggcccaccttttcagatatgccagtgagcagccccagcttcgttctccaagataaagaccctagttacctccattgctcagcctcccttgcagctaagtgta

SEQ ID NO: 131640 - DNA, 122 bp, Homo sapiens
tttcaacaaatgttgatgcttaagaataatcaaagccttgtcctccacctttgtttgtgacgtcgtgcaatactgtgaaaaagaatcggcgttgtaaatagcctgtaaggacctgctgaaga

SEQ ID NO: 131641 - DNA, 122 bp, Homo sapiens
acaaaaaaaacgatgacaatctgtcctatgagtttggacataaatgcaggtgtgcacacacgttaaggacgctgagaatggagtgagggaaaggaaaaagctaccttttctaccagccctgg

SEQ ID NO: 131642 - DNA, 122 bp, Homo sapiens
ggaaagaggagttactcatctttcgggtgggtacacgtcctgaagagccagcgccccctgcgccctctcccgcccgggtcagccccactcacgggactctgcaggatcatggtgacgcgctt

SEQ ID NO: 131643 - DNA, 122 bp, Homo sapiens
gactgacgctgcaaaagtcctcttgtgaaacaaggaataggctcgagtcttcgattgggtcgagggagacgtcaatcaatggatgggcgtgtgcaaacgcaacacaacgcacagtattggtt

SEQ ID NO: 131644 - DNA, 122 bp, Homo sapiens
gaatggttgaatacagggcgtgtgctttcttctcaaccctcttgcagtccgtctgctaaccgtcaatgttcactgtctcctagggggacttcctggaggaggccaactttggagaacaggca

SEQ ID NO: 131645 - DNA, 122 bp, Homo sapiens
tgcaggtccaaaatcctttatccaaaactctttattgagagggagtttctctctgtcgcccgggctggagtgcggtggagcaatctcggctcactgcaacctccacctcccaggttcaagcg

SEQ ID NO: 131646 - DNA, 122 bp, Homo sapiens
gtggggtctggggccagagatgtgtgtgcctccccggcccccgaagatcatacgcagtagcgtctccgagggatgccactagcagtgacaggcagagattgtcgcggagaatgtggctgatg

SEQ ID NO: 131647 - DNA, 122 bp, Homo sapiens
acatatctcttctgttgcatcatagttaactgcatccaaagaagggactgttacctgttacgctctggaggagcagatgtggttccggcctctcagctgaaacaaaagtaaaccagctaatg

SEQ ID NO: 131648 - DNA, 122 bp, Homo sapiens
agttaactaacttaaaagtactgtaaaagagctacacagcaaattaaattcgctgtgcagcgcaaaggcaccctacacactgcgtgaacgcttcggctcctggagcgccggcgactgcgaag

SEQ ID NO: 131649 - DNA, 122 bp, Homo sapiens
tgtccctccccaaggccaggatggagagttgttggttgaccactgcactcctgtgatcaccgcacccctgcactctcctcctcggctttctcagcccctggcctccagaaccgcctatgccc

SEQ ID NO: 131650 - DNA, 122 bp, Homo sapiens
ataagaagggcagagacatgtgggtgtactgcgccccctgtctcccacccacccccgccccgcagccctctctggcttgtgaaatggaaaaataaatctgaggcaacaacacatcccctggc

SEQ ID NO: 131651 - DNA, 122 bp, Homo sapiens
gagaggaggatccgggaagccggctgcggcgggaggagggaatgcgcgtgcgcgctggaccgcctcgtcccgttccgtcccaatcattgtaaacaggcagaggctgggcggggtgggaatgg

SEQ ID NO: 131652 - DNA, 122 bp, Homo sapiens
aaattaaacaatggctgatgaaatggactcaggttgcccacctgcctgcctgcatgatttcgtccctgggtgatttgtcacttcgtgcttgctctgtggctggttccactcagctggttcca

SEQ ID NO: 131653 - DNA, 122 bp, Homo sapiens
aggtcccccgtaatgtccagggttaattgtgccagcctgaacccctgagccccgcatgcccgcctagggattggcctcagcctggggtgagctgaccccaaagacaccctgcccaacgcagc

SEQ ID NO: 131654 - DNA, 122 bp, Homo sapiens
acttgaacatagtttgattgtaataacattaaatatagcatcttaaacatacagtttgagcgtgccaacctgatgggtgtggaatgtaatattcattataactttgattttcatttccctac

SEQ ID NO: 131655 - DNA, 122 bp, Homo sapiens
gtcagccccggctggccgcagcctcccaaaggaaactccgcggtttccaatctctccctccgggttaccaagcaagcgatcccgctagacacaagtgcgcatgcgcacctcagatggcaagg

SEQ ID NO: 131656 - DNA, 122 bp, Homo sapiens
accagcaaggaggtgagtggtggcggcgggccggcggcaggcgggtaggcggtggcccagcgggcaggcggggcgggccggggaggccgagaccaccgggacctcgggctcccacccggctc

SEQ ID NO: 131657 - DNA, 122 bp, Homo sapiens
tgggaggcatagaatggaactgctgtgtgaccagaaacagcctcaggcctgtggagagggcggcagtggacgcttgctaagtgtggattgatttggagctggagatcctggaatccaggagc

SEQ ID NO: 131658 - DNA, 122 bp, Homo sapiens
tgcacggctccggagaacctgaaccagagaaacgccattcgggcttcgtggggcgggctgcgcgaggcccgggggctcagggtacagacgctattcttgctgggagagccgaacgcacagca

SEQ ID NO: 131659 - DNA, 122 bp, Homo sapiens
ctgaaaaggcgtattattaaccccctgccattacgtggaaacgacctacaagagggcaagcgcgcatcttgcacttcaccgtggttgtaagaagggaaagcacagggatgtgcacttacggc

SEQ ID NO: 131660 - DNA, 122 bp, Homo sapiens
cccctcccccccaccttcccatcccctcgcgggcctggctctgcgcctgcgcgagcggctcgggttccccgtccgtagcgactcggccacgccaatagctgttctgtttatttccttccacc

SEQ ID NO: 131661 - DNA, 122 bp, Homo sapiens
atttaagatgagatttgggcggggacacagccaaaccgtatcaccttaataagacggactcgtttccccccagcagacggctggcggccgcacacattgtctcgctcctccctcccaacagc

SEQ ID NO: 131662 - DNA, 122 bp, Homo sapiens
cgccgcgacccaggacccccagactcccggatcccctagaccctctggactcctaagccccgcaactcccaaatcccaagaccccggaccctccaaccctggcccagggcgcgtggctgggg

SEQ ID NO: 131663 - DNA, 122 bp, Homo sapiens
ggaggtcgccctgggagcctctggaaggccttgctagtgctccagctgcatggaagagagcggctagcaactgttccctggttgggccctcagtggatgctggccaggccctactcttagcc

SEQ ID NO: 131664 - DNA, 122 bp, Homo sapiens
cccagagagacgctggagggggaggcagccccagggagtcctagggacagaaaacgagagcgacctttcaggcgcaccacagatcacgccactctccttgtgagatctgcgctgctgtttgt

SEQ ID NO: 131665 - DNA, 122 bp, Homo sapiens
gggtgcgaagcgcgcatgcgcgcttcgtcacaagggtgcgaggaaagtcagtgagcaaatcgcggaccaccggggctgccagctcgcctgactcccggcctcttgcgctcctaggggcggag

SEQ ID NO: 131666 - DNA, 122 bp, Homo sapiens
tcgacctccgcaccggcctcgaaaattgaccaatcggttgtgtagctccgctcttagtcccgcccccacgctgaaactgacacttcggatcgccgagtaacgctcaccagacgtcccggccc

SEQ ID NO: 131667 - DNA, 122 bp, Homo sapiens
ggcagggagggagggagggagtggagggagagagaatgagagagagagagctggttgtcacgggggagggactatgccacaagctgggctgctccaaaccttctgtatgtaagtggcaatga

SEQ ID NO: 131668 - DNA, 122 bp, Homo sapiens
acagacagagcgaggctcggaaaagtgcagaaggtgacagaagctgggctcaggtgtgagcgtgaccaacttgttttgagaagtgcagatgctgtcctctgaagacacccgacctagacgga

SEQ ID NO: 131669 - DNA, 122 bp, Homo sapiens
aggcgggtctacgacgagacacgattttctattggcttactcgccaggactctgcccaatcgacgcgatcgtcttccccagaagacccccgcctccctcccgccggcggccgcggaggcgga

SEQ ID NO: 131670 - DNA, 122 bp, Homo sapiens
gcacagcagggcgctgggcagccggcgagccagtggcaagagacggcgcagggctgcaggcggcctggcggaggcagatcaggcagttcagtcgggtcagcccagccgtggctgatgcagtt

SEQ ID NO: 131671 - DNA, 122 bp, Homo sapiens
aaaaaggcaccgatgtaaaagcacaaaggcaggcccagttacactcccgtcaacaaaccacggaacctaaattcagacttggtggagcccaaaacctcgcagcctcaggggcactctcgccg

SEQ ID NO: 131672 - DNA, 122 bp, Homo sapiens
ggtctcttaggagagctggtgacactctccaggtgagtccttgtgtaattattaaggactcgcctttctcaagctggcggggaaaggggttgctgagaagggagaaatctggagcctaagtg

SEQ ID NO: 131673 - DNA, 122 bp, Homo sapiens
gggtgttactgctcacagccctcctcaggggacagagcacacgcatgcacacacttgatccgtgcactcacacacatgcacatgcatgcacacacttgatccatgcactcacacgtgcacac

SEQ ID NO: 131674 - DNA, 122 bp, Homo sapiens
aaaccaccactcttcccgagacgatccgctctgtcccttctgacgtggcaaggctggggccggctcgcatctggagaaagttctgggttttcaggaaatcctaaagagtgggggaggcggag

SEQ ID NO: 131675 - DNA, 122 bp, Homo sapiens
agcagggttgtgccctctgacctctaaatatctggggttcagttctataattagcagcaccggataggacgcgagccaaacctctcttaaccctagccagtccctccaggaactgaaaagat

SEQ ID NO: 131676 - DNA, 122 bp, Homo sapiens
tgactggctgggctgccgcatattcgcgctgccattggtccataatcagctgggggtgggcgtagggagacctacttcagcaggtcctggccggaccagcattgttaacggctgcggttcga

SEQ ID NO: 131677 - DNA, 122 bp, Homo sapiens
atttcactgtgactagtctagaccgcagggagacctctttaagtaaaggatctccaacagcggagtttgtttgactcactgtggcaggtggttggaaagaacctctttggggcagacttgtg

SEQ ID NO: 131678 - DNA, 122 bp, Homo sapiens
ggacagagagtcatatttttaatttcagagccagccagtgtcaaacacgtgcaaaagagccgggccggattttttcagcttgtcctatggtagtcacttgtcagcctgagtttactggcctg

SEQ ID NO: 131679 - DNA, 122 bp, Homo sapiens
gatggaaagaactgtgaacaaattcttaagagatcagagttttcagtctgtttctccccccgtgaatttcctgtccttgttttgttcacagtatctctttagtttgtaacccaaaaaatctg

SEQ ID NO: 131680 - DNA, 122 bp, Homo sapiens
taaaagctaaacctaggagcctggtgggtctgcctgtgctgggcagtgtgtccagcctgccgaggtcacgctctggtgcgcggtgccctcagtggcgccttgggtctcggcgcctgggcctc

SEQ ID NO: 131681 - DNA, 122 bp, Homo sapiens
ctgaaggtctgtagcattaggtagggtccagtttaaacagatgcctagtgttcaaagaaacgagaacaatgtctcttaaatgcagctgcactctaaatgtaagtgaatgcttttctagtgct

SEQ ID NO: 131682 - DNA, 122 bp, Homo sapiens
cgtctcctgggactgtccttgggtccgatgcggggctgtggggaggtgccagggtgtgggcgcagcagggagcgggtgtgttaggcccccgcccatcccgcgcccgagccccatctggctcg

SEQ ID NO: 131683 - DNA, 122 bp, Homo sapiens
ctgggggggccagcgctggggccaaaagtctgggtccccagcctcccacacgcagcccctcgggccccttgggtgtgtcaataaataacccaggtccaggctggtgtgggcctcactcctcg

SEQ ID NO: 131684 - DNA, 122 bp, Homo sapiens
atgcataagccagcttcatttcttccactccctgggcagcacggagtccatgttgttcgccgtgatggcatttgacctctctgtggctatctgcaagccacttcgctacactgtcatcatga

SEQ ID NO: 131685 - DNA, 122 bp, Homo sapiens
ggaaagaatgttctttactcccatgcagattcagcatcccttttctataacagagcaaaccgagctttactgggttagctccacatttgactgcagacactgtcccttaagctagattttta

SEQ ID NO: 131686 - DNA, 122 bp, Homo sapiens
gatgaacgtcaagctggtcctagacgtcgagatcgccacctacaggaagctactggagggcgaggagagccggctggagtctgggatgcagaacatgagtattcacacgaagaccaccagcg

SEQ ID NO: 131687 - DNA, 122 bp, Homo sapiens
tatccagtggtgacagacatctttccccagttgcactttactcaattgcaaatgttcaatcgaaggaatcacctttttctcctttctcacataccccaccgaaactaccataccagcctttt

SEQ ID NO: 131688 - DNA, 122 bp, Homo sapiens
cccctgcaatcctgcaccgtccacccagccacgccgcaggcaccatccacccagccacgccgcaggcagccagggagatggcaccctgtgcccagcaccccacaatccccgtcttcccgctc

SEQ ID NO: 131689 - DNA, 122 bp, Homo sapiens
cggaaacgtgccctcccacccccgccaccccacccccttcagatggttattttctgcacacgcatgcgtatgttgatggtggtcatgtttgcacagataactctgttagaaaaaggtggttt

SEQ ID NO: 131690 - DNA, 122 bp, Homo sapiens
cctgtgtcacatgcatccatcccacccaccacactgcaggttacaggactgccccacaagcgccaccatgccagcctgacgttacctggcacacaggtatcctcacctgcatgacatgatca

SEQ ID NO: 131691 - DNA, 122 bp, Homo sapiens
ctttagtaccgtcagcgtggctctgtctttccttctgctagttaccgggttacttgtttccgtggctgaaagatacgggtttgtttttgttctcgccgatgttgagtctgatgtggcagcca

SEQ ID NO: 131692 - DNA, 122 bp, Homo sapiens
tgtttgtgcctgtagtccttctaggcccgtttgctcagggctctgactgaccaccatgcccgaattgtctgacagcatctacttacctggttgtacagtcgggcaccatcatctccgtcctt

SEQ ID NO: 131693 - DNA, 122 bp, Homo sapiens
accccaattgcttctggactctgtgacttgtgaggcaggggagttctgccctctcactctcgactccctgtctgcagtcctgagatgcactgggccctggcacagaggtcagagctggaggc

SEQ ID NO: 131694 - DNA, 122 bp, Homo sapiens
gctaccgtagaaacgggcacaggcgacatctatgcagcccacagagcatgacgcagctaccgtagagacgggcacaggtgacgtctgtgcagcccacagagcatgacgcagctaccgtagag

SEQ ID NO: 131695 - DNA, 122 bp, Homo sapiens
cacaagcaaaagactgcggctcctctctctgcaggaaggtcagccatactcgggtggcagcgtgacgccagtcaccatggaaaccagggctgacaggaagatgcagccgcttccagcaggga

SEQ ID NO: 131696 - DNA, 122 bp, Homo sapiens
attcagcagattgctgaagtagtgccatgcccctgtgacttgaatgacctctcctctgcacgggaaatacaagacccaaagccatactgagggatgcggacaagcgcttggcccagccacag

SEQ ID NO: 131697 - DNA, 122 bp, Homo sapiens
tcagggcacagctgccctgctgccacagcaaggaaatgtcctgcatggggcagaggcttccgtgtcctctcccccaaccccctgcaagaagcgccgactccctgagtctggacctccatccc

SEQ ID NO: 131698 - DNA, 122 bp, Homo sapiens
gaagctaagagtgggcatgtgaaaggcacgaggccagcaaagaaaatagaggctgaacctcgtcctactgaggaggatgtattaggccattcttgtttgctataaagaaatactcaagacta

SEQ ID NO: 131699 - DNA, 122 bp, Homo sapiens
ctgattctgaactggcttgtgactggagacaagcttttgtgcttgcaaaggaacacgctgcgaagaatttgaaggacacaagacccactgagcctggccactatttgcaggtaatggattct

SEQ ID NO: 131700 - DNA, 122 bp, Homo sapiens
gaaaatggcttttttatgaatgggagggaagggagcgccagtgcgcacgcgtgccgttcgcgattctatgaatgggtgggcacaacagaccctgagcgcgcatgcgctccgctccttttttt

SEQ ID NO: 131701 - DNA, 122 bp, Homo sapiens
ctgtgcccgccccctcacgccgtggcgcgctctcacgcttccccgcctccgggcgctccgcggtgccgaccattggctggctctgcaggtctcactatcctcactccatccgcggagccaat

SEQ ID NO: 131702 - DNA, 122 bp, Homo sapiens
cgttaaaaggtttctacgttctgtacgttcacgtttgtcagcggaacccctgcttctgcgcggattgtgcgcagctgcagccaagcgtaagctgaaaattgtaaagttaagcgctggggaag

SEQ ID NO: 131703 - DNA, 122 bp, Homo sapiens
gggcgggtgccagggccagtcaccctgacactcaggaggtgccggcctgtggggcgtccgcgggtgggcctctgacgcagagaaagacccagatccagctacctcgggggcctcctgctgcg

SEQ ID NO: 131704 - DNA, 122 bp, Homo sapiens
tcccaggtccactctgcaaaagttgtggcctgaggaaaacttccaggtcgccagcaggaacgtcacaggagagccccggtcgctcgtcaggcgggcggccctggagcgtgcgcgccacccaa

SEQ ID NO: 131705 - DNA, 122 bp, Homo sapiens
actgacaccacagagctctccagtgggatccaggatccggctgaagccacactctgctggcgtttcctgagattgcaccttggttggcctccttctcttgtcttctttgttctcctttccct

SEQ ID NO: 131706 - DNA, 122 bp, Homo sapiens
aacctgcctggggcaggctagtaagtactccattttacggagaaggaagatgaggcccagcgaggcttgggggctaagatttcacaataagtcagcacagctcctaactctttgcactgggc

SEQ ID NO: 131707 - DNA, 122 bp, Homo sapiens
tgacagagcaagactctgtcccaaacagaaacacagctacccagatagtttagctagatacgggtgcacagatgagacagtgcggctcgggggcctcaggtaggaacgggattgtgagtgtc

SEQ ID NO: 131708 - DNA, 122 bp, Homo sapiens
tcccagatgacaggtgcgagccgcggcctcgtgctgacatctagaaccggatgatgggagcgaaccgcggcctcgtgctgacgtgtagagtgggagggaccctggcatccaggggcttcttt

SEQ ID NO: 131709 - DNA, 122 bp, Homo sapiens
ccggcaaggtcagctgagagctgaccccagtgcaacgtggaggagtttggttggggcagtcggaggagcacctgggccgccaagcggccagacttcgggggaaagccatctctcttctggcg

SEQ ID NO: 131710 - DNA, 122 bp, Homo sapiens
gggatccatcaggtcccggaaacgtgagcctaggaaagagtttaatacaaggaaccagagcgcctttacatttattgggcctttctctgactctggccagaaggatggatttaagatggtgg

SEQ ID NO: 131711 - DNA, 122 bp, Homo sapiens
ggtgtagcaggccaggcaggtccacggagtcaccccgccccacccactacgtccgtccttcgatttacacaaggtccaaggagccgttgcagggaatgaacttgagccacgccttcagctgg

SEQ ID NO: 131712 - DNA, 122 bp, Homo sapiens
cccctagggcggggcggggccactcacggaggtcgaggggcgggcctctgctctagcagtcgggattggggcctgtctttgagtgacgtcaaggctgtgctatgagggcttctttgttgagt

SEQ ID NO: 131713 - DNA, 122 bp, Homo sapiens
acagccagcagctgggccagggttagatctgctagagtctcctcccgaattgaacccattcggctgagctgcttgaagttgtgagctatgtaggactgggcctgagatcgaagcttgtgatg

SEQ ID NO: 131714 - DNA, 122 bp, Homo sapiens
cgggcggagtccgcgggatccaaaggcggcgggcggcgggcggcgggcggcgggcgggggcggggctctccttgctggccctgcgaacgaacgagcactgttcgtggttagaaaagcgaagt

SEQ ID NO: 131715 - DNA, 122 bp, Homo sapiens
ctccattaccccaagcaattgagagttggctgtcactgcattttcaggctgcgaaatgttcgtctaagcccattttcatttggcaaaaccagccctaacgtttgagcaaactgaagtccaca

SEQ ID NO: 131716 - DNA, 122 bp, Homo sapiens
gctctcgaaagcgcaaagtctccaaaaaggttacaagggttccagcgcctccccaagtcacggaagcctgggccgccgctgcagcaggaagggttcgtacccggggggaggggaccacccca

SEQ ID NO: 131717 - DNA, 122 bp, Homo sapiens
tcagggagtctggagaggtgtcacgactgcatttacgtcgctccctaaattcctacttgccgcttccggtgtcacgactgcatttacgtcgctccctaaattcctacttgccgcttccggtg

SEQ ID NO: 131718 - DNA, 122 bp, Homo sapiens
gtgccctcgccctccaggcggcgcgcagaggggtgccggggggggggcccacgagagagccgcagacgggtacagcgggtgatctggggtctcccttatgcttcgcccgggaggggggtctg

SEQ ID NO: 131719 - DNA, 122 bp, Homo sapiens
ggagccgcgccggctgcagactgacaggagtggggcggaagacatcggtctcgcctggtgcgtgtggggagctggtccctctgacttgagaggcagacccagctgggagggcggtgggcgcc

SEQ ID NO: 131720 - DNA, 122 bp, Homo sapiens
atcagctgcttccatcagctcattgctagtcgggggccatggcctgtcacaaactcgctccggtccgcagctctctctctctgccttcatccggagccaggtcctgttcctccaaactgtct

SEQ ID NO: 131721 - DNA, 122 bp, Homo sapiens
agggtaccacccacatggcaacccttcagcacacaattctacacgggagcagacttcctacgaacttagctctgccaccaccaacccagcaggcaagtcgctgagggtagtgggtatttttc

SEQ ID NO: 131722 - DNA, 122 bp, Homo sapiens
gtagaaaacgtaccgtcgggcaaccagaaaatgcgcactccagtccccaccacgggacagcgccaggcagtaccctccacagccggagctcgaactgtcgcgagaatagcggtcggcttgga

SEQ ID NO: 131723 - DNA, 122 bp, Homo sapiens
gacagagcgagactgtctccaaaaaaattaagaattcaaatgtgaacccggctttcatggcgccccggccacggagagcctgggggagtgggataaaaacggtgctgggatgggagggcggc

SEQ ID NO: 131724 - DNA, 122 bp, Homo sapiens
agatcaccagcgccgcggactcggaggccatcacgtttcagaagctggtgaaggggcacgcgtactcggtcaccggagccgaggaggtaacggccggcgcggatgtgcaggggtcctgctgt

SEQ ID NO: 131725 - DNA, 122 bp, Homo sapiens
tgttgggttcatttgcaagaatgaagaccagtttggaaatggaccatttggactgtgttacgactacaagatacgtgtcaattgttgctggcccatggataagtgtatcaccactcccagcc

SEQ ID NO: 131726 - DNA, 122 bp, Homo sapiens
cgagcaactgacactgactaacaacaactaactaactactcgccgcggccgagtccaccgcgcgctcccggccgctcgccgcccgcccagcccaccagcctgcccgcctcctctcggccccg

SEQ ID NO: 131727 - DNA, 122 bp, Homo sapiens
tttgccaatgagggcaacatcatcgcattctgggtggacaagaagggccgtgtcttccaccgcatcaacgactcggctgttatgctgttcttcagcggggtccgcacggccgacccgctctg

SEQ ID NO: 131728 - DNA, 122 bp, Homo sapiens
ttcaacactgggtagacgggcattcagcttcatcactgcatcacacaccgggcagacgtgcgttcaacactgggtagacgtgcattcagcttcatcactgcatcacacaccgggtagacgtg

SEQ ID NO: 131729 - DNA, 122 bp, Homo sapiens
agcggggcgcatgccaggcgggggtcctcagggcgccccagccgccgccggcggcggcggcgtgagccaccgcgcaggtaggggagctgccacagagtcctagcacgtcctgggggggtcct

SEQ ID NO: 131730 - DNA, 122 bp, Homo sapiens
cggtgacagccggcccagcgtggcgccaccacacaccgcagagctgtccaggcacagctccgtccccagcgctcatggtgttgaaactgtctgtcatgcaccacggtgtctgtgtccacaca

SEQ ID NO: 131731 - DNA, 122 bp, Homo sapiens
cagagcaaagataaactccagactgcatgttgctcagagaccaggaccaacgtcatagggcgcctaaaaggcaggtggcccagttcagaattgtcaaggtctgacctgcttggacaagtgct

SEQ ID NO: 131732 - DNA, 122 bp, Homo sapiens
ttgtgagctctggcattagagatgaggacacagacattcagagattccagtggtggctcacgctcccacaagcacacctggcagagctgggtccccggtgggggctcatgctcttaaccacc

SEQ ID NO: 131733 - DNA, 122 bp, Homo sapiens
tttgccaaagttgtttatagctgtttattaaaatatttattgtctttcttattataaaagcgttatacagaaagtataacaaaatgtaatgaaaaaaataaccttcaggttacagtgaccca

SEQ ID NO: 131734 - DNA, 122 bp, Homo sapiens
gtcagctgcatcaaggcttgtgtactgtgcagtcttaaaaggcaccactcctgtccatctcggtgaaattgatggtggagcaaaagggagtttaggtggttccggtctggggagaagacgtg

SEQ ID NO: 131735 - DNA, 122 bp, Homo sapiens
gcggagcggggctgaggggccgccctgccaggcctgcgctgccgtgcttttaggtagcagcgaacagttagcctttgaaccggagcccggggtggaatacggggagacggaggggctcacca

SEQ ID NO: 131736 - DNA, 122 bp, Homo sapiens
gtctttgcggctcggtccccggccgcaggcccggcctccctcctccccgccccccagtgccgaagggaggaggaatccgcctcctgacgcccccgcctgcagtcagcctggctcccaacctc

SEQ ID NO: 131737 - DNA, 122 bp, Homo sapiens
gcgtggcggcggggatttaggcgatggaacactttgtgatgggtccctttctgagcttcccgcgagagaagcccaggctggcgtccctttgctgctacgagccagatccttcgtggactggg

SEQ ID NO: 131738 - DNA, 122 bp, Homo sapiens
gaggctccctgagcggatactgaccggcgaagcgggcagagcggctttgtggcccagcgccgtaggttatgcactgaagcacacacagatccggaagccggcagcccttcccttgcacgggg

SEQ ID NO: 131739 - DNA, 122 bp, Homo sapiens
tactttgctagttgaagtacgtttctgtagcagctataaagggaactctcagctgctgtgcgatagcggcttttatatttaggtcccactgtgtgaatgatgaaccgggcagctagattgaa

SEQ ID NO: 131740 - DNA, 122 bp, Homo sapiens
gctgtcagttgcgctgtcaggaggctaggatcttatctggggctctaggacgcttgttggcgctacagttgtcaaaccttttgtctctacacatcctatggggggctggggtgaggatgagg

SEQ ID NO: 131741 - DNA, 122 bp, Homo sapiens
tgcggactacttgcctcaacagacccagacatacgagcatcagaagggaggactccctagcgcagtggctccctgagtgtggtcccaggactggcagaagcagcatcacctgggagcttaat

SEQ ID NO: 131742 - DNA, 122 bp, Homo sapiens
ttttggggagtctccctcacctgctaacttccccttggttttgcagtctggcaagttctccggcagttctccggcgcccccaagccagccgcagggtctgagctatgcggaggacgcggctg

SEQ ID NO: 131743 - DNA, 122 bp, Homo sapiens
tcagggctggggcttccttccgtggtgacaaagatgatgtgacgatgtgtggtggcaggacgactctgagaacacactaaaaatgacccgcacactttcaccagcgaattccgtctcagtaa

SEQ ID NO: 131744 - DNA, 122 bp, Homo sapiens
atacggagtgaggcgtgccattggttaagcagagaggcagggccggggccggggcctgagcggcggggccaccgaagggagtagggtctctggacgccggttagggacggcgggcgcgggac

SEQ ID NO: 131745 - DNA, 122 bp, Homo sapiens
tccttaccatgtagccaccagaccaggaacttgagccttgcagcagggagaacctggagccgaggcctctctagccaggcagtatggggatcctggccctctgcccctatcgggtttttgtg

SEQ ID NO: 131746 - DNA, 122 bp, Homo sapiens
tgggaacccacatgtttaagaagtcatgcctgtaatgatgtggcagcatgcccaggaccacgtgagaaaccctactccatactccaccactatcagccattaaacattccctcagcctgcac

SEQ ID NO: 131747 - DNA, 122 bp, Homo sapiens
caaggcgaccaccagtgtcctgggggtccacagggcctctccagctctgatccgagttcccggctgcagctggtttgggtctgtgggggcctcgcgcagggaagcggaggccccttctctag

SEQ ID NO: 131748 - DNA, 122 bp, Homo sapiens
aagttgacacgaacagatccctgctgccggttgttctggcggtgctgtgagcacgtctgacgggtgtgagggtgctggggcttcgtttcgtccacgctcacgtatcgggcacacaggagagt

SEQ ID NO: 131749 - DNA, 122 bp, Homo sapiens
caaggggtggccacctgtggacgagggttccctgttgttaacagaacacgttgcccacctcgcaagtatgcagcccaatcagtccccagggtctcggttcccgttgcgcccttccccatggc

SEQ ID NO: 131750 - DNA, 122 bp, Homo sapiens
gcaagcaacggctattaaatgtcacaatcctttaattagaaaccatttattggccggacgcggtggctcacgcctgtaatcgcagcactttgggaggccgaggcgggcggctcacgacgtca

SEQ ID NO: 131751 - DNA, 122 bp, Homo sapiens
acgctcagcgccaacgtgagcctgcgcgtgttggtgggagaccgcaatgacaacgcaccgcgggtgctgtacccagctctgggtcctgacggctccgcgttcttcgatatggtacctcgctc

SEQ ID NO: 131752 - DNA, 122 bp, Homo sapiens
cctgtgtctagtcttcctccactctatcttctcactgccaacacaatgaattaaggcaaacgtaatgctgctcttgggcctgtaaatgcttcagtggctgaccattgccagtaggttatttg

SEQ ID NO: 131753 - DNA, 122 bp, Homo sapiens
ctcaagtgatcctcctgccttggcctcccaaactgctgggattacaggtgtgagccaccgcgcctggctacctgtgatccttcagagaagggggcaagggctgggctgtacggggtctctgg

SEQ ID NO: 131754 - DNA, 122 bp, Homo sapiens
caacaacaaagcaaattagacgggaaagcaggaaagctgtgcagaaattctgacctgaaacgcttcgcatccggtctctgcttgttgaaggaccttcaccgctatttctgagaagagcaaaa

SEQ ID NO: 131755 - DNA, 122 bp, Homo sapiens
ccatgcagggctgtaagggggttaatgtaactcgggacatgcagtggtcacccccagagacgcgcaccacccagatgggagtctgagccccaggcctgggcacgccacgctgaccggggccg

SEQ ID NO: 131756 - DNA, 122 bp, Homo sapiens
cctccccctcccgcggccctaattggggccggctgctaatgtgattaaaggccagttaaacgtttctccgagcagggggtgggaagaggccgagacccctgccccctccccagggtcacgcc

SEQ ID NO: 131757 - DNA, 122 bp, Homo sapiens
atctagcagccagcacagtgcccagcacaagttaatcttcagtaaatatttgttgaatgacggagtgagggtgtgacccgtgagacactttatcttttcagttgtatatctctaagactggc

SEQ ID NO: 131758 - DNA, 122 bp, Homo sapiens
gctctaccaaaagagcctggcttatcaacattttacagccaagcatggctccaaggtgaccgatcagttagctggcaggacacattggtgcctccaggctgggatgacatcaaaggttctag

SEQ ID NO: 131759 - DNA, 122 bp, Homo sapiens
cgccaaagtgtctagactggcatatgatgggaggcagccaatgactccgcggcgctcctccgggggccctcagtgtgcgtttgaggagaacaaaaaagagagagagagccgagcgggggagc

SEQ ID NO: 131760 - DNA, 122 bp, Homo sapiens
gggagcactttgcctcttactaccaggtagagaccacctccagaaatcattactgcccaacggatgaagtaccatcgtcctgagaagctggagaattgacacaggctgcaaggaacatctcc

SEQ ID NO: 131761 - DNA, 122 bp, Homo sapiens
gtgtgaggcaaagatacaagactaagatttgttaaagagaacttttttttcccctttgcccggagcccagacaaagttgatgttctatgctgttggatgagattttttagtgcaccaaagac

SEQ ID NO: 131762 - DNA, 122 bp, Homo sapiens
cacgcctgtcatccctgcattttgggaggccgaggtgcatggatcacaaggtcaggagttcgagacaagcccggtcaagatggtgaaacctcgtctctactaagaatacaaaaaaagccgag

SEQ ID NO: 131763 - DNA, 122 bp, Homo sapiens
cagtctcttccacctgctttgaaaccagcgcggagatcctgccccgctatccgcttcaggcgcgacatgttcaaagtcctaggtccagaagctgcagccccacccgtgacgcttaaaggtgg

SEQ ID NO: 131764 - DNA, 122 bp, Homo sapiens
cggggaacgctggggccacacctggcaacttgcagacagactgaaaaccgcagagtgtggcggtgccgccagccttcctgggttgtgctcagcctggcacggatgtggcgaggacgtcctgg

SEQ ID NO: 131765 - DNA, 122 bp, Homo sapiens
ctgcctcgtgctcctcgcctccctcgtgctcctcgccttcctcgtgctcctcgcctccctcgtgctcctcaccttgttgtttgcaatcgcatccgatacaaggagcctcactggcttcaatt

SEQ ID NO: 131766 - DNA, 122 bp, Homo sapiens
ggctcctggttggcttagggatcgcgggctgtacggaaggcggcagcagctctgcgcctgcgcagtgaggggagcgtgctagaacaggagggtggtttgggagggctctgcacttcctcgtc

SEQ ID NO: 131767 - DNA, 122 bp, Homo sapiens
tcccaggtaccattgcccagtggaagcacgagcagcccaggccggggccggggtgaggtgcgcctggaactggcttttgaatacctcatgagcaaggaccggctacagtgggtcaccatcac

SEQ ID NO: 131768 - DNA, 122 bp, Homo sapiens
agagtgtagggggaagtgagtgctggtagacctcgacggccgctctccaccatactgtggcggggtctggaggtttgggaatacagggaccttaagggagccacccgagaggagttgggggt

SEQ ID NO: 131769 - DNA, 122 bp, Homo sapiens
acctacagtgctcatcaacagggagcagcagctctgagcagcccaggagtgggtgccagccgaagtcaacaggcaggcgggtaaatgcgtcccagcgcggggagggcttggagaaaggcctg

SEQ ID NO: 131770 - DNA, 122 bp, Homo sapiens
accccagcgcccgaccctttccccttcatctccagcatgaatccctcaacccgctggctgcggagatcacagacacttcagaaggtgatgagagtcaaggactccctcccacccccaccgca

SEQ ID NO: 131771 - DNA, 122 bp, Homo sapiens
cacactggtacttcccgaaccgggacccacacctcatcacgggatctggttaaaatgcggcgggtatctagttcaaatgttgggagacctggttaaaatgtggggcgacctggttaaaatgg

SEQ ID NO: 131772 - DNA, 122 bp, Homo sapiens
agctactttgtggaatggatccccaacaatgtcaagacagccgtctgtgacatcccacctcgtggcctcaagatggcagtcaccttcattggcaatagcacagccatccaggagctcttcaa

SEQ ID NO: 131773 - DNA, 122 bp, Homo sapiens
tccccgtgcatcgccacggtggcagggaaggcctccgagtgtgcgaacaagcacaccctgcgccatcgaaagacaattacgtattcaaatgaaggatgtacgcggggccttatcacagatgt

SEQ ID NO: 131774 - DNA, 122 bp, Homo sapiens
cttagcgataactcaacattgaaccattttccatgttttctcctttttcaatttcctcaacgttggctaggattgcattcttatcagtcagaatggccagcgctatgtggctgaggctaata

SEQ ID NO: 131775 - DNA, 122 bp, Homo sapiens
ggattccgctgacaaatctccgtgtttccactaaacagaaggctgccctgcagtccttctcgtgcttctttctaaagtacgataacatctgacacttccataaaccggcctgcagaggacac

SEQ ID NO: 131776 - DNA, 122 bp, Homo sapiens
ggatacgcatcacaacaagccgattgagttaggaccctgcaaacagctcctaccagacggcgacaggggcgcggatcttcagcaagcagctcccgggagaccaacatacacgttcaggggcc

SEQ ID NO: 131777 - DNA, 122 bp, Homo sapiens
tatcccctctgcctggaaagctccatcttcttcttcccttccctagcatccccatcttcgcgttaaggttagtccatgggggaagcctcccttgactgataccgtcctttccccacgtattg

SEQ ID NO: 131778 - DNA, 122 bp, Homo sapiens
ggggccgggttgctcacgagccgggcacagtgcactctccctttagttgtgtttgggggacgagtatcgcgggggaggggagggagtcaccatgcccgccggaaaccccccgctgagtcgtc

SEQ ID NO: 131779 - DNA, 122 bp, Homo sapiens
atttcctctagtgggtttgggggtggagagcagctggtatcactctcttcataattaccccgtatacttaaagaagacaattgagtcatcctttatcctctttttttccaggaaaacatcca

SEQ ID NO: 131780 - DNA, 122 bp, Homo sapiens
tttattctaaacaaaataaagaaaatcctgctgctctggtccttgtgataagcctctcttcggcatctgaggagcagctgcagcaaaatctaggggtgtaagtgtatcaggacttatgtgac

SEQ ID NO: 131781 - DNA, 122 bp, Homo sapiens
ctctcttagcagcaaacttttagataaagatcagagaactccaaaggatgtatattatggcgtatggtgcttctttctaaggtaggatatctaagtgagaaaccataagtcttcaactttat

SEQ ID NO: 131782 - DNA, 122 bp, Homo sapiens
gacctcaggtgatcctcctgcctcggcctcccaaagtgctggcattacaggtgtgagccacggcgcctggccaggcattgatttttcttagtgtccgatgtccttccagaaggacattccca

SEQ ID NO: 131783 - DNA, 122 bp, Homo sapiens
ggaaattgtgtaatttcataggaagactgtcctgtttactgtctgccttctgtgtggaggcgtccgtgtgcagacacaagcacagcagtagcaggatttgccaagcctgtggccatgtgctt

SEQ ID NO: 131784 - DNA, 122 bp, Homo sapiens
cttgtaagcagggataacaccggccttgaaagacagctcgagcagaaggtgggacgatgccgatcaccttggagaggtctcggccatcttgaaggaaatgctcagaaggggcacctgcttca

SEQ ID NO: 131785 - DNA, 122 bp, Homo sapiens
ggcactgctgcaccttccacggattctgtgtctagcgttgccctctttgcagatgcccctcgtggtggtggcacaaagacctaaaaatgatttctgtaaaatgggtacaaggagctccctga

SEQ ID NO: 131786 - DNA, 122 bp, Homo sapiens
gacgcgccgggctgcagctctgggatgcaatccgcctgcctcgcaagctgctcgccgctgcgctggcagcgcttacgctgagctcggaggatcccattaggacttgcccggggatgtgcacc

SEQ ID NO: 131787 - DNA, 122 bp, Homo sapiens
ccgctgcctccacatcagatgtggggccgcttctatcagagtgatggagccatccctcaccgaggtctctttgtccctgcccagctggtccgtggggaactggagtgcctgcagtcggacgt

SEQ ID NO: 131788 - DNA, 122 bp, Homo sapiens
aaacaggttgtggaaggctcttgtcagatcccaggaacatgaaagaaatagcacaccctacggtagtgacatggccctgtcaccacccctcattgaaccataaaagctattcagaggggcca

SEQ ID NO: 131789 - DNA, 122 bp, Homo sapiens
cgcaccacgagggcgagtcggagtgggaatcggctttccaggcagcccagcctgtgctggcgggggcatctggcattttcacaccctttccttcccagcattttaggaagcggagttccagt

SEQ ID NO: 131790 - DNA, 122 bp, Homo sapiens
gacgagccagcagtaggagagggggagggaaggacgcgggctcccgcggtcccggttccccgagggaggtggatctttcccacgcagcgaccctcttgtgatcctgccgcttcctccctctt

SEQ ID NO: 131791 - DNA, 122 bp, Homo sapiens
agagaaatgaagggtgcttcttgccggtgagcgctaaggagtgtatctggagggtctctgcgtaaggaactcgacactgcaaaccagtggaacaaggaggcagaaagcctgcgcccagctcc

SEQ ID NO: 131792 - DNA, 122 bp, Homo sapiens
tggcactaatattttcttttgctttcttttgtgacgctcaaataactctcacgccagtgccgagaatttgttttcctcactttataagtgaacaaagagaagacctttaaaaagtcaaagca

SEQ ID NO: 131793 - DNA, 122 bp, Homo sapiens
gccccgtttgcaaggtaggaggggatgtccccgggctacacctgcggcggcggctctgtgcgccttttcttgggttacttacttgactacagccttgcttaatttcagagtagcccgggtgt

SEQ ID NO: 131794 - DNA, 122 bp, Homo sapiens
tcctaaagtgctgagatcacaggcatgagcccctgcaccgggcctaatagagaatctttacgcagcacatgttgttagtgtatatgttcggctgactcttgcagcctttcttctgtgtgagg

SEQ ID NO: 131795 - DNA, 122 bp, Homo sapiens
ggtgacacacgattacacggcagtgaaggaggatgagatcaacgtctaccaaggagaggtcgttcaaattctggccagcaaccagcagaacatgtttctggtgttccgagccgccactgacc

SEQ ID NO: 131796 - DNA, 122 bp, Homo sapiens
cgccggcgagggccgccaggccctgggggagggagggcttcgtgggggagtcgcctccagcgcccacagggactgcagggctcgtgtctaggcccaatcacaaggatcctgcgtgtctgagt

SEQ ID NO: 131797 - DNA, 122 bp, Homo sapiens
ggaggccttatgtgtacgtttgtatgtttgagtgtatgtgtatatgtaatgccataattacgggtctgtctctagtaattagaaagttggatatgccgaagagcaagtagattagtttaatt

SEQ ID NO: 131798 - DNA, 122 bp, Homo sapiens
ctcagaggtggaatttttatgggcacccacaaggtagtcgatccgctctcctctggaagacggtcacctttcgaggacctgaaaatttttttgtaggtggcaccccgcaacaagccggccgt

SEQ ID NO: 131799 - DNA, 122 bp, Homo sapiens
atttttttgataatcctgctagagacagaatgggtaaggatgggtaagggcgaccaccaccgttaagcaatgacatgcgagctccagcaccgcgtctccccggtaggatgctcactgcgcta

SEQ ID NO: 131800 - DNA, 122 bp, Homo sapiens
tagaaaagaaagtcatcaaaacagagcctgaagattcaagatagctgtgatttctctcaccgttctctggaaatggcatcagatttaaggataatactccatcatagaaataagccttaata

SEQ ID NO: 131801 - DNA, 122 bp, Homo sapiens
gaggtgcctgtggctggcgtcgaccgctggttcaagctggagccacgctccagtgcctcgcgtgtgcagggacactgccacctggttctcaagctgatcactacgcaggtggggaaagtggg

SEQ ID NO: 131802 - DNA, 122 bp, Homo sapiens
gtggtcccgccccaggccggatctggccacagggctggcggcgcgctggaaaaccgcccacgtgggaagaagccctggctgcatttccgccctggactgcgctcccgcctgccagcgcggtc

SEQ ID NO: 131803 - DNA, 122 bp, Homo sapiens
aaaacgcgacggtgccggcgaggttctgggcgaagcctcggcgtcctccactgtggtcgacgcctttcctcgcagccccggtacagggcttcctcggtgcacccctagccgttgccccggga

SEQ ID NO: 131804 - DNA, 122 bp, Homo sapiens
atggacaggtaggggtaattgggtcattggggaggttcccccatgctgttttcatgataacgaatgagtttcatgagatctgatgcatttatatatgtctggcatttcccctgcttactttc

SEQ ID NO: 131805 - DNA, 122 bp, Homo sapiens
tacggcgttcttttaggggtggagccggcaggaaatttaaactgaagccgcggccgaaaacgccaagagattgatgctgtagctgccctgagataaccaggactgtggaatcgggaagagct

SEQ ID NO: 131806 - DNA, 122 bp, Homo sapiens
gccgttcccacatcaggaaaggtctgggtctaatgaccctcgagtcaagaacaaccctgacggctgccctccctcttattcggcccaaggacttgaagcccggcatcttccgacctgccctg

SEQ ID NO: 131807 - DNA, 122 bp, Homo sapiens
cttgagagcagccggcctggatggcccggaggtagctgtggctccgcatgcggaaacagccgggcaggtccagggcgtccacggcctgggactccagctccccaaacaccgacccgcacacg

SEQ ID NO: 131808 - DNA, 122 bp, Homo sapiens
agtaatacaagacccctgctgctgacaaagaaagttgccacctggaactgtcttcccagacgtcctactggcccatattctcatttcttcatgtctctgctcaaatatcacctcaacaaact

SEQ ID NO: 131809 - DNA, 122 bp, Homo sapiens
gtggagacctactgattgaaactggagtctgggggctgtcatctgtgtctcacaagcccccgggtgatgctggggaccctcaagtctaagaagcactgagatcctggaggcttctttctctc

SEQ ID NO: 131810 - DNA, 122 bp, Homo sapiens
aaagagcgaacctggccgcgaagggaggtgccaggcctggccccgggagctggaatgcggcgccctgggccagcgggaggctgagaggagcgggccgggagtccagtgtgtagagggaggag

SEQ ID NO: 131811 - DNA, 122 bp, Homo sapiens
ccgcgcgaagggaggggcccgcggcctgagggtgccgggagagagcgagactgatgaccacgaaaaaagaaacctggagactagaggcgaggaactagctttaatggagtgagtgggtcgtg

SEQ ID NO: 131812 - DNA, 122 bp, Homo sapiens
ctttgccgggagcagcggaaagggacgttttccagcgatacaagccctttccccctgccccgcagtttggatagagccttttggcagcggctgtcgcctttatttattctatttatttattt

SEQ ID NO: 131813 - DNA, 122 bp, Homo sapiens
aaacatttgcggagaagtctttgtatttgaggggactgcagggaggccgggctgagtcagcgccactgccgctgctgcgtgtccctttctgaggcctcggaccgcaccgctttcgccctgcg

SEQ ID NO: 131814 - DNA, 122 bp, Homo sapiens
ccgcgcccctctgttcctctgccatgcggagctttgtatttgcctcttctgaagtccctgcgtccggccgagacgctggcccgaagccccactccctgtcaggcccctgtcgcgggagggaa

SEQ ID NO: 131815 - DNA, 122 bp, Homo sapiens
tgtggccccgggtgtgttttccagcatctagaaatctcccagagagagcaaggcatgtatcgtggcttgccctccgctctttctgtgctgggacaagatcggaagtagagtctggaaggatg

SEQ ID NO: 131816 - DNA, 122 bp, Homo sapiens
gcgatgggtcccagtcattaactggctgtcaggttcctcagatgatggagctaaaaatagcgcgctatagatagaagcttctcccacgcaggcaggcgccggctgcaaatggaagtgggggg

SEQ ID NO: 131817 - DNA, 122 bp, Homo sapiens
tcatgtaggggtccagctggtgcaggaggctgtagccctgctggaagaagctggactgggcgtgcatgaaggacagcatctgcgggggcagcacaggtgaggcccaagcacacccggtccag

SEQ ID NO: 131818 - DNA, 122 bp, Homo sapiens
gcttagggagcagagatactatctctaaaaatctctcagtgaggtgttaagcatagtggccgtgataagttgccttggttctctacccatcctagatttatttctacaacctatatattacg

SEQ ID NO: 131819 - DNA, 122 bp, Homo sapiens
gcacacggcgcgcggggggctccttctcgcggccggctggcggcggcagcggctgcgattcgcaggctcgagattcgttgccccgagatccgctgcccacgacttacctcttggcaccttga

SEQ ID NO: 131820 - DNA, 122 bp, Homo sapiens
taaaagttgaaactatgtattagttgatatctaaaatattaaagcccctgacaaactgaacggctaagaacttgacaaaatgagacgcctgtttcaatgattctgttgccagcatattaatt

SEQ ID NO: 131821 - DNA, 122 bp, Homo sapiens
aggctgtaatcggcattactgtcagccagtcagcaaccttatgccataaagcctacctcacgcagtgtcagcctttgtgttgcccattcactttggaaactagtgaatgtggtgtcaaaaaa

SEQ ID NO: 131822 - DNA, 122 bp, Homo sapiens
gagcatgtaaatgtcctttgctaagtgtgtgccctacacggaagcgagtctatagaatcccggttcacagttgcttgtggcctgccgatgcggccacacgcgtccattttgagaggaggcct

SEQ ID NO: 131823 - DNA, 122 bp, Homo sapiens
gggggcaggccctgcagtctcagcttaagggacaggaaccgacttgccaaggggagcacacggtatggagagcagggctgagccctccccctagcttccgctggacaactctcccgagcccc

SEQ ID NO: 131824 - DNA, 122 bp, Homo sapiens
acctccatctaaggaccaagcaccgctggcacacggaccgcgtgagaagcaggtccctgccgatgagtctttcctgcagaaacctcggctccctgacttggttaagcagcagccgaaccgca

SEQ ID NO: 131825 - DNA, 122 bp, Homo sapiens
cctgctcccaacccagggggcactgtcctggttgctgctgcacttttaggacagggctcccgctccctcatcttttactggaaaaagtcaaacagcacagggatccagagaggaggaggcaa

SEQ ID NO: 131826 - DNA, 122 bp, Homo sapiens
ttctccaagtccccacccatcccagaaacccagccggcttcacctgtcactggcatgcgtcgcgggactttgcggcacctagccagccactctggcagcccagagggagctcgccccccagt

SEQ ID NO: 131827 - DNA, 122 bp, Homo sapiens
gttgaagcagtgggtctggaagtgcagcagggcctccaggtagcagctatgccccgtgaacggggctctctcagacaggagctgctccacctcagcctcggacgctgccagcaaggaggcga

SEQ ID NO: 131828 - DNA, 122 bp, Homo sapiens
cagcgctagggcaggctggcaatgcgtcccagaactgggcaggtgggagcctgccaaggccggagcactccgaaatagtcagaaagcaaatgtgacaccttgagacgccctggcgacagcat

SEQ ID NO: 131829 - DNA, 122 bp, Homo sapiens
gctacctctccatgcccagaaggacatcataaatcatttctaatttatgaggagcccagtcgtgtactacaccctgctaggtgctggtgtttgtcgtctacagactgtgagctcccttcttc

SEQ ID NO: 131830 - DNA, 122 bp, Homo sapiens
cgattggcggcgggagcgatgagtggcagccgcacggcccaacgggagctgtgcgtgggccgcggggcggggccagggcgggtgcgcggcggcggcggggtggctgggccggcggcggcggc

SEQ ID NO: 131831 - DNA, 122 bp, Homo sapiens
cggggaccccagcatccctcctttgatgttggagggacacccgggccgtcgagctcgccccgctcttgtgggtgactttgtgctcttgagggcgcagcatttcccaaggttctcccccaccc

SEQ ID NO: 131832 - DNA, 122 bp, Homo sapiens
aggctgaggcaggagaatcacttgaacctgggaggtggaggctgcagtaagccgaaatcacgccactgcagtcactccagcctgggcaacaagagtgaaattctgactaaaaaaaaaaaaaa

SEQ ID NO: 131833 - DNA, 122 bp, Homo sapiens
gaggcaactgccgggctgtcctggacctggtgaatcctttcggggttcagcaaaggcggacgctgaccgggccaaggagtgggacctgcagtgctggaccacccttttccaagcgcagaagt

SEQ ID NO: 131834 - DNA, 122 bp, Homo sapiens
gcaggagccctcggcgcccggccaaagtcagaaatttgttgttgccatccgaggggaaaacgtgcacgggctctgcaaattgtaaccgcccggggtgggagagtccgtgcctgggggcgtgg

SEQ ID NO: 131835 - DNA, 122 bp, Homo sapiens
ttccccagaaacccagttgacttcctctgtgggaagtggtcagccgagtgtctggtgctgcggaacatctggaggcgtcacttggcatgggggactggaggtcaccatgggtggcctggaag

SEQ ID NO: 131836 - DNA, 122 bp, Homo sapiens
gagtaaattcataaggtggtaacatctagtttagagacaagaacctcagagaagttcagtcgtttctcccaatttttttttttgacggagtttcgctctttcacgcaggctggagtgcagtg

SEQ ID NO: 131837 - DNA, 122 bp, Homo sapiens
gaactggtaaagtgtcacttgaaggaaccattatcccatttcaattttattcctacttctcgtcttttgtcctgggaagatattcagggtactgcctaggagaccccacccctgtgagccct

SEQ ID NO: 131838 - DNA, 122 bp, Homo sapiens
tgggcaggtgccgaccagggtggccccttggtgacctggtaaatccgtgtctggtgtgcccggtgctgctgtggcccccagctcctcagggctttgctcctccaccacctgacaggcctcgc

SEQ ID NO: 131839 - DNA, 122 bp, Homo sapiens
gtgcgctgagggtcgccccggccacacccttggtctccccgctgggggtcgctgcagacgcgccaataaaaacgcacagccgggcgagaagtcttccgtctcgttgcattattttcttttgg

SEQ ID NO: 131840 - DNA, 122 bp, Homo sapiens
gcacagcccaggcatcgcacagccaggcacgtaggaggctgcgccatctaggcttgtgtacgtcactgtagtacgttcacacggcaacgaaatcacccaatgacgtgtttcccagaacgcac

SEQ ID NO: 131841 - DNA, 122 bp, Homo sapiens
tgccctctcaggtgacacagtcctcccatgtgacattagctcacagtggacagctacccacgaggcatcacacagccaggacaggggacggccacactggctgggtaattgtgacttacaga

SEQ ID NO: 131842 - DNA, 122 bp, Homo sapiens
gtactgcactgtcagcccctcgacctgcacaccggagtcctgctccagctctagtagcagcgtctccccaaaggcctgcaagcggcacaacagcctggcaggggcgcccgagccaggcagga

SEQ ID NO: 131843 - DNA, 122 bp, Homo sapiens
actctcgtcctgaaactgcaatgcagacattaaagtgcagtatttttcaattagagctgacgaattcaatcaaaattccatagattaggatgaaatgaggcatgggtcatttacaggggaat

SEQ ID NO: 131844 - DNA, 122 bp, Homo sapiens
gtaccctctgcagcgccacccgcgtcgcctctccgccgtgcgccaccctgagggctcccgcgattgcatcttcttgagcacagttaccaatgcgttcagcttcgtttcttactcggatggag

SEQ ID NO: 131845 - DNA, 122 bp, Homo sapiens
tcttatgaaacatcttcattcctggaggcgattttcaataacttttctagcattactcatcgtctacgacaattcaaatccaactagaaacagagtatttaattctttccatgggccaagaa

SEQ ID NO: 131846 - DNA, 122 bp, Homo sapiens
cgccgccgccacggagaaaaatagctgggggctgcactctgcgcgtgcgccaaacgggagcgcgctccgtcgggtgacacgtgacagaactgccacctagagggaaccgcgaggtgcattgt

SEQ ID NO: 131847 - DNA, 122 bp, Homo sapiens
tacaccacggtgggtcggccgcccaggtcctgggcgaagccgcagtcataataattggggcgcagggactccccggttttgtatttggagaacagtgagttgacgaaataagagctcatttt

SEQ ID NO: 131848 - DNA, 122 bp, Homo sapiens
cagagctagacatatagaaagtggtcaaggttattcatattgctgaataaccttctttcccgtaattttctcaaccttaaatccacccaattgcacatgattttagtaccttctactcatct

SEQ ID NO: 131849 - DNA, 122 bp, Homo sapiens
ctcccgctgccagctgggcggcttctgagtgtggctgcaagcactggaggagggggagggcggcaggccaatgagggcgtcgcttcctctgacaacagctggagatccttcccctcaagcca

SEQ ID NO: 131850 - DNA, 122 bp, Homo sapiens
ttacgtggcacagtgttggcctgggcctcgccgtccctggcacgacccatgggatgaggccgcgcctccccccccagcggggccgccgggcagaggtgatgtgggatgctcagtgacttttt

SEQ ID NO: 131851 - DNA, 122 bp, Homo sapiens
gatggactaagtgtgatccggcctgacccgcctccggccggcgtgagaaggggcatgtgtcgggctaccctcgggcttcccctgccgcccattgtgatccagcccgctaggcgctccctgcc

SEQ ID NO: 131852 - DNA, 122 bp, Homo sapiens
gcacagagacagaaagaagattgacatcgtacgagtgtcgggttccgagactggcgtgcccgccggcctctccctctgtgggcggcctccgctcacccacgagagcagctccggaggcacca

SEQ ID NO: 131853 - DNA, 122 bp, Homo sapiens
ccacttcagcctcaccttccacataagaccttcacagcttactgtctttgcaacagaagacgtcctctctgtctgcttgggtcccagcccctttttctgattcattcattagtccatccaaa

SEQ ID NO: 131854 - DNA, 122 bp, Homo sapiens
acacaacagacccccaggaggcatctaaggtttacatgaagcctttaccactgaggtcctcgcagcatggataccaattccactcaatcaactgggtgataaaaccatgtgtgtgtgttggg

SEQ ID NO: 131855 - DNA, 122 bp, Homo sapiens
cctccaaatctggttcccatccgcagttcctttaccaatgaatgactctaaccatccagtcgaccaagcctgaaatatgggctttaacccttcatccttgttgttacccgttcatcttcaca

SEQ ID NO: 131856 - DNA, 122 bp, Homo sapiens
gtgtcctgggtgagcggctttcccgcccctccccttggctcacagagctgctctgtccgccggccgacaccggcctgagccagcgcccttccagcagtcattccacgtgggtgggtttggat

SEQ ID NO: 131857 - DNA, 122 bp, Homo sapiens
gcacagaggcagctgggattggtcgcagctggcggaggcgcgtcccaggctccggcagaccgctggaacagctgagcagagcaggtggactgctgagatagaccagggacaccaggcagcca

SEQ ID NO: 131858 - DNA, 122 bp, Homo sapiens
gacatggcatgaggtggcctgctctgcctcagctccttcccgctcgtaggacacctacaccggactgtggaggggacttggcctctgcccaaggccaggcctctaagcactactctgactct

SEQ ID NO: 131859 - DNA, 122 bp, Homo sapiens
ccacttactctgaaatcttgaggcaagcatgaaagctagccatggtgctgctgagggagccgctggccggttacgtgccttgcctgctggggtgcatgggagcccgcgctgtgggcatgccc

SEQ ID NO: 131860 - DNA, 122 bp, Homo sapiens
agatgaaaaatatatatgcaaaaacataaattgcataaaccatattgagcaaaagacagacgccaatactctatttacataaagtgttacatacacagagatagattaatacatgtaaatga

SEQ ID NO: 131861 - DNA, 122 bp, Homo sapiens
cctttgctcccccttcaagataggtctccgagcttcaaggttttagggctctgtggaggccgccacgtagcagcaaggagaatgttttgtatttggctgatgagatttttagagtctcattt

SEQ ID NO: 131862 - DNA, 122 bp, Homo sapiens
accgaggcgatgaggccaaacgggctggtgacagggacactgagtcaggggcaggggccccggtcttactcctgggcctctggatttgggccctacatgaggcttttctatctgtaaagtca

SEQ ID NO: 131863 - DNA, 122 bp, Homo sapiens
cgggggacacgcgggacttcggcagtcccagtaacttgctttgctgttctgagacctcagcggggcggtcagacctctgctgtctccgcagcgagttgcagtacttggcgcggggagaggaa

SEQ ID NO: 131864 - DNA, 122 bp, Homo sapiens
gcctgcagcccaggattcctcctaagccgtgtcccatctgtgcaggaccccactggaaatcggactgttcaactcacctggcagccactcacagagcccgtggaactctggcccaaggctct

SEQ ID NO: 131865 - DNA, 122 bp, Homo sapiens
cactgcgcaggcgcccggaggctaagccgctcggaacctagctgcgccacgcagggtaggcgacgcagacgctcccgcgtgacgcacttccggtgcttgccctgcccatccccgtggcgggg

SEQ ID NO: 131866 - DNA, 122 bp, Homo sapiens
taaaggaaaaacataaggaggaaataagagaggttgggcaatgcttattagacatatacacgtcagttgtaatttcaggaatgcttccttggtgataatataaagtttacacataaagtaag

SEQ ID NO: 131867 - DNA, 122 bp, Homo sapiens
cttggtggtctccgagaagtatatctggtgcctggactacaaaggcggcctgttctgcagcgcgttgccgggcgccgggctgcgctggcagaagtttgaagatgctgtccagcaggtggcag

SEQ ID NO: 131868 - DNA, 122 bp, Homo sapiens
acctccaccggagggcggcttatctagaaactgcttgggtaattctgctccctgataggccgggtcttccggtggagaactcctttcttacagcagcacccaagcgcgggcttggccacaga

SEQ ID NO: 131869 - DNA, 122 bp, Homo sapiens
aacagagtggatggatggctggaggatagggttggggttgagtgggggcagtggtgaggtcgagagcttgatcatgaatgacttgaattttcaggttaagaaacacagacattatcctgaga

SEQ ID NO: 131870 - DNA, 122 bp, Homo sapiens
cgaagccactgagccaggccagagccacgagctgctgacagagagcacggtgcatgagaacggcatagtgcaggggcttgcagatggccacgtagcggtccagggccatggcggccaggacg

SEQ ID NO: 131871 - DNA, 122 bp, Homo sapiens
acgggttccccgggctgtggcttaatccgttcatgtgcccggcactgcccgggctgctgccgagcccgttggtactgaggcttgcgttgtcagcctgtccgtttgctaacgtggccatcttt

SEQ ID NO: 131872 - DNA, 122 bp, Homo sapiens
gggtggtgcctgggaggacctgcagaggagctcctgcatctcctcaggccctttcttcggcgccctcttgtggcagctgagagcaggcccagggcagaagggaggcaggggcattaagagct

SEQ ID NO: 131873 - DNA, 122 bp, Homo sapiens
cctgagcactcagcccctctctcacttttgctgtccagctactgctctgtatggcaaggtcgctaattgggacgtgatcctggccaaatggcaagagagattcaaggaaccggttccctgga

SEQ ID NO: 131874 - DNA, 122 bp, Homo sapiens
cacaccctgcccggccataaatatatacagattcctgggcatccagggcaccaggaccgacgcagagctggggtcctgtccctaagcctgtggcacagcgactcttgacatgggagccaggg

SEQ ID NO: 131875 - DNA, 122 bp, Homo sapiens
cacacatagtaagcactcagcacatatcagctgttattattatcatcttgcagttaacaccgatgtcttcctcatcagtcagcagattcggagagggggaatccaacagtcagaccgggccc

SEQ ID NO: 131876 - DNA, 122 bp, Homo sapiens
ccgctgcggccgcgtctgcctggcccgtcccctccagcccagctcgggctccagctccagcgccggcgcttcagctgcgaccgcgagccctctcaagcaaggtagagaccccgcgagccccc

SEQ ID NO: 131877 - DNA, 122 bp, Homo sapiens
cgcgctgacaggaaacgcgaaaggaaccagctaccaggcctcgcaggaaaattaatccggcgatgtcctcgaccctcttacattagttccgcaccctgtcggagtcccagagcataatcccg

SEQ ID NO: 131878 - DNA, 122 bp, Homo sapiens
ggcaacatagtgggagtctctctacaaaaaattcaaaaattagccatgtgtggtggtgttcgcctgtagtcccaggatcgcttgagcctgggaggttgaagctgcagtgagctgttcctgcg

SEQ ID NO: 131879 - DNA, 122 bp, Homo sapiens
ctacggagatatgggtgcatatggggacatggcacagggaggactctgtccctgccttcacgaaggggaattccaaacgagtcacgaagtccttctgactagggaccaaggcactagcctgt

SEQ ID NO: 131880 - DNA, 122 bp, Homo sapiens
catctgggaggtgtacccaatagctctgaagagacagcgaccatcgagaacgggccatgacgacgatggcggttttgtcaaaaagaaaagggggaaatgtggggaaaagaaagagagatcag

SEQ ID NO: 131881 - DNA, 122 bp, Homo sapiens
ttctccatgtcttaagaaggtataatcaataaaaaggcaaatgcacgggtgtgtgtatgacgtaaggcagtgaggagcaaatagcaggacaaacagtgcaatgtgcacctgctcctctcagg

SEQ ID NO: 131882 - DNA, 122 bp, Homo sapiens
aggggcggggcaggagggagaaacaaactggctggggcgggagaaaacgcctgcgcggggcggggagaggtaggatttagggcccgacgcttccgattattttaagctgagccacctagtga

SEQ ID NO: 131883 - DNA, 122 bp, Homo sapiens
gggcgcgtgggcgggcccagactctcaagaggcttccccacagggcggggctgggggctgcgtgggggcggcggggaaggcttaaggttagggggtaggcttgaagcgagtgcccggcccgt

SEQ ID NO: 131884 - DNA, 122 bp, Homo sapiens
gagccacagggagagcgcagcgtggagaccgaggcgatgtgtccatgagccaaggggaaccgggggttgctggagctgccagaagctgggagagagacaggctggcccggtcctcggtcact

SEQ ID NO: 131885 - DNA, 122 bp, Homo sapiens
gtacagaggtggtgacgtaatcactgccacagctgactggctatggcttgcttgataagacgccaggggctacctatgtagattcccagggaggaactgtaggaacaaaccggtgtcaatgg

SEQ ID NO: 131886 - DNA, 122 bp, Homo sapiens
ttgtgtatcctttaaattttttattgttttaaaaatcattttttaaataagcaagagtttcgtccccaaggggagccagtgaaaagttttgagcagggcccagacagctcagggctggactc

SEQ ID NO: 131887 - DNA, 122 bp, Homo sapiens
tgtgcgacacctctagttgtaagccgggacacagtgacgtcgagagagcgctattctactcggagaggaagttaatcccatcgaactccagccaggaaaacgtgggcttgggaaccgcggcc

SEQ ID NO: 131888 - DNA, 122 bp, Homo sapiens
gggtgtcgatgcctccgtggggattctgcaattcttagaggccacgtgggcagagagcggcgctttacccggagctaacgctgtgaccaccagcgcctctcacccggcagcgcctaacctgc

SEQ ID NO: 131889 - DNA, 122 bp, Homo sapiens
caaccttgggcgtacggatgtgctccatggctggcccacgtctgcagggtcccgggcgggcgcggcctcacgcacctgcgcgcctctgcggcgcgatgggaggggcgcggggagggggcttc

SEQ ID NO: 131890 - DNA, 122 bp, Homo sapiens
cccagcggaaccccagctcgagcccgggctcacggagagcagcgctcggcgttagccgcacgagcaacaccccgggtgcccctgcccagggggcccgccatctcctccaggaggcggggaga

SEQ ID NO: 131891 - DNA, 122 bp, Homo sapiens
ttttggggtgtgacaactccaagacttgctggttctccagacttaggcaggaggtggaagcgatggtttcctctcttcctacacctccaaacggtgagaacctgaaggtgccatatggctgt

SEQ ID NO: 131892 - DNA, 122 bp, Homo sapiens
aatgaaaccagaactgctttgctgtgctggttatcttaaggttcaagacagcctcttgcccgataaccaacacagtcaggtactttatttctgttctaaagtcaaaacgatgggaagcccta

SEQ ID NO: 131893 - DNA, 122 bp, Homo sapiens
tcgcgatgccaaggtcccagcagctggaggggcagcgccctgctgattgacgcgctgaatcgtgtgcccccgtccttactggcaggcacgccacatgtgctgtgtgccatgtgttcaggtct

SEQ ID NO: 131894 - DNA, 122 bp, Homo sapiens
gctgtccgcctctgcaggaggactggtactcactacatcgccatgccagggccggttccccgctcccccaccccagcactgagggtccgtcagggagcaacctccacctgctgcatggtgct

SEQ ID NO: 131895 - DNA, 122 bp, Homo sapiens
cccgacatggctgccaggccatgtttgactctgcctaactcccctcagggctcctcatgccgtagcacccgggttcttgattcacttgcaagctctaggagccctgctgccttgcacggctt

SEQ ID NO: 131896 - DNA, 122 bp, Homo sapiens
aacggagcctatgtgtaagtccactactggtgcaaggttgcacacttctaagaagagcggcgtggggggctcggcgaccttcgcttcagtcgctcccccgtgcagtcccctgtgcccaagac

SEQ ID NO: 131897 - DNA, 122 bp, Homo sapiens
ttttctttactattgttttaaaattagatgtgatttaaaaaaatttccaaagccaaaaaacggtacaaatgctttaaaggatgaagatgttgtccccaagtgtcatcagacaaatttaggag

SEQ ID NO: 131898 - DNA, 122 bp, Homo sapiens
ggaaggcagtcgttgggatctgggggcgaggacgccggtcagcgggcggggggtcaccggcgctcagggagggcttcccgggggaggaagcactggagctgggccaggtgaggacagagagg

SEQ ID NO: 131899 - DNA, 122 bp, Homo sapiens
cagctgttgccctgacagccgctggggttccctcgcgtcatcagtgatcactgtctgctgcgccccgcgggttctggggtggcttcctgcaaatgtgtcactggggctgctgtaagcttcac

SEQ ID NO: 131900 - DNA, 122 bp, Homo sapiens
taaacactcactatttctgtcttatggaaatacttcccctgtgagttgctcaatatgcttcgcagctaacagaatacatctcctttctggtcttgccttaaaaataataccatttggcctaa

SEQ ID NO: 131901 - DNA, 122 bp, Homo sapiens
ccaaggtggatcgctcgagcccagtagttcactactagtctgggcaacaaggcaaagacccgtctctacaaaaaagaaaaattagctgggcatggtggctcgtgcctgtagtcccagctact

SEQ ID NO: 131902 - DNA, 122 bp, Homo sapiens
ggagaggggcgggaccagaatggggcaggagttggggcagcggctacgccgcgaattgaccgggccaaaaagaaaaggcccagaaaggacgcagccacccaggggcggagcgtggggagggc

SEQ ID NO: 131903 - DNA, 122 bp, Homo sapiens
ccgggcggaatggggggcggcgggggcgggcggggccggtttgctcgcgggtgggcaggacgttctcaccccccgccccctacactcgcaaactcgcaggcacagcctccgtcatcgcccca

SEQ ID NO: 131904 - DNA, 122 bp, Homo sapiens
ctaataatgttaaaccatgaagcctgtgagatcttgtgttgcagcgtggtttggccctagcgttcttgcatgctaacctaaggtagaagattagcagcctgtttgcatgcagccggatgctg

SEQ ID NO: 131905 - DNA, 122 bp, Homo sapiens
gatggatgcctctgaaccaccggtacagaggccactctgcccgaaggaaataaagcttcccggagaggagagaaaacacacttgagtctgggtttctcactgcctggttggctggcggagtg

SEQ ID NO: 131906 - DNA, 122 bp, Homo sapiens
gaaggaccacagctcctcccgtgcatccactcggcctgggaggttctggattttggctgtcgagggagtttgcctgcctctccagagaaagatggtcatgaggcccctgtggagtctgcttc

SEQ ID NO: 131907 - DNA, 122 bp, Homo sapiens
atcatagtccaaaaccaaaaacttattaagagttacattatttgacctttttgttaatcccgttaatgtcttactaagtaggatacagccatattatgattgcttctgtattcatctcttga

SEQ ID NO: 131908 - DNA, 122 bp, Homo sapiens
agggggcgctgtggaacccgggctggaaccagccctctgtgccaggccgcagacaggttccgccggccctgaggggcagctgccatggcgtgggtcactgggagctgagaggaagggccccc

SEQ ID NO: 131909 - DNA, 122 bp, Homo sapiens
ggtagattcccgagagggtcagggaatctcttatttttctcacagccttgggtgagaaaccggctacctcctctcaggaaacacccggatgtgggtgtggaccagaggactcactggaacac

SEQ ID NO: 131910 - DNA, 122 bp, Homo sapiens
tcctgtagagtcccctgatgaagccaccgcggctgaccaggagtcagaggatgacctgagcgcctcgcgcacatcgctggagcgccaggccccgcaccgcggcaacacaatggtgcacgtgt

SEQ ID NO: 131911 - DNA, 122 bp, Homo sapiens
gaggctgtgaccaacgctgccagctccagccaccgtcctccaggccacacgaagaaggcccggggctctccagaggctgagggcgtcaatgtccaccccgaccagccctcagagacaccacg

SEQ ID NO: 131912 - DNA, 122 bp, Homo sapiens
gctcatacttaacagttttctttctcccttaccccttttggcttggcaccctgggatcaacgtaattgttggagcgaaatacacctcctggaatatggcattttgttcctcttctcatctgt

SEQ ID NO: 131913 - DNA, 122 bp, Homo sapiens
ctcccggcctcttgcactgaagtccaaaggccagaagaacccggaggctttcggcgtttccgcctttgccttccgatgtccattcccatctgagcagtcatttctgcttaattccgccatta

SEQ ID NO: 131914 - DNA, 122 bp, Homo sapiens
gactgccctgatagaaagcagtccaatttttaaatttccgatataatttaaacattgttgcgtgtcaggatatgtaacatggcggaatgtaatcatcaatttccgagcagattttaaatcaa

SEQ ID NO: 131915 - DNA, 122 bp, Homo sapiens
ggggggaagcgaggcccgggccaacagcaccaaagacgctcctagagcccagatcggagtcgggggccccagctattcagcctactcccgggttttggagctgtccccagtccacagatttc

SEQ ID NO: 131916 - DNA, 122 bp, Homo sapiens
cagaaacatgataaaacaaaatgtggccgtccgtgaaaaccacctatttgaaccgtgaaacgttagcgacattttacataggtggggaaaatgaaaatcaaatgtctctcaccaaggtggga

SEQ ID NO: 131917 - DNA, 122 bp, Homo sapiens
gtgtcggagccggccgggcggacgcgcgcggggtcgttccctcaaccagcgagctccggacgctgagctaaagacgaaaattggcaggaagagcggcactggccccttaggctccgctataa

SEQ ID NO: 131918 - DNA, 122 bp, Homo sapiens
gactcaagcaatcctcttgcttcggcctcccaaagtgctgagattacgggtgtgagccaccgtgcctggctagaatattaaattagataaaagaaatacatgtaggttagagcagcgtatag

SEQ ID NO: 131919 - DNA, 122 bp, Homo sapiens
agctcttccattttcctctgcttcaaggtgtcaacaacatcagctaaactgcccttgcgccgttcaggagttcccagggctgtactagacaaggactcgccactctgtcgcccaccttcttc

SEQ ID NO: 131920 - DNA, 122 bp, Homo sapiens
gcgggcccggcctgcctctggacacttccatttgctcagacacaaaccctttgctgccaacgggaggtctccaagcaggttcagcattgggcggggacctcggctgcagccctccagctccc

SEQ ID NO: 131921 - DNA, 122 bp, Homo sapiens
tctctgagtctcattgttgggaggtttaaatgagataatgaatttaagcatatagtgcagcgcctggcatgtttttaaaggtccgatgagtatcagaaatcatcagaattgtccattttcag

SEQ ID NO: 131922 - DNA, 122 bp, Homo sapiens
caggtgcagctgtgcgccctcaggcttagaggcttagaattctctgcagcacctaaaggccgtgagcttggattcaaaccagagccccttctggtcctggagtctgggacgaccgcagcccc

SEQ ID NO: 131923 - DNA, 122 bp, Homo sapiens
caatcccttcactccccagaactacaaccgggaatcattcacccgcagaggcaaaggaaacgaattcccaaacgagcctctgggtttcagtttgaatctgggagaggcatactccggactgc

SEQ ID NO: 131924 - DNA, 122 bp, Homo sapiens
aattagacccaagagaataagtccctctgcttgacttgggagcagagaggaagaaagccacggggtgaatgagcaatcattaccaggacaaccgcatctgggcccttctttagcagggccac

SEQ ID NO: 131925 - DNA, 122 bp, Homo sapiens
ggcggcggctccaggcaagacccggtcgtttcgcccccgggacttttacttgcggagctccgcgttcctacggcaccaggccctgaaaaagcccccagtcatcgcctcggggttcggcacgg

SEQ ID NO: 131926 - DNA, 122 bp, Homo sapiens
ctaagaggacgggtccaaaacgcaccgcgccagggagacagttccggtctgtggggtgaccgcgggccagggctgcacttctaagccgcaagtggcacctcctgcgacagtcacaggcacca

SEQ ID NO: 131927 - DNA, 122 bp, Homo sapiens
aagcttctaatctttgcttttctccaataaatacgaatgctgcatggtttgtgtttcctccgtaaagagaatcggaagcaaggagcctgcagtaaatacttctaattaaaggtttttctgac

SEQ ID NO: 131928 - DNA, 122 bp, Homo sapiens
atccccagtactggagggggggcctgctgggaggttattagatcatgagggtggatttctcgtgaaaggtttagcaccatcctcttggtgctatcctggtgacagtgagtgagttctcatga

SEQ ID NO: 131929 - DNA, 122 bp, Homo sapiens
tgtggaagccggcccgatgcggggcggactggggagcgccttgggagacgccaggtgttccgcattttcaaccacagacgcttccagggtgttgttacagccccaagatgaggatgagaaac

SEQ ID NO: 131930 - DNA, 122 bp, Homo sapiens
cccggggctggggagcggaagccatcagtgggctcggaggacactgtcccagccaggacacggccatcggtcactaatctgcagcactggaatgtccgcaggccaatcagcggggtctctgg

SEQ ID NO: 131931 - DNA, 122 bp, Homo sapiens
cgccgcaggacgacatggtgagaaggcgctcgccgcgggacgacgcagtgagaaagccctcgccgcgggaagatgcggtaagaagcccttgcctgatgtgggccccttgaccttggacttcc

SEQ ID NO: 131932 - DNA, 122 bp, Homo sapiens
acctcaggtgatccacccgccttggcttcccaaagtgctgggattacaggcgggagctaccgcaccctgcctgagactttgtcttcagttacaagtgcagtgagtgacgaggggagggaaga

SEQ ID NO: 131933 - DNA, 122 bp, Homo sapiens
ccttccctctccaacccctcactctcccagtcagtggccgcctcatccccattgggctcccggaggctgacagccagcaccaaggcctgcaggagaccaaagaggcaggcgaagtgcaaagg

SEQ ID NO: 131934 - DNA, 122 bp, Homo sapiens
tataaagaccacctgaaagaggcccaagcccgggtcctgagggccacgtccttcaagcgccgcgacttggaccccaacccaggagacctatacccggagtcactggaacaccggatggggga

SEQ ID NO: 131935 - DNA, 122 bp, Homo sapiens
aggggtcaggctcaggcaagggtggctgcggagactcccacaggctggaaggaataggggcgggccacccccaaaaccagtttgtcaaagaattgaaaaggagcaggtgagaaatctcctga

SEQ ID NO: 131936 - DNA, 122 bp, Homo sapiens
gggcatgtgtgagagggaggcagtctccactttagcttgcttctcccattaagtggaaaacgccattatttccatcactatgtactccctcctttgtcaagctcactgaacaagcatcatta

SEQ ID NO: 131937 - DNA, 122 bp, Homo sapiens
ggccccacccccatgccctacaaccccaaatccgcccatttgggccccgcccacataccccgccctccccaggtatatgatgacctaggacccgcccccaccgagccccgcccccagccaag

SEQ ID NO: 131938 - DNA, 122 bp, Homo sapiens
tccctccctgatcaggggcagactgtacttccccgatgtccgctaactaacgtaaagaaacgtccgcgtgctccgctgataccccagggccaccggaggagagcagtggggtgtgagaacta

SEQ ID NO: 131939 - DNA, 122 bp, Homo sapiens
gatgtctcgggacgggtgtgcactgatgtcacgggacgggtgtgcagtggtgtctcgggacgggtgtgagtggtgtctcgggacgggtgtgagtggtgtctcgggacgggtgtgcagtggtg

SEQ ID NO: 131940 - DNA, 122 bp, Homo sapiens
gcagtcctcagcccttgggcggtggatgggaccgggcgccgtggagcagggggcggtgctcgtcagggaggttcaggccgtgcaggagcccacagccggccgtgggggtagactcagacatg

SEQ ID NO: 131941 - DNA, 122 bp, Homo sapiens
tgggagatgggctcactggggacagcacccaagacccaaggggagactcaggaaatactccggaaatacaaatgctccaggcaaggcggctccccaggcccctcgctcctgctccaggcatt

SEQ ID NO: 131942 - DNA, 122 bp, Homo sapiens
agcaggtggcgcgtgtctcctccgggcagattagaatgctttgctcagggccaagaatcccgcaggaattaagggcaactatctgtgcagtcaattcaagtgacacagatcatgccatactt

SEQ ID NO: 131943 - DNA, 122 bp, Homo sapiens
gttttccgtccgcgactcttccggcccagagctttcggagtgcggttgctcaggggaagccgtcgccgcccccgcctcggggccgagtgagagtgcccgtcgcgtcgcgccgcgtcgccccc

SEQ ID NO: 131944 - DNA, 122 bp, Homo sapiens
cctgtgcagggagccatgtgcaggtcggagggtcactggcctcaggtagggcacttgcagcgctgacctggggaggacattgctctgcgggagggcaggcttcacagtggggaggggggctg

SEQ ID NO: 131945 - DNA, 122 bp, Homo sapiens
acgcgtgggtgcaggtgtgcgcgcttggggtgagcccatggttgtgctcgagtatacgggcgcctgtgcacctccagggcaatggtaaagcctggcagagctctttttggaacaaaatgaag

SEQ ID NO: 131946 - DNA, 122 bp, Homo sapiens
cgcggcccgaagctgggcgcgcgtgggcgcggtgagtggggctgggggagcgcaagggcacggaaggaggtgctggccacgagactggtgagcgggcggcaggacaggtgcccgactcaggg

SEQ ID NO: 131947 - DNA, 122 bp, Homo sapiens
cacggatggccagcttcctcctgactgcccccaagcccggctgtgttaagcacttcgcgtcgatataaagcattggtatttgacattttaacagtaacaaacttgccagtgctttacacact

SEQ ID NO: 131948 - DNA, 122 bp, Homo sapiens
ggcgaggctggaggtcgggaaccctgcagtgtcggacccgagctgacagcaagccactcccgctacaggctgacagggaaaaagagaaccaactaggccaggcgcagtgcttcacgcctgta

SEQ ID NO: 131949 - DNA, 122 bp, Homo sapiens
agtgatgcctaaaacagcaaacaaatccaaagtgccaacaatgaatacatgcagcttccccgtccagactcagaccttttgtattgaaggactggaagtgaaaatgactgataagcaggtac

SEQ ID NO: 131950 - DNA, 122 bp, Homo sapiens
gacgaaaagtccccaaggacttaggtttcctcgcgttcaagtgacaatctggggttactccgcgcacctggggaacccagaagttccagatgaccgaggaagggcggtagaaaaggcctgcg

SEQ ID NO: 131951 - DNA, 122 bp, Homo sapiens
cctccatgcagcctcccgccccgcccgccgagctggctgcgcccctgccttcgccgctgccggagcagcccctggacagccccgcggcccccgcgctctctccatccggcctgggcctccag

SEQ ID NO: 131952 - DNA, 122 bp, Homo sapiens
actgaagcgatggggatgatccacacccagaccacgggttacagaggggtctgtccatggcgggcgcagggcgctttctttgcgtcggagggtgtctggagggaaggagaagcctctggagg

SEQ ID NO: 131953 - DNA, 122 bp, Homo sapiens
tcagcagccatgttggcttccagaggagttggctcaatagcaggaggctctctccacagccgagcctgactttcgggctgcaggttaaagttggagtcctatcatgccagcacattcatggg

SEQ ID NO: 131954 - DNA, 122 bp, Homo sapiens
cttaccggtgactactgacctggagggagcattgggccaggcccagggcctgtaaggagacgccagacagatagcgcggtggcctagacgaccactgggcttcttcggcagtctggaacagg

SEQ ID NO: 131955 - DNA, 122 bp, Homo sapiens
acccaagaggcagaggtggcagtgagctgagattgcgctactgcactacagcctgggcaacggagtgaggttctgtctcaaaaaagaaaaagaaagttaagtaggagaggagggtattgtaa

SEQ ID NO: 131956 - DNA, 122 bp, Homo sapiens
agcggggatggttgtcgcaaggggcagagcgaagttgtcaggcggcgagagcttgtgaggcggcaggatgataatgtggcatgacacttctgaaatgagcggcccgttgccatggtgagcag

SEQ ID NO: 131957 - DNA, 122 bp, Homo sapiens
gaaataacaatcttccacataaattaggtcacaaaacaagtaagaaagcattcaaagttgcgctgtctttctttaaagaacccttgtctaggcaacatatttaacactttaaccccttcaat

SEQ ID NO: 131958 - DNA, 122 bp, Homo sapiens
ggctgcagctgcgagaccgaggctgtggtcgccatggaaacgcggctagaggcggggcctcgactctggtcccgcaccctctacccccacccaccgccccggctagggagccgcgcatgcgc

SEQ ID NO: 131959 - DNA, 122 bp, Homo sapiens
tgagtttgtaaggacagtagcagcccaaagactggcatctgtagacacatctggatcttccgtttgatctcagtgttctagtaacggaccctcggtaatcccttcctggtcatcacagcacg

SEQ ID NO: 131960 - DNA, 122 bp, Homo sapiens
aaaccgtgagaagtgacagcgagcactcaccttgttcgggggcggaaatgagggcagcgccgttgtccgacgtgaagaagacgaaggtgttgtccgcgacgtgcaggtcttggaggagctcc

SEQ ID NO: 131961 - DNA, 122 bp, Homo sapiens
aaaatattaacccgaaaattgcaacggctctaagattaggtattttaaacgccatgccgccgccaccatccccaccagcccttgacaccatccgcctgtgtaacttgagctgaacacacatc

SEQ ID NO: 131962 - DNA, 122 bp, Homo sapiens
ggggaaggggtggggaccccgagccgcccggtgccccgctccggttccggctggttgcggcgaagtttcccaactcgccgagagcagctgctgccttctcttgcgtttgtttttcccctctc

SEQ ID NO: 131963 - DNA, 122 bp, Homo sapiens
agctatgctcatgggactacaatacggcctcctcctctcctgagacagggattgggaggtcggggagagcctccaatctctgaggcctggcaggtggggattttcttggccctgcaacatct

SEQ ID NO: 131964 - DNA, 122 bp, Homo sapiens
actgttggggcttcttcattgcctgaacctaactggcacagagcaaggagtctattgaggcgcttcatccaagtcagcttcccagtgcagaaagcaaggtgcaggagggcagagaggagatc

SEQ ID NO: 131965 - DNA, 122 bp, Homo sapiens
cccttcaagagcactggctccggccccagccaccaggacacttagtgaccagccaacaagcgggtggtttaaatactgcactctattttttaaggactctgtgcatggtatttccggtggca

SEQ ID NO: 131966 - DNA, 122 bp, Homo sapiens
cttcacagcagaggcagcgggcattgaacaaacctcagtcaccatctgcttttaacagcccggggaggccggtagtagcgaacagatcgcgtctaccaaccagtttcaccaactagcaggaa

SEQ ID NO: 131967 - DNA, 122 bp, Homo sapiens
taagatgcaaggccgcatacccggttgcttccgtcatcccccccaccacctctgctggcccggagtcatccttgcatggcacggagctgttcctgcgttccagcaccgtgctgggcgctctg

SEQ ID NO: 131968 - DNA, 122 bp, Homo sapiens
agtttagctccctgaggtctgtccccaccacctttccccttgtggtcttagtgtccttcccgtcacagctgtctccgtctgaaaagcagtttccttattagcggggccaactcctcgtcctc

SEQ ID NO: 131969 - DNA, 122 bp, Homo sapiens
agtggaggtcagtggaggtttgcttcctgctcacactgggcctgattgggtcggagggcacgcgggggccgctgtctgtcctccgtggggccttggcttgtgtccaagggagggagacagta

SEQ ID NO: 131970 - DNA, 122 bp, Homo sapiens
tccttcgcgttgccatagtttgcttttttctgtctacattctgtccaatcctggcactctcggaccctccactccacaacacgatagagggtagagggagagacaaatcttgagggctctac

SEQ ID NO: 131971 - DNA, 122 bp, Homo sapiens
tctggggtagaaggtgactggacgagcccagggcagcctgccgtgcagacaggaagggagcggtcaccaacaccagagtacaccaacagcactccatgagttcacggggacatgaacaataa

SEQ ID NO: 131972 - DNA, 122 bp, Homo sapiens
ctggggaaagcgggaacttgcctcagtgctcacacaggatgccagacccccagcagcactcgccctacgccccagcctagatttcagcccgtgtccccgagacaggtttccaaatggagtct

SEQ ID NO: 131973 - DNA, 122 bp, Homo sapiens
tttccagcgtgccacacaatatcatgatacttacggttctatgattcacactcgcagtttcgaaggaaacctctgctctgtgctgattattccaggaccaaggcttaatgcgtgggatgtta

SEQ ID NO: 131974 - DNA, 122 bp, Homo sapiens
tcccaggtccgcagctgtgcgaaggaccaataagaggcctttttgaacagtgacgccaggcgccctggcgctgcccccaagctcgtgcctcatttacagcctgcgggcgggagtctccttgt

SEQ ID NO: 131975 - DNA, 122 bp, Homo sapiens
ataaacccccaggtttctggattgcatatttggatggacaggatgagtggagaagccccacgtttgtggggaagatgatgaggtcactctgggatatcaggtagacatgcacagtaagcagt

SEQ ID NO: 131976 - DNA, 122 bp, Homo sapiens
tcttttggccctttgggctcacaccactgatacctctgaccctgatgacaaatgccaattcgggttctgcaggcacaaaaaagttgccagcttttcttgccatcctagcctttcaaatttca

SEQ ID NO: 131977 - DNA, 122 bp, Homo sapiens
ctgcctgatcccgctgtctgtgtccttgcagtgtgagtggcagaatcccttgaagaagaccgagccagtgacctcgtttctgaaataaaaggcgggaagtgagggagccagtggtcaccggg

SEQ ID NO: 131978 - DNA, 122 bp, Homo sapiens
cctggtcgataggagcgccagagccggtgtttcagcgtgggtggctgtctctctccaggacgctggagctacggaggctacacaaacggacaagaagagaagggccctggtcctccccacac

SEQ ID NO: 131979 - DNA, 122 bp, Homo sapiens
ggttcctcccacattcttggccgcggcgctgcgggcggcgacgggctaaagtttcagtcccgttgggtcttggccgtctgccgggtgcttactgaaactttgattttccctggggctagacg

SEQ ID NO: 131980 - DNA, 122 bp, Homo sapiens
cctaccacaacccgccacgctccgtccaatcagagcgcgccgacggaaagtgccccgccgcgccttacctcatgagatattattggtcaaccaacatgccagtcaaactgaggacgaatccg

SEQ ID NO: 131981 - DNA, 122 bp, Homo sapiens
cggagctgggtgctggggctggtcgtgcagcacgtgaggggcctggtcctcgctctcgggcgaggaggcggccgcacaacctaccgcccccagagaaaaaatgctctcctctctctctgtgc

SEQ ID NO: 131982 - DNA, 122 bp, Homo sapiens
tccccactggtggcacggaggcctgctcaataaacgacctttagtctcggattgccggcccggacattccactgaattctgtgaatgtgtagcagggttggaggaccctcggaataaccccc

SEQ ID NO: 131983 - DNA, 122 bp, Homo sapiens
tcagagggtcggcctaggcaggttccccagtccgctggcccgggacgtcctcctctctcccggccgctcactgttcaggacagcccgggcccccccctggggccttgcaggagagcttctgt

SEQ ID NO: 131984 - DNA, 122 bp, Homo sapiens
acttggcctccacgtagcccagctcccggcagacgacgtgggcagcgtggatggagaagtcgtcatcgcacacggtgccccactggccatcatagtacacctccacccggccctcgctgtgc

SEQ ID NO: 131985 - DNA, 122 bp, Homo sapiens
ccggagagaagatcaaagccaaaatcaagaagaatctgcccgtgacgggccctcaggcgccgaccattaaagagctgatgcggtggtactgcctcaacaccaacacccatggctgtcgccgc

SEQ ID NO: 131986 - DNA, 122 bp, Homo sapiens
tcaaaggaaaaaataaaacttcctaaccaaattgaggcttacagaaaaacttaggctctacgcccaaagcctgcgtcctgggctctcgcgtaaatataagtgactgaggaacaccgcgaccc

SEQ ID NO: 131987 - DNA, 122 bp, Homo sapiens
ctcagcggtggagctggggggcggcgcggtcacgtgggatggcgggcagctcaggggatccgggcgacggggtctggcgggcagggttgttccagccgcctttataaagccggcctccccga

SEQ ID NO: 131988 - DNA, 122 bp, Homo sapiens
catccaatccaaggacgtgtttcagactctgctgcccggtcccagccagccctgagctggcgccttagacgctcgcctggcagctgcgcacactcggagcgccccgagcggcgcagataggg

SEQ ID NO: 131989 - DNA, 122 bp, Homo sapiens
tttggaggccaaggccgtgcgtgcctctggagcactgtcttcccgggctgctggtggcagcgaacgcacaaggctgggacgtcttcaggcccccagcactcagccttgccctaatggtgcgc

SEQ ID NO: 131990 - DNA, 122 bp, Homo sapiens
gcctctgggcggtgggtggagtggggtgcacggtcacacaggctgagagggcccccaggacgcccccatcccacagttcccactccagtctgctgtcttctcccagctttttcccagcgccc

SEQ ID NO: 131991 - DNA, 122 bp, Homo sapiens
gcctgcacaccagaccccgcgagcgccgtgcttaactacaggggtccgtggcctcctgtgcggcctgacgtttccccaccgctcgtgacctcgagtgcctctgggcgctgcccttagttgca

SEQ ID NO: 131992 - DNA, 122 bp, Homo sapiens
ctaagctcacagacctcaggggagaggtcagggaaacacagggccagcctgtgaggcccacgcctcatgcctcgtgagtcaccgtgataactcagggccactggggagggcagggccagagg

SEQ ID NO: 131993 - DNA, 122 bp, Homo sapiens
gactgatgaaccaccggagagctgtcctcttggaaggtcttcaccgagagctgcaccttccgggtcaccaggtccgggctgctgccgctgacgtacttgtggcggtggctggccaggtctgg

SEQ ID NO: 131994 - DNA, 122 bp, Homo sapiens
aagagatttgaaggggagggatgagaagacagggagctggcaaataaatgaagccctgttcgctcttaaatcactttgaatggtaagttcttggtgctcattctgttcttccacctcaggct

SEQ ID NO: 131995 - DNA, 122 bp, Homo sapiens
gatggtgttcacgtgggttggtttgtttccctcatcagttctgggtggaggtgcgggcctcgagttattgggagtgagtcactggcagcagtcctctcttggatcctcaggcagcctcgctc

SEQ ID NO: 131996 - DNA, 122 bp, Homo sapiens
acccaggtccaactgtctgaccttgggctacttacctccccatccagttgaacacactgccgctgtgagggcagacccaatgtgtggttttgaagggtgccagcttgtgaccctaagcagta

SEQ ID NO: 131997 - DNA, 122 bp, Homo sapiens
cggtgggggcccaggcaacagggcccaagcatgtgcgtacccctccgggcagtgacagtgcgccgcctcagctccaaccccaatcccggataggagcagacgcaagaatggggagaggccag

SEQ ID NO: 131998 - DNA, 122 bp, Homo sapiens
ctgctgcccttcctggctgtggtggccagctactcggacatagggcgtcggctacaggcccggcgcttccgccgcagccgccgcaccggccgcctggtggtgctcatcatcctgaccttcgc

SEQ ID NO: 131999 - DNA, 122 bp, Homo sapiens
gcaccggcacccgttccgagggttcgcgccgcaggcgcaaagtttagggtcagccacaaacgcgcggccgctttgagcctggcgtaaggggcggcggcgtagggggacgttgtgaatagctg

SEQ ID NO: 132000 - DNA, 122 bp, Homo sapiens
gaacacgcggggctttccaggccgcgggggacggtggcgggtgtcggggcgcggtggcaacgctggagttcccgggtccaccggcgcggtcagccctggtgacccaagccaggggctgggga

SEQ ID NO: 132001 - DNA, 122 bp, Homo sapiens
tgcacacttggagccaggctgctccaggcccccggatgccatgccaagcacgaatattaacgccattaatattcgtggctgcctggcgaggcttgacggggtggcggcgcctgctagtccac

SEQ ID NO: 132002 - DNA, 122 bp, Homo sapiens
atgaagtatttgtgggtgaaaattcagtttgtctggaacgtaaagatgttggagggatagcgtcaagaattatggcaagacattgataatagttgatgctagtactgagtaattgcaggtta

SEQ ID NO: 132003 - DNA, 122 bp, Homo sapiens
gccaaccaccacccgcggccaccatggccggacgggctccctaagccaccgaccccagcccgcggcgccttcgagccttctcaacagcagttctttctgctgaacagcatcttgtagtctgc

SEQ ID NO: 132004 - DNA, 122 bp, Homo sapiens
tcagaggcttcccggcagcaagatgcgctgccaagagtcttagggctgggtaggggctggcggcagtgtggggctctttcagctcctgggcaggagtgtgtgggggggcatgaaaggctgtg

SEQ ID NO: 132005 - DNA, 122 bp, Homo sapiens
cctggagccaagcgcgtggggctcttgtgagcaaggggtctgctctggcacgcccacctccgtggtagtgttttcatacctgtgtcacacagggtgagaaacatgcttgatgctgcagctca

SEQ ID NO: 132006 - DNA, 122 bp, Homo sapiens
cagggacggcggggcgggacatggcggggccgcacgcaccgggtggacgacaggggatgccgcgggctcgcgtcagccagggcgccaggcagggtcccagatggcaaatggggtcttgggtg

SEQ ID NO: 132007 - DNA, 122 bp, Homo sapiens
atggagtctgggctccagggaatttagggtctgggttttgaggatctggggtctgtgttccgcggatctggagtcggggttttgaagaacctgaggtctggcacccctcagtccttagacga

SEQ ID NO: 132008 - DNA, 122 bp, Homo sapiens
attgattggggtggtgtctggaaggcttcaaagagacagtgaaggactagctggatattgcgtaatacctaggagtttagcaggtaaagctgtaggtgtaaaagtgttggggaccagcctca

SEQ ID NO: 132009 - DNA, 122 bp, Homo sapiens
gttcattcacctcgcggaccgagggccccgccgtcaggagccggcgaccgtgccctggtgcgagctggtctgtatgtcctcactggtccttttgggactttgccttggcctaaaagggaagt

SEQ ID NO: 132010 - DNA, 122 bp, Homo sapiens
ctgtctcagacccaggctggagtgcagtggcctgaacacagctcactgcagcctcgacctcgcgggctcagacgcacatcccaccaagtagctgggaccacaatgtgccaccatatctggct

SEQ ID NO: 132011 - DNA, 122 bp, Homo sapiens
agacagcaccaaaaaggaagaagatgcttcaagttgttcggacaaagtcgagagtctctccgatggcagcagccacatagcaggcgatttgcccagtgatgaagatgaaggagaagatgaaa

SEQ ID NO: 132012 - DNA, 122 bp, Homo sapiens
tttcagagcaaaaatacatatatgttggtgtgggtggggatgtcccggagtacgtgggggcgagggtgcctgcgtgcctcctgatctgcaaggatctatctagtgtgtgtgcctgggagtgt

SEQ ID NO: 132013 - DNA, 122 bp, Homo sapiens
ggctcaggtgatcctcctgcctcggcctcccaaagtgctgggattacaggtgtgagccaccggacctggcctggaagctcttgaacatattgcttatcttctgtggacctcagtttcctcat

SEQ ID NO: 132014 - DNA, 122 bp, Homo sapiens
ctgcactgtcccggagcgggccatggtgtggggtctgactcaccgccgcacggagcccgacggagtccaggatccagatggccgccacgccaaatggggtggataccacgaggtagaccagt

SEQ ID NO: 132015 - DNA, 122 bp, Homo sapiens
cagcgcagtgccgagtgcagaaggattgatgagcatttgctgagccgggtgatgatcccacgggcgttgtttcctctgccctcagtctccagcctgcagacgcctgaatggattctggagag

SEQ ID NO: 132016 - DNA, 122 bp, Homo sapiens
acagatctgatccttccgagcctgcagtctctagccgcgcgcccccgcccccacccccaccgccaagccgaaaacccaatcctgggcccacccatttgcgtggatgccacagctcggccgga

SEQ ID NO: 132017 - DNA, 122 bp, Homo sapiens
ccctcccccggcaagtcagtacaaatgctttaccccttcaacataaactccattttcccgcgtagctctgcgcagattctcgaggagactgcttccggctcagggacgccaagtgcagcagc

SEQ ID NO: 132018 - DNA, 122 bp, Homo sapiens
ggggtggaagcaaattcctcctctggctgaggaccaggctgacgtgagcccagaggaactcgacccccgcccgtgggtgttgtctgcgccactccctgccccgggtttcatcctgcctgcct

SEQ ID NO: 132019 - DNA, 122 bp, Homo sapiens
ggggcccccagccaccagtcatcacatgagcatacaaaagacacttaactctgcagattccgctggatgtcagggattggggataaagaccaaatacatatttcacaatatcatagcacgtt

SEQ ID NO: 132020 - DNA, 122 bp, Homo sapiens
aaaatggcagatggttaacatcatcagctcttccaaatctcactaaaatgctcaggaagacgcaaagaggagacacggccctcctactaaggaaggttccgctaatctcggactgactccta

SEQ ID NO: 132021 - DNA, 122 bp, Homo sapiens
cgactgctccgccgcccgtggctggggtgggtgtgagcggcagcggacgccggcggggaacgcgctccgggcaggtcggggccacaggagggcggaggacgcgggcctcgagtccacggaat

SEQ ID NO: 132022 - DNA, 122 bp, Homo sapiens
ggaccggcttccatcaccaatgtccacgcaggatgatgacatcactacagctctatggaccggcttccatcaccgacgctcacgcaggatgatgacatcactacagctctacggaccggctt

SEQ ID NO: 132023 - DNA, 122 bp, Homo sapiens
gcccaggaggccatcccacgggagccccgccagcccccgccggagcccgagctgcagtgccgcctacaagtggtgcgctggctgcagctgtggcaaccccggatcccgtcctcccgcctcgc

SEQ ID NO: 132024 - DNA, 122 bp, Homo sapiens
gacggcaagggccggagggccaaaagcaaggagcgggccaaggctggggagcccaaacggcgcagccgctccaacatctcaggctggtggagctccgatgacaacttggacggcgaggccgg

SEQ ID NO: 132025 - DNA, 122 bp, Homo sapiens
atgctaactccaccttctcagctcagcaggacactaagttctgcctggactccagctcaccgtgcagtgattacaaaactgtccccaggaagagggtagggagaggggcagagggtgaagtc

SEQ ID NO: 132026 - DNA, 122 bp, Homo sapiens
ttacggtccagggggaatgcaggcaattcccctctggctgtcagtctccctatcccctgccgcgtctccttcgcggggcgatgggtctcagagccacccccagccaaagaaaggggcacgct

SEQ ID NO: 132027 - DNA, 122 bp, Homo sapiens
cacccagaagcctttccccagtgatgggggcgttgtcctctttaacaaagtgctggtgaacgacggggatgtttacaaccccagcaccggtgagtgtttgaacggaactggtactgtgtcct

SEQ ID NO: 132028 - DNA, 122 bp, Homo sapiens
ggaaaataccaaccacagaaaccaaaatgttcacatctgctactcaggcaccctctcccacgaagcaagctggaaatgctgacacattctgcagctctcccttggctgtaatctgggcagac

SEQ ID NO: 132029 - DNA, 122 bp, Homo sapiens
accaaaatgtggagaggtgggggagggggcgcgcagccgcatcttccaggtgagcctgggcgtgtgcgagccagagctcccgcagtctaatctgaagtagagcagtgaaggcgtgccgggct

SEQ ID NO: 132030 - DNA, 122 bp, Homo sapiens
ctgcagcttcactcctgagccagcaagaccacgaacccaccagaaggaagaaactccgaacgcatctgaacatcagaaggggcagacaccagacgcgccaccttaacagctgtaacactcac

SEQ ID NO: 132031 - DNA, 122 bp, Homo sapiens
gctgtatataagaagtcaactcagaaactgccaaaacacttgcattaatttgtgagaacacgatgattaaggaaattaaacacttgtaccctttcgcctaagatttcaagaaataattttta

SEQ ID NO: 132032 - DNA, 122 bp, Homo sapiens
cctctccccagcagccctggcctgccccctccctctgatctcaagaaatagctggggggtcgggggaggggacactgaagggaagaccaagctaggaaaagctcctctccaccccctcccag

SEQ ID NO: 132033 - DNA, 122 bp, Homo sapiens
aagctcttaaaatttacctcccatgatctcttttccagaaagctattagagaatgtgctccgataaaaccaagaaagacaaagatatgggattcaggaaacaagggatacaacttagggaaa

SEQ ID NO: 132034 - DNA, 122 bp, Homo sapiens
atgccagccacacaggactccttctgagaggagttctggaaattataattttctggatctcgttgcatttcatgggagtttggaagctcattataaattggtttcccatgcagcggctgggc

SEQ ID NO: 132035 - DNA, 122 bp, Homo sapiens
ccacacacacgtgagtgataccctgcactacatcatgaccatcaggacatcaccaggtgacgggaatttttcggcgccagtataatcttacaggtccaccctcgtctatgccatccatcatt

SEQ ID NO: 132036 - DNA, 122 bp, Homo sapiens
tttcactatgtgcaccagggggcgctgccgcccgccttggccatcccgggctgggaagtccgacccttcgattaagccccgcctgattgggaaaggctctgagaaactatttgcatgatctt

SEQ ID NO: 132037 - DNA, 122 bp, Homo sapiens
caaaggcaggatcaggaccctggatcagaatggggtccacgcgtgagtctctgtaattaacgctctggtgtctcaaattacgagaaaatatataaaacatgtaattgcttctgtattttgga

SEQ ID NO: 132038 - DNA, 122 bp, Homo sapiens
tagaggccaagaatgctagcccaagggtgaaggaagcccaggaagatttcaaggaagagacgaacacctcagagctgggctttaggaagggccaggggaaaagtggtagattagagggagga

SEQ ID NO: 132039 - DNA, 122 bp, Homo sapiens
ccctactctccatcttcgttagagtgatggagtccctagagggcttactagagagcccatcgcctgggacctcctggaccaccagaagccaactagccaacacagagcccaccaagggcctt

SEQ ID NO: 132040 - DNA, 122 bp, Homo sapiens
tttcacacacatacacaaatgcactgctctgctcctcaaagcatgctgataagaggtgcacgttaactttcaaaatcacctccagatagatacccaagcatatagagattaaaaacgacact

SEQ ID NO: 132041 - DNA, 122 bp, Homo sapiens
agagaaaacaactgaagcacatttcggttcacaaaagaacattcacatgttcacagacctcggctttcatctgtcggatcacagttcgtttttgatgaactgtgttcatcaaccgcccccca

SEQ ID NO: 132042 - DNA, 122 bp, Homo sapiens
agaaggctgaagatgaattgatccactgaggctggagtgcaggccctcattctccgctcccgggagaagcctgtctctgtgcccaaggaaggaaagaagctaagaaactgagcttcaccgga

SEQ ID NO: 132043 - DNA, 122 bp, Homo sapiens
cttccccggaagacaaggataatcctagaggacgagaatgatgccatggccgacgccgaccgcctggctggaccagcggctgccgagctcttggccgccacggtgtccaccggctttagccg

SEQ ID NO: 132044 - DNA, 122 bp, Homo sapiens
tgctgtctgatataaacacagcgtcaagtactgcacgctgtagctacctgaggtttaggccggaagaggcacggctgatttaaaagtgaaagaaagtaaccaattggttcgcagacaacctt

SEQ ID NO: 132045 - DNA, 122 bp, Homo sapiens
accctccaatgaagggttaaatttcactgtgcctgctggaggggccaccaggaattgccccgcctcccatcagctgggaaacatgggctctctgacttccctgattccttcagttccctctc

SEQ ID NO: 132046 - DNA, 122 bp, Homo sapiens
cgtcattactcggcagagggtgtccagcctggtcggccgacgtcacagtggatggccctgcgtggctgggacacagacagggagcaggcatggcacctgcgccacgcagagcagcaaggctg

SEQ ID NO: 132047 - DNA, 122 bp, Homo sapiens
cggctgctgcagtcacggctggtggagtggtgggcccaggagcggggctggcggctggcacgagatgccctatgccactggcactcctgttggcagggtgagtggagacttggtcgggggca

SEQ ID NO: 132048 - DNA, 122 bp, Homo sapiens
taatctgcacccgaaattcctggatagagcagccttcttcgggatgttctaatctgcacccgaaatttctggatagagcagccttcttcgggatgttctaatctgcacccgaaatttctgga

SEQ ID NO: 132049 - DNA, 122 bp, Homo sapiens
ggatgtatttcacagcacttcacagtctgctcagccctgtagtaagtaggctgatagaggcggtatcttcagggagacaggcaagcactcattgttcaccaatactgatttcatcctcattt

SEQ ID NO: 132050 - DNA, 122 bp, Homo sapiens
gtaaagaaattctcttgtctagtcaagggcagggagggagttctgcactgttgcaggggacggaggagggggttggccactagcattaggtaaaactgctgaattgagcccagcatgtggaa

SEQ ID NO: 132051 - DNA, 122 bp, Homo sapiens
tctctggattgggaggaagaacatgttcctaaacacatttgctcactgctagggaggcggcgcctcttctgagggaagccactccctcttcccacagcctgctcctggctttattgctcctc

SEQ ID NO: 132052 - DNA, 122 bp, Homo sapiens
ggacctctaggtcacctaagcagaaactgctgccatcaaagcagactgccaccatgcatccgcggagaactccctgcctacaaatgaaactggtagcgctcatcccctgtgcccgaggaccg

SEQ ID NO: 132053 - DNA, 122 bp, Homo sapiens
gagcgacccgcagctccggggcgggcccgagcggaaggaggcggtgctcgggtggcttagcggtgcatgggttctgctgggggcaacctcgaggttcccctggagactcccccgcccgcccc

SEQ ID NO: 132054 - DNA, 122 bp, Homo sapiens
acaacttgcattttctcattttatttttgcagtagctcctcctggtggggtctcttcttacgcctattttgcagatgaggaagcagaggctgggagaattggaggattttgcccaagatcat

SEQ ID NO: 132055 - DNA, 122 bp, Homo sapiens
aggcactgggcatgtggctatgcagccgtgacaaaggatgaagccatcccgtggccagggcgcagagtgacctcccagatctacgtttcatgtggcgtttctgccgtgtatttttaaacccg

SEQ ID NO: 132056 - DNA, 122 bp, Homo sapiens
agatgaaacagaatggtgactacattcaccatattttagtttaagtatttttgtgttttgcgcctgaaagggcctagaaatggagttagggaagtgaagacccctataaagatttggggcta

SEQ ID NO: 132057 - DNA, 122 bp, Homo sapiens
gctgtaaaaaccggagagggaatgattggaaatgtggagggggcagatcaagaactaagacgaagagtttagcctgaagagtaggagggagattttctttgtaatgtgagacaaggtagcaa

SEQ ID NO: 132058 - DNA, 122 bp, Homo sapiens
aatggtctttgatacccctaaatccttggaaaatccgaattgcatatgctaacctcactgcgtctgactgcagacccggctggaagccccctggaaccaggcccaagcctccccaccatgaa

SEQ ID NO: 132059 - DNA, 122 bp, Homo sapiens
gtttgatgttcaggctgggacttctgagagtctcatggaactttctcgtcactatcttctcgtccctgacctctctcctagccaagcaagcttcttcaccaagataggataagagagatgtg

SEQ ID NO: 132060 - DNA, 122 bp, Homo sapiens
caagtttggctctgtgctggttgctggagtcctcgaaactgaaaacaaatttactcaccacggaggtggagcccggccttaatcctagttttaaacctgggaccttttgctagacgatggga

SEQ ID NO: 132061 - DNA, 122 bp, Homo sapiens
gtgctgacgtggggcacactgcgtgccttcaggaccgctccagtcgccctgcacaagctccgccctggccctgcctccctggggccgccgaccacaaggaggctagactctgctgagacaaa

SEQ ID NO: 132062 - DNA, 122 bp, Homo sapiens
aagttggcgacattgctgccttgtctcctagcttccacgttgctgcagaaaatctggtgccgtttggattcttggtcctttatatgtgtgatctattttttttttgttattcctattcagaa

SEQ ID NO: 132063 - DNA, 122 bp, Homo sapiens
caggagctccacacagagcagtgtgttcattcagtcagtcaacaaacactcactgagcatcgctcaccatgagccagccctgctggatgaagagaattccaagacaagcctgacagagcccc

SEQ ID NO: 132064 - DNA, 122 bp, Homo sapiens
gtttgttgaatgccaattgcaaggcaggtactgtgtgttgggacttgacatatggcagcccgcataagtttcagtcctcacaacaatactcccatgtgggtattattactattatttattta

SEQ ID NO: 132065 - DNA, 122 bp, Homo sapiens
ccggactccgctggcgcgaggtccctgagtcagcggcgctcccgcccgcgcgaatcgctccgccccagcccgcgggctcggctcctcgcacctgcccactgtcccccggcctcgcactgctc

SEQ ID NO: 132066 - DNA, 122 bp, Homo sapiens
ccacagccctccatcctgcaagggaacagggctgcactggcaacagtggcaaagtctctgcgtctttgctcacagacgagctttttcactaaccggaccagcttcctgaaggcagggacagt

SEQ ID NO: 132067 - DNA, 122 bp, Homo sapiens
ctctcttggtggtgagagaccacatccatggactgtggaaggagaacattttctaaaagacggggatcccttgggctaaaatgaatgatgctcatgacccccagctagggcagggctataat

SEQ ID NO: 132068 - DNA, 122 bp, Homo sapiens
cggagcccatccaggttcggggacgaacaactgcttggtgtcacaactaaactgtgcagacgtcgccgtctttccctaaacgacacggcacgagaaacctactttcattttttatctgaaag

SEQ ID NO: 132069 - DNA, 122 bp, Homo sapiens
cagagacctgaaacagggcggtgtatcatctaaatcacagagaaaaccagctctgcttaccgtagtgagatcacttcataggttatgcctggacttgaactctgtcaatagcatttcaacat

SEQ ID NO: 132070 - DNA, 122 bp, Homo sapiens
aaaaaaatgtccaggttaccttttcatggaaattggtatgcaccctgtgggcatcaagctcgcgtggaaacgttcgtgttacccagggaagaattaggagcacgcacaaagcggggacgctc

SEQ ID NO: 132071 - DNA, 122 bp, Homo sapiens
aagatctggttctccattctctcttattaacaaggagaaccacaagtgccccccagatcccggctagaaggaccagacagctttccaccccggttcccaggcagccctgctcccatagtcct

SEQ ID NO: 132072 - DNA, 122 bp, Homo sapiens
ggtcgggtgggggtgggggtaggggttgcaagggcctcattttttcttactgcccccatccggttcggggaggtggcgggaccttggcggcgcccggagccggcgtggcgctcatcgaggga

SEQ ID NO: 132073 - DNA, 122 bp, Homo sapiens
acaactcattccaggtcacctatagcctatgagagaggaagaatatattttgacaattatcggcgctgtgtcagcaggtaactttttattgataattttgctgtaattcacctcactgttga

SEQ ID NO: 132074 - DNA, 122 bp, Homo sapiens
gcgggagaggacggggccgggtggggaggaaggcggggcctgaggctgtgcgaggcgagtcggtgtgtccctggctgggacggaagttgcaccacaagtacaattagtttcagttttgtttc

SEQ ID NO: 132075 - DNA, 122 bp, Homo sapiens
cagttcatttgaaaaataaatacaaatgctcctggattgatggctacttcccatacccatcgcaagttggtaatatcctaagtcaaaaggcgagtttaactttgtgtattttcaacttgcaa

SEQ ID NO: 132076 - DNA, 122 bp, Homo sapiens
gagaaatgtactcacccatggtaaactctggccacacatattccagggatgtaactctctcgaccagtgctaagagaaatagctttccaccagcccccttcactgtaagaacaagaacagag

SEQ ID NO: 132077 - DNA, 122 bp, Homo sapiens
aagtttccaagttggcaacaaccagaatctaggaggaggcaacagcctaaagagagagcacggctctgccaactccttgatttccaatttctagcctccagagctgtgagaaagcaaatgtt

SEQ ID NO: 132078 - DNA, 122 bp, Homo sapiens
ggaagagccgcagcacggcctgcaccagctcgctgttgggcggcagccgctgctccatgccgaacaccagcaggtgtgtgctggcctccaacgccaggaacctgccggccacctctggggac

SEQ ID NO: 132079 - DNA, 122 bp, Homo sapiens
aaggacaagctggaggggtcctgagccggtggggaatagagaaaggccctgcaaggtgcccgggcccacaaacaaaagaaatggcttctgcccacgggcccgaggattgagtagatggaaag

SEQ ID NO: 132080 - DNA, 122 bp, Homo sapiens
gtgcaggcccatgtcccctcccacagtagggaagacagctgccacgggaggttaatagcccggagtgaggtcactgagacatgcacaggcaggctggttcagctgggctgcagggcacgggc

SEQ ID NO: 132081 - DNA, 122 bp, Homo sapiens
tgtctttcctttatctgtatctcttgtctgtctgtctgtctatctcttgtctccctccctcgctctctctccttctcttctgctattaattttccctgattggctccccagctccagcgccg

SEQ ID NO: 132082 - DNA, 122 bp, Homo sapiens
aggattaaggatgaactacagaaacttcaaaatgttaggaaactttagcattctggtgcccgcagtatcctctcccacccagattccatggcaaaaggaaaaagaaaaaaaaaagagagaga

SEQ ID NO: 132083 - DNA, 122 bp, Homo sapiens
ccctcgcgcagcagcgcctccacgggcagcccggggccccaccccacgcactgaagaggccgcctgggctgccatggccctgaccttcctgctggtgctgctcaccctggccacgctctgca

SEQ ID NO: 132084 - DNA, 122 bp, Homo sapiens
ggggaagcagagacagttactgacctgtacccagaactgatgacgacacagtaatgcgatcgcccagacactgcggtgctgcctctcctcactcgaccccctcttctctgtaatgtagacat

SEQ ID NO: 132085 - DNA, 122 bp, Homo sapiens
gcaatagagataccaacccgggaatctccgcaccaccccccaagaggaagcagcgtctgacgtcttccggaaacgagctccactggccttatgggaaatgtggtctccgacggatggcctac

SEQ ID NO: 132086 - DNA, 122 bp, Homo sapiens
caggtctttgggggttgacagggccatgagatgggaggagcttgagtaactgaatgacctcgtggagcagagcctgtcagcctcaaacacactgtacaatgacctgagtgagcagaaaacct

SEQ ID NO: 132087 - DNA, 122 bp, Homo sapiens
gcatgtctccaccgaatccatttagagaaatgtcagagcgagggttgtgtggacacccctcgctctgatgccaactgcagataatacacacctcctgcagcgtccagccacggctccagggc

SEQ ID NO: 132088 - DNA, 122 bp, Homo sapiens
tattttgaggcagtctcctagaagtcctgggagactctgggagctggtactgtgtgcaggcgcgacctatagctctgcctggtggatctgcaattcgatttcaggcctttttccccctcggc

SEQ ID NO: 132089 - DNA, 122 bp, Homo sapiens
gagctattcaaatacaatacaatctatatgccttccacctgagcaaccaagttcttacagcgctaactagagaaggtgcaggggagggggggaggactggataaagttatttttgtggcagt

SEQ ID NO: 132090 - DNA, 122 bp, Homo sapiens
gacataaaaacaaaagatcagctgtccatggcccaacaatgaaaatgtactttgaaatgacgattatgattaatcaaccctttccgtttgagattctcaaaaaaaaaaaatacaaaaaataa

SEQ ID NO: 132091 - DNA, 122 bp, Homo sapiens
ttccctgaactctgagcctaatcctccctgcatggcagccagcacccccataagtctaggcgctctatcccagaagcagggccagaagggctcaaatcagcccaatttgcttttgcagagtc

SEQ ID NO: 132092 - DNA, 122 bp, Homo sapiens
aaaaaatatgaagcttctttgtgtggactgaaggggtgttagcctgtggatgttggtcttcggtgcctgtaccccagtggctgtttacattccaggcccctgctaaataaagcaggctccac

SEQ ID NO: 132093 - DNA, 122 bp, Homo sapiens
tccgcgccaagttagttcacgctcccaactcctgcctgcctccccgcgctgccgactgtccgcaggaccggggaggttccccatcggcagtccccaacctatcccggtcctccaggctttcc

SEQ ID NO: 132094 - DNA, 122 bp, Homo sapiens
gggtaccatgctgcctgctaccacagcatcttcagggagggtcacagaagaggaggaaggcgctgaacccagattcccgcctgctgtcagcgtcctaggccagggagggctctggttataac

SEQ ID NO: 132095 - DNA, 122 bp, Homo sapiens
cttcggaggaaaatttcaggctgaaggtttagcgggtgccggtgagtggggaatgagtggcggagagtgcggcattcttcgcaaggtgtatccgggaaccctctgcagatcctaattgattt

SEQ ID NO: 132096 - DNA, 122 bp, Homo sapiens
cccgcgcgggatgtaggctttaatttagaaatctccgccccaaaactggcatcttgaacgcgggagggcattatgagttagaggccccggtttttctccatttatccaaatcaggtagccga

SEQ ID NO: 132097 - DNA, 122 bp, Homo sapiens
taagcaatgatatatctcatgaatattaacagccacttcactagaattattttggagatccgtagactctttgagaaagcaaccacctggaaggatgcctgacaggaaactgccaggacaca

SEQ ID NO: 132098 - DNA, 122 bp, Homo sapiens
tttcagaggcttggtatcagctgttggccctaactaggaaggcctctcactgctgcctcccgtcatacacagccaatgggcactgggagcccagaagttgagcctggcttggcctagcctgc

SEQ ID NO: 132099 - DNA, 122 bp, Homo sapiens
agagagaaaagggacgtgctgcagggtttatcagagaagccaggcaggaaggatcagggacgcagccatccactcaggcaatcacaggcagtgggttgggacccccgaaaggaaaaaaaaag

SEQ ID NO: 132100 - DNA, 122 bp, Homo sapiens
tgaaggagaggcgattcaaagcagggagtgtgatgaataggtcaactctgtcctcgcagccgtccctgagagggcgctgttcccaaatcgaagccccagaggcggagactgagacaccggca

SEQ ID NO: 132101 - DNA, 122 bp, Homo sapiens
aaccctcctcctgctgttctcgggagccgtggccctgatccagacctgggcaggtgagtgcggggtcgggagggaaaaagcctctgcgggaaggagcgaggggcccgcccggaggagtaaat

SEQ ID NO: 132102 - DNA, 122 bp, Homo sapiens
agggtgcctgggagagaaggtgtctcaggccctgaccatgccacccttcctgcccgcagacgctggtgacatgatcgagatgcagggctttgggcccagcctgccagcctggcacctggagc

SEQ ID NO: 132103 - DNA, 122 bp, Homo sapiens
aagaaaggctgatgggccggcgcggcggcgagggaggaccggccttgataaatgtcagtgcggataattggggggctgtgattaagatcttatctaggtgggaagtaaacagaaaagacttt

SEQ ID NO: 132104 - DNA, 122 bp, Homo sapiens
tggggtgagtttgcagggctgactgctgcagggggaggtggtgctgctggttgccctccacgcggggacgctgcactccaagagcagctgtcacggggtcagggagagtcatcttgggatcc

SEQ ID NO: 132105 - DNA, 122 bp, Homo sapiens
atggtggtgagttataccaaaatgcatgtagatgtgtgcatgtgattggtgcttaaattacgcagtccgccatgccacaggaggaaacagccatggcctgaccattagggccaaggccaaat

SEQ ID NO: 132106 - DNA, 122 bp, Homo sapiens
caagcacacgacaatcttggccctaagtgctcacccattcctcatgtgaccctgacattccggggaactgggaaacctgttccttaaaggcaacaacagtcctttctttcctctcacaacaa

SEQ ID NO: 132107 - DNA, 122 bp, Homo sapiens
gagggagggagggaggaagagggagagactcagccaacgacgtcatcggatcccccagcgcgtcccagggagggaggctgaaccagaaaaaccagtctggagccagtgagcgagagagggat

SEQ ID NO: 132108 - DNA, 122 bp, Homo sapiens
gcagtaagcatttcaaaatgcaaacaaactgcttaacaactgacaagacaccagcccatacgctgctcttccaacagtgggttctagctttgaacaaaagtgctaaacatttccttgaatat

SEQ ID NO: 132109 - DNA, 122 bp, Homo sapiens
gggctcccagtgcgcccaatctattgttattttttaagctcagtgagacatcagggaggtcgctgcttgtcgccaccgctggatggagccttgccggatctcccgggctctgcagcccctct

SEQ ID NO: 132110 - DNA, 122 bp, Homo sapiens
tgatgtgtctgtaagccaaggactgccagcaaacaagtgagcagaagttggtgagaggcgcgggggcagattctctctcacagccctcagtaggaaccaaccctgctgagaccttgatctca

SEQ ID NO: 132111 - DNA, 122 bp, Homo sapiens
cctctgtgggtagggagggacaacggaagcattccaagcgggaaagggatgctccttctacggaacttttgccagtggaaagtatggaatggatttgaggtgacttgctagggcatggcagt

SEQ ID NO: 132112 - DNA, 122 bp, Homo sapiens
ccagcctgtgagcccaagtcttgctccccttcctccctcgtacccccgcccgcccctgggcgccctggaatgctagttgagcttgctgcagatctccagcgcttgcttgtagacctgagtca

SEQ ID NO: 132113 - DNA, 122 bp, Homo sapiens
acgtgtggcagatcacgtgggccatgagacagcggggcacacacgccgtggtgggggtggcgacggcagacgcccccctgcactctgtcgggtacacaaccctcgtggggaataaccacgag

SEQ ID NO: 132114 - DNA, 122 bp, Homo sapiens
aatcactgggaatgtaatagacagacgaacgggagtgggcggagcgggcgccggatgtgacgtttccggaacctccgggtgtcatccgcggggaaaggtggggaagggtcccgggaacgtgg

SEQ ID NO: 132115 - DNA, 122 bp, Homo sapiens
gctcagacgttccagctcattgaggtcccggttgaccgaatgtaagttgtcctggaagtgcgcaatgaaggccttctcccggccctccagcgtctccttgttccgcatcccatccttcaggc

SEQ ID NO: 132116 - DNA, 122 bp, Homo sapiens
tggcctgctcgggcaatatgcaaacaatggggctgtgcgacccggggagtcccccacagccggcctacaaggtcccaggcaaacctacccggctctgaagctagctaggaattccttctcgg

SEQ ID NO: 132117 - DNA, 122 bp, Homo sapiens
tgttcacccgccgtctgtgtttgaacctgctctgcgcttcctggttggctgcttcaggcgcgcgcgtacgctcgggggtagagcccggggggcggggcccgcgttgaccacgcccccggccc

SEQ ID NO: 132118 - DNA, 122 bp, Homo sapiens
cgctccatgcccgtgtggtgctgccgctgctccctggccggtcatttcaggtgacttcctcgccggggatgggaggggagcaggcggggatgccgcgctctcgagctttttggcctggcccg

SEQ ID NO: 132119 - DNA, 122 bp, Homo sapiens
gccctagtggagcaggatgagggttgagatgatggttgctggttgcttcagagagagggacgcacattaaccagagtgctgtcttctccaggggcttgccgtggccaagccaggccaggtgg

SEQ ID NO: 132120 - DNA, 122 bp, Homo sapiens
cggtacagcggcgggcggcgggcgggggcactgagctggggagcgcaggtgctgaagcgccgtctcctgcatgtcccagcccggtgcgaacctctacgggtctcaccctttctacctggcgc

SEQ ID NO: 132121 - DNA, 122 bp, Homo sapiens
cggaggggcccgggggtttccagatgcctgggtcaccccaaggatttctgcagctccagccgcacgcccccccccagcccccgcctgccccggttctcccgctcctccacgcctgggctcgg

SEQ ID NO: 132122 - DNA, 122 bp, Homo sapiens
tacaaggtgggagcgggtgagaacccagcgactgcgcggctgaatgacagggagtagccccgccgcctccaacatggcagcttctatccagcgaagccgggtccccgcttccgggttccgta

SEQ ID NO: 132123 - DNA, 122 bp, Homo sapiens
ttgactaattttccattaccttcccaaatcctataaaacagccccacccctatctcccttcgctgactcttttcggacttagcccacctgcacccatgtgaaataaacagctttattgctca

SEQ ID NO: 132124 - DNA, 122 bp, Homo sapiens
ttaagcaagccgagagagaagaacctgagaattggggaccaaagataaacctgggtcttccgccttgaaacatggactttcccaaggcttgggaaacctgctcactctgcccccacacacgc

SEQ ID NO: 132125 - DNA, 122 bp, Homo sapiens
cccactcaggttgcccagagagcactttaggttctgactcgcgtggggcgcgaggtaccccgtggggcagctaggtgcctccaagaaaccccgccccagaggacccgcacgagttgctgcca

SEQ ID NO: 132126 - DNA, 122 bp, Homo sapiens
ggtgcacacgccgatcttgcggttggccggggagccgaagtgacagaataggcccttgtgcgggtcgcatgggtcgcgctcggtgcacagctcgcccagctgcttggcgcagacgcggcagc

SEQ ID NO: 132127 - DNA, 122 bp, Homo sapiens
ggctcccgggcccctcctggggctgtcaggctaatccggcagccgcctcccaccccgccccgctctgggggacttttgctcgggtgactaaagttcaaactcggctaaagcaagccctggga

SEQ ID NO: 132128 - DNA, 122 bp, Homo sapiens
tgcctctgggtcgttgggaggtctgcccattgcccaacaggtgcactagactgctagagtcgtcctgagggccctggcagccacagcccaagccagcactgcacaaagctgaggtgggactt

SEQ ID NO: 132129 - DNA, 122 bp, Homo sapiens
aaaggcggaagcaggtttggctccatgtccaatctcttagattcactcaatggggtatttcgcatattttatctcccaacactgggctgtgcaggatacgaggttctggtttccaaaggagt

SEQ ID NO: 132130 - DNA, 122 bp, Homo sapiens
ctgcaggcccagggccagatcctgacttgcccacccgccggctgtgtgaccttcagcgcgcgactaacctctctgtgcctatttcctcgaggaaaatgccgggaaatagcagcgcctgcccc

SEQ ID NO: 132131 - DNA, 122 bp, Homo sapiens
agcaagatcagaactcagaaaataaccatcgtcgacacatatttataatcctccattatgcgatttcaaaagggggtgattttttcatgataaatcctaaagataatttaatttcttacttg

SEQ ID NO: 132132 - DNA, 122 bp, Homo sapiens
cccgcgtctctcttacctacacagtgcatgaggcggtggcgccaagagtcgagttcccgccggaatcctcttctctccgccgcgcaccgagggctccggcactgagcggcggcggcggcggc

SEQ ID NO: 132133 - DNA, 122 bp, Homo sapiens
gcgggcacgggctagctgagcgagtcgcccgcaggagggctcaggtggctggaaggcgttcggacagacgcccgcggtgcgcgccgggacgggcggcggggagcctcgggacgcacggggac

SEQ ID NO: 132134 - DNA, 122 bp, Homo sapiens
aggcgcggctcccggctcggggctccagcggccgcgccccgccgcccctcggcgttcgcgcgcagcccctgcgggggtggccgccatcaaagcgtcttctcgttcttatgctaatgagcccc

SEQ ID NO: 132135 - DNA, 122 bp, Homo sapiens
accagtatgactggtctccttataagaaggggagaagacacacaggcagggaaaacgtcacgttacaatggagacagagactaaagggatgcaactacaagccacacaaaggattgccagcc

SEQ ID NO: 132136 - DNA, 122 bp, Homo sapiens
ttcagcttacagaaatggatctaagatcaagtcaaatcggtaaagacactggtgagtcagcgggaaccacagtgagctaaaggtagcactgggtgggaggccaaaggagcgggttgactgat

SEQ ID NO: 132137 - DNA, 122 bp, Homo sapiens
gaagccgtgggggaagctcttctgtgctggtggcggacgcccactgcagacgggctgtggcggctcctcactgcagtgctgcggggcgcggagaagcggtggggagcggaacgtgccgcaga

SEQ ID NO: 132138 - DNA, 122 bp, Homo sapiens
agcggggccagtggccggccggcgggcgggccgcttcccggaagcacgtgctcatgcacgcgcactgcacagagacgctctgggagcgccttgcaaaccccgtcttggcaggacatgaaacc

SEQ ID NO: 132139 - DNA, 122 bp, Homo sapiens
gcggggtgacatccagcctctttccctctccgcccccgacaggatgtcccaggctggacgcggcagaggaggtcccccacaagtgaaggtccagccctgctcctccagggttggcccatgtg

SEQ ID NO: 132140 - DNA, 122 bp, Homo sapiens
gaaacgaaacctagctcgagaggagcagtccctgaagccgtcaggaagtcacgtggggtgcgggggggcgggcggcgaggactgggcgggcctcgcgaggtactcccgggagcctgcgggca

SEQ ID NO: 132141 - DNA, 122 bp, Homo sapiens
aatccagcgggagcgaggattaagctgcgactttgcgcgctgacacccagtaggccgctgcgcgctgaagaggcactggcgggaaccacgcccgggcgaatcccaagctccccgccagcggc

SEQ ID NO: 132142 - DNA, 122 bp, Homo sapiens
gcgcgccaagagcgcagagtgggaaagtgaactgatcgcctaagcagcgggtggtcaacccgcgtgtcatgtccgggctctcggggatcccactctatccacctacggtttccctcccgaca

SEQ ID NO: 132143 - DNA, 122 bp, Homo sapiens
gccatccgccctgaggccgacaggggagctggggttcaccgacccccgcggccccgccgtcgggcgcggaccccatccagccccacctggccccgccgagtgtgtgctttgcctggggttaa

SEQ ID NO: 132144 - DNA, 122 bp, Homo sapiens
ccagagtccggcaaacacaaacctgacttttccagctgaggagaaaggaaaaccttctcccggcacctgctcctgtcccgccctcagtgggtccctagcgcccccctggtggccccgcgcgc

SEQ ID NO: 132145 - DNA, 122 bp, Homo sapiens
ggggctggggtgtgtttatttgggtatatacaatgagtcatggattaaaattgcttccagcggatagatacctaggtgttccacagcattactgaacaagctgtcgtcatttccccattacc

SEQ ID NO: 132146 - DNA, 122 bp, Homo sapiens
ttgctttgagggtaaggtgtttaatttataagtgcaccccatattttttgtcagtttattcgcggtggggaagctttgaaagtagctcctctcagcaggttaaaaagtgaagtctgcgtcct

SEQ ID NO: 132147 - DNA, 122 bp, Homo sapiens
gagagaagacgcacctcagggaacagtaattcttcttttcaatgctcatgaccgagactccgggaagaatggtcaagttgtctgttctatccaggagaatctatcttttacattagaaaatt

SEQ ID NO: 132148 - DNA, 122 bp, Homo sapiens
acgggcgcacgcgcgctgcccacgatcaccctcccaagccacaaaacactcgcgaacgtgcgaggccgcaccagcccacatagccagacccacgccggctcacacgcgcacgcagcactgcc

SEQ ID NO: 132149 - DNA, 122 bp, Homo sapiens
agtgtaaagcatgctagccccgtgccacttggctgtgcagagcgcatcttcagaggacgacggagggaaggaaaggggagaggaaaggagggaaagcagacaggcagcccaggccggccagg

SEQ ID NO: 132150 - DNA, 122 bp, Homo sapiens
agtggagggaggggaaaccaggcaccaaagcaaattccttcatttcataatttcatctggcgcccccgttcaatcagcctgcattgtcgaggctttaggagaggcagttaggaaaggagaga

SEQ ID NO: 132151 - DNA, 122 bp, Homo sapiens
aactccacgtccgaaggcagtttccaaggtggaagctgggtccggctgccaggaagcggccggtgcgcgggctgcgcgggctgcgcggggctcggcttccacgtgcgagcctgcaccgccgc

SEQ ID NO: 132152 - DNA, 122 bp, Homo sapiens
tggctttcagttacaccaagctaaaatttcaggttcccagctgcagctctctgggtcccccggtgccccagtggggctccccgcatctgaatgtgtggtccctgggggtgggcacttggggg

SEQ ID NO: 132153 - DNA, 122 bp, Homo sapiens
gagccagctgaggccaagtgggagatgctgggattcagggactcagcaggctgtggttaccgcctccacctctcctgctgcagtcatgcatgtattgtgcatttaccgagctaggtgctgag

SEQ ID NO: 132154 - DNA, 122 bp, Homo sapiens
cagggcatcacctcctaccagcagcggtgagtagtcccgcctgggctgggatagtgcccccgccccggggtgctggggtgggactcactttgcctcctgttttgtgtcttacaacacacatg

SEQ ID NO: 132155 - DNA, 122 bp, Homo sapiens
tcactttcaactctcatcaccccagacctgctaaccctgtgcagccaatgcagcagccaccggccatgtgttgaacatctgcaatatggctgtggtccaaaatcagctgtgctgtggtataa

SEQ ID NO: 132156 - DNA, 122 bp, Homo sapiens
gacacgccgtcggcgccgtccccgctgggccgcagcagcaggttcccgcactcggggtagcgctccaggagcagttgtgcctccagccggctcaccttcaggaagcacctgtggcgggccgc

SEQ ID NO: 132157 - DNA, 122 bp, Homo sapiens
acatattccataatggtgggccatctccaaacaaagctaacagcactttgcaggttctgtcgtggagatcagctattccagggccagccccaaagaccaaagaccatagctccacacgggag

SEQ ID NO: 132158 - DNA, 122 bp, Homo sapiens
gaggccgaattggcggtgcaccgggatcagccagctgagcagcttacagcgggattccgccgtcacctgccgggaaggaggggggaggcgggcccgctgggcttagggtggagagggactgt

SEQ ID NO: 132159 - DNA, 122 bp, Homo sapiens
gccgtagaaattcctccggagccccgtgcgccatgtggtctccttctgtgtgctcaggtccgcggcattgagcttgctcaggacaatgacctcctggctgaagccctcatcgtccagggccg

SEQ ID NO: 132160 - DNA, 122 bp, Homo sapiens
ttcgtaaatgtaaaaggtttcttttatgtctttaagacgtaatactgttaacgacattgccggtgccggttcaagattgtagcagccacgtctccactgcctaacactcacccaaacttaat

SEQ ID NO: 132161 - DNA, 122 bp, Homo sapiens
caggctggagtgcactggtgcaatcacggctcactgcagcctccatctcctcccccccaccgaccctcccaagtagctgagactacaggtgcgtgcaacagcactgggctaactttttaaat

SEQ ID NO: 132162 - DNA, 122 bp, Homo sapiens
ggggggggagagatggggagcgaagccgcccgaccccggggcagagacgccacagcagcccgcagaagcggaaccactaccagccccgccgcggacacaccccgctctcccacccagcgcct

SEQ ID NO: 132163 - DNA, 122 bp, Homo sapiens
aggtacttactagctgtccttcccgcatcagggaacagaggagacagtgactgaggaccccgcagcgaatgccccacccacacaggcttcctctcagcggggcctgtccccactgcttcccc

SEQ ID NO: 132164 - DNA, 122 bp, Homo sapiens
ttgattagttctctcccatattgctgccaccagttttaagatcatgcagatgtgcaaaggcgaacctttgtctcttaagttggcaaaaactaggttatccttgaaaatctccaccaattagg

SEQ ID NO: 132165 - DNA, 122 bp, Homo sapiens
gccgcgcgcctaccggagccgcttggccctagtgctttccagcggatttcccctcaggtgcggagccgggtgccggggtcccacagccaaccactaccggttcctctttcgtcagccaccgg

SEQ ID NO: 132166 - DNA, 122 bp, Homo sapiens
ggtgaatgagtatggtgtcaagcctcttaattacttgttcttgccaggcttgtgactctccgttttcttgggcaacaggacagcctggatattgggcaagacgccgccctgggcaatggtga

SEQ ID NO: 132167 - DNA, 122 bp, Homo sapiens
gcctggcggtttaaaacggtaataaatgtctggagagcactttgtatgttagttacaaagcgctctcactcacattatgccgttgattctgcaaggaaccctgtaagaaggacatttttctc

SEQ ID NO: 132168 - DNA, 122 bp, Homo sapiens
gtgggaacccgcagacgtggggcgagcagggccgctggctgtggcgggcgagcgccggggcgccacgtccgaggccgcggggtcggggctgcaggcacagctcgagcgctttccgcggggtt

SEQ ID NO: 132169 - DNA, 122 bp, Homo sapiens
caagctgcctgtcctgctgcttggccgctcctcagagctgcggccgggagagttcgtggtcgccatcggaagcccgttttcccttcaaaacacagtcaccaccgggatcgtgagcaccaccc

SEQ ID NO: 132170 - DNA, 122 bp, Homo sapiens
ggtgcgctggcaggaagcggcagcacgacccccgactttgcatctggacttttctagtaacggaccagctccttctgccgaccgggccggggagaccgcgtggctcagtggctgcagcggcc

SEQ ID NO: 132171 - DNA, 122 bp, Homo sapiens
gacgctgtaccagtcccccaggtacgtcgacctcttctcatcatagtaacaggtgtaggacgactctctggggttggcagcagtagttgcataaacattagtatcaccaggcaggtggttca

SEQ ID NO: 132172 - DNA, 122 bp, Homo sapiens
gtttcatgcctccagctttcctgaccttcctgacttgaaatgtgggtctccccagcttctcgcacggctttcgggagacagggtgggaaggagacccacccggcagcaccgagtcactggga

SEQ ID NO: 132173 - DNA, 122 bp, Homo sapiens
tccgtctattattaaatgccatctgtggaccgggattggcaggtgtttctttcacgctggcgataactatctctgcatgtggtgttacctaggtggtcctaggtttcgactttcttttttgg

SEQ ID NO: 132174 - DNA, 122 bp, Homo sapiens
ctcactccctcacttcacgcagatttctgcatttcataaaaaacaccttccggccaggtgcggtggctcacgcctgtaatcccagcacattgagaggccgaggtgggtggatcacctgaggt

SEQ ID NO: 132175 - DNA, 122 bp, Homo sapiens
ccgacctggcacatggtaggtgctcggtgaatactggtttgaacagacgactgcggcagacggcaagggccactcctgtgccagggcctgccacgccaccgcagcttgtgcggtgggggtgg

SEQ ID NO: 132176 - DNA, 122 bp, Homo sapiens
ctttgttcaaaaatccctttgtacagctctctctctgttcgagagctgttaaagacacatcgagtcattgccctggccatcgtcagaagccagaagaacagtaggaaagggagctctttcgc

SEQ ID NO: 132177 - DNA, 122 bp, Homo sapiens
ccttgggaaacgtagaatagaagcagattcctttaagctgataggtagcatctgtaaggccggcaggagcaggtgctggcactcaggaagcctcctctgaagcaggaacgtttgccacctgc

SEQ ID NO: 132178 - DNA, 122 bp, Homo sapiens
cgcgcggcttccccgtctcggaccccgccccgcgctgggagagccgccagcccgggggagcgtcttcctggaagaggtggggcaccctgaagtccgctgaaacctaaaagccgagggggagg

SEQ ID NO: 132179 - DNA, 122 bp, Homo sapiens
cacagaagatgacctggtgccaaaatgaaagctttaatgagtgttactcctagacagtcacgtctcagcttctgccagcctccactgtcccagctctcttagctggccgacaggggagctag

SEQ ID NO: 132180 - DNA, 122 bp, Homo sapiens
aagctgaggggatgcacagaggcagccagaacctaggtcagggtctcgctcggtgctgaccgcccccggggtcgagtaggcgatgggggagcccggcttcttcgtcacaggagaccgcgccg

SEQ ID NO: 132181 - DNA, 122 bp, Homo sapiens
gtggtctagtggaccagacagactggtccaggcctccccgccggccccccttccggtccccgtggacgccagcctctctgagcctcggatgtttgtgctcggcaccaggctggaaggctatt

SEQ ID NO: 132182 - DNA, 122 bp, Homo sapiens
tgtggaggtccaggtgaggatatggagctcctggtgaggatgtggaggtccaggtgagaacgtgggaatcctgtgtcaggtgtctctcacaaagcggctggccctgggctgcccctgggctg

SEQ ID NO: 132183 - DNA, 122 bp, Homo sapiens
tgggcgagcagctgcagagggggcgccaggtcccccagcactgccggcccgccgtagccacgctcgaattcttgccagcctcagccgccttctcgcggggcaggtctcaggacctgcagccc

SEQ ID NO: 132184 - DNA, 122 bp, Homo sapiens
gagcccgtgaggcccctggagtttccttgtccatggatgtgctcagaggagcttggaaaacgatcatcggctgctgcttggttcaggcctcactatgtggctccagatggtgggaaagacag

SEQ ID NO: 132185 - DNA, 122 bp, Homo sapiens
accggcctcgcgagacaccatcactcgtgactgggtgagaggggctaagcggctcacctgcgctgcacagctggtacccgggactgctgaggtttgcacctgggccttccgtgattccgaac

SEQ ID NO: 132186 - DNA, 122 bp, Homo sapiens
cgttgggaaacccacccggctttgctgagtgggtgccggggagggaagggtgaggggggacgggagggctgctgaggcggcatcttcactttgcttgcatgtgtatcttcacatgttcggcc

SEQ ID NO: 132187 - DNA, 122 bp, Homo sapiens
ttgtcatcaccttcacctatcaagcagcctggagcttatcgactgtctaggaaaacatcacgagcacattctaggggcaccccacccccgggcacagcacaggaggccaagccaggctggag

SEQ ID NO: 132188 - DNA, 122 bp, Homo sapiens
aaacaggcgcctgcgagagtctgtaggagggaaaccgccatggacgatcagggttgccctcggtgtaagaccaccaaatatcggaacccctccttgaagctgatggtgaatgtgtgcggaca

SEQ ID NO: 132189 - DNA, 122 bp, Homo sapiens
taattctgcctgttttggggcagcatctaccttatagcactggctgagggctgagctgagcgtggctccaagggaatccagccttgggcagtaggtggcaatgttgggcaggcagatgaagg

SEQ ID NO: 132190 - DNA, 122 bp, Homo sapiens
aagggggtctcacagagctccacccctactgtcagtcttggaaggtcccggcatggctcccgagctcaggctgcaccttacttccaactctggactctcagggaatgagagcctctatctcc

SEQ ID NO: 132191 - DNA, 122 bp, Homo sapiens
ctccacctcacaccaccatgggcacttggtcccttctctcagggcccttctagatcttggcgtctgggcctcaaagcacaacacaggtactgacaggtaggtctccaccatgagagagaaaa

SEQ ID NO: 132192 - DNA, 122 bp, Homo sapiens
ccaggcagaaagttgggcagtccctaaaacaatgattttttaaaaaccacagctttaagccgggtgctcacgcttgtaatcccagcaatttgggagtccaaggtgggaaaatcacttgagtt

SEQ ID NO: 132193 - DNA, 122 bp, Homo sapiens
gattttttcaagctgatgaccttttgaaaaaaactgagaaaactgctgttgaaataagcacgaagaagaaaagagtgatcatccatttttagatgtgtttacaggctgtatgactcagtgtt

SEQ ID NO: 132194 - DNA, 122 bp, Homo sapiens
tcttgtattttcctaaaatcggctgaggaaagtgtcagttgagtactgagagatccggaacgacaattcagagcctccctagacaaaagaaggtgtaccaaagtgaggcgctatgggggaac

SEQ ID NO: 132195 - DNA, 122 bp, Homo sapiens
gccggggccaggcggggaggatccgggctgcaggcaggagtgcgcggggcagggcccgaccgctcagcctccccggggctcacacgggaggagcgcgccgagccagtacccagccccgagcc

SEQ ID NO: 132196 - DNA, 122 bp, Homo sapiens
gcactgaagctggacagctctgcggcgcccgagcgcggggagcgcgggagggaggtgccccggtccccgcccctgagacaggccccgcccccgccccccaccaaaggagctgtacctcctcg

SEQ ID NO: 132197 - DNA, 122 bp, Homo sapiens
ctgtcatctggcatccctgcatggggtgtaggtgtctgtgtgtggcaacgtgtatgtgtgcgtgtgtgtgtctgtctgtgccatccccagagccaagccctacaaatggcattttacgaagt

SEQ ID NO: 132198 - DNA, 122 bp, Homo sapiens
gaggtgtggaaggagaggcgtgggcaggaactggggctgcacgtggcaatcgcgagccagcgcgagttccaggtgggtgtgggctccgtgggccccacactcggattggctggccggcaccc

SEQ ID NO: 132199 - DNA, 122 bp, Homo sapiens
ggctgcgctcccggcaggcagctttcttcccggcgcggggctcgttccctgaggccaggccgctcagtggccgcaagagcgaccttcccacatgtccccaggtgtgcgcacaagcccggggt

SEQ ID NO: 132200 - DNA, 122 bp, Homo sapiens
ccagaggcgggcgcggtacggccgttccgggctccagccggtgcgggggccacgcgcacgcgcacttgcagtgccctgggacacctcttcagtccgtggactttcccgctgcacactgccct

SEQ ID NO: 132201 - DNA, 122 bp, Homo sapiens
agcagcgtgaggctctgactggggaggagccccacgtccgggcagcacctgcacccacagcgggagcctcactgtccggagaggccagcttcccttgtgtgaggagcagggcccccattcct

SEQ ID NO: 132202 - DNA, 122 bp, Homo sapiens
caccccgaaggctaaccggaaaatgacccctggagctgagcaagacagaaaagtcatttccggtgtcgcgctttcttggaagctataaagagccacgttaggtgttggcagagcggccggta

SEQ ID NO: 132203 - DNA, 122 bp, Homo sapiens
cggaagtttcattggtgagagaaagagacagagaaagagacggagaaagaaccggagaagcgggctgccagttccaaggtgaaatgcaacgagttttatagatgagcttgaggagtctataa

SEQ ID NO: 132204 - DNA, 122 bp, Homo sapiens
ggaatgaagaaagataaaacgcctatgtgaatggccagggaagagggtggacagggaccccggatggagtgaggacaaaagcatgaaaagacaagatcgccaccatcccgtgagccactcca

SEQ ID NO: 132205 - DNA, 122 bp, Homo sapiens
ttagcagttaaaacacacacatacacccaattttttaaacaaaaataaaatcataatacacgtgctgttctgcattttttcactcaagaatgggtcaaggagtattactatttcagtacaga

SEQ ID NO: 132206 - DNA, 122 bp, Homo sapiens
tcttcatcagaatgatcataacccttgaaatagcaacagccagcttgatggagcattcggcgcctgtcaaatatcttactagtatctccaagagttcgttttctaatttgaattttcaattt

SEQ ID NO: 132207 - DNA, 122 bp, Homo sapiens
actcagtttccccatctgtgaagtgaggatagtcccaccccccagctcaatggatccctgcgggaggagggaatgcgaggctggttgtgggtcggggggcctctttccgattcttcctgaag

SEQ ID NO: 132208 - DNA, 122 bp, Homo sapiens
caccctttctgggcggggcggaaaaaatacttcccgtctctccttttcgcctattagctccgtcaaaggtcgagtccgtgacgtcaaagagcatgggccaatcagagcacaccggactgctt

SEQ ID NO: 132209 - DNA, 122 bp, Homo sapiens
ttggatcgcccttctctatttgcacactaacatagccaaccttccccagagctggccctccgcccccagctccttggcctgggtcacaccagggtcccggtcggatttagccgggctgctcc

SEQ ID NO: 132210 - DNA, 122 bp, Homo sapiens
ctccgaagtgatgatgtctttttgtaccctaatgagttgaccagtgatgggcagcccctacgaaacttcagggtagggctagtcacagggccaaggcaggattagagggtttcagccccacc

SEQ ID NO: 132211 - DNA, 122 bp, Homo sapiens
ccagattcctgagcctgggaaaggagctgccacacccagtctcgcacagagcgttccaggcgaagggaatagcaaatacagggtatttagcctccctgaagacccaactaaccgacctcacc

SEQ ID NO: 132212 - DNA, 122 bp, Homo sapiens
tcccttgaggctggaagcacagagtggctgtccccaggtagttggtgacggggtgaggaccgggctcgctcccactctcaggagcctcactatggtccccagagatagaggacggtgaggcg

SEQ ID NO: 132213 - DNA, 122 bp, Homo sapiens
gctgattgcgcatttctcttctcaacttcacattaagttaaatcagctggaaatcagccacggtggaagtatttacaccacagaaattgcctcctttcctacaagcaatttattaagcattt

SEQ ID NO: 132214 - DNA, 122 bp, Homo sapiens
tcacatgacggggtgggagctgaatgtgaatgtgactcctgagctgcagcttctaaccatcgagtgatgcacactctgaggcccacagtgacatgtgcatggcacccttggcctgatgccag

SEQ ID NO: 132215 - DNA, 122 bp, Homo sapiens
tcgagaccagcctggctatcatagtgcaatcctgcctctactaaaaatacaaaaattagccgggtgtggtggcaggtatgggtctctgctataccacatgaccatttctagcaaaggctctg

SEQ ID NO: 132216 - DNA, 122 bp, Homo sapiens
gtcacgtcctgctgccagtgatacaagggcctgaattcactcctttggaaaagatgtattcggctgaaagttcaggggctagaagtcctagatctcttgccttagagctacctcctcctgcc

SEQ ID NO: 132217 - DNA, 122 bp, Homo sapiens
ctcctggcctcgtgtgatctgcccgcctcaggactgcaggcgtgagccacggcgcctggccgaggtggagagaagatctgtatattgtagttgactcctgccccgtttggaaaatacagtgt

SEQ ID NO: 132218 - DNA, 122 bp, Homo sapiens
gtaggattcgtggatagtttgtatcagaatatgagaggaagagagctgtcaataatgacacgagggcttttgcctaagcaactggaaggatagaactgccattaattacatgattgagattg

SEQ ID NO: 132219 - DNA, 122 bp, Homo sapiens
ccgggtctggcccagcctggatgggttgggtgcctctaagcagtccgcgtccccttcggtcgccggagagggaactttcaaacttagttaggaagccagactgtccgcgcgtccgccagtcg

SEQ ID NO: 132220 - DNA, 122 bp, Homo sapiens
ccaccagactcctgcagccaggagccccctcctcctctctctgcgggccctgggccggaccgggaccccctctcgcgcccactgcggaggcagcgatctggcacctgcccagggcgcccgcg

SEQ ID NO: 132221 - DNA, 122 bp, Homo sapiens
ccaaaaacattcagtacttcggcgccgggacccggctctcagtgctgggtaagctggggccgccgggggaccggggacgagactgcgctcgggtttttgtgcggggctcgggggccgtgacc

SEQ ID NO: 132222 - DNA, 122 bp, Homo sapiens
agtatgtgctaaagaatattctctgatgtgggtttctctcgctctctccttccctttccccgcccccaaaacattgcgtgtgctttgcatctcacataatcttttgtcagttcttttgttgg

SEQ ID NO: 132223 - DNA, 122 bp, Homo sapiens
actggccagggctttccggacacgtcgagttagattcaggagtgtttcctaccaccagggcgaaaggggcgggcaggagccgggaggaggattgggaggggggagagggggagccgccggga

SEQ ID NO: 132224 - DNA, 122 bp, Homo sapiens
accaccaaactacatttaagtaacgcggaggtgataacacagaccaataaaaccagggaacgcacagtgaaggttgacacgccatccttaacgcgcctccccggcttgtttctgcaatagaa

SEQ ID NO: 132225 - DNA, 122 bp, Homo sapiens
gtgtttatatatgtaaaatatgcatattggaggaagtcggccggcagcttcaccctcctgcgggaaaatgcaaagtccatcaccaatagtcggtctaccgcagagaagtctgcaaatcccag

SEQ ID NO: 132226 - DNA, 122 bp, Homo sapiens
cacgctaggtccatgctgtgtggctgtcattgtggttatggttcttgtgacaaaagtacacgccaccactcaatcagtctatcagcagcccagcaatgcaagcacaacagctccccggggtg

SEQ ID NO: 132227 - DNA, 122 bp, Homo sapiens
cgctttcaaccggcggagacactggcagggccagaaacgcgcgcagcgggggcgggaggtcggtaagctccccgcccctgcccgagaccccgccccggcccggccccgcctttttctctgcc

SEQ ID NO: 132228 - DNA, 122 bp, Homo sapiens
ttcctccccgacgggcaggtcctcctcttcggactcggagtctgaccgggagccagtggccgtggagagccacatggctcccggacaagacgacccggtcccaatgagtgcggtcggggttc

SEQ ID NO: 132229 - DNA, 122 bp, Homo sapiens
ggtctgggagctggggaccaagtcctgcctcatggcgctgtcttccccaggcaggggagacgaccagacagaggcatggtggagaacgccacaggaggaggtcagagatggtctcgggtagt

SEQ ID NO: 132230 - DNA, 122 bp, Homo sapiens
gcgtctctttcttgctttcagccagctcccaaaggattcagcactcattcttccactcctcgcagctgtcaccaccagctctgtttcctggggttcctccccaacctcatcccacccaagac

SEQ ID NO: 132231 - DNA, 122 bp, Homo sapiens
cgccccctgcgccctctggcggccggctggacgcacttcgcagcccgacccagagagtcacgtgactttggaaagtcccgtggaaatccccgggcctacaacccgcatacaactgaaacggg

SEQ ID NO: 132232 - DNA, 122 bp, Homo sapiens
ctgttgtttcttgtcaagctcttgaaaccccgagggcggcagagcatccggagtggccgtcgtccctgtgtttgtgcagctgtgtgtgcctttgccagtgattcctggataacatgggcgac

SEQ ID NO: 132233 - DNA, 122 bp, Homo sapiens
gcccacttcctttcgagtcatgttgcatcatctttcagaacaggactaaacaaatagtctcgatacatggctttaggaaagaaaagcaagtgtgcacgtttgaaccccaccctctccgtgtg

SEQ ID NO: 132234 - DNA, 122 bp, Homo sapiens
gttttatcaatttgaagaacactggcaaaaatcagcaaacttcatctcccaaaaagctctcgctcttttttgccaatacttgaagatttctgctccaaaatctactttgagctgcttgagca

SEQ ID NO: 132235 - DNA, 122 bp, Homo sapiens
ctcattcaaaaacaaaactagtacaacgctttgttgggaactcaaataaatgaataaaagcgcaacaagtcagtgagatgctgacgggggttagatgcttttccatttcacccatcaccgct

SEQ ID NO: 132236 - DNA, 122 bp, Homo sapiens
agtgacgcgggaggaagcggaggccttgctgatgggctgtgactgctcggcccggccgcacgtctcaccgccagcggcaggggctccttgctgtggttgaaggggtgctcgaagaccacggc

SEQ ID NO: 132237 - DNA, 122 bp, Homo sapiens
ctcgtgtaggagaggctgttaaaggcctgggggccagaggtggacaccttgtaggacttccgggtcaccctgatggacatggtggaggcaggcgggccgaaccagacggaatcccagaagga

SEQ ID NO: 132238 - DNA, 122 bp, Homo sapiens
tctggattaggctttggcttaagaaaatgttgtggctggtttgatcttctacccaaaccacgccaactttctgtgtgtcagcaataaggctgatttatcattcatggagtagcacttttaat

SEQ ID NO: 132239 - DNA, 122 bp, Homo sapiens
gaggggcggcgggggcgacagggcagggccaggcgctgggcagtggggccctgggcgaggcgcgggactccgggccgagggccctgttcctggggaaagttcccaggccggggaaaaggtgg

SEQ ID NO: 132240 - DNA, 122 bp, Homo sapiens
aaagggcaggcctcctgcgccctccttcccaccccccttcctgccctgggcgtggagcaccgaccaggtgtgggcttgggtggttggttaccgccttttgcactagcagtagcaaggaaggg

SEQ ID NO: 132241 - DNA, 122 bp, Homo sapiens
cggcacacagggagagatccactgaccctgtggggctggtccctacatctggcgatctgacgtggggctctccctcgctgtgtgaagttgcaccctgagtgtgggatcagcagaggagttca

SEQ ID NO: 132242 - DNA, 122 bp, Homo sapiens
agatggcagtatactacactatctgtaaaatatatttgcaaagccaggcacagtgttacgcgtctgcctcaggaggctgaggcagaagaatagcttgagcccaggagctttagtctagcctg

SEQ ID NO: 132243 - DNA, 122 bp, Homo sapiens
agctgtgccttccctttctaagcaaccacactgcttggcccttcaagggtcagggtgagacgtgatgggctaggcctccgttgtctggttgctaatgacagccttgcaacccaaggtgaggt

SEQ ID NO: 132244 - DNA, 122 bp, Homo sapiens
ccacagggggagatgatattactcacaatatcataaacaggcagagagtccaccgtggatcgtaagagccagggggggagaggggggtggctgttactccccgcatcgcggggggcgcctcg

SEQ ID NO: 132245 - DNA, 122 bp, Homo sapiens
tagtttttcaatcttctccttcctctcacccaacttttctttcttactcctggaaaaagccgttttgcctcaacttgcgcactcatttcaacatttctcatctataagcaaggacacctctg

SEQ ID NO: 132246 - DNA, 122 bp, Homo sapiens
ggattacaggcgtgagccacggtgcccggcctcctaagggttttaaaatccattcctggccgggcgcggtgctcaggcctgtaatcctagcactttcagaggcccaggtgagcggatcatga

SEQ ID NO: 132247 - DNA, 122 bp, Homo sapiens
gttttcctctcgcagcttctccatctcctcttgcatttcttcctgctcttggagctgctgcgggtgcggctgcgacgaagggggcgctgccgcctgcatgcccccgccgctcgcgctgccct

SEQ ID NO: 132248 - DNA, 122 bp, Homo sapiens
aaacctttgttctcctggctctgtgagcagatgcctctgtgctgctggggcttctcctcccgtgtctggggacggtggggagggcgcctggcactgtggagacagcaggaccctgaagccag

SEQ ID NO: 132249 - DNA, 122 bp, Homo sapiens
gattgcactttaataaaaccaaaacactcattcgtttgacaaatacatgagtgcgtcttacgtgcaaagtgagccaaaatagtctctacatttcaacagaattgttctgtttgagaacttgt

SEQ ID NO: 132250 - DNA, 122 bp, Homo sapiens
ggtgctccggcggagagagccgagccgcttcggagggggtcgaaagcattcggaaatactcgggggaggggagtgcgcaggaggggaaggaggagggggagaggccagagtctgcaaattaa

SEQ ID NO: 132251 - DNA, 122 bp, Homo sapiens
acaggacaaagtccccttttctcttccctctgcttttctcaagcagaatgaatgtctcttcgtagtgaccatggctgggaatgttctgggtcacacctaaagccagcacatctcaggatctc

SEQ ID NO: 132252 - DNA, 122 bp, Homo sapiens
agcttaagacatggctggatacagatgctcagacaatcacatcaggagcctgcctccctccgtgtctgggctctctggcctcttgggtcagtttcatgctcaggctggctttctccacatag

SEQ ID NO: 132253 - DNA, 122 bp, Homo sapiens
cctgtgtaggctgtgtaaggagtgaccggaagtagaaactgggtgctccagtggcgcaatcggttagcgcgcggtacttatatggcagtatgtgtgcgagtgatgccgaggttgtgagttcg

SEQ ID NO: 132254 - DNA, 122 bp, Homo sapiens
gagggttcaaagccctctaatccaaggccggcttgtgtctctagggaggttgcagaaaggcgccagaatgtggatggcgcggacaatgtgggatactggagtctcgactgccgcgcgccaag

SEQ ID NO: 132255 - DNA, 122 bp, Homo sapiens
taggttcctggggactggaattcatacctccttcccccctctctcttctgcctgcccctccgtctggggacagggacaccagtgctggcctggcttacccacagcctctcaggagggttctc

SEQ ID NO: 132256 - DNA, 122 bp, Homo sapiens
agacggtgcccaaccgcagatagccccactctgaggatgacagcagcgaggaggagcactcgcacgacagcatggtccgcgttggaaccaattaccaggccataattccggagtgcaagcct

SEQ ID NO: 132257 - DNA, 122 bp, Homo sapiens
aataaataaataaatacacacccatgtagggagcatattgggtgagtggcctgcctattccgctccttccatctcattcccactgctccagtaaatcattttcattaatttttctctttttt

SEQ ID NO: 132258 - DNA, 122 bp, Homo sapiens
gccggggccccggaagctccacctccccagcgggcccgagctgccgccgccgagcagccccgggtgagataagcagtttagacaaacactgggcgacggtggctccagcatgtatcagccga

SEQ ID NO: 132259 - DNA, 122 bp, Homo sapiens
ccacaggcctcaagtctaagactccccacaccgtctctgagaggaacgcctcccacagcacgcacagagattccctagataagaaggacattcacaaagagggctgaaaggctcatttgaga

SEQ ID NO: 132260 - DNA, 122 bp, Homo sapiens
ctgtcttgggtgctgaaggacggagcctgtgaacaagctgtgccttttgggatgtgggctcgggcaggccactctgggggcaccgtggtctctgggatttggaggcaggttctggagcaggc

SEQ ID NO: 132261 - DNA, 122 bp, Homo sapiens
cttaatttataagaagcaaagagaggggactttcccagagctctgggcacagctgctcgccgtcctcggaaagcccagactcaggctccgcgcacctcgagccctgggctccgaggctgggt

SEQ ID NO: 132262 - DNA, 122 bp, Homo sapiens
gctgcgcccggccatcccggtgggagggctcggctggaagaagttgaccaccttgtggagcgactgcactcgtgcgctgtgggcctcccagtccgagaagctgcggaagtcgccactctcca

SEQ ID NO: 132263 - DNA, 122 bp, Homo sapiens
cgggcgcagcgccactctatgcaggctgcagcggtcaaggcggggagctaggggtgcgggcgtctaggcaaggaacccctgagccgggagagctggacgaggagcgccccttggcgctgccc

SEQ ID NO: 132264 - DNA, 122 bp, Homo sapiens
gaccacagacttcggctagaaagctcactgtcatgctggatgagggcatggctcaggcaccgtggcttatcgtttgggctgaggacagatgtagctttcactgaactctcttccagtgcacc

SEQ ID NO: 132265 - DNA, 122 bp, Homo sapiens
tgcaaaatcactgtttctcatttatgggctccatcctagcgctcttactgattactcaaccgcaaccctgtcctgaactttattctttttttctgtgttggcctggatattgttgtttctct

SEQ ID NO: 132266 - DNA, 122 bp, Homo sapiens
ccgtggtgctgaaagcttgaccggcgcgagctggagccgccaccggctgcctcggggtctcgccgggccttacctgctccgcgccctggaagcagatcttgcagatgggctggtggtgctgg

SEQ ID NO: 132267 - DNA, 122 bp, Homo sapiens
gcaggggcgtgtgttggccccggcctgggcgcggtgctgcaggtccaggggctgtgggggcggggcgccgggtcgggccgagtgcagcaccaggttcttgacacagcctgtgatgcctgagg

SEQ ID NO: 132268 - DNA, 122 bp, Homo sapiens
ctctgggttccttctctcttctgatggggttgggggggtcactagccctagagcccccatcgccccctcctagggccagccccacgcgccaattttcccacggaagaaccgcaagaaagacg

SEQ ID NO: 132269 - DNA, 122 bp, Homo sapiens
gctgggtcattaacatggcagcaacagcaacaaagacctttacagccgctgcctgtaaaccgtggataaagttcaagcatttattctgtttgaggcctcccagtgtctataaaagcccagca

SEQ ID NO: 132270 - DNA, 122 bp, Homo sapiens
ccgtcctcagcggcattttctggggtctcctgcagacccctcagctgtgccataaccaaacgccacgtgcctcagcttcctcacgccccaaactttggaaggcaggtgggtccgcgtgcggt

SEQ ID NO: 132271 - DNA, 122 bp, Homo sapiens
cgaggcagtgctgcgttctaagagtctcggagggaggacggcagaggaagggaaggaacccggagcatccttttggaatcctggctcgcctgtgtcccccagaacacgccacctttggcctc

SEQ ID NO: 132272 - DNA, 122 bp, Homo sapiens
gaggccggaagtcagaaggcggaagtgaactgcagcctatcagcgccgccggcttccgcgcggcattgtggggcttgtagttcttgtgccgcagggctttaaaggaaacgcccacgtttctt

SEQ ID NO: 132273 - DNA, 122 bp, Homo sapiens
gggtttgccctactctaatatgacttgtgtcctcataaaaagggaacagacacagacacacgcacagagaacaccatatgaggatggaggcagagattggagtgctgtatctacaagacaag

SEQ ID NO: 132274 - DNA, 122 bp, Homo sapiens
gctgcccaggactgcaaaacaccggcgtcggcgcgtcgcagccaatcagcgcccgcctcgcgctgccctcagccaatcagcgtccacctcgcaccgtccgccaaccaatcaacgcgctcgcg

SEQ ID NO: 132275 - DNA, 122 bp, Homo sapiens
tcagagtaatactttcttaaagatagtgcccaaatttggacattatgcccaggtgtaatccgaccagtgaagagcatcagttcagcctaagattgcagcctcattcgggttttgaactgaac

SEQ ID NO: 132276 - DNA, 122 bp, Homo sapiens
ggcagtggccaccacatctggttctcgttaacttttctaaggcagcggccgctggagcagcggggctggcggggtaaaagctcctggccagggctgcctggagctgccccttccactccgcc

SEQ ID NO: 132277 - DNA, 122 bp, Homo sapiens
gcagccggaactcggggcatggccggccggcagggccgggagcggcagtggtagcgggagcgctcggggccggcagcgcccgccgtgcgctcttctgggcggtggaacccgccccgtagatt

SEQ ID NO: 132278 - DNA, 122 bp, Homo sapiens
catcctaaaacgaattagcagggtcaagtaaagcccggctcctcagtgcttccctttgcacggtgcgcggcggagcccgattctgctctctccatactctgaggcctagaggaggagtcccc

SEQ ID NO: 132279 - DNA, 122 bp, Homo sapiens
cgcggcccctcgctcggcgcccccgaggccgccggctcgccgccccacgcccgcttcgtgcgctcagctgccccgggacccgcctgcctcctcgcgaacttgggacgagttggaaaatcctc

SEQ ID NO: 132280 - DNA, 122 bp, Homo sapiens
ggcgttacctgcagttcggcccgcagccgcttgttctccgtgtccagcttggcctcgcggcggcccatggacaacaactcctggttcttgctgacgcgaaagatctcgtactccttcctgag

SEQ ID NO: 132281 - DNA, 122 bp, Homo sapiens
ctggcggggactgggggcacccgctgctcacaccctcccctccccagcccgcatccctgacgacccgcatcccagccctgcgggctcaggctctgcggcggcccctgcacctaggaccttgg

SEQ ID NO: 132282 - DNA, 122 bp, Homo sapiens
cagggccttggcccctccccctcccattactaagctccttctgctcctgcccctgttcttcgctcaggagcagccattaaaatgtcgcccggagacagtaataaaaggctcggacgtgggct

SEQ ID NO: 132283 - DNA, 122 bp, Homo sapiens
tgacctcgtgatccacctgcctcggcctcccaaagtgctgggattacaggcgtgagccaccgtgccggcccaagcctttgacattttctaagctcttcagtaatgaaatcctctcattgatt

SEQ ID NO: 132284 - DNA, 122 bp, Homo sapiens
ggtacactttaggtatgctgaattaataaataatccaccagctgttttagccattagcttcgctttgttctccccaaacctttggccagactaagttattactgaataataactgttattca

SEQ ID NO: 132285 - DNA, 122 bp, Homo sapiens
tcatggttcaaccggaatggggccagggtctcctccagcaggcgccggtgggcagccagacgggcagccacggcagtcaccatcgccactccccggccaccaccatccacagaggggattaa

SEQ ID NO: 132286 - DNA, 122 bp, Homo sapiens
tcacattcgataacttgagcacgaataaaggcagctcacagcaataacgcctgatgggcacgggccctgtgctatgctctaaacactgctcctgtcacccctccaagacatgggtcccgcat

SEQ ID NO: 132287 - DNA, 122 bp, Homo sapiens
ctggacccccggtcccagggtggcagctagtgcagcctaggccacaccagcatgacccctcgcccctgtctccacggagcaccgtgggactctggcatcagaatcctggggccccacccaac

SEQ ID NO: 132288 - DNA, 122 bp, Homo sapiens
aggccagtccccagatttcaatgcatggcgtcctgcaggatggagccgggcggggctggccggccaggggagaagctccagggtccaggggcaccttatctctaaggtcaggacaggaccga

SEQ ID NO: 132289 - DNA, 122 bp, Homo sapiens
agcccctctctgcccttcctaccttgaaccttgtccctaactctacttcctccctgcacacgctggccaagccctgctctcagacccctggctggaagtagatgtgtctgtatgaactcatg

SEQ ID NO: 132290 - DNA, 122 bp, Homo sapiens
agaatcttccagtcaccgttcctctgtccccattgtcgctgtcataaagaactcttctcccgctgcatatcaccggggttcaaataaagcccttctgagggatgccctgtgggaatgacaga

SEQ ID NO: 132291 - DNA, 122 bp, Homo sapiens
ggacagcacagaggccggcaggaaggattgaggtgaactcccggagcccacgacacagcccgttcattcatggagctgcagccgcggcttctcagtcttcgctggccggagtcgccccttgc

SEQ ID NO: 132292 - DNA, 122 bp, Homo sapiens
caaagaaatatattgtcacatgacttgtgccacagacacgaataacatccaggtggtgttcgacgccgtcaccgacatcatcattgccaacaacctccggggctgcggcttgtactgacctc

SEQ ID NO: 132293 - DNA, 122 bp, Homo sapiens
ccgggaaggggagtttgcgggggaccggcgagtgacgtcagcgcgccttcagtgctgaggcggcggtggcgcgcgccgccaggcgggggcgaaggcactgtccgcggtgctgaagctggcag

SEQ ID NO: 132294 - DNA, 122 bp, Homo sapiens
gggagactccctttcccggtctgctaagtagcgggtgcttttcctttgcattgatgctaccgctagaccacggtccgccagaccagggtccgccagaccacggtccacttggtaaccggcgt

SEQ ID NO: 132295 - DNA, 122 bp, Homo sapiens
gctttcagattttttttatttcaaaaaaaacccgctgcattttaactgagtaccagacaccgtgctaggggttggttataccatttcagaaaattacattattgatggcaatggtgttggtg

SEQ ID NO: 132296 - DNA, 122 bp, Homo sapiens
tggggaattagctcaggcggtggagcgctcgcttagctatgcgagaggtagcgagatcgacgcccgcattctccagtttcttgtctggtttatgtctcttagtttgtattccccgttgtttc

SEQ ID NO: 132297 - DNA, 122 bp, Homo sapiens
gcggtgttccaggggaaacgtgctcggcactattttgggaaggacgagtgactgttgcgccgtggatctgctggggcggagtctgagcgttactttagctgggtttccctgcgtgtttggat

SEQ ID NO: 132298 - DNA, 122 bp, Homo sapiens
gcccttccatgttcctgtcctagctcagagggttgcatcccctgcccgggcggcagccctcgaaaaggagcaggctgctacctggggcgagaacaccctcagggagatgcaggtggtggcct

SEQ ID NO: 132299 - DNA, 122 bp, Homo sapiens
ctcagtcagcccagggagaagaagaagatggtccacacccaagtgcagggaacaccatggcgtccagggaagaacacctcctgcatcaaggaaacacatgtttccggagtgaggaagctgaa

SEQ ID NO: 132300 - DNA, 122 bp, Homo sapiens
tggccaatatggcgaaaccctgtctctactaaaaatacaaaaattagctaggcatggtggcgcgactgtaatcccagctactctgggggctgaggcttaagaattgctgaacctgagaggca

SEQ ID NO: 132301 - DNA, 122 bp, Homo sapiens
gatcgcggacgccacttacttggagttcgaggaattccaatagataggctctaaaactatcgatttggaaatcgcagttctgcataaaaccatcaaaacaccccagcagtacttccacacgg

SEQ ID NO: 132302 - DNA, 122 bp, Homo sapiens
tctgggtccccaggcagcctgcggtctgcacagatgaggctgtgcctgctagatggttgtcggccgctgagccctggggattgcagccctgtctgtgccccttcacactgaggtggcagtgg

SEQ ID NO: 132303 - DNA, 122 bp, Homo sapiens
cctttcctagtcaaagaaaggagtgacagatggcacctggaaaatcgggtcactgccacccgaatactgcgcttttccaacgggcttaaaaaactgcccaccaggagattatatcctgcaca

SEQ ID NO: 132304 - DNA, 122 bp, Homo sapiens
aaaaccgcctggttggcgctctcccggaattcctcttcctggcggtcaggccgggacagtcgggaggaggtggctgaagggctcttgccatcggcaaccatttgttcctggtgagccccacc

SEQ ID NO: 132305 - DNA, 122 bp, Homo sapiens
ctccctggacagcaaccacagggctgggcaggtcaggagaatgggtggggaaacctcggccgtttgggaggagccactggcttgaaaaagtgttacaaagtctgaacgtgggcaagtctcta

SEQ ID NO: 132306 - DNA, 122 bp, Homo sapiens
ctcatgtgtcatcaccagtgtcagttacagtaagaaccgagtaagaggaggcaggatgtgcgtgagagcggctgagaaaccatccatggaaaaatcctagacttggttttgcaagtttttca

SEQ ID NO: 132307 - DNA, 122 bp, Homo sapiens
gactgaggtgcgggctcatttgcaacaagtcctttgacttttggagccacagataaaagtcggtgcgctggtcctgcctcattaatccagggcttgcagtgctttgaagcccagtcgttgtt

SEQ ID NO: 132308 - DNA, 122 bp, Homo sapiens
cgtcgccgctgccgctcctgctcctgatgttgtggctgttgttccgggagttgcagcctccgccattactgtttatcccacacagcaaaggccccggaacttccgggatcacatagttccgg

SEQ ID NO: 132309 - DNA, 122 bp, Homo sapiens
cggccacgttcctgacgaacagagacgtgttggggggacgcaggtagcgggacatggcggcggcgtgtctcggccgggcgcactaacgggctcagcaaaccgtccgcggctcaggcggccga

SEQ ID NO: 132310 - DNA, 122 bp, Homo sapiens
gggcaggagctcggggagcccttcctggtgcccgccgtcctcctgcggagccatggggagcggctccagcgcatggcggcagcccgcccgcctcgtcctggcccctgccctgacccgggggc

SEQ ID NO: 132311 - DNA, 122 bp, Homo sapiens
ctgggaatggtaagaaaccctgagtttgtgtcactggattgattccagctccattgtccccgtgtccttcaactaagtctctgctgaagcctgttctataaaaacagcaagtaagtggtttg

SEQ ID NO: 132312 - DNA, 122 bp, Homo sapiens
aagagaggtgggagggaaagaaggaggagggggaagattctttggccagggttggtcctgcgcaaaggaaggaggaaacagaactttctcatctgaaggattaggcagggggtgggaggtgg

SEQ ID NO: 132313 - DNA, 122 bp, Homo sapiens
gagttattttctttttggaaccggcagccttagaccaacagccctatagaagcagtgacccggagctatggcagaggatcaaggtggcctcaggtagtagaaagcatgatgcctctgcctta

SEQ ID NO: 132314 - DNA, 122 bp, Homo sapiens
tgccatggggcagcgggaaggccctggagggtgcctgggctgtgtctggtcccggccacgcgtccctgcagcgtctgagaccttgtggaacacacttgacccggcgctgggacggggtcggc

SEQ ID NO: 132315 - DNA, 122 bp, Homo sapiens
ccccccccccaacctgtgcagctgaggacttcccctccgtggtgacagcctctgggtcctcggtcggtacagtctctgcacctcgcgccccagcaggtgagcggcgaccggtaactggcgag

SEQ ID NO: 132316 - DNA, 122 bp, Homo sapiens
aattcaattcagttcagttcagttcaattcaagatgtgccaaataccggtccaggtgctccggacacagttgaacaggacctacagggtttttgctcttatgggattcacattcttgtggga

SEQ ID NO: 132317 - DNA, 122 bp, Homo sapiens
atcattgtcaggactatgacctcaggcactctaaacatatgttttgtttggtcagcacagcgtttcaaaaagtgaagccactttataaatatttggagattttgcaggaaaatctggatccc

SEQ ID NO: 132318 - DNA, 122 bp, Homo sapiens
aggagacgccgtgtgtcagccttttagcgtgagtgccaggcacgtaccctttaaagcagacgcattctaaacgagtgggacgacggcattctcgcctactgactgcacttttgagccatgaa

SEQ ID NO: 132319 - DNA, 122 bp, Homo sapiens
cctgcccctcaccctggagaggccccgtcggaggccggcctcgcgggggaagggcggtggcggaggaactacccaggaattccagcgccggctccgaaaccttcccaatcccgctccttcgc

SEQ ID NO: 132320 - DNA, 122 bp, Homo sapiens
cttcttgcggttgcccttctggatgccccagcggtgcgccagcgcctccttgtgcttggacgagaactggaaggtgcccttgtccttgtccacccaccagatgctgtccttcatgtcgccgc

SEQ ID NO: 132321 - DNA, 122 bp, Homo sapiens
gtctaaccgcgcaggcgtgcagcttcggcaagctttacaattccaacagcgcgtccaaaacgtggtccctgactgagacttattttacgccactagagtgagggtgggtagcgtcagaaaga

SEQ ID NO: 132322 - DNA, 122 bp, Homo sapiens
ttgtcaggggacatttgtttctggtcttttaaacctagatgccagtcccttcctccacctcgcgagacaccgatgcacagcgcagtcgtccgaccgacagggcggaaaggaacgaaggtggg

SEQ ID NO: 132323 - DNA, 122 bp, Homo sapiens
tttatctgccagggactggagaaatgtctctcttgttttcccagagcaccccctccattacgtgaaccatcatatttatcacgatactttataattatccatttagcttctctcctgacgga

SEQ ID NO: 132324 - DNA, 122 bp, Homo sapiens
gttgtcctatcacagatccccttggcagagtgtggctgggatctgcttcctgtgtgtctccggcctcagccccctgtcctttgcaaacctcccctctgtgcccaagccaccctggggcgttt

SEQ ID NO: 132325 - DNA, 122 bp, Homo sapiens
ggcgagtctcctgggacgctgccgaggcacttgctggggagtgtggcccgcgcggggctgcggtctagatgccgagccccttccaggcgcaggcgtcgctgcggaggtgcgttgtcggggga

SEQ ID NO: 132326 - DNA, 122 bp, Homo sapiens
caggctgctcaggatgcaaggtaaccagagctttcctcggactgcttcagtctttggggacgtggggtcaccctaatccttcctgtttatattgtgaacgcgtaggcagcgagacttaagct

SEQ ID NO: 132327 - DNA, 122 bp, Homo sapiens
aggagagaagagcaggagacagatttattgatctgcagcatggatgtcagagataggaggcggcttggcagatctgggcatggggctgccctactccctgacgtgtcctggtgagacatgcc

SEQ ID NO: 132328 - DNA, 122 bp, Homo sapiens
aagtgcaaccccggatagtgccccaacctgctccccactgggagcagcaacccagggagacgccccaactcactccctgcctccggcagtacagccacagatagcgcacccaacccaccccc

SEQ ID NO: 132329 - DNA, 122 bp, Homo sapiens
agcgagcgctgacgtcagtcaggctaagctgggccaggggctctgaggtcacggcccagccgggcagctccacccgcttcccgctattactcccacccccctcagccagacgggcctccctt

SEQ ID NO: 132330 - DNA, 122 bp, Homo sapiens
ttcttagtcaccccatctaccgccacactatactcggaggtgtctgctgccaccaatcgccgagcctttggatggttctgccttgtcagctgggtgtcggacttaacctttccaggttgggt

SEQ ID NO: 132331 - DNA, 122 bp, Homo sapiens
agtgccggccccgagcagcgcttcgcaggcccccgcgcgaacgctgccgaccgccgcgttcggtcgccgaatgttacccggttctgaatgttacacttacacattccattcccgacacgaca

SEQ ID NO: 132332 - DNA, 122 bp, Homo sapiens
atggttttattctggtgtaaatcacgtaacagaaacctcaccgttttaactgccgtaaagcgtgcagtgtggtggcgtctggcacattcgtagcactgtgcaaccatcgctgccatctggtt

SEQ ID NO: 132333 - DNA, 122 bp, Homo sapiens
agctaagaaagcaaactcactcagaaagtcacatctgaaactgtaccaagagcttacctacgtttcagaacaggacccacctgagtagacccgttatcaccatcatcaccagcacaggcatt

SEQ ID NO: 132334 - DNA, 122 bp, Homo sapiens
taggaggatgaagagaaggtcatggagaagccggagccggtggcgtcaaagctgccgcggcgggagccggcccgggagccggtgcgcgagccggtgcgggagccagcggtagagccggagcc

SEQ ID NO: 132335 - DNA, 122 bp, Homo sapiens
cctgctgcgtcactcagttctgcatggtgagtctcctccatccactgtgatctggaaccacgtcattgtcagtggaggttgaatacaactggaattttttatgggattctaacagacctgtc

SEQ ID NO: 132336 - DNA, 122 bp, Homo sapiens
ctgttgagagcagggacagaccgtttcctaaatgctacactcccctccccagaaatgttccgagacggggccacagcagggaagagtcacaggttttgcttgctgtggacctctgacgctgt

SEQ ID NO: 132337 - DNA, 122 bp, Homo sapiens
cttggaactcatctaacccaggtggcaaacaggggccgcccgactgccagggagaattgacgagcagtggcgtcctggaattcccgtgaggtggcgggagaagattctatgattgatccgtc

SEQ ID NO: 132338 - DNA, 122 bp, Homo sapiens
tcccgagcccagcgcggagcagccgggtttgaggatgtcagcgagcagccaatcagcgcccgcggcctaaggtaagagatgagtctgtagttcagcctgtcaatcacgcgcccctcccgccc

SEQ ID NO: 132339 - DNA, 122 bp, Homo sapiens
agtcatcaaagatgacaaaggccccaccgctatctccaaggcacgtgtctttgccgccctcgtagtagccagcacagaacatgttctccgtgacgctgtaattgcccgagcgggactcatag

SEQ ID NO: 132340 - DNA, 122 bp, Homo sapiens
ggagttagttgcttctgtccaaagaggtcggccaatgggggccattctgagttcagaaaccgctggcttggagcccgatggacccagccaggcccagctctgctgttgaccagttatgtgct

SEQ ID NO: 132341 - DNA, 122 bp, Homo sapiens
gccgagcccgaaccccaagccgcggagccagcacctcctccagtcggggtcgtccgctcccggccgttgagccaccgccgccacccggtagtgtgtcccgctgccccaatccgcctcatcaa

SEQ ID NO: 132342 - DNA, 122 bp, Homo sapiens
ctcaatctcttgaccttgtgatccgcccgcctcggcctctcaaagtgctgggattacaggcgtgagccactgcgcccagccctgcatcttactttctatcaggccagtggtgtttctttgtg

SEQ ID NO: 132343 - DNA, 122 bp, Homo sapiens
gccaaagaaagccctggaacttcaaagcacccacttggctgctggcaactgtctacactgcgtatggactcacatactttgggagccatttgagcccagcaccttctgatgatgaagaggag

SEQ ID NO: 132344 - DNA, 122 bp, Homo sapiens
ggccgggtcgcaagaagaccctgaccctgctccggcgctggggcgcgtgctaagggcccgcggggtatcagctgtattttcgaacccctgtgcttggccggggagttcccaaggctccactc

SEQ ID NO: 132345 - DNA, 122 bp, Homo sapiens
ccacacaccctccttcctcccaccgcggttttgggtttccagcctgttgcaagcctgagtcgtacgctgccgtgctctcacctgcagctgagggacagccttgctggaggtgcggtgctact

SEQ ID NO: 132346 - DNA, 122 bp, Homo sapiens
tcctggcaggaggcccagctgacctgagtggggagctgcgcaggggagaccggatcttatcggtgaggagacaaaggagaggtgggaggatgggaactgtgccagtctaaaatggagagcga

SEQ ID NO: 132347 - DNA, 122 bp, Homo sapiens
ccagggaaccctcccctctccccggcagtgtcccctcctcctccctcttcccctctcctccgaaaaggtggccatgtaaacaggaagtggctcaaagacatagagggagtgtggctggaagc

SEQ ID NO: 132348 - DNA, 122 bp, Homo sapiens
cagagtagttctgaaaaggaggaagaattcacaaagcatcagttatgggtgcagggaagtcgccatctgccaatgggcaccagagtgtcactgtactggaaggggaaaaggagtgggctgga

SEQ ID NO: 132349 - DNA, 122 bp, Homo sapiens
ctttctgtgcccctgcaccccatttaaggggtggggtcggcagatgggcgggatcagtggcgaaggtgggaggaggacatggagagcagcccctccccctcctctgtctggagccggtgctc

SEQ ID NO: 132350 - DNA, 122 bp, Homo sapiens
gtagccaccgggggaaggtgaggtctccccatggccctgcgggccgagcaaggccagagtcgggcccctccctccaggccccggcgcggctctgtgtggatgttagtgagggatcgcccctt

SEQ ID NO: 132351 - DNA, 122 bp, Homo sapiens
ccccccaaacagccccagcgcggcgtgtcctcgccgtcaccctcctctctgtccagggctcgggggagcttattaataaatagctgtcccctaggggtgcatacggccagggctgcggccct

SEQ ID NO: 132352 - DNA, 122 bp, Homo sapiens
cacttgcttggtgccaggtaccctgctaagcacaggaaggacaaatggcctaacccaaatcgcacagctagtaagcagcagcattcagccccacagctgcaacctcccacccagtgcgacgc

SEQ ID NO: 132353 - DNA, 122 bp, Homo sapiens
ctttatattagccacaacacaatttataattaatgcgtcagctgcttagctgagcaagagcgatctatcactcttcattactgtcaaaaagccaaactctaggacaactagacaggaggagg

SEQ ID NO: 132354 - DNA, 122 bp, Homo sapiens
ccgagtttaagagaattttcacctaacttctaatctccacagccaatcagttcttggaaccgcacacccgatgccgacatccctctcttgttggctcccctcgttagcgggattcaataact

SEQ ID NO: 132355 - DNA, 122 bp, Homo sapiens
gggcggggctggggagagggcggggctgggctggggccccctgttggtccgagtttagggcggggttgccggaggggcggggccatatcggggcgggtccgagaggggaggcggggctgggg

SEQ ID NO: 132356 - DNA, 122 bp, Homo sapiens
ccgggtgcagggttttccccgggcagcaggtccgggcctggggactacccaggaggggcgcgtgggccgggcggagctcaccttggccgaggcgcggcggacgctgggcgagctgggcgagc

SEQ ID NO: 132357 - DNA, 122 bp, Homo sapiens
gtcttcccttctggggtttggcttgttgtcactgacaacatggggcagcccttttgcacacggcatccctggagccacgtgttaactgtgagttaataaatgggtgttgttttaagccacta

SEQ ID NO: 132358 - DNA, 122 bp, Homo sapiens
gcactccagcctcggcgacagagcaagactccgtctcaaaaaaaaaagagaaatacaatacggaatcagaatccgtggggactggacacagcaatccagggtttcacaagctctccagatga

SEQ ID NO: 132359 - DNA, 122 bp, Homo sapiens
aagccgcgggccacgatccgctggaggagaggaggcttcagagtcgctggcgcgtggcctcggtgaaaagcaacccagtgtttgagattccatgggcaatgactacgctggccgagccccgc

SEQ ID NO: 132360 - DNA, 122 bp, Homo sapiens
ctctgtgagcagggctgcggtcacctcccacatctgaagagaaccaacctgaggatttcacgctggctgcgtgccagaccagtccctgacaggttgtgcgaggcccttcgctggacagccca

SEQ ID NO: 132361 - DNA, 122 bp, Homo sapiens
aagctcttcaactttgaatttcatttgcaaagtagatggcatctatttcagaggcttattcggaaggttaactatggagtgtattaagagcccaacctgtaggagattaagtgttctgcctc

SEQ ID NO: 132362 - DNA, 122 bp, Homo sapiens
cagagccttactcagaatcataaaatcattagaagcaatgtctgtcctcactgctgcatccgatattcttccggaccactggatcacaaatcaaaccatgtgactcccgcatgagcaggcag

SEQ ID NO: 132363 - DNA, 122 bp, Homo sapiens
ggagggaagacacagctttgcaggggcagcgtgacgccagcactgagctgttctggacagcgacccaggcgggcaggggcctccggccctggagcgggtgggacccctgctgtccaggacgt

SEQ ID NO: 132364 - DNA, 122 bp, Homo sapiens
cccggtccccaccccatcagtccccaggtgcagacacaggcgtgccagagcccaagtcaccgggccacctgggaacctttgctacccgctcttctgcccggcaaaggaatgggaggaggaaa

SEQ ID NO: 132365 - DNA, 122 bp, Homo sapiens
aagtattctgggcatgtagttgtttctaagcatctttggatgctgtcccattaacagtctcgtatccctttaaatctaagtgatagcaagtctctaaagggaaattttaaaagccaagtgcc

SEQ ID NO: 132366 - DNA, 122 bp, Homo sapiens
taacgggagggtgtgcgtctgtgttcccgggttgttaccttgcacacacccacttatgcccgcgtgaaaaacctttactccccgccgccggccaccgctgccagggtcacacaccttaaact

SEQ ID NO: 132367 - DNA, 122 bp, Homo sapiens
tattcccttttgctcccagtgcctagcacatacttggtactccaaaaatattacatgaatcgaagacagtaaggacacaaatgtatttcagaattttaggcataagttctacataccacttt

SEQ ID NO: 132368 - DNA, 122 bp, Homo sapiens
ttgtaattgtatgtttttgttttaatatcatgtatatggaaatgtcccttgctcttgtcccgtaacatagtaatgtgcgtgtttccccatgccatagccagtcttcaaaaatgatatttgaa

SEQ ID NO: 132369 - DNA, 122 bp, Homo sapiens
gggttttataggctggggtagcaagtggaaagttacagaaggttacagctgggggttggtcgttatagatttggagggatggttaaccggctggaacaggaacttgctgtttttcttctttg

SEQ ID NO: 132370 - DNA, 122 bp, Homo sapiens
aaaaatgaacatggttagtcgtgagctctttaagtatccaccagaagtcatttctgctcacgtttccttggccaaagcaagtcaaatggccacagccaacttaattgggtgggatgtacaat

SEQ ID NO: 132371 - DNA, 122 bp, Homo sapiens
tgagtcagtgaagcacttaaaggggccgaggccaggaggagccgccgttacttcccttctcgccgctctcccgacttttcaccgaggcacgactcttcccccttacccactcacccccactt

SEQ ID NO: 132372 - DNA, 122 bp, Homo sapiens
cgctgtcatttaagtcatttcgtcctcttggagcctcggtttccacgtgggtaaaatgatcgtgaaaaaaagcaccgaggagtactttgagctcgaacggaggccatccgtgtaaagggcca

SEQ ID NO: 132373 - DNA, 122 bp, Homo sapiens
actgttgctaccgactcccatatgtactcaaagatagatgcctaagaattttcacatgcacgttatttgcagtaataaacaaccaaaaaccatttaaatgttaatgaatagactaacgatag

SEQ ID NO: 132374 - DNA, 122 bp, Homo sapiens
ctgtaaaatgggataattttacagaggtggatttgggggtggattcaaggatataacactcgcaatggtcagtgaagtgacaggcagactgtaagtgcctagtgagtgttagctggtgtcag

SEQ ID NO: 132375 - DNA, 122 bp, Homo sapiens
caaacatacataactggtttgatggatggagagtgaacaagtttggccagaatcaagcagcgtttctcaacaggggcaccactggcatcgggatgagacaattgttcagtgtgtgggactgt

SEQ ID NO: 132376 - DNA, 122 bp, Homo sapiens
acgcacatctcagcttctccttccgggacagctccacctgttcctcgtccatggtggtgtcgatgggccggaagtaggacatgatggtcaggaagtcctcgaaattgatctcatcagccagg

SEQ ID NO: 132377 - DNA, 122 bp, Homo sapiens
gcagaaggtgggcaaatttgggaagaaaggctgggataaggctgaaaagtaagtaggcaccgaggcttctgaaaactcctgaatgccatttagaggagtttgaatttcaccttaaaaaactt

SEQ ID NO: 132378 - DNA, 122 bp, Homo sapiens
ccctccgcacttgccactccttccccctcgaggtgctctaaaccctgcttcctgtccctgcgccccacaaggaggctgtgcctaacggtctgacccgtttgcacgccaggggcgaggggccg

SEQ ID NO: 132379 - DNA, 122 bp, Homo sapiens
gtctaggaaactcgggggtgtctgaagaggctgttgggctatagtaaggagcgctcgggccgtgtggaggaggctgctggaggggccccccaccccatcttggcttctctccgcacccgccg

SEQ ID NO: 132380 - DNA, 122 bp, Homo sapiens
tcacttcaactcagacaaagctcttgcccagcgtgtgttgaatcgcttccagccaatcagcgtgcttccaaatcaaaagctgatggagtcacccaaggagggagggcgagagtggagggtgg

SEQ ID NO: 132381 - DNA, 122 bp, Homo sapiens
ggcctgaggccagcaggttctgagtcctggcctcgaaaagcccaaagcagaggcccagagcgtgtgtggggggggtgggggggtcttgaatgcctggcttcaccaccctctggctgtgccat

SEQ ID NO: 132382 - DNA, 122 bp, Homo sapiens
tccctcgaggcccccggaaccgatatggcgaccccgcccagacctgggtccccgcggccgcgcgcgtctcccgccgttgtggcccccgagttactgacttttgttcacaccggtcagcgcct

SEQ ID NO: 132383 - DNA, 122 bp, Homo sapiens
gccagggtggggcgaaggcgctgaggtctccgagtgctctttcaggtccaactccagaatcgcccagccccacgcaatccagggccagaggttgtgtgcgcagcactcgaatacatccacag

SEQ ID NO: 132384 - DNA, 122 bp, Homo sapiens
acatgcgcacgcacacgggcgagaagcccttcaagtgcccgtactgcgaccacagggcggcgcagaaggggaacctcaagattcacctgcggacccacaagctgggcaacctgggcaagggg

SEQ ID NO: 132385 - DNA, 122 bp, Homo sapiens
cctttgctcatggcaatgtttcctctgttcactttctgctgcttctgcattggaaaattccgtcctttaacactgggattatatgtcaccgttgctgaaatcatagacagagtccacttaat

SEQ ID NO: 132386 - DNA, 122 bp, Homo sapiens
ttttagattagttttataatgcaaaactagatgtaagatttagcagtgatgatgtaatgacgaagtcaaaggtagagtttccttaaaggccctctccacttattggacctgaacagctttgg

SEQ ID NO: 132387 - DNA, 122 bp, Homo sapiens
ctgaggaatttgggcctcttgcctgagggaattggaatcatttacattgattaagttggtcgaataatgattagaacacttcaggctgaccatagtgagaatgtattgggaggagagattgg

SEQ ID NO: 132388 - DNA, 122 bp, Homo sapiens
ttgtgaggcgggggagggcaccggggggaacgcgcgagccgggagcgtgcagcaagggagcgggccagcgcgcgcgcccaccgcgggggagcgaggtagagccctccccccgcggcaaagct

SEQ ID NO: 132389 - DNA, 122 bp, Homo sapiens
ggcctgagctcaggaggcgccttctgaggctgtttctcatgagaagagccgatgcctcggcgttcctgtcctgctactcagatcctctctgtttggggcctgggacgacggcaccttcggga

SEQ ID NO: 132390 - DNA, 122 bp, Homo sapiens
aggatcatcccattgaccattcagcagtcgtttcatttcatggccttcacataatgtgcacggaggccacttcccacctacaggaggactgatgagcatgcagcaatctgcagtttctgttc

SEQ ID NO: 132391 - DNA, 122 bp, Homo sapiens
gtggggtgactctccacattgggagccccctcatttgtcctcagtgacttctaaaaacaccgctggcgtgggctggatatttgatcttggggccaagtgcttccagactttgttctctggcc

SEQ ID NO: 132392 - DNA, 122 bp, Homo sapiens
tcagatttctcttttttttctttttttgacagactttcgctcttcttgcccaggctggaccgcagtggcacgatcttggctcactgcaacctctgcctcccgggttcaagcgattctcctgc

SEQ ID NO: 132393 - DNA, 122 bp, Homo sapiens
gtgtcaaaccattacaagggctcattattcccttaattaatttttttcctttatttataccgtgcttactgatttggggtaggctgagtgagcttaatggagtctcccaaactgtaacagcc

SEQ ID NO: 132394 - DNA, 122 bp, Homo sapiens
gagcggctggccgaggcggtgcaggagcgacagcagtatgcctggctgtgcagccagctgcgccgcaaggccaggctggggagtgtgtctctggacttgtgcgatggggacacgggggagcc

SEQ ID NO: 132395 - DNA, 122 bp, Homo sapiens
gcctctggacctgggtgactgcggccactgggcgggctggagactccaggagaatcaggacgtgcgtaactccctcgccggcggactgcagcggacggggcgcgtgctggtgacgtcagtag

SEQ ID NO: 132396 - DNA, 122 bp, Homo sapiens
tggggccaaaaaagaggggacccgtaggacagatgttgatcccactcaaagtcagcacagcgggatgcacttaaagggcactgagcacgcaggggctgtcacaaacccatgaggatctgcag

SEQ ID NO: 132397 - DNA, 122 bp, Homo sapiens
atgtgggtgtggcagtgcccatcagcccggctctggccctcctggcagctggagggtgctcggcccttagatgtccttgactgtgcccgcggcccttgtgaccttggagcccccagcgccgt

SEQ ID NO: 132398 - DNA, 122 bp, Homo sapiens
ctcccgcctcccgtcccaccttcaccctcagccaagaggcttgggtgactctgagtaatacgttaacaaaaaacaaagcttctttgaggaaacagcatgacttagtgcaaaagattctctgc

SEQ ID NO: 132399 - DNA, 122 bp, Homo sapiens
cttcccgggcgcctcctcccaactccaggggcccgagccctggaaggactgtgatttgtccgcgactggagagagttcagtgcagtctggccccgcgcgagagggaaggatcctttctaacc

SEQ ID NO: 132400 - DNA, 122 bp, Homo sapiens
atcggttaggagaagggggattcctcactcagctgtgcgctctgatttcgtgcgcttcctcgtccttcatgttggatggccagtttttcgtttgtgcgtcatcctctacctgagaaatggtc

SEQ ID NO: 132401 - DNA, 122 bp, Homo sapiens
tccaagtcattaagcacccacaaaggagggcaggcttgcacagcactcactccacacaaccgcccctgccctgagtacgacggagcacatggcttccctaaagccacaaggagaagagaggc

SEQ ID NO: 132402 - DNA, 122 bp, Homo sapiens
aagtgaggagaccctccgcccggcggccgccccatctgagaagtgaggagcccctccgcccggcggccaccccatctgagaagtgaggagcccctccacccagcagccaccccatctgggaa

SEQ ID NO: 132403 - DNA, 122 bp, Homo sapiens
cgaaggcctccccacgctagaagggatcatccagcagctcgtcaacggcatcatcacgcccgccaccatccccagcctgggtccttggggagtcctgcactcaaaccctatggattacgcct

SEQ ID NO: 132404 - DNA, 122 bp, Homo sapiens
tacccacagacgactcaggcgggagacgagcggtgtcatggccgccgacagtgacgatggcgcagtttcagctcccgcagcttccgacggtgagcggcttcccagaggtagccttcaaagcc

SEQ ID NO: 132405 - DNA, 122 bp, Homo sapiens
gagcttcccgggagcagccgctacccagggagaaccgcaacctggccccagagcccagagcggctgcaactctggggccaccgaacccgtccagccggcctccctgtcccccgccccttccc

SEQ ID NO: 132406 - DNA, 122 bp, Homo sapiens
gttggcatgctggctcacggacggggcagcgttggggtttctgcaccaaggggaacaccacgtacactccatacgttccttctggtccaggtatgatagaactgggggtcaagaaacccagg

SEQ ID NO: 132407 - DNA, 122 bp, Homo sapiens
gtgtgagaggtcgcgtgtgagagggccgcgtgtgtgtgaggggcgtgtgtgagagggccgcgtgtgtgtgaggggcgtgtgtgatagggccgcgtgtgagagggccgcgtgtgtgtgagagg

SEQ ID NO: 132408 - DNA, 122 bp, Homo sapiens
aaccctatgtggtaggtactgctagtgtcattcccatttttcacatgaggacacagaaaacgcggggatatcaaataacttacccagagtcacataactagtaagtgatggagctagaattt

SEQ ID NO: 132409 - DNA, 122 bp, Homo sapiens
acgcaggtgcagatgtgagcgagcaggcgctgagcaaggcaggagatgactcaagactgccgcgtggttctttctgcaatttgctgccgttgcaggctctgactctctgctaccctgggcag

SEQ ID NO: 132410 - DNA, 122 bp, Homo sapiens
ttctttctctatactttgtctctgtgtctctttcttttccaagtctctcattccacctaacgagaaacaaccacaggtgtggaggggcagcccaacccttcaacctacctatcttatctctt

SEQ ID NO: 132411 - DNA, 122 bp, Homo sapiens
ggagcatcccagggaggtgcttgtcccggcgccccacagtgccttctcctttaccggggccgccgccagcatgaaggacaaggcctgtagccccacaagcgggtctcccacggcgggaacag

SEQ ID NO: 132412 - DNA, 122 bp, Homo sapiens
ctgctcttcctctctaatcctttgtccctgggtgagagtgctttctgaatgcaatgcacccgggcaaggattctgagagggtgagccccctctgcgtggagaacagaagatctgtatgtcac

SEQ ID NO: 132413 - DNA, 122 bp, Homo sapiens
ttgggaaccacgggtcgtgcttacttcatggcgacagctccacggaaagacaaaagatggcgaaaagaaagagagaatcatgggaagagaccttataaggtcgctgcggggatgggggccgg

SEQ ID NO: 132414 - DNA, 122 bp, Homo sapiens
ccctagctcataagcttgctctgaggagtaagtgacatgatgcttgcaaagcacttagcacggtgccaggcgcaatactttttaatgctgatcactgtcatcagcatttcaaccagagacac

SEQ ID NO: 132415 - DNA, 122 bp, Homo sapiens
aggttgaaagcccagcctggcgctaagcactgggaacccgagaggcctcctgtgggccgacgccagaggcagggccaactccaggctgcccaagaggcctctccctgtccgccccttcgggt

SEQ ID NO: 132416 - DNA, 122 bp, Homo sapiens
tgacaagagaaatgggcaagagacagagatttaattgaataaaaactccaggctgtgacacgggtgggaagacacaaacgagtaattaacaacataatattttaaatgacagtgcaattaat

SEQ ID NO: 132417 - DNA, 122 bp, Homo sapiens
actaccgccgtccctgcccgggctaatcacgacaagggttggcatatcccagtggcaatccgggcccccccactgccgccgtccctgcctgggctaatcacagcaaagggttgatgtcactg

SEQ ID NO: 132418 - DNA, 122 bp, Homo sapiens
ccacgctctctaccgaaagcccttccagggagccagcattcatgtccttgccttcgcctccgcttccacccagatgctgcgtcctgggagaggcctcttggctgcccattgccacccactca

SEQ ID NO: 132419 - DNA, 122 bp, Homo sapiens
aataggaggagagatttctcagggttgaggattctctgccgacaagcgacctggcacatgcgaaaagggatccaaaatagaatcttaaaaagaagaagaaaaaaggcaggaaaagttggatt

SEQ ID NO: 132420 - DNA, 122 bp, Homo sapiens
atacaccccctactgatccgggaccggaggagcgagtccagtcgcaacaaactgctgagacgcacagtctccgtgccggtggaggggcggccccacggcgagcatggtacggcggccgagca

SEQ ID NO: 132421 - DNA, 122 bp, Homo sapiens
acaagcttgcaattgtcagtgtccctagaaagtcttttcaatattcctaaatcggatcaacgtatcctctcttttcagattgttagacaggtgcacgtgatagaattctcttttgcagctgg

SEQ ID NO: 132422 - DNA, 122 bp, Homo sapiens
gttccagaaagaggcagtcctctagaaaccccgtggtctgtgggctcgctccatgtcccacgcctcatcttgtcccttctcggttgcttttgccttggcccttccaggcctcagatcccagg

SEQ ID NO: 132423 - DNA, 122 bp, Homo sapiens
ttccacgggcgcatgaagtctgggtgctgtgctcgagtctctgaatattttgataggaagcgacaagaaaattcaaactgctctttgctgactactggaaagtgaaaagatgctcaagttta

SEQ ID NO: 132424 - DNA, 122 bp, Homo sapiens
acaggaggatcacttgcagccaggagtgtgagaccagcccaggtaatacagtgagacactcgtctctacacttttttttttaattagctgggtgtggtggcacttgtctgcagtcctgtcta

SEQ ID NO: 132425 - DNA, 122 bp, Homo sapiens
tattggaaagaaaggttgcagcctttcccggggtctcggagcccacacgtgaaggtggctcgctgccaccagggctccctgccgggcagaggggaatggacttgccctcgcttcctggaatt

SEQ ID NO: 132426 - DNA, 122 bp, Homo sapiens
ctggcctggcccgggcacgcggggagggtgtcgggggaggaggcggatggcttcttttcccgttaggcgcctggctcatggaagaggcgagtgtggatctaatcttcagctgattaaatgtc

SEQ ID NO: 132427 - DNA, 122 bp, Homo sapiens
tgcagagaggaatgctccagacgggtcaggcgcagggtgactagcctgacttccagcaggcgcacaatcctcccccacagagcccaagatgtctgtgcccacggtgctgactgctgggaggt

SEQ ID NO: 132428 - DNA, 122 bp, Homo sapiens
ttaacagtgaagtcggtgttcctgatggccgcgggtcggctgaaccggactcccagcgcccgagaggaggccaggggaactacaatgcccacaaggctccgcgccttcctcgatgtacttcc

SEQ ID NO: 132429 - DNA, 122 bp, Homo sapiens
gcctcaatgcttctgtgttaacgacctgtacatggtataagacctgtactgtcttaacaccgggcacggtaggaggtcacaatttctgtgttgcttttgttgtcattgaaattatgttttga

SEQ ID NO: 132430 - DNA, 122 bp, Homo sapiens
agctgccctcttgccgtgttcatgctttggtagaacaccttcagagccttggcaagctctcggtcagagccggcttgctgtgtgcacatttggctcatctccccggcggatggcagttgcgc

SEQ ID NO: 132431 - DNA, 122 bp, Homo sapiens
tgagaacatctttatatcaatatcctgctaggcagcaacccatactgcccagacccctaccgcccatacctataaattgcccagtctgtaagcagtggtgggcactggcattaggctggttc

SEQ ID NO: 132432 - DNA, 122 bp, Homo sapiens
cagtgtgtttcatgccttaaagacaactgcagagcaaagaatccaagcgatttacttttgcgtagtgtctccgaggtggtcacaaaccaaacatgactgagtctggcgagcagtcacgtgaa

SEQ ID NO: 132433 - DNA, 122 bp, Homo sapiens
aagtagcgtgtgataatgaaaacaaaacagtgctggcccgcagccaagacatggcgctgacgggagctccccgaccatttggctcttgattcttcggggaaagcagctgtagagaaatgaga

SEQ ID NO: 132434 - DNA, 122 bp, Homo sapiens
cgggtctagcggcggcccccggcgaagttcactgcgcttgcgctgacagacgcaagatggcggacagtgcggaactaaaggtaaagcgcagctcgaattcacttctaatattcggccgcgga

SEQ ID NO: 132435 - DNA, 122 bp, Homo sapiens
gcaaaagcaagaaatattgtattatcacaacagaagaatgaaaatgctcctttgctttctcggttggtgagctttctcattttgatttttgatctatatgctgattggtctgttcctttcct

SEQ ID NO: 132436 - DNA, 122 bp, Homo sapiens
aggcggcggcccccaggagcgcggccttgaccgcagcccccgccacagcccgcgagccgccggcgtctgacaagatggttcaagaatgcaccgcttggactccacacctccccccaggggtc

SEQ ID NO: 132437 - DNA, 122 bp, Homo sapiens
gtccctgcagcagcaccaccatcatccatccaccttcccagcaagctccccactctgccccgggctgggcctggcttggcttgaagccctcacctcagctggcaccaacaagggggctggga

SEQ ID NO: 132438 - DNA, 122 bp, Homo sapiens
tgccgctaaattcccttattacaaaatggttttacatatgaattgaatgagaacttctcccggagactgaaaatcagggggaaatgagactgggatctattattccatagatggaatgaata

SEQ ID NO: 132439 - DNA, 122 bp, Homo sapiens
gtcaaagaagcacctcccacaccggaggcaagggacgcgccaccctcggagcggctccctcggctcttctgtaatctcagcaagaacgtgctcactgcacataacgctgaacctgccacggg

SEQ ID NO: 132440 - DNA, 122 bp, Homo sapiens
tctctgccttttgccccagtcttcctttaagcttgggagtgtttttgtttttctctcctccgttggtttgattcatgctttatgtattcttagccatggcgagagtgaagaacagagctctg

SEQ ID NO: 132441 - DNA, 122 bp, Homo sapiens
gtggtttgtcacgcaccatccaatccacccgtttacagtggttaattcagtggtttgtcacgcaccatccaatccacccgtttacagtgggtaattcagtggtttctcacgcaccatacaat

SEQ ID NO: 132442 - DNA, 122 bp, Homo sapiens
agcgcgtgggcgtgggctcctcggctgcctggggctccagacttgtgctgcgtgcggctccggagctctgttctcgctcctgagcagctgctaggtttcccaagcgactgtctcaaccgccc

SEQ ID NO: 132443 - DNA, 122 bp, Homo sapiens
ggaacaaaattcagggccaagcccctacaacctcctccacaggcaccagtgctcgagagacgaccgccaagcaccccgccctttgcagcactcaccgaccatggctctggtgcagtccgggg

SEQ ID NO: 132444 - DNA, 122 bp, Homo sapiens
gaatgcttttcttttttttctttttattttcttgattgctaattttgttaagttcataagcgatacttacatatgtacatgtggaggctggaatctgctctggttgatgttgtagtgcgtga

SEQ ID NO: 132445 - DNA, 122 bp, Homo sapiens
cacagcacgtgcgaggcagggctgcggcacacactgaccatctggcctctgaaaggtaagcgaggcagggctgcggcacacactgaccatctggcctctggaaggtaagtgggcattttggt

SEQ ID NO: 132446 - DNA, 122 bp, Homo sapiens
ggctgctgggggaggcggctttccctctcggggggtgctggctgctggggaggctggcagcgcgcccctcccccaggtgcgaagggacctcagcagacgcagggctgctccgcacagccagc

SEQ ID NO: 132447 - DNA, 122 bp, Homo sapiens
ccgccaaggcctcctccagcatggccagccctgggcagagatcgtcacgaatggatttgacgggaatggggctggggactgtcatgttgaagcccggtggagatgtgggacagggacctcgt

SEQ ID NO: 132448 - DNA, 122 bp, Homo sapiens
gttccgctggtcaaccgccttctttagaaaagacactctgcgaaggacagacatgacccccgggagcggggggacacccacagcaccaggtgccacatcttgactcaggcctggtaggcacc

SEQ ID NO: 132449 - DNA, 122 bp, Homo sapiens
ccttgggttctccgcaggaaacgggccgggagcgcccggcgccctctcacctttgacttgcgtctcatactcagcctgcagcccccgctcccgccgcagcttcccgtgagcggccatggcgg

SEQ ID NO: 132450 - DNA, 122 bp, Homo sapiens
agaggcttctggatgtggttgtaggaagcatggactgtgcaagcttgcgctgaaggaggacgagaggatggacctacaaccttgaaacagagtgtttggaagagctgaccttggagcagagc

SEQ ID NO: 132451 - DNA, 122 bp, Homo sapiens
aatcaatagctgccgctgaagggtggggctggatggcgtaagctacagctgaaggaagaacgtgagcacgaggcactgaggtgattggctgaaggcacttccgttgagcatctagacgtttc

SEQ ID NO: 132452 - DNA, 122 bp, Homo sapiens
agccagctgtcctcaagttgagctgtgcaccggtcgcgcacactggcggcacggctttcgcgtccctccgctcccagcataatgaaagtttgaggaactggacatcaggcgctggccgctcc

SEQ ID NO: 132453 - DNA, 122 bp, Homo sapiens
tgatgcccccagacactcgggccagaccactgctccctacatcaccggggaaggcaagggcgggctcaggtttaggggctgagaatgagaagcaggcttggccccaccctcgggcctcacta

SEQ ID NO: 132454 - DNA, 122 bp, Homo sapiens
ggctgtaggaagagcggcctgcttcccacagctgcaccgcccaggccttcctctccttcgcgtctgcccataagaacttatcaccattgcagccccatcagaaagactgtgtttgaggtgaa

SEQ ID NO: 132455 - DNA, 122 bp, Homo sapiens
atagatttgtatgacgatgtcatatctccatctgcaaataatggagatgccccagaagaccgagattacatggatactctcccaccaactgttggtgatgatgtgggtaaaggagcagcacc

SEQ ID NO: 132456 - DNA, 122 bp, Homo sapiens
ctgagaaagaggaagtcggccatggacaggttgaagatgtagatggagaaggcgttcctgcgcatgcggaagcccaggagccagagcacgactgcatttcctgtcatcccgacaagggaaac

SEQ ID NO: 132457 - DNA, 122 bp, Homo sapiens
gtgtgggagctgctcccgcggtttgaatggctgcgggctccgccatggataggccctgcccggggccaggccttccaagcccagaaatagaaacgtggccacagctcccacctcagtcccga

SEQ ID NO: 132458 - DNA, 122 bp, Homo sapiens
taacacgacttcaggaacaatcctaagtcctcgcagaggtttcaccccaggctccttccccggcctgctcgcccacctgtccctgcccagaggagcctccttggctccaggcagagaaaggt

SEQ ID NO: 132459 - DNA, 122 bp, Homo sapiens
gagccactgcgcgggtccctggggatcctggcatccctggttcggaaccacgctgtgtgtcgcgcccgctggggacaccccaaagtggcaagaagactgagaagggaagttaaggcttcaaa

SEQ ID NO: 132460 - DNA, 122 bp, Homo sapiens
acgactggctggggggcccgtctctccttcatggttgcagtgtccgcgggacttgaacttcgattcagaagggagggttgcgccaggtgcgtctcagcacgccaatcaagccagattccctg

SEQ ID NO: 132461 - DNA, 122 bp, Homo sapiens
caagatttaaacgtcagtgcctcgatccaatttccatgtaaatacactgcctgcgaggtgcgtggactcgggagctctgacgtaaacgcgctgcctgcgaggtcggtggactcgggagctct

SEQ ID NO: 132462 - DNA, 122 bp, Homo sapiens
aattatctcttggtacaaatttacctccctggctgctgagatatgtatttacctcttgatcggaaattccataactgaaacttttattttcaaccatctgtatgtgttccttgctgcttctc

SEQ ID NO: 132463 - DNA, 122 bp, Homo sapiens
gataaattattaaaacacacgaaaagacagtgagttatggggtgggaagccctcggaggccgaatggccaccccaggtagacagcatgctggtggcccctggagacccccttctcagagacc

SEQ ID NO: 132464 - DNA, 122 bp, Homo sapiens
aagagatgggggtgcccgtggcggcccgggccccggaatcgacgctgcgcaggtgaggaccgctcctggagtgaggacaccccaccctggagattgagtctccgggagtgagaactccaccc

SEQ ID NO: 132465 - DNA, 122 bp, Homo sapiens
cgtggcgtcggagctgtgggactctccagctgttgctgtctgtctctgcctcagttctgtcggcctttccttcacgtgttttgggcggggtcacttattggaggcagatacactttcgcttt

SEQ ID NO: 132466 - DNA, 122 bp, Homo sapiens
ttcccctcctcctttcttgatctcggcaaacaaaaccattctaccacttgagccatctgccgcaggtgtaatggatggcagggggccgacctaaccacactccagtctcttctaggtcgtca

SEQ ID NO: 132467 - DNA, 122 bp, Homo sapiens
cactgacgcagggctccccgtcctcctcgtcaggctcctcctcgtcagcctcctcgtcggcgtggtatgacacgggcccgctctccaccagcaccgcctggggcctggcaggctcagctccg

SEQ ID NO: 132468 - DNA, 122 bp, Homo sapiens
ttaacatttattgagcaatttctagacgccaaatgctcctctgtgggcttcacagacttacgaaagtcattttaattcccggcaatcctcaggaaaagatgctattattattcccattttac

SEQ ID NO: 132469 - DNA, 122 bp, Homo sapiens
ctaaagctctaccaatttttttttagtttcaagacttagcttacacacacactcaagttacgtgaatacatgaatattgcagtttgtcttgtgaaacctcagacctaaaaccagccccaggc

SEQ ID NO: 132470 - DNA, 122 bp, Homo sapiens
acaagctgtaacgcatgaccatccggctgagtggaaagagaaacacgagggcacggcgtgcggtttcacgtacgcatgaaattcaagagctggcaacagaagccctggggctccaagtcagg

SEQ ID NO: 132471 - DNA, 122 bp, Homo sapiens
tatgacagccttgtaccttctgtaagactttttgcttactttaaaaattactactggggccgggcccggtggctcatgcttgtaatcccagcattttgggagactgaggcgggaggatcacc

SEQ ID NO: 132472 - DNA, 122 bp, Homo sapiens
accgtgttcgtagcagggcgaggcctggaggtgcgatggggatctcaacggggcagctgccgtcttgctggagcccacggtctttggggggggtcacaggtgttaaccgcatatcatacaag

SEQ ID NO: 132473 - DNA, 122 bp, Homo sapiens
agtcctgttctccccttagacttgacctggtgatgagctcatccactgaggcttcagtgccgccatacagtcacacccaactccaaatatattagtagggcaggccttcctgctagatgcca

SEQ ID NO: 132474 - DNA, 122 bp, Homo sapiens
ggaagtagcacagtttccacagttttatgtgtgttccagagacacgtggcagaataacaccgtgcaggttggcgggtttggaaaaccattctctaaaatactgctccgtatcactgttctgg

SEQ ID NO: 132475 - DNA, 122 bp, Homo sapiens
ggcctcccgccgcgatttgcggagcgcacttgttcccaggtgtgccagcgccctgcgcagcggcccagccaacccaggctcagactcaggtctgcgccgtttcctcgccacgctcccccgag

SEQ ID NO: 132476 - DNA, 122 bp, Homo sapiens
agcttagtgggggactttccccaaagactccttctctaggctggagtcccttggtgaggacgggagcagctgtttctaaacctccctctccccacaagcttaagcagcacaggctgcctgca

SEQ ID NO: 132477 - DNA, 122 bp, Homo sapiens
cttcttttcatgttcttttctctcattcaagtgtgttctgatatggttctgatacggttccggtacctgggtgtcctgctgtgttgctgttagcccgggggcggaggattggtggctgtcat

SEQ ID NO: 132478 - DNA, 122 bp, Homo sapiens
tcgcaccaaaaccgtgaagtaaagaaggcggcccgggtcatcatagaaaagtactacatgcgcctgggcaaagacttccacacgaacaagcgcgtgtgcgaggaaatcgccattattcccag

SEQ ID NO: 132479 - DNA, 122 bp, Homo sapiens
catatattcttgataacctctccaactttatgtctcaccacccccactcacttcgtaattcgtgccttatcagaatggacctgttatactggcagttcaccatatataccattacattttgt

SEQ ID NO: 132480 - DNA, 122 bp, Homo sapiens
ccctatgagaatctaatgcctgatgatccatcagtgtttcccatcatccccagatggaaccgtctagttgcaggaaaacaagtgcagggctccactgattctacattatgctgagttgtata

SEQ ID NO: 132481 - DNA, 122 bp, Homo sapiens
cggcggcgcaggcccggccggcctggcgctcccggcgggctaggggctcagcgcggccgccgccgcatccctcgccggccctgccacaggccctgaccggcctccttccctgcgggcggctc

SEQ ID NO: 132482 - DNA, 122 bp, Homo sapiens
tctcggagtggttgtcacgggcaagacggaagcttaaaagaaaccgctttgcacactgtgcgtcccagctacgcaaggaacgaagtattctctccctgggagtgcctggtgcgaatacatag

SEQ ID NO: 132483 - DNA, 122 bp, Homo sapiens
tgacagtcttgcctaaaagaacctcgtctatactgcaaaatcccattaggtacacaagtccggtcggcattgtcacttttagcgtgacttcaatttacacattcaaagaatacctgtccgga

SEQ ID NO: 132484 - DNA, 122 bp, Homo sapiens
cctaacagaagctccagcctcacggtgcaggcaggaacaagcctggcgcgccagacagctcggccccgcccactcgccgctctcggaaagctggaaccctgcccctttggagggggaggcgg

SEQ ID NO: 132485 - DNA, 122 bp, Homo sapiens
aaaagatgaaaagatatgggatcacctttcgtcagagtccgtggccgttttgccgagggccgggttggggggttttgagaaaagattctcaaaatccatgacccagacaggtcctccctttc

SEQ ID NO: 132486 - DNA, 122 bp, Homo sapiens
ggactgagcaaggaggtggaaaaactgggttttattctctgtgatttgtgtagctgtcaccggggttcatcaatgtgcagaaagtgctcccaggtaccttagctttgatatctacaaggttg

SEQ ID NO: 132487 - DNA, 122 bp, Homo sapiens
ggggcgcccgtggccctgcaggaggaggttctgcagatccctctgcgttaggcacgcgtccggtagccagggagccccagacttctctcgcttagcaacctgggcctccttcgagcggggtt

SEQ ID NO: 132488 - DNA, 122 bp, Homo sapiens
cagaaattcctcaagggctataagtacccggtggtcaacaacacaggtccaggggttgcccggcctggggttgaaatcttggctttgctgccttctaatgcatgatcttgagctactttcct

SEQ ID NO: 132489 - DNA, 122 bp, Homo sapiens
ccagtcgacttcgggggcgtggactcggagccagcggatgcctaggaccacagagaagttcggtgaaggtacgatgtcaaattcgatggactcctggtggttctggtggatacacaccaggg

SEQ ID NO: 132490 - DNA, 122 bp, Homo sapiens
tgcctctccttttcgctgggctgttctagagccctgtgcctgggagaacaaggagggtaacgcagaggaccccttcccagagggaagtaaggggatgccacatggagtaggtgccacccgtc

SEQ ID NO: 132491 - DNA, 122 bp, Homo sapiens
cctgcgatacttgagcacccctccccctctcccgtttacaccccgtttgtgtttacgtagcgaggagatatttaggtttctagaaggcaggtcatcgcaggccccacccagcagtggagaga

SEQ ID NO: 132492 - DNA, 122 bp, Homo sapiens
gatctgttattgcgggatacttgtgaaatatacataggattctttcttatggctgcatcccggatctggaaattttacttggggaccaggaggatttgaaaggctgcatgtactcagaagat

SEQ ID NO: 132493 - DNA, 122 bp, Homo sapiens
agacccagggaagccaaacgaggatgacccagtctgggtggaccccctgctgctgccaagcgcttcgaagccttaattcatttaaggctcacaaccctaatccttaggtattgtgcttacac

SEQ ID NO: 132494 - DNA, 122 bp, Homo sapiens
ccacctcgtagggttgtagaaagaccaagtgagttaatatttgtaaagtgtttagaacagcgtctactgcatggaaagtagtatttatttgttagagagactccaggaggtcttgcccaggg

SEQ ID NO: 132495 - DNA, 122 bp, Homo sapiens
ctctctgggcctgtggttggcacacaggcttcttgagggctggcgtgcttgggaggccttcgtttcttagtcctggcatcttatcagaatggctgtggttgtatacacaatttaagatgact

SEQ ID NO: 132496 - DNA, 122 bp, Homo sapiens
aattccttgacacaaatgaccttatcttaaatctaatagatttcctatttccaaaaagctcgactggagtgttataaaacctgaaaattctcttgtgctttctcttcttttgcttctagtta

SEQ ID NO: 132497 - DNA, 122 bp, Homo sapiens
gtccggttaagtctctttttcttccccgtctcgggtatgtctttatcagcagcatggaaacggactaaaacaggggccagttgctacaggagttattatttggcttcttgcactggttgctt

SEQ ID NO: 132498 - DNA, 122 bp, Homo sapiens
agaaggtgtgacaggggatacctgcaggctccacggaatgggttggaaaccccaccctcccggccctccccgcaggcaacaggatccaggcctctctacactccactccctcaaggctgaga

SEQ ID NO: 132499 - DNA, 122 bp, Homo sapiens
tcaataaaagcccttactgaattttattcaatctatatgtggatgaagacctccgccccgcgcgcccctcccgcaagtcccactgaggcccgacccattctgtccggctcccagcccccgcg

SEQ ID NO: 132500 - DNA, 122 bp, Homo sapiens
gaggagggtcagtggccccaaggcctcctgtctcaggggtgaaggctccaatcctagctgcgcctctgcttgctgcaggcacagtcaagcaagctgcttcactgcttgggcttgagtctgtc

SEQ ID NO: 132501 - DNA, 122 bp, Homo sapiens
cagaacgaatgagttggactcgcagagcctaagtgacctgcaagaacttcacaaaataagcgggtaaagacccaggccgggccggaggcctgtcggcgccacacgcctaggcagccggggca

SEQ ID NO: 132502 - DNA, 122 bp, Homo sapiens
tgtctgtggcgtgggcctgtccgtggccttagcctgtcagcagtgtgggcctgtccatggcgtgggccggtccgtggcatgggcctgtctgtggcgttggtctgtccgtggcgtgggccggt

SEQ ID NO: 132503 - DNA, 122 bp, Homo sapiens
tcgtgccccgacgcggcccccaccccagctccgggaccccttcctccgccgcacccgccccggtggtccgcggatgcccgcccttgccgctcagccactccccccgcaccgaggcctaggac

SEQ ID NO: 132504 - DNA, 122 bp, Homo sapiens
caatatgagtgaccagtggcccatgacacagccctcggtagatcctgagtgtgtccaaggcggtggagccacgcttggcttttacattgtagggagacataaggcatccatcaacacacaga

SEQ ID NO: 132505 - DNA, 122 bp, Homo sapiens
cccccgccccgcttccctcttcccctttgcaccggagcagtcgcatatgccaccccaccacgttccatttacgtctgtgccggcagggatgcccggctcttgttcgggcccgtgatgttgac

SEQ ID NO: 132506 - DNA, 122 bp, Homo sapiens
ctcgttcttgctggttaatacagtacctttcccatcttacgtgtctccagttgtagcagccgtgacacatatagccacggcttcctttgcctggcctgaattacaaggggaacgctactgag

SEQ ID NO: 132507 - DNA, 122 bp, Homo sapiens
caagctacaaactatctgagtgtgatgaggaacaatcgacaaaaattaacccagccaaagcgttggggttcaagcgagcgactggaccataaatcagcgtcgcggtggcgtcgggaagctga

SEQ ID NO: 132508 - DNA, 122 bp, Homo sapiens
tgatttggtggccatcttcactttcttggctcgagttgcagacatgctcctctcccttagcggcggcagcagcgacggctcgggctcctcccctcacacttcggcagcccggcctccgcccg

SEQ ID NO: 132509 - DNA, 122 bp, Homo sapiens
acaacccgctaggatgtacccccagtgccagctgtcattatgccgggaggaggggctcctcggaggatccagagcaatgctagtttaactcactcccaatgagccccgaggagccccaggct

SEQ ID NO: 132510 - DNA, 122 bp, Homo sapiens
gtagctgggattacaggagcctgccaccatctgcagcaaaatttttatctgtaggagagacgcggtttctccatgttggttaggctggtctcgaactcccgacctcaggtgatccatccgct

SEQ ID NO: 132511 - DNA, 122 bp, Homo sapiens
ccgcccatccactgaggggtgtgggtaggggcgtggcccgttcccttgctggtcggcgcccggaaggcgtccgcgtcagccggagctcgacgcggtgacggtgtgcgtcgacgtaagtgacg

SEQ ID NO: 132512 - DNA, 122 bp, Homo sapiens
aagtaccatggagaaggccacagtcttggagacaggtggggaagatcaagctgagggacccgaggccaagtgtgggatgccatcacagctcagggcacaccctgaacttttccaagacagga

SEQ ID NO: 132513 - DNA, 122 bp, Homo sapiens
agctgtgacttgcctccaaagactgctgactaaaggctggaaagtctggcttaacctactcgtgtgcatatcacctatgaattagcatagtcaataaatactagaaatgttacagttgtttt

SEQ ID NO: 132514 - DNA, 122 bp, Homo sapiens
gcccgccctcctgctttttctctagccgccctttcctctttctttcgcgctctagccacccgggaaggcctgcccagcgtagctgggctctgattggctgctttgaaagtctacgggctacc

SEQ ID NO: 132515 - DNA, 122 bp, Homo sapiens
tctgaggtttgccaggctccggggaactggggagtatccgattcagccagcatatcagcccgagatgttcagagccttgattttgaaagtctctcaatctaaagtgtgcatgcctgctcacc

SEQ ID NO: 132516 - DNA, 122 bp, Homo sapiens
agcgcgcggcgctgcaggagaagctgcagtacctggctgcacagaacaaggggctgcagacgcagctcagcgaaagccgccgcaagcaggccgaggccgagtgcaaggtgcagacccccgcg

SEQ ID NO: 132517 - DNA, 122 bp, Homo sapiens
ccacagcactaaacagaagatttggcaggtaactgggagagaaataacatgggctttaaccgaatggacaccatgggattttggaactgtctggctaagttatcatgatgtcactgaccaca

SEQ ID NO: 132518 - DNA, 122 bp, Homo sapiens
ctggagggcagcttcgcggcatccttgctgtgcctgccggtgggctcactggggagcttccgttgcgtggacacggcaccgttcactgatctgcctgtatgggggtgaccctgggggagagt

SEQ ID NO: 132519 - DNA, 122 bp, Homo sapiens
aggggcgggaggcggatgggccgtgacagcttaatggcttcggttaaagcatcctctgatcgtgctggcgctgggagaggctctgagctcgggtggcactgcgggcactctggacactgtct

SEQ ID NO: 132520 - DNA, 122 bp, Homo sapiens
cgacgcgtgtgtacacagttgctgcacttaccttctcaattaagcgatacagggggaggccgttcagtaagcacagtggctgctttgtagcgcttctccttgggaaaggtcaaaaagaagca

SEQ ID NO: 132521 - DNA, 122 bp, Homo sapiens
atttcttctcagaccctgacacccagcaaacatagacaagagtgacacccagtggccagtcggacggcagcgtgcagagacttcagcggcttgcttgcgtggagttgggtcattcctctgag

SEQ ID NO: 132522 - DNA, 122 bp, Homo sapiens
tacaagttcatcccggcagccacacagaacagttactaccaagctgtgctggctagcttgcgcaagccagaaattaagtgcaccaactctgagtcaggctgacaggttcaaatcccgggtct

SEQ ID NO: 132523 - DNA, 122 bp, Homo sapiens
ggatggcgcgccctccgcctgctgaggaccgggaggtggaacaggcatcgtcccacccttcgtagctactgataagtgggagatgcaggagccgagctgggttcttgcactgagggtgcaac

SEQ ID NO: 132524 - DNA, 122 bp, Homo sapiens
actcgagagtgtttccaacacttggtgtcaaggtcagtaatgttaacttttgttacaggccgaaagaatgagagtcatgaccaacacagtatagcactggaggctatatgagcgaacagaaa

SEQ ID NO: 132525 - DNA, 122 bp, Homo sapiens
agctaattaactgtgcatagaaatcactctgaagtaagtaaaattcttacctctaaacaacgtctactaaatagttttgtttcttatggagatgttcccattttgacaaagttacttagaag

SEQ ID NO: 132526 - DNA, 122 bp, Homo sapiens
cggccggcacccctccctccgcacctgagcctgcctgtcaccagccggcacccctccctccgcaccttcacggtgtccaggttcttgccctggaagttcacatctgtctcgtggttcatggg

SEQ ID NO: 132527 - DNA, 122 bp, Homo sapiens
tttagcatttcaaacactaaaatagaccgaagaaattcaaaaaaataatgtgcaaaatatcgtgggcttcagttagcagaactgatttgctttctatagcagcaaaattagatgtgactatc

SEQ ID NO: 132528 - DNA, 122 bp, Homo sapiens
gaggtgtgaatgaagtaatgggccttctccagcactccatccgtctcaggctgacagccgcgctccgagcccaggctgctctgtgtaaacgctgtcaccctgccatccccgagcaggcagct

SEQ ID NO: 132529 - DNA, 122 bp, Homo sapiens
tgagcccctggcatcttgatgcaggtccagctcagtcacaaaatggctgttcctttgtgccgcagcgctgacagacatactgcattgcactgtgtactcgccaaacagcaggaagttgccgt

SEQ ID NO: 132530 - DNA, 122 bp, Homo sapiens
gaaagtagttgcaagtgtggctcgtgttagatcctggacataaactgagtgtttcatgagcgggtgagaagcatcacttcccaagcattcttgtgaattcagaaacataccatttttgtgtg

SEQ ID NO: 132531 - DNA, 122 bp, Homo sapiens
actgttgtttgtggtacaaagagacctttctcttggtacctcttgattcacatgggagaacgttttaaagtaaacactgtcatctcgagcccttctccagtggtttttcattccatctaagc

SEQ ID NO: 132532 - DNA, 122 bp, Homo sapiens
tggtagtagtaagggagctctcaagacacctgatggtttaaaaatgtggcacgtcctccccggttctctctctttttccaccatgtaagatgtgccttgctttcccttcaccttctgtcatg

SEQ ID NO: 132533 - DNA, 122 bp, Homo sapiens
cagtgcccccaaccccaggtgcactccacagagccgcgcatacggccgcaattcagccgacggaagaggtgccagagggtcacatgactcgcgttcagctgatccctttcaagggcggagcc

SEQ ID NO: 132534 - DNA, 122 bp, Homo sapiens
aagagctagttttcggtaaatggtagtcattattgtataacagaagcaaatcattatgatcggtttaagcaaagaaattacgtattgaactttaatagattaggaaagaagaactttgaatt

SEQ ID NO: 132535 - DNA, 122 bp, Homo sapiens
gcagaagttgctctggagcacacccatggtgccagctgcactcagaaggcctggtgacagcgcttacatttaatctttagtctagagctttcttccagtgaaagttaaggggtggaaacaag

SEQ ID NO: 132536 - DNA, 122 bp, Homo sapiens
agcatcctggtgggtgcctggtgggcgccccggctctgggacaggacgcctcacgagttccggtgggagttgtgctacctcctcggccacttggtcaatggctggccccactgagatgccag

SEQ ID NO: 132537 - DNA, 122 bp, Homo sapiens
ctgccctggataaaaaagaagcccaaatcaaattccagcccctggccggcagggcagatgcgacctccctctgcttttctcgacaataatcctggccccttgttatgataaactacttgctc

SEQ ID NO: 132538 - DNA, 122 bp, Homo sapiens
ttcctcttacccgttttcttagagtttggtttctgttttgtgggttccctgccccccttccgcctttgtctggagttgcagattagcctagtggttctcaaccctggctacatcttagaacc

SEQ ID NO: 132539 - DNA, 122 bp, Homo sapiens
ctcgagatggcagagaagtgtggggcctgggttgtgctgcagcaggggtgggggtctcggcgttgggaactcctggcccaggtggacttgtgccagacagccctgcagggggagtaggcacc

SEQ ID NO: 132540 - DNA, 122 bp, Homo sapiens
cctggccgcccccccacaccttaggctgggacgctcgccccagtccgcgccttcccccaacgccctgtggggactttggctttttccaggaaatgccgtaaagggatgaaaggcgggggggg

SEQ ID NO: 132541 - DNA, 122 bp, Homo sapiens
tgaggtatgtgtcccttctctgggccccgtaagctttcagtactgataaggggaaacccacgggtagagattgggtcttgctgtattttcaatgaaccaccagagggcgccccaggatggca

SEQ ID NO: 132542 - DNA, 122 bp, Homo sapiens
tcaggagacttggatgtctgtctgtttcattgtgtgatctttagggcctagaacagtgctcggcatgtagtagttactgaataagaatttccagaattaatgcacgaatatgtttctgaccc

SEQ ID NO: 132543 - DNA, 122 bp, Homo sapiens
tggtacagtgagaagttctccctcccagggccaggtcacagggtttgtttctgttcaatccggattcttccagtaaaagcttcaacttcccacactgaagctgagagcctcccaaagtgctg

SEQ ID NO: 132544 - DNA, 122 bp, Homo sapiens
cgacccgctgccctccgccgagccaggcctgcctgggacaggggtcgtcaccaccgggagcgcccggccgcgctacctggaccacacagtccgactgcagcagacacgcgcccaggtcctcc

SEQ ID NO: 132545 - DNA, 122 bp, Homo sapiens
tttgctatttgtttacggaagtcattggtgctactgccttacctgctacccactgccctacgcaaccactttctcattcttcaaaagtttcactgacatgaacctcacttgtgggtgccagg

SEQ ID NO: 132546 - DNA, 122 bp, Homo sapiens
ggttagcccctggactctgagcttccagaaatgattttcttgggtcttctgaaccatcagcgcttggtgggtttgggaatcttagaccctgcttcagacagtgactaggggagaggccgcct

SEQ ID NO: 132547 - DNA, 122 bp, Homo sapiens
ggctgagggagccggctccggcctcggccagcccaggaaggggctcccacagtgcagcggcgggctaaaggtctcctacagcgccgccaaaatgtgagcccaggcagaggaggcgccgagag

SEQ ID NO: 132548 - DNA, 122 bp, Homo sapiens
atctttctctctaatgcttactcctatagccttgtccagacgaagtgacgttgagatcctcggctactgcatgctgcggtggttgtgtgggaaacttccctgggaacagaacctgaaggacc

SEQ ID NO: 132549 - DNA, 122 bp, Homo sapiens
actggcccaaaggaattttacccgcgagcgcccaccccaccctagcttgatgcttacgcccgcaacaaaacaggaaaccaggactgggcagtgcattctttaagtcaacaaatacactgaag

SEQ ID NO: 132550 - DNA, 122 bp, Homo sapiens
cacttcccacaacctggcgcactaggagccctccgaccggcaccgcccccacgtgttgcacgccgcttccgctttccggcccagacctcaagaccgcttccggaagcctctcggcttccgtc

SEQ ID NO: 132551 - DNA, 122 bp, Homo sapiens
cacgcatattctggtgtctctcaggccgcctttgaacagaggccgtgtctgcattggcatcgctacctgcagcacggagccccgtggggcctcaggacggtagccagggcacggccacgagg

SEQ ID NO: 132552 - DNA, 122 bp, Homo sapiens
gcccagccggtgattgctctctggctgtccccggcacctcggcccccacggccgttggtccgggcgggtgagggagaaagtgagacttggtgtcatcaccatccattgtcagaaggggagga

SEQ ID NO: 132553 - DNA, 122 bp, Homo sapiens
gaaaaactaagtgaagaaagtgaaggaggaggatagggcatctgtggggaaggcaggggacggctcaatctatggattcaggaagggtgtggtctgcgtgctcccagtgtgagtgtgggtgt

SEQ ID NO: 132554 - DNA, 122 bp, Homo sapiens
ccagctgtaacacatcgtctccctaaagccagatgcttacagtatttctgagtcagcactcgcacaaatcacatgtggtgaacacctctgcccgtgtgtctatctcctaagacagagtccaa

SEQ ID NO: 132555 - DNA, 122 bp, Homo sapiens
aacctgatgctgcagctgatctaacaggagatggagctcaggtggtcatgctcagtcgctcgccactcacctcctgccatgcagtccagttcctaacaggcctcagaccagtaccggtctgt

SEQ ID NO: 132556 - DNA, 122 bp, Homo sapiens
ccactctgcctgtaactgaggggcagatttaggctggtgtcttaaaatttcagaggagagcgaagtctctctgggctctcctatctctgcgttggaagtcgttgcatctggcacttaattaa

SEQ ID NO: 132557 - DNA, 122 bp, Homo sapiens
ccgcttaaggacccgggaaaaggaagtttgagggccactgggaaagagaaggggtatcaccgcttccggaccccggcctgtacttgaaggcaaagagaactacaaatcccagcgtcacccgc

SEQ ID NO: 132558 - DNA, 122 bp, Homo sapiens
tctctgagggctgaggttgccacgggctaggcagatactggccctgcagccctcactctccggagggcgtggggcatgggatgggatgtttcagaggacgtggggcatgatgggacgggaag

SEQ ID NO: 132559 - DNA, 122 bp, Homo sapiens
ggcactgagctggggctccatctgtccggctcctgttggcagggccagctctgagtgccacggctcagccagagacttctaatgccggctctgggcccgccagcctcacagtggggttggca

SEQ ID NO: 132560 - DNA, 122 bp, Homo sapiens
accatcccctccagcagcttcagggggagcagtgtgcagccagcacccgattccagaccccgggccccagaactgtgagaccagatatgtctgctgttgcaggcacccggtttttggtgctt

SEQ ID NO: 132561 - DNA, 122 bp, Homo sapiens
atgtctttgcatatctctctcatcctctctggagaagtgggcgctgcaggactgtggagacgtaaatgtaaactgtgactctacctcgaccctgtttcttatttttcttctctggctaaaaa

SEQ ID NO: 132562 - DNA, 122 bp, Homo sapiens
gcctccccctaagtaatcccccactagggtccgggtgtcgttctctcctgccctcctccgcgcacaaacaggtttgctcactcttagtgcgggaggatgctccgcggtctcccactcagttc

SEQ ID NO: 132563 - DNA, 122 bp, Homo sapiens
ccagagcgagggcacgtgcgggtacactccggaggaggtgggtgcgcgcgggggcgtgtgcgcgggacctcgaagtggtggtggagtgcagaccagcaaaaagtttcaaagggaaatcttag

SEQ ID NO: 132564 - DNA, 122 bp, Homo sapiens
aagctagcttttttttttttttttttttttttttttttttttttttttgagacagagtctcgctctgttgcccagacttgagtgcagtggggggatatcagttcactgcaacctccgcctcc

SEQ ID NO: 132565 - DNA, 122 bp, Homo sapiens
ggccgccgcgggattctcctcccatcactgcgccgcggcttccgccccggcctctctgggcggctatgaagccgcagccccgcgggtcccccagactgtgtgctttgtccagaggggagggt

SEQ ID NO: 132566 - DNA, 122 bp, Homo sapiens
ttgagctgttgcagcctagctagggcaaggggagctgcagttgggccatgtggtccgcatcgtattccactaggtccccgttgtacaccaggtacggtcctggcgtctctagcaggtgcctg

SEQ ID NO: 132567 - DNA, 122 bp, Homo sapiens
ccatctcgactcgtggatggtgagtagctgaagcacggtcagctgcgtcaccaggctgtccgtggcaggctgcagcccttcgtctgaacccatctccgcggtgtggccctgccgcgggcacg

SEQ ID NO: 132568 - DNA, 122 bp, Homo sapiens
cgggagggagcggactgcggcaggatctgtcgaggaaaaatcttgcggccggcgattccccgccttttaagcgcagcctcgcactccccccaccccacgcaggggcgggccttggggaaccg

SEQ ID NO: 132569 - DNA, 122 bp, Homo sapiens
gtccatgtcctttattccccctgaaggatttggagtcttcttaggagctgctggtgggcacggcctccccaggaatgcccttcataagcccatggctaatatggctgtcttcaatctatata

SEQ ID NO: 132570 - DNA, 122 bp, Homo sapiens
cagtgtgtgcagccagcttggtaattcaggtccagtggttaattagtaactggaaggccccgaagccagcttccagcaggcagggctgggaggttgaacttgagccggtttgggagccagga

SEQ ID NO: 132571 - DNA, 122 bp, Homo sapiens
gagactactcacagtgctcccatcccccggtgaataggagtgagcctcacttagccccaccgcttcctgcctgtggacagagttgtatgaaccaagatgtctaaagctgtccagagaatctc

SEQ ID NO: 132572 - DNA, 122 bp, Homo sapiens
cgctggctccaccggaaggggccttggcgaagctgggcggagccggccaggcggcgcgagcgggaactacggccttggccttcttcagttctagcgtcaacccggtgctctacgtcttcacc

SEQ ID NO: 132573 - DNA, 122 bp, Homo sapiens
gccttatctcttttctctcctccctcacattttccgctgcaacaaagccaaacacagcaccgtgggggctttcacgcttctgtgccctaggacacgctgttcctgcagcgctgcctccctcg

SEQ ID NO: 132574 - DNA, 122 bp, Homo sapiens
cagggggcctgcagcacctggtgtccatccgcacagcccccgacctcctgcctcacaagccgctgcctgcctctgcctacatagaggacggccgcttcgatctctccatgccccatgtgcaa

SEQ ID NO: 132575 - DNA, 122 bp, Homo sapiens
ctccacaaagccttgcttgcctgcaaacctttacttctgaaatgacttccacggctgggacgggaaccttccacccacagctatgcctctgattggtgaatggtgaaggtgcctgtctaact

SEQ ID NO: 132576 - DNA, 122 bp, Homo sapiens
tcctcagagcctttgactcctatatctagaaaggcacttatagtctataaacacttttaacgtataaattggtgctttgactaaagtataagcaatatgaagacaggaaagaatcttcctct

SEQ ID NO: 132577 - DNA, 122 bp, Homo sapiens
agagccctctgcctgtcggggagacctggccgtgagagcagggcacccgggccctgaaaccgcagggatgggggtgcacgccgggccatgacaaaggaaacagcgccatcttgtggctccag

SEQ ID NO: 132578 - DNA, 122 bp, Homo sapiens
aatgagaccagcggtctgtcctgggagatgacaataaaatgtcagctccacgaggacaggcgccttttctgcttctgtatttatcctcagtgcctacagtcgtgccccacagagtagcagtc

SEQ ID NO: 132579 - DNA, 122 bp, Homo sapiens
ttctcccatttgcccgcctggcctcctgaaccttctttctctcctgtttgtcatgcagtacgacgatctaccccattacgggggcatggatggagtaggcatcccctccacgatgtatgggg

SEQ ID NO: 132580 - DNA, 122 bp, Homo sapiens
acgcagcccccgtggtgctagggtcaggagacacttctttgggtggcgtgggtgggaagccgaaaaggtgggagccagagtgggctgctgtaggggtgagggaggccactgagctcccgctg

SEQ ID NO: 132581 - DNA, 122 bp, Homo sapiens
ctggacacccagctgtcggagccggaggactaggccgcttccgtattggggcggagatagcggcagacggacgtctgctacggccaatagaagctcggaagggggtgcggcgagcgctcaga

SEQ ID NO: 132582 - DNA, 122 bp, Homo sapiens
ggagagccgggcctccctagctctcgcaagcccaggaacacagtccgagtcctacaactccgaggtctgactgggaagcaggggccgctgcccgacaattacccttttccaccgcccctatt

SEQ ID NO: 132583 - DNA, 122 bp, Homo sapiens
gatctacaagagtttcctggtccgcacaggggattctgtaagatctccatggatactttccgaatctccatctccccggactgtcccggggtactcttcagatccattacatgtgtgaggag

SEQ ID NO: 132584 - DNA, 122 bp, Homo sapiens
gaggcttccaagagcacagccagcctccatgtggaaggtaaatgccgcaggagccccacgcgtggccctggagtggcctctctgccctagcggggcacggggccacccctggagcctgagct

SEQ ID NO: 132585 - DNA, 122 bp, Homo sapiens
ccttgggtttttgttttctgagaaaatctctgcctccatcagcctactccaggaagtctacgatatgcaagagatgactgtgaaccctggggaaataaacatttgaggaagctaaacattgt

SEQ ID NO: 132586 - DNA, 122 bp, Homo sapiens
accagtgctgaaccagccgactgggaagaggagccgcttgggggcgaccgagagcccatccgtttcccctttaagaccagagcggaagactacagtgagaaggccctttgtgtcggcgggaa

SEQ ID NO: 132587 - DNA, 122 bp, Homo sapiens
ccgggagatgtgctccagcgccagccccgcctcccgcccgcccctgtcggcccctcgcgccgcctccgctgcggcccgtcccctagctcccgcccgcccgagaacccagccccaggctgggc

SEQ ID NO: 132588 - DNA, 122 bp, Homo sapiens
cgccaggaacgcagacccgtggtgaggcccgggctccgcgtctcctctgccagccccagacgcccgaaccccctcacctggtctccaagtaaacgttgggtggctgccaggaatctggggga

SEQ ID NO: 132589 - DNA, 122 bp, Homo sapiens
gcttccctggcacgctactcttacgacgtcacggtcaggtggtgcagagctggacggcaacgacgtcggacgcgccccttcttggaacaatgtcccaccacggaggagctcccaaggcctct

SEQ ID NO: 132590 - DNA, 122 bp, Homo sapiens
aaccctcctttcgcacctggattatcacagctgtttctaagctaggccttccaatctatgcgccaaactgcaaacaaagcaatcttgctaattgcttacaatccttccatttctgcatacga

SEQ ID NO: 132591 - DNA, 122 bp, Homo sapiens
ccttacctcccagacagggtggccgggcagaggtgctccacacatcccagatggggtggccgggcagaggcgctccccacatcccagatgatgggcggccaggcagagacgctcctcatttc

SEQ ID NO: 132592 - DNA, 122 bp, Homo sapiens
agggctcagtgcttcaattgcccctcacttacgaaagcgaaactcaaactcaaggtcaggcgacctgaccaagttcaaacgatcaccgccccccttctcagcagtttccaaatccttttcct

SEQ ID NO: 132593 - DNA, 122 bp, Homo sapiens
gggcttagcacccggccagcagctgtggagggtgcactgggtcctccagcagtgccaggccgctgtcgccgcactcgaattctcgccgggcctcagctgcctccccagggggcagggctcag

SEQ ID NO: 132594 - DNA, 122 bp, Homo sapiens
gttaggattagggttagggttagggttatggttagggttacctttacggttagggtgagacggggacatccagtcaggataagcatgggggaccaatgcagaagatacaagtttcctggatg

SEQ ID NO: 132595 - DNA, 122 bp, Homo sapiens
ctggcagaatgaatgaccttagtattggcctctaacgcgtctgtcttgtgctcgggctgtcgccttccagccaatccatcttaaggtccacccttcctggagactgaggcctcttcctctcg

SEQ ID NO: 132596 - DNA, 122 bp, Homo sapiens
atgtctcctgcctggcatatggggtctgaaggacaaggctcctgttgccctgcggggaggcgcagagatggctggcacccaggtgggtgcatagctgatccagggtgcaggccgaggtcccg

SEQ ID NO: 132597 - DNA, 122 bp, Homo sapiens
caggcccaactcaggccagggcaggctccctggggaggagagggtcagagcaagggctcacgtcttgacgtaggggtccgagtaaccgttgacgtccatggcagccagatgggcgcagcgca

SEQ ID NO: 132598 - DNA, 122 bp, Homo sapiens
aattggataggaaagtcctgggtagatcctggggaggatgcctagcaaccacattcctggcgcttcagggcagcgtacttgaagccctcaagtccacctgatgatgcttgcccttcaccggg

SEQ ID NO: 132599 - DNA, 122 bp, Homo sapiens
gtagtcaatggaactgggcaccgtggagcaggggtgggcgttcgtcggggaggctcgggccgcacaagagcccacggaagcggggaggctcaggcatggcaggctgcaggtcccaagccttg

SEQ ID NO: 132600 - DNA, 122 bp, Homo sapiens
agtcagaaagtgagtgaaaggaacctacagggacgcgcattttatagcagctgctgggcgcgaaaaagaagctgggccattggctaagcttgcagcttcctcttaatgcaaatgagctttct

SEQ ID NO: 132601 - DNA, 122 bp, Homo sapiens
ggggaggctgggagttggaggtagccctgcctggagtcggggcgctgcctggagtcggggcgctgcctgtggtcggggtcctgcctgtggtcggggtcctgagaggcccggggcaaatgggg

SEQ ID NO: 132602 - DNA, 122 bp, Homo sapiens
cacctaggctgactccatgtctttgctattgtgaatagtgctgcgatgaacatgcaagtgcgtatgtgtttttggtagaataactgactttctttgggtcatataccagtaatggaattatt

SEQ ID NO: 132603 - DNA, 122 bp, Homo sapiens
ggaagcaagaaaaaggacaagccagactcaggctggcaggacaaagggccccgccgcatgcgctggacgccccgttcccgacctgaaatcccttcaggaaactgtcatcgaactatttcttt

SEQ ID NO: 132604 - DNA, 122 bp, Homo sapiens
ctcacgtaaggggacagtcacactgccatggattctctgccaatacagcaatcataaggtcgttgacaaaaagtctattgttcatatgctttgtgatttaattgctaaagaccaacacctaa

SEQ ID NO: 132605 - DNA, 122 bp, Homo sapiens
cccacccctggagccctggagcctttggggttcaggaccatggacctgaacacccgagaccgcagcgctccgaggccctgagtcccagtggcaactacaaaggcgcttcctcctctcctgcc

SEQ ID NO: 132606 - DNA, 122 bp, Homo sapiens
caggggctgcggggagcgatattggggtggtgagccggagaacatctgcgagggtcctcacgtgatgaacagccctgatggctcagagacagtcattatccagtgaggtgaggcggggcagg

SEQ ID NO: 132607 - DNA, 122 bp, Homo sapiens
cggtggcctcctaacctcctcccaggcccatctgtgcactgcattgtcaggttcagttttcgcagagagccctgctaagttggtttagccagagccccccaccctggatattggatcgggtt

SEQ ID NO: 132608 - DNA, 122 bp, Homo sapiens
gcccgggaagccacatcatatgccccctgctcctaaccgtccagcgacttccaccccacacggtaaaagccagagccccccgaagtcagcccgacccctcaggcattcgcctccttggcttc

SEQ ID NO: 132609 - DNA, 122 bp, Homo sapiens
accctgcccacctcacccggtcaccggaggatgcctgtcaacttctgggagctgcaagcgcgggccggccagtcgtccgcgcgcggctttttcttcaggacagcggaggcacaccgtgcttt

SEQ ID NO: 132610 - DNA, 122 bp, Homo sapiens
ccggtcagtgctcctttgtgttgtccccggggcagtgaaagcagggggccctggcgtgggcgtggtcaacgtgtggcccgggtttgttgagggggttggggccactgtcccccacgagcgtc

SEQ ID NO: 132611 - DNA, 122 bp, Homo sapiens
tggaggctcaggcgccgcgtggggcccgcacctctgggcagcagcggcagccgagactcacggtcaagctaaggcgaagagtgggtgagtcccttgaatcgttctcactggccgtttgctcc

SEQ ID NO: 132612 - DNA, 122 bp, Homo sapiens
caacccggggcaggccacggagcctctcgccgcccctacccctcgttccccgcatccccgcgcacccggcacccccggacccccgcgcccgcgtcacttactcctctgccgtcgccacctgt

SEQ ID NO: 132613 - DNA, 122 bp, Homo sapiens
cagcgccgcgcgggggcggggcgtctctgcggcaaccagagcgtcacacgccgcggtgcgcgctgacgtcacgcggggccgagccttcccaggcccgccctcccgtccttaagtgggccgcg

SEQ ID NO: 132614 - DNA, 122 bp, Homo sapiens
tgggcatttgaatacagctgggtcataaaagaaagtgaccactgactcattattttttaacgtgaaaggaaaaaacagggactcctgcaacatcaagcatgtgcttactatcgacttttccc

SEQ ID NO: 132615 - DNA, 122 bp, Homo sapiens
ttacttttcggcgtctaggtgccgttccctttttggcaatccgacggagagagaagcaagcgaggagacagggtggtgcattctgccacgctggcccctcacctctgtcatcacagggcgtt

SEQ ID NO: 132616 - DNA, 122 bp, Homo sapiens
tggcgaacatcctcaagaaccggtcggtggctctacctccgaaaactctttcgtgtttagcgattctcatatttagtgtttccctttagggagacttgaccggcaattgcagactcgtcttg

SEQ ID NO: 132617 - DNA, 122 bp, Homo sapiens
aaggaaaggctctcagggaatactttccaagcccgcaggaatgtaaggacactcccacatcgctggtaagtgagtcatcaccaatcaccatccagttaagaatcattgtatgtaacaggctt

SEQ ID NO: 132618 - DNA, 122 bp, Homo sapiens
gtagcacccctctaactactggacttgggattctctacattcttaaaaattcctgaagaccgaaaaggaccttggtttatataagttaccacatcaggattaaaacagaaaacttcaaagta

SEQ ID NO: 132619 - DNA, 122 bp, Homo sapiens
gccagtgctctcgtgagaggtgggtccccaagccggccccagcgaaactcagttaaaggacgagtctgcttttgggccttatgtttcccaactccatgggcagagccacagggccgctgcct

SEQ ID NO: 132620 - DNA, 122 bp, Homo sapiens
gggtgcggaaaccgcagcggtcccgaggcctccggaatagaaagcgcggccgcccgggagcgcggccctggctgcttcagggatctggtccggcccccacagcctccgccccgcgccagccg

SEQ ID NO: 132621 - DNA, 122 bp, Homo sapiens
gcggccccggcggcttccgctgattggcggcgagtgggccaatgggtgcggggcggtgggcggagaggccaatggcgcggcgggagggggcgtgtcccgggtgcccctggcgccggcgctgg

SEQ ID NO: 132622 - DNA, 122 bp, Homo sapiens
gaaaaccatgatatgaacatgttagatttgagatgcttgttagatttgcagtgggtttgtcgagtaggcagttggataaacaggttaaaatcttgatggtgtgtggcctataagctgtattt

SEQ ID NO: 132623 - DNA, 122 bp, Homo sapiens
gcgaagtaggtgcagaaagagcagaaccctggagtccggagcttgcacgggatgttcggccgggtcagaagtcccttctgcctgccgagaacacctaccgagagccccatctatcccttcag

SEQ ID NO: 132624 - DNA, 122 bp, Homo sapiens
acggcgccgtcattggctgttcgcgcgggggcggggcagaggccgccactgattggctggcggccgcggcgtcgcgtcggaacgtgactggatggtagtgtgctggccggtctgcctccggg

SEQ ID NO: 132625 - DNA, 122 bp, Homo sapiens
gtttgcgcagccctgcggcgatttcaaggcaagtgaccggaatgggtcggaagcgcgtcccggtgagtttcagggagcgtcccttaggtttccgggggcggcgttgaacctccctagcccca

SEQ ID NO: 132626 - DNA, 122 bp, Homo sapiens
cccagctgaagggctgctgtggagtctctgtctcccctctctgcatggcttcctctgtagcgtctcccttggagcaggcagggagggaaggacgcggtgctggtcacacagagcgctggggt

SEQ ID NO: 132627 - DNA, 122 bp, Homo sapiens
tgaggtgatttagtattataaagatgtgaatttcctccatgttctcctgcaagacccatgcgatatcaatatatcaacagaatggcttatataacttgacaactgattgtaaaatttatatg

SEQ ID NO: 132628 - DNA, 122 bp, Homo sapiens
cagcaccactgggagctggggagcagtttgggtcccacaagaagcctagctggagcaagccgcctgggtccaggctgcctatctcataaagctgttcccagggcaagaaccatctgtacctc

SEQ ID NO: 132629 - DNA, 122 bp, Homo sapiens
tgcaggactgtagctctccagagggtaatgggtccccagaacccaagagaccaggagtgtcggaggctgcctctggaagccaggagaagctggacttcaaccgaaatttgaaagaaggtagg

SEQ ID NO: 132630 - DNA, 122 bp, Homo sapiens
accatctttccctgtggaagccttcccaccagaacctacacatacatagaattatcctagcgtgatctcagacacagacacacacacacgcctgcgtgctccagaaagtggtaactaataag

SEQ ID NO: 132631 - DNA, 122 bp, Homo sapiens
aaagatgcaatacctcttacactttgccggctacatttttatggaccttaattaaacccacggtctgccgggttgggaaattggacactctttgtgcggcgccttcttaagaagtactgttg

SEQ ID NO: 132632 - DNA, 122 bp, Homo sapiens
agtgctgggattacaggtgtgagccaccatgcccagccaacaaaactcttaaaagctctacgtttgttaatgaggttgttttcctagcaaacattttcactatctcctcatgattccagctg

SEQ ID NO: 132633 - DNA, 122 bp, Homo sapiens
cctcgccgtcccgtgcagtagacacggtggccgctgtctgtaagatattcagaccctcgccgtcccgtgcagtagacacggtggccgctgtgtctaaaatattcagtcccgtgcagtagaca

SEQ ID NO: 132634 - DNA, 122 bp, Homo sapiens
agtttaatgcacgatgagatctctcttctcatgccccggacaggtgagaccttaagggaacgagcctgttcagcctggcactagaaaaggggacgtcctcatgttgatggggatgtgggatt

SEQ ID NO: 132635 - DNA, 122 bp, Homo sapiens
ccggcgccgcagccgctcccctttagacaaagatacttatcctccatcagccagtgtggtcggggcctctgtaggtggtcaccggcacccccctggaggtggtggaggccagagatcacttt

SEQ ID NO: 132636 - DNA, 122 bp, Homo sapiens
aggagacgacggcggcccctgcggcttccggcttcctggccgtcaagcgacgaccgctgtcgcaaaggcgccgtcacgtagataggcggcctctaccaactcacgacagctaggcggggagc

SEQ ID NO: 132637 - DNA, 122 bp, Homo sapiens
ctcaagcagtccccctgcctcggcctcccaaaatgctggcattagaggcgtgagccattgcgcctgactctccagcttatttacagtcctttccacggaagtcactgaagaattggataagt

SEQ ID NO: 132638 - DNA, 122 bp, Homo sapiens
gctggccaccagctaggtggcgctgtccttggaggttctatatcacagccctttagagatcggtggtgctgaagggcagggatcttattccaccttctgaagcttctgtcgaaccagttgta

SEQ ID NO: 132639 - DNA, 122 bp, Homo sapiens
ttcatttgacgggcttgtggaggttgggggtctgcggagccccgtgtgggtggggctgggcgcggccggggcggagccggcgaggagccctagggaaagggtgaaaggcacagttgagaaag

SEQ ID NO: 132640 - DNA, 122 bp, Homo sapiens
ggaggaaatggcgaaagggcaggcgctggagcccatgcatccgggaacactggtggtaggcggtcgggtgggcgtgagcgggctctccatctcccagcccagtctgcaggtcgccacctcag

SEQ ID NO: 132641 - DNA, 122 bp, Homo sapiens
tgatattttttgagcaagccaaaacaaaggaaatgtcacccaaattcctcagctgtaatacggggtgctgggattcttaaagtcacctccacatcagaaagttggatttcaatcacacagaa

SEQ ID NO: 132642 - DNA, 122 bp, Homo sapiens
gggttcctcccacggatgaaaattccttcccagcagcccttgcgtgggatccctggggttcgtgtctcacccacagggggcatcccaaagtggcaagatggcccataagggacgataaggat

SEQ ID NO: 132643 - DNA, 122 bp, Homo sapiens
cccttcctgggaccattgtcctcactgtctctcatctcattcacgctggacggggagaggcgcgagtcagcgcacagctgagggctcttcagggcgtccggggcccccgtcaccgtcagtga

SEQ ID NO: 132644 - DNA, 122 bp, Homo sapiens
gtttggagtttgttccttctgatgttcggcagcgtcttcctcctggcgggctggtggtctcgctggctcagaaatgaacctgcagaccttctccgtgagtgttacagctcacaaaagcagtg

SEQ ID NO: 132645 - DNA, 122 bp, Homo sapiens
agcaggatccgtaggggcttcaaatagagcacgatgtcgttggcttccttcagccctgcacggaacaagaacaagtgcccaccggtaagagagcagaaattgctcagaaacgatgagggtgc

SEQ ID NO: 132646 - DNA, 122 bp, Homo sapiens
gcaatcacagagactgacacagagggtatctgctgaatgaatgttgaagagattttgacacgaaattctaattgggacattgcaagtggctatgatgataaactgcagttaagatacagagg

SEQ ID NO: 132647 - DNA, 122 bp, Homo sapiens
cagaggaacagaccgctctgagtcacacagccagcccagtctggtgagtgccttagtgtgcgccaggtcctgctgtgtggacagacacaggcctgaggcaggtccctcctaggcaggctctg

SEQ ID NO: 132648 - DNA, 122 bp, Homo sapiens
tttttaagttccctgctgctctgaatattatgatgaaatctttttcagtcctactttgtccgccctaggacatgatttataccagcacaatcatcagtaacctctcagatatcaatttattc

SEQ ID NO: 132649 - DNA, 122 bp, Homo sapiens
ggctcagggttccggtcacacacacagtgtgggcaccgtctgctgctctaggtagtgagtcggggctgggcccaggggtgtcagggaggtggaggcccaggcctgccagcagggctgccgct

SEQ ID NO: 132650 - DNA, 122 bp, Homo sapiens
aaggtattgcctcagctccttggacctgcagcagagacacaaaccaagaaacagaaatcccgggaacagacacggaccacaagcgcttcctcccacagccctgaaaccatcagagaatctca

SEQ ID NO: 132651 - DNA, 122 bp, Homo sapiens
cttccatcgacaaatataatttggacatcaggaatggtgccatgcaaagacgcacactctcgttcaactccttcagctcaaggaactcatccaagtcacctcaagcattagggtcttactgt

SEQ ID NO: 132652 - DNA, 122 bp, Homo sapiens
tgtccacaggtaacaactccgtgggtgccatccagtgccctgatagtcagttcgaatgcccggacttctccacgtgctgtgttatggtcgatggctcctgggggtgctgccccatgccccag

SEQ ID NO: 132653 - DNA, 122 bp, Homo sapiens
cggccctgggtccggatcccagccatgtccagatttttaaagtccagatgttttgtctggcgccactcggatctctgcttcctgagtcatgggacgagaaactcctggctgggggcagtggc

SEQ ID NO: 132654 - DNA, 122 bp, Homo sapiens
tatttccaaggtcacttttccatctctgaatttctacaacattaaataatgtttaagctgcgagttcaggcatgaattaatgtaaccagaattattcccacttcttgctaccctgcccacaa

SEQ ID NO: 132655 - DNA, 122 bp, Homo sapiens
caatgctgcttcctcgcccgtctccctcctatccggctggcggcaggcaggcccgccccccgcgcccccagcggcaagtggggaggtgtgtggcactattacatgctattatgactttctgg

SEQ ID NO: 132656 - DNA, 122 bp, Homo sapiens
gtcctttgagcacttgttcccagctcattttgtactttccctgcctaccctgggatcactcgtctcactaagtgggatggttccttacagtattgtatggtgtttagaattttaaagacctg

SEQ ID NO: 132657 - DNA, 122 bp, Homo sapiens
ggcgccgaggcaaaggctggaggacagagatactgcagggtgggctacagctttgcctctcggtcaactgggccccaggcctaagaaactgaagcgatggggatgatccacacccagaccac

SEQ ID NO: 132658 - DNA, 122 bp, Homo sapiens
gcaggggctcgcgggggcggggccgaggtcacgcgcggaggggctgggcgggaggctgagcggcgccggggggccgggagcggggccgccggggacggggccagagagagcccctttcctag

SEQ ID NO: 132659 - DNA, 122 bp, Homo sapiens
aggtgatgggcggagccacgtttttctactgttgggattcagttccgccgacagaaaatgcggagaacgcggaggaagtccctgaggggaaattgctgctcacctggctcccgctgctccgc

SEQ ID NO: 132660 - DNA, 122 bp, Homo sapiens
ctttttctacacataatctctcttctaatctcattcctaataaagcagttaaggcagcttcgggacctggtaaggtaattccaatcactttatgttaattgcgtttgatcatagatcacttt

SEQ ID NO: 132661 - DNA, 122 bp, Homo sapiens
tccgccctctgcttctgcttctcgattcctcttctgggtctcatgctcctccttcttttgcgccgaatgcgttctccaatcggatccgtcgacccccctaggtgggcgtgcccggcagccga

SEQ ID NO: 132662 - DNA, 122 bp, Homo sapiens
tggccattcccattggggaaagatgaaaccacaggccggtgggggtggtgcgttcttggacgactcaaacctgggatctgcacagggacctgtgacttgtgttcgtcgggagccggtgtcac

SEQ ID NO: 132663 - DNA, 122 bp, Homo sapiens
gggtgaggtgcacagtggggccagaccttgcggctaaaagcagcagttattttagggatacgcttccccagaaggtgacgtgtctccctggctacaggtgtttgttcacctggatgtgaaca

SEQ ID NO: 132664 - DNA, 122 bp, Homo sapiens
gagacttccctgatgtagtctagcactgactccttccttgggtctctgacagactcagctcgtggtagtgctatttgtctctgggggaggtctgtggaagaagggaggaaggggcattggca

SEQ ID NO: 132665 - DNA, 122 bp, Homo sapiens
tcagcctaatgaagctgttgtctgggggtaatgatgcaaatgcctgggccctttcttgcccgtggtagtctagaacgtgatttgtcatacaatctgaatctttgggaggactttagacagaa

SEQ ID NO: 132666 - DNA, 122 bp, Homo sapiens
ggaggacaggggtccccagcatccccagggacgtggactctgatactgggttttgtcttgcgtgggggctggaggagcccagtcttaccttgactaccttcagcacccgcacatcctggtcc

SEQ ID NO: 132667 - DNA, 122 bp, Homo sapiens
gatcgttttcaaaaaacaaagtcacgccgtagcgcagactgcagcgttggtcccgggtgtcgcacagtggtgctgtacccacggcctggggctcctgcactcgtgaaggagctgccactttt

SEQ ID NO: 132668 - DNA, 122 bp, Homo sapiens
acctggacaataggtgactgcatctccatcactgcaatatgtactcagatcccaggcagacggtaagggggctggggccactgcaaagagggagtaggggactcacacccctcccgctttcc

SEQ ID NO: 132669 - DNA, 122 bp, Homo sapiens
cagagcaaacttctttactctgcctacagcaagctctgcaggatggatttcagtgttcagcgtccctggacatctgcctctaaaacaaatctgcaccacaacagaggtggcatcagtcaaca

SEQ ID NO: 132670 - DNA, 122 bp, Homo sapiens
tctcaagcttggagacacagccataactcaggtttgtcagactccagagtgacctcttaacggtcatgcttgctactctggctcttgaacctgaaacaaatggtgaataactgttgaaaatg

SEQ ID NO: 132671 - DNA, 122 bp, Homo sapiens
gggttacacctgctccttcctggacgctcactcccttgctcgctagaataaactgctttgcgctctcttctctgtctgagattgtgccttctgtaaggaggagtgtgcgagaggctacggat

SEQ ID NO: 132672 - DNA, 122 bp, Homo sapiens
cctttgagtcaatcttgactctctctctcataccttacagcgacgtcatcacatcctgatcgctcttctttttaaaaacattttcttggccaggcgcaggagagcccgaggtgggtgggtca

SEQ ID NO: 132673 - DNA, 122 bp, Homo sapiens
tggatgacaccggcaaaagtgctggggcaaggggccctgattccatggtttgctctcagacgggttagcaagcagtggatccaaaacgaaacttcacgcatgtacatacacgcacatataga

SEQ ID NO: 132674 - DNA, 122 bp, Homo sapiens
ctaggaggctgtgcgatcgtctggtgttccccagctcatctcccctctgccctgcacacccggccacccacccttgtgcccacggaagatgccacagtgtgcagggggcagtcatgcctgca

SEQ ID NO: 132675 - DNA, 122 bp, Homo sapiens
cagggcaatcacgcctccccggggacactgggcaatgtccagagacatttttggcagcctcgactgcgaggggaagggtactactggcatctagtggatagaggtcagagatgctgctcaac

SEQ ID NO: 132676 - DNA, 122 bp, Homo sapiens
cgcccccgacgggcgtttttgcatcgtcacatctgcgacttctggttaggcggaggcggccgagctgacaaccggatatgacgttaaggactgccctgtagtgcccgcggttgccagtcctc

SEQ ID NO: 132677 - DNA, 122 bp, Homo sapiens
gaacagaggcagacactgcggctcaaaaccccaagggtaggtacctattgtgcggagtctcggaacgcctgcctggaagaagagttccggcggctccccgaacgcttggagaaagcgcttgg

SEQ ID NO: 132678 - DNA, 122 bp, Homo sapiens
ccaggacacgggagcaaccagcgacaccggtcacttacggatgctgttaacacgatggtccgccccatggaccacaaattgaggctgagacactcaggagacggtggcacactcagatgcca

SEQ ID NO: 132679 - DNA, 122 bp, Homo sapiens
accttggacactaagaacattctgaaactgccattcctcgctggcatcatttgcacacatcgattctatccagaaccacaccccagcaagaacagagggcatgtctttgctggtttctttcc

SEQ ID NO: 132680 - DNA, 122 bp, Homo sapiens
cctgcaataagccagcactaaatataaacttgaaaatgagtatataaggcaattgagttacggagtttaaattgtgtgtatgtgtatgtatgtgcacacacacgtttgctttcttggtgtgt

SEQ ID NO: 132681 - DNA, 122 bp, Homo sapiens
cagctgctggcgctggtatgcaaagtccgtgatgccggtccctgcgcttaggcacaggctcgacgttttgcacaataaaaggtgaacgggtcctccagaccccacctctcccgcctcgggcc

SEQ ID NO: 132682 - DNA, 122 bp, Homo sapiens
agtcactgcttctagcctgcgtcgtctggtagaacaaaccttactgcacactgttcctgccgctgacttcaaataaactgcagtttctactcgattcccaaagaaagctcaagtatgaaagt

SEQ ID NO: 132683 - DNA, 122 bp, Homo sapiens
ccttgccacttcaccctaccgggtaacgatcatgctggcgtggaaaattcttgtccttcccgaactcactccagctcccgtttaattccatagcatcaggatttccctgcttcccagctgcg

SEQ ID NO: 132684 - DNA, 122 bp, Homo sapiens
gttatggtgcctcagaccagtcccccaggccccacccctgaagcagcaccatgcctcatccgagagaagtgagagtctcctgggattgtgctgtcttcatggtggctctgccctggttctgc

SEQ ID NO: 132685 - DNA, 122 bp, Homo sapiens
actctgttttctaccagatcctgctctggtaagagcagtagtgacaggggtattgaccagcgctcaaaaaacaaatcctgctgatctcctacctcaaaaggaaaagctggagaatgagatgt

SEQ ID NO: 132686 - DNA, 122 bp, Homo sapiens
agtccaggcacagcttgtgctactcacgtgtctcgcgcagggtccccaggaggcagtgggcggaggcttcattttatcccacacaatggaaggaagataacgaccccacccacacggtggcc

SEQ ID NO: 132687 - DNA, 122 bp, Homo sapiens
cgggacgcctgtcagcgggctcaccaaccgggacaccctggctgtcatccgccacttccgcgagcccatccgtctcaagactgtgaaaccaggtacgccggccctgcgtatctgtctcgggg

SEQ ID NO: 132688 - DNA, 122 bp, Homo sapiens
acacacacgcactcgcaaacacgcgggctccctgcgccaccaggaagcagccgccagaatcgccgggtgttccccaactactcctgggagacctggccccccgcccccgcccgcgcgcgcgg

SEQ ID NO: 132689 - DNA, 122 bp, Homo sapiens
ttcatgttggtgtctctatcccagagttgtcaagggtgacatgagagcagtggaggcgcccgcctgttgcagggcccagcatcgagggctgccgctgtccgcatcattgttgtggatgatgc

SEQ ID NO: 132690 - DNA, 122 bp, Homo sapiens
actgggagggctgcgtgggcgcggagggcctgggcgctccccacccagctgctgtgggagcgcctccgagtccccgcgcggaaccctcaccaggcagatgctggcgcatccaccaggcgccg

SEQ ID NO: 132691 - DNA, 122 bp, Homo sapiens
gcctcggagctcggctcgggcaggagcgcgcggccgtgcgcaccgcgcagcgaccgctgccgtcatggggctgcagcccctggagttcagcgactgctacctcgacagcccgtggttccggg

SEQ ID NO: 132692 - DNA, 122 bp, Homo sapiens
tcccccggccccacgcctcacctacgagtactcctggtccctgggctgcggcgtgggggccggcctgatcctgctgttgggggccggctgctttctgctgctcacactgccttcctggccct

SEQ ID NO: 132693 - DNA, 122 bp, Homo sapiens
atcccggcaggagcggagactcgggaggggaccgctggctgcaggcgccctgctggagtccggaacgagggtggtcagggtcgcctccccacggggtcgcagatgagggagtggggccgcgc

SEQ ID NO: 132694 - DNA, 122 bp, Homo sapiens
ggaagtccagggagagtgaagtgactgctgtgccaggttgagtcagtggaggaacgcaggcgtgtcagcgggttcccaggggcgcttttcatcaccgaggcactcagtaacaggctatcaat

SEQ ID NO: 132695 - DNA, 122 bp, Homo sapiens
agccgctgacagcatgcagagcaagttaggaaaaaccgaggccctgtgggaacagcaacgcgggctccagccaggctctcgtcctcgcagcctcccacaagacctggggctcagggcagccg

SEQ ID NO: 132696 - DNA, 122 bp, Homo sapiens
cccgcccccatccgaatcccggcgccggtgttcccgcgcgcctcacccgctcagagcccgcggcctccacttccggcggggcaggacgtgcagaggtgcctagtcctccagccccgccccat

SEQ ID NO: 132697 - DNA, 122 bp, Homo sapiens
aagggtgggcgtgtgcgcgcgttctccaaacgccacccccacggggcctcacagccgccccggcctggcaaccgtcacccattttacgaacgaggacatcaaggtaggtcgctcatccagcc

SEQ ID NO: 132698 - DNA, 122 bp, Homo sapiens
ccgcgacatcgccgcctactgcaactacacgcagtaccagccccgtgtgctggctgtcatcgggccccactcgtcagagctcgccatggtcaccggcaagttcttcagcttcttcctcatgc

SEQ ID NO: 132699 - DNA, 122 bp, Homo sapiens
ctcaggccttgctcagtcgaactgacgcccagtagacaagaaagacggaagctccgcccacgcgcctttatgcgcaggctcttcctactcgcacagcccagggagtggggaggataaggcgc

SEQ ID NO: 132700 - DNA, 122 bp, Homo sapiens
ctcttctaatcctattaggttttgtccagacaacgttttgctctttcagaagagaaagagcgttctgcgctcgtcgtcttggattcgacaaccataagcatcccgttagggcaaccaccgca

SEQ ID NO: 132701 - DNA, 122 bp, Homo sapiens
tccactagtctttcaaaggattcatggtgaattgggtctaacgagtataacacggccggccgaaggcatgaagctcacgctaccctttcagggcggagaagttcccaggaggaagaatggag

SEQ ID NO: 132702 - DNA, 122 bp, Homo sapiens
ccaccgccacaccccctgcgggccccccgcctgccccgccgcctcccgcaccgcccccgccgccgctgctcctgtctggggccccaggactacccctgccccccggcgccgccggcagcccg

SEQ ID NO: 132703 - DNA, 122 bp, Homo sapiens
gtgtgagccaatgttgactttagtcacattaaactctgcttccgggtgacactgaacacacgagaggaagtgagagctagttggacagcctttcttgaagaaggaaatcatactcaattgct

SEQ ID NO: 132704 - DNA, 122 bp, Homo sapiens
cgccacgtcccagccaaactgcaccccggatgtcgtccccacttctcgctccaaggagcgcggggccggactctgaacgcctcgcccgccaattcaaagggttggccctaactttgaacgcc

SEQ ID NO: 132705 - DNA, 122 bp, Homo sapiens
tagctgggcctgcaggggacccacggctcgcctccagcctcctgcgctccggtacctgggcgtcccaactccactgcgcgcccaaacccagccgagccggttcgtggcccgccccgccgggc

SEQ ID NO: 132706 - DNA, 122 bp, Homo sapiens
gtgacgcggcccttcctggagaccagaaggaccggtgctcagagacacacatgggcgtggcggccctcgcgggcccggcggcctcaggctccagctggagtggccatgtgcactttgttacc

SEQ ID NO: 132707 - DNA, 122 bp, Homo sapiens
cggtacatggtgctgagggagcttgggtagaatttctgggcggctgtggccacgcctccacgccggttgtcagaaaccgttccgcccaccggcctccgctcttatccaatcaacagcctcac

SEQ ID NO: 132708 - DNA, 122 bp, Homo sapiens
aggcctggaggaggcgcgcgcgctaggcagggccgcacagcgcgggcagagtgcgggatgcgggcacccggtgggtacgcagtaaacatttgctgaaggaatgtgacccttgggacagttcc

SEQ ID NO: 132709 - DNA, 122 bp, Homo sapiens
gtgatgccgacttttccgtggctgggttcccgcaagcttcatgcagcctttggtttgatacgcctgctaggcaatgctcagaagccaggagcctcactgggagcccgttattgggctgctac

SEQ ID NO: 132710 - DNA, 122 bp, Homo sapiens
gcacagtggacaaaggcagccagaggtcaagacagtccaccgtgtcatgttaaagccaggcggggtcatgtcggacactctatgatatctgctgtaccctccatgcttgttcaggatcagaa

SEQ ID NO: 132711 - DNA, 122 bp, Homo sapiens
ttttttttttttttttgaggcggagccttcctctgtcgcccaggctggattgtagtggtgcgatctgggctcactgcaagttctgcctcctgggttcatgccattccccggcctcagtctcc

SEQ ID NO: 132712 - DNA, 122 bp, Homo sapiens
agggaatcagatgagggtgccataaagggttaagatttctgcaatccttacataataaaacgtggcaagcctccagatgaaaccccaaatgtcagaatgttctataaagtacttccttaccc

SEQ ID NO: 132713 - DNA, 122 bp, Homo sapiens
ggatgtagtccaaggtggcaggagaagcaatttcctcagccaacctggagaaatgagtgccgcacaatctaagaagatcgaggaaagcctggtaccactgaaaagataacccacttaataaa

SEQ ID NO: 132714 - DNA, 122 bp, Homo sapiens
ggtcaggtgtgtatagaccatcgatgccagcgtgtggatctcctgggggcacaggaatgtcgaagcaaatgccatggacatggggtgagctgggatgggggaagtggaaggggagcagagag

SEQ ID NO: 132715 - DNA, 122 bp, Homo sapiens
atgagactgaggagctgaattttagattttacttcatttaaatgaacttaaacagctatacgtggctagtggtaaatgcagctttagaaccttataataggagtggaagacaaaagagttcc

SEQ ID NO: 132716 - DNA, 122 bp, Homo sapiens
gaaccggaagtaaggaaggggcggccgaccggaagcgaggcgtagaggccggaagctcagcgcggaggcccccgagggaggtggtggcgtggtgagactgtaaaaacaaagacacatgcttc

SEQ ID NO: 132717 - DNA, 122 bp, Homo sapiens
catagggtagcaaagggcagtgacccatgacagatgacatgcaagtgagctgagccctgacgctctccagcttcctgcctgaagagaatctctgagccatgacacaggcagaggagcccagg

SEQ ID NO: 132718 - DNA, 122 bp, Homo sapiens
tggctctacttctgggtctacctcttattgagaggataataatacctgcctctagagatgcgaggatcaaatgaaataataatatatataaaaatacttgcatatggtagtgcttgtaccag

SEQ ID NO: 132719 - DNA, 122 bp, Homo sapiens
gtagtgagaaatactataaatatccccatttgtgacaggaaggagctgagtcagagagaccgtgtgtaatttgctcagcgtcacacagatagtaaacggcagagccgctcttcctccctgtc

SEQ ID NO: 132720 - DNA, 122 bp, Homo sapiens
ctcgcctgcccggccgcgccctgccaccacagtgccgcctcctctgcttggccggccagccgtgcagccactgcgtccgccgtccgctgctccatctgcagcaggccccggtgagcctggcc

SEQ ID NO: 132721 - DNA, 122 bp, Homo sapiens
aaagttctctatttttagttgaatgattctgggaaaatctctattggaacctatcgacttcgcaaatgacaaaggcgaggtccagagacttatccaagaccccagagtaccagtggaaatca

SEQ ID NO: 132722 - DNA, 122 bp, Homo sapiens
ataaaatgccgtgatgacgctgtcacccattccggattcacgaatcattcttcaaaagtccggctccaaaactatgtggagactgaaatcccctgaagaaaaaaaaaaaaaaccgccaaaat

SEQ ID NO: 132723 - DNA, 122 bp, Homo sapiens
ggggagaaggccaggggtcactccaggattccaatagatctgtgtgtccctctccccacccgtccctgtccggctctccgccttcccctgcccccttcaatattcctagcaaagagggaacg

SEQ ID NO: 132724 - DNA, 122 bp, Homo sapiens
atcgcccgtgctgagcagtgagcgctccgagggggtgggagacacggggggcgtggagcccgtgctgccaaacttcaccaccccactgctggccaccgtggccaccaccacctcagctggag

SEQ ID NO: 132725 - DNA, 122 bp, Homo sapiens
tgggggcccctgacctgggggctggggacacctgaggtttcctgccacaaccctgctgaccgttggcaactttgcagaacttcagggctgctttggctcagagtgggtagcttgtcctgcag

SEQ ID NO: 132726 - DNA, 122 bp, Homo sapiens
ccactatcctcagggttctgcactccccaagccacctttccactcccctggcatcacacgcgaagcacacctccagcccaccctgtgtccacttcccgcgccgccttatcttccacgcaaca

SEQ ID NO: 132727 - DNA, 122 bp, Homo sapiens
gagggaccggcgcttttgctctggcagcggcgcttttaactgcgacagatgcgtgcggtgcggcgggggagccggccgtgccggggctgggggctgctgggcgggggtggtcggggcggggg

SEQ ID NO: 132728 - DNA, 122 bp, Homo sapiens
agccttgcccgcgttggagacggggaaaggctcgcagaactaaggtgcggggcgggggtgcgggtgccaaggtccctctgaggttcgtttggcttattcaccgatttcattccgctcttggt

SEQ ID NO: 132729 - DNA, 122 bp, Homo sapiens
acggccaccacagcgatgagcgtgatgagcagcagggcccgcgatcggcagcagaaggcgcgggcggagcggggcgccagggaggcctccgagagctctgccaggctgcggcggggcagcac

SEQ ID NO: 132730 - DNA, 122 bp, Homo sapiens
ccagctgaggagctgtagcattcggtcacagggaagcgctgctaaaaataaacgccggaccggattttcctctgcaaactagaaaatggattggactagtactgcgtgcatcaggacgaatt

SEQ ID NO: 132731 - DNA, 122 bp, Homo sapiens
gctgttctctttaagctcgataagactccaagagcaaaagaacatctctcaacttcctgacgctttccagcacttgggacaggactgtagctgaaatgttatggctgtgtattataaactca

SEQ ID NO: 132732 - DNA, 122 bp, Homo sapiens
gatgtgagaccaaaataagaacaagcacacccccacccccgtagggccgaggaatattcccgagggtcctgaatgtcaacgaagtgcgtttaaagcctccgtcagccttctgtctttggctt

SEQ ID NO: 132733 - DNA, 122 bp, Homo sapiens
aacaaaattggctgaagtcattggagccaatctggcagactggagtctgcacagaaaaagcgtgctgatgtcacagccaaatttccactgcatgtttcatactgaccctccccgaaactgca

SEQ ID NO: 132734 - DNA, 122 bp, Homo sapiens
gaagctgtgacgcagacacgcacagtaatacacagatggaggctcaaaagacacgagtttcgcgtcctgaaattccgcttccagggccaagctttcttttctgatactgtttgtccctcgcg

SEQ ID NO: 132735 - DNA, 122 bp, Homo sapiens
gggtggactcgttcctctgctacccgcggccccggagtcagttgcaaacctggatcccaacgccaagctccctgcacaagttgggcaggggctgtgtgtgtgtctgtgtgtgtgtgtctgtg

SEQ ID NO: 132736 - DNA, 122 bp, Homo sapiens
aacgtagccttaaccaacagtcacatttcccgacaggtatgtgatggtttcccaaagcatcgatgaggcttcagcgtgggcaggtcattaagatgccatttagacgaaaaaggagtaaaagt

SEQ ID NO: 132737 - DNA, 122 bp, Homo sapiens
cgggcggtgagtgctgaggcatggagggggtcgggggcgtctccccagtcatgtgactgccgtggtgactgtgcacctgactgccccacatcagagtccccaaacgcccgatcatcaacaca

SEQ ID NO: 132738 - DNA, 122 bp, Homo sapiens
tttccaagtccagggaacattctgttccctgggcttcagtttataactgaatgtgctttacgtttagaagacaagctatagcttgtaaaatgaatgtggaaataatctaaagtatgaggcct

SEQ ID NO: 132739 - DNA, 122 bp, Homo sapiens
gcaaggaagtcggtagaggcgtggaccaggaagaagaaactttccagtagctttgtgcagcggtaaggactgcacaagggagagatgagaagtgttttttttattgtagcagaatggggaag

SEQ ID NO: 132740 - DNA, 122 bp, Homo sapiens
aagcggctgcggttctcgccggttctcagccggggtttgatagttgtcaggaggattcgacgttcagtgcccagggatgtggaggtgatggggggccggggagggtgagtgctgggcgattc

SEQ ID NO: 132741 - DNA, 122 bp, Homo sapiens
cggcggcttcaacctggaggcctgcaaggagtacaagcccctcatcatctacaatgccatcgactcgctgacccgcatcatccgggccctggccgccctcaggatcgacttccacaaccccg

SEQ ID NO: 132742 - DNA, 122 bp, Homo sapiens
tatttttggtagagacagggttttaccgtgttagccaggatggtctcaatctcctgacctcggctcatattcatttatatgtggaatctaaacagtagaactcagaagcagagaagtggtgg

SEQ ID NO: 132743 - DNA, 122 bp, Homo sapiens
ccccacccccatcccggaggaaggcccaggctcggggaagggcgcaggctgtagggaacccgcatctgccggctctggggggctcctcacatccgtgtgtctcctccttgctttcttcttgg

SEQ ID NO: 132744 - DNA, 122 bp, Homo sapiens
cgggtgggtagcctttgagagttccagcagccccttcactaatcagagaactggaaagaccggggtgacattgacataagggactcagaggtggaactaaagactgttcttttctggcatcc

SEQ ID NO: 132745 - DNA, 122 bp, Homo sapiens
ttggggtaggccggagcactttcgtcccgggcctccggagtgagggggggcggggagcgtcgcagcaactgagaccaggaaaagtctgccccggctggtgccgcaccgcacacgtgtccggt

SEQ ID NO: 132746 - DNA, 122 bp, Homo sapiens
cctcctctacagcccgatccactctgttggcggctgcgccttgccttgggtgcagtgggacgtgtccctcccatgtttcccttaattaggaggaggcaaacttctgtcttcccctcctgccg

SEQ ID NO: 132747 - DNA, 122 bp, Homo sapiens
gaatttttattgtgtataaatgttatttaaaatgtacaacactctttcactgaagggtggcggggacacaaaatactttagctagcagctttctttgtgtgatacatcagtgttctggcttc

SEQ ID NO: 132748 - DNA, 122 bp, Homo sapiens
agagagagtccctcgcactacccagccaagcaaacagaacaaggtcgtgaccctgggtcacggccgccagtaccgctcccgcccggcagcggggaagccacctgttaggcccgagcctcacc

SEQ ID NO: 132749 - DNA, 122 bp, Homo sapiens
agcgaaagacgcccgcccgccgcccagccctcgcctccctgcccaccgggcccaccgcgccgccaccccgaccccgctgcgcacggcctgtccgctgcacaccagcttgttggcgtcttcgt

SEQ ID NO: 132750 - DNA, 122 bp, Homo sapiens
tagagctttggaggttctgaggacggtccctggggagcaagtggtaggtttcgaggcgcccgcttcccctctgattcctgcagtaactgagagagagtgtgccagaaatggctttgctgccg

SEQ ID NO: 132751 - DNA, 122 bp, Homo sapiens
ctgttctcttacatgctatttgaaaacttcctatcagcaaagagtcccccctataaaccccgacgaacctgtgctaaagtggcaaaactggggcccaagtcctgagtctgccaccgtccagc

SEQ ID NO: 132752 - DNA, 122 bp, Homo sapiens
cgtagctctggctgtgcctcactgagatccctggccaggagagttcccgtgtggcaaaagcgatctttctgtcatgtggctgtatctgtaatgtcaccctgatcaagggaagaagtgctagc

SEQ ID NO: 132753 - DNA, 122 bp, Homo sapiens
actcccttctccctgcgccgttggcccccaacacaattacactttattttgcgaggtcttcgttcctgtcctggcttatgcagtatttccatgggtgcagtggagtggaagggagacggcga

SEQ ID NO: 132754 - DNA, 122 bp, Homo sapiens
ccaagcaggtgagtggccccgcacgccccacttggcattttgggcaaggttggccgctcccgctgccaccgaccccatacctcccggtccgaggcgcccctccaacgcgcctctccgactcc

SEQ ID NO: 132755 - DNA, 122 bp, Homo sapiens
aatccaagaaaattaatattcaagggatccgtaaaaattcaggccccccgagatgtagagcgctgggatggaggaggcagggcggagctcgacgtcatgtgactggttgggcccgccccccc

SEQ ID NO: 132756 - DNA, 122 bp, Homo sapiens
taaagtggtaatttcaagtgcctctttttgcatcctgtttgggtgctctttcccctcccacgtgccatctgctctgtccaccagcaccacacgttgattagcacccctggatgtgggacact

SEQ ID NO: 132757 - DNA, 122 bp, Homo sapiens
tcgacctcctgacctcaagtgatctacctgcttccgcctctcaaaagtgctgggatcagccgggcgcggtggttgacgcctgtaatcccagcactttgggaggccgaggcgggcagatcacc

SEQ ID NO: 132758 - DNA, 122 bp, Homo sapiens
attattatcctcatttttcagaggctgaggctaagattaagagaggtaaagcgacttgcccgcagtcacagttagtgatgaatttagactggaactccgatgtttcttgacactgaaatacc

SEQ ID NO: 132759 - DNA, 122 bp, Homo sapiens
tgcggagttgagaaccctttggttcaacaagttcctagtccgggaggatgcagctcagctcgtggagtccgagagtcacggcgtaaaattggcgcttcccgcacatgcagatctcgggctcc

SEQ ID NO: 132760 - DNA, 122 bp, Homo sapiens
gagaaaggagaactaggtaaagagtgtggttggaagtgggagaagattccagaaggcgtacgtggtaaaggcgtgggagacagggatgcaattctgaaactattgactcttctttttttaga

SEQ ID NO: 132761 - DNA, 122 bp, Homo sapiens
agaatggcagtttcacctggcctttacagggacacttacttctttcagaagtcattaagtcggcttttattattcctaaacaaaagagctttattttctcatgagtaggttttagagtttta

SEQ ID NO: 132762 - DNA, 122 bp, Homo sapiens
tgtctcattttctgcagtgactattggccattgctatctcttgaatcccaaatgtgtacacgttcagatgcctggtagacaccaccacctagaagcccttaggcacctatgtcaacatgtcc

SEQ ID NO: 132763 - DNA, 122 bp, Homo sapiens
caatgtcccatgtggagcatatcacaaatatcctacattttagagactacccaacttgcgcgtggtcatttaggaagctaatggtgggattaagaattgaatttggagaatgttgaggttct

SEQ ID NO: 132764 - DNA, 122 bp, Homo sapiens
cccaaggtcccgcccctcgaggctccgtgccccgccccccgggtgccccgcccctttgcgcggctggcgcggccagcaggccaggctcccctcggcaaacctgtctaattggggcggggagc

SEQ ID NO: 132765 - DNA, 122 bp, Homo sapiens
tcaacccagcccagcagcaccggagagcccctccgcacctcattcttaagaacctggacccggctctcctcaccagcgtctccagctgcacagagaaaggactgctctctgaagggtgaaga

SEQ ID NO: 132766 - DNA, 122 bp, Homo sapiens
caaccactccccgcttggctactactcagcagccctgactcattaagaaaacacaaaaatcgagagcaaccagacacaatacaaaaggggaaccctcacctgaggaggctcagaaggagggg

SEQ ID NO: 132767 - DNA, 122 bp, Homo sapiens
ccacaaaaggaaaactacaacttccctcatcttttcattgattgtattttcttagagacacgaaggttttaaaattcatctcttcatcaattactgtctcacatttgtctcacttttttctt

SEQ ID NO: 132768 - DNA, 122 bp, Homo sapiens
cgctctccaccttgagcttcagttgagaactccgcgtttctccctgggaatgtagagatgcgttagtgccgggagagggcgttgcgagatttccagattgcgcgtggcatcctgtcttcccc

SEQ ID NO: 132769 - DNA, 122 bp, Homo sapiens
cccaccagcaaggttattgagcttggtttgtgactgccccatgtgcagccctctgcgctgcgcttgggtttaacatgcttgaaaaatgggttcgaaatgtggccgcaagccacaatagggac

SEQ ID NO: 132770 - DNA, 122 bp, Homo sapiens
tctcatctttattttttgctgcgtgtgtctctgcccttttagaattcatcctccagcattcgtcctttgcagttcgaaaatctcaggagatacacaaagtagaaagaccaaaaaaatcacgc

SEQ ID NO: 132771 - DNA, 122 bp, Homo sapiens
gggtctcagggcagctgtaccttgtccttgttccttcatgagcctgactcatgctatggtcgctctgtgtgttggctgggcttcctggaggaggaacatttaggtctaggctctgtaggaag

SEQ ID NO: 132772 - DNA, 122 bp, Homo sapiens
tggccgtgctggctgccgcagaagccaaagctcgcaggaggtacatacggcaggtgtaaacgtctctgtacgccatgtgctcataatcagggagaattttcacaaaacgtcccgacttcacg

SEQ ID NO: 132773 - DNA, 122 bp, Homo sapiens
agggcggcaggctgggaactcagcacggcttccacattgccatcttgtggaggagaatcccgttttcttccagaaacctcggtctttgctctcaaggcctcagctgctgggacgaggcccac

SEQ ID NO: 132774 - DNA, 122 bp, Homo sapiens
gcaggggaaaatcagaacctaattgaaaaatgtccactgcaatccattactgctgcgtgccgctcacagagcagagggcaggagatgaaagacagaggggagccatcccaggagccaggcag

SEQ ID NO: 132775 - DNA, 122 bp, Homo sapiens
cactttttaaagtgaccctttgagccttgcttcctctgtgcatgtcaggattggctttcacggccacagaatctggactgtgattagtcttcctgtttcatctgtggttttgctcattgatt

SEQ ID NO: 132776 - DNA, 122 bp, Homo sapiens
taatttttttctttgctggtctgtttgaagggctcctatggccaaaaaggtggtcagtcccgtcagctaggctgtgaggacgcctaaacgctttgaggacgcctaaacgctttgaggtagtg

SEQ ID NO: 132777 - DNA, 122 bp, Homo sapiens
attggagcgaagcccaaggtagcagaagctactgatttcctgtcacctgatgtctatcagcgatttcatcttcaggcctggactacaccactcaccctcccagtgtgcttgagaaacaaact

SEQ ID NO: 132778 - DNA, 122 bp, Homo sapiens
tttctatttgggcaaggacttgctgattctctttaggggtctccattattttctccccatcgttcctcccctctccagttcaagcttttactttcacattgaaacagtaactggctagagcc

SEQ ID NO: 132779 - DNA, 122 bp, Homo sapiens
ggacagaggaggcctcacccggagagaggcaaaaggacagctcagcccggccttgccctgcggcctcagcctggctgccccacctgcgccagccgggctctggacacctggagggggaagag

SEQ ID NO: 132780 - DNA, 122 bp, Homo sapiens
ggggggtggtgggggtgacgtcaggactgcagtccagaagagagcggctggagagggctgcgcgcttctcgccaagcaagcgggaggcgcactggggccgccgccgttcccgcgctcctccc

SEQ ID NO: 132781 - DNA, 122 bp, Homo sapiens
ctgtcatctccaaatgaagtaagttttaaaaacaaagggggccagctgacaggtcccaaacgtctgtactgttgttgcctcattggtcagaagcctcgagaggccaccgcgctgcgcaccga

SEQ ID NO: 132782 - DNA, 122 bp, Homo sapiens
gcctctcaaccccctccccctcggaccagtctttcaggttgtagctttgaactggtgccccgggcccaggcggacagactaatcgggagggcccgacaactcacccaggactaggcagacca

SEQ ID NO: 132783 - DNA, 122 bp, Homo sapiens
acaaaaaccaaaattttaaagtgcatacttggatattttgtgtcaatattatcctttcaacgtggggaaaaattagtcactgtatttgttgttgctgctctttgaacttgttcactgtcttg

SEQ ID NO: 132784 - DNA, 122 bp, Homo sapiens
ccattacgcaggctgtcccgttgccctttttcaccgcatccgctgcggctgcaccacgcacgaggcccagcagcagcagcagcaccaggggcagccgggggctccaccagatgcagcccggg

SEQ ID NO: 132785 - DNA, 122 bp, Homo sapiens
cctttgagaaaaaatgaaagcgcccagaggctgcgtgttctcccaccaggtcagagctgccgtcgcggcggcacaagagccagtccatggcagcctcagccgcggggaggggaggcccggga

SEQ ID NO: 132786 - DNA, 122 bp, Homo sapiens
ccaagtactctcctatagtagtgaacaggacagacaaggtctctggtctggaggatgtttcgtgttataggggaagaggcagataataagtaaataagaaagtaatttctggtagcgatcag

SEQ ID NO: 132787 - DNA, 122 bp, Homo sapiens
agcggggctccggatctaatctgatctaatcagtcatctctccggctggcaggtccctggcgcagggagaggatgctgttgtggttactgcaggatccagcatctttcccaggcagaggcag

SEQ ID NO: 132788 - DNA, 122 bp, Homo sapiens
tattcacgctctgtgcttgtgccaaggtgagtttctcttgctgctggcctatctttctcccggaggagatggcctcgattctttactactgaaatgtaagcccctggggttgagtggagagc

SEQ ID NO: 132789 - DNA, 122 bp, Homo sapiens
gagggaagcggggaccagggaggcgtccctcctgcaggtgtctgggcccccacccatgcccgggcctcccaaggatctttagagattaattattaactgcagctaattttcatcattcttga

SEQ ID NO: 132790 - DNA, 122 bp, Homo sapiens
aactgcagtagaatagtgcaccagctagattcctaaggtttcagcttccgggctctggctcgcagatggcatctctagacctgcccggagccaaggagaactcaccgtcctgaaggaaagga

SEQ ID NO: 132791 - DNA, 122 bp, Homo sapiens
ggccaccgccgccgcctccagaagccccgcgcccctgccgccgcgacgcgcctgcgccgacgtcaccgcacccgccagtgcccacccccgggaaacgaaccccgccgcctattggccggtgc

SEQ ID NO: 132792 - DNA, 122 bp, Homo sapiens
gttcccatgatcctggagggaagaggatgatatcactttaaatatcacagcaggtggacacgccccactgatattgtttctaatttcaacgtgggagaggaggatatgacacccaatatcgc

SEQ ID NO: 132793 - DNA, 122 bp, Homo sapiens
ctcccggcccgccccttctgcggggtcctgcagagtgggggctgagagctgggttcagggcggcgcggtctgcttggcgtcctcgtgggcggagagggccctggttggtcgtggcccctctg

SEQ ID NO: 132794 - DNA, 122 bp, Homo sapiens
gtgattgcaataatttgtttcctctttatagtattaggtacagtaatcaatatgaaatagcgggaagtacaaggaacaattttactgggaaaaaaatctttatcaataggttatcactaagt

SEQ ID NO: 132795 - DNA, 122 bp, Homo sapiens
ccacttggacaagtgaggggcgggtcgccccacaacccctgcctggccacagaagaaaaccgtcagaaggctgtctgtggggccccagaaccatgtggaaatggcctaaggagctggagccc

SEQ ID NO: 132796 - DNA, 122 bp, Homo sapiens
agcacgggaaatagggtcaacaacgccggaaagtactactggaaaagcttccccaggctccgcgaagaaaagttccgaagcccggaagaacgcaagccagacgtggaggcggtgctacgagc

SEQ ID NO: 132797 - DNA, 122 bp, Homo sapiens
ggcacagagcgactggagactgtagtcccccggtttccctggagaccaggcggaagcggccggaagtagcgctgcggttggcagcggcgggatggagaagctgggggtggagccggaggagg

SEQ ID NO: 132798 - DNA, 122 bp, Homo sapiens
gaccggcaggaggatggaaggcacagtccacagggcaccaccagagcagctcaggctccacggaggggtgcgggctgggagaaaccaagccctagggctgtacctgacaccccccaccaacc

SEQ ID NO: 132799 - DNA, 122 bp, Homo sapiens
agctgcggagatgtttttacattaaacaacgatatctatttttcaccttgggtcaggtcccgtgagattgtctctttttgtcctgctcaaggagaaaatccttagctacagctgttgtctac

SEQ ID NO: 132800 - DNA, 122 bp, Homo sapiens
aacgcagacatgcatgcacacacgtgcacgcacgcacacacacacttgcacacacacacacgcaccctgcttgcagttatgcaatggtttgtgcagttgctgtgagcccagaagcgcttgtc

SEQ ID NO: 132801 - DNA, 122 bp, Homo sapiens
attatctcagcttccaccctccctcaagaaggaagacacagtgaaaagccatttctgtagcgcactttatagaccaaagcttagacaaggtggaggctaaagacctgaggagccgagtcagg

SEQ ID NO: 132802 - DNA, 122 bp, Homo sapiens
tctgctgtgctcctcggccagggcaagggagcagctctcagctcagcagtgggatggggccggctggctctgtcctcagggacatggacaggcaggtgcgcagcagccctggccctccgggg

SEQ ID NO: 132803 - DNA, 122 bp, Homo sapiens
caacgtcttcagatctgattgccccccttctctggccgctgcccggccatcagtttatctcgccaacattgtgttagccagtgattcgcaggcgcttctgtgtctgctccgtgatgcttaca

SEQ ID NO: 132804 - DNA, 122 bp, Homo sapiens
ctgccttccgggctcaagagattcttctgcttcagcctctcaagtagctgggatgacaggcgcatgacaggatgcccagttaatttgtatttttgtagagatggggtctcacgatattgccc

SEQ ID NO: 132805 - DNA, 122 bp, Homo sapiens
ccatgcagagcctccttcagcatgtcctgcgctgaccagctgagcagcctgcccgcccggcggggcctcctgtacctgggccagccctctttgccccggtgctgtgccctcggtcccgtgcc

SEQ ID NO: 132806 - DNA, 122 bp, Homo sapiens
ttggccctccctccctgctcctccctggtgttggtcagtccttttctaaagctgtcccctcgtgtgtgtctggggcatgcccaggctgggccctgtgccctgtctgcatgcctccaactgtc

SEQ ID NO: 132807 - DNA, 122 bp, Homo sapiens
tccattgcctttaatattaacaactctagaaagtagatatttttatctccattttacaagcgaggctctgggtgactaatagttgaacaaggtgacatggatgtaagtcatagaaccagaac

SEQ ID NO: 132808 - DNA, 122 bp, Homo sapiens
catgaatggaagaggcgggggactcagctctgctccccgtcccaaaactgagattcacaacggggaaggaaaggaactttaatgagaaatcaaaacacagggaaccaaagtgcaaatcatcc

SEQ ID NO: 132809 - DNA, 122 bp, Homo sapiens
agactagcagccttgacgttgggcttcccgacgatgctatccattacactgtcagcaaagcggggggccgcgcataggccaagtgtcaacagaaggtgaggaagaaaatcagccgcaatctc

SEQ ID NO: 132810 - DNA, 122 bp, Homo sapiens
cgacggggtggggctgcggctgcgacctagactcaggctagcggcccggattaagaacagcggggctacgagtcgggacactgccgggccggggctcacaacaaggaagtcactgaatctcc

SEQ ID NO: 132811 - DNA, 122 bp, Homo sapiens
cgggccacgcacgcggtcccagcctcgccgtccgccccggggagagctggaaggtgggcccggatctcccacatcactatgagctcattccagccccggccaagcaaagcctggccctactc

SEQ ID NO: 132812 - DNA, 122 bp, Homo sapiens
cacatggacctggcccaaccctcacagccagtagacgagctggagctctcggtgctcgagcggcagccagaagagaacacgcctctcaatggtgccgacaaggtcttcccttctttggacga

SEQ ID NO: 132813 - DNA, 122 bp, Homo sapiens
ctcagcaccaggatattgttggagaggacagccgtgcggcgtctggggctgacggggccacgtgtccttcgccacttcttccagcatgtccccccggggtccccaggggctgggcatcctgg

SEQ ID NO: 132814 - DNA, 122 bp, Homo sapiens
gttctccagtaaaaagactgcggaggcggacagggtgtggccgccatgggactccgcccccgctctggtgactcccataggttagagatggggcaccgacattgcccactccagcttgctaa

SEQ ID NO: 132815 - DNA, 122 bp, Homo sapiens
ttaagccggtctgaaatgcgcaatattcgggtgggagtgacccgattttccaggtgcgtccgtcagccctttctttgactcggaaagggaactccctgaccccttgcgcttcccaggtgagg

SEQ ID NO: 132816 - DNA, 122 bp, Homo sapiens
ctctcagtttcacatccgatgggcaagagtgccagtccctccttcggaatcctccacagacgtctgatggagtctcattggctcttactgggccacatgcccacgcctggaaaaagtaacag

SEQ ID NO: 132817 - DNA, 122 bp, Homo sapiens
gttcgaggtcagcctgggaaacacagcaagaccccatctcttaaaacaaaaatctggggccggatgcagtggctcacacctgtgagtcccagaactttgggaggccaaggcaggaggatcgc

SEQ ID NO: 132818 - DNA, 122 bp, Homo sapiens
tgctttcataaagctgctgagcagtttgctgtcttgaataaattttgctttggagggggtcgggggggatttgaaccagcacattcttgtgtggtttgtgaagattcacatggtaaccagcg

SEQ ID NO: 132819 - DNA, 122 bp, Homo sapiens
tccttccttctaatctagggtaggattactttaaaacacggagcaaaaaggcactcgtcacggccccatacggccccggggctagtcgccagggtcaagggtagagagagcccagggttgcc

SEQ ID NO: 132820 - DNA, 122 bp, Homo sapiens
tatttttggggagaaagcggcggctagcagggacgaagctcaacttcatgcgccgcgccccggaatgctttgcctttagccactagcggagccgcccgcctgagggagccctccgggagtga

SEQ ID NO: 132821 - DNA, 122 bp, Homo sapiens
tacaaattgtacttgatactaaagaaaagacagtcgggtccagtccagttcggctgtgaacgttctcacctgatttctgtctagggatggacctccccaaaacggttttcctggcgtttttg

SEQ ID NO: 132822 - DNA, 122 bp, Homo sapiens
aattctagtgattacgttgttgattgagtagtcactaaatccaggcacatctgacaacaacggtgtaaggcagagtttgcgaagtggcacaaccttccatagaaaaaatgttgaggcacata

SEQ ID NO: 132823 - DNA, 122 bp, Homo sapiens
ggcagttagaccagctaatgccctcagggcagtggggggaccacaggccccacctactgccggccctgcccctgcccctctcactggggcccaggggactgcaggagaagatggtcccaagg

SEQ ID NO: 132824 - DNA, 122 bp, Homo sapiens
tctcaaatacatgagggcttgtattttcccccaggaaggagcttcttaggaaagagccagcgtgccagctttgtttttctttcttcttctttttttttttttcctatgagggggtgaggagc

SEQ ID NO: 132825 - DNA, 122 bp, Homo sapiens
ggcacctgcggcgctgcgggagcgaaagaaccggctggacgcggagaggcaaactttgcccgcgccctggccagcggcgctggggacccggagcctgcggactcccacccgggccgcaagtc

SEQ ID NO: 132826 - DNA, 122 bp, Homo sapiens
ggtaaaaataacaatggactcctgtgtgttctctgacgatagcaatacgaatagctaccacgtaatgcctactagttgttaggtactaaatattaactaatttcattcttacaacaacccta

SEQ ID NO: 132827 - DNA, 122 bp, Homo sapiens
accctccacccgtggagcctttcttctcagactgaagccctgtcccctttaaacgccaaccgctccccttcccgcagcccctggcacctgcccttctctctgtctctatgagtttgactcta

SEQ ID NO: 132828 - DNA, 122 bp, Homo sapiens
cctcgcggcccagagccttggcgaggtggggagcctggacctggcctaagggggctgtctcggcctcccaccccatctcccggggggcggagacccgggagcccagaggtgcccccccaacc

SEQ ID NO: 132829 - DNA, 122 bp, Homo sapiens
ccgtccacctccagcctcagccaaccacaaggagagtcggcctgggaacccgcccctccccgccaccgcctaccaagccctctataggagggcccacaggcaccgcccagccgagctttcca

SEQ ID NO: 132830 - DNA, 122 bp, Homo sapiens
gaggggtgggctttggagatcagagggtcgacgctgcttcgttgcctggactctggtttccgccctggagcaagccggggcctggtcggcagctgggccgccatggagtccacgctgggcgc

SEQ ID NO: 132831 - DNA, 122 bp, Homo sapiens
tactaggtgacggcccatcccgcgcgcgcaagcccggaaccccgctccgctcaccctccgcgcgctgccgctttgccctggcaacggtaaccacggcgaggccctgccccacgcccggtgat

SEQ ID NO: 132832 - DNA, 122 bp, Homo sapiens
tggaagctccacttcacggttggtgttgtactgtctggctttgtggacgaggacgcccgccgccttggctgcaccctggaatgccttgcactgggccccggctgcacgtgcctgctccgacc

SEQ ID NO: 132833 - DNA, 122 bp, Homo sapiens
cagaagacagcctttgtcctaacagaagcactgggagcacgtaggaggggccgagccagccgtcctcccggcttctcatcactggcattgtttcagaagacagcctttgtcctaacagaagc

SEQ ID NO: 132834 - DNA, 122 bp, Homo sapiens
ttgatgccctgggaatgttactccctccactgctttccaccaggctcttagaaacacaaacgattttctccttgtttgagctctagggatttttttttttaatcattcagatgttttttcct

SEQ ID NO: 132835 - DNA, 122 bp, Homo sapiens
gtagttttaatctcagtatattaatatcttagtaaggggaaggaagatagatgagcatggcgaaaatagagctacttctcaggaagatgatgtaatacattaaaaagaaaagtttggagtac

SEQ ID NO: 132836 - DNA, 122 bp, Homo sapiens
gactgtgtctgtcacttggctccagctgacttactctgacgtgcctggagaataagtgtccggcacgtgcagagccaagggagaaggaaacccagaccctgccctcagagctcccaggctgt

SEQ ID NO: 132837 - DNA, 122 bp, Homo sapiens
agttctgggcctaggctgcgggatatggcagcgcagataaggtgggtgcagtgcggaagccgagacgccttacaggtcatagggtgcggcggacggccgcagagctgccgatcagcctgcca

SEQ ID NO: 132838 - DNA, 122 bp, Homo sapiens
gggcccgggggtcatgtcccagctcagctggtcctgagaagctgcctggtagacagtcaccggcacagagagctggaaagtgccctcgaccccagaacctgggtcctgtgaggacatccacc

SEQ ID NO: 132839 - DNA, 122 bp, Homo sapiens
cctgctcagcccacaggcaatctgggcacaagtgacacatcccctgggcgcctgtcccttcgcactggcccagggagttcatgtgtctgatcagagggcgcagtccaccctcactatctagc

SEQ ID NO: 132840 - DNA, 122 bp, Homo sapiens
atcaaagaaaactagtgtctgttttgagcgagaaggcgtaaaactgggcaaccttgaagccgctagaaactgaacaaagactgggttggccgaaatacagctctgaagcctcataaaattca

SEQ ID NO: 132841 - DNA, 122 bp, Homo sapiens
gcctcgcgggtaaggccaagccacgcgggtaaggccaagccaatccgttacacaccagtgcgcctgcgcacctttgacgtcactgaacctgtgccttcactgcatctgcagctccagcctcc

SEQ ID NO: 132842 - DNA, 122 bp, Homo sapiens
tgtggggagcacctctgccccgccgccctgtctgggatgtgaggagcgcctctgctgggccgcaaccctgtctgggaggtgaggagcgtctctgcccggcctccccgtctgagaagtgagga

SEQ ID NO: 132843 - DNA, 122 bp, Homo sapiens
gtatataacaaaacactaaactcatcagttcatccggcatcagatcaatggatctctgagcggggtgtttttttcagtgtcttataagcatagatgatagttgactgagtttctttagggca

SEQ ID NO: 132844 - DNA, 122 bp, Homo sapiens
agataataaagaagggtttcagtccgtgggatttaaaaaatccacccaagagcctggtgacgctctgacccacagtctgtgaagcagccagctggaaactgcatacagcaaccctaatggtc

SEQ ID NO: 132845 - DNA, 122 bp, Homo sapiens
aacttcaggaagcgtcttccttttttccgcctctcgttcgcttttgtcttacgaggcttccggaacacggcccagaattacagagaaaacacactgcgcacgcgcactctctcgtcaccgct

SEQ ID NO: 132846 - DNA, 122 bp, Homo sapiens
gagcttggggacacagcgccccgcttgctgcgtccagccccgaatccagggacggggcagcggcccgggcaaggctccggccccccgtagcactcctagggctcctggacgggggcagggca

SEQ ID NO: 132847 - DNA, 122 bp, Homo sapiens
ccttcttccggagcctcctcccccgggctggctaggggtgagcgcaggggttagtcagtacgcacgtgacgcgcgatgcccacatgacacgaccgtgagcgggggagggggacacggagtga

SEQ ID NO: 132848 - DNA, 122 bp, Homo sapiens
ccggcttccggggcgggtggaaaggagccacaagcgccgcggtcgtcgcagccccgccggcgctcagaccacaattgtgggagccgccatcttgagaccgtcccgcttccccgcccagcgcc

SEQ ID NO: 132849 - DNA, 122 bp, Homo sapiens
ctcccccagtctctaccatttcatgctcatatgagtctgcttcccgctcatcactgttcgcgcagattaatcagggggagagcattacacatggtgagtgagcacttggacacgaacagtag

SEQ ID NO: 132850 - DNA, 122 bp, Homo sapiens
gaggatattagaaggtgaaggtatcccggtacgcaaaataggaattgcttagaggcgccccggggtgcctttccttacctcggtggacacacaccttcctcacagtcaccttcctcccacgc

SEQ ID NO: 132851 - DNA, 122 bp, Homo sapiens
gggcagtcagaatgtggaaagtgaatcatgatctgtgcgggcaagggaagtgccacgaaacggagcaccagggtgtgcgtgctctcatgtgtcccgtgaatcagtgcgcccctgccccctgc

SEQ ID NO: 132852 - DNA, 122 bp, Homo sapiens
gatgtgtaacaagataaaacctgggaagtggtggactctgattgattttctgatttgccccgctgcatggcacagtcaacaattagattggttgtttcaaagccttttatttcaccattacg

SEQ ID NO: 132853 - DNA, 122 bp, Homo sapiens
ggcgagggtgccaaggagcgtgaggcactgcaggccgccgtgaagaaggcagagagcgagcgcatcagcctgaagtttaccaatgaggacaaggagcagaagctggcactcctagagggcaa

SEQ ID NO: 132854 - DNA, 122 bp, Homo sapiens
gggcctagactgggggtcctggactcagcccttgcctttggtcccctaggccctcatgaacggctccgagagcaggttcttcgtgagttcctcgcagggccggtcagagctacacattgaga

SEQ ID NO: 132855 - DNA, 122 bp, Homo sapiens
ataagtctaaaggcgctggctatccccttagggcccagctgtctgggcagggcgaggctgcgctggcgatcaaaccctcgaacggtcaggcgacggcgtggacacccaagacggggccccag

SEQ ID NO: 132856 - DNA, 122 bp, Homo sapiens
acaaagaattcagcaggaaaacaaacccttgttaattagtgtaaacaaaagataagaaagcgcagcgcccttgatctatttagcatgtggataaagagctaacaaacttcagcagatcctga

SEQ ID NO: 132857 - DNA, 122 bp, Homo sapiens
ctgtattaggactatgtcaacagttgcccagttagaaattaaatgatgcgtagaacaacacgtctagactttagatttttacttgggcaacacacacaaatactgtgattaagtatgcatgc

SEQ ID NO: 132858 - DNA, 122 bp, Homo sapiens
gaaacagaacgaactgttccctgggtgggcgagccactgcagagtacaaagctttcaggccgcctgcctcattagcactaatggctgctcccttccgccctgtgtcgtcaggactgtctatg

SEQ ID NO: 132859 - DNA, 122 bp, Homo sapiens
ctggggctctgaacatacattcttagaccataaagtcattcgcagggtgcacaacagttacggatgtcaggtgcctctgccatacagagggagccctcatgtcctaggaagctggcctggac

SEQ ID NO: 132860 - DNA, 122 bp, Homo sapiens
tgccgcgggggagaggaacccctcgccccagccgggctccaccctagctcacccatcccgcggcctacactgaggctctcaatttgggtggcacttatggggcatgtgtcccctctctcctt

SEQ ID NO: 132861 - DNA, 122 bp, Homo sapiens
cccccggtgccctgtcagtaggtccaggaggcggggccgagacgggttgctgtgccttctcgcggagcccagccactggcctggcagtcggcccctagggtggagctgggaagagcgagtcc

SEQ ID NO: 132862 - DNA, 122 bp, Homo sapiens
gaagtgctgggaagtgaagggtgtgtccctttaaatgatagggaagggggcagggacatgcgtatgtgtgcccaaggacctaggtgaggacaggcataattttgttttcctgcccaaatatt

SEQ ID NO: 132863 - DNA, 122 bp, Homo sapiens
tcccgggcccagctgtgcactgccagctgggcggcggggcgggtgcagggggagggggcacgtccagacatgcagacgcacgagacagacacagacacagtacatacacgcaaacacacaga

SEQ ID NO: 132864 - DNA, 122 bp, Homo sapiens
tctcgtagtagatcaccagccaggagaagtggcaggtcacgctctagaaccccagctagacgtggccgctcacgctccagaaccccagccagacgtggccgctcacgctctagaaccccagc

SEQ ID NO: 132865 - DNA, 122 bp, Homo sapiens
gatgatcttattatggaaagctattaataagctccaaatcagagacctgctctggaaccacggagcagggagcaagggagaaactgctatcttttcttcaaacgctcggacctagcacaagt

SEQ ID NO: 132866 - DNA, 122 bp, Homo sapiens
cgagggctctaactgacgtctcaggggcagcctctcagcctgagaccctgctggggaagccgcgtcctgtgcactagctgcgcctagggctgaggtgagggcgcaggctccccagggtgtgt

SEQ ID NO: 132867 - DNA, 122 bp, Homo sapiens
acacatggggcgtaaggaaccgtgcctggacacacacagcacacatggggcgtaaggaaccgcgcctgcacaccactcacgcacacacacaacataaccaagtggcagccagagaggccagg

SEQ ID NO: 132868 - DNA, 122 bp, Homo sapiens
cgggttaatgagctgacaccatgattaaagctgaccatttgtaatgtgtctcgaccctgccgctgagccctgaagaggttaatgcggtgacggaggccggcacctgcccctcgctggcctcc

SEQ ID NO: 132869 - DNA, 122 bp, Homo sapiens
tttgggctgctcaaaatgaatttcctggataattttcctaagccctcactgactcctactcgcatgtattgctaggagccagctttcactcctgggactggtttgggcttccagaaagcatg

SEQ ID NO: 132870 - DNA, 122 bp, Homo sapiens
tgctgggggagcaaatctcttaccacttcaggtgccctaggctctggcactgctctgtcacgttccgtctggttcccatccttccatccgtttctaggcaggtccgtccccactgggctgta

SEQ ID NO: 132871 - DNA, 122 bp, Homo sapiens
tagagatggaggcacatctgagcacactgagaatcttcctgatacttctactgcactgatcgtgttcaaaagacagattcaaatgccatagcattgatgtttcttcatgttattccactagc

SEQ ID NO: 132872 - DNA, 122 bp, Homo sapiens
cccttctggaaccccccaactagatttcctcatccagaggaatgcaagagccaccaacaccgcctagtttggaggaaattcgttgtttctgccgccaatagtctgtggacgggcagaacaag

SEQ ID NO: 132873 - DNA, 122 bp, Homo sapiens
cagggtctcagaggtagaacaactttcctggtccatatccagactcctgactcctgatggcgtgtgcagctcctacattaactctttcatgggactcaaactcagatgtttaggctgatagt

SEQ ID NO: 132874 - DNA, 122 bp, Homo sapiens
tcccagaacagacaaaactcatctacgatcagggaagccgggacctgggttgggaggaggcgcttgggggcgcctctgatcgcgtgatatgggtgccctgcatctggccgtgttcactcggg

SEQ ID NO: 132875 - DNA, 122 bp, Homo sapiens
cataagagccaataatacactcagatctcataatctagagtgctgggccatcagctaatccgccctgccccacctgaacagtcatcaccaactgagcaggaatggagggatgcccagaagtc

SEQ ID NO: 132876 - DNA, 122 bp, Homo sapiens
aatttaggtgaagggaacaaggcctgccatcttcgggtactgtgggcaggggctgccaggcgtgatttgcacaccaagaaagaatgcttctgctaaagctccttcatgaatagtcaagagac

SEQ ID NO: 132877 - DNA, 122 bp, Homo sapiens
atcagaacgtgtgggtgaggcggcagccgagagcttcccaggggagggtcctgtggaccccgcgggggtgcagccggggtgagccaggcccagaaggcaggatggcgctgggcgtgttgtgt

SEQ ID NO: 132878 - DNA, 122 bp, Homo sapiens
aaagctcagatgggccacatgaaggcatattagttctgcaggccgtgctgagctacagcacggcctgcacagacataatgctgcctgccaaagagcaccctctcctaaagacttccccaggg

SEQ ID NO: 132879 - DNA, 122 bp, Homo sapiens
cagtggccagaagtccggtgactggcccgctgagcgtgcggcgccggttcaccacctccccgccaggcccgatggcctctttgtgtttcactgaggccagcacggtggccacccggcccggc

SEQ ID NO: 132880 - DNA, 122 bp, Homo sapiens
aacatacttttaaaatgctgttctcagacatacggctgacatttggggccagtctgtggacgccctccaccggcgttctgcagctggggctccaggtcaactcagccttcaggatgctctgg

SEQ ID NO: 132881 - DNA, 122 bp, Homo sapiens
gtaatgtatgatttttattaaatattgtcaaccaactattcttgcctgaattttaaaaagcgctagtggcatcagtggtcccttgagaaggctcccagaccaccagtgttgttcccagagca

SEQ ID NO: 132882 - DNA, 122 bp, Homo sapiens
cctgcggaaggtggcatttcccaagaccggagcttcccgacatcccgccacctcccgcagcgctggtgccagtcctgtcggataaggggcaagtgtaagaccggcctcatcagctccagcaa

SEQ ID NO: 132883 - DNA, 122 bp, Homo sapiens
agccaagggaggcgccaggcccgcgggccgggcgcatggcttagggacgctcccggccgccgcagccccagcatggggaaacttcactccaagccgggtcagtgcccccgcccgcgcgctcg

SEQ ID NO: 132884 - DNA, 122 bp, Homo sapiens
ccgcctcccgggctcacgccattctcctgcctcagcctccggagtagctggtactacaggcgcccgccaccccacccgaagaattttttgtattcttagcggagacggggtttcaccgtgtt

SEQ ID NO: 132885 - DNA, 122 bp, Homo sapiens
cgtgatccgcctgcctcagtctcccaaagtgatgggattacaggcgtgagccaccgcacccggccacatattgtctatggctgttttctcactacagtgagaattaagcagtaatcacagaa

SEQ ID NO: 132886 - DNA, 122 bp, Homo sapiens
ctgactgacgtggaacttccgggagccgattctcgcgatagtcagaggccagggccggagcgcctgcgcaaactgcgcgcagggccgtcgtttcccaagccccgccccagtttcctaggcaa

SEQ ID NO: 132887 - DNA, 122 bp, Homo sapiens
ggtagcgggcgggaggagcttgagaggtgggtcgggcggcgtggggaaggccgcgccaggcggaagaagggctcggggggaggggaagagttgtgggatgagggctcgcggaagataaaagt

SEQ ID NO: 132888 - DNA, 122 bp, Homo sapiens
gcgagacaaagcccgaggcttctccgcgcgcccccttccccgccccgggtccctacctgacggccaccttgacgcagcagtccccctggccggccatggccctctggagctagggtctgggc

SEQ ID NO: 132889 - DNA, 122 bp, Homo sapiens
caaggacggtaagggagatgagacaacgtggcctgatggaggtcggaagtcctgactcctcggcagtgctttatgtttctttgggaggttgagagctggaatgtgaactgggctgtcactta

SEQ ID NO: 132890 - DNA, 122 bp, Homo sapiens
attaaagagtcttcagagcgatgacagccagagtgtgcgagcacggaagggcgaggtatccgttcctggatcctcccctaaggcacctgactcggcctgcctaggtcagcacagccccctca

SEQ ID NO: 132891 - DNA, 122 bp, Homo sapiens
cgcgggcggaggcaggcgggcgggcgccggggaagcctccttctgggcagcgagtgagggcgggcgcgcagggagggagggcggcagcgagcctgcgacgggagaggcgtggggaggagagc

SEQ ID NO: 132892 - DNA, 122 bp, Homo sapiens
tcttattctggttttttattctttttttagcttcctgaaatgactcatgttcaaacacaacgaccctggatgatgtttctcctgcaaaactttggattgatcctaggttggctttctctcct

SEQ ID NO: 132893 - DNA, 122 bp, Homo sapiens
cgcacgcccacctctccgctacaggtgctgattggagagtgcgttccgaactcgcagcgtcggttggctagtcccattgcctatcacgaagggggcggagagtcgggcagaaaccgtctccg

SEQ ID NO: 132894 - DNA, 122 bp, Homo sapiens
ccccacatcaaggatccccgcactcgtccgccgtttcctggcggtgtctgccccgcccagcgctgccttcctggacccgcagcatcagccccgtcccacggttgcagctcgggcggtcccag

SEQ ID NO: 132895 - DNA, 122 bp, Homo sapiens
gccgggagagccggctacgcggcgcccgcccgcccgcggggcagcgcagcagcgcagcgccggtgttcccttcggaacaccgcgcaaagtgatcgagtgcttttcctccactttccctcact

SEQ ID NO: 132896 - DNA, 122 bp, Homo sapiens
cttcccccgtgggctcctgtgcagcccgagcctccccgtcgagcgccggcctctgctccacggcgcccagtcccatccgccacccaacgactaaggagtgcgggcccacagctcgggactag

SEQ ID NO: 132897 - DNA, 122 bp, Homo sapiens
cctcccgtgcccctttgttgtgccacactcttgtcgttagcccagtgacctgccacagcccgggcaccagatttctgccttaattgttcttccattgtctttctcctgtgggtcccctctca

SEQ ID NO: 132898 - DNA, 122 bp, Homo sapiens
cctttccattaatttgcatgactaagatgccctcccaatcaaatgaagccccttgtcctccgatgcccgctgtggctgcctttgctgaaagcccttgcctgcgctgtgaccttgtttaactc

SEQ ID NO: 132899 - DNA, 122 bp, Homo sapiens
ccagcctctacccctttgttgcaagaaagaataaatctgataagaggtacaggagaatcccgagacctgggatgcgcagggcagatatgcccacctacaccgctgtctggggacctaaaaac

SEQ ID NO: 132900 - DNA, 122 bp, Homo sapiens
aggcgcatgtacccacagggtgcagagatgaacccctgtctgagaaggtgcatgtacccacggggtgcagagatgaacccgtctgagaaggcacatgtacccacggggtgcagagatgaacc

SEQ ID NO: 132901 - DNA, 122 bp, Homo sapiens
tagcccttcccagggcctgccaatgtccaataactggatgatgggatataagactcccaccgacttgcctgaattggagaccactattaagaaccatcccaaattcagacctccctatgtga

SEQ ID NO: 132902 - DNA, 122 bp, Homo sapiens
ttccccttttttcctcccagctctgccctgacgtcaggcctcaggtgcagagctgcactgcgtggtagcacaagccctgagttaacaagagaaataccggctttctggccagaggaatgaag

SEQ ID NO: 132903 - DNA, 122 bp, Homo sapiens
gggaaggtgtggggtatactgactgcgggggtcccatcacttctcctagaacgggttctccgcgcgctgtgcagagaacaatactgtcctctagcgctcagagatcagaactggaaatcaag

SEQ ID NO: 132904 - DNA, 122 bp, Homo sapiens
tcaaagggctcttgcaaattggtaagaaaatgcacacatgtgcgtgcaccaggataaaaacgagaacaggaaaggagcccagagcacacccacacggtcagtaaacaccggtgacgtcccgc

SEQ ID NO: 132905 - DNA, 122 bp, Homo sapiens
atagctgccaggcaggtaggctgtcgagtagctggggggtctgtacccaaagcctctgctcggttgggtggtcgcgtaccccggcccccagagcgggccgccgctggccaggttgcctcttc

SEQ ID NO: 132906 - DNA, 122 bp, Homo sapiens
cagtgccccttcggcaacaatgacaaggtaggctttctgctggtcagcctgcagttggcacgtggccacggaggtcaccgttgggcaggtcatagcttgaggctgtgacgacgggggtggga

SEQ ID NO: 132907 - DNA, 122 bp, Homo sapiens
catgatacctgcttctccacagggttgctgggaagatcaatgacataatgccctgggaagcgcctggtgagccactgagctccatgtaacaccacgggacaccatccacacggtgcaggccc

SEQ ID NO: 132908 - DNA, 122 bp, Homo sapiens
cgccttttcccggggcggatttggtgaagtcggcctcaagtccaggaggtctgtcttcgccgggccagctctcgcggaactggggggtagagagcaaagggagagattcgtggaagggaagg

SEQ ID NO: 132909 - DNA, 122 bp, Homo sapiens
cttcttacactctctttcataggaagtcaatttacaggcttccaccaagcccttaagagacgtttttgtactatccatgacaagttcttgatgttatgtctgcacttctgacaaattcttag

SEQ ID NO: 132910 - DNA, 122 bp, Homo sapiens
caactcataacttagaaactgatgttattcatagattccacacattgtatagaagaacatcgtgaaactccttgccctgttctgtttctttctgaataccagtgcatgaaacccctgttacg

SEQ ID NO: 132911 - DNA, 122 bp, Homo sapiens
gctggggtgggcttggccatgaagtgactgaagggaggcaccagggcagctcagccagggcgtgggccatcatccagttcctggtagatattgtggaatggtttgttttgtttgagagagag

SEQ ID NO: 132912 - DNA, 122 bp, Homo sapiens
tttgattgatgttgtcgattaaatgaagagttaattcaccctactaatatttatggaccgcgggcctgcgcggcgtggagcctgggcattctcgggggagcgagagaggcacagtcccgccc

SEQ ID NO: 132913 - DNA, 122 bp, Homo sapiens
catgagtcggcgagtgagggtgaaactcaggccaaagtctccagagccgctcggagaaaacgctgcctggaacagaagagcagaggatcagaggcaccaccagagactctcagagtgggtta

SEQ ID NO: 132914 - DNA, 122 bp, Homo sapiens
tgtaaagctcgttcctttgcaaagcattttctctttgttcttgtcgttttgttctcatttcgtcctccatgacgccctcatgagttagagcaggcttattctctacatctctcagattgtga

SEQ ID NO: 132915 - DNA, 122 bp, Homo sapiens
attactgtcccctgcttttcccttggctgactgcttgtcacccttcaggtgtcagctcagcgattccctccatggagcggctccattggctactgggtctaggttggttggctctgtcattc

SEQ ID NO: 132916 - DNA, 122 bp, Homo sapiens
ggtttcaaaccgggctgcttttattcatttccagcgcagttctgcggccttttcaggggccgagcccctcgcgcccagcaaccgggcatctgcgttggggaccctccccgggcgctctgtcc

SEQ ID NO: 132917 - DNA, 122 bp, Homo sapiens
aaaggacttctgacttgatgaatgtggacgcgctgagctttgtggtcatttataggagcgcggaaaggcagcatgccagggaatgctctgaagtgcggctttttaaaatcaccctctgaaca

SEQ ID NO: 132918 - DNA, 122 bp, Homo sapiens
cctgtattttagtttcgaaatctggcatccaggccctttgtaggagcattcaaccaatggcgttgtctccacaaacatttaagcctcttactagaaggaacattaacaagggtcgatttcag

SEQ ID NO: 132919 - DNA, 122 bp, Homo sapiens
gctgcgcggcagcgatggaccctgtgcatgggctctcctagcagcctcgggaaccgcggccgcaagctgtggtttgacccctgccccaaccactcgcgaggccttttctgttcagagccccc

SEQ ID NO: 132920 - DNA, 122 bp, Homo sapiens
ccggtacggcgacatccgcacctaccaccccccggcccagctcacacacactcagtttcccgccgcttcctctgttggcctgccttcccggaccaagacagctgctcaggtgagccagccag

SEQ ID NO: 132921 - DNA, 122 bp, Homo sapiens
taaagcataacagtcttaggataccttttcaggtacaaaatcagtgactctcaacctgggcgtattcaaaggactcccttgtggagtgtttgaataatgcaggctccagctactgcctacag

SEQ ID NO: 132922 - DNA, 122 bp, Homo sapiens
actctccagctaccaagacctttgcctcggggctgtgcccccggctgcctggctggggatcgacaggcactagtgccggggcagaacctcccctaactgcactcagatgccaccctggtctg

SEQ ID NO: 132923 - DNA, 122 bp, Homo sapiens
ctcaatctctaagagctatcaagcaataaaacttctcccagggtgagcaggaaacaccaacgtggctcaccttattctctcatctttaaagccagcatccaaaacaacagcttaaaaggaca

SEQ ID NO: 132924 - DNA, 122 bp, Homo sapiens
tttcttccttctggtgggttcgtggtctcgctggctcacgagtgaagctgcagacctttgcggtgagtgttacagctcttaaggcagcgcgtctggagttgttcgttcctcccagtgggctc

SEQ ID NO: 132925 - DNA, 122 bp, Homo sapiens
atctctagactcagatgagagtgaggatgaagaagatgactaccagcaaaaccgcaaaggcgttgaagggctcttcaacatcgagaaccccaaccaggtggcacagacaaccaaaaaggtca

SEQ ID NO: 132926 - DNA, 122 bp, Homo sapiens
tatttggaactggttaaatgttaccctgacctcagctaacatttgtgtttcacttttctccgggacccaggggacgtggatgccagatgagtccacctcctctccctgctcttcccgcaggg

SEQ ID NO: 132927 - DNA, 122 bp, Homo sapiens
cgccgcagctctgccaagctctccccgcactctccgccacccagcgcggagaaggccaggcgtgcctcaggacccccacagccacctccatgatccttcatgtcgtccatctcagcccgcag

SEQ ID NO: 132928 - DNA, 122 bp, Homo sapiens
acccgcgtccctgccggggctggaggtgctgtggagcccacgggcgctgctgctgtggctcgcctggctcggcctgcaggcggcgctctacctactgccggcgcgcaaggtgcgggccccgc

SEQ ID NO: 132929 - DNA, 122 bp, Homo sapiens
catgtttaatgaatgcctaaacttggaaaagagaaaaaaacctaccacccaaaagaaaaacgggcaaaggttatgaaacaaaaggagacatataattagtctttaaatgcatggaaaggtgt

SEQ ID NO: 132930 - DNA, 122 bp, Homo sapiens
ctcaggcttttctccatcttttaagcagcctctgtaactcccttttgtccataggtgttgcgtgcctctcatctgtggggaagtattatttaataaaatttatgttacaggataactttatt

SEQ ID NO: 132931 - DNA, 122 bp, Homo sapiens
ttggaaaagttaatgtaaaaacagcaccaccctggagcactaaatctggttttatttacccgggccatctggtacttccctttggtaaagtaaggaatttatacacattgaaaaccaagctt

SEQ ID NO: 132932 - DNA, 122 bp, Homo sapiens
catttaatttacactgattaacagtcatatgctaagtaaacaccagctgaatattaaacccgcaccattgagaagcgtggaacgcaaagtaatatagaaaacgcagtaaatacacagtttct

SEQ ID NO: 132933 - DNA, 122 bp, Homo sapiens
cctctcccgcgcgatctgccgtgtggcgtgtgcttaattagtccctgattactcatttgccgggtgctgtgtgtattccatatctaataactttccaattacacccggtcgccagcgcacat

SEQ ID NO: 132934 - DNA, 122 bp, Homo sapiens
tcccacccaccacctcccaccaagacgcatctccagctcctgagtcgacctgcagtacagcgttattagtctttttatttgcttattgcatcttgggagcgcgtgggtgggtgaagggagcg

SEQ ID NO: 132935 - DNA, 122 bp, Homo sapiens
gcttgctgtccggcgggcggggccggggatcctgtccgtcgaggggacaccggattgctgcggagagaggactagacccagagtccagccaagaccagaactgagaccaggcgaccagcaga

SEQ ID NO: 132936 - DNA, 122 bp, Homo sapiens
ttccagcatggcatttcaaacatggattcttcggctgttcccaacccatgcggcagcaggcgcctgcatcgccctgacctttatttttactggatcttttcctttttctgttgatggtcact

SEQ ID NO: 132937 - DNA, 122 bp, Homo sapiens
ttgatccctcaagatgccacgctcactcctaacatttggtctttgcatttgctattccttcgtcttggaaggctcttccaccaggctccctccttcgctttcttcaggtctttgcttaaaag

SEQ ID NO: 132938 - DNA, 122 bp, Homo sapiens
aggttataaattaaattttagccagcatctgggtcgaaggagtcaggaataacatttcctcgatccaggaaggctggtttaaaaatttgcaaatgccatgtcaaagtaggttgttttgaaga

SEQ ID NO: 132939 - DNA, 122 bp, Homo sapiens
cgcctgcggaaggcagtgtgggctgcagtgatccaatggtctggctcagtgcccatcccccggagaccccatagtggccttcccacccagttagcccagtggtgaggagcggaaaaccgaga

SEQ ID NO: 132940 - DNA, 122 bp, Homo sapiens
gaggagaggcaaatttaagaaagagacactaagttcagtcttgtacatgttgatttttaccgctcagggaccatcaggatggaggtgtttgtatacatgaatctgaaactcagaagacagag

SEQ ID NO: 132941 - DNA, 122 bp, Homo sapiens
ccctgcccaccactatttcccaagggagcgcttccatagcagagtccaggcggggacacccgattgggtagagcgctggaaaaacaatttcagcctgcggttcaaaaggctgaactcatgac

SEQ ID NO: 132942 - DNA, 122 bp, Homo sapiens
tgagaggtgcgctggcctcagggagctctcacctgttgcggttgaactggatggcaaagtcggtcatgacctgcaaggccttgttggtcagctgcaggtccatggagatggagcccacctgg

SEQ ID NO: 132943 - DNA, 122 bp, Homo sapiens
gtgctgaaccctgggggaccacagtgaacaagctagataccacccttcctgcgaagagctcgaggccagtgggggtccctaaggagagccgggaacatcaaacctgcggattgggagtaaat

SEQ ID NO: 132944 - DNA, 122 bp, Homo sapiens
gacgcgctgttcccggagcggatcacggtgctggaccagcacctgaggcccccagcccgccgacccggaaccacaacgccggcccggtgacagctcaaacccaccctctggcccttttctcc

SEQ ID NO: 132945 - DNA, 122 bp, Homo sapiens
tttatgcaaacatggtgtctccctagtcttgggtgaggtctttgacatcactcactgcagcgattcatctcccctactctgcactgtcagactctaaagaagggtgcaacaaatacttgtcc

SEQ ID NO: 132946 - DNA, 122 bp, Homo sapiens
gtccagcccagctggccatgcatttctggctctcatgctcttggacttactgtctgacgccgaagtccatgctgtttcttctagccactgctccttacaccttactaaagaaatattttaca

SEQ ID NO: 132947 - DNA, 122 bp, Homo sapiens
aggaagaaacagacttcacacttgtgagtcagaggtgtttgctttggagggttgcattttcgctttctatgctgggtgaagtgagggtgttgtctttctgtgtccccttcctcctatctccc

SEQ ID NO: 132948 - DNA, 122 bp, Homo sapiens
tgataccaatcttaaggagaaggtcttcagaagagtccctcaaagagcaccgcccctcaacgtcatcaaaccccgcctccaaaggcggaggctgcgcatgcgcggcaggacctcgggcgggg

SEQ ID NO: 132949 - DNA, 122 bp, Homo sapiens
ggaattggggagttaactgctcacaaggggcacataacatccgaggatcccatttgcggccgggggaatggcagagatcgccccccaggtctgcccggcgctcagggaattggtggcagcgt

SEQ ID NO: 132950 - DNA, 122 bp, Homo sapiens
tcgggccccctgcccttgtcccctgggctgggggcgcgggcaaagcgggggcctggcgggcgctgagaggacctgaagccggcgcgggcggcggaggcggtaggcgcgcccctccaccgcgc

SEQ ID NO: 132951 - DNA, 122 bp, Homo sapiens
tctaggaagaggtaggaaaggatcggcgcatcatttctccaatgggaaaggatgtgtttgcggaccaataagtcgccagtataacacccgcccacgcgcctgccaagccaatcggctaggag

SEQ ID NO: 132952 - DNA, 122 bp, Homo sapiens
aaaaagagattgtgcatttaataatatctataccccaaattatcgaatattcgcgttttccggagtgggcagaagtggcgtgtagtgtgtcacttgttgaataaacacacgtccaggggtct

SEQ ID NO: 132953 - DNA, 122 bp, Homo sapiens
catgtttcagaatgactttgagaaaccccaaatcccaaaattgttttaatctttaaatgacgttgagatttttatatcgaaagtattaaataattgtatgtagcctcttgttggtagatatt

SEQ ID NO: 132954 - DNA, 122 bp, Homo sapiens
ggagcagcgagccgagctccaggtgcaagccccccggcctccgcgccaccgggggagctgcgatccagtagaacggggtccccggtgctgaaggagcatccctgggcccagcgggaggctgt

SEQ ID NO: 132955 - DNA, 122 bp, Homo sapiens
ccgcacccggcctgcaataattttctaattcggccctaagcagaaaatagaagatgtcttcggttgctgttttatttaggaaaatatgcagacagatcattttgctgagctagtctgtattg

SEQ ID NO: 132956 - DNA, 122 bp, Homo sapiens
tgactgcctccattcagggcaagctgggttttgtggtaattgcctttgatgtctgttcttcggtctttctcccttgcctaacccctgtcgctgtcaattaccctgggaggctgcccacaaca

SEQ ID NO: 132957 - DNA, 122 bp, Homo sapiens
cagagaggacggtgagggcggcggcggcggccccgcggggcccggctccgcctcagcccccgacgcctgctccccagctgcggcaggcccgagtgaggccatcctccagctgcgcggttgcc

SEQ ID NO: 132958 - DNA, 122 bp, Homo sapiens
aagccaccggcagtgcggaccgcatgatcaaaagccgccgcggcgcctaactcaggctgccggccccccagcagccagagggcggaaacttgcagcttagccccatctcccagcgcctgcac

SEQ ID NO: 132959 - DNA, 122 bp, Homo sapiens
cagccttgatctcccgggctcaagtgatactcacaccttagactcctgagtagctgggaccgctggcgtgtgccaccatgcccagctaatttttaatttttttttttttgtagagacagggt

SEQ ID NO: 132960 - DNA, 122 bp, Homo sapiens
gggtctgtccagtagagaccggaacgccgcgcaggctcagcaaagggctaaggctggagccggggaagctgcctctaggttagcgaagggtaaaggaagtcagacactgacgcgagtggcct

SEQ ID NO: 132961 - DNA, 122 bp, Homo sapiens
aaggccctgctccaccccttgtatgccccaacccgtctgctttcccttgcttggatgagacggttttccagggtttcgtgtccatggagtcgggcagcatgcactggctgtgtgtctgttct

SEQ ID NO: 132962 - DNA, 122 bp, Homo sapiens
tccataaaagggttctaaggtaaagcagttgcatgaactacaacccccatcagacctcagcgtaaaagctcatatggttgcacacaatgcagctgcactgttttctgggattcgcacttttt

SEQ ID NO: 132963 - DNA, 122 bp, Homo sapiens
ggaatgtgagcaaaggggagtggctgtaaatacagacgaagcttccctctctccctcactcgacaccactcacctcctgctgtgtggctccttacggctccatggctcagggttggggaccc

SEQ ID NO: 132964 - DNA, 122 bp, Homo sapiens
gttaaacatttggatgggagcagtcagatggttgagttgtttagctttctgtagacaaaacggggtaagccaatagaaagtgccaagggtgatgcttttgtgtctcctccagtgataaaaat

SEQ ID NO: 132965 - DNA, 122 bp, Homo sapiens
acacagtctgtactataaattttgttttccagaatgaaattttactatctttacttactgcgaatatatgcccgggaccatacccccaagaaaataaaaattttagaggctgggcatggtgg

SEQ ID NO: 132966 - DNA, 122 bp, Homo sapiens
gtgggcgcggggtgcgcgacagggtctgtgtcctgcgctgcgtgagccgcggtgggtgtccgcgaaacgctgtgtgtggagtgcgtgcgtgtgtccgccctcgccaggctgttggtctacac

SEQ ID NO: 132967 - DNA, 122 bp, Homo sapiens
agcatttagcagagtgctgggcatacggaagacagcaggatcccgtggctttgcctgaaacgcggaacctggtcttgacttttgagtgactgagccctcctggtgcccgcactctggccggg

SEQ ID NO: 132968 - DNA, 122 bp, Homo sapiens
gtccagatgtcatctgggatcatcacctgggacatggccctactgggccctacttgtaggcgaggaggaaggtgtgcatgtgtgggtaggaacgagacagtgcaaaaagccgctgcctggtg

SEQ ID NO: 132969 - DNA, 122 bp, Homo sapiens
aggtgaaactgttcagaatgccaatgatggggacagagcgttaagcccaggacatggctgcgtgcccacaaagccagctctggatggaaaagtaacgagtggagggcgttttcttcccagac

SEQ ID NO: 132970 - DNA, 122 bp, Homo sapiens
tcccttcttcaaatcctcccacccttcaatgtctccttgtgactccttcttatgggaggtcgacccagactgccactgcccctgtcactgcacccagcttggcatttaccatccatcctgct

SEQ ID NO: 132971 - DNA, 122 bp, Homo sapiens
tttagggccaacttgcactgacttttccttataacacataagcaataaaccctattattgcgtactctcgcgtgattagggaacgttgttaagaggctcaaaaatcggacgtcatagctcaa

SEQ ID NO: 132972 - DNA, 122 bp, Homo sapiens
ccagcactgcccgagccggcgagggcctctgtgcaccagctccattgccaggcaggcctgcgcagatctataaattgatggaattcaaagcctccagcatcgattaccgttataacaaacag

SEQ ID NO: 132973 - DNA, 122 bp, Homo sapiens
aagcctcaatttctctcctttgtagataagactaatatcatttgtcttattttacgacaccgcagtaatttatcaggcatgcaaactttcaaaggttaaaattgatgtacaaatgaaagctg

SEQ ID NO: 132974 - DNA, 122 bp, Homo sapiens
ggtcttccaccgccagcctggcagccagcatcaagggtgtggtcccgtcctctgtgcgagcgtccactgcagtttgtctgctacggagcagaagctggggagacagagggccagtgacccct

SEQ ID NO: 132975 - DNA, 122 bp, Homo sapiens
tatgaggccttgaaacactgtaaagacaaatgcgtagcttaaggaacaatcatctttagccgagggaaaaaaaagatatttagaaatgttgctaactcatgtaattgccacattcaattcaa

SEQ ID NO: 132976 - DNA, 122 bp, Homo sapiens
ggcaccctctccgtctggaatactgggctggtctgggatcctccggtgtctgggaaagggcgggagactgcggggcagggaggccggcgcccccgttgcagcggcttccagctccggatgtc

SEQ ID NO: 132977 - DNA, 122 bp, Homo sapiens
actcttcactgctggtcaatcagagcccgtgctctccctagtgccggccaatgggaggtgcgctcgggctgcttccggctccgcgctccgctcgccccctcccaaggtctccccgcgactgg

SEQ ID NO: 132978 - DNA, 122 bp, Homo sapiens
tgcctcgggtcctgtgccgagagcttccccggcggtgccagaggtgcagccactgcgtcccgcagctgtgcgcagcccctgcctccgctcacccacgttcgtctgcaccatctacgcccgtg

SEQ ID NO: 132979 - DNA, 122 bp, Homo sapiens
gccaggcaggctgggaactggggggccactggggcctctgctggaaccacctggtgagcccgtaaggggaggcccccaccccagggtctccagcacctgcctggctccccatagatactcaa

SEQ ID NO: 132980 - DNA, 122 bp, Homo sapiens
cacacgttgtgcttttctcagttcaagcggcctcttccttttgagtaaccagggtaaccacgctgtgcccgcgtgtgccgggcggggaggggaggccgcagccccagccccgggggcctggt

SEQ ID NO: 132981 - DNA, 122 bp, Homo sapiens
tggctggcgggcactcttgtcagcagcgctgcctcggtgggtgcgggatgatggatgggccgctgcggaggagaggagggcgcggccgggctgggaattggctaagtactcccgggcgcctg

SEQ ID NO: 132982 - DNA, 122 bp, Homo sapiens
ggtgctggaagccaagtttgaaccagttcaaaactcgggggtggtaacggttttaaccgccgcgctcgtttccccgcgcgcggagccgaggcccgggctggccgctcctagtggtgcccggg

SEQ ID NO: 132983 - DNA, 122 bp, Homo sapiens
ggttggctttacagcggggccaagaagactacctgggggtaccgccacctcggacaaatccgttggctctgtccaaggtgctgaatggactcctatcgcccggattacacacccggcacagc

SEQ ID NO: 132984 - DNA, 122 bp, Homo sapiens
atttgtcacaacaatgggagaaggaccaaaaaatgataaacccccgtcccttaataagctcgtattgtaattgtagaaatgacattaatgtacactgaactatgaataaaaaatagaaaatg

SEQ ID NO: 132985 - DNA, 122 bp, Homo sapiens
acagttctaaaatattagcttaggaagttttatagcatcctacaaacagcatgggtttggcgtcagacctggatccgattcctccacttacgagatatgcaactttgaacaaacactttaat

SEQ ID NO: 132986 - DNA, 122 bp, Homo sapiens
cccagcgtcgtacacaagcacatccttcctcctccacacccacctctctcgagaccctgccgtctaccccctgacgcttcaggactctatggaggaagactttgatctcattattggaacaa

SEQ ID NO: 132987 - DNA, 122 bp, Homo sapiens
gcactgctcctgaggtgggctctgtgtgtgcagaggtgaccttgctttgcctcaggtttgcgcctccaagttttacacaccctccttgtttgctgggtcgttttccactgtaaagggtcggg

SEQ ID NO: 132988 - DNA, 122 bp, Homo sapiens
cagcctggaatgcagtggcacaatgatagctcatggtatccttgactccctgcgctcaaacgatcctcctgactcagcttcctgattagctgaggctacgggcatgtgccacaaggcccacc

SEQ ID NO: 132989 - DNA, 122 bp, Homo sapiens
gctgtgctcctaggctcttctcttgatagtattaccgaatctatcaggtaaaccgctggccgagtaggatgtctgcaggaatttctggagttagcaagtaacttcatctggcaaagagagta

SEQ ID NO: 132990 - DNA, 122 bp, Homo sapiens
gcgcatgtactccatgcagccctcctcctccatgcagtagcggatgtagggcttgaagagcgagccgaactggcccggggcagaacaaccacggcgccggttaccgcgcgctccctgcgggc

SEQ ID NO: 132991 - DNA, 122 bp, Homo sapiens
gtttcagtggaaagcacaatagaaccaagtccctctcagatggtggaactttcccagagacggtaactaactgctcagatctctgctcactattgatctccttcaggttatctagattcttc

SEQ ID NO: 132992 - DNA, 122 bp, Homo sapiens
cagccgctgctgtctgatgtacgcccagatctctagaagcttccaggggcgccctgacttcgcggctcccaccctccttctccagggccctctgagaggcgtttacacaggcgtttctcgca

SEQ ID NO: 132993 - DNA, 122 bp, Homo sapiens
aaagcctcctgcagctgcgctcccacaagtgcgcaaagattgccaattttaatattaaagcggataattattaagggctcactaggtagcaggtcgtggactgcgctaaatcaattagttca

SEQ ID NO: 132994 - DNA, 122 bp, Homo sapiens
cccccgtccgccgccgccgccgccgccgcgcatagcccccggagagccctctggggaccccgaccagaagggaccttgccctgggagaaggtaacagacccacctggggagggagacgctgg

SEQ ID NO: 132995 - DNA, 122 bp, Homo sapiens
aagatcacggtgacccggcagctgagtgtggaggtgcaggactccatccaccgctgggagcgccggcgtactctcaacaaggcccgggcctcccgctcctccgtacaggtgaggcctgagag

SEQ ID NO: 132996 - DNA, 122 bp, Homo sapiens
tgtcctcagggctctgcatccattatctctaattctcccagcaactctctgaggaagatacgctcacctccaatggtgctctctcagagagaacttctctgacctcatctacaccagcgctt

SEQ ID NO: 132997 - DNA, 122 bp, Homo sapiens
ataggacgctcctcccggagagtagtgagacccctggtgcggggcgattggcggcgggagcgatgagtggcagccgcacggcccaacgggagctgtgcgtgggccgcggggcggggccaggg

SEQ ID NO: 132998 - DNA, 122 bp, Homo sapiens
tggggtcggggcaggggctggggtcggggtctaggcgggggcggtgcgggcccgactcgccgccaacaaaggcggctgccgccccagcggttacctgggccggaggctcgcggccgcgccct

SEQ ID NO: 132999 - DNA, 122 bp, Homo sapiens
tatcagagaccaaggttggtgacttgttcagaataccatggagagaagacagcaggctgtcgtggatgctggagttcacgagaaaggtaccttgtagaaacatgacaccccaaatcagcata

SEQ ID NO: 133000 - DNA, 122 bp, Homo sapiens
ctaggggcccgggggagtagcagaacgggtgcggcaatagcgtgagactggtggcagggacgtagacccttagctggccggtgaccccatgtcccaaaatagcacgaacaggattgtcgcct

SEQ ID NO: 133001 - DNA, 122 bp, Homo sapiens
cccttgacggcgcccaaggccccgcccgtgcggcgctgcccattccccatcaccagagatcggttcgtccagcgggcaggccccatcccaatgttaggtcaaagctcctatcccttggaccc

SEQ ID NO: 133002 - DNA, 122 bp, Homo sapiens
catggttgttcacatttgctgccacggaacaccgccagtcttcacttggaaacagaatcacgccttgtgaagagatcatccctaagcaggagagaagctactaaaggtgagaattttcttca

SEQ ID NO: 133003 - DNA, 122 bp, Homo sapiens
tctatgagagaggcatttataaaatacaaaatagcaatccacccacggggatggctgttacgtattttgtaaatgaagaaacaagaaatgggtggacgcgacttgcagcttagtggcaaagc

SEQ ID NO: 133004 - DNA, 122 bp, Homo sapiens
tgtgaaaacaaatttttaagtgtgtgtgtgggtggggaaggggtatatgtattcgtatgccgaaagaatatgcgccaaactgataacactggttactttctgagtggagtagaattagagga

SEQ ID NO: 133005 - DNA, 122 bp, Homo sapiens
cttccagtagcagaatgaacaagccaagagtgaagaatagggacagggaagtgaacatgacgtaccactccttccacaaagaatctggggcaccgtgacacatgctctgcaacatgtgctga

SEQ ID NO: 133006 - DNA, 122 bp, Homo sapiens
aggctgggaggaaaacaaacgccgccctcactgctcactctccaaatcttggctggccagcgtgccctctgagctgcctctcctagtctcatggcttcctggagaccacctgctctgaagcc

SEQ ID NO: 133007 - DNA, 122 bp, Homo sapiens
tttataaatccatcactgaggtggcgctgaaacagctgacggagcgaagcctgacccagtcgggtcccgggccctccacgggggtctgcgtcctcccgctgcctcccacccacccctgacag

SEQ ID NO: 133008 - DNA, 122 bp, Homo sapiens
ggttgggcagctgcggctcctccagagcctgatacacaccgtcggcgtaattggctggtacgcggcgctgcaaccggcagcctgcggaggcagggagcggggctctgtctaagcactccatc

SEQ ID NO: 133009 - DNA, 122 bp, Homo sapiens
gggaaggcccagtggcaagagggaggtggttttatataggtcttacgatgataaaaagggcgaacctttccacaggtctctactaggctctgttcagagggcttttcatgttttctcatttg

SEQ ID NO: 133010 - DNA, 122 bp, Homo sapiens
tttttctattccttgcctccaactttcatcctttttaattctcatataattaaaaattgtcgttggactatatatttgtgcttattgttttttgcatacttgagtatatgtggcatttagat

SEQ ID NO: 133011 - DNA, 122 bp, Homo sapiens
caaccgcgccggaaccggggggacccacgtgactcacctctgaccttctgatgccgtccgcgccattttggagactggcatgtagagaaagactctatagcgaatcttttgaaaagggaaga

SEQ ID NO: 133012 - DNA, 122 bp, Homo sapiens
ctttgtaacagggtccagaaataattagccactccagagagtgttgtggaatttgaaaaccgagatgccatgtattttctctgacactattttctgaatagtccaaataaaaacttggagga

SEQ ID NO: 133013 - DNA, 122 bp, Homo sapiens
tgtctctctccaggctttttccagggactccccggggtcagtctcctctccccactggaacggggaaactgggattggcctagacccggcagtggagtcccaggtgccctgcctgcccggct

SEQ ID NO: 133014 - DNA, 122 bp, Homo sapiens
ccagccagttttgacaaagtagcaattcctgaagtgaaggaaattattgaaggatgcatacgacaaaacaaagatgaaaggtaagttgcctcttttgatctgggtgatacttgaacaaaacc

SEQ ID NO: 133015 - DNA, 122 bp, Homo sapiens
catagtagggtttcagaccacaagttttctgaagcttttcggaattcatgcagcttgatgcgttattagtaggggctgctcgtgggaaaacgcttgtaattacacttcctcaagaagttaat

SEQ ID NO: 133016 - DNA, 122 bp, Homo sapiens
tgcctcactcaccctatacctgggagggacacccagggacggtgcctcactcaccctacacgtgacagggacacctggggccgcgcctcactcaccctacacctgagagggacacccgggga

SEQ ID NO: 133017 - DNA, 122 bp, Homo sapiens
aatttgccaaaagcaaagtattttgtacacgcttttctaaagtagaggtcatctcttaagcgtgaggaggataggggtcagagtcctacagcagtgcctggggtttaaaagtggagagaaag

SEQ ID NO: 133018 - DNA, 122 bp, Homo sapiens
ctcttcttcagccagcaattaggggttaattattagcaattaggggttcgccacataccccgtggacctgctgttccttcccaggacacaggtcacttgtcattctctgtgttagcaactga

SEQ ID NO: 133019 - DNA, 122 bp, Homo sapiens
agcccgcggtggagctggaggcgtatttatagctggctgacctcagtcctgttgggccctcgccgctccttatcttatgccgctggaattcgcgggctcgcaggtcacaggagcccgggcgc

SEQ ID NO: 133020 - DNA, 122 bp, Homo sapiens
cctcggcctcgcgcatttcctccgccatgcgcgccagacggagcctacggggaggcacagcgtgagacgcccctgccctggaggccccgcccctgccctggaggccccgcccctgccctgga

SEQ ID NO: 133021 - DNA, 122 bp, Homo sapiens
gcagggcacgagccgcatccgccgcggtgaccagagcctgtggatccgctcgcgggacatcgcctgcaagtgtcccaaaatcaagcccctcaagaagtacctgctgctgggcaacgcggagg

SEQ ID NO: 133022 - DNA, 122 bp, Homo sapiens
catgatcgtgtgtgcacacatcgcgtgcagatatccatgtgaactcgtgcccgtgtaagacgcatgatcgtgtgtgcacacatcacgtgcagatatccatgtgaactcgtgcccggataaga

SEQ ID NO: 133023 - DNA, 122 bp, Homo sapiens
gccgttgcgcccagccttgcgccttgagatcgcagggcttacagcccagagccgaggtgccgttgagatgttactccaaaaagaaaagaaaggagaaaaggaagttacttcagaccacgtga

SEQ ID NO: 133024 - DNA, 122 bp, Homo sapiens
aaaaaaaatccttctggtggggccatatgaagtacccactctcaacgcctccttccccaacggctgcatattcatagtcagggcttcttggcagtgagacacacaccatgagtcacactggg

SEQ ID NO: 133025 - DNA, 122 bp, Homo sapiens
aaagctaaaaaactatacataacatactgattgtttgactgcattacttagcattccatccgtgcaggcagatggtgttcctaggtttggaaatataaatcccatgggaagtcagctgaaga

SEQ ID NO: 133026 - DNA, 122 bp, Homo sapiens
gactgggcggggaactcgggtgactcacgtcggtcctgtccgcaggtcgaccatggtggccgggacccgctgtcttctagcgttgctgcttccccaggtcctcctgggcggcgcggctggcc

SEQ ID NO: 133027 - DNA, 122 bp, Homo sapiens
cagctctgccaggtgctccatgtgttgcccttgtatcctccttgtcaataaaggaagttccgctgcagaaggggtgtgtgctgtgttcttgacccgttgcctttctctggtactggtgtctt

SEQ ID NO: 133028 - DNA, 122 bp, Homo sapiens
aattagatccctgttagtgactccagtgtcctcttcgtttaggttgctgctctcctggatcgtcttgatccaagctaacatatcatctctgtcttcagcctgaaacaggcattcacagtcgg

SEQ ID NO: 133029 - DNA, 122 bp, Homo sapiens
attcgtaactttccaacagcctgcctgtcatgtggattagcggttgtgtttttgtatatccgagtgtgttaattatcccaaattcgcccttcttcgccagctcagaatctaggccttgcact

SEQ ID NO: 133030 - DNA, 122 bp, Homo sapiens
cccgaatttgagggtgacctgacataacctggcaccaggatgattgttcttaatgagacgcgcaggcctggggagacagccgtttctgctctggaaaacatctccagaaaaggtcccaaaac

SEQ ID NO: 133031 - DNA, 122 bp, Homo sapiens
gatccccttcagttgcttcaattactactatgagccagtaactcccaaatctcctgcttacgcccatacacagaaccgtgttcttgttatcaacccaatcattcaaactcaacgtgttcaaa

SEQ ID NO: 133032 - DNA, 122 bp, Homo sapiens
ccgggccccgccccgcaccccgacgcctcctcggaagcagcagatcccgcccctgggccgcggagatccccactccccaaacagaggtcgcagtcagagttcccgggtcccttccgcctggg

SEQ ID NO: 133033 - DNA, 122 bp, Homo sapiens
ggagggagggagagagactgaggagccctttgtagccaggcagagctgtcaataaagtttcgtcgccttggtaaccgcaggcctcgcggggcgggaggggagagggatggcggtgcgcgcgc

SEQ ID NO: 133034 - DNA, 122 bp, Homo sapiens
ctgcccactcatgctgcggagtgtgggaggcgtggggagatcggccgccagagggacgtgcgccgtagccaatcagcgtgtgaagcagggcgctatgtggttggggcctcccgtaactcttt

SEQ ID NO: 133035 - DNA, 122 bp, Homo sapiens
gtttaccagattgacagagattcatacaaggaaggaaaggtatggcaggatggatgttcacgctgtttataaatccttgctattagatgaaactgtcaataagtaactagaagcagccagta

SEQ ID NO: 133036 - DNA, 122 bp, Homo sapiens
ttccagactagcctggccgacatggtgaaacccggtctctactaaaaatacaaaattagccgggagtgcacacccgtaatgccagctactcggaagactgaggcaggagaatcgcttgaacc

SEQ ID NO: 133037 - DNA, 122 bp, Homo sapiens
gagtccagtgcaaactgaaaatgtagcgcctctttttcaaaaatcattaagaatttcaaacggccaggctcagtggctcatgcctgtagtcccagcactttgggaggccaaggcgggcagat

SEQ ID NO: 133038 - DNA, 122 bp, Homo sapiens
cctcccgggttggccaatgaaaagctggcactgggtcggaggcgccagccaagtggggggcggagcttccaccaccggccaatggggatctggcttcgggatgtgggcggggtccacccggt

SEQ ID NO: 133039 - DNA, 122 bp, Homo sapiens
acgtgcccgtgggctttggagagagctggaagaagcacctcagcggggagttcgggaaaccgtattttatcaaggtaaatatggaaatgcaccttccataagggtaaatgtggaggctgccg

SEQ ID NO: 133040 - DNA, 122 bp, Homo sapiens
gatcacatctgctctgaatccttgacaaccgcagcccaaagaatgataaactacaaaggccggaaatgcgtcaccgcggcccgctctccgcgaaacagcggttccggctgtgttccttctag

SEQ ID NO: 133041 - DNA, 122 bp, Homo sapiens
tacatcggagagagggaggcgttccctcaacttatttgtttgctcaggtttgagcctccacgccgcgccatccacacacgctcggccgggtgccctggatgcgaggcgggaggaagcggggc

SEQ ID NO: 133042 - DNA, 122 bp, Homo sapiens
ttaaacttccgggtcagcctcagtgcagcttgggaaacgtagttcctagtccccacgtctcgctccttggagcccagactgagggagcgtcgcgaaagttgcccgttttggaacgctcccat

SEQ ID NO: 133043 - DNA, 122 bp, Homo sapiens
atcctgaggcggtctagggggcggggcgttcagggggcgtggccgtgcaggggcgggctccgagcgtggggtgggcgcttgcgcactgccgctgcggctgttgctgcggagccaggagggga

SEQ ID NO: 133044 - DNA, 122 bp, Homo sapiens
aaagcggctccagggaggggctgagccggcggctctcgcaggagccggcggagatgggcgcgtccccagctccgactcatcgggccaacctccaatcagacccagggaaaccgaaagcccct

SEQ ID NO: 133045 - DNA, 122 bp, Homo sapiens
tcacagcatctgtatgccaggccccctcatcaacaccatccgcgtggtgtgcgccagctacgaggactacggtcactggctgctgtgccttcgcgctgtcacccacagggagggggccccgc

SEQ ID NO: 133046 - DNA, 122 bp, Homo sapiens
ctgggcaacatagcaagactccttctcaaaaaataaaaataaaaataaaaatattattaccgtatgagctggcaatcctgcttttgtgtatacacccaaggaattgaaagggggtctggaag

SEQ ID NO: 133047 - DNA, 122 bp, Homo sapiens
gagcccgccctgctatgaggacgccctctacttcccggtgctcattgtccacggagacagcggctgccagggggatgggcagggtgctctctgagaccccccacggcccccagagtggcccc

SEQ ID NO: 133048 - DNA, 122 bp, Homo sapiens
ggattgagtacgggccggtcaggtggacaggattgcgtacgggcgggtcaggtgagcaggcgtgcgtactggcgggtcaggtggacaggattgcgtacgggcgggtcaggtggacaggattg

SEQ ID NO: 133049 - DNA, 122 bp, Homo sapiens
tgcgtcgccctcggagagcgagtccaccaggtcctcctcgtccagcgtggcccgcttgtacgtcgacatctgcaaggccaaatgcagcacggactccctcagcgcctccatggctctcgcgc

SEQ ID NO: 133050 - DNA, 122 bp, Homo sapiens
gtcaggtggaaagtggtgaatttggtttgggaacctcaaacccagcatgcactatgacagcgcacgctgcatctggggaggcagcaagcaggcagttggatacagaggcctggtgctcagaa

SEQ ID NO: 133051 - DNA, 122 bp, Homo sapiens
tcaggggccgctcccggttgccgttgaggaagatggtgctggtcctggaggcaccggctccgttctgcatctcctccccgcagtccctggggaaggggatccgcagcccacctgggagagga

SEQ ID NO: 133052 - DNA, 122 bp, Homo sapiens
tacaagggacatgttaggcaatcagatgctttgtagaaactgagctatttgtcggcctggcgcggtggcccacacctgtaatcccagcactttgggaggccgaggcagtggctcacgaagtc

SEQ ID NO: 133053 - DNA, 122 bp, Homo sapiens
aaaaaagaaaaagaaaagaaaaaaaaagtattgatgccagtaggaaaatgtgaaagcaagcgtggggccatgagggagtgcacaggtcacatgcccatgactctggccctgctcaccctgct

SEQ ID NO: 133054 - DNA, 122 bp, Homo sapiens
gattgctcctctgaaaactcaatattggaagctggtgcttgaggacaagccctggcaggccgagggcacctgctcctctgtctgccctcctggaaccacgcgtcgggtcacaggccgctggg

SEQ ID NO: 133055 - DNA, 122 bp, Homo sapiens
catcatctagtagtcttttatatgtgttctgaaaggttgttcactgtgtaatgtgaactccgtgttctgtgagcagtgttgttgctgccaactctgagatgctggcctggtgtgtttttgtc

SEQ ID NO: 133056 - DNA, 122 bp, Homo sapiens
ggcgggcagcccctgggcgggcggggtcctggcgagaagcgagccggcggcctgaggaggcgactgactgagcagcgcacccggggagcaaggaggcgcggtgaactgagcggcccctgagc

SEQ ID NO: 133057 - DNA, 122 bp, Homo sapiens
cacaccgcagcaaagcccctccagccagactgccgttggtgagacaaatccctcccttcccggctcccacggaggatgactcaccgggcaattaagttctaagggcttccaaaaaagtcagt

SEQ ID NO: 133058 - DNA, 122 bp, Homo sapiens
gaggctctcctgtgtgctggggggaagggggcagctggaaaagtacttggcagaaacccacgttagaaaagctcagtttacggttccccttgcaatggtacagaaccagagcgggccaggtt

SEQ ID NO: 133059 - DNA, 122 bp, Homo sapiens
cctcaaacatatgtacactgtattgtgcacatagtcattagaaaaatcccttattgaggccgggcacagtggctcacgactgtagtcccagcactttgggagacagaggcgggcagatcact

SEQ ID NO: 133060 - DNA, 122 bp, Homo sapiens
tacaaataggcagtatacacagtgagcgcccactaagcgctgggctgggggcctccaacccggaacagaagccggccacaaccctcgctccctgtcgtcgcggccgttataggccgaaagca

SEQ ID NO: 133061 - DNA, 122 bp, Homo sapiens
tggcgaagtaagtttggaaaacaccattataggattctttactgtagtactttggcggggcgaaggtctttaatttgttcatcatttagaggagttgccaacctgggattattttgtaaagt

SEQ ID NO: 133062 - DNA, 122 bp, Homo sapiens
tgcgcgagggagggcgaggaggagaggagagagcgagaggaggttttgaggtatgtgacccgggtcagggctggagaggacccaggcgagtccgcactcctgctaccactgcggccccccgt

SEQ ID NO: 133063 - DNA, 122 bp, Homo sapiens
ttgttcgcgggacaattatatcttgctagccagcttttgcaagaccacgagctttgtagccgcaatcacagtttaagaggattaccgtggatataatatgagcaaacagggtttgatagtga

SEQ ID NO: 133064 - DNA, 122 bp, Homo sapiens
cgagagctgccctgcccggcaggcgccagtgtgtggggacgacggagtcacctacgaaaacgactgtgtcatgggccgatcgggggccgcccggggtctcctcctgcagaaagtgcgctccg

SEQ ID NO: 133065 - DNA, 122 bp, Homo sapiens
atctggaagtaacgaagttcgtaggtctccttgtcagatgcaaccactcgaagccaatcacgaagattgttcttcttaaggtatttcttggtaaggtatttcaaataccttttaaaataaaa

SEQ ID NO: 133066 - DNA, 122 bp, Homo sapiens
gtgggcggcccgtgggaggggctgaggctcatttctctactcacctgtctccgaatccgtcgtggtgtttcaagcgagtcaagattccagatcgcgccccaggctggactcggaattactgc

SEQ ID NO: 133067 - DNA, 122 bp, Homo sapiens
caagcgcggaggaagacgtaggttttcgcttacttgcaagcaggaggcaggagacggccacggtgtagagctgcttggaggtggtgacgttgtagcgatccatgaagtggtccagcaggtag

SEQ ID NO: 133068 - DNA, 122 bp, Homo sapiens
aaattcatggcctggcttttccccatccaggtcattctagggaagttccagccccagtcccgaccccatcacactttggcctggagctaaggctggggggaaatgccgggaagcaccaccag

SEQ ID NO: 133069 - DNA, 122 bp, Homo sapiens
cagagctacggaggacaagtggtggcgcgattatcgtagcgagcagcacggtgggagtggcgctaacggtcagttcagaagacacttctggagatggttaatagaacttggtataaacaaac

SEQ ID NO: 133070 - DNA, 122 bp, Homo sapiens
actacagtttgcattaagaggcggcgccttttgggtttcggagggttccactggaacccacgagggtcaggaacaccgacgcgcggattccgcccaccagacagcctggggaagcgagcctg

SEQ ID NO: 133071 - DNA, 122 bp, Homo sapiens
aggggagctgttttggacagtggaggtgctctcggggcctgcaatatgatgcagcctgggcgttttgctcaagcccagtgacccacctgccctttcctttctgggttcagtggaagggaggg

SEQ ID NO: 133072 - DNA, 122 bp, Homo sapiens
aacccgctagagacagcagaagtggtaaaacgatcttccggaagacacgcctgtgtgtcccgggcacagttcacgccggagcgaagccttacaagtgttgggagtgtgagaaaacctcccac

SEQ ID NO: 133073 - DNA, 122 bp, Homo sapiens
ccgccgcatcaccgggcctgacctccgctgcatgtgcacagcccgacggctgctccctggcgatgccatgtcctctcggttcagcgcggccacactcgctctctctgtcaatttcagagcag

SEQ ID NO: 133074 - DNA, 122 bp, Homo sapiens
atagaaacgggtgactcacagagacactcaggatagatcaccatggatactgtctctggccgaaggagaaaggtcagcttgagtgaagctaagtagaactgatggagtaggcatttttcaga

SEQ ID NO: 133075 - DNA, 122 bp, Homo sapiens
aacaagtatttactagttcttgggcgtacctaccctgggtaggtggaagcttatccaacacgaactgagaaagctcatgaagtaactcatgtgcttcttcgagatcttattcctagatttgg

SEQ ID NO: 133076 - DNA, 122 bp, Homo sapiens
tgtcctgacagggactgaaccacgctggcgggcagcaattagctgttatctagcaagaggcgtcaggctgcacggcgaggcggccccgaagtgcactccgcaaaccatgactactcagcaag

SEQ ID NO: 133077 - DNA, 122 bp, Homo sapiens
agcatcccgccggtgccagctgggaacggggagccggcgtgcccggggtatcccggggtacgtggtctgcagggcgcagccaccacgtctcagcatgtgcgtacccacgagagccggcaaga

SEQ ID NO: 133078 - DNA, 122 bp, Homo sapiens
cttccggggcggctccctcaagtctttctgaagagtccccaagctttgctgggtgcccaccgcgccagggagctgcggtgctcccccgggccgcctgcggtgctcccccggactgcctgtcc

SEQ ID NO: 133079 - DNA, 122 bp, Homo sapiens
ggcagagggcgggaagtttgaacgttctggacccgccccgaaggcaaataggccaatcagcgtccagactcttcagctacggcagtccgcttctcctcctcgccctgtcggatctctaggct

SEQ ID NO: 133080 - DNA, 122 bp, Homo sapiens
gaaccgtaactccctctctgagggtgaatacgggccttgattgccagaagggccctcggccggggacgcgggatgatgcggggccgggagatgctttcctggaggctgagaaacctggaggg

SEQ ID NO: 133081 - DNA, 122 bp, Homo sapiens
acgtcgggcgctctttagagaggactgggacaagagttgcggacgcgaagaacgagtaagcggtggttcatccctcctgaccccacccccgtggcctggcccgatggtcgcgcccggggttg

SEQ ID NO: 133082 - DNA, 122 bp, Homo sapiens
gagcacgtgggtgcgcgcgggccgcggagtgagcagcagccaggattcctctccagatcgcgcccccgccgcatttcattgcctgaaacggcccacgccccgcgatggcccagcagacaccc

SEQ ID NO: 133083 - DNA, 122 bp, Homo sapiens
gtggaatataaacctacgaatcacagtgaggaatacattagagaggtgaaaaaaatgctgcgggaacactgggagagatgacatctctgccaattcatacatggcctagagctcctattgcc

SEQ ID NO: 133084 - DNA, 122 bp, Homo sapiens
ccatgccatgccttacccactggctgctagcggcgcgtttcacttaaggtggccacggtgcggagactacaggagcctgggaatcccagggtttggggaaaaagtagtgagcgagaaaggtg

SEQ ID NO: 133085 - DNA, 122 bp, Homo sapiens
ggaggggaagggtgttggaggggagagagggcatgcatgcacatacatagatgattcagacggcttcagaaaagaaccacaaggaatgcttagaggagttttgtatttaatctaaatatttt

SEQ ID NO: 133086 - DNA, 122 bp, Homo sapiens
aggacctctgaaaggccatgagcacaaagctgctgcctgagtcccctgaaatgcagggtacgccccaggtctctgatgtaccccaccacacttttcctctcaaacatattccaggatcactt

SEQ ID NO: 133087 - DNA, 122 bp, Homo sapiens
ggcttactattatcttcacaaataaacccacacatttagggggttagtatatatgctgagcgatagaaatccaatggcatattcctctgattttcttttaggtctgttagtcttcattatag

SEQ ID NO: 133088 - DNA, 122 bp, Homo sapiens
caagggaggcactccatctcgacttatccgaggtgctggaggggagaaactgctgggccccgggctccctgctgcatctcactcacctctgcaataaggggcagagaccgaacacagacatg

SEQ ID NO: 133089 - DNA, 122 bp, Homo sapiens
gcgaatattcccagtcgcccgtggcgacgcgggggtggggtcggcgctcaaggcagaaagcgcgaggcaggtgcccaggagagccgcgcagaaggggactgactggggggccctggtccccg

SEQ ID NO: 133090 - DNA, 122 bp, Homo sapiens
gggcaaatgaggacgcttcctgagcatatttctaggctgggaaccccgctgaaatttccgcggtgcctgggaattcctagagcctgagcgcctggctcaacccggtctgggcctggggctgg

SEQ ID NO: 133091 - DNA, 122 bp, Homo sapiens
cactgagcccagcctgactgatgtattctttattgccaagctcatagtaagcactcaatacgtattacatagatgaatgactgaaggtaggtagggaggagaggtttttgaaaataatataa

SEQ ID NO: 133092 - DNA, 122 bp, Homo sapiens
tcggcgacccgcccacttaaccgcaaccaatgagagcagagggagacagaaattgccgtacggaggcccgcacggacccttctccgccgtaaagccgtttgggaacttgtggaggcggggtg

SEQ ID NO: 133093 - DNA, 122 bp, Homo sapiens
tgatgaggagccttatgtgaggattgccatttttccatttacgtttggctatcacaaatacgtctgagctataaagagatgagaaacttgaaaacagatggcccatctgtttctgtctgtat

SEQ ID NO: 133094 - DNA, 122 bp, Homo sapiens
gcaagcacaggcacctggtctgactgtggaagacataccttccttgactgagggtgcttccggagaaggcccacactgatctggggctgagaggtggaggacgggaatgggattttcagcag

SEQ ID NO: 133095 - DNA, 122 bp, Homo sapiens
acaaaacaaagcaaaacaaaaccaggccacacagtgttgggttacaggcttgagccactgcgcctggccatgaatcctttatcacaccccaggggcctcaggtaccaatcacagggcccatg

SEQ ID NO: 133096 - DNA, 122 bp, Homo sapiens
cgggagagggcgccctgggattcactggcattcgctctgtcccggccaggtgtcctggaacgcggccgggcgggcacttagccagttacctgaacgcggacaggtgagctcgggagggccca

SEQ ID NO: 133097 - DNA, 122 bp, Homo sapiens
aaccccttgcagaaggacccccagtaccggcggaaggtcatgctcgccctcccctccgtgcggcagatcgatgccacgttcgtcaggttctgagtccttcttggctcctcatgtggtccctc

SEQ ID NO: 133098 - DNA, 122 bp, Homo sapiens
ctttggctcggtgggtactgtcgcggaggcttgtcattctgacccggggattcctcacagcgtctggcaggttggtcgtgaggggctggtgccttccaggatgcgagtgtcgggggaactgt

SEQ ID NO: 133099 - DNA, 122 bp, Homo sapiens
acctcttttacctggcactgcagaacgttttatccagaaatcagcatcttctgtttcgttcgtacctcgggcaaattagtagcgtatcgacctgccaggcacaggtgtcttttttctttggt

SEQ ID NO: 133100 - DNA, 122 bp, Homo sapiens
gtctcctgacgttttatggcacttgacgctggtaaccactcccttcccgaggacggagaccgcggccctgccagtatcgctcacgctttacctcttcccaagtgtttttatctccttacctt

SEQ ID NO: 133101 - DNA, 122 bp, Homo sapiens
aacccttgaacctcaatccgctacgccacgtggatttgcttcctgtgggctgcccaagagcgcctctgtggtgaaggaagcttctgaggatgggccactaaagatggccaaggtcacctttc

SEQ ID NO: 133102 - DNA, 122 bp, Homo sapiens
atacttggcctataaaatcccaatttaatctccaccatactctgcagggggtattggcagcgcaagtggaaaggagaggaaactgaggctcagaaaaaaggtgccgaaggtcaccaagcaag

SEQ ID NO: 133103 - DNA, 122 bp, Homo sapiens
tgttctgaaaccttgcttttcacttcagactgggggaggggtagagggagcctaatgtaccggagatgcttcggaaatgagagccttggatgaattcctgggcctattgatccaccggcagt

SEQ ID NO: 133104 - DNA, 122 bp, Homo sapiens
tgttttgggcaacaacctaaataacttttaacagtgcctgggaatgttcaagggtcagctcgggttcaagctgcaggggaaacacacagctggctgggccacagggtggtcaaggtaatctg

SEQ ID NO: 133105 - DNA, 122 bp, Homo sapiens
tggagctacggccggcggttccgaccgagggcggcgaggggcccgcgccctggccagtgtcggcctgcagctcctaggttgaacccggggggcctccaacggtgacctcctgggtgcccttt

SEQ ID NO: 133106 - DNA, 122 bp, Homo sapiens
gcagacgagcgcgcggcagcggtagtggcaggtgaacttgcaatctgcagagaggcctggcggtgaggcggaggagctccaggtcggggaaatgtcccggagattgaagggaagccccaggg

SEQ ID NO: 133107 - DNA, 122 bp, Homo sapiens
ctgcagtgaggcgagagctagctgggcgtggagagtccactgtgaagccgaggctgggcccgtgtaggccttcgagaggcaggaggccgggcctgccaaggccgactggaggtcaagttctg

SEQ ID NO: 133108 - DNA, 122 bp, Homo sapiens
aggggtttatggttatgtttctatgagtcagcaagtctttcttatttttttctttacctacgggtatactgccttctgtttgttagagaagactctgaaatccttttgactcaaaattgact

SEQ ID NO: 133109 - DNA, 122 bp, Homo sapiens
gtttcagcccagtcatgtccaatatcttttcctgagactctgcactctacagtttgaaaccggaatactaaacctacagcatgcatgccctagcttgtaccctccgtactcatggcagacat

SEQ ID NO: 133110 - DNA, 122 bp, Homo sapiens
ccacgccctggcccgaaacacgtggagacttgatgcatttttgatgtggacgaaagggcccgggggcgaggcggcgcctgtcaagataaaactcattaaatgcaaagacctcatttacctga

SEQ ID NO: 133111 - DNA, 122 bp, Homo sapiens
cagctttttgccatctgattcctagttcttttaagattgtgcatcccaaatggtttgcaacggcagacttccatttaactgcctgggtcacattgaggggagctggaaggagagaatggagt

SEQ ID NO: 133112 - DNA, 122 bp, Homo sapiens
cctttccctttgtagtgcccgcctgcctgagaggctgtgagcgctcctaagaggtttgtgcgttctccaggcttcttattcggccctctttggggggcttttcaagctgatttttcactact

SEQ ID NO: 133113 - DNA, 122 bp, Homo sapiens
ctggctttcacttcttgtttttgagctgattggccagccagtccaggccttcgtacagcccgtccccgctggtggcacaggtggcctgaatgtaccagttacggtgacgaagggaatgcagg

SEQ ID NO: 133114 - DNA, 122 bp, Homo sapiens
cgcagcaccagccggtggacttgccatccagctctcagcttccactgctccccttgttcccggccggctggctgcctccccgtgctgtgtccagcacggccaacaacgtcagaccctcagag

SEQ ID NO: 133115 - DNA, 122 bp, Homo sapiens
agataccaggcttgactttactcctggcggggctagggccagaacccagactggttgctgcgcacggtgctttttgccaaacctcacatttgttggttgcgtttttcacaactcttgtcctc

SEQ ID NO: 133116 - DNA, 122 bp, Homo sapiens
gataaggtttgtgtttcatactttgattccttcacagtatttaggtcagaggtgggtccacgataatccatattctttgagaaagggagagtacctggggcagggctgcatgctgatacacc

SEQ ID NO: 133117 - DNA, 122 bp, Homo sapiens
caagtgtatattccagggttccttccccagagaggcataccccaagttctgtgtagccatcgactgaggacaggtagagtcacctatcctacccacgaattggcagccttgtggtttagatg

SEQ ID NO: 133118 - DNA, 122 bp, Homo sapiens
tgcgcatgcgagggatctaggttgcgtgctccttatgagaatccaatgctaaaagtaatgcgcttgaatcatcccgaaaccacccccccgacccctgtccgtggaaaaattgtctttcatga

SEQ ID NO: 133119 - DNA, 122 bp, Homo sapiens
gtgttaagggggaagtgcagagaacgagcagacacgtgggctagacacagggtgggcgggcgccctggtgggctgtgtggctggtcacctcagtcagaatctcgccctctctgggccactcc

SEQ ID NO: 133120 - DNA, 122 bp, Homo sapiens
ctctgtgctcggcttctagacttgtcggcgctcgattgaggagcgtggctacgttgcttccggtgcctggctccgtttcctgcttttggttcttacagtagtcggcgtaggccttaggtggg

SEQ ID NO: 133121 - DNA, 122 bp, Homo sapiens
gagggggcggggggcggggccgcggtgagatggggcggggccgcggtgagggggcggggccgcggtgagagggggcgggaccgcggtgagagggggcgggaccgcggtgagagggggcggga

SEQ ID NO: 133122 - DNA, 122 bp, Homo sapiens
gcacgcgcttaacggcttcgtggagctcactcggtctgagaggtcggaggctgcgagtgtcgctgctgaaggctgtggtggaccaggctggatcgcggattctgagctacatcgcgggtttg

SEQ ID NO: 133123 - DNA, 122 bp, Homo sapiens
tggggagggatagggtctacctcttgatggacagggctgcaaagtcacattgcaaaggaacgtggctacagggaaagaaagagttgtggccagttttggaaacaagcttaaggcacaataag

SEQ ID NO: 133124 - DNA, 122 bp, Homo sapiens
taaatccacttttaatccccattttcttcatcaggatgaagtctaggcggccacatttagcgcatcttcgcttgccaggctcccagggtttggattcctttgctcggctttcccctttgcgg

SEQ ID NO: 133125 - DNA, 122 bp, Homo sapiens
cccacttgtcaatttctgttcgggtttcaaagagccattgcacggaggtttagtcctgtccgagggcactactgtggcggcgcgcagaagcggcccagtggagccaggcggcgacgtttctc

SEQ ID NO: 133126 - DNA, 122 bp, Homo sapiens
ctctacgactcccacaggtctctctttgtgtccagatggatggcgactgtgagtcagcaacgccagccaagacttcctcgcctttaccgtggcattggggcagtttttcaggctctctacgg

SEQ ID NO: 133127 - DNA, 122 bp, Homo sapiens
tctgggtaactcatgggcacaccctggaaaccagaaaaacagtggagctctgcctgtccccgaaggaaagaattacattgccgcaagcaatttggaaaggagcaaggagcttggaaactcgg

SEQ ID NO: 133128 - DNA, 122 bp, Homo sapiens
gacttagaaggtgtcaggtggagccagggttcctgttcagagatgttctccacggtgacccggggctgcgggggggcatccaaggccccatcgcctctgcgcctcccgccatcccgtactct

SEQ ID NO: 133129 - DNA, 122 bp, Homo sapiens
cgccccgtcgcgcccagcgagccacccggcgaggcgggggcggcgtctcccccacccccgcgatcacatggtgacccccggcagccaatgcagtggacgctaggaccctgcgggccgcgggc

SEQ ID NO: 133130 - DNA, 122 bp, Homo sapiens
cactgctttggtcaatccgagcttcagccacctggaaagtggcttagtttgcaaagattacgaagttgtgcaagaaaacagtttaacaatctgtaaagcaggaatcttaaaaaaatattcac

SEQ ID NO: 133131 - DNA, 122 bp, Homo sapiens
tctcgctgctggtgtcgttgagtgtgtttcgggatgtccttgcgcctaacagcagtgaggcgcagaattggcccacgccctcacctgcggcttgcttcgcaggactccaccccaggataaaa

SEQ ID NO: 133132 - DNA, 122 bp, Homo sapiens
tggttctgcaggtggagccaccaatgcccagacaccctgctgcaaagtcagggtccctctcggcctcgtctttccctctcccgtacccctagggctggatagtcctcgtctgcagaagttcg

SEQ ID NO: 133133 - DNA, 122 bp, Homo sapiens
gattgcaagttcagggtaacaggtcatctttggactgtggagccctttctcctaggctgccgatggctatgcacaaacttgatcttgtttactgtgctttcccctccagcttcccactgacc

SEQ ID NO: 133134 - DNA, 122 bp, Homo sapiens
cacacatggtaatccactgcgttgagcgcctgtctcaaaggcgtgatagagtttccgcttcggcctgcggtgctgtgggattaacctgattaatatcgtccattgcatgtgattttcgatgc

SEQ ID NO: 133135 - DNA, 122 bp, Homo sapiens
cggcctctcgcttgggactctgaggctgagagcgtgtcagggaagcttcgcctggagaagcggagggggaggggcggccgccgccgcgccgtggccctttgtgctggaacaatgaccagctg

SEQ ID NO: 133136 - DNA, 122 bp, Homo sapiens
agccggactgaagaattgaaccgggaggtcgctggccacacagatcagctccagatgagccggtccaaggtcgctgacctgcggcgcaccctccagggtcttgagctgcagtcacggctgag

SEQ ID NO: 133137 - DNA, 122 bp, Homo sapiens
ccgcattcctccgaggtctgcaaaggccactgcttaaaggcgcagaggagcagctgggaacgagaacaaagcggccaggcccccctcggaggaaggaaggagagagccccaggaaacagctg

SEQ ID NO: 133138 - DNA, 122 bp, Homo sapiens
aagctgcagaaggaggaaaaatcagagattggtgactgaccaaaggaagcacctgctttccggaaattaaaatcatgtgttaggcagctctgacttaattgccaaatggggtgaagcccagc

SEQ ID NO: 133139 - DNA, 122 bp, Homo sapiens
gcgccttcgtctgcctggagattgtaagtggggccgccggagcgagggtcgcgcggggagcgaggacaggcggcggcatccttgtcccccgggctgtcttcctctgcgtccgcccccggcct

SEQ ID NO: 133140 - DNA, 122 bp, Homo sapiens
taaaacaagtctttcaaactgccttcaagtatctcctctgtgtcacttggtaacaaaggtcgaagataacagatggagtcctcagtgtaacttgataaatgtttcccttcctcagccttttg

SEQ ID NO: 133141 - DNA, 122 bp, Homo sapiens
ctggggttcttgacgctgaccacggtggccttctggaatgttgggggctgcttgggtggccggtcccggcccggggcaacggggaggctgtctggaatcagagtctttggcctaacctggga

SEQ ID NO: 133142 - DNA, 122 bp, Homo sapiens
ccagcagggagggcgtggccggccaagcccacatctcctccctggccgggagcgggttaacggccagccgccgatgctgcgttttctgggtgactcacttcccccgcagggtctgggcgccc

SEQ ID NO: 133143 - DNA, 122 bp, Homo sapiens
ctcttgcggtggtcatcccacgccaccaggcaggtcacagccgggggagtcacttttcctcggcaattcctaaggataggggaacgtcccccggcgtctgaaactacattccccacaataca

SEQ ID NO: 133144 - DNA, 122 bp, Homo sapiens
cagcatttattccaactgaagacttcactcaaaggtgagtcaggtcagtgtggacctgggcgcttccttttcctccagctctcactgggtccaggcacaggagccctgagggatcggcgacc

SEQ ID NO: 133145 - DNA, 122 bp, Homo sapiens
caggtcacaaagaccctggtggtaaaacagcatgcggtaaagaagccagccaaaacctaccgaaaccaagatggcgatgaaactgacctctggaggtcctcagtcctcattatacgctaatt

SEQ ID NO: 133146 - DNA, 122 bp, Homo sapiens
ggcgcgagcgggaactacggccttggccttcttcagttctagcgtcaacccggtgctctacgtcttcaccgctggagatctgctgccccgggcaggtccccgtttcctcacgcggctcttcg

SEQ ID NO: 133147 - DNA, 122 bp, Homo sapiens
cccctttgtctccctattgacggcgacagcattgggcaagtcctgggcctcatgtctgtgcgaatgtccccaccctgtcaccggcacttccccccggggtcggggctccgggcctctcatac

SEQ ID NO: 133148 - DNA, 122 bp, Homo sapiens
acttaaattagaactccccgaggtttcagatatccaaaagctatctctgagccctccactcggtagcccttcccctatccgtggtgaatcaagactacttctagtcaccgcacacacagcca

SEQ ID NO: 133149 - DNA, 122 bp, Homo sapiens
gtgtttttcttgatttttttttctttgcattgtccgctgcaacatggtagaaaagggcagcgttaggtttgaatactggctcttgcagtcaccatcagcagcagggcctcggccgaatctct

SEQ ID NO: 133150 - DNA, 122 bp, Homo sapiens
cgagggggcgtggcctgccttgtcgcactctaattgggctttcgcaggaaagtgggcgggcgcggggcggagcttccgataacaacactcggagctggggctgtggctatttgttgctgcgc

SEQ ID NO: 133151 - DNA, 122 bp, Homo sapiens
catttcctaggcattagggatcggtgacacggaaacagggatgggacgttgtggtgtgcacgctcaggccagaagggcccagtaagagcccttgctaagtctggacacaaagggaaaaaaaa

SEQ ID NO: 133152 - DNA, 122 bp, Homo sapiens
ataagctgtaacgctcagcgctaaggtctgcaggttcagtcctaaaaccagtgagaccagcgacccaccagaaaaaactagcaactgcagacgcgacgcctttaagagctgtaacactcatc

SEQ ID NO: 133153 - DNA, 122 bp, Homo sapiens
cgtgctggctgcggaacccagggcaggggtgggaggggcctccagcactttttatatttacgtattctccaaagcagtgttcacacgggagccagcctgtggcccccagcctcctggaaaac

SEQ ID NO: 133154 - DNA, 122 bp, Homo sapiens
tcaaacaagcaacttgcttccctttgctgtgaaaagaaccgaaactcaggctcagagcctcgcaaaacaaagacatctttacccgcccagtgctatcctgtgtcacccccctcccagggtct

SEQ ID NO: 133155 - DNA, 122 bp, Homo sapiens
tgcacgggcaggtttagcaaaggtctctaatgggtattttctttttcttagccctgcccccgaattgtcagacggcgggcgtctgcctctgaagttagcagtgatttcctttcgggcctggc

SEQ ID NO: 133156 - DNA, 122 bp, Homo sapiens
ccggcctgctccctcgggctcaacataaacgtcaaagtaaggaagagcgggagctggacccggctggccacttcctgacccacagccctattcctagagaagctgaccttgagcctcaagat

SEQ ID NO: 133157 - DNA, 122 bp, Homo sapiens
gaagaggaaggcagagcaggtctcagctctcagacccattgcctctatgaaagcagaagccgggctgggggtcagctgtggcacagtaggacatggcccagccagaatccatacttgagcta

SEQ ID NO: 133158 - DNA, 122 bp, Homo sapiens
gcattcgtgcccactggccccggctgcggcatcgagggcgaccctgcacacacccctcctcgccctggccagccgataagagggctagcctcagtgtgggggtctgtcttctaaaggggttg

SEQ ID NO: 133159 - DNA, 122 bp, Homo sapiens
ttttagaatttaaaactctgcagaccaaacaaatgacatccatggcccaggagacctctgcgctcaatgcttacttgcagtaattttaccttccagtacatatctactctgagggaggtgag

SEQ ID NO: 133160 - DNA, 122 bp, Homo sapiens
tgacctcatgatctgcccgcctcggcctcccaaagtgctgggattaaaggcgtgagccaccgcacccggcctggacctgagattttatttaggtggctctttcagtggccaggctgagcaaa

SEQ ID NO: 133161 - DNA, 122 bp, Homo sapiens
gcgccgaccagtgataacaatcgaaatagcaggcgtggctgaccgtgtgccgaggctcggcgtgccgcactggccagccgtgatttcatctcagcctctagcatcctgctggggtaggttaa

SEQ ID NO: 133162 - DNA, 122 bp, Homo sapiens
tccgtcctcacggctggaggggctctcagaacatctggtgcacggctcccaactctcttccggccaaggatcccgtgttcctgaaatgtctttctaccaaacacagttgctgtgtaaccact

SEQ ID NO: 133163 - DNA, 122 bp, Homo sapiens
aatcactatgcaaattgtcccagttacaatcgaaaggttcgatctccaggagctgcctgacggaagttgatgtcagctatctatgcattagggttgcattaccgccttcgtcggcctcctcg

SEQ ID NO: 133164 - DNA, 122 bp, Homo sapiens
ccccgcggcttgcagcggagccgacagctcgtcttctcttctggaggtgcagctggtggtcggggggagagacttgctccaaacacggacatcccccagctctcccccctccctgttttccg

SEQ ID NO: 133165 - DNA, 122 bp, Homo sapiens
tctgtggcaccgatgagctcccaccttgggcagccctgacctccccccccccccccgccccgccccccggtactaggagtgaccatttaggccatagccacatttttaatgcttaacctgcc

SEQ ID NO: 133166 - DNA, 122 bp, Homo sapiens
cagaccttccctattttctctccctgcccaggggagggggatggtggacttattaggtaacggaactgttacagttaagaaaactgtagctcagagagggtaaactaccccgagtcatacag

SEQ ID NO: 133167 - DNA, 122 bp, Homo sapiens
taaacactcatcacctctgaaagtttcctcatgactctctgtaatcactcccttgccgatcgttcccaggcaaccactgatccactttctgtcacaataaatcagtcttcattttctagatt

SEQ ID NO: 133168 - DNA, 122 bp, Homo sapiens
ttattgcctcggggctgggaacctttgcgcccttcttcagctgtgctctcaggcagttaccggccagacccggaccggaaccttggcgcggtgacgctagtttccggcgggctacttagagc

SEQ ID NO: 133169 - DNA, 122 bp, Homo sapiens
ttggtttagaaacttctgaggaattttactctctgctcttcctcatctctatcccacctccgactggtcaaggacatttagctgtgccaacaaaggtcgttctcatctgcctgaggagtcca

SEQ ID NO: 133170 - DNA, 122 bp, Homo sapiens
aatcctcagcagcatttattgggcacctactgtgtgcagtccctgcccccagggagctcccggttgtgctggggatgcccagacatgagggaagacttagtcacatagggcagagagtcaga

SEQ ID NO: 133171 - DNA, 122 bp, Homo sapiens
gcctgttgggagccgcgtccgccggtgttggtgtctgcacttggaaggacgtagggaatgcgttgtccctgctaggtacttttcagtcgcagagttctcttcttcttctttctttcttcctt

SEQ ID NO: 133172 - DNA, 122 bp, Homo sapiens
attcgttctctctgttttaggtccataggctgaattaaagccacaaacccagagggaactcgaaatgcacatttaagcaaatgcaacaccaaaatggcccaaagcagagagaaattcctcca

SEQ ID NO: 133173 - DNA, 122 bp, Homo sapiens
ttctataaaagatgcaagataaacaaatgagctctccaccttctaaggctggctccctgacgattgtctgacctctcgccatttcaaagctacagaaacgtcggaagtttcctttctttttt

SEQ ID NO: 133174 - DNA, 122 bp, Homo sapiens
cccgtccccggactccggcgaagctggcccgcgccccagcccctgtcctgggactcctgccgagcccccgccccccacgcgccgcaaaccccgtacccgcgcgcaccaaaccccttgcccgt

SEQ ID NO: 133175 - DNA, 122 bp, Homo sapiens
acaaaatgcaaaggaaaccacctgtgagactaggataggaactgggcttttattctttctcgatgttctcagaacttgtagttcactaacagcaagtttccactgtgaagtggctattgtgt

SEQ ID NO: 133176 - DNA, 122 bp, Homo sapiens
taagtggcggcgctgcagtcactggcccaggaaagcccaggcgcctggcctgggaggttccgggaaggtggtttcacagtcaggccaacagggaacttgggacttttgagaggtggggggtt

SEQ ID NO: 133177 - DNA, 122 bp, Homo sapiens
gaaggatgggtcggggtgctatctagaaagctgcctggcaatggctgtgggatgcggaagcgagacatcaaacaagaagctgtcgcttaaataaagtctgaagaaagactagatatgtaaac

SEQ ID NO: 133178 - DNA, 122 bp, Homo sapiens
cctaggccagagggtggaggtgtcagggctgggcccatggatcgctgttggcccctaactcggcaccaaagtggctgaagcagacgtttgacgaggccgacaagaacggggatggcagcctg

SEQ ID NO: 133179 - DNA, 122 bp, Homo sapiens
ggcaatgaaagaggaggtgtcatggtttagcaattccgggtctgcacagagaaatgttcacgcctcccaccatgcttcagttcattgctcctggtggatttaaccagcactcacacagactt

SEQ ID NO: 133180 - DNA, 122 bp, Homo sapiens
tgaaatgagccagggcgaggagggagggtgaaggaacggagggcgggcggctccgaggagcgagagtcgggctgagggcaacctggcgccagggaaaattctggttattcaccacttctaca

SEQ ID NO: 133181 - DNA, 122 bp, Homo sapiens
aagaagcgaaaatgggcggttagcagcagggacccggagccggaggagccgagagcagcgcgtgcgccgagctctactgcctcgcgggaaggcggaagggtggggagggcggcgctcggggc

SEQ ID NO: 133182 - DNA, 122 bp, Homo sapiens
atactatgtccggggttggtgccacgttgcccctaggtgtccatcaacctgctcaggggccggcaacgccccctggtggctgccacaagaacagtttaattctaatttcacttcattacctt

SEQ ID NO: 133183 - DNA, 122 bp, Homo sapiens
gggctgcccgtccgtgtccctgtactggaccacgaaggagtcaaaggggccctgggctaccgtccaggacaggcgcagagagctggaggtctcctcagccacggtcagttcccccaggtggg

SEQ ID NO: 133184 - DNA, 122 bp, Homo sapiens
tccagaggtggacaactactacaaccctctgagtgtggctgcctggatatgggaatctggcgcggcagcccctcggggcgcgtccacgcagagtcctgggctatctgaagctccggtccctg

SEQ ID NO: 133185 - DNA, 122 bp, Homo sapiens
ccacctccctccatcctcagggctccacactgctgcctatccagagagcaggggaagatacggattcgtgtccctagtagggggctgtatgcaacccggctgcccagaccctccaactcgtt

SEQ ID NO: 133186 - DNA, 122 bp, Homo sapiens
ctggtgggggcaggtgggggaatttgcaggcctggctgtatcctctgagcacttttccttcggaggtgaaagcttctccttaggaggtcagctggagcttcctcctctactaatcagcctgg

SEQ ID NO: 133187 - DNA, 122 bp, Homo sapiens
agctgcacgtgtgtgctgcgtgcttcacatcctctattgagagttacagcaagtgttaaacgaggtgagttcacataacaggaattctggaactgcttgaaaactaggacgattgggcaata

SEQ ID NO: 133188 - DNA, 122 bp, Homo sapiens
ggaggttccggttcgaggctcgaggggcctgaaggtggctctccctccccgggcccaagacgatggtatggcctgctccgccaccatcacgtgggctcctcctctgtgacgtcggcgccttc

SEQ ID NO: 133189 - DNA, 122 bp, Homo sapiens
acttaacgtctctgggtcgcagtttcttcatctaaaaaatgggactagtagggtcgggcgcggtggctcatgcctgtaatcccagcactttgggaggccgaggcgggcggatcacgaggtca

SEQ ID NO: 133190 - DNA, 122 bp, Homo sapiens
cacccgcgggtagatgccctgcagcccgtccacagaggtgtgcaccttggagatgaacaccggctggtgggagccgtcctgcgagtgcgcggaggagccgccgccgccgcccccgccgccgc

SEQ ID NO: 133191 - DNA, 122 bp, Homo sapiens
cgtgcccgtctctccctgcgcaaaattccaagatgagcaaatactgggctcacggtggagcgccgcgggggcccccctgagccggggcgggtcgggggcgggaccagggtccggccggggcg

SEQ ID NO: 133192 - DNA, 122 bp, Homo sapiens
gccccgccccccgcgcctgtgggagggagctgggggcccgcaggtgcacccagccgtccgcgggccgtctccgggttgggtaccggtataatccgcttctagcttgtttggaggcgtgggct

SEQ ID NO: 133193 - DNA, 122 bp, Homo sapiens
gcacagaggagggaacgcttgtgtctaactgatgctcctaatgcggaagcccctgaaaggcggttgtggtgcaaaggaaaacccacaggccaaggaatgggaagaccaaggttgacacttgt

SEQ ID NO: 133194 - DNA, 122 bp, Homo sapiens
cagccctttggaaacaatgggttacatgaggctgaggctggccactccatccccagctgacgggagtccacattaaccatgttactgataatgatggagtcattgtgttacatggacaacag

SEQ ID NO: 133195 - DNA, 122 bp, Homo sapiens
gcgccgcacgccccggcacttgcctttgcgggtagagaccactggggtctgggaagattccggcttcaactctgggactgagaccgggcctgggcctggcagggcagggggtggaggaggcg

SEQ ID NO: 133196 - DNA, 122 bp, Homo sapiens
cactggttgttgtttagaggggggctcagaagaagtaggggttcactgagggtgatgggccgtcaggaggcaaggatgccttggttgttgcgttcccccagtcataaatgagtgcagcaagt

SEQ ID NO: 133197 - DNA, 122 bp, Homo sapiens
tagaatgaacagaaacttcccctctccgagcctgtggcctcatctgtaaaacagagatcgcgagatcccatgaataccgtggggattgaataagggattttttcgtttcaagcagcaggaac

SEQ ID NO: 133198 - DNA, 122 bp, Homo sapiens
aaaaattgttgagttaggttactctggtggagcaaatgcaagaagcaaggtgaggagaaacgaggtggaccgtactgtgttacagtgaatgtgaggaggtgcacagatgagtgaaccccaac

SEQ ID NO: 133199 - DNA, 122 bp, Homo sapiens
cccctcgggggaagagcggacaccccaaccggaacgcaggctgcaccgcgaggctccctgcgccccaccgagccggtcagggctgcagtctaccccgtatggccaggctgggaggatcctgg

SEQ ID NO: 133200 - DNA, 122 bp, Homo sapiens
tggtgaccaactgtcactcattgctgagcctctgctccccaggggagttgtgtctgtaatcgccctactattcagtggcgagaaataaagtttgcttagaaaagaaacatggtctccttctt

SEQ ID NO: 133201 - DNA, 122 bp, Homo sapiens
ggggcctatgacaaggttctccgtgctccccagaggagccaggcactgggccggggtaggcgatttgtagtgaagacctgcaccgcacccacgagggggcccagcactgacgcatcctcacc

SEQ ID NO: 133202 - DNA, 122 bp, Homo sapiens
attcaggcctctcttggctctgctcagtttcttatctttccctgccctccccacctcctccggctcctgtggctatggaatggcagctagagcaatcgaactgtctttcttcctactctaca

SEQ ID NO: 133203 - DNA, 122 bp, Homo sapiens
tggccttttggcggccctgtcagggtctggaaatctggctttgtctcagaaatctggctgcggaagattttcctttgtgtactgtcataaatgccttaaatgtattagggtgctttgcaaat

SEQ ID NO: 133204 - DNA, 122 bp, Homo sapiens
cacaggatccggccaacaggcgccgggacccttggagcccgccttgttagaaacttgctacgcgcgccgccgcacatgcgccctaggcccctccggacgcaggcgccaccgacctcgcttcc

SEQ ID NO: 133205 - DNA, 122 bp, Homo sapiens
ctgctgggctgggagggggcctggagtggctgtggttcagagcccaggctttggaacagacgtgcctaggtttgaatcctgattctgccacctgctggttggatcagttccctgcggttgct

SEQ ID NO: 133206 - DNA, 122 bp, Homo sapiens
cagacaaatccagtttgtcatcacggggtgtttcactgggggaactatggacagaagcatcgtcttggatggccacaaggcaggtagatctccatgctgttacatcccagactcaggaacta

SEQ ID NO: 133207 - DNA, 122 bp, Homo sapiens
tgtccttatgacgcctgcccgctgtggcactccggttacccggaggagagttgctactctcgagttcaccgaggcggaaagcccctctgactccaaagcagggctcagcgcgacgtcccaga

SEQ ID NO: 133208 - DNA, 122 bp, Homo sapiens
tcaggggtgggtaaatcttgccccttgttagcctgttgaaggaattccagccgtttcatgcgaagatggtgaatttctggtaggccttccgtagaaagaggtggacatccctgccacgaggc

SEQ ID NO: 133209 - DNA, 122 bp, Homo sapiens
ccgccgccgcagccgccgccagtccgcgcggcctcgggtggccggagctcagcctgcgcgcgccgcgccctgtgtctccgggtggggcagaagactcgccccttgaacctcccgcggggact

SEQ ID NO: 133210 - DNA, 122 bp, Homo sapiens
gctgctgcctctccagcagtcctgggaggaaaggtctcatggaattaaaggaaacagctacgttaatatctgccagcgcccgctcggagccgggcccagccccacgtgccaggacagcgggc

SEQ ID NO: 133211 - DNA, 122 bp, Homo sapiens
aaaatatgttaataatctagagccactgctgattgtctgctggaataacagaaataggttcgcctggcattcaatgtgcatggaaagcattttataactggtcacctactcttttcactggt

SEQ ID NO: 133212 - DNA, 122 bp, Homo sapiens
tcccggccgttctctgttcttgcacttggccgcgcacggacgcgcatctctcctcgctgccggtggccatgcagaaagctggcttagtctccatcctaggtccgcatctcagtttttttgtt

SEQ ID NO: 133213 - DNA, 122 bp, Homo sapiens
ggcgcctccccaaacacagcgccacgtgcaagagggttttgaccctctgcaacaggctgccggcaactggaggacagaggggcgtggagaagccaccactctcccgctgcggagcgaaggaa

SEQ ID NO: 133214 - DNA, 122 bp, Homo sapiens
cagattaccccagctccaggagttccagcacgtcaaacgggacagtcatcatgagggcggcggccatgagtgaacgtaagagtggacagacaccaaatgccttctcagggccacgggggcca

SEQ ID NO: 133215 - DNA, 122 bp, Homo sapiens
acaggcacgtgggtgacccgaggcttctctgaacactagaaagcgctgtgagtgagctcacgcccggcacagctcacttttcaatggtggaattgaaagttgtgctttttagaaaagtggcc

SEQ ID NO: 133216 - DNA, 122 bp, Homo sapiens
atctccagtttacttttgaatttgttcttttattgaagaggtttctatttttgactaagccgaaaaagaacaaaggagattttcaaaggcaccccaagccaccaaataaagcaaacagtaaa

SEQ ID NO: 133217 - DNA, 122 bp, Homo sapiens
ccgaggggcccagaatgccagacactagggccttcgccctcctcattggtgggtccataccgcggggcgggcctaggtactcattgggccgggaattatgtcagtcttgggaaatcaggtcc

SEQ ID NO: 133218 - DNA, 122 bp, Homo sapiens
caagcagggaagtatcttcaaggaagcagtaggagccagaatgagaagctataaaagcggcggaaccatccatcaaacagacaagcagctccaggagagctgcccagagggcaaattctcac

SEQ ID NO: 133219 - DNA, 122 bp, Homo sapiens
tatctgaaaattttccccctggcttactcgcttgcagctgcccactttgcagaaggatggcgctctgatctctacgctccctgttccttcagggactccatagtattttttttcacgcgtcg

SEQ ID NO: 133220 - DNA, 122 bp, Homo sapiens
ttttcctacagatatttggatggatttagccttgtaagagtaggtcacacaatcttcagccgcacagtagccacagatacataacagaacagtatcatgtggggaaagaaccatcttctgtt

SEQ ID NO: 133221 - DNA, 122 bp, Homo sapiens
gacggcggcctgagagggcagcagattcgcgctaacagagcaggtcaagcagggcctcctcgccttgctcttccgcttcagcatatacgtctccaagctcaggaaatgcagttacatcaaat

SEQ ID NO: 133222 - DNA, 122 bp, Homo sapiens
ccgcggggatgcggggagtggcggacggaggggcagcggcgcacctggcggggccagggccgggacgtgcagggagcggagcaggtgtttgctgaacagactagcgggccgcggccggggtt

SEQ ID NO: 133223 - DNA, 122 bp, Homo sapiens
gcctgaattcagcataatatattaataaatatattgataattttcaacttctttgtgcttcgtggggtagctacagaagtgattattatttttggtcatagttgtgatgactgcaatagcaa

SEQ ID NO: 133224 - DNA, 122 bp, Homo sapiens
accccttctcgaagatcaaccgcgacctgggagccccacttcttaccatagcgaggccggcgatgccgcagccacatcacccttccggggctcaggcggaagaggctgcatgtcccgtctgc

SEQ ID NO: 133225 - DNA, 122 bp, Homo sapiens
gatcggtacgttatttccggggctgggttaacgcagcggttccgagctgcgactgcgcagcgtggcccagcgcggtcaaattataatacataaaagttgtcagggcggagagcaagacatta

SEQ ID NO: 133226 - DNA, 122 bp, Homo sapiens
aactggggggtgttgaataaagctgaagatttggtgccctcgcctcagctccagactctacgggaaatgtttggtgcagcatccagaatggacaccactgctgtctgcaccgggggaggtcg

SEQ ID NO: 133227 - DNA, 122 bp, Homo sapiens
ccagctgccagggtggcctagagccactcgcagatggggtccccaaaagggatgggcaggcgcaagcccagggatgggatggagatgggtgctctttggcaaatccactcccacaagcccgc

SEQ ID NO: 133228 - DNA, 122 bp, Homo sapiens
gagatgtatacccatgtgcttgaaccctttgaaatataggcaaaatggagagacagacggcgatcaaaataccagctttattccggataaaagctggattggggatgtggcttagatatgtg

SEQ ID NO: 133229 - DNA, 122 bp, Homo sapiens
tattgacatttgagtgaattctctaaaaccatcctatttctaacatttttgtagtcctttcggtattatattaatgtatcttaaagattaaaaactcaaatcctgatttttctagatttcaa

SEQ ID NO: 133230 - DNA, 122 bp, Homo sapiens
gcaccgtgcataacccacaaaccgctctgcggcttccagggagcatgcaaagaaccaagccgcacggccggggccccgagtcctgccgaccccacgcctcacctccctgctgcgtcttgacc

SEQ ID NO: 133231 - DNA, 122 bp, Homo sapiens
cactgccggcacatcccccacattctcctcacactctgccagctcccctctggccagcgccggcaccttgcagccgcccaacacggcccctcctgggccacctgtgccccctgacctacgcc

SEQ ID NO: 133232 - DNA, 122 bp, Homo sapiens
ctccccagccattctcaggccagaaccccctttttaacaagacatggccttggtgtgtcgcggactctgccggggacagtctggcagaactgggctccttgcgctccccagtataccggcta

SEQ ID NO: 133233 - DNA, 122 bp, Homo sapiens
cttctttttttttttttccccccttctgcaataagtctgtgatcagccacgggacagaggcgccagcagcctgcctgtgacaggcatcaggttagctggctcccactcgggtggcgcgccca

SEQ ID NO: 133234 - DNA, 122 bp, Homo sapiens
aggagtcggtggggagctttgggtttgagctccaggagctccggaagtggcgatgagagtcgggcagtcagacttccagtgagggcccgcacaggcggggcatggcttaggaggaatcccag

SEQ ID NO: 133235 - DNA, 122 bp, Homo sapiens
ctggggagttgagtcgctcaatgcaaattttctttcaagtgcaaaacagcttaatgggctcggctagcctttggtggtgctgcagttagaggctagtgaagcggagagcagctgttgcagta

SEQ ID NO: 133236 - DNA, 122 bp, Homo sapiens
tgagggctccccagccatgtggaactgtgagtcaattaaacctcttttctttataaattacgcagtctcaggtatttcttcatagcgcgaggacagactaatacactggctcatacaatttc

SEQ ID NO: 133237 - DNA, 122 bp, Homo sapiens
accggcgcatgccaggcaccgagtctgcaaaaggggccctgagccagcggccagacacctcgcagactgcgggaagcaatcgtggcggccgcctccccggggctccacggcggacccgccgc

SEQ ID NO: 133238 - DNA, 122 bp, Homo sapiens
ggtttgtaattcttacttacatgatggccacatgatgtcgctctttaccgcaaattctttcgtaatcagcaaaaggaagtcattccttttcgcactggaaagacgctccactctctttcact

SEQ ID NO: 133239 - DNA, 122 bp, Homo sapiens
gcgggagtggctgcttcctgggaggtggtgctcgcaaacctggcagctgactgggtggggcgtgccttccctggcagtcgcggaggggaaggctgagggacccggtccccgccccgcgtgct

SEQ ID NO: 133240 - DNA, 122 bp, Homo sapiens
cacagccggggacagtcttgggaggtgactgtggtcaccaccactactgggctgcagcatcgctgaatgcagcccctgccacaactccacaggcattggctgtaatgatgggcgggggtgct

SEQ ID NO: 133241 - DNA, 122 bp, Homo sapiens
ctaatctccgccgtgaccagggccttccttgtatctctgctgcaggcgccatgtcagaaccggctggggatgtccgtcagaacccatgcggcagcaaggcctgccgccgcctcttcggccca

SEQ ID NO: 133242 - DNA, 122 bp, Homo sapiens
tccaactgttcacctcttgaaaccaagcactttttaccacattgttgcttcatttatctccgaggaaagacacggacccacccatttgctattggagtgacgcagtgtgctctgtattgctg

SEQ ID NO: 133243 - DNA, 122 bp, Homo sapiens
tgcttgagagtaatctgtatctcagctctatttactttgcaaatagaataaaagtcttaccgcttgtgcttaagagagatggggctgggggagggaaaggggctgggaaagtagaggtacag

SEQ ID NO: 133244 - DNA, 122 bp, Homo sapiens
gtctcccgcccgcgcgcctccctggcgcagacctcttttaactttttggcgtggagtgcgcgtcctgacgtgccccctgagctacagcttactgagctttactggcttcgccggacagccgt

SEQ ID NO: 133245 - DNA, 122 bp, Homo sapiens
agtcttggggaagtgtagtagctccatcaaggcagctctctgcaccggcttccacctagacgtgtgcaagactgtgcagtggttccggaacatgatgggcaatgcctgggcccttgtggccc

SEQ ID NO: 133246 - DNA, 122 bp, Homo sapiens
gtgtgtgtgcacaagcacagacacgtgcacgtgtggagcatcccatctctgcatggggcacgcttgtgagtgtgcacccacatacacagagccgggtggtccactgaaagggcctggcagta

SEQ ID NO: 133247 - DNA, 122 bp, Homo sapiens
ctcccagcccttaggaactcatgatttaactggctcccgtaaggggctggaggaacagtccgtggaatgtaatacctggccttgtgaagatagggtagcagtacaggagtggatgagagtct

SEQ ID NO: 133248 - DNA, 122 bp, Homo sapiens
tcccttcaaatccatacacagctttaatgcacttagaacatacctgtgcctggagtatatcgtgcatccctgtttatggagcctagagtcttatttggtgaacaaaatgtaagcaagaatgg

SEQ ID NO: 133249 - DNA, 122 bp, Homo sapiens
acaggcacgtggctttccctcttgggcctagattggggtcctccctgtaagggataaaggcggaactgggccacctactgtaccgttcagtctgcctcacagtatgtcccccctcagtgctt

SEQ ID NO: 133250 - DNA, 122 bp, Homo sapiens
tgccccgacccggagaggggcagagctgcggaggccctggagctgcgcctttgcctgccccgcccactcctcacggcgggggaagcctggaaggggcgggcgaggccaccctcggctcccca

SEQ ID NO: 133251 - DNA, 122 bp, Homo sapiens
gggccagtgacggacacagcctggggtgcaagggagtcaccgtgtccagctgcatcgggacgttttccttacacacgtgtctcaggacggagggtgactctggtgcccacctgccctctaag

SEQ ID NO: 133252 - DNA, 122 bp, Homo sapiens
aagctgaccatctaccagacaagcacagaggactcagaggaagccgatcctgccgacacccggacctcagacttccagcctccagaacgtgagagtcaattcttgtgatttaagccacccag

SEQ ID NO: 133253 - DNA, 122 bp, Homo sapiens
gatcctcccgtctcggcctctcaaagtactgggattataggcatgagcactgcacctagccggaattaaaaattcaggttctcagttgcattagtcatatttcaatggccacttatagttag

SEQ ID NO: 133254 - DNA, 122 bp, Homo sapiens
gggctaaattcctgattcttctaataggaaagatccaaaacttcccacggagtttcccctcgtctgcactgagtcacatacctgtgggcttcgagctaacagaccttttttaatcaaagaga

SEQ ID NO: 133255 - DNA, 122 bp, Homo sapiens
tactcgggaggctgaggtaggagactcgcttgaactcgggaggcagcgtttgcagtgagccgagatagcgccactgctcttcagcctggcgacagagcaagactctgtctcaaaaaaaaaaa

SEQ ID NO: 133256 - DNA, 122 bp, Homo sapiens
gcaccaggaatgctccaaacacaaacagccctagtgagtcacaaggatagatgaatgctacggtgattcttacatttgcagtcaggaccacagagtgctggagacaagaggcagcttagaaa

SEQ ID NO: 133257 - DNA, 122 bp, Homo sapiens
aggagcggaagacaagagctgggaaccgatgcgtgccttccctctttaaaacaagagtttcgaatccccatgagggttccctagcgtggtctcagagcccaggatctggagggggacgtctg

SEQ ID NO: 133258 - DNA, 122 bp, Homo sapiens
aaaaagcacaaaaatgcaaaaaacacggcagtaaatatactgtgaaaataacacggcttacggtatgagagctgaaacaaggcagcagagcatctccttgatcaacctcacctgggtactgt

SEQ ID NO: 133259 - DNA, 122 bp, Homo sapiens
taataattcaacacagtcgtccattaccaatctgtgacactgtgtggattagatgtatatcgcatgctttacacagtagtgtccccttatccactgggaatacattccaagacccccagtgg

SEQ ID NO: 133260 - DNA, 122 bp, Homo sapiens
caaggattttgcaaacctgctttctgacgcagctggtaaacttgccccggggcgaactgtcggaaggaggtgcggtcacctggagtttcccaatagatacttcgctgtctggtgaggaaatc

SEQ ID NO: 133261 - DNA, 122 bp, Homo sapiens
cccccccccccagcccggcccccggccgccgcgcattggccgcgcgcgccgccaatcacgcgcatgtaaacaccttggcccacagccattcctataaaaccaattacggacctaggggctcc

SEQ ID NO: 133262 - DNA, 122 bp, Homo sapiens
atcagggcctagtacatagtaggtcctcaaaaaaatctgctattgaaataattaatctatcgaaatgaacaggagggctgggctaaagaaaaatttcaatgtgaaatgctggtcagaaaaaa

SEQ ID NO: 133263 - DNA, 122 bp, Homo sapiens
ccctgctgcccagttaggggcaagagaggccaaaggaactgaagtgagacaaagtataaccgacttgggtggagtcaagtcagctccaggagccagcaactgaagacaactcaccttagctc

SEQ ID NO: 133264 - DNA, 122 bp, Homo sapiens
ccgccactcaccgaaccggaaccggctgccatgcgaaggggtttccggccgggcgcggaacgcaaaacccgggaaccgccgcgaaccggaaccgccttcacagcaccggaagagtcgctagg

SEQ ID NO: 133265 - DNA, 122 bp, Homo sapiens
caaaatacacagaacggctggtatccacaggaggccccatcgcacggcagaactggtgaccggacacaaaagctgctgccaagcgtcagtcatacagagctgtcacgcagtgtttgcggaac

SEQ ID NO: 133266 - DNA, 122 bp, Homo sapiens
aaagctcctccttgtagcttactggtgttggccgccgggtcggagcctgcgaacactgaccggccggctgtggccacgcgtctgcgcatgcgcgcttctggacgacccggcagccgctcctc

SEQ ID NO: 133267 - DNA, 122 bp, Homo sapiens
gtattctaagcactgaagagcctcttaaggggagctgtccaaatcgcccaggagtggtggcgagacacaggaggccatgccagcgatgctgttattaatattgcagacttggtcatctctcc

SEQ ID NO: 133268 - DNA, 122 bp, Homo sapiens
gtcatctccttcacctaagaggtaagaaccggctgtaagtcatggggtcactaaaccggccgcagttacagtaagcagaagaggtcacggctcaggccttctcagactttccctgggacaca

SEQ ID NO: 133269 - DNA, 122 bp, Homo sapiens
attaaagtctattttctgaatgcaagtgattgcccatcctggaatagctctccttgtctgcggccttttctgcagagtagctgataaggggctggctgggctgacaacatgtatgtgtacaa

SEQ ID NO: 133270 - DNA, 122 bp, Homo sapiens
tcggctgccgggacaacccggtgcgtgtcaacgcccgtgtcctggggccaactcgcctctcgtgtgtgaaatcagagttttcataggctaacgatttgtaacttcataaaagatccccctct

SEQ ID NO: 133271 - DNA, 122 bp, Homo sapiens
cagagctggggagagacaggcgcacaggaactacaggtgacatccgctggaggagcgtggcgcagggtgcgcgctggtgccagcagagccggagctcgtggtgctctgggcacaacctcgcc

SEQ ID NO: 133272 - DNA, 122 bp, Homo sapiens
ggaggctgaagcaggaggatcccttgagaccaggaggtggaggttgcaacaagccatgatcgttccatatattccaacctgggcaacagagtgagacactgtctctaaatatatatctatat

SEQ ID NO: 133273 - DNA, 122 bp, Homo sapiens
tgctcaaggccacgcagcgggcaggtgagagcagggtccacaccctgcgtgggtctgggccgcacactagccccgcactcccgtctcccaggagacagatccggaccaccgtggtggtgtct

SEQ ID NO: 133274 - DNA, 122 bp, Homo sapiens
tgggcaacatagggaggccccatctctacaaaaaattaaaatattagctggttgtggtggcgcgggtctgtagtcccgcctactcgtcctggccgcagagtcagcgtctccggagcgcctcc

SEQ ID NO: 133275 - DNA, 122 bp, Homo sapiens
gtgctccgggacgggggccaccccctcccgcccctgcccccgcccctttggcccgccccccgaattccattgggtgtagtccaacaggccaccctcgagccactccccttgtccaatgtgag

SEQ ID NO: 133276 - DNA, 122 bp, Homo sapiens
cccggccagccgcgggccgggccccttggttttcaggacttattcttgccggggttggctcgcacgccagcatcgcgccttcggtgcgtcttttatctccatctcaaatatgggatcttctt

SEQ ID NO: 133277 - DNA, 122 bp, Homo sapiens
tgcagcaacagcgtctgcccagttccagcagggggcagcagggcccgggtcagagccggccgggggcctgcctggggcagctcacagcctgcccaggaaccagcccagctcagcccgcttgg

SEQ ID NO: 133278 - DNA, 122 bp, Homo sapiens
ttattcttatttgcagcataaggcataacatgctccgaaatatacacatcattgtggccccgactgtccctggaacagtacgatgccgttgacctcaaggacgaccgaagatagctgtcatt

SEQ ID NO: 133279 - DNA, 122 bp, Homo sapiens
ccagccccggaataaaaccattttcctgcaaatgggttatctgaagcggggcgggggatccgaccaccgaacacccctggaaacgagcctgcccgtccccggccgggcgtggccacggcagg

SEQ ID NO: 133280 - DNA, 122 bp, Homo sapiens
agatatggcctttggactcaacaggtgctactggcattgggcagtggggctttctacccccggttcttcccactccaatccaggagactactggccttcaaatatggatttcatggtacagc

SEQ ID NO: 133281 - DNA, 122 bp, Homo sapiens
caattagcaagaccaagacattctgtcccgaaggttaagccattggacaaatcgaatcaccgtcaggagcctctttgttgagataccccaaagattgactgcataaggacctgatattcaaa

SEQ ID NO: 133282 - DNA, 122 bp, Homo sapiens
cagggggctgtgccccgctcatgttcagagtttgctcagcataccacacaggaaagaggccggcttgccaggtcctgcggagcgcctttccaagcctgtgaaaggcacgaatcatccagcag

SEQ ID NO: 133283 - DNA, 122 bp, Homo sapiens
gcaggggtctctacccggtgccttcctcccggcacgctagcctcctcgccgaaatttcgtcgtcccggagtcggtaaccgagtcccaggctttactgccactccactccctgctgggttatt

SEQ ID NO: 133284 - DNA, 122 bp, Homo sapiens
aagcaacatagagctagctaagaagtggctgaagtggccgggtgcggtggctgaagcggccgaatgtggtggctcacgcctgtaatcccagcactttgggaggccgaggctggtggatcacg

SEQ ID NO: 133285 - DNA, 122 bp, Homo sapiens
ataacaccagtgaggtcctttgccacatttggtatctatttttagcactgaggcagtatgcgcccactatgtgcccaagcccgtgatgctgctgctgcccccttcccagagccagagcccag

SEQ ID NO: 133286 - DNA, 122 bp, Homo sapiens
ttcctggactaagcaggcaccagcaggatgacttgtagacaacagccaaagtttatttaacgtgggaatgcttacaataaataaagcagaggggtaaagagaaacagaacagtaccttgagg

SEQ ID NO: 133287 - DNA, 122 bp, Homo sapiens
ccgactggaatcaagatctcctctgtgggcaccagctggggacagtcctgggggaacaaacgaagaggctccatctgtcccctgttcatgctgtcctatgtgcctgggacaggcaggcccct

SEQ ID NO: 133288 - DNA, 122 bp, Homo sapiens
ggcgggcgagggagggacgcgagccggggcaagcgggctgcgccaccgccggcgccgcgccgactttgccctttaaatcggtctccaagccgattacagctgagctcccacgtgacgtttta

SEQ ID NO: 133289 - DNA, 122 bp, Homo sapiens
ccccagcctagagcctggtacagagaagatgcctaacaaaatgctgaacaaatttatgcacgagtggactataatttatgccagactgtgaacaggtgctttaatcagatacaaagtgctct

SEQ ID NO: 133290 - DNA, 122 bp, Homo sapiens
aggggaagaaggcaggggagggcgggaggccattcgcaggtcactcgggttagatccgcgcgaggcactaggcgaccagccacccagccccgcgaccaactagcgccgcctctcgccgccca

SEQ ID NO: 133291 - DNA, 122 bp, Homo sapiens
ttcactagaacaacgacgttctaaaaacaaaggcgcagcaagcatccctttcttcgctgccgcgggctgaaccacggacgctcgcgggtcgcccagccccgacggcccgcagggggcgcgcg

SEQ ID NO: 133292 - DNA, 122 bp, Homo sapiens
taacaacagatagagcctgttgaaccggccagttcctggatttgattttgagtcctaacacgttgggtgtggattctacctgacacaccgggggtagttggccttcgcctcggttgtccgcc

SEQ ID NO: 133293 - DNA, 122 bp, Homo sapiens
gcatgagataccctggctggaaggccctgaaaggtagtcgtccattcaacacgtgcttagcgcgctgctgatctgtgccaggcactgggccagggccccgacacgcgtcagggtagaagcaa

SEQ ID NO: 133294 - DNA, 122 bp, Homo sapiens
agaacctgcaggaggcggaggagtggtacaagtccaaggtgcaagagccgggagggcctgcgaggcgggacgctggggtggtgtcgcgcgtcccagccgactaaagcctgggttacccccac

SEQ ID NO: 133295 - DNA, 122 bp, Homo sapiens
caaaaataaaagtaattgtttggcaatctaaatttaaaacctgttagaactcaggacaggcgcttcaatgcgctttttaacaatatttaaggctgttttgatgagtgcgttgtgagaatcat

SEQ ID NO: 133296 - DNA, 122 bp, Homo sapiens
ctgaaactattcccaatgtaatacatgcagaatgtacaacattttaaatgtacaaaagagcgcagggaaaataaataccttagtgcaaattataaacaatttttgcttgtaaaatacaaatt

SEQ ID NO: 133297 - DNA, 122 bp, Homo sapiens
cacctcccgggttcaagtgattctcctgcctcaagcctccggaggagctgggattacaggcgcctgccaccatgcccggctaattggtctatttttagtagagatggggtttcatcatgttg

SEQ ID NO: 133298 - DNA, 122 bp, Homo sapiens
gttcccagattagcccctggcacagtcagcagggtctccggtgccaggagcaggcaggggcggggcagtgttgggggcatcagatagacagcctgagtggggcacccggagccagggctggc

SEQ ID NO: 133299 - DNA, 122 bp, Homo sapiens
ccttctaggacgttagtcgtgccctgccctgggcttcctctgaaccctgtacacacccaacgttgtacatccttctctgtgtgctgtgattctgttgccatgatctggccccactccaagaa

SEQ ID NO: 133300 - DNA, 122 bp, Homo sapiens
agaaagtcttcatttaaaacattcctcccatccctgctgaatcactggatgtggctggaccggctgtccagagccttgtctcctctcctccactccctgttgagcatgcaagtcaaaggtca

SEQ ID NO: 133301 - DNA, 122 bp, Homo sapiens
cagagaggcagagtgcgggctgacggtgtgtggggcagcggggaggtctggaggcggccccggcccacagcgggcttgatggccgtgctgaggactttccaagagcagtggggctggctgga

SEQ ID NO: 133302 - DNA, 122 bp, Homo sapiens
acccaggatggaggggccctgagtctctcccggccccttggcgccccgctctctattccacggcctgctggccttttgtgtgttgcccacttaggatcaagggccccaggccagatcctagg

SEQ ID NO: 133303 - DNA, 122 bp, Homo sapiens
tagactgaggaacttgtaaatatcttctgctttcttggtgaacaaggacagaggcaattgcgtgtatattgtgactgtagtttgtgaagaaaatgcaaccatttgcttcgacagctcctcaa

SEQ ID NO: 133304 - DNA, 122 bp, Homo sapiens
tgaagaggaagtgagcgtgagaaccgggcctttggcggatccaggtgcctgcgggcagcccgggggcttgtttgttgggtgcctggccagcgggccggtccagagcaggaatagatgtctca

SEQ ID NO: 133305 - DNA, 122 bp, Homo sapiens
caacaaggcaaaaccccgtctttaataaaaacacaaaagttagctgggcgtggtggtgcacgcctgtgatcccagctacttgggaggctgaggcaagagaattgcttgaatccaggaggtgg

SEQ ID NO: 133306 - DNA, 122 bp, Homo sapiens
gagaccgccgcggggccggggatcctagggacggttcatggtctttcggggatagtgccccgcggcctgggccttttctcattaggtctcatttctgtctctggaaaagaaaatgtagaaga

SEQ ID NO: 133307 - DNA, 122 bp, Homo sapiens
cccgcgcgcacagccactcgtgcctgtcctggtacatggtgtcacggacgtgcacaacatcgtcacacttcagggacatggtgcaggcgtccagctggctggagatgttcaggttcagccgg

SEQ ID NO: 133308 - DNA, 122 bp, Homo sapiens
gaggtgctcagcggcgccaggaacagtagctgctcgtacttggcgcgaatccacgactcgcgctcctccctgcaagaccagggatcaacggaaaaggctctagggacccccagccaggactt

SEQ ID NO: 133309 - DNA, 122 bp, Homo sapiens
cgacacctccaaccatctgtgctatctatctgccttctgatttaccagatctgtacaagccgcatacaaattgtacttgatactaaagaaaagacagtcgggtccagtccagttcggctgtg

SEQ ID NO: 133310 - DNA, 122 bp, Homo sapiens
agagcggtgggcggggcctgcgaagaaggtgtgccgggggctggttggaggcgcgggcggcggggccaatgtggcggtgacgtcacggggcgggcggacgctggcgcgggtaggtaagagca

SEQ ID NO: 133311 - DNA, 122 bp, Homo sapiens
gtcggacttccgaggcggcggcttctgcctctcctgccgccgccgccgccgccggagctgcggctgccgcggaagttaattgcaacttgacttcaagttgtcctctttccccatacgaagtg

SEQ ID NO: 133312 - DNA, 122 bp, Homo sapiens
aaaaggggggcttcggaacccaggacgtgggttccacatcctgcgggggcagggaggccgcgcgggaggccgccagacgcagtaaataattcacacagatgaactggagataagggcggctt

SEQ ID NO: 133313 - DNA, 122 bp, Homo sapiens
cacccttcaagctgcccagccggccctctgggcagactgtcatcacatgcatgcataaaccggcatgtgtgccaatgcacacgagtgtgccactcaccaccattccttggccagccttttgc

SEQ ID NO: 133314 - DNA, 122 bp, Homo sapiens
cgctcccattggctgccagacagccccaaccccaacccgcgctcgccctaactttgggtccgcccggccctcatatttgcatacggggccttctaggccttcgattggcccctgcagtagct

SEQ ID NO: 133315 - DNA, 122 bp, Homo sapiens
ctaaaaagttattgaatacatttgtttctttaattgtgaaagtccagtctttttgacatgcgtacattttctacagtagcaaccacagtgcacacacacagtcttccagcctgctctgctcg

SEQ ID NO: 133316 - DNA, 122 bp, Homo sapiens
gccaggcggggctggctgggcttgcgggcagagagctctgagcgtggggaggctagagcccgtactccgcaagcagagggttgggaggatcagccgtggccgagggacctgcccccgccccc

SEQ ID NO: 133317 - DNA, 122 bp, Homo sapiens
taatgggagagaagggtgcagtaagagtttacaagtcctgtgtgggctaagagctgcggccgccgctgcggctgcgaccctggctggcaggagggacgctcaggaggagccccgcagggacg

SEQ ID NO: 133318 - DNA, 122 bp, Homo sapiens
tggctggcctggcagtgaaactatggggatttcttcaggaccttcagcctaggtcctccacgacgacctcgtggtcctcagtcagctctgtgctctcgcttcccactccccaggctccagct

SEQ ID NO: 133319 - DNA, 122 bp, Homo sapiens
tcctacagtcatattttggggtgacgtattctggtctcctatagtcatatttaggggtggcgtattctggtctcctacagtcatactttggggtgatgtgtcctgagccccattgtttccta

SEQ ID NO: 133320 - DNA, 122 bp, Homo sapiens
gcgccgggggagttggagttccagagcgttgtgttttaaatctctgaagggaccctgctccgggccgggcgttcacgcgggagtcggacggagcctcctgccgcctcggaagctctgcgccg

SEQ ID NO: 133321 - DNA, 122 bp, Homo sapiens
tcaccctatatacaaaaattaactcacaatggatcatagaccttcatctacaactataaacgcttagaagaaaacgtaggtgtatattcatgaccttgagtcaggcaaagatttcttagata

SEQ ID NO: 133322 - DNA, 122 bp, Homo sapiens
ctcaggaccttgtggtgcctacttccgctgccagaatggcaggtgcatcccctcaagcctcgtgtgtgacccctggggcatggacaactgtggcgatggcagtgaccagggctcctggtcac

SEQ ID NO: 133323 - DNA, 122 bp, Homo sapiens
ccgagagcgctgcgtgctgaccccacacttcactggggagccctcttgggtagcgcgagacgcctacccgcccagggccaggtcagtctcccaggctccgtgtcttcacggttaccagggca

SEQ ID NO: 133324 - DNA, 122 bp, Homo sapiens
cgcgaccgccttgacgggcttgggcgctgtgggcggcggcggcggcttgggagacacgggcggtggcgtgccgtgggcgcgcttcacctctgcggggaggaccacgctggcaccgagcgggc

SEQ ID NO: 133325 - DNA, 122 bp, Homo sapiens
aagtttggtccaagttgccaccaacccagggcagcagcatggggcctccaggagagtctgcggaggtggccacgccacgaccctgcctggaccccagactccagccgggagctgtgacctcg

SEQ ID NO: 133326 - DNA, 122 bp, Homo sapiens
tgcctggggtggcctaggaaagccgcctccaagctaggcctcccaggtccgaccggaccccgcagaacctagcacgtgtgggcccagcacctgcccaggtgtgtgacttcagtttcatggtc

SEQ ID NO: 133327 - DNA, 122 bp, Homo sapiens
tgttgttgttgagaaacagtcttgctttgtggcctaggctggagtgtaatggtgcgatctcggctcactgcaacctccgcctcctgggttccagtgattctcctgcctaagcctcccaagta

SEQ ID NO: 133328 - DNA, 122 bp, Homo sapiens
acacggtctctcccgcccctccggcggccttgtagaagatagccactagagggcgcctttcgcccagccatggctccaagcgctaaacctgcttcataggagagcacattaagctgagaagg

SEQ ID NO: 133329 - DNA, 122 bp, Homo sapiens
aaggtcggaggattgcttgagcccaggagtttgagacaagccgggtcaacataatgagatcgcatctctacaaaaaattgaaaaatgagccaggtgtggcagtgcgtgcctgtagtcctggc

SEQ ID NO: 133330 - DNA, 122 bp, Homo sapiens
cacaaatggctggaggtgctcggggttagctcccgagggcggcaagcgccgaccggtcctcgctcgctaggcaggcgcctccggattccgttcatgcctctcggagctacagggcttggtgc

SEQ ID NO: 133331 - DNA, 122 bp, Homo sapiens
cacgcggcgccagccccagcgcgccagggccgcctttggagagcagcagccctggctctgcgctaccctatggccgtgggcctcaacaagggccaaaaggtgaccaagaacgtgagcgagcc

SEQ ID NO: 133332 - DNA, 122 bp, Homo sapiens
gaaaggtagtatggagtgggagagcattggattctaggagctcagttttggtaatggtgacgtggacagctgctggacatggctcccttaaagagcttccattaatgaaccatgtaggcgtt

SEQ ID NO: 133333 - DNA, 122 bp, Homo sapiens
gctgtaacacagaggccaagcgtttaaaaagcgtttaccttaggtaagttttggtcatttcgtttctttaagagaaaaaaccttagagctgctttaaaggcgagtttttcgcgattactgga

SEQ ID NO: 133334 - DNA, 122 bp, Homo sapiens
gtgcttccctccagacccttctccctctcgtgcgcgcggaggtttcggtttcctcttttacgtaggccgccccactcgcttgaaaacaaagtccgcgatcctctagcccgcaagagagctcc

SEQ ID NO: 133335 - DNA, 122 bp, Homo sapiens
caaagtgtgcagtttcatgacctttttccttttgtgattggtgtggagacaacattgtggcgcacatgcttgaacctggtcctgtttccccagaggaccccttaccttgtttttgttgttca

SEQ ID NO: 133336 - DNA, 122 bp, Homo sapiens
aaaagggatcaaattataagtgatatacgtctggaaattcagtaaaaatagtaggttgtgcgtagtgtttttgccatagtagtgaaggcagggatttcttttgtttggtgttcttggggaca

SEQ ID NO: 133337 - DNA, 122 bp, Homo sapiens
aagccacgccttcgccagttttagccccgccttcttctccaagtttacccaattgaatgtcgtcttgattgagctctgtggcagaggaaaccaaccgtaaaccgaaccaagagcgaagcgca

SEQ ID NO: 133338 - DNA, 122 bp, Homo sapiens
cgaagcatgcctgagaaagaaaagcatgcaggtcctcacggcctcctttgtctaaaccggcgcaagattcgcctgcccacccgcggcgggaaaatcgctactgggatttacagaactcaggt

SEQ ID NO: 133339 - DNA, 122 bp, Homo sapiens
ttgccggcggcgacagaggcagcgctgctggtgcaagaggccagcatgcgggtaggtgagcggtcgcccccactgctgctgccggccaccatggagaactggtaggagccagaggatgtccc

SEQ ID NO: 133340 - DNA, 122 bp, Homo sapiens
gctctcccagcatcctttgccttccggtatgtggccccgtctggctagtcccgcctagcgcgcccatttcgagcccaagtttccagctcgggtttccaggctcagaattttccaggagtagg

SEQ ID NO: 133341 - DNA, 122 bp, Homo sapiens
taagaatgaaatgcaagcaatgtgtgtgaaaatgctcaaattacaagctcctctatataccgtcattccttagatggcagttctttatccaaacctgtaggttccctcgacttcatttgcta

SEQ ID NO: 133342 - DNA, 122 bp, Homo sapiens
aaagttcacagagtgccttgggaatgcgtttcttctcacactcagcctgattttctcaggcgaaattctaatagagaattctcaaggataagttctgatcaataacattctccatcttgtta

SEQ ID NO: 133343 - DNA, 122 bp, Homo sapiens
gatgagtgcctctctcctcactttgcactccttcctctatgtcatgccaaggcacttcagcggctcagcctccaatgatggaggtgactctggagctcaggcttcaatcaaccaacgaagaa

SEQ ID NO: 133344 - DNA, 122 bp, Homo sapiens
attttcacacttcattagcatatgcatgatttaatgagggaacatgctggggggttggcacgggtgagggcagctctttctacccacagactagaaactggggcagtagcattgggagcgct

SEQ ID NO: 133345 - DNA, 122 bp, Homo sapiens
cctggacgcttccgaagccccgcttccaggatcgccctgtcctggccccgccccaggacccgccaacctgaactctccccaggacctgccccaacgacgcttatcctggccctaccccaggc

SEQ ID NO: 133346 - DNA, 122 bp, Homo sapiens
gcttagaaatgtaaagaggcttgggggaagggtggacagcacggagacgtttgaggggagcgccaagaagctttatggggcagtttgtctttaagacgcagtctcactctgtcacccaggct

SEQ ID NO: 133347 - DNA, 122 bp, Homo sapiens
tccaggccaaaggttagcaggttgaccagcaagagctgggctttccggtgccgcagcaggcggctcacccacagcctctggaccatagtgggccaggcgggtagggctcagggggccgttca

SEQ ID NO: 133348 - DNA, 122 bp, Homo sapiens
caaacccaaaattaacctaattataaaatttgagcaatggggaaaactgagaaccaaccccgtttatattgcagatttctccaaagtaaggagaacttactgaaagctgtttaagaagttgt

SEQ ID NO: 133349 - DNA, 122 bp, Homo sapiens
tgcggtgccgaaggaaagaggaaaggttcccatgcggggccacagactgagtttcctagacgtggatctaaagcactgccgagtcccaaagcatcctgtgaaccccgaaatggtgcgccaag

SEQ ID NO: 133350 - DNA, 122 bp, Homo sapiens
ccagaggcttccgagaagctggcgttgccttttgcgcacagagcaggccagcttcgggggcgctgggcgtctcggcgagaggtcggcacctgccgggttgggagacgccccttccccacccc

SEQ ID NO: 133351 - DNA, 122 bp, Homo sapiens
catttccgcttactttgtactttccttgaacttggagcaggacatcactcttgcatcccacgcttctcagctcaggctcggtatccaaaaaaagctctgtgcctctggggacctggggcacc

SEQ ID NO: 133352 - DNA, 122 bp, Homo sapiens
tataattgtatataaggctaccggtgtggtctgacagaaaattatgcaaagatgcccttacgaataaagacctaggcccggcatggtggctcacgcctgtaatcccagcactttgggaggcc

SEQ ID NO: 133353 - DNA, 122 bp, Homo sapiens
tgtggtgtgtgctttcaactctcagagtttaacatttcttttgatagagcagttttgagacgctctttttgtagaatttgcaagtgtgtatttagagggcttttaggcctagggtagaaaag

SEQ ID NO: 133354 - DNA, 122 bp, Homo sapiens
cagacaaaaaaatcatggactgggggaaagaaagtagcatttaaatatatttaataaggacgatatagtcgtgaacatgtgcctgagtatcctggctaccacagtaaaaggggaaatatgat

SEQ ID NO: 133355 - DNA, 122 bp, Homo sapiens
ggacgggatccctggttctagcagggtacaatagacctgtggacgcgggccagggggtggcgtgtgggagcttcttagcctatccccggtggctgcattgcccccttcccacagacacaccc

SEQ ID NO: 133356 - DNA, 122 bp, Homo sapiens
aaaaaagaaaaaaaaaaaaaaccagaaaagctgcttcaagccagccaacgttccaagtctcgcagaagcgtgtgaaaatccccacgctcagtcgccctctccctgcacacgccccgagtccg

SEQ ID NO: 133357 - DNA, 122 bp, Homo sapiens
gaagggacaagtctctctagaatggatccagagcgagctcctccctcctgcaagtagccacgctgccgagacgctgaacttcagatacgcaagacccctgtctcctccccagccctgggacc

SEQ ID NO: 133358 - DNA, 122 bp, Homo sapiens
tacctgatgtgttcccaaggagtacgtatagggcctttataattttatccccagacccctcgaatggccatgactggcaaaggatatgaaaagaccatccctccctcctctccatggacgac

SEQ ID NO: 133359 - DNA, 122 bp, Homo sapiens
aaaacaaggagctgcaaatgcagaactcactgggcaaaaactgacagatgataccaaagtcgtgaaagtatctcatctcaaaaaagataactacaatctcaaactttcaaaaaatgcagatc

SEQ ID NO: 133360 - DNA, 122 bp, Homo sapiens
ggcgcctcctggtgtttgcatttgaatagagacccaagcccgaagtcaaacaatgaggctcgtggtgggagtgggagagatttggggtagagcgcattcttgcagccccttctgcgcctccg

SEQ ID NO: 133361 - DNA, 122 bp, Homo sapiens
agcaggcctgctcttattaaacagggcagctccacccagtcagccttgcccactgctatccggcccttccacacacattgtggtccttgagactcttccataggctcccagggccttagaac

SEQ ID NO: 133362 - DNA, 122 bp, Homo sapiens
atgagaattcgatgccttttctgtaactgtgcgagacacactgcctgggagcgacggggacggggcaggatgcctggggacggctttccacaccctaagtgctgccatgcgtccacctgttc

SEQ ID NO: 133363 - DNA, 122 bp, Homo sapiens
acaaacctctttctctttaggcagctggatgggaatcatcattgcttcatggcacaatggcgtacaaagatgttaactccaagcctttcaatttcagaagtcctggtccagatgtaagacag

SEQ ID NO: 133364 - DNA, 122 bp, Homo sapiens
aggttagcacaatgagcatacacaaatgtgagtactcacgaaacactcattacaaagggacgcgttacactgactccaaaactctccttggtggcctaggtgaaacctcatggccaacatca

SEQ ID NO: 133365 - DNA, 122 bp, Homo sapiens
cttggagccacactggcccctccgcttcaggtctctggaacaccaaaggaaggtggagaccggcccccgtcaggactaggaagcagggggcttcccagagcctccaccgggctcgaggccag

SEQ ID NO: 133366 - DNA, 122 bp, Homo sapiens
taatcttccgaactcagcaactgccagtagaacgcaccccggtcagggcgggctcgcgggcgcggtcccacccccaggcccctccgccgcggaggttctccagcgccgcccgtactcccgcc

SEQ ID NO: 133367 - DNA, 122 bp, Homo sapiens
aaacctcacagtcaaaaaaatcgaacctgacgagggaggacgggatcagtgatctctgaccggcaccccaagcattcctggatggcagggccggcttacacgcaaggatcagcttagaatga

SEQ ID NO: 133368 - DNA, 122 bp, Homo sapiens
ccctttcatacttccttgactttgttttcattactctgatttcacaaaaactctttcattcggctaattgtgagttatggagggtgattgggatttcttttcccttttttgggaaatgggct

SEQ ID NO: 133369 - DNA, 122 bp, Homo sapiens
ggccgctctgttctatactctggcccgagacaagctagtcaaaaacagcagcgccctggccgcccctccgacaaagagcccatcggaacccgagtctgctgaaaaaagcctttcatacctgt

SEQ ID NO: 133370 - DNA, 122 bp, Homo sapiens
ggggccatgatgctaggcgtcgaggcgagggttgagcctgtttggcttcagagaacgatgcgggttcgaccggaagcggggcgcgtgttctaggggcccttgggtggattagggggcgccaa

SEQ ID NO: 133371 - DNA, 122 bp, Homo sapiens
gcgcggaccgttatgtgctgctggccggggatgccagcgctgcgggctccttgggaggcccgggagggggcctcgcccacgacaggaaatggggccgcgactgagggcctggagggtggagg

SEQ ID NO: 133372 - DNA, 122 bp, Homo sapiens
caggcgcggtggcgagcacctgtagtcccagctactaggcagtctgaggcaggagaatggcgtgagcctgggaggaggagcttgcagtgagcctagttagcgccactgcagtccagcctggg

SEQ ID NO: 133373 - DNA, 122 bp, Homo sapiens
gattatagaatattcttctagtgtgatgcattcatttgcaatgtacgcacatagagcgtgcgcagccagagagtgacgtctaggaggagagtcaccgaaacactgtatttagtagttatctc

SEQ ID NO: 133374 - DNA, 122 bp, Homo sapiens
aagatttggaatttaaagtatctgaaacatacaaaggcagcctagtaaatgatactgtcccgccagggtggatgtgtcagtgctaaatacctgacgtactatctggcttatgagtggagcac

SEQ ID NO: 133375 - DNA, 122 bp, Homo sapiens
tatccttcaatgtggctgctgcacaccaataggaggaattaccggtcggaatacctacggcggcccacgtgtggagccaagcagccacaaacccggaatagcctgcttgacgcgactgctcg

SEQ ID NO: 133376 - DNA, 122 bp, Homo sapiens
gcgcctactgtgtgtggatgcccgggccgtgaccagggttgggggagtccacgtcgccctcgttgctctgggtggcacccggcccctgctctggcacggatggaggtccgcaggcgggggcc

SEQ ID NO: 133377 - DNA, 122 bp, Homo sapiens
gggaaaggagtaacagtaaaggaatttctttcttttttccttcaaccttgctctaaaaggcgggtgtgtggagcccatttctttagccttggcttcttaaacagcgttatcttataactcct

SEQ ID NO: 133378 - DNA, 122 bp, Homo sapiens
ctttaaccttcggtaacatagttacatagtctttgtattgaaaagaactacttggctggccgcggtggcccaggcctgtaatcccagcactttgggaggccgaggcaggtggatcacttgag

SEQ ID NO: 133379 - DNA, 122 bp, Homo sapiens
tctttacctgcgtttctgtcatgcctgatggtgtggagcatctttcacgggcttacttgccgtctgtacctcctctttggtgaaatgtctgctcaggtcttttactcatttctaagtggatt

SEQ ID NO: 133380 - DNA, 122 bp, Homo sapiens
gactcccagaggtttctgagattgccgacatcctatgcaagatgactgctcccacccacccgcccacccactcactaataagacataatgccgtcctatttttggtaacaattaaagggcct

SEQ ID NO: 133381 - DNA, 122 bp, Homo sapiens
gaaaaagttctgcaattgattatcatataccccatcccaattagaacaactgatgtaggccgggtgcagtggctcccgcctgtaatcccagcactttgggaggccaaggcagaaagatcacc

SEQ ID NO: 133382 - DNA, 122 bp, Homo sapiens
ccctagccggagactccgggcagagcccgaacggccggggtcccggagccaggaccgccccggctgcggcggagactcaagtctgaacccagagaacaactttgagctcgcgggagtggggg

SEQ ID NO: 133383 - DNA, 122 bp, Homo sapiens
gataatttaatcagcatttacacccatgcaccttaactacatatatgtaaaagcatcaaacgagttctcaaattccctgcttaggtcatgacactgaggggttcaaatagaatcatcagtgt

SEQ ID NO: 133384 - DNA, 122 bp, Homo sapiens
taacaataaaataaaatccacacacaggcaattgtcatattattgtattttattacagtacgtgtagtgtatactaactgaaagggaaaaatgtaaacaaaaccaaagtcatggggaaaatg

SEQ ID NO: 133385 - DNA, 122 bp, Homo sapiens
agacgcgtggctgtgggagccgagtggcacagggagggctccagactggggagccggtgtcgccacacaggcaggggactggagcccggggtcccagcttccagtccagccgacatttgtgg

SEQ ID NO: 133386 - DNA, 122 bp, Homo sapiens
gcggcaagcggccattgccatggaaaccggagccgcagggctatctgtccgggattgtgacgcccagatgggagtggtgagaggagacagaaagagggtggtggccgatagctggtcctctt

SEQ ID NO: 133387 - DNA, 122 bp, Homo sapiens
atgactaagattctcctctttgccacttctcaagatctcatttatacaaagtggcagagtcggctctgctggtcttgacctgtacatccccttttatggaaaatataaacaggaattttttt

SEQ ID NO: 133388 - DNA, 122 bp, Homo sapiens
agatccatcgctcccagtgcgtgcagttattccgtcctgctgtgtgacacgggagaatggcgcgcacgcctgtgcacctgcatcgaccgtgtagctgcctgggtgacagccacccatttgtc

SEQ ID NO: 133389 - DNA, 122 bp, Homo sapiens
aacaggaaagtcccctcagtcttaggcattggatattagggtcttactgtgactctggtacgataggttttgcccatcatagtgatgagggaagggcatatgcttggcactgctgagatagc

SEQ ID NO: 133390 - DNA, 122 bp, Homo sapiens
cagtgataccctatatcaaatcattgtgtcaaccccagaatgccctcaggtttccaaactcgctggccaagtgggtgctgcccagagcaactggagataacactggaaagggaatggaatca

SEQ ID NO: 133391 - DNA, 122 bp, Homo sapiens
gccaattacccttgtggattctgactctttcttgctagttcctagacacaaagagcccagcgtaccccaggcaacagctctggtttataattccatgggactcttgcttgcccctggtgaaa

SEQ ID NO: 133392 - DNA, 122 bp, Homo sapiens
gtgaactttaccatatgtcagttgcagaccacctgatttatacacaaagaacggaggtctcggccgggcgcggtggctcacgcctgtaatcccagcactttgggaggccgaggtgggcggat

SEQ ID NO: 133393 - DNA, 122 bp, Homo sapiens
cagtgtaagagcccgcacacgggcgcagcggtgcccatcccagggcgagtgcagaggctgcgcgcggccaccacacagtgcttccgcccactcttttgctagtgaaattctctgggagtagg

SEQ ID NO: 133394 - DNA, 122 bp, Homo sapiens
aatagatgacggggctcacgttgtacgttcacatcaggtcccggcccgccggaacctgggcgatccacgatgccgagtttgccacgctgcgacagcccataggcttgcccccccgggcattc

SEQ ID NO: 133395 - DNA, 122 bp, Homo sapiens
ggtgggggtggtgaggtggtggcgagcatggctctagaactagcaagcccacacccgagccggacccccgcggagcacttatcagggtggctagctggaatcgcgtgtcagactcacatgaa

SEQ ID NO: 133396 - DNA, 122 bp, Homo sapiens
ttacttcttgttatcagtgtagaagcgtgtttggagctgagccatggcgaggagtacacacgacttgcccacggaaacgtacgggttagcagacccacaacacgaagctcctgccttttaag

SEQ ID NO: 133397 - DNA, 122 bp, Homo sapiens
ccccctccgtccgcgtctgcgtaggggaggtgacgagggcggggcgcggcggcggggtgacgtcacggccgcgcgcggcgtgggcggagcctcactttgaacccagttggcgggagtggctg

SEQ ID NO: 133398 - DNA, 122 bp, Homo sapiens
gccaatatggtgaaatgtcatgtctactaaaactacaaaaattagcctggtgtggtagcacgcacctgtagtcctagcttctcaggaggctgagtcaggagaatcgcttgaacctgggaggt

SEQ ID NO: 133399 - DNA, 122 bp, Homo sapiens
aggtgcaagcccacagcagcctaatggcttggaattagccccagctatttctgaggtttccgcaggaatccttttacctgagctcaggaatgtgcccacgggtccttctggtgttgacatcc

SEQ ID NO: 133400 - DNA, 122 bp, Homo sapiens
cttgctaatgaaatccttactcactgcaaatttataaatatagcctcctaccatttcttccggcagtttcaaatgtggtttgttacacttaggtctttaacccacatgcaatttatttttgt

SEQ ID NO: 133401 - DNA, 122 bp, Homo sapiens
atggatatgacagatgcatatgatgctacataaaggctctgacaagcctaaaagccactacgttgaagctggtgtgcttcccccactcactgacagattcagagagcacagactcctttcca

SEQ ID NO: 133402 - DNA, 122 bp, Homo sapiens
gggggacccaggctgcagccttgcaggtctgaaggaagccgggaggggcgccgaggcccgcgtaggggaacagggccgccgccccctccgcttgcgccctggccgctgggggcgccctccgc

SEQ ID NO: 133403 - DNA, 122 bp, Homo sapiens
ggctgcacttctgtgtgtctttcaggaagccacagggcagggggcgtctgtgcagagaagcgggggagtgagtagcaggcaggcccagcttgtgtaccagcccagtgacatatatagaaaca

SEQ ID NO: 133404 - DNA, 122 bp, Homo sapiens
ggggggaggggggtgctgcttggttgggggatgggcggtagccggggctggcagccaggccgggggttttgtgtgtgagaagaataggggtttggcccgcgttggcacactcgcttccatga

SEQ ID NO: 133405 - DNA, 122 bp, Homo sapiens
ggttactcatatctgtttgttcatttcttcacttccttctcttctctcccctttgtctttcgcagagctcagtgcctctgatgacagctccctgtcagatgggctcctcctggaggaaggtg

SEQ ID NO: 133406 - DNA, 122 bp, Homo sapiens
ggggtgagccctggcagcgctcctacctgggacctacattggcttagtaagatgggccggcgcccaccccagccctcgcgcatgcgcataaaagcccactcccgggggcggggcctgagcta

SEQ ID NO: 133407 - DNA, 122 bp, Homo sapiens
aaaataaacacaaaccaggctcctgccaaaggaggggcagtccctggggcgcccaccgcacgcatgtgagagctcgcaggccacctgccaatcatgaatctgttaaggaagcggccacgaag

SEQ ID NO: 133408 - DNA, 122 bp, Homo sapiens
gttgaaacacacatttgtgagctttcacttgcacacactttctctcttcccgggtggatccgacccgggtagggcaggcttatctgttgcgtaaatgtgcccagctctgctcagagaaaact

SEQ ID NO: 133409 - DNA, 122 bp, Homo sapiens
agatggcatgtacagtacctgagtacctgccactgggcaaaaagatgaccaggtgagagacgaaggaatgagactgcagccctcaccatcagggcacaaacaccccagtctcacattccgtc

SEQ ID NO: 133410 - DNA, 122 bp, Homo sapiens
actgtcagggcccacaagtctttaaaatctggagtcctcctggcctcacgagtccatccccgctgacacgctccacctcactgcctcttttcctctcccttcacctcctctacctttaaacg

SEQ ID NO: 133411 - DNA, 122 bp, Homo sapiens
tttttttttttaaatagagatggagtctcactctgtctcccaggctggagtacaatggcgcgatctcagctcactgccaacctctgctgcccaggttcaagctattctcgtgcctcagcctc

SEQ ID NO: 133412 - DNA, 122 bp, Homo sapiens
gttcctggagcgggctggaaactcattccttgcaggctctgggagacgatgatgcattcccgggaccccgcgttgagaaccgctaggagtgggacacgtggcttcctgcagaggtggacaga

SEQ ID NO: 133413 - DNA, 122 bp, Homo sapiens
cttggagtctatatttttaaccaaaacttgaataaactctaaaacaaaccaaggatccatcggtgactcagatcctgactgtcctttacagtgaggctcagccaccttccaatagttactgg

SEQ ID NO: 133414 - DNA, 122 bp, Homo sapiens
ctctggccctgcgcctccctggctaaagagcgccctgtggggaggaagcagggccccaggcggaaccgggaaaacacaccggggctttaaacagaccgggccactcccatcgaatttggaaa

SEQ ID NO: 133415 - DNA, 122 bp, Homo sapiens
ggaagcgatgacgtcttcccagcggccagaggtggtggagtgcaaaaagcttcctacttgcgaccgaaaaaaagggagaagaaaaaaaaaaaaactttgtcccgcctactgagcacgccccg

SEQ ID NO: 133416 - DNA, 122 bp, Homo sapiens
tttattttttattttttttttgaaagaatgtcttggaatgcgcaagtctccctttagagccgtcttttgcagggagcgggaagtgacaagagctcagatctccctcccgatctccctcccca

SEQ ID NO: 133417 - DNA, 122 bp, Homo sapiens
ggagggtctgcatacgatggtcagagccaacttcgccatgccctgtctcttgccagatctcgtttacccgggcagcactgccagttgcttcattccccggcttctgtagtgctcagcaatct

SEQ ID NO: 133418 - DNA, 122 bp, Homo sapiens
agaaaatcagcgcatgcttactctgattttggaagaatcaaaagagaaaatcagaccgtgcgtactctgagtatggaagaatcgagagagaaagtcagagcatgcatactctgaacttaaag

SEQ ID NO: 133419 - DNA, 122 bp, Homo sapiens
cacgttttattcccggctgtccttccagtccggaagcctgaagtggacaccgaggaactgcggtgcggaaactaagatagtactgggaagacttgggttctggccagccaagattaccaaaa

SEQ ID NO: 133420 - DNA, 122 bp, Homo sapiens
ggcgggtgtcctcctgcccatctggggcgacgtacttggtccaagttcggttgctgctggcggaggttggagattctccagggcccccagctcacctccctggatggcgctttcggggatct

SEQ ID NO: 133421 - DNA, 122 bp, Homo sapiens
atgaaaaactgaagccatatttctctgtaagaaaatacgttgtgagttttgaataagtatcgccccagcttccgagtggcaaatcctattattggtaatccatgatgatgtaagtcacacag

SEQ ID NO: 133422 - DNA, 122 bp, Homo sapiens
ggctggctccccttacatcacaatggccagaactggggcctgcccacctgcctggatgtccgggtgtgtccggaccaaagctgagctctgttggcagcaggaagagagactcctgttgagca

SEQ ID NO: 133423 - DNA, 122 bp, Homo sapiens
acaatcaagcaacatctggcagagagtgaactgtaaatggtgaacacgctggcgaggcagcgactccaattaggaaacaactagatttctctaagtatgatgggaaagtaattctctggcca

SEQ ID NO: 133424 - DNA, 122 bp, Homo sapiens
agagctgcataccatcttactccaacctcctctcttcactacttccctacattaaagcagcggtccactaaagccctgtgcactgggtctgcctgcttttaagcctggcccacgctgggtgt

SEQ ID NO: 133425 - DNA, 122 bp, Homo sapiens
cgcacccgctcaggctgactctcgggggcgaggtcgagccaggggcggctgccctgggggcgaggcgacgctgtctcaacctccacctcgcggcggaacccgaggacaggagcctcaggtac

SEQ ID NO: 133426 - DNA, 122 bp, Homo sapiens
ctgggaggccggtcggggctgggctcaggggcccagacctagctgggcttggggcggggccgagacggagcgaggggtccagggtgtgggaaacggggaggggtttgaggaggggatcggaa

SEQ ID NO: 133427 - DNA, 122 bp, Homo sapiens
gaaaatggggaaagacgggcagactggacacaagaggaaacctgtgcagaaagcaaagtccgtgcatacagaatgggatgcggccaaggggttacaccttccacgtgcatttaccttcccgg

SEQ ID NO: 133428 - DNA, 122 bp, Homo sapiens
aaaatgtgtcattacgatttttacacatccccgtgccacagaatggcgtctccttctaatcgttccccccgacagatgatagtacatcccacactgctgctggaaaagatagtgcaaaagtt

SEQ ID NO: 133429 - DNA, 122 bp, Homo sapiens
gtggggaggaagagcaggcagggcactgggcctgcctctgaaagggcggatagaagatgccgtggatgaaggcgccttcagggtgggggagccagtccagcctgagccagggccctagggaa

SEQ ID NO: 133430 - DNA, 122 bp, Homo sapiens
gcgtgggaggaatgagaaagtcagggatggctccctggtttctggcttgggtactaggtgcgctggtggtgcttttgacagagatagaaccatgggaggaggaacatgttttgagggaaggc

SEQ ID NO: 133431 - DNA, 122 bp, Homo sapiens
gggctgccagggtgcacagtccccagcagagacagggcaggcctaccttgtagtacttgccgtagatgttggacaccatcatgatgatggggaagcccatgaaggtgaccaaggagagctgc

SEQ ID NO: 133432 - DNA, 122 bp, Homo sapiens
tttccatgtgtccccttcaaagcgctcctaccggcagctggagtaaggtaactccaccgccgacctccgaggagttcatgtggactcagcccaggcgcagagaggaagactcctgagagtcc

SEQ ID NO: 133433 - DNA, 122 bp, Homo sapiens
cgccccccttccccacaaggcctggcagttccagagaactgggcgcggcctcccaaataacgacctctgttaagtgggaccaggagcctcccgatggtcgctgtgtctgcccattggaccag

SEQ ID NO: 133434 - DNA, 122 bp, Homo sapiens
cattttggccatgccattagactgtgggcttgtcagcaggagaaggacgcaaggccagaacgcctgatccctagagcctgaatttgccaacagatcacagggttctggatttagcaatcaga

SEQ ID NO: 133435 - DNA, 122 bp, Homo sapiens
tgtgatgttaacaacaggcatatgtaatgccaaagtatgaactttacaggatctctaagacgttttctgtaagagcttacatgccaaagatgccaggatggatcactaaaccctgagtggaa

SEQ ID NO: 133436 - DNA, 122 bp, Homo sapiens
ccaaagcctgaagtcctcactggtaacttttcataggtgtcccattcgtaagagtaaagacgttctaggtaaaaatggctgggaacggggggtggggtgagggatggtagggtgaggcggct

SEQ ID NO: 133437 - DNA, 122 bp, Homo sapiens
tcatgacagaagacgtgtggggaatgggcctgagtgctccacagccacgcaggtgggggccgtgggaggggtgcaaaggagcagccagaggtggggatggagcccagagaatggcctggctg

SEQ ID NO: 133438 - DNA, 122 bp, Homo sapiens
ctggggggtcagcatagtctcccggaagcttggagaaggccgtctcatggttggtgctttcgctgatgaggatcttcccgttggagaaggagctgcccccaggccggccttttgggctggtt

SEQ ID NO: 133439 - DNA, 122 bp, Homo sapiens
ctcagtaaggaattgtcttccttctaactgcactgccagagctcaggggctgcggagaggcggctgctgcttttcccccgacccactgggtcctaagtgccgggaaaggccgcagggcagat

SEQ ID NO: 133440 - DNA, 122 bp, Homo sapiens
tggtcttgaactcctgagctcgggtgatctgcctgtctcggtctcccgagggattacaggcgtgaaccactgtgcccagcccaacgagaactttctttacaaaaacaggcactagtgttgcg

SEQ ID NO: 133441 - DNA, 122 bp, Homo sapiens
cacataaaagtcctcctaaccaacctgtgttcaaccaactcatgaaagtagggatactctcgagtttctctgactctcatccatatgctgaaagctggtggttaatgggcttatctccagta

SEQ ID NO: 133442 - DNA, 122 bp, Homo sapiens
tggctcacttcttcggtgtcccgcagctcagacccctaggggggcgggcaggcagtcaggcgggttgtggggagcatgggctccgatcccacagcatggtctagggctgggcgttgacagct

SEQ ID NO: 133443 - DNA, 122 bp, Homo sapiens
tctggagcgccaagtgccttggcccccaggcccctgaaagagccaggtggaggggccgcccgcgctggaaccctcagaggctgtttcaccaaccacacctcctgaccaaatcaacatcacct

SEQ ID NO: 133444 - DNA, 122 bp, Homo sapiens
gttctcgctgtgtcccagccgcgcccgagggcttggcctggggcaagcgggccgcgggggcgcagtaagaggctacgtggaagataatttaggtctcttgaaatctaaaatctcacagcgtc

SEQ ID NO: 133445 - DNA, 122 bp, Homo sapiens
tacgtgtgcatgtgcatgtgtgtgcgtgtgcatgtgcgtgtgtgtgtgtgtgtacatgtgcgtgtgtgtccatgtgtgttgtaaataactgagctgcaggacaaaactgacctggcagggaa

SEQ ID NO: 133446 - DNA, 122 bp, Homo sapiens
gccataagctttgagaaaacctgcacaggccaaatatcaattactgtatcgtgcgtgactcgctgttccctctcgggtcgtctgcccttgtctgggcttcactttctcatctgtaaaaagac

SEQ ID NO: 133447 - DNA, 122 bp, Homo sapiens
cttttattttcccaaactgtcaaactgtattaaggaggtaccaaaaggctcctgctgtcccggggcagaggggcgacaggcaggagctcgctcacgtggggcagtcacccgcgccccgggcg

SEQ ID NO: 133448 - DNA, 122 bp, Homo sapiens
ttcacagaagccaaaatgcccaaggaacccctggcgctctggcaagggtgggactccacccggagttgccgccagggcgccttctgcccggccgcctgcactcccctcaaccaacgcggaac

SEQ ID NO: 133449 - DNA, 122 bp, Homo sapiens
gtaactaaccagaggaggagcttcttcatccattgagtaagggaacttaccctcccacgacgataaataccaactcaactatatcatcagcagcataataattattataattgttatttcag

SEQ ID NO: 133450 - DNA, 122 bp, Homo sapiens
ggcgcgcgcgtaaaagcatagagacgggcattgagctcttgggctagagcgtcgccgagtcggagccggagcctgagccgcgcgctgtgtctccgctgcgtccgccgaggcccccgagtgtc

SEQ ID NO: 133451 - DNA, 122 bp, Homo sapiens
tgttcatggcactgagtgggggtcactcttcctgtctgttaacaagtcccatggagaaggcggatcagtcacaatgagagtggaaaaggcaaaaatagagtcacagtggaggcccgggggaa

SEQ ID NO: 133452 - DNA, 122 bp, Homo sapiens
gtctcaagcaattctcccattttggcctcccaaaatgctgggattacaggtgtgagccaccgtgtcaggcataagtctaagttttaaatagattattccggctgctgcattaagactaggct

SEQ ID NO: 133453 - DNA, 122 bp, Homo sapiens
caaggggtagtgtgaagggctcatgaggcagctggcagggagtacatcctagaaggtattcgctttagaaacatcatggtaacttgctgccctttagctctctttttctactctaatgccag

SEQ ID NO: 133454 - DNA, 122 bp, Homo sapiens
ctgtggtagctgcaggtggagggagatgattctcagaagagaaaggccagttcttgcagtcgtgtgatcttataacctaggggacttgtggatctgaaacatctgagaaggctgtttgcagt

SEQ ID NO: 133455 - DNA, 122 bp, Homo sapiens
tggggagcaggtctccatctccttttcccccttccacacccaaccctcagagtccaagtgcgaccctctgtgtagccttagttccagtcaccatcctgtgtagcaagaactaaggagattgc

SEQ ID NO: 133456 - DNA, 122 bp, Homo sapiens
tgtgaggaggaggaggaagagcgagtcctggcagcgctgctggtggcggagcgggggtggcggccggagcccttggctccatagggcctctgcccaccatgggcttatgatcaccgctgtgg

SEQ ID NO: 133457 - DNA, 122 bp, Homo sapiens
acaaaaagggagagacatccagagctgaagagttttccctgagaattttgtcaagagcgtcgctctccaggtacacgccccccgtcaaaggcggctctaaggtcctctcacgagggagcgcc

SEQ ID NO: 133458 - DNA, 122 bp, Homo sapiens
cagaataagtagaggaggacaattcaagagagcacagagctgcgtgcattctccctgtgccgcgacctgtatccaaaagcctcagacgagacttgaggagcttcctagaggctctcctgcca

SEQ ID NO: 133459 - DNA, 122 bp, Homo sapiens
tggctcagtggctatacagtgagacgcagagattccacagagctgggcttgcccacctgtcgaccccactttccccatgtgctcgccgcgggatgacaaccacaacactccagaaccacccc

SEQ ID NO: 133460 - DNA, 122 bp, Homo sapiens
ttatcttggaagatccgagctgggtttcatctcctttttgattttgagtagttccctccacgagaactgacttccaggtgttcaccaagggaaacaaggtggttctcacactggaaatgagg

SEQ ID NO: 133461 - DNA, 122 bp, Homo sapiens
cgcagctctgcgctcacggacacgcaggcccggccagtgccaggatggggtcaggagccccggggctgttcttcacagaatttaacttgagtctcagtcagagccaccctcacggacgtgga

SEQ ID NO: 133462 - DNA, 122 bp, Homo sapiens
gatgtcactctttttattattattattccctctgtgttgacaagtgatttaaacacttcccggcgggggggtggggagaaagggtgggggtgggtggggaatcttttctttgaatccagggt

SEQ ID NO: 133463 - DNA, 122 bp, Homo sapiens
ctcctcacataatactgtggctccctgtttcctatccacttcaatacaggctcgttgacccggcccttaagagcaccatcatgcagccccatcccatcttgctagctgtatctacacttacc

SEQ ID NO: 133464 - DNA, 122 bp, Homo sapiens
catgctcctcttttccatctgtgttgttttttaccccagcatactgttggaagggttgctcgaaggcatttgactgaagggtacttggaaagaccaaacccaaaccacagtagtgaccagat

SEQ ID NO: 133465 - DNA, 122 bp, Homo sapiens
gagggtgaaggttgttgccacaagctcaggggatgctccagacagagtggcctgggatgtcgagtcacagctgctccatgccacggggacaagaggaagcaggagtttagtctgacacactg

SEQ ID NO: 133466 - DNA, 122 bp, Homo sapiens
cagcagaaaatcagacgagaaggatgcatttcaatgaccctggtgcaccctgggtcatcacgaggcgcaccctgggtcgtcacacacgcgtgaacacacggggggcaccctgggtcgtcaca

SEQ ID NO: 133467 - DNA, 122 bp, Homo sapiens
gtgggttactcatccgcccgctctgtgcccagggccctcccccaccaccgtcagcgagtccgcacacaggtgcctggggttgtcacctgagggccgcgcctgcctcctctcctgatcccaca

SEQ ID NO: 133468 - DNA, 122 bp, Homo sapiens
cgctcccgccaccctggctgcctttcccttctttcagcacaggtttgttcccgtgtctggcgttgtgtgtctgcggttgtttctgcctggcatgcttacatcttcgtatggtttgcgccttc

SEQ ID NO: 133469 - DNA, 122 bp, Homo sapiens
tggcctaatgagtttacctgaacagcgtggagagcaccaagggatctaggctgaggtgtccgtctcctgtgaggaggggcggcagtgcagagaccttggggcactggaaattagtaaggcgg

SEQ ID NO: 133470 - DNA, 122 bp, Homo sapiens
agggggaggcagggcggccccgcgctgagggtggaagcgtgaacatccgagcagagagagcggggaggggccgtccggagagatgccccgctggcccgactgtggcccccgggaaagacgcc

SEQ ID NO: 133471 - DNA, 122 bp, Homo sapiens
attacaggtagagtgccagagccacctgaccttgctgctttccaatcctcttccttcccccgccttcagagcagagagtaccagcctagtagactggcacaggcagcctgagccacgctagc

SEQ ID NO: 133472 - DNA, 122 bp, Homo sapiens
tgcatgatcttcctggccatggggctcagcgacgagaagtaagtgaagcgctttcgctcccggtcgtccagaggccggttcccgctcatgaccgccgagcgcgaagccgcgatcgccgccgc

SEQ ID NO: 133473 - DNA, 122 bp, Homo sapiens
cctcttgcagcgcgggctgcttttgcactcactgctgtcacagtgttgagggcagtccaccgcataattattgctccaggcggccaccaggtgtgcaggcacgaggagcgtggtcagcagca

SEQ ID NO: 133474 - DNA, 122 bp, Homo sapiens
atgtcttccctggtggtctagtggttaggattcggcgctctcaccgccgcggcccgggttcgattcccggtcaggaaagtaagccgttttaaaaactgttgccgcagggctaaccataggtg

SEQ ID NO: 133475 - DNA, 122 bp, Homo sapiens
atgggatcttttgtgtctggtttctctgcgtaatgcttccgtccaggttgtggtatgtatcggaacttcattccttttcatggctgaataatattccactgtgtggacggaccacatttcag

SEQ ID NO: 133476 - DNA, 122 bp, Homo sapiens
cggacggaccatctgcatcaagacgcacgaaagcggccagaaagagatcgaggccttcgacgccgccatcctgctcatccgcaacccctacaaagccctcatggctgagttcaaccgcaagt

SEQ ID NO: 133477 - DNA, 122 bp, Homo sapiens
agagggtgtgagcatttttgggctgcaacagccacggctgctggcctgtgcttctgagcacgtgtgttccttgcccagcacccgccgaggcccgagtaccagtctccgtttctgcagagcgc

SEQ ID NO: 133478 - DNA, 122 bp, Homo sapiens
ccggcccgcggctagtgagacggggagcgcatgggacaaaattctcctagccgcgggccgcgcaggctcctttggaggcaagtcgctttctgtacactgctggttaactgcttcggaagagg

SEQ ID NO: 133479 - DNA, 122 bp, Homo sapiens
accaattgctccgtgaatactaaccaggaacttagtcaacattaactcagttaattcactcgtgcacccagggtcagatgccctcgatgagcaggagtttgttacatggcattgtgtatcgt

SEQ ID NO: 133480 - DNA, 122 bp, Homo sapiens
ccacaaagctcggacctgctccaggtcaccaagcagcagggccaggcactggcaatccaacgagaagccccactacatcgcattccagctcctgaagccattccctgggtaggagagccctg

SEQ ID NO: 133481 - DNA, 122 bp, Homo sapiens
agctaggccggtgcgatcgccaccttagcagatgaggcttcatggtcacgcagcccgccgcgcacccctgcccctgccgccactgggtgaccggagccggcatctctttgagcaggaaagga

SEQ ID NO: 133482 - DNA, 122 bp, Homo sapiens
caatataaatgaataaataaatgagatgtcattttaacagtgcacaccacaggttggtttcgaggatgcaatgaatcaatgcgagtctagcacataggacaatgcctagaacggtggtgtgt

SEQ ID NO: 133483 - DNA, 122 bp, Homo sapiens
ggtggtggagcctgggtatcattcctcctagcgcccctttccctcatcctttaatacccccgccccccatcaaaggtagggctctggggaaatgagggtggaaacttctgttctacccaacc

SEQ ID NO: 133484 - DNA, 122 bp, Homo sapiens
gtggccggagctgctgtgcaggcggctcaggaggtactccagcaggcactggctgctgcccggagactcgtgggagatttctgcggcacgctcgggttagggaagggcgagatgatgagggc

SEQ ID NO: 133485 - DNA, 122 bp, Homo sapiens
tgcgggtccgcctgtcagggaaccgaggggtccaccgacctcccgttagcccctgagagccgggtggaccctgaggtccttcacagcctgcaggtacgtgtccccagggctggttctccgcg

SEQ ID NO: 133486 - DNA, 122 bp, Homo sapiens
acatgagatatttcctgtgggtgcaagtgcagtagagaaatgggccaagttctctggacacgtgtggatgtgtatattgtgttatacacaaggccccaaattcctgcaactatttatacatg

SEQ ID NO: 133487 - DNA, 122 bp, Homo sapiens
agtcacatatgatgtctgggaaacctcctaattgtaagtcaatgaaagcaaggcaactatcgaaaaatgagcaaagcaataaatgttagcaaaattaatgttcctatataaacacagatgtc

SEQ ID NO: 133488 - DNA, 122 bp, Homo sapiens
cacatcttttcttgcaaactagcaaacctagggttaagtagggcttgttggtaaatgtagcgtgtcaggagctcacagccagatatgagccagtaagcaacgtaggtgtcctgggatgacaa

SEQ ID NO: 133489 - DNA, 122 bp, Homo sapiens
cctcagcctcccaaagtgctgggattacagatgtgaaccaccgtacccaggctcttcacacgttttctgttacatgctgggtagattcatatacattatctcatttgcatctcacgagtcaa

SEQ ID NO: 133490 - DNA, 122 bp, Homo sapiens
gatccccgccgatatgagaagcagctgtggggagaacatgactgcatctctggcaaaacacggccagttctgttactcaacaactccaatctccagatccacaaacccctccaagaaccaag

SEQ ID NO: 133491 - DNA, 122 bp, Homo sapiens
tgtaactcaacgaaacatggagaggagttctgtgccgaccccaaagcaacgcttctccaacgcgaatgtgcaagaaaccgcctgggtctgcttaaaatgcgcgtttggattcaggagaaacc

SEQ ID NO: 133492 - DNA, 122 bp, Homo sapiens
ctgggccgccggaccggaaggtcgtgacgaggcgtgtctctctctaggctcctctgcacccgagcactctccccgcacttccgggctgggctgccgcctgcacagcgcccccaacctgtctg

SEQ ID NO: 133493 - DNA, 122 bp, Homo sapiens
tgcccagaaggggcggctgccgggcggaggggcttctcacttctcagagggggcggctgccgggcggaggggctcctcacttctcagacggggcggttgccgggcggagggtctcctcactt

SEQ ID NO: 133494 - DNA, 122 bp, Homo sapiens
tctgtgaaatggggcaggctcgtggggcctggagcattcagcaggcggtaacccagtgggcgttccctgcacggtgccacgccccctctgccgcgcaggccacgccctcatctattaggctg

SEQ ID NO: 133495 - DNA, 122 bp, Homo sapiens
gagcccccacctgacctctacttgcaccttggctgttctgacatttggataaacaagaggcgccattccttccacattcggctattgggaggaaagccagtaggacccatttgttgacatgg

SEQ ID NO: 133496 - DNA, 122 bp, Homo sapiens
gacatattgcaacatacatgaaacctctgtgatctatttatggtcacagaaagtaggtaacgttctgagataaagagcttggaggcaaggtgatgtggccagtcacagtaaaaaataagtaa

SEQ ID NO: 133497 - DNA, 122 bp, Homo sapiens
acacaaagactgagagccaagtaacagaattggagagagaaaaacaggcgcttagtttaacgctacagaagcaatatgctactttgtgcagagtacacatgtgaagtactccaggtcaaaca

SEQ ID NO: 133498 - DNA, 122 bp, Homo sapiens
gcggggcccgcgaggagcaggcggtgggcaggggctgtccccggggggctggggagcggccgggcccgagtagggccggggttgggggggcggctgccccgcgcccaggccggacgcgcgcg

SEQ ID NO: 133499 - DNA, 122 bp, Homo sapiens
attccacccttccggcctcctcctcattatacccccggaggaagtgttgcccgggcagctcgggactggcccaaggtcacctagcaagttggtgacaaccagagcttgttcctcagggttcc

SEQ ID NO: 133500 - DNA, 122 bp, Homo sapiens
gcccatctaattggctttggtctaggtacttctgattggcttcccccgggcggtgggaggcgcggttttggggattgttcatcatggattggtgaatttgggctccttctcgaggtggtggc

SEQ ID NO: 133501 - DNA, 122 bp, Homo sapiens
gcggagatgttcgcctggcagcaggagctcctgcggaagcagaacctggcccggtaggtgcggggaggcgggcggggccgcgcggcccgggaggcggctgacccgcgtctgcccccggccca

SEQ ID NO: 133502 - DNA, 122 bp, Homo sapiens
tccttcccaggagcagcttctccatggacaagaaactgaattctccctggaaggaggtggcgtctgggaggaatcacagccctcagaccagagagcagggcatctgcgaggtcaaggaaggc

SEQ ID NO: 133503 - DNA, 122 bp, Homo sapiens
agagccccacgtggcagagagccctcagtgcctcggtgagtggctgggctggggccacctcgggtagggccacggcataggggcagtgggtacgcggcggccccaaagtctggcccaggaac

SEQ ID NO: 133504 - DNA, 122 bp, Homo sapiens
tctgtactttaaaaaaatcattttgttttgaagcaattttagacctacagaaaagttccacgacagtactgagagttcctgtggactcctagtattaacatcttaataacggggtgtattga

SEQ ID NO: 133505 - DNA, 122 bp, Homo sapiens
catcaccgcttgcgcacccgagatccgcagtggtcgccgctctccagccccggctccgctcgccgggtcagcttggctccgctgcccgcctcccccgccgccagctcacccctggcggtgcg

SEQ ID NO: 133506 - DNA, 122 bp, Homo sapiens
ccgaggagacaaccccaacaagcccatgaacccgctgatcactgggggcttcggagccatcgtgtgcacagccagcgtctttggaaacactcctctggacgtgattaagacccgcaggtagg

SEQ ID NO: 133507 - DNA, 122 bp, Homo sapiens
tgtgctgtttctttcttccctatgccgatagattgccccaaagcggcctcacaccagagacgggttaagaagagggattggaggtccaccactccactagcccaggaaggacttatctttcg

SEQ ID NO: 133508 - DNA, 122 bp, Homo sapiens
gcatccccggagggcggagcgtgggtgaggggcggggcatccgtcgccggaagcctgtaccgtatttcatggactcctaggcgccatcgattttaagacgcgctcgcattccacgcaccact

SEQ ID NO: 133509 - DNA, 122 bp, Homo sapiens
ttcttaccctttccccagcgtccagtgttgccggtttccaggccatcctgtgctgggccacgacatcaacttgtgatactaagttgcattaatggaagtatcatgtcaaagtttgggtgttc

SEQ ID NO: 133510 - DNA, 122 bp, Homo sapiens
acgaacatactgtcacagtggaaaggacacgagacaggcgcgccaccgggttgagtctcgcgaacaaactgaggccagagtgccttccccagggctgcacgtcagtcaggaaaaaaaaaagc

SEQ ID NO: 133511 - DNA, 122 bp, Homo sapiens
tctcactctcgtgggcaaacatatccatgcgtacctacgaggagcaaacctagacaaccccgcctcccccactccccgcgcgcccctccactcactcaggtcccagccctggctctcgcgga

SEQ ID NO: 133512 - DNA, 122 bp, Homo sapiens
ctgatggtgacatccaaacaataaatatgcaataaatagcgctcctgggctgggccgggccggctgccttcaaaccccactcggcccctaccagtcttctctggccaggacaggcctactgg

SEQ ID NO: 133513 - DNA, 122 bp, Homo sapiens
tcctgatgtggggctttcagaagtgggacctggggccgtacgcagtccttagggaggggccgtgtggcgttgtgcgtgtgaggggatagcacagggtgaggtgggggcccaagaaggaagtg

SEQ ID NO: 133514 - DNA, 122 bp, Homo sapiens
ctcggtcccctgggctcagcccgaagctgcctgacaacttctggaggagtttcctgggagcgcccggctgcggccgcagccccaggaagcttgaggggagcccctcccggcttctgcatcga

SEQ ID NO: 133515 - DNA, 122 bp, Homo sapiens
agccagcggctgctaggaggctgtgtccgcaagccagcggggcgaggcacctggggcctgcgcgtcaggtcccggcctggggcaccggggctgccagcgtcggaggaggtgcgggcgcgggg

SEQ ID NO: 133516 - DNA, 122 bp, Homo sapiens
ggaggcagctgggggcaagacagtgaaaacaggtgggcatccaaccctcaggccccttagcgtttctaaggcaaacaagaaagacttctgtttcctatcactgatgaggtgggctaagctgc

SEQ ID NO: 133517 - DNA, 122 bp, Homo sapiens
ccggcttccgcgcggcattgtggggcttgtagttcttgtgccgcagggctttaaaggaaacgcccacgtttcttccgaccagggatttccgacccgagaaccttacctcaaaggccgggagg

SEQ ID NO: 133518 - DNA, 122 bp, Homo sapiens
ttggtttcccacggccttctgaggctgggccgtggtcagctgcccagaggccaggctgatcggcttctgtcgagtccaggacttagggctgctgatggggcagagcctgaccccgtggggat

SEQ ID NO: 133519 - DNA, 122 bp, Homo sapiens
tgaccattcctttatctagccacatattgtttataaataaaccacagtattcttaagtgtcgctaaggcttttggcatgtcaccattccaaaaatcttgaggaccaaggtaagggctccaca

SEQ ID NO: 133520 - DNA, 122 bp, Homo sapiens
caggtctctgggaaaagtgctgactactggtactaggagctaggcttgccaccccagtttcgccacataaagcaataaatcaaattatctagatagagcaaaagccctttggagggagctcc

SEQ ID NO: 133521 - DNA, 122 bp, Homo sapiens
tccagcgtggccagaattttaattcaggcagtctagatccagagcctcttaatcactgtacggtgttgcctccaacctggaggaactggtctgaagagaacaagtattaccacgagtgttaa

SEQ ID NO: 133522 - DNA, 122 bp, Homo sapiens
gcccagcaagcgcgccgcatccaacctggccttatatgggcacgttcgggtgctgggtggcgggcggtgaccaggtgggccttatgccacagcacccccccctaccccccgcctgcccacat

SEQ ID NO: 133523 - DNA, 122 bp, Homo sapiens
aagattaaaaagttgggtctgttctaaaaaaaaaatcacaccatggaccattcctcctgccgcctcactcccccaccccaaagtgttcatctacatatgctcatttaaaataagcattaggg

SEQ ID NO: 133524 - DNA, 122 bp, Homo sapiens
gcgagcgctccgtgctgttccagcccaggtggaagggcactgagtcattgactttgatggcggccgcgcgcgaagatagccagtagcgctcgaggatgcccccaaacgcggcgtcggaggag

SEQ ID NO: 133525 - DNA, 122 bp, Homo sapiens
aattcctcctgtagctgtgctcatagaaccttagaaattcgttacctgttgagagagtatcgctgggccagtggtcaatgaaccccgattccaatttaatcctggcgctgcccctgacttgc

SEQ ID NO: 133526 - DNA, 122 bp, Homo sapiens
accggccctccgcgccccaccccgtgcacgcgctcactcctgcggcgcacccggaactgccgccgagcgcggaccggcccggcccagcccaacccagcccaacccagcactgggggagcgcg

SEQ ID NO: 133527 - DNA, 122 bp, Homo sapiens
acccggccaggtggtgatgatgcggccggccgcgctggtcactcttggccgctccccgcgcgcagcccgacccccctcgtatgggtcacggcgcctgcaaaactccctgacacagaaacgcc

SEQ ID NO: 133528 - DNA, 122 bp, Homo sapiens
gacttgcccagcggaatgcccttcaggacacactgagtactgtagtaagagctgcatatgcgctcagggagaatgtggatagacgctgtttgtgattcacgggtaaagggccttctcccaga

SEQ ID NO: 133529 - DNA, 122 bp, Homo sapiens
tatagccatttccaagcttatcaggaaagagtttgatgttcaactagtaatgtcttccatcggcacaagaagggcactggaaggaggcatgcgtctgatagacctgcacccttatcttataa

SEQ ID NO: 133530 - DNA, 122 bp, Homo sapiens
tctgtcgtgcagtcggctcctgggattggccagggacgggacaggcgcggaaccactgcgcgcacaggcggagcgcggagacttgtccgtcacgtgcggccgcccggcctctcggccttgcc

SEQ ID NO: 133531 - DNA, 122 bp, Homo sapiens
aggcacggtggttagcgcgggcttcctggaggacgcggatccggcaagcagcatctgaaccgcattttcgcagccgcgtagacactggcgcccacactctctcacccatgcgcactcgccag

SEQ ID NO: 133532 - DNA, 122 bp, Homo sapiens
ttaatacacatatgtaccagaggctgcaggttcacggaggaggagtcaccaatccatgcccggggagcaggcagagaagagggaggcgggcccgtcccgagttcacgccacgtgaaaggtgc

SEQ ID NO: 133533 - DNA, 122 bp, Homo sapiens
gggtctgttttctgggtgaagatgggggcatttttgaaagcattgggaagatacacttgacgtatctatccagtctccagaaatgcacgtttaacgctcagaaggaaatcttgcaacaattg

SEQ ID NO: 133534 - DNA, 122 bp, Homo sapiens
ctaaattgcctgtgaattggcgcgggcacaatgggcgctccccaaggagcaggtgggccgcgcggcacaatgtccgggctgtgggaacgcgctcgccctcattagcatcccggggcctgatg

SEQ ID NO: 133535 - DNA, 122 bp, Homo sapiens
tgtaccacacctcctaggagccctcagcgtactgaattagagttctctataagtctccggcgctagactgcgaactgcctgagagcatcccttctgcagccgcggggcataagcggcaaaga

SEQ ID NO: 133536 - DNA, 122 bp, Homo sapiens
ctattctgccaaagctgggatcttctcctggaacccgggagcaagaagagctggcagtgccgactcccagaacccggctttccttcagaaaagatggataggccgagtttgtgtgcgtggac

SEQ ID NO: 133537 - DNA, 122 bp, Homo sapiens
gctacgcgggatgggccgggccagggccaaggccgaggcggcagcggctgcgagaggcggcggcacgacgacggtccctcagcccagccaccatgagcaccaagcagatcacttgcaggtca

SEQ ID NO: 133538 - DNA, 122 bp, Homo sapiens
aattatgtaaagcgtatcatcgaggacctgtaattggtacagaaggctacggctagaaaacgagactattactctctacaatcttcttaggataaatgatacatttatcttaaaggaaagag

SEQ ID NO: 133539 - DNA, 122 bp, Homo sapiens
tgcctgcggggagcaagcatggcctgggcagcagatctcaacctgtgattgtgacatcatcgcccctacctgaaatgccggcttcttgggcggaagtttgatttttcacaaatctgcaaggg

SEQ ID NO: 133540 - DNA, 122 bp, Homo sapiens
cacatttatttgacatgttgtatgtgtaaccactgggaagtatacagttgtaaagaaaatcggatatagacttgtcctcaaggaacttttagtctagcatcattgatgatcacaaaaacaaa

SEQ ID NO: 133541 - DNA, 122 bp, Homo sapiens
tctgagactctccagttgagcactcctttctccagaggcctggaattggagcaaggccaccgtttcactccctccccctaagaagaaccaactatgatcctggggcacttcaggagtcagtg

SEQ ID NO: 133542 - DNA, 122 bp, Homo sapiens
ggaaggaggttgggataaatagagggagcacagaggtttggagcagcaacactgtgattccgtatgatattgtagtggtggatacatgccattgtacaagcattccttgttttattgtactt

SEQ ID NO: 133543 - DNA, 122 bp, Homo sapiens
tccaaggactccccattcccgacgccgactgcttactcaccagtcttggagcccgcaccgcgagggcccgcccccttggctgaccacgtgacccaagttcagtgacccctgacctcctcccc

SEQ ID NO: 133544 - DNA, 122 bp, Homo sapiens
cctcctgggtgaaaacccacatgtcacagaaaaccaccctgactccaactctgaggggaccgaccaccagcggcagctgacactgatcacgtgcccaggactgttgtgctggcaattcatgt

SEQ ID NO: 133545 - DNA, 122 bp, Homo sapiens
cgagaggagaaaattccagccttggcgactgctagagacagtgagctgaggtgggagcaccgaggggtggttggggctgaggccttttataatctgacctctccagccttcctcctgttctt

SEQ ID NO: 133546 - DNA, 122 bp, Homo sapiens
agttttccaacggcctcctgttcccgttcccgagttggcggcgaggggagggggcagcggcgggattggtccctccaagcttggcccggctagtcggcgctgccattggccggggccgggcg

SEQ ID NO: 133547 - DNA, 122 bp, Homo sapiens
gtgtgcgaggggggcgggagacagcctttcaggctgcggctcctggggctgaggcactggcggtggcagaggaggctgagggtgctgctccagcgggctgtgggcatggtgctggctgccgt

SEQ ID NO: 133548 - DNA, 122 bp, Homo sapiens
tctgagggagccttccgttaatgaaggctctataaacatctgacaaacacacagggcatgcgggaaggacacggcctactgtaaagaatctgtgcttctccagggggttattgccccctaat

SEQ ID NO: 133549 - DNA, 122 bp, Homo sapiens
ctcccagggaagcacgattgacagccgggagaatgccggaaatgcagccttctggtcttccgtcctccctccccctccttcccattcattcaacaaatatttatggagcgccagctctgagc

SEQ ID NO: 133550 - DNA, 122 bp, Homo sapiens
agaagagggtgacactgcgacccttcctggactctgacccccacccgtccgccctgcggacgaccctcgctctaactgcgccgggtcgttacctggttcccgcccgccccgtctcggctagg

SEQ ID NO: 133551 - DNA, 122 bp, Homo sapiens
cgacgccgacataactgcacgcaaggtactccagtccgcgccccaaactcttggaggacccgtcgaccacaccggatgtgctgtttgcgcatgcgcaccctcgtgacctaactccgccctcc

SEQ ID NO: 133552 - DNA, 122 bp, Homo sapiens
ttcagtatgaccgtaaagaaaggcatacaacttgtacacttaagagacatgtcatctcctcgcaatgaaagaatctgacccaattcatttggtaattaattttattgattaaagtattacaa

SEQ ID NO: 133553 - DNA, 122 bp, Homo sapiens
tgtaaatcagtgctctcttccgaggcccagctggaggcagggatgatgtctttcatcattcgcaggaggatggcgtaagccctgagaggtgtgaaaggtaagtaacgccatgctttccaaag

SEQ ID NO: 133554 - DNA, 122 bp, Homo sapiens
aagaaactgtctttctgaaactgacatcacgatgctcccagattttatgctggttctcatcgtccttggcatcccttcctcaggtaagcacaagtcacagtaaattaaaactacagttgcag

SEQ ID NO: 133555 - DNA, 122 bp, Homo sapiens
aagggcccacaccccgtcccacccccaacgttggccggagaaggtggagtccagccagcgcgataggtgagagcaagggacgaaaggttttctgtttaaattgccaccatcaccagctcgcc

SEQ ID NO: 133556 - DNA, 122 bp, Homo sapiens
aaataatgtcagtcgggtatggcagtgccatccacagaccaacttctggctgatagttcacgctggggaattctcagaggtgccttagactcccccataaagtacaggtgggtttaaggttg

SEQ ID NO: 133557 - DNA, 122 bp, Homo sapiens
tctggtgtattcaagcagattttaaaaggttgtccagcttttctagttgccttcagcaggcgggttggcctaaattacttaatctgccattgctggaagcattatataattttaaaacagca

SEQ ID NO: 133558 - DNA, 122 bp, Homo sapiens
aagcacatcctgagggtcgcctggttctgtcctctctcctccactcccactgccctatcccggttcaggaccctgctatccgttgagctgccagggtgatccattgagcgagcacctctgac

SEQ ID NO: 133559 - DNA, 122 bp, Homo sapiens
cggcggcggcggtgcttacagcctgagaagagcgtctcgcccgggagcggcggcggccatcgagacccacccaaggcgcgtccccctcggcctcccagcgctcccaagccgcagcggccgcg

SEQ ID NO: 133560 - DNA, 122 bp, Homo sapiens
atgcctgtaatcctggctactcaggaggctgtggcaggagtatcgcttgaacctgggaggcggaggttgccatgagccaagatcgcgccactgcactccagcctgggctacagagtgagatt

SEQ ID NO: 133561 - DNA, 122 bp, Homo sapiens
tctctgtgatgaggcccccctcttagctgcttctttcttgcccttcatcaccaaagctcccggacacccttgcgaggtgcttctggcccgatggcctgtccaagtgcttcctgtagctcttg

SEQ ID NO: 133562 - DNA, 122 bp, Homo sapiens
gcgcgttcctaaagggcgggggatcttaaagggccggggggatctggaggctcggccaagcgtcctcataccgaggcagagagctgtactggcgctgggcctgctgggagctctcgcgctcc

SEQ ID NO: 133563 - DNA, 122 bp, Homo sapiens
ttcctaaccctaaatctgtccagagtaggaacattcatggtaatcgactgtctgtcattgcgtaagaaagcactgatatggggtcagcttctttggacatatggtccatgcctgaaccttac

SEQ ID NO: 133564 - DNA, 122 bp, Homo sapiens
acggggcagctggtggggcgggggctgccccccacctcccggatggggtggctggctgggcgggggctgccccccgacctcctggacggggtggctgccgggcagcggggctcctcacttct

SEQ ID NO: 133565 - DNA, 122 bp, Homo sapiens
caggtccctgcacacgcgtctcctgggagagctcttgtctgcaccaggagctgggcagggcggctcctgtccctttagggaataagagatcaagaagtggaaaagcatgatggaagggaaag

SEQ ID NO: 133566 - DNA, 122 bp, Homo sapiens
gccttagactgtacagcggcagaaactccctctaccacctcggtccccctttccattctgcgttatacaaaataagctgacacgttaatgctgtggcccacattaaacaaagtataccgtac

SEQ ID NO: 133567 - DNA, 122 bp, Homo sapiens
cgtacgaggacattttgccccgcggcttgttggggtctcctttacccatgttgacagatccgcgtccacctgacggggccgaggggggagaggggaagccggagggtcggcgcggagcccgc

SEQ ID NO: 133568 - DNA, 122 bp, Homo sapiens
aagtaaactcgtgtcttcggtgtttgttgtacagaatatttcatcacccaggtattatgccgagtacccaatagttctcttttctgctcctctccttcctcccatcctgcaccctggagtca

SEQ ID NO: 133569 - DNA, 122 bp, Homo sapiens
aaaggtgggctggaccagccctcagagtgctcgctggcggccacgcacagcgagggggggcggccagtccccagacccctcacaggtgcaggcccagattctgttgagctaagctttgcgtg

SEQ ID NO: 133570 - DNA, 122 bp, Homo sapiens
ctacagaaaaacctcaaagcgaatgatctactcacagaagattgggtataaacaacatagcgcagctctgtcctctgcagatgcatcgttaagttcttgggaagatgctcttgttgcctgca

SEQ ID NO: 133571 - DNA, 122 bp, Homo sapiens
cccgtggtgtgctgcattgtccccgggacactcttgcctgccacccagctccccagagcacgcgctctggaaaccacctctccaaccagagtgtgagcaacaggccgaggccctgacttcca

SEQ ID NO: 133572 - DNA, 122 bp, Homo sapiens
gagaacaacagtgtggggggaaaactgtgccaatcaaacaccagagaccatgagaacagccgtgtgtgggagggggcggaaacaaactgtgccaatcaaacaccagagaccatgagaacaat

SEQ ID NO: 133573 - DNA, 122 bp, Homo sapiens
ggcctggtgtctgagttgccctgggttgctaggggcctgccctacacccacatcaagacccgaacctggggatctcctttggtggaattacaaccagagggccacattcaacgagataaccc

SEQ ID NO: 133574 - DNA, 122 bp, Homo sapiens
tataacatagaatatcttacaaatactgtcatatgcctgacctcattggtccttattctgcgaagcaaatattgttattactgttttacaaatgacaaaagagatgctgagaaaaatggatt

SEQ ID NO: 133575 - DNA, 122 bp, Homo sapiens
gtggagtccgcgcgggattctggtgccacctagacgccagggcggggaccgcaaggtgggcgggaggcttggaggccgggatgcgggggaatactggtagggtgcaaggagaatgctggagg

SEQ ID NO: 133576 - DNA, 122 bp, Homo sapiens
cgttttggtgggagggggtcttgctggcgcagtggaaggccggctgcggggggaggcgatcgctgccaccctgtctaagaagaaacggcaccaacagcgttgcagtttatgttacagtttcc

SEQ ID NO: 133577 - DNA, 122 bp, Homo sapiens
ttgtccttgacttaggcacggtaggttgaccaatggctctaatgatacatcctgaaatgacgaaggcatgtacttggaaaaccacgctgaagtcatttttcagattttttttttttttttga

SEQ ID NO: 133578 - DNA, 122 bp, Homo sapiens
caaacggtgtcaagcatggaaggagacttcagggctgtacctcctccctccctgcagggccgcaccccctccttcatggggaatgggcactgggcgtccccttcagccagggaggttggcca

SEQ ID NO: 133579 - DNA, 122 bp, Homo sapiens
gacactgagccagaggcaggcgatagagacccactagtccacctcgtcgcctggaacctccggggatctcagtttcctcatctggagagtgggagcagtaacagtccctgccttttaaggcc

SEQ ID NO: 133580 - DNA, 122 bp, Homo sapiens
tccatgtcccgcctcaaagtccataatataaacttcttactcagccaacgtcttaaccctcgttagcccttggccatccagtcccatactagcactgtcttctctcgcccatgaagatatcc

SEQ ID NO: 133581 - DNA, 122 bp, Homo sapiens
actacatacctcatccatcattctgttttcaccttaatcaattctctgtatgtccttcttcgttctccatacttcaaacttcattcttttttctctgtactctattctctgtaccattctcc

SEQ ID NO: 133582 - DNA, 122 bp, Homo sapiens
attaatgaagaatgtaggtctcctattccagccgggactcagagcggaacaatggcatagcgtgcatatttatttaggccttggcatctcagcaatgaaaaagttcatggaataaatgagca

SEQ ID NO: 133583 - DNA, 122 bp, Homo sapiens
tgcaacacgtgggcgctgggcaatgggtcggggaagcgaacctgctgcaacgtgaggtggcggccccagcaggcgctcggcggccgcccgcggactcagacgacagcgctgggctgtgcgcc

SEQ ID NO: 133584 - DNA, 122 bp, Homo sapiens
taaggtgacgcaggaaccgtcactgcagcgtttgctttgcgttcagatgcggcagctcagcgcagctgtaggtggaggagcgtgccagggaggggggagctgggatgcagctgcaatctaca

SEQ ID NO: 133585 - DNA, 122 bp, Homo sapiens
tgtcctcggagccctccggggagtgcggaggggcgtgagcgagcccatggctctggggggcggcctcctgcccgccgcgcggccgaggcccgagcgcccccaactgctccgggtgccctccg

SEQ ID NO: 133586 - DNA, 122 bp, Homo sapiens
ctcaggtgatccacacacctcggcctccgaaagtgctaggattacagtcgtgaaccaccgcgcttggccgcaacttgatttttaaattgctctctgagtgtagattccttgtttgtttggca

SEQ ID NO: 133587 - DNA, 122 bp, Homo sapiens
aaagtgttgtaaaccttgaaattagtcctggactgaaggcactttccctcctcccagactcgcttctctctgacacatttcccctttcaatggaaagtctatggcagtcaggtccactcagc

SEQ ID NO: 133588 - DNA, 122 bp, Homo sapiens
tccccaccctcccgtcccgccccccgcaggctggcggtgtacggagctgtgcgcccccaccgcgccacgagctttcagtgcacagaactgagtgttccccaccccacgccccgccctctgcg

SEQ ID NO: 133589 - DNA, 122 bp, Homo sapiens
ggctgagactgcgtgctgcgtcatgaagcctgcgccttgcgtcagggcggctgggcggtgcgcctgcgcggctgcggcgggtaccaaaaggaacagcgttttccgtgcagccctgcaggtcc

SEQ ID NO: 133590 - DNA, 122 bp, Homo sapiens
caagcagagaacccagtagggtatgtgaccacgttcagatcaacagaacgcaaagcagaacggtccgagtactgcctcctacagccactttcctttctttaagcctcagctgctgctctagg

SEQ ID NO: 133591 - DNA, 122 bp, Homo sapiens
gtaccaggaaaataatgtggaccaggcctccggctctgtgctcctgcatctggaggtgggcgaccaagtctggctccaggtgtatggggaaggagagcgtaatggactctatgctgataatg

SEQ ID NO: 133592 - DNA, 122 bp, Homo sapiens
ggttactttcactcaataatattgaattgtgagttttttttttaatgtgaagtctttcaacgtttagaaattcaatgacactctgttatacaggttttgtttgttttctgagacagagtttt

SEQ ID NO: 133593 - DNA, 122 bp, Homo sapiens
ggtggccgctgtccttggtgctgcccttccgcgctggcctcttgggctggaaggtgggcccgggtgccttgctgaggcggacccggggcaccaccgtgcctggccacaagctgctccgccgc

SEQ ID NO: 133594 - DNA, 122 bp, Homo sapiens
ttagctgggacaccgcgcccgaggtcaaggcgggtggaccaggcatgctgagagtgtcggcgcacaggtgggcacggccacgcactgacccagtgttcacgaagggtttgcactggacaagg

SEQ ID NO: 133595 - DNA, 122 bp, Homo sapiens
aatcagcaggcgggacagttcccctgtacagactggtacgggcggaccgggctctgccaacgccctcgctcctgccagatgtcggcgcccgcggggttaaccctttccggcagcgcagcctt

SEQ ID NO: 133596 - DNA, 122 bp, Homo sapiens
gaggggctggaaatgaaagtaaagcgctccagagccacatggacggagctgccggggcggcggcgccgggagcaggatgcggccgcccgtaattaaatagcatttactcttattattactaa

SEQ ID NO: 133597 - DNA, 122 bp, Homo sapiens
gagagtttagaacaccgtggatatcatggaaatggtaccgatggggagagtttagaacgccgtggatatcatggaaatggcactgacagggagagtttaaaacgccgtggatatcatggaaa

SEQ ID NO: 133598 - DNA, 122 bp, Homo sapiens
tggctcccaggtgatcaggccttgtggtaaggacaaggtctctgattgtagggagcctggcgtggagtcctagtctcatgacttaacctgctatattcttggggtatgttatttaatctctt

SEQ ID NO: 133599 - DNA, 122 bp, Homo sapiens
tagagaatgcaaatatctggctggctgaggaatttcatttcctattgtaaatacatatgtcggcattctggttacagaacaatcttttatgtgtttggttagtgtcagtatcctcaagcaat

SEQ ID NO: 133600 - DNA, 122 bp, Homo sapiens
tgtgaggagcccctctgcccggccaccccgtctgggaagtgaggagcacctctgcccggccgccaacctgtctaggaagtgagcctctgcctggccgcccatcgtctgggatgtgaggagcg

SEQ ID NO: 133601 - DNA, 122 bp, Homo sapiens
ctcaaacccaactcccgacagcaaccttgaggccacccgaggtggcgcatgcgcagtgtgcgaggtagtgctcttcctacctgccgacctgcggagccttcttactgagcagggcttacgtc

SEQ ID NO: 133602 - DNA, 122 bp, Homo sapiens
ataacgtggtaacagaatactttgcacattacaaaattcagaacacggaaacaagaagctcgcttttttttcccccctatttcggtttggccctttagatttcccctcccccaccggggcgg

SEQ ID NO: 133603 - DNA, 122 bp, Homo sapiens
ggggcgaaactcgaccccagccgagaactacactgtccttgcgcggggccctctgcgccccggaaggcgcccagtcccggtttattgtgagcttacagtacagttcgcaaggtcccggccgg

SEQ ID NO: 133604 - DNA, 122 bp, Homo sapiens
cgtgatccgcctgcctcggcctcccaaagtgctgggattacaggcgtgagccaccgcgcccggccttaattaaattttaaatgatgttttggcaagtttggatcatttatgcttctgaaatt

SEQ ID NO: 133605 - DNA, 122 bp, Homo sapiens
tgcggtcgccctcctccaggaggtcgtcagacgtgtgccagctgccgggtgctgcgggggcgcgtctggtcagggatgccctggagcccaaggctcacccaacagccagcctcacctgtctg

SEQ ID NO: 133606 - DNA, 122 bp, Homo sapiens
gacggtgtcccctgagcgcacgggacgtggggaatctggggtgtccggcagacagaagcacgggttcccagaagagccttctctgtcattatttgaaatgtttgaagcagccagagcccaag

SEQ ID NO: 133607 - DNA, 122 bp, Homo sapiens
taaggtgaccggtgtcagattgacgctcaccatagtacctttttgagaaccaccagggggcgctaggtgcaaatgatataaaatgttaaaaaaaattgtcacagtgaatttacaagagaaag

SEQ ID NO: 133608 - DNA, 122 bp, Homo sapiens
gccacattttctttacggtctctatgtaacattcacacccggcagctgctgggtctaaaccgcaaaggggagggggtgtgacgaggcgtctacctcccatcccatcactgctgggaactcag

SEQ ID NO: 133609 - DNA, 122 bp, Homo sapiens
agaaccacctgtgtccgggaaatgagcattgctgccaccaggaaactgtccgctagggctcggcactactaaggacctcgctaacaataatctggctgcgctgggactcagcaagagcagac

SEQ ID NO: 133610 - DNA, 122 bp, Homo sapiens
gtggggcacgcgcggcgggtgcggctgcagcaggcgaccctccagcgcaccttcgaaggacgtccctgccctctgccttgcctcgtattgtggttcactagtaagtgcctgcttccctagtc

SEQ ID NO: 133611 - DNA, 122 bp, Homo sapiens
gccgagaccccgtccccaggcgtccctgaggtctgagggtcaggttgtccatgtgtgggacgaacgtggctctcgggctgctgtggtgccctagtatccggtggaagcaggaaggtttggca

SEQ ID NO: 133612 - DNA, 122 bp, Homo sapiens
ccctcctaggaggtggtgaacccacaggcgtggctcaccatagggagccctcggccaatgcgggttcctctcccgtggtccaccggccagcctgtccctgcttactcactgaacaagcactc

SEQ ID NO: 133613 - DNA, 122 bp, Homo sapiens
agcagccgcaggacatccccgccaggacaccaggagccgcagcaaggtgcagggggagcgcgtgatgtcgacagctgatgtcgcgacacacctctgcctatgtgcacgacagggacccccaa

SEQ ID NO: 133614 - DNA, 122 bp, Homo sapiens
acgataatgcagatagacaacagatacatccatacatcttacacaaaaccattatatatgcgctcacattctttttctgtttcggttctaggacagcctttaggtcccaccccaccaccctg

SEQ ID NO: 133615 - DNA, 122 bp, Homo sapiens
agcagcgcagtctgctgtccagggtggcgcgtgcccctcggtgggaggacaagccaggggcgagcgggaggacgagcaagcaccaggctggggggcctctcccgggaggggtgccgtggcgc

SEQ ID NO: 133616 - DNA, 122 bp, Homo sapiens
gctgtcatgcctttcccaactgagccaatgtatacctcacatgtactaactgatgtcttacgctccttaaaaatataaaatcaagttgtaacccaaccaccttgggcacaggttctcaggat

SEQ ID NO: 133617 - DNA, 122 bp, Homo sapiens
cctcgcgggcttcctctttcctcactttctcccgccactactcttcctcttccttttccgcgaacccagcccacttcccgtttcaggacctcggctcggccccagtcccccggaccaggccg

SEQ ID NO: 133618 - DNA, 122 bp, Homo sapiens
ccttgtcatgttggtccctgtcgggtgggctgctggctctctgtggagctggcagagccgcggttcagccttggaggccggtcctggggcccagcagccgtggggagcactgcccagtcccg

SEQ ID NO: 133619 - DNA, 122 bp, Homo sapiens
taatttctagaccctcaattagagtttatatcccttctcaccaaatgcacatctcagactcgaaagagtttattgtaaaaatgctgtttgtgaagccaagcctatgttcacaccggcataca

SEQ ID NO: 133620 - DNA, 122 bp, Homo sapiens
gatgaacgacaagaagctcatgagcagcctgcccaacttctgcgggatcttcaaccacctcgagcggctgctggacgaaggtgagcgtctccagggccccggccccggcccgacccccgccg

SEQ ID NO: 133621 - DNA, 122 bp, Homo sapiens
gtgtgctgctttgtttctttgtccctgtgcattgatgtatcatctcgagagcagtggctgcgtgcagctgagagacttggtttcagatgcagtcagagcatcctcaggcacattaataatgg

SEQ ID NO: 133622 - DNA, 122 bp, Homo sapiens
aaatagcgaatgaatgatgtacacgtgtaggaaacagcgggctcggacgcctggcttctccggctgccctaacgccctccagctccaggtgaggtcggggagctggggccaaggctcgtgag

SEQ ID NO: 133623 - DNA, 122 bp, Homo sapiens
agcagtcttcaagccatccttctgggctgaataactctgtgtgctttactcccttgggaacgggcttggaaatggtgacttgtaagccctcctcactgtgagaataaatgacccagctcagc

SEQ ID NO: 133624 - DNA, 122 bp, Homo sapiens
acgagatgcagggacagcaacagggaagggtcacaaaatgccagcccggtggccctcggacgctgcaagtgcgttcagctgccagccctcctgacctcccagaaacactttcctggagccca

SEQ ID NO: 133625 - DNA, 122 bp, Homo sapiens
aacccgcagggctgggtccaggaatctggacgtaccttttataccttgggcgagtgtgatcgcagctgccagccctggtctgcccgccagcatctgccacctttaggatgggatggtgcacc

SEQ ID NO: 133626 - DNA, 122 bp, Homo sapiens
tcctgaaactgcaactagactgcagacccctagaaggcaacagcacagttactggacaaccgaggcggctcttggacacagcaggacaccagcagcccttcctagagcttaagatccgagcc

SEQ ID NO: 133627 - DNA, 122 bp, Homo sapiens
ggaggggcctcgcttccaccgccgccgccgccccccggttacctcggccccagccgccgccgtggccgccgctgccgctgttagggactctcagtctcagacacttgcttcgctgagaagtc

SEQ ID NO: 133628 - DNA, 122 bp, Homo sapiens
ctcgagttcttgggagatgggcatttggcgagaaggctggcgttagtgaagcgcgcccggcgtcacggtgagtgcgggtcttgggccctagcacctgttctctgggaagtcgtccgctgtga

SEQ ID NO: 133629 - DNA, 122 bp, Homo sapiens
taatacaccaaacaatgtgattatgctgcactcatggccatccaccaaagccacacacctcgggacaactcagagtgtctggtcacccagcacccagaaaagcacttggcaccaagaaggtg

SEQ ID NO: 133630 - DNA, 122 bp, Homo sapiens
cccttctcagagcctggtgttgtggctctcaagccctcccacatttcgggaactcagaaacgccgcccttttcctgaaatggaccctccgagtacgcgcaaccccttccctaaccccggctc

SEQ ID NO: 133631 - DNA, 122 bp, Homo sapiens
ctatctataggagtcacgggaagaacacccagaaaaacagatatataccctgcttcccctcgaccaaaagaaaaaaaaaagttgcttaatttttaaaacccaataacacaaaattacagtgg

SEQ ID NO: 133632 - DNA, 122 bp, Homo sapiens
aagatgacctgagattggtccatctcaggctggtggcaccatggtgacccctagaaagtacgcggggcacgatcgtcctgggatctgggaggaaggtttctgcatggtggctcctcatgacg

SEQ ID NO: 133633 - DNA, 122 bp, Homo sapiens
ggccgccagccgtgagtggccgggcccatcccgtccaaagacaaatgtctggagtgcttccgctcatctttaaaaggcggccaggcccgtttatctttggagttcttctgtcttaggatttt

SEQ ID NO: 133634 - DNA, 122 bp, Homo sapiens
tagtcaaatgtggagtaatcagaactctataatggctctagagtagagtagtatcaaaaacgtacatggcacacagaattcctggagtgctgactgctgttcatgtgtctggtcttagcctg

SEQ ID NO: 133635 - DNA, 122 bp, Homo sapiens
aagacatgcacagggcaaggaatggagggctgagaggagtatgcaaagtttccatgccttcggtgggtgcactgtcctcccagcaccagttcacaagtccagaagctctcagaactcaattt

SEQ ID NO: 133636 - DNA, 122 bp, Homo sapiens
ttaacatcaacacagaccttaagactgatagaacagcctctttaagtctcacagactatccggtagtgtgataatgatgagaaacatttgcagtctattctctgaagcctgctacaggctcc

SEQ ID NO: 133637 - DNA, 122 bp, Homo sapiens
tacaggatcccagagaaggcttcccgccggagcagcggtcgcgggcggttcacctggctgcgcaggggtcccagatattcagagaagagctgaggctcagcctgtcctgccctctggattaa

SEQ ID NO: 133638 - DNA, 122 bp, Homo sapiens
acctttttggcacccgggattggtttcgcggaaggtagtttttccacagacccagtggtgcgggggaatggtttcgagatgaaactgttccatctgaggtcatcagacattagattctcata

SEQ ID NO: 133639 - DNA, 122 bp, Homo sapiens
tgggtgtacaccctgtgtgcacacgctgcgatattattcatgacatcgttgcgacctttccgctaatatcacagtgggtgtatgccctgggtgcgcaccctgcaatactatgcatgatatcc

SEQ ID NO: 133640 - DNA, 122 bp, Homo sapiens
atggcatatgcctagccacaagatagccaaggcttgtggtacttgagtaaccattgttaccgaagtactaaggaagtgggagtaaggaccaggaatagttttgagcagggggatgatgttag

SEQ ID NO: 133641 - DNA, 122 bp, Homo sapiens
tggggccaatggcgtgaggagcaccagagagcaggagggaacgggcctggggcgtgaatccggccccatgagtgctcttcggccgcccaaaaccggtcccatgggtaacagcgtggccttcg

SEQ ID NO: 133642 - DNA, 122 bp, Homo sapiens
tttgttctagcaacatagggtcagtaaagggttttaaacaagaaaggtatgaacaacttacgttttaaacagaacaacttatagaacaaaatggaagcaaggaaaccaaccaacggggagct

SEQ ID NO: 133643 - DNA, 122 bp, Homo sapiens
tgcggtgcaaaatttccccctctcccccagttcgcagtgcctggagccgctggggttactcgtctgttctgatgccaccgcgagatggtccccgagctccccgagagtcctcagtgaaagga

SEQ ID NO: 133644 - DNA, 122 bp, Homo sapiens
cttctccctttccctctgggctcgacagtggtgcacagagcgactagggagtgggggccgcggttatttcattagaaaagctctggagccccgggagcccttcgtcccaggcgcacttgccc

SEQ ID NO: 133645 - DNA, 122 bp, Homo sapiens
ctcccaggtctggtcccccggctgtggggctctgggaagcggatgctagccgcgaggtggcgctcgcaccggactcggtgggctcaggagttgcttacgcgctggtgggtgtgggccggagg

SEQ ID NO: 133646 - DNA, 122 bp, Homo sapiens
aaataatgcacagatcaccagctacaggtggccctagtgcctaagtttataaactacccccgcccttcccggagagaaaggagcttgtataaagggaacaatcctagaacctaggcttaaca

SEQ ID NO: 133647 - DNA, 122 bp, Homo sapiens
tgggaacgcacttcctgggacgctgagagggagacgctccaagaggctcctcagtgtgggcgagtaaaatgccctgcgtgtgagaagcaggtaggtgtggtcaagatgttccgatttctggg

SEQ ID NO: 133648 - DNA, 122 bp, Homo sapiens
tcacaggtggctacgggccactgtattggacagcacaaatacagagtgttttaatagttgcggacaattcttttggatagctctgctgtaagggaactgcagggaagtacgatgaaaggcaa

SEQ ID NO: 133649 - DNA, 122 bp, Homo sapiens
acgtacccacaggaggcccagactcagcggggcgggtgcaagcgcggggcggggcctctgcgtccggtcccatctccgcctgcaaaaggagcagctggctccaggctccaacgtgccttcca

SEQ ID NO: 133650 - DNA, 122 bp, Homo sapiens
gcaagcttgaattttacagctgtgcccagatgtcctttgttgggggctcccctctccaggcgagaggtctggatggctggactccccaactgggagtacctggcctgcacgtgcatgctccc

SEQ ID NO: 133651 - DNA, 122 bp, Homo sapiens
catttgctgccacatggatgaatcttgatgatgatatgctgagtgatatataatcagtcacggaaggacaaatactgcatgattcaatttatatcaggtacctagagtagccaaattcatag

SEQ ID NO: 133652 - DNA, 122 bp, Homo sapiens
cctgcctctggcctacaagatcttttatgcatttccttcagtcaccatctccaaggcttacgactgaccaaccaaatcaggaagttttgagtgaaatgaggaggacattaggacagaaagca

SEQ ID NO: 133653 - DNA, 122 bp, Homo sapiens
ggtcgggcttgcaggcccggatgcactcctgggggaagacgcgagggcatgagggcagcccgtgccccgcaccccggcccggctgccgcgcccgtcactgcgcctaggccctggccgccctc

SEQ ID NO: 133654 - DNA, 122 bp, Homo sapiens
gaaaaaatgcaccaacatgtcaaatgcagcgctgaaaaaggaaatcgggcttatttttgtcgttgtttactgtaccaaagcatttttgaaaacccaaatcgaggagataaccgtttttgaat

SEQ ID NO: 133655 - DNA, 122 bp, Homo sapiens
ttaaccctctgggacttgtggccctcatctgtaaaatgggtagaaggtcagagtggacctcgtggcctgagaggctagtaccccatgctgcatgtaagtcttacatcctcctctttggtgat

SEQ ID NO: 133656 - DNA, 122 bp, Homo sapiens
cctcctgttgcaggtgtaccttccggtttcccagcacggccatcaagatccagttcacgtcgctctatcacaaagaagaggccccagcctccccgctgcggccactgtacccccagatctcc

SEQ ID NO: 133657 - DNA, 122 bp, Homo sapiens
cagggctcgtgatggctggtgggccctgaacgaggggtctggaggcctgggtttgaatatcgacagcctctctgacccacttggttgcctcagggaggcaggtgtgcggatgggggagagtg

SEQ ID NO: 133658 - DNA, 122 bp, Homo sapiens
ctggagtgacagctgctttcttggctggtgtggcaactgcaaccttttttgttggggaaacgaccaccttctttgctgaggttgcagcagccttcttgcctttcttctgaggtatgacgacc

SEQ ID NO: 133659 - DNA, 122 bp, Homo sapiens
ggcggcgcgctccagcccgcccctcggagcgcacagagaccggccagtccggcgccgccgcgcctcagccccagacggacgactggcccctccccgcccggcgccccagcgcctcccgcggc

SEQ ID NO: 133660 - DNA, 122 bp, Homo sapiens
caggcttgggccctccagtgcacccgcctgcggcctcccccagcccctcctccctggccccgccctgctgagtcctgcagggcccccgtgcttcactagccccgcttttggacaccccgcag

SEQ ID NO: 133661 - DNA, 122 bp, Homo sapiens
agcacagacacggcttcaaacgtccccaacgcactaatccttgttatccggcaggataaccgcggccgcgccagcacccggcctgcctcctccgtctggctgcgggcggggagtgcgcctgg

SEQ ID NO: 133662 - DNA, 122 bp, Homo sapiens
tccagttagtaatagatctagagatctagaatccaaatccagacctcctgcctccatgtgcggtggtctttcactgttgttttgttccacttggtgaagaggatttgagaataaatagccac

SEQ ID NO: 133663 - DNA, 122 bp, Homo sapiens
attctagccataacttagctatgaaatactaattaagaaaaacaactcaaacaatctcagcgtatttgcaaagcacctcatatgcattttaaatacaggacccagagaaatagctgcgaaag

SEQ ID NO: 133664 - DNA, 122 bp, Homo sapiens
ttttttttggagacggagtctctctctgtcgccccaggctggagtgcagtggcgcgatctcgactcactgcaaccaaaaggagacattttgacatggagacatatacagggaatatgccctg

SEQ ID NO: 133665 - DNA, 122 bp, Homo sapiens
tgtaagacgcatgatcgtgtgtgcacacatcgcatgcagatatccatgtgaactcgtgcccgggtaagacgcatgatcgtgtgtgcacacatcgcatgcagatatccatgtgaactcgtgcc

SEQ ID NO: 133666 - DNA, 122 bp, Homo sapiens
cctgacctcaccttaatagagatcctcccattttggccttggaggtttaatatatagtcacggaagtgtactgaaatagtcataagaaggaatgttctccatacaactttaaagttgtacag

SEQ ID NO: 133667 - DNA, 122 bp, Homo sapiens
accacttgttggcttctgtaggtgggaagtagcatttgttaatttcttgtatttgccaggcgctgtgaaagatatttaagcctcagaactctaaaaagcaggttgttaaatccccatttgca

SEQ ID NO: 133668 - DNA, 122 bp, Homo sapiens
gagccacaatctcaaacctgcaacaggtgacagctaggaaagaaataatggatgctacagcgattatcattagtggatggccctgtggactttatcagtgactcagtctggagcccaggggg

SEQ ID NO: 133669 - DNA, 122 bp, Homo sapiens
agggttctggtgcctaatgaatcccagtgctaggccttgtcatgtccacctcacagaggacggaactaggccaccagactgcatcacaaagccctcctgtttcataaggtacatgtagtagg

SEQ ID NO: 133670 - DNA, 122 bp, Homo sapiens
gcgggacctcgcccacggcccatgaggctcagggcgtcagaggcgctggggctgtggtggcgctgtttgcatgtctgagggatgtcccagggttgggaagagccaagtctgttccgttcctg

SEQ ID NO: 133671 - DNA, 122 bp, Homo sapiens
cccatgagggggccatggcagggtctccccggacggtatgactccaggagcctcctccaccgtcctcaccagccacgctgcacacggcccggcctgaccaggtcggccaacaggtcctcccc

SEQ ID NO: 133672 - DNA, 122 bp, Homo sapiens
ccaaacggacaacttgactacgcttcggccacaggcctgggacgctgtcagaccgagggccgctgagtgcccagtggcagcagagcccagagggtgcttcccccaggaagggaggcagacca

SEQ ID NO: 133673 - DNA, 122 bp, Homo sapiens
cgggaggggcgcacttgacgccctggacagggggagcgcgttgcgctgccccctcggtgccgcctcactgggcctcgtggctccgatcacgttccaacttcgcggccactgaccttgtcttc

SEQ ID NO: 133674 - DNA, 122 bp, Homo sapiens
ccattaaatgaggtaacgagtcaaaagtccctaccctgggtcctagcctgtcaggggctccgaaaacccaggctcaggtcggtcctgcccggcacctgtttcacacatgtacactccggtct

SEQ ID NO: 133675 - DNA, 122 bp, Homo sapiens
ctgagctgttcaatctttcagacaaccagcttgtgtctgaacatatgtatgtgtgtgtgacgcatgcacatgtcacagagtgagctgttgtgtgtgcatatgtgtgcgtgtagatggttgag

SEQ ID NO: 133676 - DNA, 122 bp, Homo sapiens
tggtccctcggcaggaggttgcagtaggcaatctggtgaccaaaggcagggcctgggacccgagccacagtgcggatgttgttcccatagtcacaggccatctccatgccactgaggctggg

SEQ ID NO: 133677 - DNA, 122 bp, Homo sapiens
atcaccttccagaagctacttactggtttttgtttattgtctattcctactctgccctcccgccactggaatgtgagctccattgaaggcagagatcttgtctgtctgattcagtgctgtat

SEQ ID NO: 133678 - DNA, 122 bp, Homo sapiens
cagggtgcaccactttcgccccgcccatgacgttgcagctcccgtttctcgccaggctcccggcccgaactacaaatcccagaagacactgcagccccgctcgcgttctcgtctcatcattc

SEQ ID NO: 133679 - DNA, 122 bp, Homo sapiens
ctcctcggcctccttgggcttgctggggggtgctggcgggggcaccttgggccgggtcagcgtgcttgtgcggcggctcaggttgggcttcttgcgcttatcgatgtatgatgcgggggccc

SEQ ID NO: 133680 - DNA, 122 bp, Homo sapiens
cggcatggtcaccacactgtatcaggagggaatgactcaacggtgacttccgagggtttgcggagggagcttaaaccatttcccaggaagggggtcgatcgtgatcccaatgacacaatccc

SEQ ID NO: 133681 - DNA, 122 bp, Homo sapiens
taacataaaacctaccatttaaaccatttttagctgaacaattcagtggcattgaacttacgtaaccatcatggtggtctatttccaaattttttcttcccaaaaagaaagcacgaggccgg

SEQ ID NO: 133682 - DNA, 122 bp, Homo sapiens
agaatcctctctgtgtgctagtgggattgcccatcccagatcctaaggcattcatagtcccggcagggacctccctgcagagagctcctttgcctactagcacccagtttcatttgagaaac

SEQ ID NO: 133683 - DNA, 122 bp, Homo sapiens
ctcggggaaatatagaggcgccacgcggggaaggcctgcggcgctgtgaggcaggctgggcggggctgtgacgtcacacaaggcgccgtcccggagcgaccacccaggctggggcacgtggg

SEQ ID NO: 133684 - DNA, 122 bp, Homo sapiens
gccagtgtagtgaaaccataaaagatgcagacatttccaaacacaagctgacactgggaccgagaaccacctctttcctacagcacccaaccactctcccaagtctgggcatcagacattgc

SEQ ID NO: 133685 - DNA, 122 bp, Homo sapiens
aaatccctgagaaagagagagcaaagcttctatactctgcctaggatttctttctctttccgggtgaaaaataggtgttgggatgatactgagttgataaaagtatttaggaaaagtggcca

SEQ ID NO: 133686 - DNA, 122 bp, Homo sapiens
tatccctgcatagaaaccagctgtggctgaagcagatgggtaaatgcaacacccaatcatcggcagaggtcccaatcttgacagaggtggctgggggagctctcagtgaaatgcactgagat

SEQ ID NO: 133687 - DNA, 122 bp, Homo sapiens
gcgggcagacagattttatgtgagagaaaagttggatgctcacgctccatggagcatcctcgcgtttcccggggaaaagcggatcccggagaagcagcctaatctctcagcccttgtggaga

SEQ ID NO: 133688 - DNA, 122 bp, Homo sapiens
cagtaaactctaatgaactgtaaactgcaaaaccttttgcaattggcttcaaagtaaacccgtttccaccaccacatactcccagctgtctaaaataaatacttggtgttcttgaaagcagg

SEQ ID NO: 133689 - DNA, 122 bp, Homo sapiens
gatccctgggaaaaagcaggagccagttctggagccctacagagggtgtggccagaaggccgtggattgggagcaagggctgcgagagctggaattttcagggctggaggcgggggaatggg

SEQ ID NO: 133690 - DNA, 122 bp, Homo sapiens
tctgagtactgagcattttcacaaattaaaattccctttaagaagtaaaatattcagaggcgaaacgatgcataacacagcagatgaggtggttttgtatcacaaattagcaggtaaatcag

SEQ ID NO: 133691 - DNA, 122 bp, Homo sapiens
ctcggtgggtgggagttggtggcctctcgctggtgccatgggactcgcatgttcgccctgcgcccctcggctcttgagcccacaggccgggatcctgcctgccagccgcgtgcgctgccgtt

SEQ ID NO: 133692 - DNA, 122 bp, Homo sapiens
gaccttcagagaacaaacaggaggctagaaaaagaatactgtagggagatgatgagacctcgaatgatgcagtgacagagtggagacaatacacacgtggagattagagccaagatctctga

SEQ ID NO: 133693 - DNA, 122 bp, Homo sapiens
ggtgaccctcctcagccaagagcaaggtgcagcctcgagcagcccagcaccgccgctgcgcgaaggaggcatttccgtttatggctgtttagctccttaaacatttcaagtcatacagaaat

SEQ ID NO: 133694 - DNA, 122 bp, Homo sapiens
ccgagttgaatgatagtgtttggtttctgtctcttgccatgtgcatgtgtataaatgctgcggattggcatctgtgtaagtcttgtcctgcgttatttctgcagcctatgcaagtgttgtgt

SEQ ID NO: 133695 - DNA, 122 bp, Homo sapiens
tccaggaagctgatacctggaatccccagtttgagtttctgctggtcttcaccgacaaaccgagaaagccgcaggcaatggccaacttagctccccatgtcctgcaccccagcagggccatg

SEQ ID NO: 133696 - DNA, 122 bp, Homo sapiens
gactactggtaattccctaaattctctcctccagtcagctatggcttaaaaatgcagagtcgttatacaaagatgtggtgtcaaaagggtaatctggtggcaatacacaaaaaatagattga

SEQ ID NO: 133697 - DNA, 122 bp, Homo sapiens
agccgctgtctcccgcgcccttctttgtcccctgggtctgtgtggtccctggggatggggcggcggtagcagctgtgggtggctaattaagatagatcgcgttagccagttttaccagcgca

SEQ ID NO: 133698 - DNA, 122 bp, Homo sapiens
tccctgcctggctgaggtggcagcagggggcgggacgcgcagcgctatggcagagggcagcggggaagtggtcgcagtgtctgcgaccggggctgccaacggcctcaacaatggggcaggcg

SEQ ID NO: 133699 - DNA, 122 bp, Homo sapiens
tgagccctcgggcacaaataggtgaacgaccacacccgcctcccgctgtggactgagattcgcggtgcgaggggttcccgggttgaggacctaaaacgccgaggagttccaatttgtcctcg

SEQ ID NO: 133700 - DNA, 122 bp, Homo sapiens
cccgtgtaccagtggaggaaggccttgcgcctgaacattgctgtaaactgctctgagacacgcttgaagagttcctggatggccgtattattcccaatgaaggtggctgacatttttagccc

SEQ ID NO: 133701 - DNA, 122 bp, Homo sapiens
tgagcgagcgagcagttggctgagtgaagagaaggtgctcgggtaaattggaaagggatgcgagtgctttatactcgtgggtagggggcgggtctggcactttccattccccttggctttca

SEQ ID NO: 133702 - DNA, 122 bp, Homo sapiens
cccccaccttggggcacagactcctaatgtcctccagccactggctgcagccggcattcccgggcagattcctggcttggggactaatgccccagaggctccaggttacccacgggctcagg

SEQ ID NO: 133703 - DNA, 122 bp, Homo sapiens
agagtcgaacaatgttgtcagggaagtggctcctcacggaggccgccttcagcctcctagcggcagtgggctactgcacaggcattggtgtttacctccacgtggctctgcagatcaatagc

SEQ ID NO: 133704 - DNA, 122 bp, Homo sapiens
cttcagagtccctaaggtcgatctttggcctccaaggagtcaggggagacctgggtcccccgcactgacttcctttctcctcacagggcaccagcctccaaatggctatggaccgggagcag

SEQ ID NO: 133705 - DNA, 122 bp, Homo sapiens
ggacatattctgcttgcgtcggctgctcaggacagtcaccggggacataatgtggaagcccgaggttctcaatctcatgatgtataaatgtactgaaatactgagatgccaaaaaggggaat

SEQ ID NO: 133706 - DNA, 122 bp, Homo sapiens
gccttcagcccgagggggcggatactgacccgaggacgccgaggccaagctcagcagcaccgcacacagcagcagcgtcagccctatccggacccgcatcctcctctcggggccggtgccaa

SEQ ID NO: 133707 - DNA, 122 bp, Homo sapiens
tttggtcaggccagcttttccctcccagctgatctgaaacaggatagcctttaaaattgtcgcccttctctaccttcctactttcctttcactcattaaaatcaaccaaagttattttaaaa

SEQ ID NO: 133708 - DNA, 122 bp, Homo sapiens
cgcccgccggattagcggctctttgttcggggcctgttaacaagttcctggctgagcgctcggctgccgccccgggagcgggcgtccagcctccgggcaccgccgcgcggccgcctccgccc

SEQ ID NO: 133709 - DNA, 122 bp, Homo sapiens
gccatcactgcccgccagcgccttcctcctcctccccgccccctgccctccccaaccccacggccggccccgcccatctgggggcctctcagccaataacgtgagaagagggggcggggtca

SEQ ID NO: 133710 - DNA, 122 bp, Homo sapiens
ttgagtttgtctttactcttgtttagaaggctaactattgtttaaaaaacaatctcttgacggatgtattcctagtgaagacagttaaacaaaccattgggctgaccacaaatgtgtcaaca

SEQ ID NO: 133711 - DNA, 122 bp, Homo sapiens
gattgggaggaagggagccggaaggttgagggcctgtcatagggaattagaggccctgagcgcacatgctcccggtgggggcaagtgggatctgttgacactgtgagtcagctgctgagctg

SEQ ID NO: 133712 - DNA, 122 bp, Homo sapiens
ggtccttggtagggctagagccaagtgagtaagggtgagattggcaacacgggccagggccggatcacacaggctatttagaggactgtattagtgccctgtggctgctctaacttggtgac

SEQ ID NO: 133713 - DNA, 122 bp, Homo sapiens
acgcaccgtgcacgccctgcccccacgctcagagctccgtggcacgcccccccagccccacgaccctgagtgcacgctcctctcacctggcccggttccgcgcgctgtttttttaatccctt

SEQ ID NO: 133714 - DNA, 122 bp, Homo sapiens
ggtttcctgcagaagaggcctcatcgccagcaccctggcatcctaaagctgccgcacgtgcggctgccacaggcactggctaacggtgcccagttattgctacttggtgagtaacggcggga

SEQ ID NO: 133715 - DNA, 122 bp, Homo sapiens
tctgaacgagtggggcagccgcttcaagaagctggcagacatgtacggtggcggggaggacgactaggcggcctgcctgcagggctggggaccaaacgtcaggccacagagcatctccaagg

SEQ ID NO: 133716 - DNA, 122 bp, Homo sapiens
cgctgtgatccagagagccatgctgaagcacaatctggactcagaccccgccgaggagtacgagctggtgcaggtcatctcggaggacaaaggtgggcatccttccgagacaggcatgttcc

SEQ ID NO: 133717 - DNA, 122 bp, Homo sapiens
cctggccagttccttctgtccgggcaggaaggggtgctctgtgggcttggaggatgcaggcgccttcctggggactgctctgtgagcagtgataaaatatttatcagccagcagctgggctt

SEQ ID NO: 133718 - DNA, 122 bp, Homo sapiens
tttttctttggaactttccatacgcaatatcagactctatgtattcctctgtggcctccacgttcccctccacagcatgtctgagattcacgcgccttgatgaatgcagttggcattcattc

SEQ ID NO: 133719 - DNA, 122 bp, Homo sapiens
tctgcccaagcgaaatccaggggagtgacactggaggcgtctgcacccacagggcagtgacgcgggcctcgactggggaaaagggcggaagggctgagtccctttccctattccacccattt

SEQ ID NO: 133720 - DNA, 122 bp, Homo sapiens
ccagcggccggaggtcgcgcgcgccgggtgctgcccagcaacgaaaggccatgcggggttcgtccctcagatgccggtgaccttgattgaagtcacctgccttctctagcttccagtccttt

SEQ ID NO: 133721 - DNA, 122 bp, Homo sapiens
acgcgcactcaggccgcggctccagccgccctccctccgcagtggggcgccccgcccccgcgccgctcagttttaaactcgcagcagacggaactcgacttaaaaataactattttgacagt

SEQ ID NO: 133722 - DNA, 122 bp, Homo sapiens
tgtctgtggctgttctcgtgcttggatggctgtgctgagtacctggaacggagcctgcgccgcggcggggcctaaatgccgtctggccttttccagagaaagcgtgcccgccctgccctgct

SEQ ID NO: 133723 - DNA, 122 bp, Homo sapiens
aagcgcttccaactctactgggcatctaggaagggcgcactcactgaacttcctccgttccgtctattctcagggcccaccgggcaggaccactgagcaaggccttggaaaaccagagagat

SEQ ID NO: 133724 - DNA, 122 bp, Homo sapiens
tggacagaggttccctctgtgggcaccaggcagcgatgcctgagccaggctgggctgggccggatgtgaaaggagacccctgcacccccggcgcatcagcgggactcctgcacttcgcagag

SEQ ID NO: 133725 - DNA, 122 bp, Homo sapiens
cacgtcagccaactctttgtacaggtttttactggatgatcaggaatgtgccatccatgccgacaacgtcaatcgtcatgaaaacagaaggtatattcccttcctgccaggaactggacggg

SEQ ID NO: 133726 - DNA, 122 bp, Homo sapiens
tgggtgggcacctgccgtccacagggcccccccaccggcagtgtccggatcacacgaagacggcttacagaccagcaaggaaacgctgaacccggaggacaagagggcaaagacttgaacta

SEQ ID NO: 133727 - DNA, 122 bp, Homo sapiens
tgtgatccacccgccttggcctcccaaagtgctgggattacaggcgtgagccaccacgcccggcctagcagtggttttctcaaacgagtctggatcagattcacctgaagggcttgttaaaa

SEQ ID NO: 133728 - DNA, 122 bp, Homo sapiens
tgcagacagttaatgaagactgagcgggatggagaatctagcggggctcagttcttcactcgcgcattctgcagcaccagctactgcagcaacctctccccactttcagttgccaccgacag

SEQ ID NO: 133729 - DNA, 122 bp, Homo sapiens
ctgggctctccagtccctcaacccagccagtggggaggggtctttttctgtctctatattcgttatattcatggcgccttgcttagaagaccatggatggcttgccaaattattagaagatg

SEQ ID NO: 133730 - DNA, 122 bp, Homo sapiens
cctgcaggctggctaacaatgccgggaaaagctgtttaaaaggctgagcacttgtgcctccggtcttcactaactgttacaagtcttcctctctcgcgctctctctcctttttaaagtaaaa

SEQ ID NO: 133731 - DNA, 122 bp, Homo sapiens
aaaatagagaaagaaggataatctataatctacagactagtgagcaagcctttgaacagtcgaggccacctactcatgagtaaaattacattgtttaaccattctgtaatgtcttagatagt

SEQ ID NO: 133732 - DNA, 122 bp, Homo sapiens
gtaaattaaaactaaagtacagaaagatggaaataatttgcacaaggttatacatctgaacgagaaaagagctgagatttaaacctgagaagtctggctctagagtctctgctcttaatccc

SEQ ID NO: 133733 - DNA, 122 bp, Homo sapiens
gtaactgttgtctcctctaaactatctttcagacgtttaatgagagccatcttatcccagcgagtaaaaggcaaataccagctgcctcctgagagaggggcaaagaaaggtcaaggaagacc

SEQ ID NO: 133734 - DNA, 122 bp, Homo sapiens
tgaggggcttagcacccgggccagcggctgcagcgtgtgtgctgggtcccccagcagtgccgcccaccatcgctgcgctcgatttctcgctggaccttagctgcctccccacggggctgggc

SEQ ID NO: 133735 - DNA, 122 bp, Homo sapiens
agtattacactttataaaggcagtgtggacccaaagagcaacagaacaaaccttccgcaccgtggaagggaaccctaccaggttaccactgctggctcgcgcagcctgcttttattctctta

SEQ ID NO: 133736 - DNA, 122 bp, Homo sapiens
cttggaaggaaggccatgagtttctgcatgtttgtgcgtttaatagaatctcttctgcaacgctggaaagacatcagccctgagtagcatcattagaatgaaatgagaaatccagcctcctt

SEQ ID NO: 133737 - DNA, 122 bp, Homo sapiens
gcgcgatgcctttgcaccgagctcgggggctgccaggtcccttcctcgccgcggctgttgcggccgcagcctccgccggcgcctctagctctgtctaattcgctgctaaagcgtcctatgct

SEQ ID NO: 133738 - DNA, 122 bp, Homo sapiens
cccactaggccctggcaaagggtctcacaggttacctaatttaatccctccacaatcccccgaggcggatattatcactctcattttccaaatgagggactgaagctcaaaataagtgcaat

SEQ ID NO: 133739 - DNA, 122 bp, Homo sapiens
ggcaagtcactggcttcttctgtgcttctgtttattgtgaaatgaggatgttaatgctaacgtatcccagaggatggtttcaagggttaaagaaaataaagcactagagagaggtctggcac

SEQ ID NO: 133740 - DNA, 122 bp, Homo sapiens
gggaggggcgtggcgtgtccggcagggggcgccgtgattggcacgccagctcccgctgtccgcgaggctgccctaaagtctagctcatgagaaccccaggcaagtgcggacctacaaagttt

SEQ ID NO: 133741 - DNA, 122 bp, Homo sapiens
ttccttttaagctttttggtcagcctcttgttagccccatctggtatcaccacttcaaaacgctgctgtgttaaacaattgccattaatagtgtttgacaaatgcctttgagatacggctgt

SEQ ID NO: 133742 - DNA, 122 bp, Homo sapiens
ttttccaaaaaaggactgaccataggaaatctgacagcatcagcacaagtcaacattatccgggggttgagggaacaaagtagtcggccccacgggggtgagtaaggaaccatcactgccct

SEQ ID NO: 133743 - DNA, 122 bp, Homo sapiens
gctagcagccaggctggctgatggcgctgactgaggacaccaagagccagtggggagggccggatggccctgctgcagagaatttcaggtgaaggccaggactcaaagcagatggaggggtc

SEQ ID NO: 133744 - DNA, 122 bp, Homo sapiens
ggggcggggccgagctggaggcctccgggggcggggttggggcggacgccctgtggtgcgcgctgagcgttttgcctgcgccaagcgagcccctcacaggagctaccctcgacgcctgagga

SEQ ID NO: 133745 - DNA, 122 bp, Homo sapiens
ggagaagggccctggaggaatggcgagcccctccagggccagggtgtctctccccatccccgcccagagcacagcggactttctctagttcactcctcccagcggctgggtctccaggtgcc

SEQ ID NO: 133746 - DNA, 122 bp, Homo sapiens
caaccctgccccacgaccgccggccgcccagcccagcccggcacacgcatgcatgcaggccggccagcatgaccgtgctcggccccctgggcactcggtcccagttggtccctatacccgcc

SEQ ID NO: 133747 - DNA, 122 bp, Homo sapiens
cccgatagatctgtggattcctggcacctagctgctcactctgagtctaatgaatgagcgcgtagaccgaatggctgggaagcagcaagtgattccaggctgctgggggaggacggcggagg

SEQ ID NO: 133748 - DNA, 122 bp, Homo sapiens
cgcatttgccccggaggcccgtctcctgcaggcgggaccagatgctctggatcctcccggcgtgctcggggtggctgctgctactcccgcaggtgcactggtgcttcagcatcagcgtgtca

SEQ ID NO: 133749 - DNA, 122 bp, Homo sapiens
aagtacggaggccgacaggaagagaaggaaaaaagagaaggcgctgtcccgctcttgctacggtggcctggaggagtggcgaaaccggaacagagaatttatcacttctgggactcacagtc

SEQ ID NO: 133750 - DNA, 122 bp, Homo sapiens
tgcctggagaggcagttgccaagctgcaaggggttaggattacctgtcacaacaataattcgttactcaagtaaatggggtgtgaggttttgtttgtttgttttaacctaactgcctttcct

SEQ ID NO: 133751 - DNA, 122 bp, Homo sapiens
tgtacccacagtgaggaggctgcagctgcagcagggcctgtcagtcactcatactctccccggagttgggctgggggcactgaaagggccaggggtggagagaatctgagataagcattcac

SEQ ID NO: 133752 - DNA, 122 bp, Homo sapiens
cttacaatctgttgtgttgattgtattttttctgacttattctgttgatgtgaagagtgacgctgcttggtccttagagggtaaactcagcatgcacaagtggattaaaccacattcgagca

SEQ ID NO: 133753 - DNA, 122 bp, Homo sapiens
aatcactaatcctcagggagaggccttcaaagccatatggtgcaggttccttctaatcctcgagtcccttttggagcatccccaccagtgtgggtctctagcttgtgctgaggaagagccat

SEQ ID NO: 133754 - DNA, 122 bp, Homo sapiens
accccaccttcatttgacactttcaaatttccacattgttttctacttccttttatttttcgaataaaatgtatacctttctgcctccagttccatactatcagataccccgtcatctggtt

SEQ ID NO: 133755 - DNA, 122 bp, Homo sapiens
ggatccctcgtgaagccgtcaagtgctgaagctgtgaaagctggggccggcggatcgggtcgggactgccgctgtgatcacttttaggccagcgtcagcagaagcctgtgtgattgcaggca

SEQ ID NO: 133756 - DNA, 122 bp, Homo sapiens
ccgggcgccccgcgagtggggtccacaccacgctcctccgaagccacggtttcccaagcgcggtctccaggtccgtccgtccgcagccgacctcgcactcccctgcgttcgaggctgcggac

SEQ ID NO: 133757 - DNA, 122 bp, Homo sapiens
ccgagttgcttccccgagagtttgaaggctccggaacttccgtcctgggaggttaatatccgcctcttgaggcagcctggctgggaaagtctaaccgcggggcccacgccttttctcatcat

SEQ ID NO: 133758 - DNA, 122 bp, Homo sapiens
tctcctgctcctcctcaaccctgaccccaccttacccaccttcatgtttcttttcaagctcgcacagccgtgcaggctctagcaaaaggctggggggtccccagcgacccccatcagctttg

SEQ ID NO: 133759 - DNA, 122 bp, Homo sapiens
gcccagggctctgtgggaggctctacaaaggctcaattagggcctgttccctccccgacgcgcggctgctggcctgcaggaagaactgctggcggtgggccagcctcgctgcgcatgcccac

SEQ ID NO: 133760 - DNA, 122 bp, Homo sapiens
aagaagcaaaaacattcattaaaacattaacaattgcatggcaggtacaacaagtcatcccgatgatacagcccattatgaaacatgctcgttatctggagcattcaagcagttttaagagg

SEQ ID NO: 133761 - DNA, 122 bp, Homo sapiens
actcacaccaaggaccagaagcagaattacagtgtgaaaaaccagagccggccgagactccgtcggggaatcccctccagctccctctctgtttcactcctttaaaaagccctggccatggc

SEQ ID NO: 133762 - DNA, 122 bp, Homo sapiens
cacctatggctgcacccactgactgtattatcctctgccccacctgttggattcacccaacgcaactcttgggagacactagaaatcaagaaaggaggaaaacgaggctttaatcttcttgg

SEQ ID NO: 133763 - DNA, 122 bp, Homo sapiens
ctatgtggactggagcggtatatgggcacaggtttctacgtgaaagtggtggatatagatcgatactggagaggaaaaggttaaatgtgcagcaaactcaaatggcggggagagcaagggta

SEQ ID NO: 133764 - DNA, 122 bp, Homo sapiens
gaagaggctgaagctagcggtggaggagttcgtgcacgcgacttcggaaggcgaggctcccgggggttgcgaggggcgcggcgccccggtgagctttcgcccgggagggagaaaaagccgta

SEQ ID NO: 133765 - DNA, 122 bp, Homo sapiens
actgaccttttttttatctgaaaaaggctttatagtgcccacatgtggcaatgttaatttcgttgtacttgtttcagagatgataaatttgagaccccaaaaggcccaaagtctctgctaag

SEQ ID NO: 133766 - DNA, 122 bp, Homo sapiens
ggcctgcccgccgcgcgcctgcctcggcgccctcgcaaccgcggccaggccaacctcagccggaaactacatttcccagcaggtcgcgcgctcctcgacagctctccaggcagtagaaacta

SEQ ID NO: 133767 - DNA, 122 bp, Homo sapiens
tcagtgtcagtcagggaggcgaactgctgagcactggccgcggacgctccgttgcagtctcgcccaggggccggtacctgcgctcgcgccgccgggttgaaaggatgaagccgcagctggag

SEQ ID NO: 133768 - DNA, 122 bp, Homo sapiens
tcccttctgccctgccggctgccccaagtgcgccctgaccacctactgcgctggcatggccggggccaccctgacagctgatccatcatctgtctggagagcagcagcagggcccaatgaga

SEQ ID NO: 133769 - DNA, 122 bp, Homo sapiens
ccacacgacgcttaacaccacgtcttcttgggctcctctaggctgtgaccgtttctcagacgttcctggtttctaatgaccttggctgtttggaggagggttttgtctgatgttttttctca

SEQ ID NO: 133770 - DNA, 122 bp, Homo sapiens
cccccggcagcggcgcggcccggcggccgctgcactccgcgcaggctgtggacgtggcctcggcctccaacttccgggcctttgagctgctgcacttgcacctggacctgcgggctgagttc

SEQ ID NO: 133771 - DNA, 122 bp, Homo sapiens
tacctgcatgagaagaaccagcggcagcggcagcacgaggtggtgatggagcagctgcagcgggagcggcagcacgaggtggtgatggagcagctgcagcaagaggcggcgccccgcctggt

SEQ ID NO: 133772 - DNA, 122 bp, Homo sapiens
gtctccccaaactcaagttgtcttcccgtgggctgctgctgccacctagtgtctaatcttcgtttctgcttcagcagttgtcagcgagcaggagggaaagaaggcttgaggcagaggacaca

SEQ ID NO: 133773 - DNA, 122 bp, Homo sapiens
gggagggggcggagccaggcccacggccggtgtcaggttgctccggtaacggtgacgtttcgcggcgtgggcggggccagcacgcaggttgcatattttaggaagtgaggaggaggcgcggg

SEQ ID NO: 133774 - DNA, 122 bp, Homo sapiens
gttaacaggctgagctgcggcccggcatgggtgggttacgggttttctccgcgaaagctccgggaaaagtgacctgaaatcgggactttcccgctgtcagctccaagcaggacctgaggacc

SEQ ID NO: 133775 - DNA, 122 bp, Homo sapiens
gggcgggcccggggaggggtaacctgggggattcagagcgcccgcctgccggggggcgaccgcgatgcagcgttccctgccgctggagtcggggtgacagcccggacccccacccagtgggc

SEQ ID NO: 133776 - DNA, 122 bp, Homo sapiens
gtccttgtgtagaagaccagggtgacgtaggaaccagacagcagggccagggcgttccagcgatccgcccccatcggcggggccaggtggtacacggccccgtccagagcaaaggaaagggc

SEQ ID NO: 133777 - DNA, 122 bp, Homo sapiens
catgtccttgtctggtcctgcttctggctacagccaccctggaacggagaaggcagctgacggggattgccttcctcagccgcagcagcacctggggctccagctgctggaatcctaccatc

SEQ ID NO: 133778 - DNA, 122 bp, Homo sapiens
ctccagatagtttaattatcacaggtacatgtaatatcattgtaccattacctctgtcttcgagcacttgctctgaaaagaaagatgctctgtttattgtgttgatggaactcctactttaa

SEQ ID NO: 133779 - DNA, 122 bp, Homo sapiens
ccacaggtctccctcctcaccaaagaacacccctcaataagtaactattttatagattctcgaccttggagataatttcagatgagattaaatcacttgcccaaaaacccttagttactaac

SEQ ID NO: 133780 - DNA, 122 bp, Homo sapiens
cagcatggatgacccttgaagacattacacccagtaacataaaccagtcacaaggctgggcgcagtggctcacacctgtaatcccagcactttgggaggccgaggcgggtggatcacctgag

SEQ ID NO: 133781 - DNA, 122 bp, Homo sapiens
ggcggctggcaccgggtgggttctagacccaaggtttgtctgcagaaggggaccagtagacggggtggattcgaggtggggacatgggacgcagcggtcggagccgcctggaggggtacccg

SEQ ID NO: 133782 - DNA, 122 bp, Homo sapiens
cctttcttttgattgagcagttttgaaacactgtttttgtagaatctgcaggtggatattcggagcactttgagttctttggtggaaaatgaaatatgtttacataaaaactacacagaaac

SEQ ID NO: 133783 - DNA, 122 bp, Homo sapiens
acctccggcgcttgctccaaaggatccgcctcatcgactcagaatttgagaattggaaggcgccagaggcttcagtttacagatgcgaacattgaaatctggagagggcaggtgacttgtcc

SEQ ID NO: 133784 - DNA, 122 bp, Homo sapiens
tgtctcctgtcttagaatttcaggattccaaactgataaggccttgcctctgtgtggaaccgtccacggctcctgtggtgtggagtctcctctctccctgagaggcctgccctggtccccag

SEQ ID NO: 133785 - DNA, 122 bp, Homo sapiens
tttccttccacctccccatgcagcatcgctaaagccagaagaacctacctggctgagagacgtcttcctgccttgtgtgtgtgtgggcggggcggtttgggggtaggattgagggtgttggc

SEQ ID NO: 133786 - DNA, 122 bp, Homo sapiens
ccgtgaatggtcggccggcctcaggtcaaaaaagcgtttaggtgtctgcgacggagcctccggagaaaggcaagcacgtcgcagccaatgaggtgatagaaacgcaaagcagcgaccaatga

SEQ ID NO: 133787 - DNA, 122 bp, Homo sapiens
cccaggaacaggctgatcctgcgctggcgagaagctcagccatttaggggaaagcgaaatcgaaagcggccgcctgctcactagataacgcctacttccaaaagtggcctgcccagactatt

SEQ ID NO: 133788 - DNA, 122 bp, Homo sapiens
ggagacggccttccaattcatgcaccagtttaactgcgggagaaagccttctcccagtcccgcacgcaactgccttcttcaaaccatgggccttccttgctgtataccctatactggataga

SEQ ID NO: 133789 - DNA, 122 bp, Homo sapiens
tagagacattaagtatgtgagaagaatacctcacgaatgacaattatgttccaggtagagcgaagcgtgctgcagctcccatcaccgtcagagtgtttgatttctctctacatccacatcga

SEQ ID NO: 133790 - DNA, 122 bp, Homo sapiens
caaacaggtccacggggttcatgccgtaggttttctagctggtgccagttctgcacggagcggttgatcttggggtctgagcccggctgcagcttgttcatgagtgtgcgtaagataatcca

SEQ ID NO: 133791 - DNA, 122 bp, Homo sapiens
agggctttgagcaggggagggattcaggctgactcagatgtttctgggatggtaaacccacgtgtcagcactctgggccactcccaaacttagaacgttctgggttggccgggatggtcctt

SEQ ID NO: 133792 - DNA, 122 bp, Homo sapiens
ccttccacgaggacgcctggcgagagaagggcctcgcgcccgcgcgtgccttttataatgcgaacaaagtagccaatcagaaaccgcggatagcgctcctgtctattggctgcgccatcgcc

SEQ ID NO: 133793 - DNA, 122 bp, Homo sapiens
ctcagtccatccccgggccagcctcaggtcccaatcccttctcccctactttcctagacacggtaagagaccgggaggtgtcctctacactgcccccagacccatcctatctgacacccaaa

SEQ ID NO: 133794 - DNA, 122 bp, Homo sapiens
gggacccgagcagtgacctcaggctaagtggccagagcagggttgtgcggcggctcagatcggatcttagggtttgttttttgtctgtccaaggaatttgcctaacccaaggccacagagga

SEQ ID NO: 133795 - DNA, 122 bp, Homo sapiens
ccatctcatatcagccagggacaaagcaactccttgttcatcccagcttggcttttgatccgtgcccatgcctggttcatgccttggacacataggtttcctttaaagaggtggtattgtag

SEQ ID NO: 133796 - DNA, 122 bp, Homo sapiens
ctgcccatccatcttccaggaaaccacaggctgctgctgcccagagttggcatgaggcttcgaggctgctgcttttccccctacatcataaccgatttcaaatggtgctagacaaaaacaga

SEQ ID NO: 133797 - DNA, 122 bp, Homo sapiens
gaattgtaatccctacctattgggggagggaccacatgggaggtgattggataatggaggcggtgcccccatgctgttctcgtgatactgagggaattctcatgcaatctgatggttttata

SEQ ID NO: 133798 - DNA, 122 bp, Homo sapiens
gatccccagctaagacgccaggtcctcctggaagcctagaaatggtgagagtgctgggtccgacatcctgggagaggggaagggggtggttggaacctgtgggaagtcgctgtggcgggact

SEQ ID NO: 133799 - DNA, 122 bp, Homo sapiens
catcatggaggggtaggcccgggccacccacgtatcaggcacggtgtcatagaagagagccgtggacagatcttccacgtcggtcgtgatggtcagttctccctaggagacacacagatggg

SEQ ID NO: 133800 - DNA, 122 bp, Homo sapiens
tattttgctaaaactgttctcaaggcagctctggtgtaagtgagaatataccacagcgggcgtcagaagatctcagttcaaatcccagcctgccatttatgagctgtgggacactggacagg

SEQ ID NO: 133801 - DNA, 122 bp, Homo sapiens
ttcaatttggtatttacaggtgcatcgtctccagaccctcttggcaagttctgaaaccaccggaaagaagtatgatggccgcttgcaagctgtgttttgtgtgttgccttcacgttgtggaa

SEQ ID NO: 133802 - DNA, 122 bp, Homo sapiens
cccattcctccagtatgagacagggactaggcttgagtcacgggggactgtgctgtgtcacgccctgccatactaatgggaccactctgcctgttgatggccgttgtagggcagccaacatt

SEQ ID NO: 133803 - DNA, 122 bp, Homo sapiens
taagaagacttgtattagagccttctttaattacagaaggaattgagctgtgtgagagttcgtacgttctgtgcccttagtgactttccgaccggatcccaaccactactttttaaaaaatt

SEQ ID NO: 133804 - DNA, 122 bp, Homo sapiens
gtcctgtttctcgtcctccgtgggcgtgagctcgtgtcggctgtacagatgcttgtactgcgggatcaggcacggaggtcacagctgtgcccaccgccggacattctcgccctcctgccgca

SEQ ID NO: 133805 - DNA, 122 bp, Homo sapiens
ccatccggatgccctgccctcggccgttctggctccgccattcccgggccccccagggctcgggtcccagctccccaggctcgctctctgcgccccgctccccaagcagaggggaagaccag

SEQ ID NO: 133806 - DNA, 122 bp, Homo sapiens
tggccggctgtcagtcgttttcctggccgttccactttgggtttgtgaaggccttgaccacgtgaggagacgcgttggtccggagcaattgaactatcatccccatcctgagcagcctcttt

SEQ ID NO: 133807 - DNA, 122 bp, Homo sapiens
gttaccgtaccagcatgtaactaccagagtgcaaaatccccttcccaggacagaaactcccgcccagaataggtcccgccttcctccaactattgggcaactcaaataaaagacatatcccc

SEQ ID NO: 133808 - DNA, 122 bp, Homo sapiens
tctgatatttgatcaagagaaaagttttaggcagaaaagaagaggtagctgagcttaaaccgtaagaagaaacctagtaaaggtgaagaaagtttctccaaaataatttcattgacatttaa

SEQ ID NO: 133809 - DNA, 122 bp, Homo sapiens
atccccgcacctggatcatgaactccgagaagacgtggacggccacggcgcagcccagcgcggtccccagacacagcagccacacaagccccagcacagccgcctgccgcagcctcccgcac

SEQ ID NO: 133810 - DNA, 122 bp, Homo sapiens
accccgaactggctgctccctgcgaggcggggcgcgcgagccctggcgcctcctggaggccggcttgcggcggcctcttagacgtctcacctccgcctaccgctctttcttttctaaacttg

SEQ ID NO: 133811 - DNA, 122 bp, Homo sapiens
gaggtggaagcgagagtccccctctggattcacacacctggaggcgtctgagtgactcctcgggtcccagagcccggtgagcactggcacatgggagggtcacagcactgcatctgagtgag

SEQ ID NO: 133812 - DNA, 122 bp, Homo sapiens
gctacaactaaggctttctaaagtgggagtcgggagaccgtgggaggatcgcactcacaccggctgaaggtcaaatcgcagaatgtgccagtcggtttggctaacaattgaagtcagaatcc

SEQ ID NO: 133813 - DNA, 122 bp, Homo sapiens
cttaagttaacattattaagaaaatgtaaacactgttttgatagatgtcgtgagtcgactcgaagtacagaatcagttgcagtggaacagctggctacttactgatttaagaggagccgaga

SEQ ID NO: 133814 - DNA, 122 bp, Homo sapiens
ggaaaatgaaattgcagcccgagtgcatcagttccaattatgtttattagtttgcattcacggttcattgatagcgtgattatactctgagcagtgcatagcaatcctgatgcaggggcaga

SEQ ID NO: 133815 - DNA, 122 bp, Homo sapiens
tcaggtttggggcaaggagctttgattgacccttaattttttcagtggaacggaaaacttcggtaaaatagcttctgaccttcggaacagatggattcaccttggaaaggaaaaatctcttt

SEQ ID NO: 133816 - DNA, 122 bp, Homo sapiens
gcctcggcctcccaaagtgctaggattacaggcgtgagccaccatgcccggccacggttccgtgtattttaaaatttagaaaagcaatcagctctttctgtcaagtgacgttctacactcca

SEQ ID NO: 133817 - DNA, 122 bp, Homo sapiens
atcccggctcactacaacttctgcctcccaggctcaagccattctcctgtctcagctgcccgagaagctgggactacagacacatgccatggtacctggctaatttttgtatttttagtaga

SEQ ID NO: 133818 - DNA, 122 bp, Homo sapiens
gccttcagaaatcccaagcactgtctctcatgtaggattgtctcaatggtcacataactccgtgtaggaataagtacattttacagtggactttggtgtggtgacagatgggaaacagacaa

SEQ ID NO: 133819 - DNA, 122 bp, Homo sapiens
tggccgcgaggcgcgggagtctgaccccagcgggaggctgcgggtgggtggggcgggctgcgccgccagggatccgtcggggtcgagggccgggagctccagccgcgccgctgcgtgccggc

SEQ ID NO: 133820 - DNA, 122 bp, Homo sapiens
ttgcctctcttattccacttcccatcaggctccaccctgctctctttgcttcagccatgccggctgttcctcagacatgccagcatactcttgccttggaaccttcacatttatcattctgt

SEQ ID NO: 133821 - DNA, 122 bp, Homo sapiens
taggaggaagtgatagttgaggagcctcctgacaaaaaaggcacgaaatacacctaaccacgactttacatacagggactgcagattccagaaccccctgaataagcccactaattccatgt

SEQ ID NO: 133822 - DNA, 122 bp, Homo sapiens
tggaaactgcaacatggccgtgattacggatggaacgtgcaaagcactgggcaccaaaggcggctgagggagaggcgacggggcgttagcgccctggggaaggagccagcgtggcttttgaa

SEQ ID NO: 133823 - DNA, 122 bp, Homo sapiens
acgctgagcaaccgcgactcccgctgcctcggccccacccgggacccaatgccgcggtcacgcccccggcgcgccccactgccaatcgcagccgtctccggccccctgggccacgcccccaa

SEQ ID NO: 133824 - DNA, 122 bp, Homo sapiens
ctcaggcggtttcatagcacagtgggcacggcggagcgtccgggcgaggctgctgactctcgatggcaataccaatctcaaattggcactgagatgtaaagctgctgccgcgttcactttta

SEQ ID NO: 133825 - DNA, 122 bp, Homo sapiens
gacactgtttgcccagtgtttgtgcaaggatggagtgggtgtctctgcatcacccacagccgcagctgtaaggcacgctggaaggcacacgcctgccaggcagggcagtctggcgcccatga

SEQ ID NO: 133826 - DNA, 122 bp, Homo sapiens
aaatgtctaggagggggtggaggcgcggctgcggcgcaggcagaggcgcaggcggaggcacggcggccagagcgcagcgcgcccggagccgggagcggacgcgacgcccggcgctgccccag

SEQ ID NO: 133827 - DNA, 122 bp, Homo sapiens
cagccacgcgggaatcaatggttcaggaaccggatctgtgcagcctcgcccgcagcgtctcggacttcaggactctatactagtccttgtctatttctggtagagccgcaacatcccactcg

SEQ ID NO: 133828 - DNA, 122 bp, Homo sapiens
ctcctgcttctgtggttcgctgcaaccggagatgttctccttgcctggcccatgcatgatcgcagcttcagccttggtcttctcctggcgttctccctgcgtggtgcgtgggtcccgatttt

SEQ ID NO: 133829 - DNA, 122 bp, Homo sapiens
cttccaaggtccccgggtttgcggatgaccccacagagctggcatgccgggtggtggacacgaagagtggggaggcgaatgtccgattcacggtttcgtggtactacaggatgaaccggcgc

SEQ ID NO: 133830 - DNA, 122 bp, Homo sapiens
gtaaaataactagaattaaatcttatttggccaaaaggtgtgttttttaactcgccaccccgcccccttccaggttgagttgtaaccctttcacttgcagggcgggggtgggggagtgaggg

SEQ ID NO: 133831 - DNA, 122 bp, Homo sapiens
cattccaagctggcttggagttcccctgtcccagcccacttcacctttgcttagtggaggcgaacacctttcctagtgagcagggagcagacgcgagtaagaaaacagtgaaggaaccatct

SEQ ID NO: 133832 - DNA, 122 bp, Homo sapiens
ttgtactctctcatgaatcgagttaaattaataaggtcacccattaaagaccagctggcccggaaggagcaaatgagctcagaattattggggatctgctctggccctcgttatcgaggaaa

SEQ ID NO: 133833 - DNA, 122 bp, Homo sapiens
gaggcaccacgtggttaaggagtttgtgcgttgccgcccacatagtgtgggcagctgaggcgccgcccggatcagagccgcagggcgtctactctgtcactttcccaacctgacttttccgg

SEQ ID NO: 133834 - DNA, 122 bp, Homo sapiens
gcgcgcgccggcgccccctccccgccacgtgaccggcgtcccagtccgacccgcgcgctgcgcccctgctgagcggcgcggagctaccacgccctgccagactcgcccttgggtccctgtct

SEQ ID NO: 133835 - DNA, 122 bp, Homo sapiens
tactgaagcttgggcccttcctggcaccctggtctccttcatggagctggtgagcccatccgggttcttctggatgtatgcatggggagcggggtgcactgggttgggtcaatgatgagaac

SEQ ID NO: 133836 - DNA, 122 bp, Homo sapiens
cacttcaggaggagcaaaagcgcgttatcgtagacccaggtccctcgttgtgtccagtaccgagctttggcactgtcaataagtcttttgagaaggatggcatccctacctcagctactgag

SEQ ID NO: 133837 - DNA, 122 bp, Homo sapiens
aacttcagctgctggagaccagggtaagcggcccccaagtgcctcctaaaagggttttctcgaagttcggcttctcggcagggacttgtgagtaggcacctcagcctctcagagtgatcctt

SEQ ID NO: 133838 - DNA, 122 bp, Homo sapiens
ccccgtccccatttatgcccaacccataaacccaaagtagagccaacctcgcactggctacgtaacccgggccaagctaaacattataaacctcaggctccccatctttaaagtataacagg

SEQ ID NO: 133839 - DNA, 122 bp, Homo sapiens
ggggaacatgtctgagtcggagctcggcaggaagtgggaccggtgtctggcggatgcggtcgtgaagataggtaaggggcttttcgccccagcaggcccggccggtgcagagctgctggctc

SEQ ID NO: 133840 - DNA, 122 bp, Homo sapiens
gcagtctagctgcgcgcgtgagggcaggaagggatcccctgcgcgtccatccttcctgcccgctggcctcgcaaatctcagctagcgccgcttccaggcgctgccaagggaagcgcagtgct

SEQ ID NO: 133841 - DNA, 122 bp, Homo sapiens
ataaaaagaagatggctcaagggataaacaaaggggcaatattatagaccatttactaatcgtatgacaatttgtgcctcagtgtcttctgtaaaatgcagataagaagatccattttgcct

SEQ ID NO: 133842 - DNA, 122 bp, Homo sapiens
ttggctatgttctcatacacagcaagttacattttaagttaaaattcaaagcacagcacacgtgagcatgccaaggcccttctcactccagctgagactagctttggcccccacctttctcc

SEQ ID NO: 133843 - DNA, 122 bp, Homo sapiens
gtctgactgcctgagcatggccctcctgttaccacctctgctgcaactggctcagagcaacgcctgaggctgatgcccaagtgaaatgctctcctcccaaggcctcccggcctggtcgccct

SEQ ID NO: 133844 - DNA, 122 bp, Homo sapiens
gcctccctgctccctgcagctgagtcccaacgggggccaggaggacacgcggatgaagaacgtgccggtgccggtgtactgccgccctctggtggagaaggaccccaccatgaaggtgagcc

SEQ ID NO: 133845 - DNA, 122 bp, Homo sapiens
gtgagtgttggtgccggagtttctgaggccctggctgcctggaaacaggcactggtgtctcgtcctttgcctccagtgcccctgtcctcagacctcacataccgccaaagtctggccatgga

SEQ ID NO: 133846 - DNA, 122 bp, Homo sapiens
aaaaccagtacaaagggggagggccgggaccgagggggcgggacggtgagaaacgggaatcgagcaagcgcagaaacaaacagatgttaatggaggcgtgaaggctactgcgctctcacttt

SEQ ID NO: 133847 - DNA, 122 bp, Homo sapiens
gtcatcagggaactcccaagacccctcccagtgtgactgccagtgccccctgcctcggtgcgtacctgccagtgcaagcagtgttacggccaggacccgcccagccgccaccagcagccagt

SEQ ID NO: 133848 - DNA, 122 bp, Homo sapiens
ggtgccagcaaggactgactaatacctgacccagggccaagctatcctgtgtcccatactcggcccgtagagccatcaaatcatctgggccccgacacacttgtttcgtacctttcccggtc

SEQ ID NO: 133849 - DNA, 122 bp, Homo sapiens
cgtaatctgcctatcttggcctcccaaagttctgggattacaggcatgagccactgtacccgccctaaaggccttctttgaaagagaaaaagaagaggtggcattctgtgaaggaacatcaa

SEQ ID NO: 133850 - DNA, 122 bp, Homo sapiens
accccggagtgggcaagtgacgagggcacggccagaaacgcattggcgtcaaggaaaccacgacccatcttcctggaaggaaacttggggacacttatgaagagaagactaggaaggaccgg

SEQ ID NO: 133851 - DNA, 122 bp, Homo sapiens
ctgctgcagagggaaatccacaggggctctcacggagcccacatgtcagacccacccgggcgtcgagactcaaaacacgaccatcacatggctgtccctcctgggaaagtcgaagccaaaga

SEQ ID NO: 133852 - DNA, 122 bp, Homo sapiens
actgaaactgtgctgtttccactttagtttattccctgatgtgaaatgatatcatgtttccgttgtttctggataaactcaagcaggaactaaacctcaacatgtcttgtggctttgatcta

SEQ ID NO: 133853 - DNA, 122 bp, Homo sapiens
ccacagttctgctccagccactccatgcctgatgtccaggaacatgtcaaggacggacctcgggcccacgcatataagcgtgaggagggctacatcctggatgattcccattgcgtggtttc

SEQ ID NO: 133854 - DNA, 122 bp, Homo sapiens
ccatgctgtatctataatgtctccaagaaggcagagatttgtgtctgttttattcagagacgtattccaaagtgcctggaagaaagcctaatacataatagctgtttgataaatattagctg

SEQ ID NO: 133855 - DNA, 122 bp, Homo sapiens
agatggctttgcttttagaagcctgccccagagtcttccatctcttccactctccctgcacgtccgctctgtatggcttttgttattaatgtggagcagttgaagtcactgacttgggtgca

SEQ ID NO: 133856 - DNA, 122 bp, Homo sapiens
cctttcccagtcgggaaggggcgtctgcagggaccaggaagggcttagcttggggctgcccgctccggcaccgacctgggacgcgccctgaggcccctgcctgggaccgtcccggactacat

SEQ ID NO: 133857 - DNA, 122 bp, Homo sapiens
ctacgactctaattaattccacgattctattgaaagttgaggaatgctgttttacccctgcgcattataaagaaaataactagaattactttagtcttcagattttctccctgttaattctg

SEQ ID NO: 133858 - DNA, 122 bp, Homo sapiens
gtctcagatttagttggcctcactgttaacctatttagagctttttttttcttatgtcatcgttcataagttttgtattttaaatattgttggtttctgcccagccaaaggcctattttcag

SEQ ID NO: 133859 - DNA, 122 bp, Homo sapiens
ggctggcattgctcctggatattacacatgaagtcttgggatatgaagatttacagcaagcgtggaccttggaaggctgggcagctcgctggctggctcttgagacggacgtcttacaggag

SEQ ID NO: 133860 - DNA, 122 bp, Homo sapiens
ttttattgtgctgtgtcttgaaatgttgtagttattacttttggatattatttagtattccgactttgaataagagtagtttgcacaccacacagctatagtgttataatattctgttttgt

SEQ ID NO: 133861 - DNA, 122 bp, Homo sapiens
tgcatttctctcaccttaagaagtaattggcagggttagagttgatattccaaactctgccgagaatacagaagaatgagaactctggctgcttttctgggagtcgggttcacaaggtgatc

SEQ ID NO: 133862 - DNA, 122 bp, Homo sapiens
ggtgccttcctgaggtgcccgaagggcaggcaggggaaaaggcggggcctcccactgcgacggaagcacagcggttaagattgcagaagtctggggactgcaccttgcccaggcctgtgggt

SEQ ID NO: 133863 - DNA, 122 bp, Homo sapiens
tcactcagaaatgcaaatgcaatcatgtaactgtcccactttccgtatttcagactcccccgcacccttaccataaaatcttcagcatgcacttcaggatctcacgatccagctctgcttcc

SEQ ID NO: 133864 - DNA, 122 bp, Homo sapiens
tcccctcggtgaaatgccaggggccaggaaattacttatttttttgcgacgacggggtctcgtcctgtgacccaggctggaatacagtggcgcgatcacggctcactgcagcctcgagcctc

SEQ ID NO: 133865 - DNA, 122 bp, Homo sapiens
tgtacatatctagtcgcagaagtgctcacatctccagaggattcaattgctcagtgttcacggagtacctctccactgggcagtggaccacggcctgcgtgagcctctcaaagagggtgggc

SEQ ID NO: 133866 - DNA, 122 bp, Homo sapiens
gcataatacaatgaactcataatttggccggatgatttgtaggcagggacgttttagtgtcggttttacgagattccttgatatattacagaattagagtccagatttacaccaaaaaggac

SEQ ID NO: 133867 - DNA, 122 bp, Homo sapiens
cgtgagccaccgtgcccagcctggtttattattttgatttgcctggtgagtccaacactacgctgggctcagagtgtagcactgaagcagcaaaagaactagcacagcccactccacgtttg

SEQ ID NO: 133868 - DNA, 122 bp, Homo sapiens
ggtcagctgccccgatgtccacggccggcgtctctccgttggaccgcccctcccgaagaccgccgcactctagtaagtggttgctgccgcccgacccattctggatggctgaaccgttactt

SEQ ID NO: 133869 - DNA, 122 bp, Homo sapiens
ggaaatagcttgggaaaacaagaaggatgaagatggcagcatttataatttcaggggaaccgtccatagatcacatattaagcattttgtagagtctctaccatgtgttcggaatgtacagg

SEQ ID NO: 133870 - DNA, 122 bp, Homo sapiens
ccacaccccagcgcccgaccctgcgcggggacatgcgcacaagcgcgcgtcctgaccacccggacgtgctggcccacacgcacacgcgtgcgcattacccccgccccatccgcgcctgcgct

SEQ ID NO: 133871 - DNA, 122 bp, Homo sapiens
cggcagcagaggcggcggcggtggcagtggcacccggcggggaagcagcagccaaacccgcgcatgatctcgagagtttcagcaacatccagggactgggctcagccccggagcgagagggt

SEQ ID NO: 133872 - DNA, 122 bp, Homo sapiens
gcaaccccggcccacccgaggctcctccgccaccgcccccgtccgcttccgggctcgcgccgccacgggcaccaatggggaaaggccacgccccccaccccagccaatccgggacaggggcg

SEQ ID NO: 133873 - DNA, 122 bp, Homo sapiens
acgtggagacccgcgtgcacgtgtggagactggcacgtgtgaggggcccacaggtgtggccgggcggcctttctcctccccacctctgtccaccctcgccgaggcgtcggtcctgctgagca

SEQ ID NO: 133874 - DNA, 122 bp, Homo sapiens
ctcctgggctccctgccttagctatggcccggccccctgtcagacaacttcagaatgcagcgctcctgcaaagctctcagaaagaccagtgcctggggaagcagcaggggctttgggggttc

SEQ ID NO: 133875 - DNA, 122 bp, Homo sapiens
gaaaggaatttcctacaggctggactaaccattaaaaatgtctctaccttcaggagtccccggcgtgcagtggagcctcgctgggggaaatgacagcttggaccatgggcgcccgcggtctg

SEQ ID NO: 133876 - DNA, 122 bp, Homo sapiens
taccagcacggtttaggaaaagataaccaggcccggcctttcttctgttcctttgccagccgtgggggcggggtgggggccgtggcgggcgggcaacaatccgcggcaggtaggaggagaga

SEQ ID NO: 133877 - DNA, 122 bp, Homo sapiens
gggcctgtctgcggtaagtgctttggtctagaagagtcaacttgtggtttcacatctggccgggctgaccagatgttgcaaggatacagaaagtggacactcaatcccctggaggacacaat

SEQ ID NO: 133878 - DNA, 122 bp, Homo sapiens
ttgttcactggaatctgcagccctggacccctggtaggcgcccagtgagcctgtacagctcggccctgcactggacaccgtcccctcgcaggcctgggctcagctgcaggtgccaccagaag

SEQ ID NO: 133879 - DNA, 122 bp, Homo sapiens
aagtgcccaaaccagacattgcatttttcaggtctgaagcccattagggactgaggtaaacgtcccaaaacaggcagggggcattttggcattgttagtcaaatttacttagtattctagaa

SEQ ID NO: 133880 - DNA, 122 bp, Homo sapiens
tccctgttggaactctcctgtaagcagcctctgcctgtggcttagagggggagcagagatcgtctagatacctatttctattgctgtggtcttctttgggggacatcgagcctcttgtattc

SEQ ID NO: 133881 - DNA, 122 bp, Homo sapiens
atgcgatacccttgcggcctgcctggaagtcagcacagcccatgccgggtaggagtgacacgcactgcgtgttcacagccttaaccagaggcgagagttctcacagttggggatgcggctca

SEQ ID NO: 133882 - DNA, 122 bp, Homo sapiens
aataaagtgggcaagttcccaggacccgtcctaccgtattccagatgtctggactccaagcgcggttccttcccagtgttcagctgctgcgttgatcctccgcgggggggcctgccctgcac

SEQ ID NO: 133883 - DNA, 122 bp, Homo sapiens
gaggcaagcattacatcaacttgcctgcgtgttcatagacataggaagaccaagacacagcgggtctatgaaacgtgcccagggttaccataccagttggcaatctgggatttgatcactct

SEQ ID NO: 133884 - DNA, 122 bp, Homo sapiens
gggaagaggcttttgaaaagcatttgagagcagagagaataaataaagcaaagacccttgcgaaaggaatgactcagctgttcaggatggaggtctcaggaaaagaggcaggcccagatctg

SEQ ID NO: 133885 - DNA, 122 bp, Homo sapiens
agggcccagcacagccccagacccgaaaaaagtgttctgcccaagattccgagagccctgcgctctagggcaggggcagagttttggaaacagtgcaggctctggagccagactggcgagat

SEQ ID NO: 133886 - DNA, 122 bp, Homo sapiens
ggcaaaccgctgcaaagtcctagtgaggcagaactcgacccccaacactcagcagcctgccgtccacccatccacacccccgtctcgccccctgccccaagctggcagatgccttgtcgccc

SEQ ID NO: 133887 - DNA, 122 bp, Homo sapiens
caaagcctggcgagactgcaaggttagggatctcgtacccttcagcttttggcagcggttcggaacggtcaattcaatgagagcggagttttagaataaaaatactcttctatccgtgcagc

SEQ ID NO: 133888 - DNA, 122 bp, Homo sapiens
cgggtgctgtctgagatgccagctcaggagggctccatcctggctctgctgccccagggccggcgttcccggagggctccaggttcccggttctagtcctggaaaggcagaagggagagggg

SEQ ID NO: 133889 - DNA, 122 bp, Homo sapiens
gctgctgacggagatggggcctaggacccacactcctcggagccaggggcagccctggggcgcctctgttcgcagcagcatcttggggcggcaggaggacagagccgctgccccgcctgtcc

SEQ ID NO: 133890 - DNA, 122 bp, Homo sapiens
agttgtaacattcatatttcctcctggcttttattgcttgtgttaggagagacagtcctccgtggctctcttgtgctcctccaggccttgcaaggtatgccaagaatgctgtttgcagtaaa

SEQ ID NO: 133891 - DNA, 122 bp, Homo sapiens
ccgtgcaccagcccccgccaccccccgctaccctcaaggtggccgagcccccgccacggccgccaccaccaccgccgcccacgggccagatgaacggcacggtggaccacccgccgcctgcc

SEQ ID NO: 133892 - DNA, 122 bp, Homo sapiens
caatgcgcccgggccgctgtagctgctccggggccagggcgctgggccagctctggcgcccggcgcttgtgattggctgcccccagcctcagcccagcgcgccctcccacccagggcgcagt

SEQ ID NO: 133893 - DNA, 122 bp, Homo sapiens
ccggtactgcgctgtcatggacccactgcggtaccctgtgctggtcaccccagttcgggtcgccatctctctggtcttaatttgggtcatctccattaccctgtcctttctgtctatccacc

SEQ ID NO: 133894 - DNA, 122 bp, Homo sapiens
tctagaaagccaaacagtccctaattactaaatcacatatagaatggacatagccgccaacgaccaaagaaagaatataaattgcatgtcacatctcaacttcagagagaaaccatctgatg

SEQ ID NO: 133895 - DNA, 122 bp, Homo sapiens
caggtgagcccgggtctcccacctccgcagcccgtgcctcctctctgcgtctgtgagatacgcacagtgcccctttagggatggagaaggagaaggccttgttttcagtaattcctaacatc

SEQ ID NO: 133896 - DNA, 122 bp, Homo sapiens
gcggcagagctcggccaaaccccagcatcgcctgcgtgcgtgcacgatggggccgctccacgccagcccaaacctcagcatcgcctgcgtgcgtgcacgatggggccgctccacggtcagcc

SEQ ID NO: 133897 - DNA, 122 bp, Homo sapiens
ctcccgggttcacaccattctcctgcctcagccttccaagtagctgggactacaggcgcccgccaccacgcccggctaatttgattatattttaagtagagacgaggtttcaccatcttggc

SEQ ID NO: 133898 - DNA, 122 bp, Homo sapiens
agactcgcccgcctggtagtggtgcttgtacagcgtctggtagccattctcgggaacccccgggttcaggcacggctcgtacttcactgcggggagcatgccagtcacgtgccagctgcact

SEQ ID NO: 133899 - DNA, 122 bp, Homo sapiens
ggggagagaagcctcgggttcaggtacccagagtgtggtctagaattgggtgcatgggctcggggtgggcacctcctctgcaccctcctcctcatgcttgtttcccagcatacagtgtcttc

SEQ ID NO: 133900 - DNA, 122 bp, Homo sapiens
gaaaaccagatccccaagaatagatggagccatgccaggagggtgtgttctaggctgcaccgggccaaggccagcacttggccacagccccaaaagtattcattcagcggatccttgtgcat

SEQ ID NO: 133901 - DNA, 122 bp, Homo sapiens
taacccgactggagagctcgcaacaaggcagccaggtaaacacagacctgctctcagacacggggctctgctctcagcctgccatggacaagcgccggcaactcatcctctccaggacataa

SEQ ID NO: 133902 - DNA, 122 bp, Homo sapiens
aggcttaggaatgaggcctcaaagggttttgcaattgaaggcattttgcttatgggtcagcggatgttatgtaatgtaatattgtcaatatagttcctaggctcttaattatttgcctcttg

SEQ ID NO: 133903 - DNA, 122 bp, Homo sapiens
ttcagccgcagcctctgggccggggcggcccccaggggccaggagagagccctggagtcccgcagccaccatgcacgctcccagcgtgctgtgtccttcgccactcccacgcgcccgttcct

SEQ ID NO: 133904 - DNA, 122 bp, Homo sapiens
gggagggacgtcgcactagcctggagcaggagtccctggtgccttatcacccagctacgacgggggtctccacggcctggagagtaagatagaagaccacctacctgaacgagggcatccac

SEQ ID NO: 133905 - DNA, 122 bp, Homo sapiens
aggctctcccactcatgtgcctgagtgaagatagtgtagaacagagcctcagccggcccacgtggccgtgaagcatgattaaaaaataagccttggctattttaagccagtgagatctgggg

SEQ ID NO: 133906 - DNA, 122 bp, Homo sapiens
cccagcacatgaattaacagtggcatccgcagggaaaattgaaaacagagagccgctctccgttatgtatgtttaatgttctgtttgaatcttttaacatgtacatgtatttctttttcaat

SEQ ID NO: 133907 - DNA, 122 bp, Homo sapiens
cactcactcctgcgcacacaggctgctccgcggacacgcttcacggagcaggtgtgcccacgcgcaataccctcctggcccacaggcctccgcacgcacaggacacacacacacactctctc

SEQ ID NO: 133908 - DNA, 122 bp, Homo sapiens
tgtagggtagccttcatttggtaaggaaactagccatttgatggagtgctgcatgaataccgagtgctgttagtggatgctgcacgtacatgacagagcaggctttcagtgagagtgttttt

SEQ ID NO: 133909 - DNA, 122 bp, Homo sapiens
ctgtgacggggaacttgtctgggatccgcgtgcagcggcggatcaggccggggttgacgccgttgaggtactggtacccaaagaaggtgtcctctgcccagtgctcggccacgtactctgcg

SEQ ID NO: 133910 - DNA, 122 bp, Homo sapiens
actgtgcatgtctgtcgaggatgtatgtccaggaggtgcactgtgcatgtctgtcgagggcgtatgtccgggggtgcactgtgcatgtctctcgagggtgtatttccggggggtgcactgtg

SEQ ID NO: 133911 - DNA, 122 bp, Homo sapiens
atttccagaagcaagaggcttggctcatgcggaatgccgcagagccaggcctcaacccaccggagaatctctgagaacactgactgcagcccaccacggtggccccgggtcctgctctgagc

SEQ ID NO: 133912 - DNA, 122 bp, Homo sapiens
gcagttacttggtggcagagacgatgcgaggagttaaaggcatgcagcttagcaaagccacgcagagcaggcacactggaggcagaacagctgggtgggtcattggcttgtggggctctggg

SEQ ID NO: 133913 - DNA, 122 bp, Homo sapiens
tcatcattccttgaccttcacctgttttggtttttaaagtgttttctcttctgcattagccggagttcattagagagccgtccagcctccatacctggagttggtcactgatggcctttttt

SEQ ID NO: 133914 - DNA, 122 bp, Homo sapiens
ttaggagttgtgggttggtaagctcccaggtacttcccgaggctatggtgtgagagcccccgtcctgccctctggggctccacaggcccctggcaaggccgatggctcaggatgatggggca

SEQ ID NO: 133915 - DNA, 122 bp, Homo sapiens
ggacctggagactagtcggccggaaggaggtgccgtggctgccggctgtaaccacaccgacgcgcgagctctgcgcgggcttcacgtctcatgcgcgggagcctggccgggatcccggcgac

SEQ ID NO: 133916 - DNA, 122 bp, Homo sapiens
tccaaaatcaaggggtttgcatctggacagagcctttatcccatgaggaaggtggcagggcgagagagcacattcatgaaagagagagagagagataaaggagggatagagagagccagaac

SEQ ID NO: 133917 - DNA, 122 bp, Homo sapiens
cgaggcccgaggcggaagtgggacggccaagcagggaagcgagggctcgggatcgacggccgcggggcgccgacgaggagtgcaggactcaggaagggcgagtgcgcggcgacagagcccgg

SEQ ID NO: 133918 - DNA, 122 bp, Homo sapiens
tagttgctccagtatctgcgctgcaggaagactgtctggtcgaagcagggcctcaggcagcgggccaggaaggccgcgatgatcagcagcagggtgacgctccagccgatggcctgcaaagt

SEQ ID NO: 133919 - DNA, 122 bp, Homo sapiens
ctcggacgcaccaggcagccaatggctgcgcagaggtgtacagcagatggcgtctgactgcgccgttccttcctcctcctcctcctcctccttctcttcctcctcctccttctcttcctcct

SEQ ID NO: 133920 - DNA, 122 bp, Homo sapiens
gagcattctcaagtgcattgattaattcattaatccaaaagctaacctgtgagtacagaacgcctgccttgctaatggatggctgtcagctgcattccagagcatctgtgctacgggcctct

SEQ ID NO: 133921 - DNA, 122 bp, Homo sapiens
gcaaagagcagtttgagaatgtcttggggaaattgaatgaagaaggaaaaaaaggaagggcgttcaggcaagaaataagacaatgtgttggaagattgggaacaaatttcttaaatatctca

SEQ ID NO: 133922 - DNA, 122 bp, Homo sapiens
aactcgggctgaagacagtgcctgtacagcaggagtgaggagcggagcccagaggtcactcgcaaagaggctcatggcggtgatgtccacgcgggaggggccgcgtctctccgcaaccctgg

SEQ ID NO: 133923 - DNA, 122 bp, Homo sapiens
caatggccctacaccaacgcagtgctgctggagatccagcgcttcatcagcgtggtgccgcgcaccctcaccctcgacacccacctgcacagccactgtctggccaaaggtgcccactgagt

SEQ ID NO: 133924 - DNA, 122 bp, Homo sapiens
gctggatctccgctggggggcgcaccggggaacgttcagagggcctgagacccgacccctcggggaagccaggcccagaaatttcagggtgctaccctggcagccccagggaatcaggccca

SEQ ID NO: 133925 - DNA, 122 bp, Homo sapiens
cggccggcgcgcttggcggcagccgtgggaggcaggccggcaggcagacggactcgcaggcgtgtggcggcggccgtgcttgctagtgagggcgggagggagtgactcactgagcgtgtgtg

SEQ ID NO: 133926 - DNA, 122 bp, Homo sapiens
cagtcagatctgtcttcttctctttttactatcataaccattaattgctgaggaatcaatcgagccctgaactgtggctgtgatttgactgcccagctgatcaaagcagctctttgccccat

SEQ ID NO: 133927 - DNA, 122 bp, Homo sapiens
caaactgtggaatctccttttgcagacgaaatctttctgcaatggctgagtcaagttcagcggaatgggaggagagtgggccgtggggaaacgtgttacttgtgtgttactcttagcaatcg

SEQ ID NO: 133928 - DNA, 122 bp, Homo sapiens
gggagaggcgcgagcgggaaccggggctgtgcgccgagcttgcgggccagttggagttcccggtgggcgtgggcttggcgggccccgcactcggggcagccggctagccctgccggccccag

SEQ ID NO: 133929 - DNA, 122 bp, Homo sapiens
ggagctctggtgaggagcagaccgtgtccatgctggtaaagcgtcccccgccccgacccccgagagtgcccctgagctggaaggaaacactgagcggttgtccagcagatcactccgcagct

SEQ ID NO: 133930 - DNA, 122 bp, Homo sapiens
ctcaactcggtcaccactgtcccgctggagttttaaggacagaaaccccaagtaagatatcgtcccttttctcagttttctctgtggcatcatccttttttattgtggtaacatacgggtaa

SEQ ID NO: 133931 - DNA, 122 bp, Homo sapiens
gccctttacattgcgttcttaacggttcagtcaccttaaccgttattattcacttgcgggcgagaagtccgagctaggtgaggcggaacgggactcttacgagtaggactggggatagaact

SEQ ID NO: 133932 - DNA, 122 bp, Homo sapiens
tcggggggatgtgtggtgtgcaggaccacgtgggaatgttagagaaaggggaagtcactccgggcctgccctgctaacagacctgctttttggatttttccagccagggatttttgtgtcct

SEQ ID NO: 133933 - DNA, 122 bp, Homo sapiens
aacctgaaacgccggcaccgtggagttacaggcagtacccagccacaggagctcagccgtcgtggggtcacgagaccccgagtgcatttctttgctcagttacatttggggtccgctctgac

SEQ ID NO: 133934 - DNA, 122 bp, Homo sapiens
aaggggcggggaccctgagcgaaaggtgcggaggcggcctgccggggtggttcggcttcccgttgccgcctcgggcgctgtacccagagctcgaagaggagcagcgcggccgcgcggacccg

SEQ ID NO: 133935 - DNA, 122 bp, Homo sapiens
aaaaaaaaagatgcctgctctggagagctttgaacttggaagaaattcctatctgctaggcgggcaggcagaagtaccatggagaaggccacagtcttggagacaggtggggaagatcaagc

SEQ ID NO: 133936 - DNA, 122 bp, Homo sapiens
ctgtgtgggaacccctcgcagcccagctctctgctaggcctgtgtatcacaatctgagctcgccttgtattcctacgttggttctgccccaaggcacaaagccttgcctgccacagggtgct

SEQ ID NO: 133937 - DNA, 122 bp, Homo sapiens
atgaggtcacatggggaggctgcagtcgtctgaaggaagatcagcctccaagatggctgacgcatagccgacaagttggtgctggctgtcggcaagaatcctcagttccctgccacatggat

SEQ ID NO: 133938 - DNA, 122 bp, Homo sapiens
aattgtacagaccccagttttaaagttagaaatagaatccttgagcatatcctaggattccgtgtgttttaaataaactatgacagtaaaatccaatgtgtgacctaaataaaacagaagct

SEQ ID NO: 133939 - DNA, 122 bp, Homo sapiens
cctcttaggggccctgttttctgttacaatggatcgagatttagaacaggctctggatcgcgcagagaatatcattgaaattgcccaacagagacctcctagaaggagatactcacctaggg

SEQ ID NO: 133940 - DNA, 122 bp, Homo sapiens
gtgtggtgggcagacaccacagggtggcatcacctggtggcatttccagaacctcagccccgattccagcacccaccaccgcctgaccctgtgtaacctgctgtcccgggtcccagagtgca

SEQ ID NO: 133941 - DNA, 122 bp, Homo sapiens
gagggtatcgatcccgccgggggctggcttggttgctggtgccctgagcccttctctgcccgcctgggtgttgccttcactgatggaggtaggcgtccagccagatgtcaccagacttcttc

SEQ ID NO: 133942 - DNA, 122 bp, Homo sapiens
cgtgcgtggcgtgtccgctggaccaggggacgggggcgcgccgcaggtgtaggagctttgcgcgcctacctggcggtcgtgggtcgaggaggggtcaagaattgttgtctagcagccctctc

SEQ ID NO: 133943 - DNA, 122 bp, Homo sapiens
ccttagaaaaacaaatgtggcaaaggtggaatcatacaacatatggccttttgtgtcttacgatattcatttttgcatctgaatgttcaaactaaataatatctaccttgtgaggccatctg

SEQ ID NO: 133944 - DNA, 122 bp, Homo sapiens
accaaaggggtctttccttgataggtgtgagtatgtaggacacctgctctccttgataagcgtgagtacgtaggacacctgcaggggaagcaccctaaggagaaccacctgggtcttaatta

SEQ ID NO: 133945 - DNA, 122 bp, Homo sapiens
gccgggaacgggcgtctgcagggagcaagatggactcagtgtggggctgcctgcctggaacgcgccctgaggcccctgcctgggaccggcccagactacgtttcccagaggccccccaggaa

SEQ ID NO: 133946 - DNA, 122 bp, Homo sapiens
aacaacttgtagccattgttattgcaacttttactcctattgcagatgaaaagctttgtgcgctgtggctccctttccaaaaggcccatctattttctaaacagctcctaggttatgagacc

SEQ ID NO: 133947 - DNA, 122 bp, Homo sapiens
cacaaatggccgtctgggggccgggctgccaggctgaggtgctgcatatgcatgagggggcggggaggggcggggccgcgccgcttggggctgaggttcgggaggtaacccgggcttcagac

SEQ ID NO: 133948 - DNA, 122 bp, Homo sapiens
tccctcagggcccgctccagcccttcgtgcttcgtgattccggtgatgaccggttgctgacgctggagaggtctccacaccctgtttgcctgtgatgtgaggtcaggtttgggtggtccagc

SEQ ID NO: 133949 - DNA, 122 bp, Homo sapiens
tgaatgtaattaccatcactctgttattccaaaggtgtggcagctggaagcaggtaatctcgaaggcaaccctgagtggcaatccttatggccaccacagtccacctcttgcaacacgcatg

SEQ ID NO: 133950 - DNA, 122 bp, Homo sapiens
tcaggtgggacctctctgtggccatctggagtggaaatcagaggctccaccttccagcctcggccatctgatttctcagcatggtttcaacgtgggtggcctgaggctgggttccaggccca

SEQ ID NO: 133951 - DNA, 122 bp, Homo sapiens
gacctgtgcagtacgccaggtgacactcggggggcgctgtcaggttgtagacgtagtagccgccggcacaggccttcacctggacggacgcatcccacaggcagcagtggccgctccagtgc

SEQ ID NO: 133952 - DNA, 122 bp, Homo sapiens
acggaggaggaggcagaagacggggccgtgccagactagccgggtagcctggaaccacttcgccaacctgcaaaggcgtagcacttctccctcccagcctgcagccgccaccgactcggcgg

SEQ ID NO: 133953 - DNA, 122 bp, Homo sapiens
taagagaggctcacctatagatcaggaagccaactgactcatttcccgtgagaagtgtcacggctcagtgggtcagcctttcacatcattactgccggtgtctcctttccctggagaaaagc

SEQ ID NO: 133954 - DNA, 122 bp, Homo sapiens
gcaagccacccgggcccagccttgttgaatcttccggcagtgtggcgagttaggtctgctcgttcccactctccgcatgggaaaactgagcttcacagttaatataaacaccaacagtaata

SEQ ID NO: 133955 - DNA, 122 bp, Homo sapiens
ctggtccctacagcagcctgccggacaccccagcatctcacccagatgcctacctatggccggcgcattgatgcagagctctcttgccaagagaagaaacgtctttccaagcacgtacacat

SEQ ID NO: 133956 - DNA, 122 bp, Homo sapiens
ggtttccgagtaccgctgaactgtgggtgggtggccgcgggatccccaggcgaccttccccgtgtttgagtaaagcctctcccaggagcagccttcttgccgtgctctctcgaggtcaggac

SEQ ID NO: 133957 - DNA, 122 bp, Homo sapiens
taaattccaagggtcagtagggccccccttacactttgaagtgatcggaaagtgatgtgacgctccggggatcccaccaggctcagagatacccctggttagggctccgacaagtcgttccc

SEQ ID NO: 133958 - DNA, 122 bp, Homo sapiens
gctcgcccgtgtgcaggcgcaggtggttggtcaggtaggtgttgcggctgaagcccttgccgcactccccgcagcggaagggcttttcgcgcgggggccgggccagcgggggcccggccccg

SEQ ID NO: 133959 - DNA, 122 bp, Homo sapiens
tcttttcaaagtaatctttatcttactaaagcagaaatgaaagagggaactgaaaaggagcgggagcagcagggataggagtatttataaagcatctaatatatgctaaatatctactcaat

SEQ ID NO: 133960 - DNA, 122 bp, Homo sapiens
cgcgcgcgctttctggggaccagggctgtggttcctgctccgcgtcgtgcctttagacaccgccgggcgttcgtcctccatccctccccccttttccccactccgcggttgacgagggccgc

SEQ ID NO: 133961 - DNA, 122 bp, Homo sapiens
cttttgatagagcagttttgaaacactctttttgtaatatttgcatgtgtatatttagagcgcattgaagcccacagtagaaaaggaaataacttcacctaaaacctagacagaagcaatct

SEQ ID NO: 133962 - DNA, 122 bp, Homo sapiens
gatggtttccctgagatcacacaattaaagagacaagctggaattccaactcaggcctgtcgacccaccctgtgattttgaccagattacagcactcaggaagagttctcgttttgaaacct

SEQ ID NO: 133963 - DNA, 122 bp, Homo sapiens
gaagtgaaatacagaaatagccagattggttacagctgggttacagacttatttgaacaccgaacagttggccacctgtgagtagtatgtcttctgattggctgagacttggctacttgtta

SEQ ID NO: 133964 - DNA, 122 bp, Homo sapiens
cgggagggtgggggcgggggcagggcagcgctgagatttccggggagcggcaggtgaggccgcgcggggcgggtgacggcacccgggcgggctcctttccaggctggagcccgagactgcca

SEQ ID NO: 133965 - DNA, 122 bp, Homo sapiens
agctgcgtgcgagcgccttgcaggtggctgggggagattcacatccacttctgcaagacacgggccccccactcccagccccagccccgccgaaaccagctagacagctcctcctccttcac

SEQ ID NO: 133966 - DNA, 122 bp, Homo sapiens
atttccttgaaatgcatgaggctagaaaggaaattggaacttaaagaggcagtgtttctccgagatgacggtgctcctgctctgtcactcactatatctttagtgaatgaatgaataaatga

SEQ ID NO: 133967 - DNA, 122 bp, Homo sapiens
atagatgcagtcagatattctagaattctaggttaggaatgctttaacctggggtccgtgcgctggcttcagggaatctgggagctctctaaaatgctataaacaatgtaatatttttctgg

SEQ ID NO: 133968 - DNA, 122 bp, Homo sapiens
tccagcaggtggcgctgcagcagcagcagcaacagcagcagttccagcagcagcagcaggcggcgctacagcagcagcagcagcagcagcaacagcagcagttccaggctcagcagagtgcc

SEQ ID NO: 133969 - DNA, 122 bp, Homo sapiens
ctggccttctagctctctatttatctccaaagtgtccggttttctttctcctgctagatgcggattccttgagggcagagtcacatctgacgcccctttcccatggggcacagcacgcatgc

SEQ ID NO: 133970 - DNA, 122 bp, Homo sapiens
gcaaacaaattgccacctcagtggaggctctttggcatgctaaattttttccagttcttgcggcgagatcaggaatccctaaaagtagccgctcccccgccccggggccccgacagtgcttg

SEQ ID NO: 133971 - DNA, 122 bp, Homo sapiens
taaattttaatcctctgtccctgcagaccaactcaaagcagtaaccttggctaccgttgccgcagaagaaacacaccctgcagatttccagttctatattcagtcttagaaaattggtcatg

SEQ ID NO: 133972 - DNA, 122 bp, Homo sapiens
gccagccgagggattcggaggctcttttgaaaagattgcttttccctcgtgcgtttttgccgccctgtctttaaacacctaaaaaccgtggtttctggggtggctccccccgaggggccgcc

SEQ ID NO: 133973 - DNA, 122 bp, Homo sapiens
cagtgaaactgagtagctgagtattttgtactcccctggctgagagatacgtttgttgaacgacttacctgtgagaaggtggggtagcatcctgccagtgtgcaggagaaggtaaacctgca

SEQ ID NO: 133974 - DNA, 122 bp, Homo sapiens
cgctcctgggtcgggtggctcggggggagcccgcggccgagggaccccttcctcctcggccgcccccccacctgggaaggctccctctggggaaaaaggggtctcggtctcgtagccgctgt

SEQ ID NO: 133975 - DNA, 122 bp, Homo sapiens
acccaggcgcgcttctcccacagggcttctgggctgcggtcgaagtgtggctggagaggccgcaggtggcaaacaaacggctttgcggcgcccgcctggaggcccgctggagcgccgccctg

SEQ ID NO: 133976 - DNA, 122 bp, Homo sapiens
gcacttgccagaagttgtcaattccctctcctattagaaaattatagtccagtggccgggcgcagtggctcacgcctgtaatcccagcactttgggaggccaaggtgggcggatcacaaagt

SEQ ID NO: 133977 - DNA, 122 bp, Homo sapiens
ggaagcacacgaggaagtgggtacatcagcatgagagcaggaaacgttttcattcacagacgctgtggataaatcccaaagagagagctagcaaaagagggagcttttttaagtttaaagaa

SEQ ID NO: 133978 - DNA, 122 bp, Homo sapiens
cagggaaagaaagagggcagaagccgcaggctgcacagcctcacaaccgcccagagggcacggcggccctggggctcggtctcttccgagcagagcaacctccgtgtctatcagctccttcc

SEQ ID NO: 133979 - DNA, 122 bp, Homo sapiens
tgcgagaacagtcgggagggaccagaagggacgatctcccctgtctctctttcacaaccccggcagcaaacatctctaagagtctgattaggtcacccggagcatgtggtatcttgggcatt

SEQ ID NO: 133980 - DNA, 122 bp, Homo sapiens
tgctaaggggcgtggctcagccgcacggaacccgagcccccggcgacttataaatatttgcgtattcaaatgaggcctggctcccgttgctatggcgcccaggccgcaaccccgcggcggcc

SEQ ID NO: 133981 - DNA, 122 bp, Homo sapiens
gggtcgctgctcggtgcccgagggcccctttccagggcatctggtggacgtaagcggcaccgggaccctgtcccagagctaccagtacgaggtgtgtctgacaggagactctgggactggtg

SEQ ID NO: 133982 - DNA, 122 bp, Homo sapiens
gacctggtgccacctgcgggctcgcccgaactctcgccaccccagcccctcttccggccccgctcggagtttgaggagatgaccatcctgtatgacatctggaacggtggcatcgatgagga

SEQ ID NO: 133983 - DNA, 122 bp, Homo sapiens
gcggagacatccgcgcgttggtgcaactgcacaacaacgaggcgggcaggctggtgcgtacgggcaggatggagtgagtgtgtgcggaaatgtgagtgtgcgcgcaggagtgtgcttgagga

SEQ ID NO: 133984 - DNA, 122 bp, Homo sapiens
ccaccctcatggctcctggctcctctctggcccaggcaggggcctgtccctggaccgctccgtcccaccggcccagcaagctcagcagctgcccacttgctcgccagccccttacaccccct

SEQ ID NO: 133985 - DNA, 122 bp, Homo sapiens
gacctctcacttctttaacgttagggtcacttagaagctcccagcagactggcaagcagccggggagggggccgtaaaaaacaaggccacccccacctccacgcaaacacgtcccctaggca

SEQ ID NO: 133986 - DNA, 122 bp, Homo sapiens
ctcatccgcctcgcaactcccgtttctacagatgatgaaaatagcaaagacctgctcgctcgggttaaatcggctgccagaggccaagttaaaggctttccccacaccgcgcgtcacctccc

SEQ ID NO: 133987 - DNA, 122 bp, Homo sapiens
tctggaggagcgcaggagctggtgaaggacgacccgtgtttgcattttttagatgattgccgtgaggaccactttctactgcacgagcaggcagcgttctggcagctgctgggtgttttgat

SEQ ID NO: 133988 - DNA, 122 bp, Homo sapiens
ggtccagacatccgtttgttagatgctggtggccacccagagtgtgcccagagattgactcgaaggccacccgaggtgtctggctcaatttctgggtcggatcagggtcagggaatctgagt

SEQ ID NO: 133989 - DNA, 122 bp, Homo sapiens
caggggaatgaggtgaaagcgaagcacgaaacatcgcgagaggctactggactctcgcgacgatttctgggattgcccctccccccttccccaagtgccgtttcggtttaatctagtgtgtg

SEQ ID NO: 133990 - DNA, 122 bp, Homo sapiens
cacccacctgagctccgcatgtgagccgaccttcacccgcctgcctcagtttcccgtccacgaaaggggtgagcgcccccacgtctcctgggactgtccttgggtccgatgcggggctgtgg

SEQ ID NO: 133991 - DNA, 122 bp, Homo sapiens
ggagtcctgacctctctcttctctctccgccacctctccccgccctggcttggtggcagtcggtgctgctgggcattgtgatcctgcttgcttaccgcctggagttcacggacaccttccct

SEQ ID NO: 133992 - DNA, 122 bp, Homo sapiens
tgcctgggctggtctcaaacttctgagctttcaagcaatgcaccctcttcaagcaatacacgctcccaaagtgctgggattacaggtgtgtgagctactatgcctggccctttttcctattt

SEQ ID NO: 133993 - DNA, 122 bp, Homo sapiens
agacgggagccgggagactgcaactcccgtcaggccgtgcgccactggtgggggggatttcgagaccacaggcgggcgaggtgcccaaggtggtggaaagcggagaccgggagaggctaggt

SEQ ID NO: 133994 - DNA, 122 bp, Homo sapiens
cattgctaaatcagaagcattcacagtttccctccgggaatcttcctgtttgctttccagcgcgtcccctgggtgctggggccggcggacaccctcgaggtgcgtcgcctcggacacctccg

SEQ ID NO: 133995 - DNA, 122 bp, Homo sapiens
aagaccacaaatggggcagctgcaaacaacagaagtctattttctccgagtcctggtggccggaaccaaaatcaagctatcggcaggactgtcctctctctgcaggctgcaggggaggttct

SEQ ID NO: 133996 - DNA, 122 bp, Homo sapiens
gacacggtgaaaccactgtcctcttaagtgcctgcgtgcttgtttctgtacaggccgcatcgggaagctgggtatagagaaggattaacagagattgcaccctggtgacctttcccctcagg

SEQ ID NO: 133997 - DNA, 122 bp, Homo sapiens
ctccatgtgtggcgctcctctgctccatcctggcagcagacagacatcacccagagggcacgtgtctgcctgaggccttccaaaagcaagcccacaggccctctcctgaagaagtggtggtc

SEQ ID NO: 133998 - DNA, 122 bp, Homo sapiens
taggacattgaatcgtacctttggttgaatatgattgcagaaaaatattatctcagagagcgctggatggaatttggcttgctgagctagtggagtattcccagcttcagaagaaatatctg

SEQ ID NO: 133999 - DNA, 122 bp, Homo sapiens
ccactggacgtgggcaggaatagtgtgtggttcaactatgagattcctagggcctaccaccgcctggggtccaagaagagctcagcgagtatttgcagagtgagtgaatgcaggaaggagtc

SEQ ID NO: 134000 - DNA, 122 bp, Homo sapiens
acaacagagaacaactggcattccagggaacacttgcagatctggagatcttgcttgtcacgctgtggggtggatgccacttgcatctagtgggtggataccaggagtgctgctagacgtcc

SEQ ID NO: 134001 - DNA, 122 bp, Homo sapiens
tctggagaccacgacgattctgctatgaagacactcaggagcaagatgggcaagtggtgccgccactgcttcccctggtgcagggggagcagcaagagcaacgtgggcacttctggagacca

SEQ ID NO: 134002 - DNA, 122 bp, Homo sapiens
tgacttcatgtactaactgattatatgccgccttagagttctttgaacttcacaagcttccgtctgctgattttgcacatttctgtttcttctgccccgcccctcatctccttaagcatgtc

SEQ ID NO: 134003 - DNA, 122 bp, Homo sapiens
tgcagccatcgcagcaaggaagcggagtagaagcccagggtcccagggacagcgggatgccgggtggtcagggccacagcgggacaaatccacacccatgaccaccacaaacctgtagagga

SEQ ID NO: 134004 - DNA, 122 bp, Homo sapiens
ttttttttgagatgtaacacctcgctgtgtcgcccaggttggagtgcagtggctcaatctcggctcactgcatcctccacctcccaggttcaagcgattctcctgcctcagcctcctgagta

SEQ ID NO: 134005 - DNA, 122 bp, Homo sapiens
ccccagtgcaaacaagctgcaacagcgggctcggcgggaggaaggagaaagaaggggaggcggcagcggaggaggagcagggcacataaaccagggcacttcagttgtctcatgtttccttc

SEQ ID NO: 134006 - DNA, 122 bp, Homo sapiens
cgttcccaaggactgcacacctgcccaaggagccccccacccccaccccaactcgggctccgcccccagcccgtaggagccccaggttcccctaaacatcccgggcggcggggcgggggatc

SEQ ID NO: 134007 - DNA, 122 bp, Homo sapiens
tttgtctttcagaccagcttttaatctttctgcctcttgcccctgtgcagccactgagcacgctctctgggctagacactgggctaggggtctggaaatacaaagacaaatgatgcgtagtc

SEQ ID NO: 134008 - DNA, 122 bp, Homo sapiens
atacaggccaggaagaggaagccggcgtggaaggaggccgagtagaggccagagatggtgcggcaggtggcacttcccagactccagccctgaagagcccctgctgccgcgaagggcagagt

SEQ ID NO: 134009 - DNA, 122 bp, Homo sapiens
tccaaggaggccagaagtgccactcagcatgtgggggtgggcacagaggacaatgacctgcgtcagaagctgggggtgggggaggcttggagtggaggcgcgtgctgactgggaggagggtc

SEQ ID NO: 134010 - DNA, 122 bp, Homo sapiens
gacccggggtctcccaccagcgcatcagctttggggaggtgacacacactggcagacaaccgtgtcatcgcacggccaggctgggccacagtgcagaggacagagggggtgaccgtggcttg

SEQ ID NO: 134011 - DNA, 122 bp, Homo sapiens
tcttggcatggctagccagctttcccaaagcctccataggccactaagcttctgtccacacggctggctggtccgtcagtttaagtcacccaattcaactgacatcatgacagcttgcaaat

SEQ ID NO: 134012 - DNA, 122 bp, Homo sapiens
cgccggacccacaagcggggtcgggccaggcaggggtcgcggtggagccggggcgggggtcgcaaccagagcctcacctcgggcccgggtccggccgggcgcggagcccgcggcgcctgttt

SEQ ID NO: 134013 - DNA, 122 bp, Homo sapiens
ggtaacaaaaaggttcacaaagattcttatctcaaaccgataaacagatgcaaacagagccgggactatctgggctaccacaaggcctgtttgactaattgccctgatagatccttctcctg

SEQ ID NO: 134014 - DNA, 122 bp, Homo sapiens
acaagagcaagtggtctcttttccaagactctctgagagagaacctcatcacagggacagcgcttcctcgtcagcgagcccgatggggcaggcgcggaagggaaaggccttctctgcatttg

SEQ ID NO: 134015 - DNA, 122 bp, Homo sapiens
ataaacacatttggaacgggggtgtttgaaatgtcagtcagggcccagggtctgtgtgtgcgtgtctgtgtggctggtgttctgccagtgaaaatgaaactgaatgttgaaaggaaaccgga

SEQ ID NO: 134016 - DNA, 122 bp, Homo sapiens
cttgtcatattcttcctctcacaaagcatgaatgctgtggattcttgcataacaaagcaccgtttccctgtggtgccaaatgtccatttgcttgcttctcttctttctccaattgggggtcc

SEQ ID NO: 134017 - DNA, 122 bp, Homo sapiens
gaagggggcaatcagggaaggcctgccggaggaggtggcctttgagaagagacctaaagacgatgagatctgtgggaagagagatcgaagcaggccacacaaccaaggaaaaggctctgggg

SEQ ID NO: 134018 - DNA, 122 bp, Homo sapiens
aaatgcccaagattaaaggaaagaagatacaaaccacgcggatttgactccatttcaatacggctgggagtcctggctctgtgtccctccgcctcgctccgcaccaggtctgaagcccagtc

SEQ ID NO: 134019 - DNA, 122 bp, Homo sapiens
ccttcaggggaagttaatattccacaaagttagaagttacaggagaggaaaagtagtaaacgccccaaaatgaggcagttacttctattatatcttcaaaggatacatggctcaaggcagat

SEQ ID NO: 134020 - DNA, 122 bp, Homo sapiens
tcagggttggaggaagccggacaaagatgaatgggattcagagcctgaactcaaggtcaacgtcttctgaatcacaaagagctggtgggtcagtctgggagaagaaagaaaattctgcgcca

SEQ ID NO: 134021 - DNA, 122 bp, Homo sapiens
tccccagtctttgttgttactcaaaacacacacacacacacacacacacacacacaccctcgctactcttgtagctccagcccagataagttctctgaaggaggggcgtggaggtggagggg

SEQ ID NO: 134022 - DNA, 122 bp, Homo sapiens
gcggttggcgcgccgctgcgcgaaggagccttctgattggttgcgctgggggtgccgcggcggccttccccaagggtcggcggggatgcttcttccgcctggtcctagtggcagcggattct

SEQ ID NO: 134023 - DNA, 122 bp, Homo sapiens
tgtgatcgcagtttttgctttcaatgttttactgaggaaatccgtacaactgcctatttccgccgcacgtgaggcttcgggtgccctcgcctgcaccagtgtttatgattgacaagcgaggt

SEQ ID NO: 134024 - DNA, 122 bp, Homo sapiens
ctaggaccttcagggtgtccaggaatccagtgcgggctgcgtcatggactggactggtaccggaggtgtcctggacattggggctggcaccttgcttcagcagctccagggcgatggcggtg

SEQ ID NO: 134025 - DNA, 122 bp, Homo sapiens
catcctgggttcaaatcttggccctgccacataaacctgtgttatttaagagtaagttctcgaccattctgggagtcccagcaaaatgaggatacctagtagtacctatctcctaggcttgt

SEQ ID NO: 134026 - DNA, 122 bp, Homo sapiens
tgatttctgaatcacagatctatgctgatctgcaccttggtgttggaatatatatctgtccggcagcttggtgataactttaacatcttttgtgtcgtcttagtgtaaaataatactctagg

SEQ ID NO: 134027 - DNA, 122 bp, Homo sapiens
cgatgcagcagttcattaagcggctgtgtttcctcctaactggcgaaggactcaggtgggcggagcagagctcagcttgggaggaggcggacgcgagtagctcggcagggggactcgcttgg

SEQ ID NO: 134028 - DNA, 122 bp, Homo sapiens
aatcatttatatttgaaatgatgataaatccaggatgatatgaagcatgtttaatggagacgtaacctaatttgtgggtgagggaaggctgcactgaagaaaatatgtttcagatgacatct

SEQ ID NO: 134029 - DNA, 122 bp, Homo sapiens
acagaggcggagaaggggcgaagttactcgccctgtgtgatctggaacatccatcctctccggcctgcaggcatcagagctcctgggccgccggcctttggacccggatcaagacttacact

SEQ ID NO: 134030 - DNA, 122 bp, Homo sapiens
cagtgactaaaacactttgatgtcctaagacagtcccagaggctgcagcgctggctggcgcggtcaggcctcacccaccgcggggcaggccgggcgcaggcgtctacacggacacatcccgg

SEQ ID NO: 134031 - DNA, 122 bp, Homo sapiens
gcggcccgcacggggtcgccacctgccccgtcgctgccccccttaccttggtgagctgggcgattttcttgctcattttcaggtgcatctcctggctgtagtccatgctgtgcccagccagc

SEQ ID NO: 134032 - DNA, 122 bp, Homo sapiens
gccgctctgctccctccagcccagtgtcttactggaaacttgcaggctttgctcctccagcgtcttctaaggtttggttttgaggcgcccgggcttccctttactgcgtgggaagtagtgct

SEQ ID NO: 134033 - DNA, 122 bp, Homo sapiens
gtgaaacattcagcttactaatgtagagcaatggtaaatcatttgcagagactaatttatcgaagactaaattttgtaacaagtttacctgaagcatggcattaatggttccatattcttgg

SEQ ID NO: 134034 - DNA, 122 bp, Homo sapiens
cttaattttcctaagcattcagtgagtgcgcgtatgacgcaagaacacacagaggttctgcgtgtcacccatgaaaatgtgacagcacccgggaagacgtgggcagcacagacaaacccagc

SEQ ID NO: 134035 - DNA, 122 bp, Homo sapiens
aggccagcccccactattttgagtcaacctagccatggcaccagggagacgagaagacaccggacaatgtccccatcctgagccatcactagattgcatcctcctgagtgaccctgaaccac

SEQ ID NO: 134036 - DNA, 122 bp, Homo sapiens
tcctctgaagggaagggactccccgacccagcgcctcccccgtcacgtgaccctgtgacccggagcagccatcttaggcatcgcctcatagaggaactacatcttccagaatcctcgcgccc

SEQ ID NO: 134037 - DNA, 122 bp, Homo sapiens
tttcagccaggcatggtggctcatacctgtaatcccagcactttgggaggtccaggtgggcgcatcactttacatcaggtgtttgagaccagcctggacaacatggtgaaacaccgtctcta

SEQ ID NO: 134038 - DNA, 122 bp, Homo sapiens
agccaggaccctcctttgaggcacaggaacaataaatccctccagagtccacaggtctctcgcatccagtctgaaaggttgactccctgcacggggcactcctggggatggggctctgcagg

SEQ ID NO: 134039 - DNA, 122 bp, Homo sapiens
tggagtgtgttgtgggatgaccgtgtgcatgggactctcacctagataccactggattgccgacagatagatgaggtgggaccctgactatcagccctgctttgcagtggatttggctctca

SEQ ID NO: 134040 - DNA, 122 bp, Homo sapiens
cctgtatatagagaccccctcacgggaacaatggggtggcaaggctggacactgggggctcgtggtggccaattctatgctccctcagggtcccgctctgtccatttcctcccctgcaggcc

SEQ ID NO: 134041 - DNA, 122 bp, Homo sapiens
tgggtactcgtggacacgaagaggggaacaacagacgctgtggacaactagagcgtaaagcgaggagaagggggagggttaaaacactacctatggggtactgtgctcactacccgggtgac

SEQ ID NO: 134042 - DNA, 122 bp, Homo sapiens
ctccgcctgcggccgcacagctcctccatgctccgcgccccaaaggaatgaatccggccgcgctgttcgccacgccccgccacccgagctgcctcccgcccttagtcggctcggactgcagc

SEQ ID NO: 134043 - DNA, 122 bp, Homo sapiens
tgagccgtttcctcctatgtaaaaattgggacaatagtacctacttcacagacttcacgacgggtaatatgaaatgagagaatgcatgtaaacaacttagtattttctacgttggctgttac

SEQ ID NO: 134044 - DNA, 122 bp, Homo sapiens
ttcctactgaattagaagctccagggcccggaaatccgcattttaaactagctccgtaggcgatttggattcacactaaagactgaggaccacactgttctaggcactgttaggtgctggga

SEQ ID NO: 134045 - DNA, 122 bp, Homo sapiens
aggcgtccttcagcgggcaaacggataaaccatgtcacctccagacaacaggatataaaacgaaatgagccatgaagctgtgaagacatgaaggggccaggcgtggtggctcacacctataa

SEQ ID NO: 134046 - DNA, 122 bp, Homo sapiens
ggtttggagacaaagagaaagatgctgctcttatcgacttacgaaaagctccagcagcaacgtggaaacccaattcctgtgatggagacaaacgcttcctcaaaatttcctaggttcgaagc

SEQ ID NO: 134047 - DNA, 122 bp, Homo sapiens
ttccactggatcatcagcatcaatgaatctgggaaacacagcaggcagcacacagcttgacgtgcaagaacttccgcagccacatccacgaccttccgcacatcttacggggattttgagtg

SEQ ID NO: 134048 - DNA, 122 bp, Homo sapiens
tggaggctgcatccagggagctgcaggctgggagtgtagtggaagccagatcacaggggccgcagaataagtgcaagataaggaggtgaggtcatctgaggccagatctcctgggccttgga

SEQ ID NO: 134049 - DNA, 122 bp, Homo sapiens
ttcttcatccacacattcacattcctggagtcctcagtgttgctggccatggcctttgaccgttttgttgctatctgccatccactgcactaccccaccatcctcaccaacagtgtaattgg

SEQ ID NO: 134050 - DNA, 122 bp, Homo sapiens
ttctggaacttgagaacttttcaaaagagtgatcggatgcagcccctaaatatcccagggcggcatctgtgtcctgtggggggtgtttgtgcctatacatatgtatggccatatgggagcgt

SEQ ID NO: 134051 - DNA, 122 bp, Homo sapiens
gccttaagatatgaaatgtgtttattgggcagctgccaagtgcttcctgctgcataacaccgcctggggtgtggagagctttatgtaaacttcagagagcttttcctgacttaatttccacc

SEQ ID NO: 134052 - DNA, 122 bp, Homo sapiens
actgtatcccctgggtaccatcttttccttgacagtggtcttctgtccttccacttccgtcgagtcacccccatgtgccttgccctggggttaccaagaggagggggtgcacagagcaagat

SEQ ID NO: 134053 - DNA, 122 bp, Homo sapiens
gcagcggaacgcggcgggcccgggaccccgtttccgggggtagtctaatgaaaaggcactcgggagctatttctgaacggacctgggcttgtcggaccagtgagcggcggcggctgcgcggc

SEQ ID NO: 134054 - DNA, 122 bp, Homo sapiens
gccgggcctggggagagaggcgggtcctgtcggcggggcggggccgatagcaggcagccccgccccccacggccccaggctcttggacggcgaagctgggcatggtggtgggcaactgtaat

SEQ ID NO: 134055 - DNA, 122 bp, Homo sapiens
ccccataataaagtattactggtccaaaatgtcaatagtgctgagattgggaaatcctgacggggagggaacattcaaggatatgggtagacttaaaatcatgccaactcataatcacatta

SEQ ID NO: 134056 - DNA, 122 bp, Homo sapiens
gactgggctctcaaaatggtaccttgctgtatctgcttagggcttgaagtatgtgagacacggtgtgacccccacattcctggagcaacaccactgcatggtttctagatggctttctatgt

SEQ ID NO: 134057 - DNA, 122 bp, Homo sapiens
gatcacactgcagagtccaggcagctggtagggaacggcttagttccctgagtgcacaaacgacctggtcaaccagtcactcaggaaacgttccaaaagccaagttcccggatgctggctgg

SEQ ID NO: 134058 - DNA, 122 bp, Homo sapiens
tgcaccggaccaggacgcgtggcgcctccagagaggacgcccatcgcccggagcaggttgcggtcccggttcccgccgaactctagcaaccgcgaggagaaatgtctgccgtagggggcgga

SEQ ID NO: 134059 - DNA, 122 bp, Homo sapiens
ccaggtcgtgaccacacacgccacatttggggcctggctctcctgctgcctgcaggggtgcgtgttgtgggggctgcaggccggggtctggctgcaggaggatgccatagacggcacagccc

SEQ ID NO: 134060 - DNA, 122 bp, Homo sapiens
cgcctgcgggcggggacccttccgggctgagctcagggacccctcggaatcacagcaaaccgcgcctggcaaggcagtgacaggagtgcctcctggcggctctccgggctgcccgcgctcgg

SEQ ID NO: 134061 - DNA, 122 bp, Homo sapiens
agcgacgcatggtgtgcgtggagtacccgggagtggtgcgtgatgtggctaagatgctgccgactctgggcggcgaggaaggcgtctcccgggtaaggggctgggaatctcggtgttggaat

SEQ ID NO: 134062 - DNA, 122 bp, Homo sapiens
acgccctcctttgctgactgaccgatggggggtgagacggggcccaggcctcccacggctcgcccgctctggagcggtggctccgttgctcaccacggtgactgcgtcgttcagcagcgact

SEQ ID NO: 134063 - DNA, 122 bp, Homo sapiens
cctgtgtctttactaaatcgctttttgagaaattcctccaacatttgcataatgtgttcccgctttccgcgaccccccccccccgctcgcgcgcgcgctcccacactcacaagcacacactc

SEQ ID NO: 134064 - DNA, 122 bp, Homo sapiens
gccggccgagctgggcgggcggcctaattgccttggttaatctcattaattcctttgtgccgccgcagttaacaactccctccgcccgagctctccacccccacccttttttctcagattgg

SEQ ID NO: 134065 - DNA, 122 bp, Homo sapiens
cataggcattcagagggcagccggcatctctctgatgactgggaattaaagaatggttggcgcgggcatccccgaataaatgcaaaatgctctcctctatgtctggattcagcagaacctgg

SEQ ID NO: 134066 - DNA, 122 bp, Homo sapiens
tgggagcaggtcagaccagtgggctgggcagggccaggatgagacagccccagtggatggcgagcaggaaaggccgccagaggcccacccgggtctcctcgtccaaagcagcactggcccgg

SEQ ID NO: 134067 - DNA, 122 bp, Homo sapiens
tcaagaggagggtaacgaagtcacagggccccgcgaaggatgtgcggagagcggcggcaccgcccagtacggccaccagggggcgcccagccctcccgccgtcatccccaagggcgctcccg

SEQ ID NO: 134068 - DNA, 122 bp, Homo sapiens
agagagggagcacggagcctgctccacccgccgtggcgggcttcagggctcactgagaggcgtcggccagcgtaagaggatacctcacagttatgcaacccgggccagcgaggatgggcccg

SEQ ID NO: 134069 - DNA, 122 bp, Homo sapiens
acccacttatcgagcttcctcacctttctagtttgcttcaaatgctgaatgaccgtagaacggtcgtctttgagttcttcagcagcttctcgtgtggttgtaagaggatcagcttccacgat

SEQ ID NO: 134070 - DNA, 122 bp, Homo sapiens
agggagggtcggatcctgcagccaaatctctgagctgagctgagatgagtccagtctcaacgaggaccgtgggcggctgtggagaaccggaagggtttctcccccggagcgatgtgtctgtg

SEQ ID NO: 134071 - DNA, 122 bp, Homo sapiens
agcagcgccttgcgtgtgtgtggtgtagtcatggaccctgcatcccagcttttcttaggccgtgaacgtacctaatttgatggtcgaaacgccagtcggtctgaccgtgtctaggccctgct

SEQ ID NO: 134072 - DNA, 122 bp, Homo sapiens
cccgcagcgactcgccctcgtcgcaccgaatccgcagtcccatcaccatgcccaccacgccgacacccaccgccagcaccatgcacgccacagtcaccgccagcgtggctggggagagcggg

SEQ ID NO: 134073 - DNA, 122 bp, Homo sapiens
ggcaggggatgtactgacccgggaccctgggcctgggccctgttggtggggaaagtcttccggctgagggttgctcaagtcagtctgtccttctgtaggtcagagacagaaaggcccctcct

SEQ ID NO: 134074 - DNA, 122 bp, Homo sapiens
tctggttgccgcgcagctgcgtcgttctgacccagggtaggtgcagggcggctggaagcacgtgccgccgcttcctcattctgggactacatcccccacaatgccgcgcgccgcgggcggct

SEQ ID NO: 134075 - DNA, 122 bp, Homo sapiens
ggctctcgggtggcggggacagaccctccttcggcatgggttggatcggacaaggggggccgtgtgccgtcagctgccccacttctctctgaagcccagtgggctccatccactgacccgcg

SEQ ID NO: 134076 - DNA, 122 bp, Homo sapiens
aagtatagatacttttgcttcttttgttttccatttgtatagaatatctgtccattctttcgatttcagtttgtgtccttagaggtgaactgagctccttgtaggcagcatatagttgggtc

SEQ ID NO: 134077 - DNA, 122 bp, Homo sapiens
aaccagaaaaaaaaataatacacattttgagcagcctctgtgggtgcagcttgttgaactcggagccagacgctttttctggcgaaacggagaaaaaacgccgcggaaacggtgcgcagggt

SEQ ID NO: 134078 - DNA, 122 bp, Homo sapiens
ccggcctttccccaagtacggctgggcgctgggatggggcctgctgtaacggcagggagacggtctctccgcggcccaggagagagagaccagaaggaacggcctcaggtagcctaacggcc

SEQ ID NO: 134079 - DNA, 122 bp, Homo sapiens
ctctccgctgatctttcttcctgatggagaggcacggggtaggcggccggctagctgtcgcgggctctagtgaaatctgtggacaagtgctgagataggagacactgcactggtgacgcctc

SEQ ID NO: 134080 - DNA, 122 bp, Homo sapiens
caggaatctggccaccccacccgccacgttcccagccacctgcacattcctcccagggcacgatacgagccccagatcgggcgtttgggttcagagctctacctgcctggaggctgcctgag

SEQ ID NO: 134081 - DNA, 122 bp, Homo sapiens
gccggcggccgccaccgcgggcccgttgggacctagcagcagcttcttctccacccccaccggcgccatcttgccaactgcagccacaaagagggccctcccccgggcccgccgaggacccg

SEQ ID NO: 134082 - DNA, 122 bp, Homo sapiens
ggtactcaggcagctgccgcaccatgtcctgcttggcctgccgcagggcggcctccagctcggacaacttggcattggcgtccttaacagccagctccccgcgctgctcggcatctaccatg

SEQ ID NO: 134083 - DNA, 122 bp, Homo sapiens
cgcagcggccactcacgcagcgacactcgtctgaatcctcctctgaactgtcctcatctgcgtggcccggaacaatatggacttcaacactgagccccggccaaaggctaccaaccccgcca

SEQ ID NO: 134084 - DNA, 122 bp, Homo sapiens
ccgtggagtcagaagcccacagggccaagaggccttgtctgcctccaccttctaaacccccgtttggatatccagacgcccagagtcccctgtccaaaaaggccccaggcctgcttccaggg

SEQ ID NO: 134085 - DNA, 122 bp, Homo sapiens
tccgcgttgcagagcccaagcccagtggcgcaggatttgttttggtaagaggggatttagcgtcccaattgctgcaaattgacacagttgcggacgtgcaagcgcagaagaaatttgtcctt

SEQ ID NO: 134086 - DNA, 122 bp, Homo sapiens
tagaggtccctggcagcccagctctcctaaacatgaagctcatcaggcagcaccgtcggacgctgatggtgggggctgggccctgtgctgacacaggctcagcaggctgttaatgaggtcct

SEQ ID NO: 134087 - DNA, 122 bp, Homo sapiens
agaaaaggaagatggcaaatgtcaacatttcttacaacacatttagttatgaatgacacacgacagatcctgggagacagtgcaggggttcaccagagaatttaacagaattgtattctgag

SEQ ID NO: 134088 - DNA, 122 bp, Homo sapiens
atataaagaaatgttaacctaaatggagaatacaatgagaaggtccaaaatatgtctcatcggagacctagaagaaaagaatagaaaggaaggaggaaagggaatatttaaggagatgataa

SEQ ID NO: 134089 - DNA, 122 bp, Homo sapiens
agccccgtaaggacacccgctccccagccgctgctgggacacgtttaagagaagagacggcgggtgtgcgccaccaccttcaccacgtcgtgtctcgatcctggacagagcgtcaatgccca

SEQ ID NO: 134090 - DNA, 122 bp, Homo sapiens
ctctctccccccgtctctcgctcgcccgctcgctcgcgctccccgtgttgctctcaaggacgaggtgaaatccctttgctggtcatgaggcggcttcagagacaaacaacacaatgcgagtg

SEQ ID NO: 134091 - DNA, 122 bp, Homo sapiens
cttatcccctctttgtcatttatcaacttgagggcttcagggaaaaacttcagacatccacgaggaagtgaatcctcaaagaggactgccctggaggctcttgggagggtggagcatccaaa

SEQ ID NO: 134092 - DNA, 122 bp, Homo sapiens
gctgccaccactgaactccagacaccagacaggcgctgcggagacactgagcactgccctcgcggctgtcacgtctgcggctgtcacgtctgctagggggttggggggtccaggaagggcag

SEQ ID NO: 134093 - DNA, 122 bp, Homo sapiens
cggaggagagtttgctgggactggtgggctggtttcctgctctggggggcggatcaccttcggggccgcctcttggagacaggggcgcctagggaacgaacaggttcgcttgagtcacttac

SEQ ID NO: 134094 - DNA, 122 bp, Homo sapiens
atctgctgcagggcctgggaactcctgacacttggtgtggccttgaccaccgggagcaaacgcagtgcacacggcaaccggctctgacaaggcagatgctcctgcccagggcaggtcggacc

SEQ ID NO: 134095 - DNA, 122 bp, Homo sapiens
actcaggaagcacaaggggtcagggagttccctttcctagtcaaagaaaggggtgacagacggcacctggaaaatcgggtcactaccacccgaataccgcacttttccgacaagcttaaaag

SEQ ID NO: 134096 - DNA, 122 bp, Homo sapiens
aagacacaataactttgaactaaaataattatatttttgttgttttccagtctgtccccacgtctatatcaccaccacccccaatcccaccccgcaggagctaactcctccttcctgtccct

SEQ ID NO: 134097 - DNA, 122 bp, Homo sapiens
tgctataggaacatgaagaaaggaggatggataattctttggggacacaggaggccatcacggagaggtccacagaggcaatggcactggagcgagagaccttgaagaacatgagaaattta

SEQ ID NO: 134098 - DNA, 122 bp, Homo sapiens
cggaggaggcaggctttcctggtgacccccacgaggacaagcagtagccccaatagcctgcgcgctccaggactgcctacccagcactaccccaaacccccagttccaaacccgagacttca

SEQ ID NO: 134099 - DNA, 122 bp, Homo sapiens
aatagcatgcaagctatataggcaattttaaagtttctggtagccaggttactttaaaagcgttagatgaggctgggcgcggtggctcacgcctgtaatcccagcactttgggaggccaagg

SEQ ID NO: 134100 - DNA, 122 bp, Homo sapiens
caccaattttactttaaaaagagtaaggaagcctttttaatgctgtgtccagatgcttaccggccacgtatggtaaagtcaggccgtgccaaaaaggcaatgacaaagaaaacctttctccg

SEQ ID NO: 134101 - DNA, 122 bp, Homo sapiens
ggtggctctaatactgctttgtgctgcctgccacacttgccctttgagcctgcgaatggccgctagtgagcaagctctgcttcagagcagtctagttaggtagaacagggacttaccagctt

SEQ ID NO: 134102 - DNA, 122 bp, Homo sapiens
aggggcggagcttgtggaggaagatggctgccgcctgggggtcgtccctaacggccgcgacgcagagagcggtcactccctggccgaggggcaggtaccaagactagaaaggcacctggaaa

SEQ ID NO: 134103 - DNA, 122 bp, Homo sapiens
gccaggtgggtgtgccaaaggaatccccccattgtctcaggaccttcaaggccaggatcccgggggcgggcccaggtcacacgtcggtgctgatgctgcggctcctggcgaaggcctcccgc

SEQ ID NO: 134104 - DNA, 122 bp, Homo sapiens
accccactgtaaggaagttgacaatgtcagcagcagccatgctgaggcggccagtgtaagcggaggctaggacagtctcaaaggcgcctgggtccatgacactgggcagcgagatggaggtc

SEQ ID NO: 134105 - DNA, 122 bp, Homo sapiens
gctcccacctgcccttctccccagtaagcatgcacacccgagtacactggagtggaagcccggggcctgttacctcctacagtcaggcactggttctttacgcttctcatttctctgcactg

SEQ ID NO: 134106 - DNA, 122 bp, Homo sapiens
gctcgccctgggaacgccagcggagccggcggcggcgagtagggggcaattcgaaggagacgcgcagcttacacccgcggcgggtggagggagcaatgtgacgaaaccattgagcttgaccg

SEQ ID NO: 134107 - DNA, 122 bp, Homo sapiens
tctgagccaggtgcgggttataacctcctggtgtgccgtttgttaagcctgttggaaaagcgcagtattcgggtggaagtaacccgattttccagatgccatctgtcacccctttctttgac

SEQ ID NO: 134108 - DNA, 122 bp, Homo sapiens
aaaggaagatcccttccagtctcaaagatctatagccctggggaaaaaaggagagcccaccgactcctgggacatcaagaggtggacaggtaacaaaatgggacaagtgaacaacaggaggg

SEQ ID NO: 134109 - DNA, 122 bp, Homo sapiens
gctctcagagggcaaagcacagcccccttctcagggtgaggctcccagcagccccagacccggggatgtgcctcctttgggaaatggctaccccgggtcctggaaagatgtggggccatgcc

SEQ ID NO: 134110 - DNA, 122 bp, Homo sapiens
ctgcgggcctcactggctgcctcatcgtcactggaacccgagtcagcttgggcactgctccgggcacctggagaaggtggaataggacactcaacttgcctctactgatgagggatggctgg

SEQ ID NO: 134111 - DNA, 122 bp, Homo sapiens
tcagcccactccttgttcccttttttgcctttaaagattcccttgtgggccaggcgcagtcgctcacgcctgtaatcccagcattttgggaggccgaggcaggcggatcacgaggtcaagag

SEQ ID NO: 134112 - DNA, 122 bp, Homo sapiens
ggtctatttactttttctcaagatctggaagcctgagtcccctcccaagcggttaagaggcgggcttgggcgccctctagcggtgatctgtggtaaccgttccctactcagcggcagcgcct

SEQ ID NO: 134113 - DNA, 122 bp, Homo sapiens
tcgctccattgttggggtccaccgaggaccgcccgccgcggccctttgtcgcccgccctgcgcggggccgctccagaggcgccacaactgccggagcccctcccgtcccacgcgccctgggc

SEQ ID NO: 134114 - DNA, 122 bp, Homo sapiens
tagccgccccacccgagcgtgagcgtgggggccacggtagccgcctcacccgagcgtgagcgtgggggccacacccacaagtctggcatcatggtgttgggttcatgctccctccagaggcc

SEQ ID NO: 134115 - DNA, 122 bp, Homo sapiens
tcttgccaccccctcactctagccctatttgagggccacaactttcaaagtcccggctggcgcgtggctgcgggatgggccgaccccgcgactttccctttgtacgacctagcccctgcccc

SEQ ID NO: 134116 - DNA, 122 bp, Homo sapiens
agtcaaagaaaggggtgacggacgcacctggataattgggtcactcccacctgaatattgcgcttttcggaccggcttaaaaaacggcgcaccacgagattatatcccgcacctggctggga

SEQ ID NO: 134117 - DNA, 122 bp, Homo sapiens
gatgtggcagtatttgaagccgtgtccagcccaccgcctgccgacttgtgtcatgccctacgttggtataatcacatcaagtcttacgaaaaggaaaaggccaggtaaaatcatctttgtat

SEQ ID NO: 134118 - DNA, 122 bp, Homo sapiens
gcccagtgtctgcaccggcgggagcgagaaaactatgtgccggagagaagcgtcctgatccgtgcaccaaagcccttggtcatttagcttcaggttctcaaattaagtcctccgcggccgcg

SEQ ID NO: 134119 - DNA, 122 bp, Homo sapiens
cggccaacagcggcagcaacagcagcggggctacccgggccagtggcaagcacaggtctgcgtcctgctccttctgcatctggctcctgcagtcactcatccacatcttgcagctcgggcaa

SEQ ID NO: 134120 - DNA, 122 bp, Homo sapiens
aaaccctcatctctagcccaccatttgtgacttttacaacttcaccagcgtgccgggatgcgagaaaggtactggtaaataactagtgattccaaagcaaccagcctctctcttctgcctta

SEQ ID NO: 134121 - DNA, 122 bp, Homo sapiens
atccaagcctgataggcttggatcagggtgtgctgctgtggagtccctgccagcgtgcaccgcagttccattataacagaaaaatgcaggtggtgctccaggctattgaggctgaggggcac

SEQ ID NO: 134122 - DNA, 122 bp, Homo sapiens
caaactgcatgccctgaaacccagagggaaaagggcattgtcgccgatacctgttcccgtcgatggagaccccagccatggagctgccccctccaccatgcattccaaaggtgtctagaagg

SEQ ID NO: 134123 - DNA, 122 bp, Homo sapiens
taacctggtgcattgctagaagaaaccctgctgagtaagagcaaattgtttttagcataccgccgattttactttccagtatttaaaaatgctgtgtatccttttaaatgaaaacgacttaa

SEQ ID NO: 134124 - DNA, 122 bp, Homo sapiens
catgtcatggtgtgactacaccatctcacgggacggggagtgggcaaagctccctgctcccgtgtctatggtgagaggcaaggttctgcatccccccagcactgcacactacagagttgagt

SEQ ID NO: 134125 - DNA, 122 bp, Homo sapiens
cgcttctttcaagatgccacctgactgtccaaccagagggtgtgccttcgtagttggaatcggagtgcacgtgtctgcgccagtggaaggcatccaggtccgtcagcgcggccggggtcagg

SEQ ID NO: 134126 - DNA, 122 bp, Homo sapiens
gcctcgaggcaggggaggggtggtggacctttcccccgccctggctgtctgtggggtggacgaggcctgcgctaccatggcaaccagacaggagcatgacagccaggagagaacccttcctt

SEQ ID NO: 134127 - DNA, 122 bp, Homo sapiens
gtgcggctcccggaaccgtctgcccagagcggcagcgcctcccggtcactacaacaacggcggcccagtcaaaccccgcgctccaggcatggccagccgagccccgagacaccgccagccct

SEQ ID NO: 134128 - DNA, 122 bp, Homo sapiens
gaaggacttccccagggccacagcttgttcttcctggcttgcacctgccaagtatacctacggggagggtgtaggaactcccccaaaccaagaggcctgaggctcctggccccagaactcca

SEQ ID NO: 134129 - DNA, 122 bp, Homo sapiens
ggtccccaggggctgggcatcctggcccaagcaggacagaaccctccctccagggtccttcgaagcagggtctgtctccctcaagccccaaagcgagggcttagcagagtgtggggttggcg

SEQ ID NO: 134130 - DNA, 122 bp, Homo sapiens
cgaacacgccggggcactctccggcgcacccccgcccgccagcgcctagtccagccctcccgtcccagggccccgcagcacgctgggaattgtagttcttggcctccccatcccggaagtgg

SEQ ID NO: 134131 - DNA, 122 bp, Homo sapiens
ctcggcgggccgcaggcagcgggcggggcggtcacgtgggcacgcctggtccccagccggcgccacccgctcccaggccggcccttctgtctcgcggccccggctccccggctgtccgcgtc

SEQ ID NO: 134132 - DNA, 122 bp, Homo sapiens
aaaagtggtcgcagggtgtgtggccccaaagatcccaggcgcttccggaaggcgagccaacgctccccaggcccgtccgcgagcgggtgggcctaagccttggaggatctggggtgggggtg

SEQ ID NO: 134133 - DNA, 122 bp, Homo sapiens
tcattctttctcctccttttgactttattgctgcagctcagtttgcatcttgagcaccctcgttgcccagcagcccggcggggttcatttgcatgtgtcttcccaggtcttcccttcaacct

SEQ ID NO: 134134 - DNA, 122 bp, Homo sapiens
tgcgcgtggcctcttgtttctttatatttttcaccccccaaaacggagtctcgctctgtccgcccaggctggagtgcagtggcgcgatctctgctcactgcaacctcctccgcctcccgggt

SEQ ID NO: 134135 - DNA, 122 bp, Homo sapiens
ggcaccaggcagtggagtgtgccacaggtgcctcacacctgtatatggcacctgccagcacgcaggctgtttacttacccaatagttggtttgactgggcacaattccttcatccagataaa

SEQ ID NO: 134136 - DNA, 122 bp, Homo sapiens
gcaaggtttcagggacagggacaaactccatcatcaaacacacagggcaagcaagagaaccgaaagagacaaagggtcagaaaccaggcagagcttggataaaacaatgggagcaggtaaag

SEQ ID NO: 134137 - DNA, 122 bp, Homo sapiens
accactgacggcccgcccctccgagccagacccgttttctattggttaaatcatttttgacggacaggcccacgttattgacttcttttcgacgacgccagcgaccggaagcagaatagagg

SEQ ID NO: 134138 - DNA, 122 bp, Homo sapiens
ttcttcagctacaacaatatccctttgtcctggcctcagtggacagtgcttagccccattcgacctttagccttcttgcaaaaaagcaggaggcccacttacaccctgggatttccaggaga

SEQ ID NO: 134139 - DNA, 122 bp, Homo sapiens
cagttacagctcacaggagcttgtggtgcccagcggctgcttctgattgagagtcgaggtcggaggctttgggaggctgagaggctgctcggtttcacaactgctgagggagacttgggctc

SEQ ID NO: 134140 - DNA, 122 bp, Homo sapiens
cggtactcacgctgctggggtggaggacgggcagaggcagcagcaggagcgggacgcagacgaccagcagcagcttccggactcggagcaggccctgcagcaggcccatcgcgcctctgtcc

SEQ ID NO: 134141 - DNA, 122 bp, Homo sapiens
ccccgtaaccagagacgccactcctgccctccctaacgacgcgggcctttcagacgcctacgcgggtcgcccacctgactgcccgaaatcaccccgcccaccaagtgtcccctcttcttcct

SEQ ID NO: 134142 - DNA, 122 bp, Homo sapiens
acctccgggtgtgaccacacagggcccgggctcccatccaggccgagtgggcgcagggcacggcttctccgtggagtcccaggccctacgcctccaggcgccaggcgtgcctgagtgagggc

SEQ ID NO: 134143 - DNA, 122 bp, Homo sapiens
atatcaagcagggagacaggtgcgatccggaaaaggttaagtggcattctctatctggcacgctgaaagttagggaggcaaatatgtcctagaaacacagattatctgtctttaagactccg

SEQ ID NO: 134144 - DNA, 122 bp, Homo sapiens
catcgcaaggcggaagagtttaaataccatacctcaagatctccctccagccctgacacgcgactccgcggccctttcagcgtcggtcgcctaggagacaagcgccacttccggcagcgaag

SEQ ID NO: 134145 - DNA, 122 bp, Homo sapiens
gccaacggcaaatattttcacctctaacattgtctcatcctgaatgtggcgatgtctcatcgtttctactgctgtcaccctggggtgaaccaccatcatcttctgcctgggttatctcagaa

SEQ ID NO: 134146 - DNA, 122 bp, Homo sapiens
atgtatctctctcccagggtccaaattccctaaatcacctttcctggggggcatgcttttcgggaagtccagccatcagctaaaggggagttggggtcagctggacaggaaggtgggggatc

SEQ ID NO: 134147 - DNA, 122 bp, Homo sapiens
aggttgcatatagggcatctagatggaaacaataagcctagttacttaagacatgggaatcggtagaaagaaggactcagatatggctgtctgacactattagctataatatcttagagcaa

SEQ ID NO: 134148 - DNA, 122 bp, Homo sapiens
gttgatgagttcgttcattcccagctgcagccttgggtgctcaagtgtagatttgcctaccgttgagctcacggagtttatgctttataacaataagctctatttaaaaatgtttttgaggc

SEQ ID NO: 134149 - DNA, 122 bp, Homo sapiens
tgtcattcaatgccccagatgtatcagaaggcaggtcctgaaccacgtggggcagaccaacgtagtctactttaaataaatattttgaggctaggcgtggtggcttatgcctgtaatctcag

SEQ ID NO: 134150 - DNA, 122 bp, Homo sapiens
tgctttcgccgcctttgtccacaaggtggcagcctttgaactttcttccccgtaagaacgcgaaaggggggcagagaggaaggagagaaggcaaagcactgcccccaccaagaacaatttga

SEQ ID NO: 134151 - DNA, 122 bp, Homo sapiens
gcccatgacctccatgcccaactgccttctggcatgtggtaatatgcccctcacccccagcgggtgctggcatcaagcctggctcaaaacaggcatcctgtgaggtttgctgactgtcagaa

SEQ ID NO: 134152 - DNA, 122 bp, Homo sapiens
tgagtgtaggggcaagtcttgcttttaattcccctttaaacactgtcctccttgggtcttcgtgtcagggccgtgctcactttgagttgggaaactgcccacattttctgttctctggaaga

SEQ ID NO: 134153 - DNA, 122 bp, Homo sapiens
cttggtcgtgcagccgctccacaagcacgcagttgtaggctctggccgcatacaccagtgcggcctcatccgggctctccgcctcgtaccgcagctcgcgctctgactcctgctcctgagca

SEQ ID NO: 134154 - DNA, 122 bp, Homo sapiens
cgatggccctgagctgatgcttcctggcccagatctctgctagtccctcccagacatggccgccaccaggctccccaaccaagacttcctgtgcaggaccagccacgcatcctggtgcctat

SEQ ID NO: 134155 - DNA, 122 bp, Homo sapiens
ccggacggcggaagtgagccgcgggggcggatcttgttgttacgggtaacggaagtgtggcggcgttgggttgagcgggctttttggaagtttgtggcggaggtgaggccgaggtgactgca

SEQ ID NO: 134156 - DNA, 122 bp, Homo sapiens
gccatctcatcctgccaatgtggccgcgaaactgcgggctacgcaggctgtggggtctcccgtgagccctgggactctggccctgtgtctggggaacgttctgtgtcctgccttctggaaac

SEQ ID NO: 134157 - DNA, 122 bp, Homo sapiens
cctctcctggcagcattgccctgggggcgagcagagagtggatttggagtcttcttttcccgcctgacccctgctcgcccgagcagcattttcgggccagcggctgcagccacccgggcgcc

SEQ ID NO: 134158 - DNA, 122 bp, Homo sapiens
ccggagcccccttcagtctgtcagtttgaaaggtacacaattggcccttcaggaggtgggcgtgggctccattagcgtttgccaggagtcccggagctgtgtgggatttgcatacagtaata

SEQ ID NO: 134159 - DNA, 122 bp, Homo sapiens
ctgggtctcctcccttaggcctctcctttaccccattgttctctccggacccctccactacggccaggcgctatgtatgttttcaacccccaagaagcccagtcccagccacacacaagatg

SEQ ID NO: 134160 - DNA, 122 bp, Homo sapiens
cagcttcagagccaggcgagccaggaaggaccagcgggcgaggtggtgagttgtgaggcgcgcccagtccctctgttcccgcctggcacttgctctggccgcgcccgccccatctgccactt

SEQ ID NO: 134161 - DNA, 122 bp, Homo sapiens
cggccgagaacgcccaggatggggtggtcgctgaccaccgtgtcccaggtgaatcagctccgcttggaggcagggggatgactaaaatgacctccaagaagatgtcaattacaagaacaaaa

SEQ ID NO: 134162 - DNA, 122 bp, Homo sapiens
ggagcgggtgggcagaggtggaagcggctggtgggcgtgagggggcggagccgggcagcccgtggggcggggcaggaggcgagggagggggcggggctgggggcggagcgcacctgtggctg

SEQ ID NO: 134163 - DNA, 122 bp, Homo sapiens
cccttcgccgccctcccagggctcctgagggcgcttccttggtgttctcactgaagctctcgaacagacagatgtgagctctctgtcttttacacgctgaatttggctattggcaaaaaagc

SEQ ID NO: 134164 - DNA, 122 bp, Homo sapiens
gccttcatatgaagttcttggtattataatagtcagtgtgcttccaaattaatcccaattcgtttacttttactttaagatgaaatgtaggcagagcacagtggctcacacctgtaatccca

SEQ ID NO: 134165 - DNA, 122 bp, Homo sapiens
actggaagttgctttccatggcttttgtgacttgaagcagctttgtttaggagatgtcgccgttgtaagcctcttaagcttgagaaaaaggcaaattagtaccatttctcattggttaacat

SEQ ID NO: 134166 - DNA, 122 bp, Homo sapiens
gcgttgcctggctccacgccctgctgggtcctacctgtcagagccccaaggtaaaaaggccgggaaagcatcttaatttagcgtgcagtctcagctggtcctgccattccagataaacagag

SEQ ID NO: 134167 - DNA, 122 bp, Homo sapiens
atttttatgattctttctcaaaacaactgtgggagtgaatttgagccaagatactggactcgagtgagacgccgtgcgggcaaggcgggcgccgcgttcggctgtgacgtgtggcctcttgt

SEQ ID NO: 134168 - DNA, 122 bp, Homo sapiens
ctcgtgcttacacttacatttcgcctccttccagtcggtggaggtgctcaggtccaccttcgccgccatggccaggggggcccaagtgcgcaccccggctgtccgccccaccgccgccgccc

SEQ ID NO: 134169 - DNA, 122 bp, Homo sapiens
aagtgaaatagagctgatgtatccagaggttatgttgctagaggtgagatcagttacctacgtgcaactgaaatttcaaacttctgttcagcagggacgtgagtggacaatggtgactgata

SEQ ID NO: 134170 - DNA, 122 bp, Homo sapiens
gtccgacttttcctgcctgcggcgcagtccctccccggcttcgttactcgagtgcacacgcggccgggctctcggccctcgattgcttcagcctatcaccctgggatgccgcctgccgctgc

SEQ ID NO: 134171 - DNA, 122 bp, Homo sapiens
tatgatataaacaaaggactctggaggcacggtctctgttcgtatttgctggtgtgggcacggggcagaagtggagggtgggacggggcagggtttgagggaaatccaccgaacgaaccgac

SEQ ID NO: 134172 - DNA, 122 bp, Homo sapiens
tgaatgtccttgttcaactctctgtaccctgagctgtggtcactgcatccagttcctcagcgggcaccctgtcgcctccacatctgtacctggtgcctaaccacagagtgggcactcagaaa

SEQ ID NO: 134173 - DNA, 122 bp, Homo sapiens
agggtgtaagaaatgcctccatttggacagtgctccagtactttccagtctctagtgaaccgtttggccagtctgctcttgcagtaaacacagactccaatagcccttgatgtgttctcaac

SEQ ID NO: 134174 - DNA, 122 bp, Homo sapiens
ccagatgtctgcagcggttaaaacaaatgttcagcgttgggtgctgatcccgcttccctccgtgtaaggtttttcacaaaggcagcagagtaagagcgcacatagcaacagcactcacagct

SEQ ID NO: 134175 - DNA, 122 bp, Homo sapiens
gcgtggcgcggtgcaccccagtctccctggctcacgggactccgagggctgcttccagtgcggcgtgtctctagtgcgcgccccgccagcatccggcccccgagccccctagggtggcgtgg

SEQ ID NO: 134176 - DNA, 122 bp, Homo sapiens
tgggtgtacaccctgtgatattattggtgatcccctagggtgatacgattcctactattacggtgggtgtacactctgtgaggttatttgtaatgtcctgggaagatattactcctaatatc

SEQ ID NO: 134177 - DNA, 122 bp, Homo sapiens
tccgtggcacgagggggtggtggaataatcctccgtggcacggggggtggaataatcctccgtggcatgagggggcggtggaataatcctccgtggcacgagggggcagtggtataatcctc

SEQ ID NO: 134178 - DNA, 122 bp, Homo sapiens
ctgcagccagaaagccaacattcagtgctagcgctcagagaacccgggacacagagatgccgtggaaagtgaaagaaagagtagtagaaagatagtcgggaaaatatctgtaagtggccttt

SEQ ID NO: 134179 - DNA, 122 bp, Homo sapiens
gccttcccctcccgtcggctcattcagccgcggaagcccctgggagaccccgccccgccccgtcccgcggtgccccccgcgcactcaccctcgctcacccacgcggccttcctggcgggaga

SEQ ID NO: 134180 - DNA, 122 bp, Homo sapiens
tcaggaccctcgcaggccttgccgccgtgctgggggggcacgcaggtccgcatccggctccgggacccccgcccgcagctgcgggagcacaggctccaggacccccactcctcccacacgcc

SEQ ID NO: 134181 - DNA, 122 bp, Homo sapiens
tgttgatagtcatcaaactcgccccgggctgcttccagaaagctaaccggattacttgtacgcggttcccagcactgtcctttgcagtcagcttgtcgctggcgccgatgggaagaactgaa

SEQ ID NO: 134182 - DNA, 122 bp, Homo sapiens
cttatatttctgccataccatagtgaaatgtcaactgatttgcccattcttcttaaaaatcgttttttcctctgattcagggttacaagtacagatcattatttcctaagtgatggtctgta

SEQ ID NO: 134183 - DNA, 122 bp, Homo sapiens
acttatttaaaagagtagccattcagaaaactcccacacttcgttactagtaacaaatatcgtgcgtgtgataaacctccccagtgaggacaacaaactgatttttcactggcaagaaacag

SEQ ID NO: 134184 - DNA, 122 bp, Homo sapiens
tcactgtcacctggccccaacagaagggcaaatacgatcaaagcaatatacaaaacgagccgattgtgatctcttttttaaggaagagaaaactctgtctctgttctatttccttgtgtgtt

SEQ ID NO: 134185 - DNA, 122 bp, Homo sapiens
gagccctcttgcagtgtttgttcttccctttggatctcctggtcctcccttgcagagaagcgagtgtgccagtgttcatggactcctgatctgtcgggttcgtcgaagagaggtttagcagg

SEQ ID NO: 134186 - DNA, 122 bp, Homo sapiens
atatttgtagactgccttttctcattcagtctagttcctgatcctttttttgagggggtgcggaagcttcctcttttctctctcaagtcaaagcctatcctatcctccctctcctcccacta

SEQ ID NO: 134187 - DNA, 122 bp, Homo sapiens
agggagagggtttctcatgaaggtagccagagcttaagatggagttggcagcttggtgtccggggggctgagtctagtcctccacccagcttatgtttccccaggactggattgtttcagaa

SEQ ID NO: 134188 - DNA, 122 bp, Homo sapiens
tcagaccctttcaaatcactgagtcctcttaactcttttgttgaaatgtttcattgatatcgatccctccttacacaggatgatgatgataatgataacgatgatggtggctaacatgtata

SEQ ID NO: 134189 - DNA, 122 bp, Homo sapiens
atctgcgactacaccaccttccagatcgaggtcaccaaacattatcggaagcaggagttccgagatggtacggctgggtttctgaaatgctaggaataaaagatcagatgcatacattcctg

SEQ ID NO: 134190 - DNA, 122 bp, Homo sapiens
ttgtttcctttccttccgccctgctctcaaacactggccttccctaaggtgatacattctcgttcaggcaccctcaattaggggatggggatttgtattataatagcattgtttgggagaat

SEQ ID NO: 134191 - DNA, 122 bp, Homo sapiens
tgatatagagatacatagctcccaacagtcctttatcttaaacattagccaactctttgtcgggttttgtttcaggaaacaaaagtccaacatgattattccttacagaaaggatacagtct

SEQ ID NO: 134192 - DNA, 122 bp, Homo sapiens
gggcctatgtctaccaaaataattaactggttattttactagcacacacaaactaacattcgaccaggcttatctgaaaccaaataagcatgttctacccaaatcaaaaatcaagtttatgt

SEQ ID NO: 134193 - DNA, 122 bp, Homo sapiens
aggacaatcttcccgcctctcccttcctcaaacccagatctcataatcacccttgttggacggactcttgctgtagcaatgaaccaccagcgctgcggccagggcgcacatgcccagtccgg

SEQ ID NO: 134194 - DNA, 122 bp, Homo sapiens
ttagctatggtcaaagctaggtgagttaggatgcttgggtactgtttctagaagaggcagcgagtcttacctgtttctatatgtgacagtggaaaaatacaaggctcctggagtgagggctt

SEQ ID NO: 134195 - DNA, 122 bp, Homo sapiens
tcgggaccccaaattgcaaaccctcagcccctagcaaagacgaccaaatgcatttacaaccgtgcaagtatctcagccttgtaacagagctccgggtttgcgccgggcacagttccccgact

SEQ ID NO: 134196 - DNA, 122 bp, Homo sapiens
agtgaccaaggccttggtaggttcagcagatcagctcttgtttccagatctaaactcactcgcacttctctatcttttgaagttggagtttccttcccttgtaaggctgactatggagtact

SEQ ID NO: 134197 - DNA, 122 bp, Homo sapiens
ccctcgcccaaccgccgtcgggggcactggattcgggcgggctctccgccctggcctctccgaacctgatccctgatcattaaaatgggaatgagtgtaataccaccttcctgcaacaaggc

SEQ ID NO: 134198 - DNA, 122 bp, Homo sapiens
agtaaagagtgttgtgggggtgggatggaggtggatagagaaaaattatagcaaaacgagcgcaaaaagttaaggcccggttactcctctgaggtcgctccggagggactttgcactgaaat

SEQ ID NO: 134199 - DNA, 122 bp, Homo sapiens
ccgcagccatggaggagatctctgccgccgctgtcaaggtcgtgccgggcccggagcgcccgagccctttcagccagctagtctataccagcaacgactcctacatcgtccactctggggat

SEQ ID NO: 134200 - DNA, 122 bp, Homo sapiens
ggacaatgccaggactggctactttctgaagaacctttgtgcagctctggggaggtctgacgctcgtgtaggctaagtctcctagggtgaaaccctctggctaccgtcagcccctctgtgtt

SEQ ID NO: 134201 - DNA, 122 bp, Homo sapiens
atgtctctaaccaggaaaacagctccagagagctcgctcttcataatccccgtggcctgtcgggttagggaatgcacaaaggggagtctttctccatagagaaatgactctttacaaggcgg

SEQ ID NO: 134202 - DNA, 122 bp, Homo sapiens
ccagtcccttcgcagccgaacagggcagggacaggggcaggtgcaggggctgggcaggggcgcccgaccttggtccccaggaggaggctggcctcaccagtgcccgcctctgcccgcggagc

SEQ ID NO: 134203 - DNA, 122 bp, Homo sapiens
ttatgaatcaaagaatggtccccaattaccacgagccagctgtgtgaccttgggcgactccgttaagttcttttagccaagagtgatgaatggtctgcaaaacgaccttaatacctgttctg

SEQ ID NO: 134204 - DNA, 122 bp, Homo sapiens
acctatagtttacgtcagttctttgaccattcgttggagctccggttttcagcctctttccgggctacctggtagcaatttgaggctctgtcatcagtttctgctacgtttcaaagatcctg

SEQ ID NO: 134205 - DNA, 122 bp, Homo sapiens
tcatggcgccgtcgcttgcaaggcgtgtgcactaggataccgagcacaaacgggtttgcgcggccagcgagagtcaaggtaggtgccagcggcgtactaacgttaccgactccgcgctgcta

SEQ ID NO: 134206 - DNA, 122 bp, Homo sapiens
gggatgggctgtgtcgcagtccgactggccttatagcggtcggtgccccggaggccagctcggccaagcccaccccgcccgcccaagtcccgcccgcgccccaccctgcgccgtggcttaca

SEQ ID NO: 134207 - DNA, 122 bp, Homo sapiens
gggagccgggcaggtgggagctgaccctgggtcagaggccccctcctggggccactttcacggcccatgcttggcaccgtcagcactgggtggggccgggccgaggggccctccacttaaca

SEQ ID NO: 134208 - DNA, 122 bp, Homo sapiens
ttctttaagccactagaagctcaccgtgagtccattcacagggccagagttccaagtgtgcggcgtgggcggggcctgcagaaagggacggggcctgcagaaagggacggggctggcaaagg

SEQ ID NO: 134209 - DNA, 122 bp, Homo sapiens
tagtgtctccagctttccctctcctccttgttaacagaattggaacccttcctgtcttcccgtctctctcctgaaattagccaaggctctctctcttatgactcagttcattagagaagtaa

SEQ ID NO: 134210 - DNA, 122 bp, Homo sapiens
ggcccgaggacacggaccctgggccagagggatctgaagttggcgaggcggacggagaggcggaggccgcggccgaggagagagaggaggcggcggtggcggcgcccacccccagcggcaag

SEQ ID NO: 134211 - DNA, 122 bp, Homo sapiens
gcacatctgatcacttgtcgataactctggggttagacaatagttgctcagtctgaaggccgagttaaaagcaattgctggtagggctcacatctgtaatcccagtaccttgggatgctggg

SEQ ID NO: 134212 - DNA, 122 bp, Homo sapiens
ggaaagtctgggcctcgaaattcgaaggcagcggcggctgcccagcacgggagtgtggggcgcgccactcggcggcccagcctacccagggcccggcccgcgcctccatgggcccgacccgg

SEQ ID NO: 134213 - DNA, 122 bp, Homo sapiens
gtgtttctgcgcctggcctcttgcatttctaaggggcctttgaagacagggccgaatgcgcgcgggggcttcaggcactttgcgctccacggcgggtcccgcagcccggcccgagccggccc

SEQ ID NO: 134214 - DNA, 122 bp, Homo sapiens
ttgctttccgtgcaattatttgaacttgcttttcaaaagacccagtttgaatccagccaacggacttgtgccttagccccatgatataacctgatgacgttcggtggaataatgaccgttca

SEQ ID NO: 134215 - DNA, 122 bp, Homo sapiens
tgcagcctggcccgcatcccaggccggaatcgttcatagaaaaccagccccggctcagggcgcagcctcagccaggcgggccaggccctcacgcagctcactcagctcaaacaggctgacgt

SEQ ID NO: 134216 - DNA, 122 bp, Homo sapiens
agaaggggacctccaagtaggcccagccaggcccccaaatacggtcagcccagcagaggccggggcccagctccagaaccacccgcccccaccatgcgtcctgctctcagactcagaattaa

SEQ ID NO: 134217 - DNA, 122 bp, Homo sapiens
gctttataatgttcacattccatttctagttgaaattcagttgatttttaaataatgcatcgccttagattgtgggttttggcaggaatttcaagatacagataaaattccagagagtaaaa

SEQ ID NO: 134218 - DNA, 122 bp, Homo sapiens
aatccaatgctgtcactccattccagacagaccgaaatacttggatggccctgatgacaccgtgttctcctgacttccttgctttcatttcatgtctcagtttaaactttgatttgctagca

SEQ ID NO: 134219 - DNA, 122 bp, Homo sapiens
agcaggcagccagggacaagactgcacggcagcgccccatggccaggggaagctcagaaccggagtcgcccgctgcccggcgattctccatccctggatcggtacaggggcatttggacgct

SEQ ID NO: 134220 - DNA, 122 bp, Homo sapiens
gagctcaaatgtctcctgctgcaccttcttcatactcagttgcagattgagtcgaactcccgtctccaaacccaggcttcctgcttaggaagaagaagtgagctcttacccgtgcctttttc

SEQ ID NO: 134221 - DNA, 122 bp, Homo sapiens
aagtgacgggggaggggcaggcgcccgcccccggcccccgcccgcctccaggcccggccccggccccacccccacccacggtccgaaccacaagttccggctggcactgcggcggagcctgc

SEQ ID NO: 134222 - DNA, 122 bp, Homo sapiens
gagtgggtcaatgttgtgcaggatctccgtgcgtggtgaggcccggccctcgctgatggccggccacacgtcgtagccatctagcccatcggctgctgaggtggtaccacctgccagaccca

SEQ ID NO: 134223 - DNA, 122 bp, Homo sapiens
gggggaggcggagccggggtgggcagtgtggtgtatctctctccaccccgggccgcgctccgggagggaaaagggactgcagaccccctgtccgtgctccctgctgagacgccagccttctt

SEQ ID NO: 134224 - DNA, 122 bp, Homo sapiens
tgaggactgtaatcccagaggctgcaaccgatccctctgctgcggagactttccctggaccgaaagggcctcctggtgaggctgggtctccgtttgtggactcactgttgaggcgtgtggtt

SEQ ID NO: 134225 - DNA, 122 bp, Homo sapiens
tccccggggcacgctgggatcagccaagagaatgcaacagccaggggtgggagccccctccgcggttgcacacgccaggtccctccagtcttgcaggttcaaatgaaggcttatgtgaaggg

SEQ ID NO: 134226 - DNA, 122 bp, Homo sapiens
cggaggagcggggcgggaggcacggcctaggggccctcaggctggtcgcgctggcgatcccgaggccgcccaggccatgcccctccagcccgcctgggcacccaagctgcagtcgccctctg

SEQ ID NO: 134227 - DNA, 122 bp, Homo sapiens
gttctcgcgagagcagctgccctggctatccacgctcctctctgattggtcagctaagtgcgcatgcgcatgcgggtgaaggaccttgggggccacgacccctgctgacacgccttccctct

SEQ ID NO: 134228 - DNA, 122 bp, Homo sapiens
cggtggcgccgcctcggtctgggttcccccgaggaaaaatacccacccgcgagggctcggcggcttttcgactcggcggggatgaactgtggcaacttcggcagcccccaccgcggtgcgga

SEQ ID NO: 134229 - DNA, 122 bp, Homo sapiens
tagatcctctctctggccttctctcctttacccttcctggcagctggagggagggacccacggagtttctcttcaacacccggatcccaagcagcattgcacgggggtgaggtagggactct

SEQ ID NO: 134230 - DNA, 122 bp, Homo sapiens
gggaggagtttagctacatccaagtagggacttatagaaatatgcccctggaaggccgggcgcggtggctcacgcctgtaatcccagcactttgggaggccgacgcgggtggttcactaggt

SEQ ID NO: 134231 - DNA, 122 bp, Homo sapiens
tggcaagtaatccactggtggaatgatcaattttccattctttggtgaccctgaattgcccgaatatcccccagcaccagtgtcaacagggaggacttctattcgactagacggcagtacaa

SEQ ID NO: 134232 - DNA, 122 bp, Homo sapiens
tcccacacccagcacacttcgtgacactttttaggaacttggttataggttaattagaatcgatacgaattctaatgagacattgcaactttgccttaacattcactgataaacctgctagg

SEQ ID NO: 134233 - DNA, 122 bp, Homo sapiens
gggtttttagatgcaaaagcaggaaacaaagcaaacttgtagaagctccagatcctggagcgcgccagccacgcctggggccgcggcaagagggaccggcggctccagggtcacgccctgcc

SEQ ID NO: 134234 - DNA, 122 bp, Homo sapiens
taggcccccggaggggcgtccccagcctcgccgctgccgccgccgccctccgcagccgcgcgccccgcccgctccagccgcccccggggccgccaccggcccatgagccccggcctcaaagt

SEQ ID NO: 134235 - DNA, 122 bp, Homo sapiens
ttctgccccaccacccacccctacacacacatatttcggttggacataggtgggcactgacgtagattctttgcttcctgtacttatatgtgaatagcaaagtgttgagaactggaagcatg

SEQ ID NO: 134236 - DNA, 122 bp, Homo sapiens
atgaagggtatcgaccgcccagcttttggttgagcagtattgatgttggacaggttaagccgtcccgaaggaaaatctatatgtcaagctgagcacaagacagcttgcgagtggaggcggga

SEQ ID NO: 134237 - DNA, 122 bp, Homo sapiens
tgcttcattaacattagaactaaaccagtgggagagtacctccctccctgcttcctctcccgcctccccaccaagccagctctgccttagagaaaagtgaacctggttcttcatttgctaat

SEQ ID NO: 134238 - DNA, 122 bp, Homo sapiens
ttgcctgcagctctggactctccctcaggctccagggctccctgtgcccttgcggtgctccggcctcttggcttctgagttagattgggcatctctcagattccttggctactgagtctgta

SEQ ID NO: 134239 - DNA, 122 bp, Homo sapiens
ccagcagtgccccctctcccccctgcaagttctgcatcttaaagggctggccctggaaggcgggcagtggcgtaagacctcgctctcagcccagcaccgggttcattccaggggctccttgc

SEQ ID NO: 134240 - DNA, 122 bp, Homo sapiens
acactgtaagccaagccccaaggccagacagctctacctccttagactgccatagcccctcggatgctggcccttcgtgacctagtgctctgtctttggtttgtgcagctgcctgccctgtc

SEQ ID NO: 134241 - DNA, 122 bp, Homo sapiens
cctttttaaattaaggctgcaaggtgtgactgttgtaaatctcaaggaactcttaaagagcgagttcagtggcgtggggaaatgaaacatttctgtgatcaacattgcttactgcgtttcta

SEQ ID NO: 134242 - DNA, 122 bp, Homo sapiens
ccataacctcccattagagtctctgggttacgccccttgggtctgtccgttatccaatcccgttaactgctgtgctccaacctctgttcttattggtcgcctcccttctctgtcccctgcac

SEQ ID NO: 134243 - DNA, 122 bp, Homo sapiens
tttataaagctctagctgctgcctgtcttcagacctgggaaatgaaactattcagacttgcggccagatagcgcctgcgattgtttgttaccgttttaatcctattaattaaaacgttaacc

SEQ ID NO: 134244 - DNA, 122 bp, Homo sapiens
ggttcctgctggcctgtagagctttcgtgatccccgccaagatgcgaacagtaaggtcctcgtatggatcgcagtttttgtccgaaacctgaaaacactaacttgggatttcgcagttctgg

SEQ ID NO: 134245 - DNA, 122 bp, Homo sapiens
tgagtgccaaggtatccccacagaagggtggctttccaaggaccagccctgcctacattccggtgagcagtttgatcaggagatgggctctcaggtatcccaaaggcggtattggggtgtgg

SEQ ID NO: 134246 - DNA, 122 bp, Homo sapiens
tcatgttttcaaggaagggtctccaactgagcagtcaccagtgcagcctgcgtcagggcgcgcctccctccagcggtccccgcgtcgcccatgtctgacacagtttatgcttcgcaggcggt

SEQ ID NO: 134247 - DNA, 122 bp, Homo sapiens
gaagcactgcctgcctgagcccagccagtccccagaaatgagagagacaacattagcaaacgattgctgtcgctttgcaccactgagatggagatgtttgttatgtagccacggataagtgg

SEQ ID NO: 134248 - DNA, 122 bp, Homo sapiens
cagcctctcaggagctgacaggtcctctttcggggctcaggagggtgggcacacacccagcggcctgcagagtaagcttattacccacaactgtgcccgctttgtgcttctaaggtgcacac

SEQ ID NO: 134249 - DNA, 122 bp, Homo sapiens
ttatttgtcaactgtttgtgctaggagcatggactgtttcgctcactgccccatccctgacgtacaggaggcgcttaaaaagtagttcagttacacattaaaaacaaagaaacaaaaataca

SEQ ID NO: 134250 - DNA, 122 bp, Homo sapiens
gggcccctctcctttcaggagtcttctctggcactcaagacaaaatcttacaaaagaggacgttcagagggaggaagagattggggttgcctttcagtttccatttttcatctctgcctctg

SEQ ID NO: 134251 - DNA, 122 bp, Homo sapiens
tgaggtccgagtcgctgtgggaccctgcgggcttccacaactggcatgaggtctgagtcccggtgtttcacaatattacttgaccaaagagcgtttttttcacaaacacatgaggcagccca

SEQ ID NO: 134252 - DNA, 122 bp, Homo sapiens
gcaaggccccgagactggaagggactgacagagctagaaatgaaacttgtttttccacctcgagaaaaacgaatcaacaaaaaataccctaagcaattgctggtatctgaagcccacttttt

SEQ ID NO: 134253 - DNA, 122 bp, Homo sapiens
cccacatgaggaaaaaaggcccgaggaaatagaagtcaactgcaataaggccgagggaggcgaggaaggagcgggccggtgcattcgccacatgcagagaaaaatcaaaacagccggagctg

SEQ ID NO: 134254 - DNA, 122 bp, Homo sapiens
aaagtcctttcaaatgccagtcatccctggggtaagagctgcatgcctgaaacgggaatccgagactaaggaaggagaagcgacgcctgccaaacaccggtgcctcctgcgtgcttgctggg

SEQ ID NO: 134255 - DNA, 122 bp, Homo sapiens
tctaatttcctgcttaccttaactgggaattttaaaaagttggcctaaaaatgttccatgcgtggcagcaaccatgcagagtgactgaaacacaattcatttctgactgacattcctttctg

SEQ ID NO: 134256 - DNA, 122 bp, Homo sapiens
ggacccgccgacctgggcgctgggtctggccctcttcctctggggacagagcctgggccccgaccgattccttttccgagcccccggagctggccggggaaccctggccctccaatctgatg

SEQ ID NO: 134257 - DNA, 122 bp, Homo sapiens
ccctgccgctcgccccgggggtcgacatcgtcacccattcagaggacagcaagatctgggcgggaaaacaaaagtcacaaagaaatttgtttgccaccatgcaaaatggcggcacttaaaca

SEQ ID NO: 134258 - DNA, 122 bp, Homo sapiens
tggcaacctctctggtcatgtcttcccggtgtccaaccctgacccctcttgctgccgcatcggctgttttctatttttgctgtgctgctgccccacagtcctctggtatgacggatctccat

SEQ ID NO: 134259 - DNA, 122 bp, Homo sapiens
acacatatatatatatttttttgtcaagacagcgtctcactattttgcccaggctggtcacgaactcctgggctcaagcaatcctctcgccttagtctcccaaagtgctaggattacagggg

SEQ ID NO: 134260 - DNA, 122 bp, Homo sapiens
caggcaatcagaagcaaggaaaggaagaaagccaggcaagagggaaggggtgacatcaaacgtgccctctgtatttcgctccagaaaacagctcacaattatgactacctgccttgttttgc

SEQ ID NO: 134261 - DNA, 122 bp, Homo sapiens
tcctggcctgggctgggctggtgcacagcctgggcccggcgcggcgggggttaaggtgggcgcccgcgccccgcgccccgcgccctcccgccgggatgagagcgcagtccgcgccgccagcc

SEQ ID NO: 134262 - DNA, 122 bp, Homo sapiens
tagagcccagcgagcgagcgtttgtgcttttgtcctttgaaccgggtgtggtttggatttcggagctggagctttggaatcaaacctagcttccaaacgattgtgtacccgtgaccttgggc

SEQ ID NO: 134263 - DNA, 122 bp, Homo sapiens
tcccattggacggctatattaagaaagtggccggactctttaaatagcgggcgctagggccgcagccctcatctgccaccgcagtctggttggagctgttgtcttgtatgctcagcgaggcc

SEQ ID NO: 134264 - DNA, 122 bp, Homo sapiens
cctgcctgattctcctgcttcagcctgccgagtgcctgcgattgcaggcgcgcgccgccacgcctgactggtgttcgtatttttttggtggagacggggtttcgctctgttggccgggctgg

SEQ ID NO: 134265 - DNA, 122 bp, Homo sapiens
tagggaggcacatgcgcaacacccaaaatgactccaggcttcgatagccgcaggtcagcccgtcgtgccaggcaccctggtatgtttcagaaaggtaaggttgcatgacatcatcctacctt

SEQ ID NO: 134266 - DNA, 122 bp, Homo sapiens
tcctcacttctcagacggggcagctgggcagagatgctcctcacctcacagacggggtcgcggccgggcagaggcgctcctcacatcccagacggggcggcggggcagaggcgctccccaca

SEQ ID NO: 134267 - DNA, 122 bp, Homo sapiens
gttcccaagcggttggagacaaagctcgcgcgcacattggacccgggtgggaggtggtaccgcaggccgcgttgaccggaaagtaggtccgtgtcatcgtctgcgccggaacctgcgggacc

SEQ ID NO: 134268 - DNA, 122 bp, Homo sapiens
gacggcttcgccatcgccagcttcagcaccctggaggccctggaggtaggtggacgggtgcggcttcgcaggcgttgaggcgagaacggggcccggagttgacgcgtcgggcgatcccggga

SEQ ID NO: 134269 - DNA, 122 bp, Homo sapiens
gcgcatgctcgggcgggtaaaatccgcgccggggacagtcagggatgctcccaggcccttcgctcttgctttcagctagtcattgtcgagcgccgcccgtgacaggcgttttgccaagccct

SEQ ID NO: 134270 - DNA, 122 bp, Homo sapiens
aaattcaatttaaaaatgggcaaaggacttgaaaagacattgttcctgctccaaagatgacggacaaatggccactaagcacctgaaaagatgctcaacatcatcaatagtcaggaaaataa

SEQ ID NO: 134271 - DNA, 122 bp, Homo sapiens
cccccatcgctagagtgctcgccgcgctagcagcctcgcgttccagggctgggggtgcgccgccgggatcctctctgatcgcccacgccccatctggggtccccattcagccgtcagccctg

SEQ ID NO: 134272 - DNA, 122 bp, Homo sapiens
agaagtctaaggtatccacgcatttctccctctccaggaaagttcggaacaggtaagcaccgtcttgatcgcccaataaggagtgtaaggacttggtccaccgggtcagaggggaatccgga

SEQ ID NO: 134273 - DNA, 122 bp, Homo sapiens
gctcagggtacacagacccaggtcacagccctggcaagccatgcagtggggattctagcccggccctgaggttttggagcagggacggtgcaggggagtctccagcccaggctcctcccctg

SEQ ID NO: 134274 - DNA, 122 bp, Homo sapiens
aggcgccgctgaccactcggctccctttcagatcgaagacctgcaggtgaagctgcagcacgcggaggcggaccgggagcagctgcgggccgacctgctgcgggagcgcgaggcccgggagc

SEQ ID NO: 134275 - DNA, 122 bp, Homo sapiens
gcgggtaagggggctccaggctgcgcccacttccccgagctgccagatcccaccctctgacgcacccttctagagggagcgggctgcaagcgctggggcctgtcccttctcccctacttcga

SEQ ID NO: 134276 - DNA, 122 bp, Homo sapiens
gcacaggttgtacgggatcaaatgcgccaagtgcagcatcggcttcagcaagaacgacttcgtgatgcgtgcccgctccaaggtgtatcacatcgagtgtttccgctgtgtggcctgcagcc

SEQ ID NO: 134277 - DNA, 122 bp, Homo sapiens
agtgcgccgagggcctgccagagcggtgtatctggcggcggcggtgccgctgcgctccggcggtaattggttctgcatagctcggggaaattggcagaaaaataaatcagccgggagccggg

SEQ ID NO: 134278 - DNA, 122 bp, Homo sapiens
ctacagaaaatgctggctgagctgaacacatttgcccaattccaggtgtgcacagaaaaccgagaatattcaaaattccaaatttttttcttaggagcaagaagaaaatgtggccctaaagg

SEQ ID NO: 134279 - DNA, 122 bp, Homo sapiens
gcccccgggggccccgccaccgccaccgccgccgtccgccgtcacctacccggactggatcggccagagttactccgaggtgatgagcctcaacgagcactccatgcaggcgctgtcctggc

SEQ ID NO: 134280 - DNA, 122 bp, Homo sapiens
atttattagagcagttaaatctgtattcgtccttttaagtacgttgcttttatgtagtctcgtctgggttctaagatttcaaccatcctaagtcgtgcctttctttccctctttctccctga

SEQ ID NO: 134281 - DNA, 122 bp, Homo sapiens
gctgaatttacagagcacctcctgggaagcccagcaagaaggactcgtgggcaaaacacccgggtttaacagagtggctctgcatttgcctgggaatgccttccgagcgctccaagcaggct

SEQ ID NO: 134282 - DNA, 122 bp, Homo sapiens
cctgcgcaggccacagcctggtctccgcaacagaaaaacacacggaaagggcttcctacccgtcccgagggctcagggctggaaggggagcccgggctatcagccctacacacactctcttg

SEQ ID NO: 134283 - DNA, 122 bp, Homo sapiens
taggattccaatctcaaaggacatttattcatcacgatggcagactggtcaggtgtttggcgatcatccctagtcttcagctttttaatcatgagattttaaaaaatgtcaccatctgtagg

SEQ ID NO: 134284 - DNA, 122 bp, Homo sapiens
tgctgcgtgctttcaagacgctgtgaaggccagtgcgagagaggccttgagccacggtgccggcgatgggcgtggacccagggtgcacccaggcagcaggcctgacccgcagctccgtgtca

SEQ ID NO: 134285 - DNA, 122 bp, Homo sapiens
tcttgggcaggatggtggcctggtgcagcaccacatcctcaaacaccacaggcagctgctcgacgcccaggcccagggcgcgggccagcgtcttccacactatgctcaggtagccagtggcg

SEQ ID NO: 134286 - DNA, 122 bp, Homo sapiens
agcgtcgaagctgcggccgggacatagcagcaggtctagcgggccggagtgggttcctaccgcctgggtgggcggggcctgctgcgcgtcggggcaggaaggggcggggagagtcgggaagg

SEQ ID NO: 134287 - DNA, 122 bp, Homo sapiens
aggggcctgctactatagccattcttcatcacagggtttaggctctataccaggtgcagccggcggagataattgagtacgtaatactcctcatctcagcttaatcatcagggggagcttcc

SEQ ID NO: 134288 - DNA, 122 bp, Homo sapiens
actggaatcccagaagcaactacctaggcataataacctaatacttcctgatcaataacacgtccttattaaaacatagactccacctggttctgttagctgatgggagatgcatctttcac

SEQ ID NO: 134289 - DNA, 122 bp, Homo sapiens
ttgcagcacgcgccattttatagtgcgcgccgctcgcaaggccggtcctcggcgccagcccgcgctccgcccgaggcgtccaatacacacgcctgtttgggaaaccccatttcatgcttagg

SEQ ID NO: 134290 - DNA, 122 bp, Homo sapiens
cttcgcttccttagccttgctcaggtgcaagtgccccagggggcggggtgcagaagaatccgagtgtttgccaggcttaaggagaggagaaactgagaaatgaatgctgagacccccggagc

SEQ ID NO: 134291 - DNA, 122 bp, Homo sapiens
caaagagatgaaatttggggaactgctgggtagagccatgaggctggtcccaaaggtcaccgggatttgaagccatcaggtaggacaggagcagaggtgggaaaggaaatgggccaagggcg

SEQ ID NO: 134292 - DNA, 122 bp, Homo sapiens
acaaactgttattggtagatgtttttattatcttgccaaagtctttgcagagatttggggcgtccattcagcagtgtttcctgagtcgttgtttttggtcaatgctgagtttggcacttgga

SEQ ID NO: 134293 - DNA, 122 bp, Homo sapiens
ggtgctgagtgccgcacggtgcattccacccaccactgacgcaactgtcagtcacgcagccgagaggtgggcactttacagaagaggaagcggagactcacagaagagaaacaccaagccca

SEQ ID NO: 134294 - DNA, 122 bp, Homo sapiens
aatgaatcccgaggtgggagagtctgggaactaggcattcatgccctgtgtgccctcatccgtggatggacttggagccctggagccacctacccactcacccatgagccaagtagtcataa

SEQ ID NO: 134295 - DNA, 122 bp, Homo sapiens
ccgcaactgctgctgtctcacccctaggcaggaatggaccaccctccgccctccaccctccgccagcagcccacaggaagcaagtagaacctgataccacctcccgccagtctgtgaatata

SEQ ID NO: 134296 - DNA, 122 bp, Homo sapiens
tctgaccagaggaagtaaagcacccacagaagccacagccaagacctgactaaggctgctcgggcaactaaaacagctgggaagctgctggaaggagtaaattgctctatttgcttgattgc

SEQ ID NO: 134297 - DNA, 122 bp, Homo sapiens
tttcagttactctggtaacacctgtgacctgagggttattctattcgcgttagcaactcgcgcgggttgggaggcgccaatgagagcagggcttgaaactagcgcttggcgtctgatggttg

SEQ ID NO: 134298 - DNA, 122 bp, Homo sapiens
taaactccaatgtaagaaccacgcacctgcaccaaaatatgcctgagcgggaactcgagtcggctctccgagaccccaaagttcccaacctagccccaacccctcaagcttcccccaggggc

SEQ ID NO: 134299 - DNA, 122 bp, Homo sapiens
tgattctttcactgagataatctaaatctagatcatattgaatctgccttctctctggcacggaaacattttccaaggtattcacgttggaagtatgaattacccacactctctttaaagcc

SEQ ID NO: 134300 - DNA, 122 bp, Homo sapiens
ctctgcaggctccctctgaaggacaactgctggcccctcagggcctcaggtggaaggcgtcgggaagtggagcaggtatgtgcctggaggtgggcgtccagcaccaaagtcgccccgtacgc

SEQ ID NO: 134301 - DNA, 122 bp, Homo sapiens
ttcaggacagatgttcagcagtgtgctccccttaagaggagggtggtcctgttctagcaccgtagttcccaaacgtggctggggaggtggcagcttccttgtgtgatcctctcagccttcac

SEQ ID NO: 134302 - DNA, 122 bp, Homo sapiens
agcgtttcaagcggatgtgccagctgctggaacgggtgcctgacacctcctcttcctcctcggactcagactccgactccgactcttcgggcacatcgctgagtgaggacgaagcccccggc

SEQ ID NO: 134303 - DNA, 122 bp, Homo sapiens
aggcttggaggtaattctattctgcttccacaaagacaaagacagatgaaaactgcattgcgggtattctgagtccatgagtttggattgaggcaggcaactcatggctctagcaggctgaa

SEQ ID NO: 134304 - DNA, 122 bp, Homo sapiens
gtctcccgcatccctcctagagcctctgctgacgtgtcagtcggaaactgctcagaccttcgcgggcgccgcccctctgcgcttgtcttcccacatgcccccggcgctccgcctggtccctg

SEQ ID NO: 134305 - DNA, 122 bp, Homo sapiens
ggaagatgaggtgggttgtagcatttgccacctgagcctcgcagaagggctcctcgtgagcgtggtgccctggagtggcccttgctgcctccctcctgagtcaggttgttcttgcttgttcc

SEQ ID NO: 134306 - DNA, 122 bp, Homo sapiens
gctcgacccactttagggcgggaccacccacttcagccaattctggaagccgaaccctggcggtttgtactatttctttccaataagaaaaaaaggaagcagcttggctccaatgaccaatc

SEQ ID NO: 134307 - DNA, 122 bp, Homo sapiens
ggcggcggcggggccttttgggggcggggtccggcagaggcggggctgggcccctctgcgcgccaccctttccctccgctactcggtggctcagggtctccggtgcttattcaatacttttt

SEQ ID NO: 134308 - DNA, 122 bp, Homo sapiens
acagccgcggcctggcgcaggcggtgcggacagagggtatgccatggcgagacgctggcgcggcgcaggccctgccggccgggacacggagggcggggcacaggcgcagcaggaagggggcg

SEQ ID NO: 134309 - DNA, 122 bp, Homo sapiens
tccatgttatcccaccggcctcattcatcaacaggctgcagacaggtcaggcatctgagtcgagaactgtaaaaacgcacagttttatttttggtcagattttggtttaggaccagaacttt

SEQ ID NO: 134310 - DNA, 122 bp, Homo sapiens
tttatttttttaggtgaagtagaacacaatagaatggctcaaaaatatcagaatgcactacgcacatcacgagtaaatactgtttggtaaaacttgtttcagttaaatatgtacgtgtccgt

SEQ ID NO: 134311 - DNA, 122 bp, Homo sapiens
tgggaggaccttcaaggagccaggctccccggcaccagtaggtcttgttcagctgtgaatcggagctaaggtggaatcagattatgacttaatttccctgctaatgcctccctgtctcatag

SEQ ID NO: 134312 - DNA, 122 bp, Homo sapiens
tgtgccccaggggtcatgtcgtgcgcctgcacctgagtctgccgtgtttgctggtgcctgcgtgtgcacaggtgcctctcgggcctcctggtctgtgtgcccgggagcacggacacagatcc

SEQ ID NO: 134313 - DNA, 122 bp, Homo sapiens
ttggagagcctcagagacaagaaaaggaaagtgagaagagataaggcatccttccttgagcgtgacccaggcctggactctcccatggcagaatagggacatccacagcaggtcagccaggg

SEQ ID NO: 134314 - DNA, 122 bp, Homo sapiens
ggtcagaagctgaggactcagaggttgaattttgtgggcacacacacacggtagtcgatccgctgtcctccggaagacggtcgcctttcggggacctggaaaattttttttcaggtggctcc

SEQ ID NO: 134315 - DNA, 122 bp, Homo sapiens
cgcgccgattggtggcgccagccgggcggggagggggggtcacggcggcggcgtggggttcgctgtgtgacacaattacaacaactttgtgctggtgccggggaagtttgtgtctccaacga

SEQ ID NO: 134316 - DNA, 122 bp, Homo sapiens
gtcatctcctttttggggatatcccacatgtccagaactgccagacggtagtggggtggccggctaggctgtggggagcacggagatttatttgcaaaggaggacctggacaaatgtgcccc

SEQ ID NO: 134317 - DNA, 122 bp, Homo sapiens
aacttgcccagggtcacaaagccaataagtggcagaaccaggattcaaacccaggtcatccggctccatctttcctgctattctttgttcaaccaatccccttgtgacctcaattattttcc

SEQ ID NO: 134318 - DNA, 122 bp, Homo sapiens
cagatagggagactgaggccagggaggaggaggagctcagcctgcagggaccttagaacacgctagtcctaccagcccagagagacagctacctggctccactcctgcacggcctggcgagg

SEQ ID NO: 134319 - DNA, 122 bp, Homo sapiens
cagtatgcgctaaacacctggcacatggagaagcccagtaaataatggccaggagctgggcgcggtggctcatgcctgtaatcccagcactttgagaggctgaggtgggtggatcacttgag

SEQ ID NO: 134320 - DNA, 122 bp, Homo sapiens
agttcagacagacgagccagaaaacgggtgttctgtggcagcaggaaccacggtcgttcacgacgcccaaagaaatgagaggcccaggcagtgcctcacccagaggctgccccgccctcacc

SEQ ID NO: 134321 - DNA, 122 bp, Homo sapiens
ggaacaagccagtgagagccggcctgatgggaggaccggcgaaaggggcttggtgaagcccgcgctccttgggggtgggaatgcggggatggggtggtcgcgatgcagggagggcgacaggg

SEQ ID NO: 134322 - DNA, 122 bp, Homo sapiens
agagtcaatcaacaagagagaaaagaaagagggttcatcataaaataacggtaacaacaacgaacatcttttgagtgttttctatatccggggaactatggtaaactcctaacctgcattct

SEQ ID NO: 134323 - DNA, 122 bp, Homo sapiens
ccccactcccccaaccccctcaatgctgggtggctctgggcaggatgtcaaccttctccccgctctacaatgaggagtgtgcctctctccttgcatgaggacaattaaagtcctctctgggg

SEQ ID NO: 134324 - DNA, 122 bp, Homo sapiens
gtttgtctcttacttgttcgtttcgttacagacttccgggttttggaaactgaggtgctccgcttgcttcatcagaacagctcgggtagcctctgagctgaaacacggcttttttttttcca

SEQ ID NO: 134325 - DNA, 122 bp, Homo sapiens
tttcgctcctgctccaggctccgcctccgccgtgtccgggccgctcgccccgcccccgctcgccccgcccctggatttgctccctcaaagcggaagtgaggccggactgaggctcttacagt

SEQ ID NO: 134326 - DNA, 122 bp, Homo sapiens
tgccagccccggaaatctcgtgttaggcgaggtcaacgggtaggttctcgcgagaggacccgtcagccccagtcaggcgtcgtgcgaacagcagctggtaccgaaggcggaggtggagcccg

SEQ ID NO: 134327 - DNA, 122 bp, Homo sapiens
ccttaggtgtaggtgagcgctcgcaaatgaactgctagagtttgccgctagaggacacagcgccttgcaactggtttgcctaggctgacaggaagcttgcacttcaagaaaactcggctctc

SEQ ID NO: 134328 - DNA, 122 bp, Homo sapiens
ccgcggccgcgggcctgggactactttctacatctggcccttggtctgggccagggaggtcggcgcggccggcggagggagacgctgggagggggccagtggcggccgggtcggagccctgg

SEQ ID NO: 134329 - DNA, 122 bp, Homo sapiens
agccgataaggtataacagaggccagattgtcatccatctggccagtgacaggtgatcagcgcagtgctaggggcactcgggtgatggcatgattgctgtggtcagctcagagtcctgaggg

SEQ ID NO: 134330 - DNA, 122 bp, Homo sapiens
tcaaagagcggtggatgcgcacgggccgcccacgccctcgctgccctcccggagcgtgggcgagtgattccgattgtgcagcagaaacccagggtctcacgggaacgaggaaacccgcccac

SEQ ID NO: 134331 - DNA, 122 bp, Homo sapiens
ttggcaaaacacctcccctcctaaggttgctgtgaagtttaatgagataatctatggaatcgttagctctccaagagagcctgcagtgagtggtggctgtgattatgccaatatcatgccct

SEQ ID NO: 134332 - DNA, 122 bp, Homo sapiens
aggggggccctccagtgctcctgcgccgtgggaaacgcgagaactctagctgctgcgtatcgcgctatttacccggcttgtggggagtttcaagttgggcggctactttttggcttctattt

SEQ ID NO: 134333 - DNA, 122 bp, Homo sapiens
gcctaatgcctccagccaccagcaaatcaataacaataataacaaaaccatcaccagtgacgacagggggccctcatcaggcactccacccatgaggcactcacagtaactcgataaagatg

SEQ ID NO: 134334 - DNA, 122 bp, Homo sapiens
cacggagcctgcgcctgcttccctccaccgacgtcaggccgttgctcagggcgagaatctcgctgttctctgacctccaacgcgcaagtcagtggcgtcacatccggccccgtgacttccct

SEQ ID NO: 134335 - DNA, 122 bp, Homo sapiens
caactccaccacaaaacatactgcattcctcactgtctgcagacatctggggctgcttctcgcctgccagtctctgcatttgctcttccttctgtctgggatgctctttccccaaaggccta

SEQ ID NO: 134336 - DNA, 122 bp, Homo sapiens
cagggaagcaaggggaccagcagacccctttttaagtacgcatgtgataagcaatgaacacgaactgcccagagcagtctccaacactgacacgattcgcttccccaccacgacgccctagc

SEQ ID NO: 134337 - DNA, 122 bp, Homo sapiens
cagccagcctgacattcttttgtgtgtttgggagtcccagagcgtggtcaagccagggctcgtttgcagtcagtggcagcagcagcaggtagctccgtttagggggggcgtggagcaccagt

SEQ ID NO: 134338 - DNA, 122 bp, Homo sapiens
tcaaatgctttcatttctctgtattggcttcattctctttgaaggctgctttcttctgtgcggcagagaacatggcctactgatagctcccaagttgtacattttaaatcttttgtttctag

SEQ ID NO: 134339 - DNA, 122 bp, Homo sapiens
ggcccgggctcccagttctggggtcgtcctggtgacagggtgacccctagaccatgggggcggctacagcgactgtccgggggtgtctgggccacgaccacccgtcccaccaggaggacgca

SEQ ID NO: 134340 - DNA, 122 bp, Homo sapiens
gaaaagagtagaatgtatggtatgttaggtggtggcaaacgttatcaagaaaaatgaaaccgagaaaagggcctcgtttttaaagtgacagaggtaaccataaacttttatctattaactat

SEQ ID NO: 134341 - DNA, 122 bp, Homo sapiens
gtcaacacagaacatttttaaagcagagacgcagcaggacgcgcaactgcagtctcaggccgaccttcctgctttctcggtggcaaattccaaaccccagaggagtaaagccagacccaggg

SEQ ID NO: 134342 - DNA, 122 bp, Homo sapiens
tctctcaggaatacctcatttactactccatatctctaaaatcattttagaaattgtcttcggggcaataagaataaaaaaggaatgaaggcccataagctgcagatatttaacacataaat

SEQ ID NO: 134343 - DNA, 122 bp, Homo sapiens
tagagtccttgtgagtcctctgtgtccccagcaccgagaggcagcctctcagcaagtgtccgctcacggtgcccactccggctcgtgggtcatcgtagcttcacgcccatctcctccgaggc

SEQ ID NO: 134344 - DNA, 122 bp, Homo sapiens
cagctgagatttcatgaaacaaaggatttgcagatggagtgagaaacaaacaaaagtgctcggataaggcagtcagggaaatgggacttgttaagctctggtggcaacctaggttttccaga

SEQ ID NO: 134345 - DNA, 122 bp, Homo sapiens
tctgcctcctgggtggattgtcttcttggctttgcccattgctaggcaactcatgtcacacgtgaagacaatacattccagtgtgtttgagtgacctgaccaaggtcacacagctggttatc

SEQ ID NO: 134346 - DNA, 122 bp, Homo sapiens
caagtcctgcctctgcactcaccccattcgggagattcttcacgatcagtcgcgacatggcgcagggtccccgctgttttgattccaacacgactggtcagcgtcttccaccaagtttcacg

SEQ ID NO: 134347 - DNA, 122 bp, Homo sapiens
gtggcaaactctggatttgaatccaattctgtgtaacccctgaatgtgtgctctgtttaccgtaacccatgctgcctctctcctcaaccaaccatgtgcattgttgcttaattccctctgcc

SEQ ID NO: 134348 - DNA, 122 bp, Homo sapiens
acaccctgggctgcaaactgtcctcgggacgacagcgaaaacacacttcagcgggcgagccgcccaaggtcagctcctgtgccagcgtttaatggatcatccatgaggtctggggcccggca

SEQ ID NO: 134349 - DNA, 122 bp, Homo sapiens
ctaggggagccctcttcttgatgtgcactcgtttagccctatggcttaaaataccttctacgcactgatggctctcacatttacaccttctgctccagcctcttccctgatgtgtatattca

SEQ ID NO: 134350 - DNA, 122 bp, Homo sapiens
agggaggtccttgggatggacggctcccattccttcctgagtgaaggacgccctcatgagcgtggcattcgagccctccacaaaacaaggtgaacctcgtctccagcctttttcccttcctt

SEQ ID NO: 134351 - DNA, 122 bp, Homo sapiens
gtgccctgctcccctcgtgtaaggaagcgcataaggttgtgaaggtcactgacccgagagcgctgcgtgctgaccccacacttcactggggagccctcttgggtagcgcgagacgcctaccc

SEQ ID NO: 134352 - DNA, 122 bp, Homo sapiens
ccagaggccaggctgcacccctaacctgctggatcagagtggacaacagacctgggaatccgcattttcaccagcttccccagcagagtaagaaagctccccattatagtctctgaaaatgc

SEQ ID NO: 134353 - DNA, 122 bp, Homo sapiens
ccgcccgcgtagccccgccaaacagccaatggacgcgcagctcgacgctccgcgcacctccgccaaccaactagaaaaggtcgagcagacgggcggggctactccgccctctgcttctgctt

SEQ ID NO: 134354 - DNA, 122 bp, Homo sapiens
agactaaggaatttcaggtaaaaatcagatggctccaatcctccgatactaagagcccatcgccccagttcccaggagttccgccagttagactttttcccccatggcctcgctaaggctag

SEQ ID NO: 134355 - DNA, 122 bp, Homo sapiens
aagccttcatttggatggactatgagcacgtcaaaccattatggtgagaactaagcaaaacgccccacttcttccctaaagctctctgtcccatcccagatgaaggtgctgcattcccacct

SEQ ID NO: 134356 - DNA, 122 bp, Homo sapiens
ggacgagggcgacgttcccgctcgcggctcctgccccgacgaggcgtttccgatctttgccgcagtccggatttcctgggtctctgggcactgaaggggaaatgccctcgggatgtttctag

SEQ ID NO: 134357 - DNA, 122 bp, Homo sapiens
acctgccagagggtcggcttcaacaggcctcttggcccgtcaatcaggcccgccgtgctccgccccgcccctcccgggggtttataacgggaattcccatggcccgggctcaggcgtccaac

SEQ ID NO: 134358 - DNA, 122 bp, Homo sapiens
gcctcttggaacctgggaactttcccctgacacaccagggttagggttaaggggctttgccggcagccggtgctgttaatttccatctatttcctcttcatttgccatttactgtggcccca

SEQ ID NO: 134359 - DNA, 122 bp, Homo sapiens
gcacttcccggggggctggcatggctgcatcgttcagaatgaggatgtctattaagaagccgtcgccagagctattattagcacagccatcccttggaaatttcgcagaatacgcctgaatg

SEQ ID NO: 134360 - DNA, 122 bp, Homo sapiens
attctccaaagaacccagttttctaactttttgcccaacacgcagcaaaattatgcacatcgtgttttctgcccaccctctgttctctgacctatcagcttgcttttctttccaaggttgtg

SEQ ID NO: 134361 - DNA, 122 bp, Homo sapiens
gacatattttaaaattctgcttccttcacttaaaactataccacagacatgttttcatgtcgctacatagttttcaaaactatgattatgcataagattccattgagtttctatgccataat

SEQ ID NO: 134362 - DNA, 122 bp, Homo sapiens
ctagaaatgctatgttgtacagactgactccttgcctcccccggcccccccgccccgccccgccccgtgcccagtaaatcacatgcaaccgcagtgtgagtttgccgggaatttccactgaa

SEQ ID NO: 134363 - DNA, 122 bp, Homo sapiens
tccccgccccctggctgcagcgggagccaatgggcagcgcgcgcgggggacgtgtgcgggcgtctccgccattttgtgagtctataactcggagccgttgggtcggttcctgctattccggc

SEQ ID NO: 134364 - DNA, 122 bp, Homo sapiens
ggagtgggattgctggattaactggtagttctttaaggaatctcctccgcttttccatagcggttgtactagttcacattcccaccagtagtgtaaaagtgttcccttttcaccatgtccca

SEQ ID NO: 134365 - DNA, 122 bp, Homo sapiens
gatgagaagcttggcatcctggaaaaacaaccatctccagaggaaattagggaaagggagcgagaaaaagaacgggagcgtgagaaagaacttgaaaaagaacaagaacaggagcgagagaa

SEQ ID NO: 134366 - DNA, 122 bp, Homo sapiens
gcagccaaagagcgggtgttccatagcatgcaagtttcgggttccaggcagaagacttcacggcggttccaaaggccaccaccctctgtcactttttcactggaaaccgtgtgatttttttt

SEQ ID NO: 134367 - DNA, 122 bp, Homo sapiens
ggtgatctgcccgcctcagcctcccaaagtgctaggattacaggcatgagccaccgcgcccggcctggattttttaaatacaagttagaaatttgcattcagcaaaagcaaggggtcattgc

SEQ ID NO: 134368 - DNA, 122 bp, Homo sapiens
acctcgtgatccaccagcctcagcctcccaaagtgctgcgattacaggcgtgagccactgcgcccggcctagtttcctgaaattcttaaagctgtgtggagagcttctgagtaagaacactg

SEQ ID NO: 134369 - DNA, 122 bp, Homo sapiens
tgctgtgcctctctcgcccacattttccccaagcactctcaggaacctggcaacaggtaacgtggcaacctttgacttataaaagggcaagtggcacaatctcagggaacaaatggactttt

SEQ ID NO: 134370 - DNA, 122 bp, Homo sapiens
caggggctgaggtcaggggccgaggtcaggggccgaggtcagagggccgaggtcaggggccgaggtcaggggccgaggtcaggggtagctgttgcaaggctccatgtggctttcataaggac

SEQ ID NO: 134371 - DNA, 122 bp, Homo sapiens
aacggccgccagggccgcaccgcggccctgcgcacgcgcagctccgccccactcaccctgcggcgtggtctgtagccaataggcgcacagctctcgccccgcccacttccgcccctctcagt

SEQ ID NO: 134372 - DNA, 122 bp, Homo sapiens
gggtctctctgctcccaaagaaccacaggccgctgtgtatgtcgggggctcacgagctcacgtgctacacggcccagaagcaaaaggtttagacagattcatccaggggcttgattcatggc

SEQ ID NO: 134373 - DNA, 122 bp, Homo sapiens
aggaatgcctaagtggtaactgatgaattgctggagacagagtgtagaccaacatgaaagcggccaaatacttaggagaagaacaactcttcataggattttcctctaagaagccaactggg

SEQ ID NO: 134374 - DNA, 122 bp, Homo sapiens
ttttccagctcgagccctcacgaggccgtgggtacgaccggaagccgcaggtgggtgaagcggaaacgcttcaaaccgggatgttgcgggccgtagcgcgtgggcggccgtggggtcttggg

SEQ ID NO: 134375 - DNA, 122 bp, Homo sapiens
aggataaacatttaagctcaggggctcacaggagggcatttttgttgcaggcaccggatgcgtggggatcaagtgctgtgggtccctggttcagatcatgcaggaattgctacacaagtatg

SEQ ID NO: 134376 - DNA, 122 bp, Homo sapiens
gaaccaaggccagaggccatctcctgggtcctaccttgctgcttggtgcctgcaaactctcgctttaactccttcctcacttcccttaccctaccaagtaattagtcattgtgtcccagaaa

SEQ ID NO: 134377 - DNA, 122 bp, Homo sapiens
caggaagaagcattcagcctcctggccctaattcccacccctggaagaatgcctgcaccacgaggtgcctaagttccccagtagtcagagcccaaatacccactcattctcaaacacctcct

SEQ ID NO: 134378 - DNA, 122 bp, Homo sapiens
tcatttaacttcgagactgtccttttggcctgtgagcacacgtagggcattaggacccagcgtttgttgtagtgagagtggttgaatctcgatctctcaatttttctctcgagctccctcct

SEQ ID NO: 134379 - DNA, 122 bp, Homo sapiens
ccaggctctccacccccattttgctttctcctgcgtttccaacccacttacccttgccagcgacccccgcttaccatttctagctgattggagaagggcatgagcttggggggtgtggacgg

SEQ ID NO: 134380 - DNA, 122 bp, Homo sapiens
cttccctttcctgcggctggaggccgcagactgggtggaagaggcatctgtccccaagggcgtgcacattgccctctccagccaagagcagcgtgctggggaccctcgtgggcatcttctct

SEQ ID NO: 134381 - DNA, 122 bp, Homo sapiens
atgaggagcggcagtgtcctggccttttggggacctggccttcggctttgtgaagggatgcggcagggtgggaggcattgccatggtggggatcagatctcaccacattcctcattctgtta

SEQ ID NO: 134382 - DNA, 122 bp, Homo sapiens
ctcccctctcccacaggcactccctagctgtgccacatttaacccgggacctcctgtccgcgctcagtcttgcagtctctggccccggcagacaccacctctccagaggtcgctgccccatc

SEQ ID NO: 134383 - DNA, 122 bp, Homo sapiens
cattatcttcattttacagatgagaatactgaagctaaaataaattagtggcaaagtctgcgtaattctacttctgcataggatgccataggtatagtccatgaatacaggcatatgttgaa

SEQ ID NO: 134384 - DNA, 122 bp, Homo sapiens
tgcctcctggctcacactgaggtctgcgccgcccccgcgccacccccgcgcccattgcctcggtgcaagcgaccaactcacctctcggagccgacaccagcagcgaagccggaaagaactgc

SEQ ID NO: 134385 - DNA, 122 bp, Homo sapiens
acataagaagaacatcacccatgagtcataggactctgggtactcttagaggtcagaaaccgctgcagtgcaagtcctttcagcctaatcgcctcttcactagcaacgcccaggttccacaa

SEQ ID NO: 134386 - DNA, 122 bp, Homo sapiens
cagcagcctctgcccgagcagtgacaggcagggaaacctgagctgtcatcaccagagtgccggaggcgcagagcgggcaagtctggaagttaaagatccacgggaaccatgtcgttgtcccc

SEQ ID NO: 134387 - DNA, 122 bp, Homo sapiens
aaacgttcgtgccctgttacgtccacagcattaagctggctgtcgtggggcaaacaaaaacgttgagtccgagtcttacggggggtcgggtcaacaaccccagcaaacatggagagaaaatt

SEQ ID NO: 134388 - DNA, 122 bp, Homo sapiens
gggtgagacggaccacagccttgacaccttcgagtcccccgctctgcaggacgccgtgagcgtcctccctaagttgcacttggttgtcagagtgtgttgtgtaagaaggggatggcggtgag

SEQ ID NO: 134389 - DNA, 122 bp, Homo sapiens
caaatataaaacctaagaggcagcttctaataggaagggagattacccaaatgatgtcatcgcatcataattagcaatagggccagaattaccaaccacagcaaagcacgtcaaaatggggc

SEQ ID NO: 134390 - DNA, 122 bp, Homo sapiens
taacatgtgtccatgtggagaatgttctgtttgccctgttcgcggtgttttccacattgtcgcgtcttggcttggggatgcttgagctggcagtttctgaaagacgagttagagataaaact

SEQ ID NO: 134391 - DNA, 122 bp, Homo sapiens
acgaatacagaactcctatggaactgcacacccgcttctgaagttgagcctaaaaacagacgtgtgtgtgcctgcaagtctagataccgtctcgtgcgtgcatcaaaataaatcaccgggaa

SEQ ID NO: 134392 - DNA, 122 bp, Homo sapiens
caagcggggcggccgcgccacccccggccccgcgccagcagcccctcgccgcgcgtccagcgttcccggccagcagcctccccatacgcaggtcctgctgggccgccccgtcgcgcccccca

SEQ ID NO: 134393 - DNA, 122 bp, Homo sapiens
ggtgacctttggcatgaggagtcctggttccactctacagacgaggacactgagggccagcggggcccagaaacttccctgagtcacagctcacagagcaagacatgggcccaggtctgctg

SEQ ID NO: 134394 - DNA, 122 bp, Homo sapiens
tgagacagacggggacagtactgtgcaggtagaggagtctagggcggtaaacactggccccgtcaatctcttaatcagtttctctcaagtccactgtcccgcagaaatacaacgcaagtcac

SEQ ID NO: 134395 - DNA, 122 bp, Homo sapiens
aggaatgggaaggaaatgtctgtagctggtattattctggatcccagacagatcttcgttcgagcttatcaatgtgtcaaaccagggtgcactgagtctgcaagttagaatgctcagagaaa

SEQ ID NO: 134396 - DNA, 122 bp, Homo sapiens
attcagactctgatcctggaccctcccagagtgctgcatcttacaactctaattgagagccgaaagtcaatccatggccagggtgtaactgaggaattgagggagagggagagaggcagaga

SEQ ID NO: 134397 - DNA, 122 bp, Homo sapiens
tgagagcaggaaggtgtggccaggctggctgagccatgaacaggctggttgctccagggccggtgtctcccctggaaggttctggagttcaggctgtgttggagtccaccttctgcccctca

SEQ ID NO: 134398 - DNA, 122 bp, Homo sapiens
tctggcacaggagcaggtttgacaccagcagcagcaggagggaccctgcttaaataagaacgcgagccactctgagatgatttattccacggaggttttcagaagtaatcctgccgaggaaa

SEQ ID NO: 134399 - DNA, 122 bp, Homo sapiens
ccttctccaagaagttcgtgcttgactaccacttcgaggaggtacagaagctcaagttcgcgctctttgaccaggacaagtccagtatgcggctggacgagcatgacttcctgggccagttc

SEQ ID NO: 134400 - DNA, 122 bp, Homo sapiens
gcagcctggaacctacactggcaggatttccccgtgttcttgctgcctgctggcccacttcgcagcagagatgacagcttccactcagtgccacaggccaggctgcactcctcccatgcttc

SEQ ID NO: 134401 - DNA, 122 bp, Homo sapiens
gtgctagaaaggcagaagggaagaggcgtgtgccttgatttctcctcgttgctagtctaacgactgcgctttgcgttcagccacttctcgggccagtccttgcctgccttcgcccaaggctg

SEQ ID NO: 134402 - DNA, 122 bp, Homo sapiens
atcctgaccacaccgcgttcttaccagatctgatggagttgtgaggcatcgccggggagtcgctcgcagcccgccgagggctcggggcttcctcccgtaggtccgggccgcgcctgccgctg

SEQ ID NO: 134403 - DNA, 122 bp, Homo sapiens
gatatcacttccgatatcgcagggagtgtacacttcttctgtgatacggttcctagtatccggagggggagaggatgataatccttcaagtatcgcaggatgtgtacagccaccctgtgata

SEQ ID NO: 134404 - DNA, 122 bp, Homo sapiens
cggggctgtggtgcctgtcctcttacttcattctctgcacagcccgaccggtttcctgtgcgtaacgtcacacggttcattcaaaaaaagaagaaagaaagagccctcctctgagccacccg

SEQ ID NO: 134405 - DNA, 122 bp, Homo sapiens
tgagctcaccaggcaatggcctaatgggttaactctttgtgagctgctggcatgggtcctcggactgtggctttctcagctctgctcagccacaattagatgaatcttgtgaaaaattcatg

SEQ ID NO: 134406 - DNA, 122 bp, Homo sapiens
gggcgcgggcggagcgagaaagcaagtgtagggtggcaggctccggagccggaagaagcccgttcaattcagcaacttttcattaagcatttgctgtgcctttagtccggtctctgaagcaa

SEQ ID NO: 134407 - DNA, 122 bp, Homo sapiens
ttcccgtctgtgaagcgctcgttcagagccgcaggactccgcaaacaataaaaccggctgcgtggctattgcctggattacagagcaagcactcctgcgaaagacgataggctttcccgaca

SEQ ID NO: 134408 - DNA, 122 bp, Homo sapiens
aagagtattacgaaagtacataaggaggcccattcagcctttaaaaagaaggcaatcttgcgacatactataacatgaacaagccttgaggacatcatgcttagtgaaataaggcagtcaca

SEQ ID NO: 134409 - DNA, 122 bp, Homo sapiens
cctaataactgacatagtccacccctttggtcactgagcttctatgtgcacccatctgcacgcaaatgaacttctttacaacaaccatgcaagtctgtttccacctaacaatgtatagctat

SEQ ID NO: 134410 - DNA, 122 bp, Homo sapiens
tgcccagcttatttatttatttatttatttgtttgtttgtttagagacagagtctcactccgacacccaggttagagtgcagttgtgccatctcagctcactgcaacctccacctcctgaat

SEQ ID NO: 134411 - DNA, 122 bp, Homo sapiens
acttgacagttcagccaccctggcctccacttggttcttcgaacatgtactacgtgctttcgcagccttgaaggtgagattaagatacgtaggtaaccctcccaagactaaaccaggaagaa

SEQ ID NO: 134412 - DNA, 122 bp, Homo sapiens
aattgctgagttttatagcactcgtgacgtcaggtccaaatgagaaattgactggcactccgggccaatgggaggcggcgagagcggccgcgattagcataatagtatagaaacaaggaaac

SEQ ID NO: 134413 - DNA, 122 bp, Homo sapiens
ggcagcacgttgtcacgtggcactgggcacggtgagaggatttatttacaccatggcaaccggcacatgctacaaacgcagcttccccctacagaaagctggttgttaaacatttaccagca

SEQ ID NO: 134414 - DNA, 122 bp, Homo sapiens
gagttaaattcaaaagtggcagcaaaagaggaagtgagcagaaccagccacagtgacacacgtgctacagagttcaacaacatcgtcacagggcagtacctggaggacttgctctcctatag

SEQ ID NO: 134415 - DNA, 122 bp, Homo sapiens
atgaaggtctgctttgccagtacgcagcaggtcccagtctctacgccgtcccgaacacctcgtagaaatacggggcatgcacaacgttgtacctgctccaatctaagcagcaatccagccct

SEQ ID NO: 134416 - DNA, 122 bp, Homo sapiens
catgggcacagcggtgggcaggagcgaggtctggttccgcttcaacgagggtgtctccaacgccgtgcggcgcagcctgtacatcagggacttgctctagttctctgagccgcggacatgcc

SEQ ID NO: 134417 - DNA, 122 bp, Homo sapiens
actctcctgttgaagaaaggagttaagaagcaccatttagaaggctggattagttctcagcgtctgaatgacacagacattatgaaatgtaattggcttgtcttaagttctaacaataaatc

SEQ ID NO: 134418 - DNA, 122 bp, Homo sapiens
tctgaatctaggtaatgtggctccagaaaccatgctccttaccatgatgcaatccagcctcgcaaatataagaggccaggcagcaaagtaaatgagtcagacttgccagattaagtgacaga

SEQ ID NO: 134419 - DNA, 122 bp, Homo sapiens
agggtcaccacacacaggttgggggccggggggctgcccttcttgtgcaccgtagctttgcgggagagcactgcctgcgatcaacatcacccaccagctgtgctgcagcgtaccggccacag

SEQ ID NO: 134420 - DNA, 122 bp, Homo sapiens
cttgcctcggggggagggtctcagtcttctgcctaaggcgccctcctcccttgggaagtccgccgtcctctgccgtgaagattgcccctctctcctccagtgcctcctccccagcggcttcg

SEQ ID NO: 134421 - DNA, 122 bp, Homo sapiens
cctcggcgctggcgctggcgctggcgctggtgaaggggtctggccaaagacggccagagacgatgctgctggctcttgaccactaggctgtacttggctctcagcagtccaagtaggtgggt

SEQ ID NO: 134422 - DNA, 122 bp, Homo sapiens
aacggcatgggagccctgggcgtttcgggatcttcctctcctgggggatgtcctgggtggcggcgccttcctgccgccgttaacacaaacccggtggacttcgctccaggtgcgagtcgagg

SEQ ID NO: 134423 - DNA, 122 bp, Homo sapiens
gggtgagcggccccacggagcgctcctccacgttcagcttcacgtggcgtgcctcgaagtcgctgctgacggtgatctcatcgggcgcaatggtgtcaatcttggtgaacaggcgcttctgg

SEQ ID NO: 134424 - DNA, 122 bp, Homo sapiens
cgcgcccggcctggtaagcacttttaatcaaagcaacaggaataaacatttgctgcagagcggcaatgttcagggaggaacattcttccactcaggctcagaaagcaaaacctcctggctgt

SEQ ID NO: 134425 - DNA, 122 bp, Homo sapiens
tagctgggattacaggtgcccatcactgcacctggctaatttttctacttttagtagagacggggtttcaccatgttggccaggctggtgttgaactcctgacctcgtgatccacccgcctt

SEQ ID NO: 134426 - DNA, 122 bp, Homo sapiens
actgcctggcatccctccctatctcctttcagccacaccaggtacagcctgccaggctctcgcctccagtttcacacatccttgcacctgcctgggcgatggcacttgggacatactcatgc

SEQ ID NO: 134427 - DNA, 122 bp, Homo sapiens
ggaaggtgcggggctgcgggcgcagagctgcacaagtagggctgcaggctgggccaaagccgccttgcggggaccgacatgaacccgggtccctcaccggaagggaccaaggactgagggct

SEQ ID NO: 134428 - DNA, 122 bp, Homo sapiens
tggatgagtgatggatgatggatggaaggatggaaggataaaggagaagaatatattctacgtggggaaaagctctagaaattcttctgggaaggaataaggcctcttgggaaatgactgaa

SEQ ID NO: 134429 - DNA, 122 bp, Homo sapiens
gtgggccccggggtggaggcagttgggtcgcggccctgccacccccatgctgcacggcctcggcccagtgccaccacctctgtgggccgccgtttcagcctccagatggggtggcggcgggc

SEQ ID NO: 134430 - DNA, 122 bp, Homo sapiens
tgcctcggggcggacgcgcaggcatttactttctcctatggtctcctctgatttttaacccgatgctatcattcttttgttatagagccttccttttatttactgcataatttcctaaaata

SEQ ID NO: 134431 - DNA, 122 bp, Homo sapiens
ctgccatctgcttgtttgtctaaacgatgctgcaggggcaggggttcccaatctgctgcccgggccccacccgcccactgcgacctcctgacccccgggccagacgggtccgcagagtttgt

SEQ ID NO: 134432 - DNA, 122 bp, Homo sapiens
atatattacactttatcagtagagcttgaaaggttagaaaatatttacaaagggtatgaacgtggtgaattctaggaaaaaaatatgtagtcatatacttcatttgttaaaaaactcattta

SEQ ID NO: 134433 - DNA, 122 bp, Homo sapiens
ccttccttgctctaaagattcctttcaactgtaaagtttccttgtaggattctgatcctacgagaataggaagtagacggtaaaatcttctttctcaggtacatgccacggcaaatgttaaa

SEQ ID NO: 134434 - DNA, 122 bp, Homo sapiens
tccttacccagagcttggtgggtgctcctaagctggtgggtcaacaggcccagggctccacgggcggagtccaaggctgctgccagccaggctgatggaggaagagtggccaggcaggcggg

SEQ ID NO: 134435 - DNA, 122 bp, Homo sapiens
gctggagggggagttgctcgcagtcagaggcagcgtttgtcaccttgtcaccctcatcctcgccccctcccatacacactcccctccccttctcggtgctcctgctggtgctgttgagggtc

SEQ ID NO: 134436 - DNA, 122 bp, Homo sapiens
ggctaacatggaaatcattatcactgttatctacacagcgggtctggccagaaacctgagcgtcattattgacccacgtttctccctccctgcctacatccaaccaccaccaaagcctggca

SEQ ID NO: 134437 - DNA, 122 bp, Homo sapiens
cagccgtccgcgctcaagacgcacatgaggtacgcggggagccgtccggaggggtccctgcgcactggaagggtgtgtcaagcactgaggtcgtcctgggatttgatgtctcactgcttaat

SEQ ID NO: 134438 - DNA, 122 bp, Homo sapiens
ctcccagtcttcttgtacaggggcttgggggcttggccaggctcttctccatccatgccacggggctgacagccacagatctggaagctcaggcctaggagtgcaggctccgttaagccctg

SEQ ID NO: 134439 - DNA, 122 bp, Homo sapiens
gcagtacgcagaaagacaagaaagtccgcggaatccgctaagaccgagactacctgaagtcgctgtggctagcacttccggtaccggccctaaaagcggtcctaccagaaggaagaggaagt

SEQ ID NO: 134440 - DNA, 122 bp, Homo sapiens
agctgaggatcagtcaacaaagactgttggccgatggatccattccagtctcaagtttcacgggctctggcagggagggagggcacagaccccagaatactcctgagaagccctcacctatc

SEQ ID NO: 134441 - DNA, 122 bp, Homo sapiens
aggaagcaagtctgaggaggtgccagttagagaatgacttcttaggatccagcacatctgcggtttaacctgtaaaccccaggggagcatcctcagccacatagaaaatgtcacctacttag

SEQ ID NO: 134442 - DNA, 122 bp, Homo sapiens
agtacctgggctgggaggcacctgcctgatgagctcctcacgtgtggcccgcctgctcctcgcatctttctgtgcttcctgtctgcaggtcctgggcactcccatttgcccccaccatgtgt

SEQ ID NO: 134443 - DNA, 122 bp, Homo sapiens
tggagccacaagccctccattcctcttggaatcttcaaccccaaggtaaggtaagttcaccgagcaccgcccagcgatgcgcaggatccgggggggatcacgcgcggcgaccctaccgagcg

SEQ ID NO: 134444 - DNA, 122 bp, Homo sapiens
gaatgagggaaagggaatgccgccaaaggaaaccgactctgtcagggcatctgcacagcccgcgagactcaaatgagacccattgagacccaggtcccccttcccttccctggcagttctga

SEQ ID NO: 134445 - DNA, 122 bp, Homo sapiens
acctaaccgaggcgcccagctacagccaactgcactgcctcgggagccccactcccaccccgcctctgcgggaccacttccggcgccttcctatgccgtctgcccgcccccttccctccacg

SEQ ID NO: 134446 - DNA, 122 bp, Homo sapiens
gcgctcggaagtcgggggtcggcgcggagtgcaggctgctcccggggtaggtgagggaagcgcggaggcggcgcgcgggggcagtggtcggcgagcagcgcggtcctcgctaggggcgccca

SEQ ID NO: 134447 - DNA, 122 bp, Homo sapiens
cccctcccgcgcacttgtactttatctgcaggatctccacacctcaggacagcgagaaggcgctttcgcagcgccctctgctaagagtcgggacgggctctgcccgagtgtagccacaccgc

SEQ ID NO: 134448 - DNA, 122 bp, Homo sapiens
gggtggggatgaagggggcgtgtccctgccacgtggggtggaaggggaggggcctcaccacgtgggctgacacttttggaggaaggcattgcctagaactttggtcaaaagcgggaggggac

SEQ ID NO: 134449 - DNA, 122 bp, Homo sapiens
aacacaagggacatcaaatgggattgctctggctcaaaacagccagtcttaattctggtgcgatgaatggctttggtggtcgtcccagataagaacattcagcgtcagcaagaaaggctgta

SEQ ID NO: 134450 - DNA, 122 bp, Homo sapiens
cggcgctcgccaggtccgtgcttggggccgggcaggctcgcggaggggtccaacggtgctcgcggaggggtcggggcgcggctgtcgcggaaccacagaggtccctgcagcgggccgggccg

SEQ ID NO: 134451 - DNA, 122 bp, Homo sapiens
gtgccatcaacccctccccatctgtggtttccagggcaaccctggaaaccaagagtgggtcgcctagaaacggtcagactggccccacccactctggatttccagggtcacccggcagtccc

SEQ ID NO: 134452 - DNA, 122 bp, Homo sapiens
acattcggggcagcgcttggtttggagtctagagccagagcctggcgtgggacccgagctcgtgaactctgtcagtgccactgacttggggcagtgtctccgtgtgcctccctgtggggcga

SEQ ID NO: 134453 - DNA, 122 bp, Homo sapiens
gagttgctggagagataaaagccatacctccttttgaccttcattggacagtaggagccccgactcagcgtggaataataaaggcatatcatgctgcataaattatcccgtgattgacgctc

SEQ ID NO: 134454 - DNA, 122 bp, Homo sapiens
atcctcccatttcagcctctggagtagctgctactataggttcgcattactaagtcaggtcgtttttacatttttaaatggttacaaaggtcatataaatacccacataataatatcctcca

SEQ ID NO: 134455 - DNA, 122 bp, Homo sapiens
gctgcccgaactcaggcctgatgtctgggttagctcaccggcagcctggttgggtaggcccggcacgtggcccgcttgaagccttagagatcgagcgcttccggaggtggggaggccggaaa

SEQ ID NO: 134456 - DNA, 122 bp, Homo sapiens
ggtgatccacctgcctcggcctctcaaagtgctgggattacaggcatgaaccaccacgcccggccccattcgttatttcttaacgctggatgaatattaggctgtttgaaggtagagactgt

SEQ ID NO: 134457 - DNA, 122 bp, Homo sapiens
atttcactcatgaaaagcgtcaagacttttctgacaccagttcaccccacgggaagctttcgtctctgatgggctaataactcctctagcaaacattctctacctgcccatcataacacttg

SEQ ID NO: 134458 - DNA, 122 bp, Homo sapiens
atttcttggcatctttggaaataaccacaacttctctgtaggcagacatgtattccctagcgctgttttttcaataacatttattttaacaataatatgcttagtctgccgtgcaaatacgg

SEQ ID NO: 134459 - DNA, 122 bp, Homo sapiens
cattcagcacatattctttgatgtgaaaaacagctcccaatgcaaaggccccaaggtaagcgaagagcagcttctaacattttaggaagagtggttttgcttctctttccgctgaacccaca

SEQ ID NO: 134460 - DNA, 122 bp, Homo sapiens
ccaactccggaggccttcacccactaaaaggagacagataatctcgcccacatcacaaaacgatgagatataaatgctagaatgaggctgggtgcggtggctcatgcctgtaatcccagcac

SEQ ID NO: 134461 - DNA, 122 bp, Homo sapiens
gccgcggcgctcaagcttcccctgaggtcctagaaaggctcaccctgggctcgctcggggcggcggctcccggcaggcctagcgcggcggggcggggccggcggcacgaggaccaggcagcg

SEQ ID NO: 134462 - DNA, 122 bp, Homo sapiens
gaggcgcgtacaggtgggcctgtttgtccctttccacctgcataatgggggcccacaaggcgctgtccccatgccccgagaggcgtgtctcggcacagcaaagtccacctgcgctggtccgc

SEQ ID NO: 134463 - DNA, 122 bp, Homo sapiens
ctctaattcctccaggtaaggagggctcgtgggacggctggggtgtcagcaccttggagccgtcagctgacaccatgtacctcactgggtcaggtggggaacaccccagccccactgtttgc

SEQ ID NO: 134464 - DNA, 122 bp, Homo sapiens
tgcggaggtcaccccgagtcacagcggcgctggcagcctgggccatctccccgcagcgaacgtaccactgcggccgcagcagaggctctaccacgtccttcgaccggctgggggtacacgta

SEQ ID NO: 134465 - DNA, 122 bp, Homo sapiens
agagctctcactggggcaggagccacctcctctgctcccactgcccctcttcttcctcctcggcctgctgcaagcctcacgtctgagctgtttcctgagtcacacaatgtcctggacaccct

SEQ ID NO: 134466 - DNA, 122 bp, Homo sapiens
cccgtaccagatcaggagctgtgccaggaccacattccccttgcggcaggccagatggagcgccgtgcagccgtctccctccccacaggtctcgttcacctcctcacgggagccatgtgcca

SEQ ID NO: 134467 - DNA, 122 bp, Homo sapiens
gttaagtaacttgtccaaagcctgcacagtgtatagcagaaccaggattagaaccaggtccgtctgactcccttgcttataaccattgaactgctttgcctcttcacgtaagagggggtgga

SEQ ID NO: 134468 - DNA, 122 bp, Homo sapiens
gagagcacatggccaagtcctgtcttccatgtagccacatgtgttcagagtagcagtgcccggtgcacagtgactcacacctgtaatccctgcacttaaggaggcagaggtaggaggatcgc

SEQ ID NO: 134469 - DNA, 122 bp, Homo sapiens
cttttgtttctaaagttggaccttgctgccatgactgtttagtttacagaaacttgaccccggctcatcctgtctctggctgtggcccggcaaagcactgaaaacccctctggtctcagaga

SEQ ID NO: 134470 - DNA, 122 bp, Homo sapiens
cccactgaagtgggttgaggaaagcttctaggcaaagttgtgcaacttagcaaagatgtccgtgtccaagagatgaggaaggtccaggaggtgtggcctgtgtcagggaatcagagcatggg

SEQ ID NO: 134471 - DNA, 122 bp, Homo sapiens
ttactacaggtcctttgcttatgacttccagagattcagtataattgtgcatcagataaacgggctagaataaagactcataacttctttgtcacacttttgacagcttattaagctctaag

SEQ ID NO: 134472 - DNA, 122 bp, Homo sapiens
agcagaaagcaggctctatccacagcaggccctcactcagagtaaaacccgagttctcatcgtggcatctgagggaggcgcccccgccgtgacacacaagaacgaactttcccttcagacgt

SEQ ID NO: 134473 - DNA, 122 bp, Homo sapiens
gtgaaacccactttaggtttgtggccataaatataaggtgagaccaacagcgtggttgtgcgttttttttgcagccccatgccatggctcagttacagacaaggagtaggcaacaagatagc

SEQ ID NO: 134474 - DNA, 122 bp, Homo sapiens
gaggtttttaatatttacaagccacagaattatttcctgcagccacagagacttccttggcgggaaaccaggtcctctgacctcacccggctctgcagtctgttttgccgttttccgcctca

SEQ ID NO: 134475 - DNA, 122 bp, Homo sapiens
aagataacctcataatgtaaccacccaatgggcttttcttgcctgctgcccaggtagagccgatttattaaggcaggggaattgcaatggagaaagagtttaattcacacagagccagctga

SEQ ID NO: 134476 - DNA, 122 bp, Homo sapiens
gcccccgcggtgcggagtatggggcgctgatggccatggagggctactggcgcttcctggcgctgctggggtcggcactgctcgtcggcttcctgtcggtgatcttcgccctcgtctgggtc

SEQ ID NO: 134477 - DNA, 122 bp, Homo sapiens
gtatccacacagcagatggcagtccccatggcaactcgtgccactggacactgtcctggccggacgggaacaaagggaccctgcagatctccccacccgcctggagcctccagcaagcatgt

SEQ ID NO: 134478 - DNA, 122 bp, Homo sapiens
gcggatggatggggcttcttcaggcggtggcggcagcagcgaaggtggcggcggcagcagcggcagcggctgtaagtgcagcctccacaagccatctctccccttctattccagtttgggat

SEQ ID NO: 134479 - DNA, 122 bp, Homo sapiens
ttttctcaattcctttcccccactccttttgtttttttaagcactaatctggaatggagtcggcgggacagagcaaagctggatgggctgccccttgaatgatggagtaggtctgcttgggt

SEQ ID NO: 134480 - DNA, 122 bp, Homo sapiens
ggagggcaagccgtatgctgaggggcctgctgtggttagaatcctgtcaggggcaaggcccgccctcttgagtccttgccctgtgacactcactgcgcccatcggacttgtgcacccccacg

SEQ ID NO: 134481 - DNA, 122 bp, Homo sapiens
ttgcgggacggcgagcgcatttgtgctttgcccgccgcggcctaggaggccttttgaggccgcgtagtcggtgtttttgaactgactctacagcttctggcaggccgtgcggcgccctgacc

SEQ ID NO: 134482 - DNA, 122 bp, Homo sapiens
tgcctcacaccttgacctgttgaatggccacagaggctctctgcatgccgatcagagtgacgtgtatgctccccacccccacttctctgcacacatgtttaccttgctccacgctcttctgc

SEQ ID NO: 134483 - DNA, 122 bp, Homo sapiens
gcgccccttgtggcccagctcggagaaagttacacagatagatgcctcacggggcaaaagcgcatccgcccttctcagctgatccatgccacactgtgagcactttgaagggtgtcactgaa

SEQ ID NO: 134484 - DNA, 122 bp, Homo sapiens
gtttagggaccccacagatccctgcagcccacggccctgcctccctccctccctcactggcgctcagcagatcaatgctgcctttgctgacagctgagaatcgagctcgccttcccgcccct

SEQ ID NO: 134485 - DNA, 122 bp, Homo sapiens
taagaaaaaaaagagatctattacgaaaacaatcttacacaaaagtggaaacatctactccgtcagctcagtccactcttcttaataagagtcagaaatcactagcatgtaaagagaactag

SEQ ID NO: 134486 - DNA, 122 bp, Homo sapiens
tgaactcgattacatatgcagaaaccctgttcccaaataaggacatacaggttccggggtcgggagtggacacgtcttgctgggggccacgctcagcccctgcctgtaagtgctcctggatt

SEQ ID NO: 134487 - DNA, 122 bp, Homo sapiens
tctgcgctctcagctcccggcgtccctgggggtagccgggtgcgcggcccctggaccctgcgccccgagtgaccttggctgagcttgggacttcctcatgctgccagcaccgaggccgcctg

SEQ ID NO: 134488 - DNA, 122 bp, Homo sapiens
agtgcaaaacgagggtcacaattttcattcacagattgtatgtgtttacacacatactcacgaacgcttagcaaagttgaacctggagcaaatgtgttaatagcccttaaagggtcagtgta

SEQ ID NO: 134489 - DNA, 122 bp, Homo sapiens
tggacggccgttggggccgccatagagacggggcacaggcagagcggacgagcggaccggcgcctctaggcggcgggaggccgccctctcgactgctccagcccccgcgctggggctgggat

SEQ ID NO: 134490 - DNA, 122 bp, Homo sapiens
tcagttcagtgtctcacacggtcctgttagacaggagatgcaggcgttcgagctgagggccgcgtcacggagcccatgctgccttcggtttctttttagtccgcaagtgggaaatcgatagt

SEQ ID NO: 134491 - DNA, 122 bp, Homo sapiens
gacagggacagaaaaattgcaggaagcacttgccttcagaaaggggaagaatgaagtcaccggtcagtaacaattatgaaatgacactggaaaccatttgagggccctctgccctaacagag

SEQ ID NO: 134492 - DNA, 122 bp, Homo sapiens
tcggccccagggtgtgaggtttctcacatgtgcgtgaaaacgcttcgagaggggtgcagccgcggacacaaaaaccgtggcttgagtccccgcgcccctcccctcccctcccctccctccct

SEQ ID NO: 134493 - DNA, 122 bp, Homo sapiens
gagcccacccctggcctgagtagccagccgtgtggggctaaggggctgccgccccttccccgtgccccacccagccatccacccgccctcccgggggttccctacagcctgggtgggagctg

SEQ ID NO: 134494 - DNA, 122 bp, Homo sapiens
tccgagggtaggcgcggcccggcccggggagccctcttccccctccctcccgcggccccgcgcccttacctggagcggcctgcagcaggcacaggagcagggggccccagcgctcgggcccc

SEQ ID NO: 134495 - DNA, 122 bp, Homo sapiens
gaccaactacttgcgcacgctgatcaacgagctagtgaaaggtgcgtgagaggccgaactcgtggtgtggcttccggcgggcaccttggccaggggccacaacccagcccagccacacagca

SEQ ID NO: 134496 - DNA, 122 bp, Homo sapiens
gtccgctgggccatcggtgtggtgacgctgcttcctggtttctcgtggcagcagaagggccgatcaccacaggcccagacagagagctctgcagtgttctattcatagaggcagactcctca

SEQ ID NO: 134497 - DNA, 122 bp, Homo sapiens
gcccgtgccccacatcgaggtgactttgggtgtgaacgaggcaatggaatgctagactgacgtcttcatgctgctgaccaacagcttcccagcgatggcaatggtgggacaggggtcattcc

SEQ ID NO: 134498 - DNA, 122 bp, Homo sapiens
aagttctacggtgacgaggagaaagataaaggtaagagcctaggagtgggtgctcagatccgggaggacttcctggcagaagtccttgtctgtacacacacagccgggacagtccccttgga

SEQ ID NO: 134499 - DNA, 122 bp, Homo sapiens
cctcgcgccgcgtggccgcctccggagccccgccccctatggtcagcactggcccagctccgccatggcgcttgcgtcccgccaccggccgcccttagcccccgagtcctccctcgcacccc

SEQ ID NO: 134500 - DNA, 122 bp, Homo sapiens
ccacacccccaagagtcccgcccccagacccgtcgagcgagctcccctccctgaaatcctcgccccgagatctccggccggcgagctccgccccctgaagtccccatcccaagatccggggc

SEQ ID NO: 134501 - DNA, 122 bp, Homo sapiens
cctcctcctctcagcagcagcagcgagcaccaccagcccattcaccacccggccccgggccgcagcacctccgccgcctcagcccggggatccctccgcccaggcccagacacactcgcccg

SEQ ID NO: 134502 - DNA, 122 bp, Homo sapiens
gagcagagcgaaagaggcgggggcatcatgaggtgatggggtgggcacggggtatgaatacgctgaaacagagaggttaagtaaatggctaagttcacgcagataataaggaaccggccgac

SEQ ID NO: 134503 - DNA, 122 bp, Homo sapiens
gagccttcgcgactccccggctcgcctgtcccggcttgatggatctaccgaagagaaaagcgctggaaagaacctggaagccatagcaagtgagccccgcttccaaattgctgtagcaccgc

SEQ ID NO: 134504 - DNA, 122 bp, Homo sapiens
tagaaacaccataaccagcatctctgctttccaaaacacgttctccatccagatagtcagcgatggctggggtaggaacatttgaaggtagaatagggctaaggtaaagctgtgttcatgta

SEQ ID NO: 134505 - DNA, 122 bp, Homo sapiens
tacctggctgaagcgcggctgctgggcggacctggggagactgcgaggtgcagtctgcgccgcggagtccggagcctagcgccccagagtccagagcaaagcgccccgccccgccctctgat

SEQ ID NO: 134506 - DNA, 122 bp, Homo sapiens
ctccggggctgctgggaggtctcttgcggcctaggccaggctcagggccgccggggatctcgcctccatcccgtgcctcagtgtcccggcgcggccgaggggcgggcggcagggggcggggc

SEQ ID NO: 134507 - DNA, 122 bp, Homo sapiens
caaaggaatgattacagatttgggatccatacaacagcatattccaatgttatgaacacccgataggatctggacacaagtgctgctcaaggaagcctgctgtagtaagcgcaagcactgat

SEQ ID NO: 134508 - DNA, 122 bp, Homo sapiens
tgtagcagacaataccgtccagatcctcttagatcccttcaagccttttcttgtgcaccacgcttgcctgccttggtgtgcttctgatttcagcatcctgcattgtggctcctcttccagga

SEQ ID NO: 134509 - DNA, 122 bp, Homo sapiens
ctcaggctccaaagccagcaggaaagaggtagctcgggacgtggagccgccgcccaggtgcgccaggaccacctcggccgtcaccttagccaggtggctgcttaggtccactgtgcgcttca

SEQ ID NO: 134510 - DNA, 122 bp, Homo sapiens
cggagctgggtgtggggggagcaggggcggggctcctcgagggcggggccatgctgaggccgggctcttgcaggtgatcttcgataacctgatgctgaacccggtgtcccagctgtcgcagg

SEQ ID NO: 134511 - DNA, 122 bp, Homo sapiens
gatgggagctgagagtctcagtaatctccaaaacatctttcttgggtggattttttaaatcgacaagccttgatatgattgtgcatgttctcatttctaacttatttttaatgatagagatg

SEQ ID NO: 134512 - DNA, 122 bp, Homo sapiens
gctgccggaacccagacagctccatctacagccggtaggagcgaacagtgtcgagcgagccgcccggcggcgacggacacgccctgagcccgggccagcccgtcgtggagcccgggccgaac

SEQ ID NO: 134513 - DNA, 122 bp, Homo sapiens
ggagcggccggagaggagctgccgggagttcgtgccctgcaggtctgcgacgctggcgttcgctcctgcctgggccactttggtgggctcagagcatcgctttttgccaaggggcgtgacct

SEQ ID NO: 134514 - DNA, 122 bp, Homo sapiens
cagagacacggtttcactatgttggccaggctgctctcaatcccctcatctcagttgatccgcccacctcggcttcccgacgtgctggggaaacttgattttctatagcattatgttactgg

SEQ ID NO: 134515 - DNA, 122 bp, Homo sapiens
agggatggatgtctgggttccctgagaagaactgattcccatactgggctgacctcctcccgttcccttgctcatctccagccccctgtgctgagtgagaaagggagaggtaagccttagcc

SEQ ID NO: 134516 - DNA, 122 bp, Homo sapiens
gtggatctcagcactctgggtgaaagcaatctcagccagtaaaacatcagaacgctttcacgcacgcgcagtaagcacacgaccggtggcaagagcccggataaaggcggagctaaaggtgc

SEQ ID NO: 134517 - DNA, 122 bp, Homo sapiens
tgggactttttttttgacactctggtattacaaaatctgttactgctttgatggtgccagcggacagattatacctcatgcatctttgctctatcacttttctagatttaagtggtgttact

SEQ ID NO: 134518 - DNA, 122 bp, Homo sapiens
caggagcagctcccaagaagaccctgcgtgcgccgctaatgtctgatttgggcagatcagcgagcaaatgcgacaacagcccacagggatgtgttacaaattagtgctttttcatcttattt

SEQ ID NO: 134519 - DNA, 122 bp, Homo sapiens
gcacatccacaccatggaatactatgcagccataaaaaatgatgagttcatgctaaatgacgtgcattatgggtgcgaaatgtgctaaatgggtgcagtacaccaacttggcacatgtatac

SEQ ID NO: 134520 - DNA, 122 bp, Homo sapiens
caaatgggcagatcacttgaggtcaggagtttgagaccagcctggccaaaatgatgaaaccgcatctctactgaaaacaaaaattagcagggtgtggtgacagctgcctgtaatcccagcta

SEQ ID NO: 134521 - DNA, 122 bp, Homo sapiens
gtgacgtacagaaggcacagcggccgggagacgcggtggacggaggcctcttaaactgtccgatttccagacacctcagccctggcagaaaatggagagcttatcagaggcttgagttcaca

SEQ ID NO: 134522 - DNA, 122 bp, Homo sapiens
aaaactcagccacactctgcccgccaagccctgcttgttggtgcctgcgtgcatgagccccgagaacaggctatcgttttgaaatttattctccaggaaggggaactctttcaaattcccac

SEQ ID NO: 134523 - DNA, 122 bp, Homo sapiens
tccggttctgaaaccagatcttgacctggcgctcagacaaacagagcgtgtgggcgatctcgatgcggcgccgccgggtcaggtatcgattgaagtggaactccttctccagctccaagacc

SEQ ID NO: 134524 - DNA, 122 bp, Homo sapiens
gagtgctggctgactctggctcggccgccctcccttggccgcgaaggtccccacgagctccgggttgcagttatccctgcaaagcttgccagctctggcccataaaagcctctctgcaaagc

SEQ ID NO: 134525 - DNA, 122 bp, Homo sapiens
caaaacgcaccgcagcagccacataatgctaccaggagttcctgccggctgcagactctccgcctcctctcccaagagccgagggtctgcctgcccagattcctttatatacagaagtcagg

SEQ ID NO: 134526 - DNA, 122 bp, Homo sapiens
cgtgtcccccaagtgctcactctccccagaggggcaggagtccagggaagagggtggccgcgcagctggctttcacctggccgcaccaagggcgagactcaaaccccaggcggcgcagggtg

SEQ ID NO: 134527 - DNA, 122 bp, Homo sapiens
gaacacagctgcagaccatagcagggtcctcagtgagtccgagctctcctgactccgcgtcggactgaagcatcctcgagggtgtctatatgagcctgtgtgtgagcttgtgtgtgaatgtg

SEQ ID NO: 134528 - DNA, 122 bp, Homo sapiens
gtggctcactggagccttggtctgtgacagggttcacacctcagcagcatccacacggcacgaacgccacactgcatgaacactcgatctaagtgggaacacgggagtggtttcttctagta

SEQ ID NO: 134529 - DNA, 122 bp, Homo sapiens
caccatgcccgactaattttgtatttttagtagagatggggtgttgggaaaaaggcttatcgagtgcctgtataagctggccataaaaatatggcacagtaagttgtgaaaagccacaagag

SEQ ID NO: 134530 - DNA, 122 bp, Homo sapiens
aggctcgtccaggaagaataacaaggagccaccgcgggtctctcccaagcttccagctgtcgggaaaccttgtccaatcacccacctcgccacgtccacctgctcacctgcattctgtagaa

SEQ ID NO: 134531 - DNA, 122 bp, Homo sapiens
agcggctgtgaatgttatcttctatgggcagcaataaatacggtttggtgtcggagtctgcgtagtgaatggctcactggatctggcgcatgcgcatcttttgtggtgccgcaagatggctg

SEQ ID NO: 134532 - DNA, 122 bp, Homo sapiens
gcaaacaactccgcccaacagcagaggccctgcactgcgttgtgcctgcagcacctcgtgcgccttctgcagccggccaaccacctacaccgcagcccgcccacccgcacgcgggggcgggg

SEQ ID NO: 134533 - DNA, 122 bp, Homo sapiens
aggggattatgcatgagagcaaacccttcttcgctgtgcagttccacccagaggtcaccccggggccaatagacactgaggtacgtcaaaaagatgaggcctattatgtatgcaaaaaaaaa

SEQ ID NO: 134534 - DNA, 122 bp, Homo sapiens
gaaagaccgcagagggaagccgtttcaccagcctctccccttctggggtctcgggaaacacgcggtaattaccgaagaaccccgcactctgtgagaggcgaggctgcggggctgccgggacg

SEQ ID NO: 134535 - DNA, 122 bp, Homo sapiens
aatctcgacgctcctcactattggcccaagcctcagagacatgaacgtcgattggccgaacggcagggcccgagcgggcaatgattggttgcgtccggccgtccgtgcggcggccgaggagg

SEQ ID NO: 134536 - DNA, 122 bp, Homo sapiens
cccagagccatcggccaggtaccaaagctcagctgtatggattcccaacaggaggacctgcgcttccctgggagtaagtgctcctccagtccctgtcactggacttgtgccttagggcttgg

SEQ ID NO: 134537 - DNA, 122 bp, Homo sapiens
ccctgctgggtgggtgacagccgctgaggctctgagtgaccctgcaggctggtggccagccggccgcccatcttccacaccatgtcggacggcgagggcccctccgccggtgagtggcagcg

SEQ ID NO: 134538 - DNA, 122 bp, Homo sapiens
tctgtgtcctgcggcaaagccaccacgagcacagacaggcttgcggcaccagtcctctcccgttgcacgccacacagcgctttccatgcattaactgcttgcgatgtcaccaaaccatgatc

SEQ ID NO: 134539 - DNA, 122 bp, Homo sapiens
catccggccccacccaaacaagtgggctgtgtgggcggggggagggtccccgggccctgacgtcccgagcaggctcttctgatgagcaggagagtcccgtagagggtctggaccccctttgc

SEQ ID NO: 134540 - DNA, 122 bp, Homo sapiens
gtggggggcctggaccgacagctgccacctcctcaaagggcgctctgtgcatgtctggcacgtggccctgcccgtgcccacccgcccgcatccagctggcacaggggctcctgagctgggag

SEQ ID NO: 134541 - DNA, 122 bp, Homo sapiens
ggaccacggggcgtcataacaccgcgcagtggaggccacgctgcactggccggtgtccgccgacagggtgtgtgccacagacgcgcagtgccttgcccgaatctgtccctcccctcagcgct

SEQ ID NO: 134542 - DNA, 122 bp, Homo sapiens
gcccagtgtgaaaaacagactcacaaggggcttcttggcctgcagcttcatttgcgagagcgccgaggcaggacacagagcacagctgtgctggaagtgtggggagaacccggacagctcag

SEQ ID NO: 134543 - DNA, 122 bp, Homo sapiens
aagaggatacattcctatgcaacgaaacagctattttggaaagaatggagtcactgaggccgtctaggctacatatagggcacagaaccactcagacagaaggcttgggagacatgggtggc

SEQ ID NO: 134544 - DNA, 122 bp, Homo sapiens
aatcaatgaagatgcaagtttctttcaccagggaggggtccctgctgcttcggctaataacggtgctctgttgtttcaaaatttcccccatcatgtcagccctggctttggaggcagcttct

SEQ ID NO: 134545 - DNA, 122 bp, Homo sapiens
attgtagaacaatataaatttagtgcatttagaccactttatattaactaatttagaaaacgttgctttcgcagacttcgccgggtgcctttcactgccaaactaaatactccactttaaaa

SEQ ID NO: 134546 - DNA, 122 bp, Homo sapiens
attaattatagattcacaggaagttgcaaaaacagtacacggcgcagcgggtccgctccccggccttccccagcggtgaccgcacagctgcagccaatggcaaagctgggaaatgagactgg

SEQ ID NO: 134547 - DNA, 122 bp, Homo sapiens
ccagcatatttctgttttgttatggcaggaccttgttgctcgcctggatgaactcgggggcgtgtatctccagtttgaagaaggactggaaacaacagcgttatttgtggctgccacctaca

SEQ ID NO: 134548 - DNA, 122 bp, Homo sapiens
ggggcgtggcggggaggggagtggaactgagggaagcagagagggtggtgccattgcccccggcctagcttctgtttgatcattagtttcaattcaagaaaacgttcttttgagggaatttt

SEQ ID NO: 134549 - DNA, 122 bp, Homo sapiens
atagtggagcctcagaccccttgcaggaggaatgagtcggtgtggggagggtaattgagccgaaactggcaggaggaggagaataggtgcaaaggaagtcagggcaaccagctccctgggga

SEQ ID NO: 134550 - DNA, 122 bp, Homo sapiens
agctttgggttggggatctgtccaggaactcggctgggcctccacaaacctagccctcatcgcatctcagtcaacaagcgcaaccctcttctcattttctcatgaggagaaaggcatagacg

SEQ ID NO: 134551 - DNA, 122 bp, Homo sapiens
tttatggaggaggaggctgagctgggccttggctgggcttgggcttggagtctgagttcccgggggccgggggtgcgggggagggggtgggcgccagggctctgggcaggggctttacctct

SEQ ID NO: 134552 - DNA, 122 bp, Homo sapiens
ggcaaacccgcgcaaggatcggctcatcgccccctttcgggctggaggatcttgcgcaggcgcgagaaaaccccgagagaggccagtgcctctgtgcatgcgtcagtggcgagcgcaccgcc

SEQ ID NO: 134553 - DNA, 122 bp, Homo sapiens
gctgatgtcggggaggtccggttgcgcgccctgtgggcccccagaggcatggctggtggccgagcacgcgcttgacttccacctgcagccctgtgctggcctccatcctggaggcgggtggg

SEQ ID NO: 134554 - DNA, 122 bp, Homo sapiens
tttgcaaactttttctgtagaaggacagatagtaaatattttctactttgcttgtcattccgtctctgttgtaattattcaactcagttgtgtagcatgagagttgtatagccaatgtgtaa

SEQ ID NO: 134555 - DNA, 122 bp, Homo sapiens
ggctaagcgccctgttcactgtttcattggcccaaagaggcctggcttcaacagagtgcccgcggctccgaccctagtctggccgtggccgagaagatccggaaagaacccggggggacctg

SEQ ID NO: 134556 - DNA, 122 bp, Homo sapiens
tgcggactgaagatccttatgcgattggccggggagccggaggggcgggcaatttgggatcgacagtgactcgcgactggtcggcgcggcgaaagcagagcggcgcgccggttccttggttc

SEQ ID NO: 134557 - DNA, 122 bp, Homo sapiens
accctcaacgtccagccgcttgtgtcttcttctgccgatgtgttcctcttgatgtccagccgcttgtgtgtctgcccactaaggtctcgagatctttataggcacgggatgggagcatggca

SEQ ID NO: 134558 - DNA, 122 bp, Homo sapiens
ccagaaggcttgtcacactctgggggggcatctagctaaaaggtactccatcaatgtaaacgaccgtcgctctcgttaagttccatctgtgtgtcttaaagctcccgcacggaacgtgattg

SEQ ID NO: 134559 - DNA, 122 bp, Homo sapiens
ttggacaagagatggtcatctaccacccagccttggctcgctcaaagggtcaccattacacgggtttcaactggttccagcagggtggaccgccaggagccaagcttaacccccatcccctg

SEQ ID NO: 134560 - DNA, 122 bp, Homo sapiens
gccggatggcctaggctgctgtctttcaaaggtggagagcatgtgcgggtggggccaggccgggtgggtctgccctccctctgcccgccgtatgcagcgctgcgcttgctccagagctcagg

SEQ ID NO: 134561 - DNA, 122 bp, Homo sapiens
cttcccttctcagagcatttattaaaacctccttggcctttccagacgaatgtctggctacgtaaactgtgagctctgtagggcagaggtggcgacggttcagttatataaatccagtgccc

SEQ ID NO: 134562 - DNA, 122 bp, Homo sapiens
aaacctttgcggttttccacagaacaaaaatgatgtgaagctgcaagtcagcagttctggcgcaggggctccgggggacgcccgctccgccggctgtggtgtgcgcccttcctgctctcccc

SEQ ID NO: 134563 - DNA, 122 bp, Homo sapiens
ccttttccgcgctctttaaaaaccctcctggtctgcagtgcaagctgcagccgcaggaagcggacccagcgtaaaggagccgcagcggggaactccgggggcgggggggccgatgctcgggg

SEQ ID NO: 134564 - DNA, 122 bp, Homo sapiens
ccccaaatcaggaggggacataactgacctgaggaaatgggtctgctgatgccagcaacacgttttctggtttcaagtcacagtggacaatgttcttgaagtgaaggtgtctcaaagccacc

SEQ ID NO: 134565 - DNA, 122 bp, Homo sapiens
cgccgccgtcggggctggacccccttaccagggggtctgggcagcccactctgtagctgccgcaccatctcgtggtccctgtggtccagcacgcggggcaggaacagggaggacttctgtgt

SEQ ID NO: 134566 - DNA, 122 bp, Homo sapiens
cttatgggaggtggagcatgcagacggacgggtgcaggagccagggtgcaaaagctggggcgctgggcttccagccccacggcagtgtccaggggcaggatcccgtgattcccggagcccaa

SEQ ID NO: 134567 - DNA, 122 bp, Homo sapiens
gggaagcaaagagggagtgagagagaagaccgagtattagagacgaaagagatgagagcacgttcttacctccattgcttgccacacagctggcttcttgctggataaaggctttgcccatg

SEQ ID NO: 134568 - DNA, 122 bp, Homo sapiens
gccctgggtgtgggggtaataagtgcagaaacctacctgtcttcctgccatccaagaccacgcttctgtctgtaagttccccaataaaacactctttactgacaactagatttgtctgtctt

SEQ ID NO: 134569 - DNA, 122 bp, Homo sapiens
cagaggtatgggctccaggcagtggtgtggggtggggagctgccctggaggacaccctgtcgggaggggatctgtgtgggggagggaggtggatctgtgtgatggaggtgctgcaggagggc

SEQ ID NO: 134570 - DNA, 122 bp, Homo sapiens
aagaatcatttgcccctgctgccactgtctcctgcaaggcacatgaaagctgctgaggctcggtatttattatgctataaaattcaacacaaggggagagaacaagcaaattccatgagcat

SEQ ID NO: 134571 - DNA, 122 bp, Homo sapiens
ggactaataggatagggttccaacttactcagaggctaagagtttgaaatttactctgaacgatgtctgttcactagactgcgtgactgcagtttgctgtcttgtggccattttaagattgt

SEQ ID NO: 134572 - DNA, 122 bp, Homo sapiens
tgcggtcccgaggtctagcctaagtcccccttgcttctcttgcagggtgtttatttctctcggcttcttcctctccctacgctctcactttgttttatttcatctccgtccctctgccctcc

SEQ ID NO: 134573 - DNA, 122 bp, Homo sapiens
gatgattaggggtgtctgggatgactgtgtggaaaagtgcaggcacctggggtcggtgcacgtgattaagcagcaggcagcctggagagcctccagcccaggtcccttcacagaccatgcgg

SEQ ID NO: 134574 - DNA, 122 bp, Homo sapiens
ccgtcacaaagggggcgtccaacagacacatgagacaaacaactcaataagggagtgacccggttctcaaagggcagccactggcagtgcaggacgcagatgcacacacgggataagggcat

SEQ ID NO: 134575 - DNA, 122 bp, Homo sapiens
ttcggtacggcgggcagcgaatctcgggctcctgaccctggcagacccggtgggtgggggcgggggaccggcggggaggggacccggccaggagtcgagggccggcggaggcgggagtggaa

SEQ ID NO: 134576 - DNA, 122 bp, Homo sapiens
tgtttaaaatagaaacttctaagagagccaagttagcacatgacaaattactgaatatcccgttctcctggaggggagaaaaaaaaaaaagccccttcatttctgaaatgagaaagggaatt

SEQ ID NO: 134577 - DNA, 122 bp, Homo sapiens
cgcaaactccgtaactttggaggcggaggacgcagccactaggagcactaagcccccggccgcgggagaggctgggggttggcgtgaggtccgggcgggcggggtggaaggagtgactagcg

SEQ ID NO: 134578 - DNA, 122 bp, Homo sapiens
accattaggaaagtcttaattgaatgagattacaattaataactctggaaaaacagcacacgttagtaacatttaaaaagaaaagcatacaaactccaactatataaattttttttggagaa

SEQ ID NO: 134579 - DNA, 122 bp, Homo sapiens
tcccaggaatgtgggagggctgggcggaggggcgggcgaggcgggagcgcttcctctgcccgcgggaggggatccgcggccggctcggagggggcgggggcagcggcgggcggcggcgaggg

SEQ ID NO: 134580 - DNA, 122 bp, Homo sapiens
agaaaggggccagggtcatcggaaagggccctgggcggggaatcagggcacctaggatggcgtcccaggtctccatgacccagacaagtcactccacctctccggacctcagttttcccatc

SEQ ID NO: 134581 - DNA, 122 bp, Homo sapiens
ccataggatggtcaagaagattgaataaagtaatacacgtaacagcgcctaaacaggtgtcgggcacatagtgctcagaaaatgttggctcctattaaagtttgacccctttgcttcattcc

SEQ ID NO: 134582 - DNA, 122 bp, Homo sapiens
gggggtgggattggggtggccttgtgtgccctgctctgagggtttccaggactttgacctcgctcagtccgcctccctacgtatgcagtgtgtacactctttctcgcagtgtgatgtggaat

SEQ ID NO: 134583 - DNA, 122 bp, Homo sapiens
ccccggaacagtattggcacaggtgagggccacgcctcctccctgggcccaggcatcaggcgctggctctccacaggaggccgcagcttaaggagctcacagacgtttctattcggagagag

SEQ ID NO: 134584 - DNA, 122 bp, Homo sapiens
ctaaatccaaaccctttcccacattcatcgcatttgtagggcatctcccctgtgtggactcgatgatggttgtgaagggaagagctgcgcctgaagcccttgccacattctttacatttgta

SEQ ID NO: 134585 - DNA, 122 bp, Homo sapiens
ggagcctactgggcttgagagccccgctgaggagtccggaggttgggacgcaactactgccgcgtcccctcccggtccccggccacatggcgagcggggcgacaccgaagcagcccacggag

SEQ ID NO: 134586 - DNA, 122 bp, Homo sapiens
aagcacctggagtccttcctaacaggcaggaggagtccggggtgcagcagtttccagggccgcgtcccatcccgcattcccgcgcgggccgtgctcaggctttgctgtacacttacctgccc

SEQ ID NO: 134587 - DNA, 122 bp, Homo sapiens
ctgccagtaccatgcacggaaggttgctaacggttttaacggttctaacagtcgctgggccgctcatttcccggcctggaaggcctttgtcattattgttccatctcaggggcactgagcgg

SEQ ID NO: 134588 - DNA, 122 bp, Homo sapiens
ctgaccattcagtgtcctgaaagaatgcagtttttcaaactgtgcctcaccatccattagcggggtgtgaaatcaatttagtagatgatgtctagcattttttttaaatgacacggaataga

SEQ ID NO: 134589 - DNA, 122 bp, Homo sapiens
ctcacagtcccagcactacctcgtggaagacgatgagaaacacagatgacagttcgggagcggggttctgccacataacagacactgaagagagtctctgtaatttctttaattattcaaac

SEQ ID NO: 134590 - DNA, 122 bp, Homo sapiens
cctccctctgctttcaaggttgagaaggaagcaggggtaggggggtggggccaagtggcgcgtgcgcgatactgttgctgcccctttgctgctattgcgttgcaaaaaaaatcctgactagg

SEQ ID NO: 134591 - DNA, 122 bp, Homo sapiens
gctaaggagtgtttggtcagccttaaggtctctgttttagtgttaattgctggtcatctgcgcctgaattcccaagggaggaatgtataatgaggcatgtctgagcacccattcccattatg

SEQ ID NO: 134592 - DNA, 122 bp, Homo sapiens
acccccgcagacccgagtgctctcacctgtagtcccgcagcatgaggctggtgtaccgcacggtgtcgtccatgctgcagctgatgagctgccccgactcatccacggtcatcctggacacc

SEQ ID NO: 134593 - DNA, 122 bp, Homo sapiens
gggtcatcaatgcccctcagaaggtgagggcctgcagctggcagggtgggggtacccaaacgaggaggacaggtgtctcgggggtggtggaaaggggacggtctgcaggaaatctgtcctct

SEQ ID NO: 134594 - DNA, 122 bp, Homo sapiens
tgcgttgctttattttcctttttctgaatggttgtaacagccgcgatctgcctagatacacgggcggcctgctctgtcattggtcactgctgccacccggagacagaaggcgccgggctcgt

SEQ ID NO: 134595 - DNA, 122 bp, Homo sapiens
ggggagctgccagaggccagcctagctccttggtcgtccagtggctggagaggggctgtccgtcagccctgctctgcccgggtctggctggtgacaaaggaggggagcactccatgcggcct

SEQ ID NO: 134596 - DNA, 122 bp, Homo sapiens
gtctgaaatgcatttcgaggagaacaagtaaaacctgccctcttagagttcaaagtttcccggagacagctgaggccgatagcttattgtttaggtaagaacaacagaacagagaggcagag

SEQ ID NO: 134597 - DNA, 122 bp, Homo sapiens
cctacctgccgcacctcggaaccgcagcgcgcctacctgccgcacctcggaaccgcagcgcgcctacctgccgcacctcggaaccgcagcgcgcctacctgccgcacctagtaaccgcagcg

SEQ ID NO: 134598 - DNA, 122 bp, Homo sapiens
ttatgaggtaaaatactttttaccgttttacaaatgacgaaacagatttagaggttaaaacgttggcacaagttcacatagttaaaaaatggagtatacttcatgtcggatcatagtcactc

SEQ ID NO: 134599 - DNA, 122 bp, Homo sapiens
gaaacaaaaattgaatgcacaggatcaaggcactaaagcttagataacacactcctgcatcgtttccctgttttatcaagatatctttcatctttatatccggcaatttagtggcaactctt

SEQ ID NO: 134600 - DNA, 122 bp, Homo sapiens
gttaccttcagtcagctctggcttccccggaggccactttcctcttcctcggctcgactacgcctctgcctctgtggccacgcctccctgctgctctgggtagcaaagctctccgctgctgc

SEQ ID NO: 134601 - DNA, 122 bp, Homo sapiens
tcatgatgaccacataggggtcggccacggcgcactgcacgatgggggcgcccaggtccacggggatgaagtgcagctgattcactgtaggcatggggcagtcagcatgcgcctccccacca

SEQ ID NO: 134602 - DNA, 122 bp, Homo sapiens
aacatccagctgctggcagcaatagcagaacccaccatgaggctccaggcattcggatgccgccagcgaggccagcaagcccacctctccctgagctgcagttcggctttcttcctccacaa

SEQ ID NO: 134603 - DNA, 122 bp, Homo sapiens
tcccggaccggcggcgtgaaagtcgtgatatcatcgttgaactgtgagcggcagtggcggcggctggggggaacccggatgggaagaagggcgggggaggctgggaggcggggcagaggaaa

SEQ ID NO: 134604 - DNA, 122 bp, Homo sapiens
ggccagggctgtgcccgagaatggcggagcgagaaagcggcggcctgggagggggggccgcgtccccgcccgccgcctccccgttcctggggctgcacatcgcttcgcctcccaatttcagg

SEQ ID NO: 134605 - DNA, 122 bp, Homo sapiens
agggcgggccgggatgtgggcagtgcggagctggcactgttggtagccccaggcaagccccgacctggcaagccgctgcccccgaagacacgtggagagcagaggcagagcgccttcacgga

SEQ ID NO: 134606 - DNA, 122 bp, Homo sapiens
tcaccattttccgaccgcagaatgtcaggagcttgggatgcctttctctgaacttggggccggtgctccctcccctgatgggatgggatggcctcactccaggaggagttgcgggggcagcc

SEQ ID NO: 134607 - DNA, 122 bp, Homo sapiens
gcgccgcccacttcctgcgaccaaataaggccggggaaggcgtccttaaacctcaggcggcggccggggctggggatttccagcagacctcacctccactcacgagtcggtcgccgtcccca

SEQ ID NO: 134608 - DNA, 122 bp, Homo sapiens
tcactgtctcttgcagttaggaagtccgtagccctgtgacttgctcgtgggaaagagccacgggacaggcgatcccatgacttgggtgcaaaaggccacagggggccctttggggcctgctc

SEQ ID NO: 134609 - DNA, 122 bp, Homo sapiens
tagctacaaggcctgggctacagcagagacagcccagcagggagggagagggtggtggagcggagggcaggagagagagtgcttctctgtgctgcctcctctgcttggctcagaaagtgtgc

SEQ ID NO: 134610 - DNA, 122 bp, Homo sapiens
gggcagcggttggccgggagaatcgggcagccaggtgcaggggggtctccccagtgcccacggtgtgagcctggggacaggcccctccatccagcagaggttcccagggctcaggacatccc

SEQ ID NO: 134611 - DNA, 122 bp, Homo sapiens
aaattatattggtgattgttccattgtttcatggctgcatagtattccagtgattggatacggtgatttatctaaccaggactttatcgatgggcgttttattatttcatgttttctttaca

SEQ ID NO: 134612 - DNA, 122 bp, Homo sapiens
gtctgtttatttgctgcctgctccactggatagtgcgctgtttgagggcaggaccagttccgagttgccagggctggacgccgagtgggtgcggagagcgcacctgtgaccgacgtggaggc

SEQ ID NO: 134613 - DNA, 122 bp, Homo sapiens
tcatctgacagtggcagttcaagtgagagcgatggtgactagtccaccaggagttcccagcggggtgacagtctgaagacctcgtcacctgtgagttgatgtagaggagagccacctgacag

SEQ ID NO: 134614 - DNA, 122 bp, Homo sapiens
gaccgaccgccacgcgcagccaattggaactcgaggcggggctgctgggtcttcctggagcgcgcatgcgccggcgagctgccacaaggtttacactttcccccatcttcctctgtgctttt

SEQ ID NO: 134615 - DNA, 122 bp, Homo sapiens
ggccaccgcgcgggcggggcttggacgcgggggtggggacactgggtcttggccggacgccgcccacccccagccgggggactccggaggccgggcaggcactggggcgcaaaggccgccgg

SEQ ID NO: 134616 - DNA, 122 bp, Homo sapiens
ctcatcctgatctcgccaccctgtctctggcggtaacaccgtggggagtttctgtgtgagcgttttctctgtagtctctgtgccggtcatagctgtgttcgtgggaagtgtgtggtgctgtt

SEQ ID NO: 134617 - DNA, 122 bp, Homo sapiens
accgtggctgcaggctgctaccgccggggaagcggcgaggacggcggcagggaggcaaggcgccgcgccggtggctcctctctctctcggcggcgcggctcctctgctccgcgagccgtagc

SEQ ID NO: 134618 - DNA, 122 bp, Homo sapiens
cgtgggggccgcggggctggggctggccggggccgggacttggggggcggggctggggggcgcacctccgggtaactgtagtggcctggtgctgccaggggcaaaaaaggggagaacaggtc

SEQ ID NO: 134619 - DNA, 122 bp, Homo sapiens
cccctgttcctcctgcctcccaccagcccgtgctcacctgccgctgctctgccctggtcccgagttccaggggctgcaccctgttcgcccacctcccactagccatgctcagctcttgatgc

SEQ ID NO: 134620 - DNA, 122 bp, Homo sapiens
gccttaactaggaatggcgcgatggcgccgcgggcgggagaccgctgacttccagccaatcgctgcgcggagagcaagttgactctctgctgattgggtcccagtgagtcagcgcctccacc

SEQ ID NO: 134621 - DNA, 122 bp, Homo sapiens
aataaaggactgaatgaaggaataaatgagtaacagtcacaaaaaggttgatcgtgatgacgctactggcttgtatacacaaggtgtttggtgagggaacagtttttcactacaacgttgag

SEQ ID NO: 134622 - DNA, 122 bp, Homo sapiens
ttttgtcccggcccagccggacttttccccgcccccatcggctcgcggcgagaacggccccgcgattggccacacgcgttccctagcctgagcgccagggctcctcccaattcgctgctggc

SEQ ID NO: 134623 - DNA, 122 bp, Homo sapiens
cctatcttacaacagaaacaatgctttctagagtagattctccagaacagaagcctttctcgcgctcctttccttcctttcttccttcctctctctctcttttatttttcttttaaaatttt

SEQ ID NO: 134624 - DNA, 122 bp, Homo sapiens
tcaggcggctcccgcgcaggtcactcccacgcaggtcaggtggctcccgcacaggtcaggcggctcccacgcaggtcgctcccacgcaggtcgctcccacgcaggtcagagggctcccgcgc

SEQ ID NO: 134625 - DNA, 122 bp, Homo sapiens
cggccgtgtggggcctgtgctcccgggactcccggcacatcacgcacagcagcttcccgtcgtcctcacagtagtagtgcagcttctctcggtgtcgctcgcacaactttgcatcctgctgc

SEQ ID NO: 134626 - DNA, 122 bp, Homo sapiens
aagacgcaaaattacaggcaggatggatacaaaaccccttagaaacactcccactcctaacgctatgactctagtattggtgagaatggaagcatatctcaaaggattgcggatggcaatga

SEQ ID NO: 134627 - DNA, 122 bp, Homo sapiens
ctcccatcgtaagtccttccctcgaccccccattttgtactgcaataatactgtattatacgcttgcactatttcccgaccctggccagcggaagcatgcacgaaaaactcaaaaccacaca

SEQ ID NO: 134628 - DNA, 122 bp, Homo sapiens
agtggagacagatttcagacaaacacaaggaggagcgcactcaggcaaacagactcaaaacgaactcaaaacctgatctcaacccaaatgtaaagcgggtgtatgagcgagccctgttgctt

SEQ ID NO: 134629 - DNA, 122 bp, Homo sapiens
ggcgggtgtgcggagggcgccctggggtctccggctggactctggccgggaccttgagctcgctcccgccaggcgcaggctccctcttctctctgcctccctccctcccacgcccgctactg

SEQ ID NO: 134630 - DNA, 122 bp, Homo sapiens
gctcgctcattaaggcacaccaaagacatgctgccaatcttctcggtcccccatcacttccggagtcacctgtggctgcagcggagaggttctattattcccttaacgtttctttctcagtg

SEQ ID NO: 134631 - DNA, 122 bp, Homo sapiens
aactcaatatcaaataatctcaactaaataactaatgcaggtattcaactaaatgatagccgaagtcatggttgtaccactaagaagttactgtgctcttactgtgtgccaggcatttcata

SEQ ID NO: 134632 - DNA, 122 bp, Homo sapiens
ttttactgggcatctcctgagcctaggcaatagctgtagggtgacttctggagccatccccgtttccccgccccccaaaagaagcggagatttaacggggacgtgcggccagagctggggaa

SEQ ID NO: 134633 - DNA, 122 bp, Homo sapiens
tacctgcaagcagggctcgcgcagaggctcaggcagccatgctggtggcacatgggctgtcgcgactgctcccggtggaatcagccccatttctgattttacacccaacacctgcaagcaga

SEQ ID NO: 134634 - DNA, 122 bp, Homo sapiens
ttctggcaggaacgatggggctggggcttcctcccctgtccctcacctgggtatgctcagcggcgtgggccccgccctctcctttggctgggacgcaggtggccagagaggagccgttctct

SEQ ID NO: 134635 - DNA, 122 bp, Homo sapiens
tggactcctccacgcgcagctccacgtgtgcccagcaccactgcgcctgcccatccctcccgggcgctcttaaagggcccacaccccgtcccacccccaacgttggccggagaaggtggagt

SEQ ID NO: 134636 - DNA, 122 bp, Homo sapiens
cgctgcccctccattgcctgtttatagtactgctttcttgttcttcctgtttctacccaacgaaattgaaaatttcatcaccagtgtcagaaaattaaaccccagggagcagagcaatagct

SEQ ID NO: 134637 - DNA, 122 bp, Homo sapiens
ctctgtcctcctggctccacgtcacccttccttcctgcctgacgtgatcagggaaatctgcggggttaaagaagcttctagaagccacttagtccccctgcaggtagatgctttttttaagg

SEQ ID NO: 134638 - DNA, 122 bp, Homo sapiens
cttcccctccgcctgtggtacgcgcatgggccgggtgcccaggctcactcttggcatgtgcgcccacattgccaaggtgcgagtcattccaggtggctggcacacctacatctgggggctgg

SEQ ID NO: 134639 - DNA, 122 bp, Homo sapiens
agaggaagagtgctgggatgtctcacgacagcatggctccgagaaagcatggctaaaagacgctgctcttcctcggctaaggagatttttgtcgttcacttgttcaaccggggtaagttccc

SEQ ID NO: 134640 - DNA, 122 bp, Homo sapiens
agcctgggaaacaaagtgagacccccatctctacaataatttttttttaattagcccaggcgcggtggtgtgcctgtagtcatagccactcaggaagctgaggtgggaagatctcttgagcc

SEQ ID NO: 134641 - DNA, 122 bp, Homo sapiens
ctctcccaggaccaggtgtgcatccgtgcgtccagcctcgggggtgggcggggtggtcagcggctctgtctaaccggggcaccgtctgccaatgcccgggaaggctgcgtcccgggaagagg

SEQ ID NO: 134642 - DNA, 122 bp, Homo sapiens
ggacgaacggctttctgggagctggggaatgcttgcgtagcgtagtttcccagcgagccccgcgaggacttccggcgccgggagctcgcggcggaagtgggatctcctgggccgtagtgggc

SEQ ID NO: 134643 - DNA, 122 bp, Homo sapiens
gtcgttgcggatggccagctgcaggtggcgcgggatgatgcgcgtcttcttgttgtcgcgcgccgcgttgccggcaagctccaggatctcggcagtcaagtactcgagcaccgcggccagat

SEQ ID NO: 134644 - DNA, 122 bp, Homo sapiens
tgaaagttgtgcattttaaaattaagtgactcatttcttacggccaaagcagaaatcaaacgggaaaaaacagtctagagaaaaatctgccataaacagggtacagagggtgagtggatgga

SEQ ID NO: 134645 - DNA, 122 bp, Homo sapiens
gaggctgcacgcgctgtgcccgacgcgcatgcgctttccttcaacggtcacccgctggggcgcgacagtggctttttgacccctggtcgaggtcacctttcccgccaagcgcagcgcaaggc

SEQ ID NO: 134646 - DNA, 122 bp, Homo sapiens
aggcggccgagcctcagacacacacagctagagggctctgctacggcaaccgactcttctcgcgagacttcactcccgcctccacttccccctcctacctccgcgcaaagtcgggcgcaacg

SEQ ID NO: 134647 - DNA, 122 bp, Homo sapiens
ccctcccccgcccggcacactgccccccactaggccccttcgcggccacctccttcctgccgtccagtgcccggagacccagggctttcaccttgagcccaggcggaaaggccttgcggagg

SEQ ID NO: 134648 - DNA, 122 bp, Homo sapiens
cagtcctgactcagagacgacccggcccccacgactggaccccacaacgcacagggcccccgccggccaacaagaccaaggtcacgcacagcggtgctgggatcctccagaggactccacag

SEQ ID NO: 134649 - DNA, 122 bp, Homo sapiens
cttggggtgggaagaggacagcccggcactggctgctggcccaggtgctgtgatgggtttcgtgcgcagagaggcctgacagcctctgcatcagtgaccgggcgaagagtggggcagctcgg

SEQ ID NO: 134650 - DNA, 122 bp, Homo sapiens
tcctgggagaatcaggaagtcattgtaggtgaggccgttggtgctggtgaagagctgctgcgcggtgagcccgtcctcgggcacgtagctggtgccgctgctgatcaggtagtctgccaggc

SEQ ID NO: 134651 - DNA, 122 bp, Homo sapiens
aatgcgggtgttggaagtagaatatatatatacatataaaattggtaagtggtgccaacacgtcttccctggctgagtagacacaggctctggagggggtagtagctgcttttcagtgtggg

SEQ ID NO: 134652 - DNA, 122 bp, Homo sapiens
gccgggcatgctcggcggtgtgacggctcaggactgcatttcccagaggctgcagctatccggccaatgtagcctgaaactacatttctcagcggccactggaacgacctcaatctctgcct

SEQ ID NO: 134653 - DNA, 122 bp, Homo sapiens
gcagggtaagcaaaggggggtgggcaccgcgggcatggtcgattggggtgggaaaaggagcggttctttctgacgcttcaggattcctttggaattgggcatccttcctcactatgcagcag

SEQ ID NO: 134654 - DNA, 122 bp, Homo sapiens
cttataaaatcaaatctgactcaggctccatgtgtcatgtgttagcagaaagttcagtttcggtcatttgggaggaagggtggtcctctctccctcctgggatttgcagaagtaccccagta

SEQ ID NO: 134655 - DNA, 122 bp, Homo sapiens
taggggtgggagtaggcagttcgtgagtccgggaaggcctgcggggtttcccgcctgctgcggacttagcgtggggccgaccggggctggcgagggctggcgaggactggcggggacccgcg

SEQ ID NO: 134656 - DNA, 122 bp, Homo sapiens
agcccgtccccgcctcacccctaagccccgcctttctgccccaccccgccccgcccccaccgagccccaccccaaggcccttcctgtctgccactacgccccagcagagccctacccctagg

SEQ ID NO: 134657 - DNA, 122 bp, Homo sapiens
gccccggatgacgcaaaccgggaacagcggctgagcctgcgcttcggaagcatggatgtgcgcctgcgctgcgctagggcgcggcgggcggtttgaattttgcttacagagtcccgtctcac

SEQ ID NO: 134658 - DNA, 122 bp, Homo sapiens
gcaagttaaacaagtttctttaggacaggtgttcttagaaacttttaagatattaatatacgtggtgaagtaaaagatgcaaccgtttgcattttctgagattttctcattctcttttcctg

SEQ ID NO: 134659 - DNA, 122 bp, Homo sapiens
tgcaataatttcagagacagttaaaaggtgatattttctatattcagagattattaaattcgttagcaagaggaatgcagttcagacttctcagatttgggaggtaaatctcccccaccccc

SEQ ID NO: 134660 - DNA, 122 bp, Homo sapiens
cgccttgcttaacaaggatgcgttcggagaaatgcctcattaggtgatttcgtcactgagcgcacctcacacacaggtacactgcacacacgcccgggccgcacagcctcctccacgccctg

SEQ ID NO: 134661 - DNA, 122 bp, Homo sapiens
ccggggagacgcggggctgcgggcgcagagctgcccatagagggctccaggaccgggggccgaggtcgccccgcggggacgggacaggacgctggggctcccggctgcgggtccagctccca

SEQ ID NO: 134662 - DNA, 122 bp, Homo sapiens
gaagctgcagaccttcgcggtgagtgttacagttcttaaggcagcgcgtctggagttgctcgttcctcctggtgggttcgtggtctcgctggcttcaggagtgaaactgcagaccttcgctg

SEQ ID NO: 134663 - DNA, 122 bp, Homo sapiens
gccattctcatctattcagcccacgttccctgagcccttcttcgccataaggtatgcagacgagctcacaatgctatatgggagacacacacctcaacaaatatttttggtgcctctactga

SEQ ID NO: 134664 - DNA, 122 bp, Homo sapiens
cctcgtgggccctgagcgggactgcagccagccccctggggcgccagctttggaggttctcgtttggggaagcgggggtgggctgcgagtgggtggagggggctgggcgcggagccggccgg

SEQ ID NO: 134665 - DNA, 122 bp, Homo sapiens
atgggggaagggcgaaagtgaaagccgcagctctctggggtttttaccctccgttgaaaacgtagggcgaaaatcgcagctgcaaagggcccgcggctctgtgcggttccatccccaagtct

SEQ ID NO: 134666 - DNA, 122 bp, Homo sapiens
ccaacaaaccagatgacatcagatcggtgctgctggggccagggggacacagagcagtggcgttccaggtataagggaccccgaataggtgcctcagagcagaaggcaccagagccaaggcc

SEQ ID NO: 134667 - DNA, 122 bp, Homo sapiens
cggggcgccccccccgacttggcgcagagcctgcgtccccctgccgatgcccacccgactcgctaaagccaccgaggcagacgaccccaagactcccaatttccgacctccctggcccgcga

SEQ ID NO: 134668 - DNA, 122 bp, Homo sapiens
aactgagccaggaggaagtcactagcaaagaggaaaaaaaatagagctctggaaaaatagcgtaaacagtcacaaggaagcgaccctgtattgtgcctgacctctggacaggtatataaaga

SEQ ID NO: 134669 - DNA, 122 bp, Homo sapiens
actggctaaggagaatcatagcagtagagccgcaccactgctgccgccgcctccaacttgcgttaagttcggctcaggctactggattgggcaggaccagctaacccaggtcccgaggggca

SEQ ID NO: 134670 - DNA, 122 bp, Homo sapiens
ggccgagcctgccccggccgccacccctggagctctcatcttactgtgctttgtgcgctccgggtcctcctcaggcggggacgcagggcctgcagccttcagtgcctccatgccccctgacg

SEQ ID NO: 134671 - DNA, 122 bp, Homo sapiens
gaacaaatttacaaagccaacacctttatcatctcccttttacagatggagaaacagagacgcgtcatttaaaagtggcagagctggtatctagcaccaaacctgatgcttccagcctctgc

SEQ ID NO: 134672 - DNA, 122 bp, Homo sapiens
ggctgggttagggaagggcctggcggggtctgagaggcctggggttgcttcaggacacgccggtggccggcagtcagggccaggcttcagggagagcaaggctgccccactgctcagatgcg

SEQ ID NO: 134673 - DNA, 122 bp, Homo sapiens
gggattcgcgctgctgggcacccacggagcctccggggctggtgaggagcgggtagggggcgggggtgcggtcctgcaggggccgggaatggaggccgcggtgccgacccgaagccgacggg

SEQ ID NO: 134674 - DNA, 122 bp, Homo sapiens
cagccgcggcctgctctccggccaggtcggaaccgaaatctccggtaagaaatgaccaatcgctcctgtcagattcctccagggcgactggccacctggcatggaggccagcaggtggtctg

SEQ ID NO: 134675 - DNA, 122 bp, Homo sapiens
gcctgcagcggcagctcccaggggactccaggagttggggaccgcagactaggccagctgcgcgctcgccgcctcgactccccgcttggccgccgcctgtccccgcccaggggcagggacgc

SEQ ID NO: 134676 - DNA, 122 bp, Homo sapiens
tcatctccacgggcgggaaagacacaagcatcatgcagtggcgcgtcatttagtacccaccgagagctgtggggagcagcatgggcaaggaagacacagactcgcattacccttggtcactg

SEQ ID NO: 134677 - DNA, 122 bp, Homo sapiens
aaaatagagctgctctgattgaaattggtggtggtgtggtaaggattagcacccagctcacgtggccacctaaggtgctagagaggccagtctgaaaactcaggaagtgagcgagtaatcag

SEQ ID NO: 134678 - DNA, 122 bp, Homo sapiens
tttgtaaataaagttctactggagtacaacagctatgcttattcattgaggtattatccacgggctgcttctgcactacaaccaccgagtgtgatagttgtgacagagaatgtatggccctt

SEQ ID NO: 134679 - DNA, 122 bp, Homo sapiens
ccctcaggtcctgcctcggcctcccagagtgctgggattataggtgtgagccaccgcatccggctgaatgtgtctctattttatgaataatgaaatggacacagcaacagaaaatcaatccg

SEQ ID NO: 134680 - DNA, 122 bp, Homo sapiens
gggagcaggggaagagacaccctcctgacctccagcctcctgcctgtacctcacatttgccggacacaaaaggaagctagaggcaaaggaagctggtgattcagctcctagcactcagcccc

SEQ ID NO: 134681 - DNA, 122 bp, Homo sapiens
ggaggtgatcacaggtggagccaggccccgtcagagaggaggtgcctgaggagcaccttccgccctgccgccctgggttcagagttccgagttgcagaggtctcggaagcagcagaagatca

SEQ ID NO: 134682 - DNA, 122 bp, Homo sapiens
cagcccccctcccacccccaccccagtccccgggcctgggctgctgccggctgctcccgccgctggggctgcctgctttcccggtcacctgggtcccggagctctgctctccggccgcgctc

SEQ ID NO: 134683 - DNA, 122 bp, Homo sapiens
agtaggctgaagagctggatgtgggggatctgggctgctgggaaccccgaatgttggaatcgccctgacaaccttatgagggtggtcagatatgggtcctgaggaaactgattccacggcaa

SEQ ID NO: 134684 - DNA, 122 bp, Homo sapiens
cttccttcccatgagacctttgaccttttgccttttctacttcttcctcagtttcagtcacgtgccagactttttcttaattacaaactgatagatggtccacatctcaactaacagtattg

SEQ ID NO: 134685 - DNA, 122 bp, Homo sapiens
atcttcatgaagcatgtacttgtacctcacttttctgatcactctacccagactgtcagacgaagagaaggaagagaaatacagccagcacactgtttgtaagtgcctttttcccattacag

SEQ ID NO: 134686 - DNA, 122 bp, Homo sapiens
attcagccacggccttcatcagaagccttttgagtgatgagacagtgatgagatagctcgcgttatcctgcagcacagagctgcgcctggtcacggcagggtgcaccggctctcgggcttca

SEQ ID NO: 134687 - DNA, 122 bp, Homo sapiens
ttggtcccttctgccacattttagtctagacagccattttcacccaggacagttgcgaagcgcaaacggaggatgcaggcactcttaaaaagagcagccgtggctcgcgtttcacggacgag

SEQ ID NO: 134688 - DNA, 122 bp, Homo sapiens
ccacccagtttgatattttgttctagcagcccaaacagactacaacaccttccctgggctcgcctcagcttctgttgtggggcagagcataaggcaatttgactaggacccagaggatgggt

SEQ ID NO: 134689 - DNA, 122 bp, Homo sapiens
actaggcatggtgtcgggcacttatagtcccagctacttgggaagctgaggtggggggatcgattgagacttgggaggtcaaggctacagtagccaagattgcaccactgcactccagcctg

SEQ ID NO: 134690 - DNA, 122 bp, Homo sapiens
cttcacggtccttgaaggaaccatcagccggtcttgcctgctggttgcactggggggaagcgctgcagtgagcctcaggaaggtccaagtctccccgcccagagcctggcaggttggacagt

SEQ ID NO: 134691 - DNA, 122 bp, Homo sapiens
agccaaataatctctgggaaaatattaatgctaattagggaggtagctgtccagttcccacgcagtacaatcaaactcaaataagcacacagacaaaatctaccaataccatttttctgcgt

SEQ ID NO: 134692 - DNA, 122 bp, Homo sapiens
caggcttgcccttgacctcccaaaaaagatgacagcccaggagttcatttgcatgcattccgtccaccagtggggccccagcctctaagagagtgacccatgttgaaacgaaggaaaaggag

SEQ ID NO: 134693 - DNA, 122 bp, Homo sapiens
caaatagaaaacattcaataagtgtccctgacttccttccagatttaccacgctccaatccgaaaagattctgcagatctacccactaaaactcagaatgcattcccctctcagcaagtttt

SEQ ID NO: 134694 - DNA, 122 bp, Homo sapiens
cagccggcggcctggctcccgcgcagccgcggtgagggagtaccccccagcgcgcagccgcgctggcattcgtctggaggaccgaagccccacctttctgccctgcgccagcgcactgagac

SEQ ID NO: 134695 - DNA, 122 bp, Homo sapiens
gccaatccaagcaattccgaaggcatcttggaagccctagaaaagaaaacctcagtgactcgatttagaaccttggaaactagagtggtaactttgtgcttggcacataataggtacttgat

SEQ ID NO: 134696 - DNA, 122 bp, Homo sapiens
gacaaacacagaagataccccgcaaaactgacaactttttggtggtggcttttccgggttcggcttgaaccttcacttggctgggctgaagtcttcacaagcccccagctcccacttgcagg

SEQ ID NO: 134697 - DNA, 122 bp, Homo sapiens
accgtggcagcacaaaagcagccgtggacagcatgcagacacacaggccagccctgcgcccgcaccgtccgatgttggcatcctcaaaccagatacctggccggctacctgccgcctcacac

SEQ ID NO: 134698 - DNA, 122 bp, Homo sapiens
agcgcgcggccgggctgaggggcagctcccgacgacctggggcctgggctgggccgctaacggagcccggccaccagccagcccgtcccggggccacgccctctctggcctcagtttccccg

SEQ ID NO: 134699 - DNA, 122 bp, Homo sapiens
agcgccatcaccgccgagctctgaaaacgcagatcagtcttgaagtcctgcgcgatctcacggactagacgctggaatggcagtttgcgaatcagcagctcggtcgacttctggtagcggcg

SEQ ID NO: 134700 - DNA, 122 bp, Homo sapiens
ggcggctgcagcggcggcgctggagcggcggcggggggaccttggggcggtctgagggggcggtgaagaggtgacggacggctggctatgggcggccggccgggctaggggaagagcgctgg

SEQ ID NO: 134701 - DNA, 122 bp, Homo sapiens
caagacttagcgctaaccattgcacctggggctgggagccagcgccggagccaggaggcccgctaggcggctgcaggcgctgtgatggccacctgggggcggccacgtgagcgccacgccgt

SEQ ID NO: 134702 - DNA, 122 bp, Homo sapiens
cgcgcgcatttgggccgtaccacaacctgtagggtcatctgggtctgaaacgggcaccagcgacgcgggagcagggactgacgcccctctagcaaagcatctgtggtacatcccagacccgg

SEQ ID NO: 134703 - DNA, 122 bp, Homo sapiens
taaataaatgagattcacaattccccacctcggaccagcgccaaatccgcaagaggcccacggctaaatgttattcagggcttttggtcaaacacgtttaggtttgagatctacctcttaaa

SEQ ID NO: 134704 - DNA, 122 bp, Homo sapiens
acgtattcctaccccttttggcaaccagatttccgttggaagatgcaacggttccggtgacggtagcaagttctcgcgtccaggcatctccgcttccgctcggggcgcaacaacttccgact

SEQ ID NO: 134705 - DNA, 122 bp, Homo sapiens
aaactaagatgcatgttcctggaatgcacagctgtgtcttctttatctcaatttccccagcgtcaggcaccagggaagagtacacagcatgcattcaataaatacttgtgaaaagaagaaaa

SEQ ID NO: 134706 - DNA, 122 bp, Homo sapiens
tgcccagctggtatgtggcaaaataggatttgaacccaggcattctggctccccagcccacgtctttgaactatctgccagtcagaaaagccagtgggggatccactttacacagcccagca

SEQ ID NO: 134707 - DNA, 122 bp, Homo sapiens
aaaccagccatcagagcctctgccatttcacagcgcagccctggccccaccataactccgcggatttgccttccgcaacaaatgcactgccgtacgggatcaggcctattatttctctaaga

SEQ ID NO: 134708 - DNA, 122 bp, Homo sapiens
aaaatacttattgtctaaacacttgttcaccaatatccaatgtcttgtgtcatcattgtacgtacaccaaagttatcaacgaggccctaagttctctcaagaggaaccatggcttaactctc

SEQ ID NO: 134709 - DNA, 122 bp, Homo sapiens
tggaggatttcaataaaagaggtgcttccagtgtcgccccctttcccgctttttcgtttacggtgagcgggacatttaaagtattttgtggtttgttggttttttaaagtttttatttattg

SEQ ID NO: 134710 - DNA, 122 bp, Homo sapiens
gagcctgccatgagccggcagtcagggtttgactggccctttaagtccaatcgactcactcggcagatctgaagtgatccctccctcttttagtcttttatcttgctccgtaatgactgaag

SEQ ID NO: 134711 - DNA, 122 bp, Homo sapiens
aaaaaaaaaaaaaaaagtatacttacaaaaatagatcactctagcataccatcacccttccgtcgttagttttaacagaccatgcttttttgttgtttgtttttgagactgagtctcactct

SEQ ID NO: 134712 - DNA, 122 bp, Homo sapiens
atggaatgtgagtggagatgacagtctgtcattttagatcaaaggctttaagaagcattacgtgcttcccccagcctcttgctctttaccctgggccacagttccgttgtcagagttccaac

SEQ ID NO: 134713 - DNA, 122 bp, Homo sapiens
ggaggccacgcatgtggtggtttgggctgtgacacctgagggatattccagcaggagagacgagctctgcctcccaccatagagaaacagcttccagatggcttgtggtgcccaagcaggac

SEQ ID NO: 134714 - DNA, 122 bp, Homo sapiens
tcctcccagttgctgtggctagaagcatgagaattgtcttgaactctgccattccttacccgccaccacatctaaaggctatttaaaaggctatttaaaatagctaaaggctattgtttcta

SEQ ID NO: 134715 - DNA, 122 bp, Homo sapiens
caaatgcccccactccaagtacgggtgagtggggggcgggcgggggtgggccggggtgggcgcaggccctccacaggctccgctgagagctgcccgcttgctggtcccggggaggtaggccg

SEQ ID NO: 134716 - DNA, 122 bp, Homo sapiens
cctcccctctcagtgactcctaataaaatgcaccctcgcttacactttctagcccctcttcgctgcagggaggaggggcagcttgtccctggcgggcgcctccttccggggtgggggggccc

SEQ ID NO: 134717 - DNA, 122 bp, Homo sapiens
ggagcaggggagcttgtgttaaactgtgatgatgaggggcacctggacagaggttgggtccgtgggcaatgagaagacatgttactccctctcttgacatgaagacctggtgggcttgtggc

SEQ ID NO: 134718 - DNA, 122 bp, Homo sapiens
gcccgtgcagcgtcctctcttcacgacaggtggtggggagcatgcgtgcttgggtgtgtacgcgcgcgagccccagaggctgcggcagcagcagagcagcagagcagcagcccctgcctggc

SEQ ID NO: 134719 - DNA, 122 bp, Homo sapiens
ccagccttgccgtgggggaaagtgcgcagcgggctggtcccggcgccttggactgggctccgtctctgcttcagttgcctgtctcttctcctctctctcctgcttctctctctctatgcctc

SEQ ID NO: 134720 - DNA, 122 bp, Homo sapiens
aaaacgtgtctcttgacgaatttggggatcaaatcctgcctctggagcagttccacaatacgaccagcaggtggaagcagagaccgccctttcggtagcatggttgccctcactttgcaaaa

SEQ ID NO: 134721 - DNA, 122 bp, Homo sapiens
cctgtgaggcgttctggagctttaaggtcaggcgccttccgggagccgtagccccggccccgcccttctgcccgcgcgttcctcactgcgcatgtcgcgtttttgttcccctccccccttca

SEQ ID NO: 134722 - DNA, 122 bp, Homo sapiens
gaggcaaataccaggcacagttcgaccctcggaaggtaaggccggggtctgcgccggtcacgggtcttccgcactgcaggcggcgagacccgcagctccctgggatcacagactctcccgcc

SEQ ID NO: 134723 - DNA, 122 bp, Homo sapiens
gcctatcatccatcttctcgggtgctctgagaaacacaggcgcacagttaaattcacaggcgaactcagaacaagcttcagcctgcaatccgtcagggattcggcagctgcacaccgaaggt

SEQ ID NO: 134724 - DNA, 122 bp, Homo sapiens
cccgcttgtcgccacggcacttgaggcagccggagatactctgagttactcggagcccgacgcctgagggtgagatgaacgcgctggcctccctaaccgtccggacctgtgatcgcttctgg

SEQ ID NO: 134725 - DNA, 122 bp, Homo sapiens
tacttccgggtcggccgagcacacctggcggcgtggcggacgcctgaagtgtgacagtggcgcgcgcccccgccccagaacggggactcgagggactttgcccacccctgcaacagccctcc

SEQ ID NO: 134726 - DNA, 122 bp, Homo sapiens
ggggaggcgatgcctacgtcaacgcgggctcattctgagaaaaactttctttagcttgtacgcggggtagggggagcagtgagcaaagaaagacggaaaccccaggggggtggaaaaagcca

SEQ ID NO: 134727 - DNA, 122 bp, Homo sapiens
tgagtatgttactttcttttctagagtcttcatgtcttcctaaaaaaatgaatgtaataacgcttgccctgccgctggggccctatgagtttatcaagcacctagcacaatgcttggaacag

SEQ ID NO: 134728 - DNA, 122 bp, Homo sapiens
cagaagtataactcccagtgtccttggcccaaacctctgttctctcatagatcagggagccgatagcatgtccgggccttggtgacgacgggtcaggccatgaactgggcttgagatctctg

SEQ ID NO: 134729 - DNA, 122 bp, Homo sapiens
taaaaaggaaactgggttttggagaaaatgacaaagtgaaaccagattggcccgcgtggacgggagccaaaggagggatgacccagctcatttccatggcccgggagacacaccggatcctt

SEQ ID NO: 134730 - DNA, 122 bp, Homo sapiens
agaatcactgccagaagagtttgaagaaacaagttcctttgctttaggcatcgcttcgctcggctctagcagtggaacaccctcttgctcgttcgctcatgactgactcgtttgtttttatt

SEQ ID NO: 134731 - DNA, 122 bp, Homo sapiens
ttacagctcttaaggcagcgcgtctggagctgttcgttcctcctggtgggctcgtgggctcgctgggctcaagaacaaagctgcaaatcttcgcggtgagtgttacagctcataaaagcagc

SEQ ID NO: 134732 - DNA, 122 bp, Homo sapiens
ggtcccgccagctccccccagtgaagggcaagggggcgcatcgcagaatcgcccctggtgcgcagcgtagttggtggcctaagccgtcttctccgagagctcagccatcctgggcacttgag

SEQ ID NO: 134733 - DNA, 122 bp, Homo sapiens
ggtgtctgcagggctggaccaaagagaagagtcttccgcgggtgctagaaaagcgaagcacgcgttaccatggagactgcggaatggaaaagcgttcggtttcttgtttcctagccgcgaat

SEQ ID NO: 134734 - DNA, 122 bp, Homo sapiens
ctgagctctgagcctgcggttcctggcgggtggattttacacaaatgtcagaggcccctgcgctgtaaaaagcaggtgaagtgtaaaggacgattcctgctttccctttaaaagtctatcaa

SEQ ID NO: 134735 - DNA, 122 bp, Homo sapiens
cctacctgccctgcacaaccagtgccagggcaccggggcaggaccgagatgcaaacgcagcgtctgtgctgacagaagaggtttgggagcagcacgagagccccaaggcaggggactgctga

SEQ ID NO: 134736 - DNA, 122 bp, Homo sapiens
gaaggggcatgggaggctttaggggagcttccgcttttctggcaaggttttctttttgcccggggagctatcagccagcggagagatctgtgagaagggataagacctcaagacaagtagga

SEQ ID NO: 134737 - DNA, 122 bp, Homo sapiens
actctatcaggtgcagatatcagaaaacagccccctggattcccttgttgccactgtttccgctagagattcagacatgggaattaatggtgagatattctactcattttttatggtgatga

SEQ ID NO: 134738 - DNA, 122 bp, Homo sapiens
gctgcttctgcgggctactatggggcttcaccgagatggggactcagagcatgacgcatgcgcattcggaccacgcagcagctgcaacgatagaccacgcccacctctcccatgtgccctgc

SEQ ID NO: 134739 - DNA, 122 bp, Homo sapiens
ggctgctgaccctggagcgccctggctcggggactcctgcccaggctggcgatgatgctgcggaggccacccctggccacccctgccctgtcctggagctgcctccggcctggcccatgggc

SEQ ID NO: 134740 - DNA, 122 bp, Homo sapiens
gtctcacgtccagcttgactcaaaaggactctaaagagctggagagcggctgcggaaaggcggagtcacggtacaatcggtgttaactacttgtgcaaccaccgcctccttagtcctattag

SEQ ID NO: 134741 - DNA, 122 bp, Homo sapiens
tgttggcagacagatgccctccaggccctggggcctccttaacggccccttaacgacacgcgtgccaagggtggaggatgccagccaaggggcgctacttcctcaacgagggcgaggagggc

SEQ ID NO: 134742 - DNA, 122 bp, Homo sapiens
tgggcgagtggccggggcgggatagaggtgtgtttaaggggcaagctgccccgcccggtccgaccctggtgcccagacaggtgtgggcagtcctagggtatggatcatagttttcaaagtgg

SEQ ID NO: 134743 - DNA, 122 bp, Homo sapiens
cagagaaggaatcagccagaagatcctatgaagacaagatcaaaccaaacacgctgtgttcgccccagttttaataaggtacgaagtacaaagttgccccaattttgtttgaaactgtactg

SEQ ID NO: 134744 - DNA, 122 bp, Homo sapiens
ccggctctgccggaagttgtgcgcgcgcgggacaggaagttcctcccttctccagagcgccgtcgaccccacgccacgcagaggtgaagatacgcaggacgtcctctaaagcaacttccgtg

SEQ ID NO: 134745 - DNA, 122 bp, Homo sapiens
gttggggttgcaaggtctgggtagaaaaatcacccctggtggggagcttgtgaggggaggcgggaggcctgtccctccgcgctacagcctaggagcgaaccccacacttacccctgtgccat

SEQ ID NO: 134746 - DNA, 122 bp, Homo sapiens
agagcgatcacgggctgggcggcggaagccgacgaggggcgagccccgctccggctcaagcgatcacacccctcacggcccgcactccggccttccacacccgtgcacactctcgcccgcgg

SEQ ID NO: 134747 - DNA, 122 bp, Homo sapiens
gcggcccccgactttgcgccccgtagttgagttccgtttatggtctgatttccggcctctcgcctgctcgccccgccgcccgcctgtcccgctccctccctcccggggacccggaggagagg

SEQ ID NO: 134748 - DNA, 122 bp, Homo sapiens
ggccacatggcatggacctgtgcctgccctccttctggggcagggagtggtgtgaacccacgtgagtatttctgaagctggggggtcccccatggctcagaaacaggcccagaagtcagggc

SEQ ID NO: 134749 - DNA, 122 bp, Homo sapiens
tgaaggcagctctcatgcccctcgctgggctgtgagcttctgtgcgtggccgcaggcagacgcgcttcgcactggagcccctcacagtccagcccgcctgtgcaggctgtgggctgtgcact

SEQ ID NO: 134750 - DNA, 122 bp, Homo sapiens
gaatcccaaaggcggccaaggagaggtcaaggcctcaggccagccaatgatatgcaaatacgtccatctcagccttgcccctagggctccagactttgtcaattctcatgcaatcacaaagg

SEQ ID NO: 134751 - DNA, 122 bp, Homo sapiens
cccggaatgcggctgggaggactgcgcatgctcgaagggtgggggttgaggccgacggggcgccgtacggcggaggcggggtttcagtggcttctggtgctctagggtgagctctgcccggc

SEQ ID NO: 134752 - DNA, 122 bp, Homo sapiens
tgtattttacacttagagcatgtcaggtttcagactagccactgtgcggtgcccgagagccgtgtgtggctaccggattggacagcacggatctgaacaagacagggattttttttgttaat

SEQ ID NO: 134753 - DNA, 122 bp, Homo sapiens
ttggaaatgcacagaatttctctagacggatacagaggaggcaggaaatggtggctgcctcgagagaagcacactaggtagctagggcacaagggtcagagaaagctctttactttttacta

SEQ ID NO: 134754 - DNA, 122 bp, Homo sapiens
aaatgccactactaaggtggaggctgaagtttcaagacaaatctcctggcaccacctctgcgggggttcaccatggcgaatgacgcctgggaagcggggcgagtggccagcccgctcctgga

SEQ ID NO: 134755 - DNA, 122 bp, Homo sapiens
tgctatctctgggggcagtgatgaaggaaatgaaggaacaatgttctcatgcttcagagccgattccaggtgcacacacacagagacctgcacccttgcccttagcactctgatgaggactt

SEQ ID NO: 134756 - DNA, 122 bp, Homo sapiens
acccagtggccacgtcacagcccctcggatcagacctccattcaatgactgcccccgcaacggtcccccagtgcagagcatgggatcctcggcacccatcgcgatatggtggtggcagcagt

SEQ ID NO: 134757 - DNA, 122 bp, Homo sapiens
ctgtgggggtgggcacaaattgtttagatgttttgaacaaaggtacctttttataaaaaccgcatgttgtacacagcatttcttacctttcccatgaacaacaaaggctcccaaataaaata

SEQ ID NO: 134758 - DNA, 122 bp, Homo sapiens
tcaattttccaaaaatgatgtctgtttccttaagttatagataagttatttgtaacctcacgaaggttcatagtgttttaagaccctggcccttgggtaaaaccctatgggctccaattcta

SEQ ID NO: 134759 - DNA, 122 bp, Homo sapiens
tccggtggcgctttggtgtgctacaaagatactttcattgaaatgtcccagggattggtccggaccctggatcttacctcacttgaatcagagtagctcatttttttttttttttttttttt

SEQ ID NO: 134760 - DNA, 122 bp, Homo sapiens
gcctttgtttttgaaggaccacatttctctttggttactcaatttcctcatggtgaaatgcgactaatgatgactctcctgcttattttagaacacagagggaaattgtatctgaaagtgat

SEQ ID NO: 134761 - DNA, 122 bp, Homo sapiens
caagagcaccaaagcaatccacatcttcactccgaggtcccagggcagcccccggcgaggcgggtcgtccgagttgcccctcgagctctccgaagaggcagcccttagcctcggagctcggg

SEQ ID NO: 134762 - DNA, 122 bp, Homo sapiens
ctgttacagttatcagtaaggaatccaggaaggttcagtgacctagacaaggccacacagcgggttcagtggcagagctgggactgaacacaagtcggcctttagcactctccacgacccta

SEQ ID NO: 134763 - DNA, 122 bp, Homo sapiens
gcagagaagcatcgaggccgagctggggccgatgaagatgacaaggggcctagggcaccccgcccacctcaacctaagaagtccaagaaagcaagtggcagtgggggtggcagtgctgcttt

SEQ ID NO: 134764 - DNA, 122 bp, Homo sapiens
ctggaagaggaaaaggaaagtcggcaaaatctgaaagttgggcgcagggaaggcacaagccgggacttaccctgtgtcctgggcctccggggctcctgcggctgcaaccttccggctgcagg

SEQ ID NO: 134765 - DNA, 122 bp, Homo sapiens
ataaggtagagctggacctaaatttaagataatctgcttcaagcacagtgcttttcccaccgcagtgcagctgttatgagcagctgccgaaataaaacagcttgatattctcctgactgagt

SEQ ID NO: 134766 - DNA, 122 bp, Homo sapiens
ctgcaggtgcagccgtgagtctacggccctgcccctcagctccccggctgcacagtgctccgtccccaggccgctgaccacactcacaaccccttgttgtacaccactgtccggctgctcgt

SEQ ID NO: 134767 - DNA, 122 bp, Homo sapiens
gtctctcattgaactataagcaatgtattctctcaagtctcaaactgtaggagccacagccgtagagcatgtatgtatttcatggtatcaggccagaattagattgatctaattaaccaaga

SEQ ID NO: 134768 - DNA, 122 bp, Homo sapiens
aaaataatcatccagtttgatgcccattacaaattttcctgctatgaaagaaattctatgcgcggcagttttgcaataaaacaacccgggcttcgcaatgggagaacttcggtgcggcgtgc

SEQ ID NO: 134769 - DNA, 122 bp, Homo sapiens
cccctcggctcggcgccgcgcaccctgctggctgctcggacgctgcccgcggaggaggggcgagggcgctattaccatatattagcataccagcgcgcgtcacgtggccgctccagccaatg

SEQ ID NO: 134770 - DNA, 122 bp, Homo sapiens
tgcgcctcttagccgcgtcgcagctgcagtgtcagcaagtgcagcctcagcaagcacaaccgctacctagacggcaacctgacagtttcaaactgcagggaggaattaaggaccgccctggg

SEQ ID NO: 134771 - DNA, 122 bp, Homo sapiens
tgaatattccaaatagtcaattatgacagttaatttcaaatgagatgacttcgaagtacacgtgaaaacaatactattttatatcacgactcatgccatccgtatgtgtaatcaaagccttc

SEQ ID NO: 134772 - DNA, 122 bp, Homo sapiens
ggcggctctttggcgcggattagggggtctcggcgaggtgaggcgccaggcagcgctgggcgggcgggcgggtggcggagcgcgagcccctctagcgggactagggagaagcgggggccacg

SEQ ID NO: 134773 - DNA, 122 bp, Homo sapiens
acagttatattattaaaagcacagttgtgaggtacatgcttgtggcacaagtgagtgaagcgggatgctcatcaaaagcagctgtcaaaggccatcttcaaacatgacatcctgagatgact

SEQ ID NO: 134774 - DNA, 122 bp, Homo sapiens
gcctaaaaataccccatgttgcccctctaaaggctcactccacattttgtaatcatgtgccgtgtgtcatgaaacaagtatttcatttggcttaagcttttgtttcatgaacttaaactcaa

SEQ ID NO: 134775 - DNA, 122 bp, Homo sapiens
gtcaaaggcagataaagccctgggaaggtggagtaacatgatctcccttcagggctgccacggcgggaggttgaatgcctgagcattccctctgaagaggatgggttgctggtcgcacattg

SEQ ID NO: 134776 - DNA, 122 bp, Homo sapiens
ctgggattacaggcgtgagccaccatgcccggcgtaaagttttcaaatgtttaagtaacacgttaaattttgttatcgggctcagcacagaaaattgaaaaagagaacttaaaaggcgccca

SEQ ID NO: 134777 - DNA, 122 bp, Homo sapiens
aaatgaaaagatatttaagagagaatgttttctttataacagcctctggggaaactgtgtcggggaggtatgaaggaatgctcctagagccagagttaccattaccagctaaaagcagctct

SEQ ID NO: 134778 - DNA, 122 bp, Homo sapiens
agaacaaataagagagaaataagaatagaatgaatgaccccaaaatagggttttcttgggcgaggatgtgctggattaggaaaggtgacatgacacaggcagagcagagtggcacccaccac

SEQ ID NO: 134779 - DNA, 122 bp, Homo sapiens
accctagcagcagagaaaacaaaagcagtagcatgttggccccagtggctcagacagccccgagcagggagcaaggcgggtgccatgccggcttaagagagacctggccctgggaagaatca

SEQ ID NO: 134780 - DNA, 122 bp, Homo sapiens
gtctcctgcccggctttcaagagctgccattctttctttccaggggctgagccaatttctcggtgccacccactctcgcgcctgcccccagcccccgtttcctcccccgctcgggccggcgc

SEQ ID NO: 134781 - DNA, 122 bp, Homo sapiens
atcccaaaaacttcgctgccccgggaactcggcaagcaagtcacggtggacgcctcagatcgcagagaaattcagagacgccaacttaaggtatcaatcaggtcctactagggatgtttaat

SEQ ID NO: 134782 - DNA, 122 bp, Homo sapiens
gatcggtctgactggggttcggataaggaggaggagaaagaggaggaggaaagggaggagcgcgaaaaacctcaggcgacagcctcagcaacagcgactcccccggagacttccagcgcgga

SEQ ID NO: 134783 - DNA, 122 bp, Homo sapiens
catgagccacgatgcctggccaatgctgccattttcaaacacctatacttgatatgtattcgtagatttaaataatgtggtccaatcaaaccttttattttctgatctttgttaatatataa

SEQ ID NO: 134784 - DNA, 122 bp, Homo sapiens
ccaccatcaaccaggcaaagcccagcgtgtctccatggagatggcagcaggacccgaccccgtgctggcccgcactctcggcctccttatctggtttaggaatgcgcggtatccacgctcgc

SEQ ID NO: 134785 - DNA, 122 bp, Homo sapiens
cagggacttgctccaggagaaggcgagccggagggcggccgcctgcgagcgcgagaggagcgacgaagagtactacgccaaggaggtttacaaaatagacatgccgcccttcttcccctccg

SEQ ID NO: 134786 - DNA, 122 bp, Homo sapiens
gtgtggcgcgggcgggctggcagtgctgggggacccagcaccctccgcagctgctggcaccggtgctaagcccctcactgcccggggccagcggtgctggccagccactccgaatgcagggc

SEQ ID NO: 134787 - DNA, 122 bp, Homo sapiens
gcaccaaaattattttcagtatctcagtaagcaaacagatactggttcgtttgcaaaacccgagctaaaatgcccctcctaaccaccacccacctcattcccactggcctcggcccctcccc

SEQ ID NO: 134788 - DNA, 122 bp, Homo sapiens
gaaggatcggcagcgagagggcggaaccggatccgtgagagtcgcggcccacgctccgagcgtcaccctgtcaccgcccagctgcgcatgagcgctgcaactcctgctgactgcgcaggcgt

SEQ ID NO: 134789 - DNA, 122 bp, Homo sapiens
gaacagtcgacataatgtggcctactgcttccacctgagcgccccgccaggctgtaattccgcgggcccacgtgacctccggggccgcgccttccggacgcaactccactggggcggaagtt

SEQ ID NO: 134790 - DNA, 122 bp, Homo sapiens
agcttggtttttaaaggagccggaggtgggagctgcggaagacccgggatccacgggaggcggcggtgagcagcccttgggggagggcaaggagtggctggagagagggcgggagtgggggc

SEQ ID NO: 134791 - DNA, 122 bp, Homo sapiens
gaggtgcctagagtagtcaaattcacagagacagaaagtagaatggtagttgccagtggccgaagggttggggatagacagttgttgcttactgggcatagaattttaattttgcaatatga

SEQ ID NO: 134792 - DNA, 122 bp, Homo sapiens
cctggcttccaggtattctggcgtcctctctaaaggtcccgtgaacagtgcaggtcacagcgcagtcgacagagcaacagcagctacggcggaagtaactggtccctctcggagcaagaaag

SEQ ID NO: 134793 - DNA, 122 bp, Homo sapiens
caaagcgaggctgctctccacccagagcagagcttccactaagctggcagctcagcacgtcgtctgtttgtcactgctttttctgaaagaagtaaaccttagtctgagtaaggtgcgtgaaa

SEQ ID NO: 134794 - DNA, 122 bp, Homo sapiens
caaaacagcttaatgggctcggctagcctttggtggtgctgcagttagaggctagtgaagcggagagcagctgttgcagtaacctgttgcagaaaagtgaaagtatatccgcaacagttggc

SEQ ID NO: 134795 - DNA, 122 bp, Homo sapiens
catagacgccggagtgccagggctgcgcgttggcaattagtaggttggtgcggcccaggacgatgacatctgtggagatgggcttcccgtctggggaaggagagggagacgcgctggagggg

SEQ ID NO: 134796 - DNA, 122 bp, Homo sapiens
aacctcccagggcccaagcgatcctcccatcttagcctcccaaggtgctgggaccacaggcgtgctccccacgcccagctaatttatagaattttttgtagacccggggtttcaacatgcta

SEQ ID NO: 134797 - DNA, 122 bp, Homo sapiens
tcctgccgctgcaggagccggagtcgctgcagcagggaggccttgagccgcaggaagaggcgccgtgagccgggtgagggcgccgccgctcccggaatggttccagccggagacagcaggcc

SEQ ID NO: 134798 - DNA, 122 bp, Homo sapiens
tgtgatgaagctgtaccgcctttgatggagtcagaagatgaaacgcggaccgcggtgctgcgaatccctgggagatggggccggcatgcaatatttaaagggccgtttcatgaaagggagct

SEQ ID NO: 134799 - DNA, 122 bp, Homo sapiens
tgtcctagctactgtggaaagacctcgggataggggtgggggtggggttgggggtgtgtgcgactgaaccctggaagtggccagggcagctctcaccgcgcacgtgcactcactgcccccag

SEQ ID NO: 134800 - DNA, 122 bp, Homo sapiens
gtgagcccagccagtcaggcgtagtgttttgacttaagctactttggtagtggcagctggcgtggcctctctgcctccatctggaaccacagcctattgtgacttcccaaaaacctcgatga

SEQ ID NO: 134801 - DNA, 122 bp, Homo sapiens
tctgaggacaatccagggtggatggcggctggtcaagatcccgcctcctatcttgacccccggagcagtgtactgtacgtgcatcactcgcccagccctcagccatcgcccggctgccccgg

SEQ ID NO: 134802 - DNA, 122 bp, Homo sapiens
ttagagcctgctccgctcacgtggcccacgcattgttcaggacgcggcctttcgatcccgcggaagacagtccttgagcaggagcagctccccagctgagacagggccctggatgtccaagc

SEQ ID NO: 134803 - DNA, 122 bp, Homo sapiens
gggagggaggactgtcagtagaccaaatgctgcccactaggagtatcgggccatccccatcgcctgcccgtcccgcccctaccatctgtctttcagaatcaagcacttcagccagtgcagcc

SEQ ID NO: 134804 - DNA, 122 bp, Homo sapiens
atcaaactgtgccccaaaagcaggccaactttaaattttaagccactaacaataacctaccgagtagctaatccccatgggggtggtcagctcaagccatttattccaacctatagatagcc

SEQ ID NO: 134805 - DNA, 122 bp, Homo sapiens
tgcggagggtctagaggctcagttgcccgaggctgtcttgaggagctgcctttgggactccgcgaaacctcgaagtcttgggctgcgcctccccttgcgcggtcggagccttggcagagcct

SEQ ID NO: 134806 - DNA, 122 bp, Homo sapiens
ccctgaagatcatgctcaccacacctcttcagctctagaggccacatcaccttgttatttcggggtctagtctgccttatccccctcctcatctcaaactatctggccttgagccatctttc

SEQ ID NO: 134807 - DNA, 122 bp, Homo sapiens
ggaacacttggttgcactaaaaattttccagcaatggtatccccagcttgcccttttgcccgaatagtgcacaaagtcagcaagcatttcccctgaagtgtccacctccacacggccaagac

SEQ ID NO: 134808 - DNA, 122 bp, Homo sapiens
agcgcaacaacgagaaccgtgagaacgcgtccagcaaccacgaccacgacgacggcgcctcgggcacacccaaggagaagaaggccaagacctccaagaagaagaagcgctccaaggccaag

SEQ ID NO: 134809 - DNA, 122 bp, Homo sapiens
gaaggtgctcctgagagctccagggaagcaggagcaggctgacctttccctcggctgcgccgccacgctgtgaaattactgcctatgagtcagactccggggagatggcacgggctaaatat

SEQ ID NO: 134810 - DNA, 122 bp, Homo sapiens
ttaggcggggtttttctctctgggacttacagtgcatctaaagggttctcacagagccgccgctatcagtgtttccagtagaccctaacggaggtgtcgccatgactctctttctcgctctt

SEQ ID NO: 134811 - DNA, 122 bp, Homo sapiens
tgcaggattggcgggaaggcagcggggtcatcaaaggctgcgcggttgctgaggcatttccggggtgtcttccgaccaggattggaacagctactgcgctgcctctgtgggtcgcggaacat

SEQ ID NO: 134812 - DNA, 122 bp, Homo sapiens
ggcggggtcccacttgcccaaacgcccccgaacgcccccgtgcacagcctcagccggccgcgcctcgagcagccagctggcccgcgtcccgtcacccgcccggtccatgtccctgcagaccg

SEQ ID NO: 134813 - DNA, 122 bp, Homo sapiens
ggccctcttctgccgcactgctggtgggaggggaaattggggacccgagttggtggatgacgtagccctcacgtgaccaagagctgacgtgtgcagaagtccttcttgtcctggtcgttgtt

SEQ ID NO: 134814 - DNA, 122 bp, Homo sapiens
aacgatcatgcctagagaatcaggagcctggtacaatctaggggtggcaagcgggaaatacggcattttgcaaaaatcaatactgcaagaaaagagtcatctttattgaaggacatggcatt

SEQ ID NO: 134815 - DNA, 122 bp, Homo sapiens
tagatctgagcgtggggaagccagggtgcatgggcggtcactgtgaagctggcctggccccggggtggcagcctactggacttggagagagaggccctgctccacctgtttgggccgggcct

SEQ ID NO: 134816 - DNA, 122 bp, Homo sapiens
ccccgggacgcacgggacaggagcaacatcaggtgaactgcaatgacctcgcttgtctttcgggggaacccaggaatcccctgggaagcttctctgcactggcctcaccctttcgggcctgg

SEQ ID NO: 134817 - DNA, 122 bp, Homo sapiens
tgcgcagcttgcggaagctttcccggacagactcgctgccagcggattggctgcgagcagcgccaatctcacgttgcccccgggcgaggcgggactcagtgccgcgctctctgcacccgctc

SEQ ID NO: 134818 - DNA, 122 bp, Homo sapiens
aacaatttatacgtatgtaaggctatgtaaaggcacgtaaagccaaaccgctgtgaaaaccgccttcagaagtcagtcggctactaggcaaatatacagaagcacacaggacaaatccattc

SEQ ID NO: 134819 - DNA, 122 bp, Homo sapiens
accccaggaggctgctggacgtgccggaggatgccacagccaccggagctggttggggtccgagagcagatgggccaggggctggggcaggcttcgagaagagggttcgggcttggggaaag

SEQ ID NO: 134820 - DNA, 122 bp, Homo sapiens
actgtgcttccggagggtgttctcccctcacgaggtttttgttctgatgcacaccaactccggaaggacttagtccaggctggactaaggcaggagagggttactctggatgaactaagaat

SEQ ID NO: 134821 - DNA, 122 bp, Homo sapiens
agggggagggggagggagggaagggacggggcaaacctgtctgtcaggacgtgctggttccgctcactggctgctggccccaagggctttcagactcttctggacagttgttacttcctgta

SEQ ID NO: 134822 - DNA, 122 bp, Homo sapiens
ccacacacgtgggcgctgagacattccattgggccaaggccccaggcacagggaggcactcgatctctggcgacccctgcagggcatagccggagttgcattcgaagcggacgatggccccc

SEQ ID NO: 134823 - DNA, 122 bp, Homo sapiens
tccaagcagctcaggggattgtctttttctagcaccttcttgccactcctaagcgtcctccgtgaccccggctgggatttagcctggtgctgtgtcagccccgggctcccaggggcttccca

SEQ ID NO: 134824 - DNA, 122 bp, Homo sapiens
tcaaaaaaaaaaaaaagaaaaaaaaagcaaaatgacccagccagcctgaatcccagccgccgtgtcggactactatagtcccagatacttggaaggctgaggtgggaggatcaattgagccc

SEQ ID NO: 134825 - DNA, 122 bp, Homo sapiens
ctcatccccacaccagcctttctgccccttctaaccgcaaatggaggtgtgcgggtctcccgtctgcgcagcgcctcttttgctctctgtatcgcagatgaggacgggagggaccttctcca

SEQ ID NO: 134826 - DNA, 122 bp, Homo sapiens
tcaaacctgtaggactaatctgacccattggtcccattctaagtggcttaacatggtgcacgagggagttagagtataaaacaaataactttgttctctatagtacttttcttctttttggc

SEQ ID NO: 134827 - DNA, 122 bp, Homo sapiens
tccccaaatcctccttcttccagtcaatgtgcatcgatggggtcagctcagcccttaactcgaagaccccgggaccacaggggccaccacgcagctgagctctgcacagcccgggctgttcc

SEQ ID NO: 134828 - DNA, 122 bp, Homo sapiens
aggggaggtcccacttcctcagccttatgtatcgcactgatcagaactttccagaatctgcggcatttactcaccggcgcctccaccggcccctccacgtgccacttccgcttccttcttct

SEQ ID NO: 134829 - DNA, 122 bp, Homo sapiens
ggcttacctctgccgcgcgaggatgtggagccagcgcggacaccttcccccagcgtctcgcgtgccttcaggcagggactctaggatcttaggtatttagtggaggtctgaggttggggggg

SEQ ID NO: 134830 - DNA, 122 bp, Homo sapiens
cctggaacacaaaaactaaattagtagaaaagtggtaaaataggtggtcgcgcgcccgaccgccgcagtcccagtcgagccgcgacccttccggctgcccccaccccacctcgccgccatgt

SEQ ID NO: 134831 - DNA, 122 bp, Homo sapiens
ggagcagcaaagcagtcagggtgaggggtcagaggcaccaaacttcctcttagaaaaacacgagggaaccgacgaacccatgtccagggaatgctgaggacgctcttgactgtagggggacc

SEQ ID NO: 134832 - DNA, 122 bp, Homo sapiens
ggctggtggatcacctgaggccaggacttcaagaccagcctgaccaatatggcaaaatctcgtccctactaaaaatacaaaaattagccgggcatggtggtgtgagcctgtagtcccagcta

SEQ ID NO: 134833 - DNA, 122 bp, Homo sapiens
gcgagatggtgagtctgcggggctgagcttcccgagacgcggcaggggtcggctgggaaccgggcctgcccctggcggctccggggtcggggcccggagtctcctcggtcacacggtgcggc

SEQ ID NO: 134834 - DNA, 122 bp, Homo sapiens
gccttccttcccacttctgcaccctcaaaaagaaatgtacagaataatgcaagcaattgccgctgttttagcagttttgctcatagccactgcctctctttggaattatattctatcccatt

SEQ ID NO: 134835 - DNA, 122 bp, Homo sapiens
tccaagggcaccacggggggtttgccacctgagcccagggatcaggcagggcttggccagcgctgagcaccctaagtgcctggcacgggctgagactcaggggccggctgtgcctctcctga

SEQ ID NO: 134836 - DNA, 122 bp, Homo sapiens
accccaagggctccagggccctgcaccctgcgctgtgtgggcagcgagtccggaaggagacgtccgtggtgcccatgggaggagaggccggtcaggcgcggatccctgccggacgccaggcg

SEQ ID NO: 134837 - DNA, 122 bp, Homo sapiens
tcactttgcatctctttgggacgccggccgcgcccccacccttgccgccgccgtcgccgccgccacttcggttttgctctggctggggagacccggcgtttctggatttcttttatgcagcc

SEQ ID NO: 134838 - DNA, 122 bp, Homo sapiens
tgagcttggtcagaggcagtcagatctacaaaagtgaggccgaagagaggaagcctgagccgagtgatgattgatccctgtgacatcacagaaggacaaatgggctaaggacagacttgatc

SEQ ID NO: 134839 - DNA, 122 bp, Homo sapiens
ccaccagtgggtttgtctgaactgtttaggaatgcggccgcggtcgccagctgacgtcagcgccgccggttcagccgcaggccagagtcagagactgacagcgcgaggggcggggttgggag

SEQ ID NO: 134840 - DNA, 122 bp, Homo sapiens
gcggggccaggttctcacaccatgcaggtgatgtatggctgcgacgtggggcccgacgggcgcttcctccgcgggtatgaacagcacgcctacgacggcaaggattacatcgccctgaacga

SEQ ID NO: 134841 - DNA, 122 bp, Homo sapiens
gtagctgggcttggtgggcgtctgtaatcccagctagttgggaggctgaagcaagagaatcgcatgaatctgggaagctgagattgtggtgagccgaaatcacgccactgcactccagcctg

SEQ ID NO: 134842 - DNA, 122 bp, Homo sapiens
ttacaggcatgagccaccactcctggccggattttgccattacttttaatggcaaaaccacgattatttttgcaccaaccaaatacaaacatcctctaaggtaatgactctctgaacttact

SEQ ID NO: 134843 - DNA, 122 bp, Homo sapiens
tgctaatttcattttaatattacaccattgtatgatgaataactacgtacctcaacagagcgaagggaagacagaacgaaagtgctcacggggaggcggggagcagaggggtcgatagcaca

SEQ ID NO: 134844 - DNA, 122 bp, Homo sapiens
ctctttcaaaactgactttagtccaagcagtgaaagctatcccctccgtcacctgctccacgtaactttccagctaagctgtgcattgcaagtttacacgtggatctacagtttcatctgaa

SEQ ID NO: 134845 - DNA, 122 bp, Homo sapiens
ctcgaaagcccaggcccgcgggttagctccagccgctgggcttgacaggggtcagggaggcgggccggccccacagccaagtcacagctccagggcctggtcgcacctgagcagcgcggcct

SEQ ID NO: 134846 - DNA, 122 bp, Homo sapiens
tccctataggcatgagcaattcacaactttacagagcaaaagatggaagcaggcatggtgcgtttcagccaacctctgaatccaaggatctactcatcaataccgctgtgcatttctgaaag

SEQ ID NO: 134847 - DNA, 122 bp, Homo sapiens
taatagaaataatccaaatcggtgcctccccgctgaagacgctcatggggcccacaccttcgtgctggtccaggctctctctgcattgggcgcctcctgagctccgacacatcagaagagag

SEQ ID NO: 134848 - DNA, 122 bp, Homo sapiens
cctggagcccggcgggctctggggcgctgagctcatctcgccacgccctgcgcgcatccgcgcagaaatttgggaggtggggttgagtctcgcaagctcctctccgccaggctgggccgcag

SEQ ID NO: 134849 - DNA, 122 bp, Homo sapiens
gctctggccaggcacgcaaggggcagccgaggtgggagggtgcccttgtgggaggggctccggtgcccaccacccttcacagctacgtgaggcggggcatgcatggctgtcccccaggcaca

SEQ ID NO: 134850 - DNA, 122 bp, Homo sapiens
ttcagctaggttggatcacattttctgaatcccacaccatcctttttttatttacctcctcgtttgaatggaacacatcctccagtagctttctgagaaagggtatgtgggaagttaagttt

SEQ ID NO: 134851 - DNA, 122 bp, Homo sapiens
agaggaccaccaggtcccggagcgaagggcaacgccgggagtgagcaccggggcccgggtcgtattccactgtcagatgaagccctgatgtgtgtaggggaatagggaagagacgtgatttt

SEQ ID NO: 134852 - DNA, 122 bp, Homo sapiens
tatcctgtcactgcatagttcctatccctacttggaattctaatgcttaaaaatcccttacgaaattacaaaaattaaaactaccaaataaacacttacattcacctatccattaaggccat

SEQ ID NO: 134853 - DNA, 122 bp, Homo sapiens
aggcgtctttccctcactggggagcaggccgattgcaccaggcttccatatgaacgagcccggctcccttgaagcagtcctgacccccctggcgggggctgtctagacggggaagccatctc

SEQ ID NO: 134854 - DNA, 122 bp, Homo sapiens
catgtcgcgcaggtcgccgaggcacgcgcgctgagagtgcgatgcgatggcgggcggcggcgagctgggctcagacttcactaccgagcccatggggcccaggctcatggcggctgcggccg

SEQ ID NO: 134855 - DNA, 122 bp, Homo sapiens
agcaagctcagcagtttcttccctttttaaagcccgacagtcagtggagttttctatagtcgagccacgtgagcactgtcaccccaagtagagactcttgtgaactcaaacggctccagatt

SEQ ID NO: 134856 - DNA, 122 bp, Homo sapiens
ggttatgttttaaatgcccagattcttgctaaagaaattgtagctataggcatgattaaacgctcttctctgataccacactggtacacttaccaatgattgcaaacagaattgacactgtc

SEQ ID NO: 134857 - DNA, 122 bp, Homo sapiens
ccagggaaccgacaggtgagcgctcccgggcccgggagcgccagggagaggccgggccaccgaggcccaaagcagcaagtgtgtcctcaggggagcttgtgcaatagccccagtcacagagg

SEQ ID NO: 134858 - DNA, 122 bp, Homo sapiens
gggctaatggggcaggtaaaaacatcctagaactagaggcaggaggcccagcatctaattcgggctcagtcacttatatgatgtgtgaccttttggcacagggtgtgcctgccttctgtaag

SEQ ID NO: 134859 - DNA, 122 bp, Homo sapiens
aaagaaaaaaattaaacagaacatgttaacatctcaaaatattctgccacatttgaaatacgggagagttgaattcattagaggacttctattggaaaaaaggaattgtttttgaaaatgat

SEQ ID NO: 134860 - DNA, 122 bp, Homo sapiens
accaaacactgccatatgggggagagttacatttcctgtgtgtgtgtcaaaatatctgagcggatgtgaaatacatcagacatgtataaaaataaacttttacagggtgactgactactccc

SEQ ID NO: 134861 - DNA, 122 bp, Homo sapiens
acctccttagatttagcatcctaggttcctcacacgcctcaccctgaatcctggccctcccgcagccccagcgccatttgtcccatcagtgacaagattcatattctgatgtagactctgtt

SEQ ID NO: 134862 - DNA, 122 bp, Homo sapiens
catctctctcctcctgcaagtacatttcctgcaattagactatactgtcaccaggtggaacgtggtgggggcagcatgttagactagccttggagcaaggctcatctctatttaaaacctag

SEQ ID NO: 134863 - DNA, 122 bp, Homo sapiens
atggggcggctgggcagagacgctcctcacctcccagacggggtcgcgaccgggcagaggcgctcctcacatcccagacggggcgtcggggcaaaggcactccccacatctcagacgatggg

SEQ ID NO: 134864 - DNA, 122 bp, Homo sapiens
gagggaagtgaggttccctcggacaccctagtgggaaggctccacgcggtaatggaaccacgctgtgaaacctttgcctttgggtgtcatggtggaagcaaatcttagaagacatttaattt

SEQ ID NO: 134865 - DNA, 122 bp, Homo sapiens
cacaagttttgcatgaactttttgtgtgtgtgtgtgtggacaaggaagtatctttcccttcgtgggggttggagagaggcacaagtcaactaactaaaagggtccaccttgaattagcaaaa

SEQ ID NO: 134866 - DNA, 122 bp, Homo sapiens
acagcacggtcgcctccactgccgccgtctcctcgtcgttcaaatgcgccttgaccaagacgggcttccagttttactacctgccggctgtctacatcttggtattcatcatcggcttcctg

SEQ ID NO: 134867 - DNA, 122 bp, Homo sapiens
cctgggtgcgccctgaggcacacacctcctcttaggagacgctgatcgggatggggacctcgagtagctctgctcacggctccggctccgactccgactctctcgcccctttggcaagctgt

SEQ ID NO: 134868 - DNA, 122 bp, Homo sapiens
tacgtgcattattacttttaagcctcgtaacagctttgaagttgatatgattatcagttccgctttgaaatgggagaactagagcacaaagaggttgggtcacaccactaagaactgatgaa

SEQ ID NO: 134869 - DNA, 122 bp, Homo sapiens
ataaggagcaaaggtaagcggaacggctcttaaaggcgcagttttgcttttgccctgaggcgagaggttggagggaaataccggagcggcgaggggagagcagagatcacgaggcgtgatct

SEQ ID NO: 134870 - DNA, 122 bp, Homo sapiens
aaaatcccagtcccactgggtgcgaggcggagaaatccggcgaggcatttctatggggagcggcccccagcatttaggagttagatggtcatcgagacccaaaacattagagccggaaggtg

SEQ ID NO: 134871 - DNA, 122 bp, Homo sapiens
aacagagagaaaccagtgggtactcctattagttcagtggttctcaaacttgagctgcatcggaatcacccaaagggcaggttatagcactaatttctgggtcctacttccagatgtttcgg

SEQ ID NO: 134872 - DNA, 122 bp, Homo sapiens
tcccgctggctcccctcttccaagttcttccggacaacctcagccccagccaaagcagcacgcaggccctcagcctcagctcggccggccttctccgcccgtgccagagcctctagctccat

SEQ ID NO: 134873 - DNA, 122 bp, Homo sapiens
agacatgctccagatgagttgtttcctgtctcttaggaattggcaggcatgggaagagcacgctgtccagggtcggcaaggcctggaaatgtcagagcatcagaatactgaaaataaaagac

SEQ ID NO: 134874 - DNA, 122 bp, Homo sapiens
caaagggatatgatctgccaacctttctcatatcatttcatgggcgctcagggagtgatgcggtaggcactcattgggagactagatgagacagagggggaagaagaataccaatttgcagt

SEQ ID NO: 134875 - DNA, 122 bp, Homo sapiens
cgcaccgctgccgggggttccgggccaggtgggcagcaccatgtggaagcagtcgcacatcgcggcggccaggcggtgcgggcctggcggcccgtcgcgtccagtcgctggtcccggctccg

SEQ ID NO: 134876 - DNA, 122 bp, Homo sapiens
aacaaaacgaaaagccagcccctcttgttgtctcgttgaatcccagaacgtacaaagggtcgtgaagaaatgtaactgtacatcgcaagccattgaactctccaggctgattggggtgacat

SEQ ID NO: 134877 - DNA, 122 bp, Homo sapiens
caatgcataatgagcgggcagcggctgagctgcagatgatgcctgctgctctggagtccacgctactgtccctcttttcccgggtaaagctggaagctgaactgggaaccccggggcaatca

SEQ ID NO: 134878 - DNA, 122 bp, Homo sapiens
atgcgaagcggcggccgccggcaccgcccccgccgcgctcccgcttgccgcagcctgcgtcgtctgccgccaccgcgcgccttcactgacctacaccaccgccgccgccgccgccgccgccg

SEQ ID NO: 134879 - DNA, 122 bp, Homo sapiens
ctctcacaggtttgttatgtaaccgccgggccagccccgccctcagggtgggctgaggtgcggctccctggagaccccgcccgctagccgggagccagcggcgcagtgcgagttcagcccgc

SEQ ID NO: 134880 - DNA, 122 bp, Homo sapiens
aaagaatgtgaggatttctctctgattcagatttggcatttgtttcatccatttatcattcgctcattcatctatttatctaggtgacaattacttctcttgtttcaataatcacatcggaa

SEQ ID NO: 134881 - DNA, 122 bp, Homo sapiens
gactgagcctaaaaccagcagtgtctcagagacggagagattgtcgcagcgtctcagagacggagggaccgtcgcagcgtctcagagacggagggaccgtcgcagcgtctcagagacggagg

SEQ ID NO: 134882 - DNA, 122 bp, Homo sapiens
cggcctggtacagagaagggctgggtgcgccaggacagtagtaccggggtctgccagctccgcagaggtccctccaatcccccctcctcctctgcgcccccccacccatgcccagcaatccc

SEQ ID NO: 134883 - DNA, 122 bp, Homo sapiens
gacagggacacccgggggcctcgcgtcaatcaccctgcacgtgacagggacacccggggacggcgcctcactcaccctgcacgtgacagggacacccggggacagtgcctcattcaccctac

SEQ ID NO: 134884 - DNA, 122 bp, Homo sapiens
aactgatctcactatcaggagcgcaagggacggcggcgcaagggacggcggcgcaagggacggcggcgcaagggacggcggcgcaagggacggcggcgcaagggacggcgcgcctttgcccc

SEQ ID NO: 134885 - DNA, 122 bp, Homo sapiens
gccgcgaggcgtcctctgcagcacgacaccgagctccatgtcacactcacgctgcctccacggcaatggccagtctggggattggggtgtccacgctcgtccaaggcccccacgcgatgccc

SEQ ID NO: 134886 - DNA, 122 bp, Homo sapiens
cagaaaatgacatttgtttttgtgattctgttgtttattttcttgggcattctcattgtccggtgcttccggattcttttggatccatatcgaagcatgccaacctctacctgggctgatgg

SEQ ID NO: 134887 - DNA, 122 bp, Homo sapiens
gcgctttgacacaaactaaactcagctcgggagcatggcacagacgctgtgctggaaactcgcccattcactcttcagcagtcaatctctgttctgagaggagttttcccatggatcccaga

SEQ ID NO: 134888 - DNA, 122 bp, Homo sapiens
ctgagcctgctggtgccatccatctcccccagccccatctcccgtccgtctgtcaccgctcggcccccaccatccctgcccagctctgagggggcctcagcaggtctggccttcgtgtttac

SEQ ID NO: 134889 - DNA, 122 bp, Homo sapiens
ataaaaataggatggattgaagcagggatgaatagttggatatatgtgaatatacaagtacggaacaggaaattggtaatggtaaaatctaggtggtgggtatgtggtgttcactgtaaaat

SEQ ID NO: 134890 - DNA, 122 bp, Homo sapiens
ttttgcgtctcctcacccagtaacagagggtgttgctgccttctgtgcatttgacccccacgcttggatccgatcggagatggcagggctgagtgctcttggagcccaggtggggcgcactg

SEQ ID NO: 134891 - DNA, 122 bp, Homo sapiens
gcattcgcatccacagctgaccccctagtgagtcttcattcactcctaacttgacgcagccgggataaaactgaccttatcatgtttgacctgattgtgtcacaaaagcattagacgctttc

SEQ ID NO: 134892 - DNA, 122 bp, Homo sapiens
agtactgcccgcgggatcgcggcgtggggaaccaggaactacaagtcccggcaggccgcgcgcgcctcggcttcactaagcgcagtcaggtggctgtccccgcacggttcccagctaattcc

SEQ ID NO: 134893 - DNA, 122 bp, Homo sapiens
ctgggatgaaaatggaattggctgaggagtagcaggaaggaacacgcaggctgggcgaggcgctggggacagcagggaagggaagttccacctgagcaaagctgtgaactcagcttcaagac

SEQ ID NO: 134894 - DNA, 122 bp, Homo sapiens
tatccgaaaggtgtttgtattttatttcaaattatgaattcctgaacatcggattatgtacgattctgcagtgccctcggaggcccattagagtctggagctcgagaagcataacaaactct

SEQ ID NO: 134895 - DNA, 122 bp, Homo sapiens
cttggggtgtggcccagcagcatgctagccagggcaggtggacgcactgggcggatgcaccggtgggggccaggccaggaggctcagcacagagctgactctgccccggttcctaaccctgc

SEQ ID NO: 134896 - DNA, 122 bp, Homo sapiens
tggagctacagaaagggcctcaggggtggggcctggaaaccgggcacaggatgtgaggggcggagcctggggccccggttggtgggacagaacctggaatcactgacagggccttaggggcg

SEQ ID NO: 134897 - DNA, 122 bp, Homo sapiens
ccggccctggtctccgctcgagtcctcgagctctcgaggggatgactcttcccgcagcgtcggcagtctgaggttttccagtgacgaaagacatccagtcccaatgtccgagatgctcagag

SEQ ID NO: 134898 - DNA, 122 bp, Homo sapiens
tcgctgccttgagaagctcccgcttctgcagtaaggtggcttttaagccagagattaccacgcgctgccgcggagggagaggtagcgcggggcatggggaggccacagagaggctgtactga

SEQ ID NO: 134899 - DNA, 122 bp, Homo sapiens
tcccgcccccgccagaaggtgatgcttccgacgggagccgccttccggtggtttcagtgacggcggcggaacccaaagctgccctctccgtgcaatgtcactgctcgtgtggtctccagcaa

SEQ ID NO: 134900 - DNA, 122 bp, Homo sapiens
cagggcccagacaatgacctagggtcagaaatgtgagccagggccgggcgcggttgctcacgcttgtagtcccagcactttgagaggctgaggtgggcgaatcaagaggtcaggagttcgag

SEQ ID NO: 134901 - DNA, 122 bp, Homo sapiens
gtttccgccataaacccatcggagagtgcccagcacaggggctggcacagagcgggtgttcgtgaacatctgttaatgaatgaaagaaccaagcaacaaacaaatgagccttgagggaagtg

SEQ ID NO: 134902 - DNA, 122 bp, Homo sapiens
cagcgcccgcggctttgggtggccgaccagagggcggccggaaagcacctcggtgccccgcgaccctccgaacagaggcggcgggaggtaccagctgctaccaccgctgccgcccccagagc

SEQ ID NO: 134903 - DNA, 122 bp, Homo sapiens
acctggagccgcaccggtagctgcgggactgcgaactcagcaggtgatgggaagccaggtcgggagtggtcagggaaggcacgggctgagctgcagatcagagacacccggtctctggccgc

SEQ ID NO: 134904 - DNA, 122 bp, Homo sapiens
tggtttcaccaactccactaccactagaggtcagcacttgactctccatatggttctgtacgagggaaaagaccaattctctgaaacagatcatcatctacggttcgtgttgttatctcatg

SEQ ID NO: 134905 - DNA, 122 bp, Homo sapiens
gagaagcgaaagaggtgaagtgtacggcacattcccatgaggaccgccgggctgcttccccgcccctatgtggcatagctcgagctccgcctgttccacttggtgcggggagggttgacggg

SEQ ID NO: 134906 - DNA, 122 bp, Homo sapiens
cgccggagcgcagcatcgcctccggccaggagtgtgcatgcgtggggtgagtgagcgagtcgggggcccgggcggggtgggctgcggagagcagccacggggcgccgccgttcccaggacgc

SEQ ID NO: 134907 - DNA, 122 bp, Homo sapiens
ccacccggattctcccctctggccagtcaagcactgagtaagcccagggctccccacctgcgtcctgagcctggtcccctgggaatcaccacaagtgagtgggctgtagagacccacagact

SEQ ID NO: 134908 - DNA, 122 bp, Homo sapiens
gccactagacacgattctggacgtcaggcagagaccaatgtagttcccctgtccatagggcggagcaaagtgtggaggggggccgggcggggtggctcaggcctgtaatcctagcactttgg

SEQ ID NO: 134909 - DNA, 122 bp, Homo sapiens
gcggcgggagtcgcctctgctggttggggagggcggcagctgggacagaggcagggcctgcgcggcggcggggaggcgggagtgggccgggaggagcgcctgggtccagcgcctggaacccg

SEQ ID NO: 134910 - DNA, 122 bp, Homo sapiens
ggagggtggtttagtcacaggggtggagggagggggcccactggcgcgccaccaggaccccggtgccctagatgcatacctggccgcgcttcggatgctcagaggcaaaccccctccccttg

SEQ ID NO: 134911 - DNA, 122 bp, Homo sapiens
gacagcggtttgcggtgtcgccctctctgcggtgctttccaaggaccctcatgccccgcccgggtgcacattcaccacatgggtcttactaggtgacctctttctaagtaaaatgcattgag

SEQ ID NO: 134912 - DNA, 122 bp, Homo sapiens
tgcttccgccggcggcccgggcagccagagccggacacacaaggttccaggccgcgaggacgagtctttcctgcccgagggacccggcagctaggcaaggcctgaccgcacccgccaggcct

SEQ ID NO: 134913 - DNA, 122 bp, Homo sapiens
cacgtgagcagcaggagccctcggcgcagcagtcgcgaatgcccgacccacctccgtccacgatggcttcataggtgacttccagcagcagccgcagctgagggtccatcgtgtgtgcctgc

SEQ ID NO: 134914 - DNA, 122 bp, Homo sapiens
aaacgttggggaagaagaagatgaggagaaagggcccaccgaggatgcccaagaagacgccgagaaggctaaaggtacagagggtggttcaaaaggcatcaagacgagtggggagagtgaag

SEQ ID NO: 134915 - DNA, 122 bp, Homo sapiens
agtacgagggatgagggtcacttccagtttgaagcatagaagaataattaggactcttcacgcattttccttttccctgttagaggcctcaggttgaaatgatgatgtcaacaatgaaagcg

SEQ ID NO: 134916 - DNA, 122 bp, Homo sapiens
tggggcttgggcgcgggggcagagccgggtccggccgggtagagggagcggggccgcagccgtcaccgccgctgccgccgccagcgcctgacagaatcagcaccacggccagcgcctggcga

SEQ ID NO: 134917 - DNA, 122 bp, Homo sapiens
tctttcctcctgccatggttgctttctctcctttctttcaggatattaaaaaatgtttcacgtgtcttttcagattctctaagttcccttcttttcaccagttatatagtcctctgtgctgt

SEQ ID NO: 134918 - DNA, 122 bp, Homo sapiens
agggatgtggctgatttaggaggtttagcatgtgcctgccagtctagaagtggaaccaaacgcatgttcgctgcttgcggagtctaattaacaagagcgaggtctggtagaaagaaagtgac

SEQ ID NO: 134919 - DNA, 122 bp, Homo sapiens
gactcacgccgcggaacttgggggctgcagaaggcgagtgcgcggcgggagtcgtcctgccgcaggctcgagtcctcctcctgccaccgtggggtctcggagctgccccgcgctcccgtccc

SEQ ID NO: 134920 - DNA, 122 bp, Homo sapiens
gcccctccctgccacttgccccacacagcaagctgggatttctgatttggatctcttcctcggataggggatttctggggaaaccaggagttttggctccatgggtctccagggtttgagga

SEQ ID NO: 134921 - DNA, 122 bp, Homo sapiens
cttacgtgcgcccggagtccattggccaaggcgggccacactcccgggtctggattgggtcgtggcgcagagaaggcgtggcctcgccgcgctagtccttataggctgctccgcgctggtgc

SEQ ID NO: 134922 - DNA, 122 bp, Homo sapiens
gggggttaagattgcagatggaattaaggttgcttatcagcggactttaaaataaggtgacgatcttggagtgtgtgcttgggtaattacaaagtaattacaagggttctctaaagtggaag

SEQ ID NO: 134923 - DNA, 122 bp, Homo sapiens
ggcctgtcctttcaggcgggagttcccagcggcgttcctaggtgttttgaatgtgtgccccggggctgggggaagcctcgtgcagttctgctgctgtgggaggcaggggggactggagggga

SEQ ID NO: 134924 - DNA, 122 bp, Homo sapiens
aatccaatttaaaaatgtcaaacgatctgaataggcatttttcaaaagacaacatacaaacggtcaaaaatatattaaaacacactcatcactatctgggaaatgcaaatcaaaaccgcaat

SEQ ID NO: 134925 - DNA, 122 bp, Homo sapiens
cgcacgcctctgccgtctggaggacgcaggcgggagcgccccggaccgggttcacggtctcgcactcctgccgccggcgccccgcggtcccgccctagcaggctccttcccgggcccctccc

SEQ ID NO: 134926 - DNA, 122 bp, Homo sapiens
gagttggaatacaaggataggggagagaaggaaataattacagttattttttcccctaggcggtttaatttaatagggctaacttaaggtaccttagagcccacactaattaaattggcctg

SEQ ID NO: 134927 - DNA, 122 bp, Homo sapiens
gccagccaatggcgggtgggagcgggcctgggtggggctccaggagaggtcacggggagacggccacctagagcattgggcggggcagagccctgagggccgctggccaattggcgcgctcg

SEQ ID NO: 134928 - DNA, 122 bp, Homo sapiens
tctgcccacgccgggatctctgcctggtcccaggagcgggagactggagaagccccaggacgtgccgggggaggcggagggaggagggggtcacttctcaggaggcatgtgcctgggatata

SEQ ID NO: 134929 - DNA, 122 bp, Homo sapiens
ttttttttttgagacagagtctcactcagtcgcctaggccggagtgcagtggcgtgatctcggctcactgcaagctccgcctcccaggttcacaccattctcctgcctcagcctcccaagta

SEQ ID NO: 134930 - DNA, 122 bp, Homo sapiens
accaggaggtttgtctccgaggaagacccagggaactggatatctagcgagaacttcctccggattccccggcgcctcgggaaaatgggagctgctgcaaagttggcgtttgccgtctttct

SEQ ID NO: 134931 - DNA, 122 bp, Homo sapiens
tctccaagactgggctccacgttcccagctttgcaggcgtctccttgggacactggtggtcgaatctaggagtaatgaccaggagatactgagtagtgacgacaacaacgatgttaatgata

SEQ ID NO: 134932 - DNA, 122 bp, Homo sapiens
gagggcgcgactggagcccaagtgccggagaggaccgacccacagagcgagcagctgaggcggcggctgcgcggaggaggcggctggagctgcgaccgcgggaccgggcgcgaggcggctgc

SEQ ID NO: 134933 - DNA, 122 bp, Homo sapiens
ttttggctattgggaacaattctgttgtgaacattggtacacaaatgtttgttggagtcccgactttcaattattttgggtatatacccagaagtagaattgctggatcatataactcattt

SEQ ID NO: 134934 - DNA, 122 bp, Homo sapiens
gaaaaataccgattgccacttattaatgggtaacattaataagtttgagaaacagaggaccggaacagaaatggcatcataaataaaataagacaaaaaatagttccaggagttctcactca

SEQ ID NO: 134935 - DNA, 122 bp, Homo sapiens
gtttggcccccagttggacactgcccaggccaccagctcggtcttggccgagaggttgagcggtgggtgggcaggctggccggaccacggctccagccagccgtagggcgtgaagatgtcgg

SEQ ID NO: 134936 - DNA, 122 bp, Homo sapiens
tgaaatgtggaagtcaaccaggccaatgacggaattaaatgtaaactccaagagggctttcgcaggccacagggttccagtgacttgggtaacagatgttattcttagctcatctgttacgt

SEQ ID NO: 134937 - DNA, 122 bp, Homo sapiens
aggttatgtggtgcatgactgtatgttcgtttcctgtgggcgctggaactaacgacctcacgcttgctggctcaaaacaacagcagtctattctctctcagccctggagagcggaagcctgc

SEQ ID NO: 134938 - DNA, 122 bp, Homo sapiens
taccaccttcctttctaaaataaaatctctctggcatgaagtcaccgcctatttcacatccggtttgccctgggacgtattactactgtcttggtaaagagaaatcttttgttgtatagctg

SEQ ID NO: 134939 - DNA, 122 bp, Homo sapiens
tcctaagagattatactctcttcccactctgggaaagccatcttaaatggcctcattaaacgcagagtagcttgttttgtttttaaacaagcactacccttgccccaataaagtcctgcgcc

SEQ ID NO: 134940 - DNA, 122 bp, Homo sapiens
tccctcccttcctctcccgtctccctcctccctcctcccagactccgcaccgggcgggggcggcacccaccgaagtagaagccttcgtgttggtacttggggttgaagaaggcccccttggc

SEQ ID NO: 134941 - DNA, 122 bp, Homo sapiens
aagtctgcgctaggactccctgccggagaggccggaggcacgagaatcagtgccactcaacgcccacgggggcagagactgaagccctgccagctccgacggggtggagaaaaaggaaaggt

SEQ ID NO: 134942 - DNA, 122 bp, Homo sapiens
gagggccttaaagagacccggcagcctctaccgcagaatgggttggagcaggttaggggccgggcgggccggccgagaaaaggagaaggcgaagggattggacggagtgcagaggaggcggg

SEQ ID NO: 134943 - DNA, 122 bp, Homo sapiens
ccgcccccgagacgactccatactgcaggtgggggccgcaacggaggaattggttcgccccggctccggaggcagtggctgcgcctttaaggggcgttggtagaggcgagccgattggcagc

SEQ ID NO: 134944 - DNA, 122 bp, Homo sapiens
gtgaaaatctggccgccccccactttaatcttttattatgcagatggattctccacctggcggatgccatgttgcctgttcctttactgtacacacggtgacaaagaaaagggaagatggag

SEQ ID NO: 134945 - DNA, 122 bp, Homo sapiens
cccagggtccctaactggaggccgcaggggaggtggagccaagccctgggactcaccaagcgcaggagcagggcccacagcagccagcccctcaggccggcctccgccatcccaggtctggg

SEQ ID NO: 134946 - DNA, 122 bp, Homo sapiens
cactttcacaggatcccctagtgatcccagtgcacactgaagtttgtacagcacagatggcgattcaccagatcggctgcacattggaatcacttgagggatttcaaaaatccttagtgccc

SEQ ID NO: 134947 - DNA, 122 bp, Homo sapiens
aggggggtaaactgagccagggaggctcggacttgggttcgggtctggcctgcgcggggccggccctcgttcatcctcacttctgagtacccgcgacgcgccctcgacgtccctgcgctgtc

SEQ ID NO: 134948 - DNA, 122 bp, Homo sapiens
cggcacagcctgggcctgttgcgtcctcccagcctcttccctccccggcagtgggggcgccgcgcccagcctttgctcgatgagggctgcaggatccggctgagaccaacccgcggcgcagg

SEQ ID NO: 134949 - DNA, 122 bp, Homo sapiens
caagcccttggctcatttgtagagctgcaacttctaataacacttcctgattcaggtacccgccctcacatactctttttccaacttggctctgatgatccaagggtccctttgccctgcct

SEQ ID NO: 134950 - DNA, 122 bp, Homo sapiens
gcccgggcgcccagcctccctccgcgccgcgggcccccgcactcccggaaccgggggcgacgtgtgtgccctgcatgcaaaagttcacgtcgccttgctgggtctttgactttgcacccggc

SEQ ID NO: 134951 - DNA, 122 bp, Homo sapiens
gcgatgctaggcttcctcagtagagggcgccggaggacaccgcagctggaggagggtttccgccggttgtgcggggaccgcggctcagtagtgtgggtggacgaggacagcgggtggaactg

SEQ ID NO: 134952 - DNA, 122 bp, Homo sapiens
ttgctgcctggacacctttcttttgggagctcaaagcaagtgagctcacctacctgccaccgcccaggaccagtctgcccactgcctaaatgatgcccggccagcaggacctggcctgcaga

SEQ ID NO: 134953 - DNA, 122 bp, Homo sapiens
tgggcacaaggctcaagcacagggaccgccggccaggcacacatgtgtatgggcaagacccgcaggggacgtgtccctgggaagaatgcttcctttggttgaaggctgtaaactcgccctgt

SEQ ID NO: 134954 - DNA, 122 bp, Homo sapiens
aaaaaactttttttatttccgcaaactaaaatcaacaagcagaaaaataccccaggaagtcggcctccgggccagccgggcttggcgcagtgctgcgttttgcctgtaaaccgaaactgcga

SEQ ID NO: 134955 - DNA, 122 bp, Homo sapiens
ttggcatctggatcaggactgagtcaagcctcccacattctgcagcagctcagagaaaagcgctagaaattactggagctgtgggagagacgggagcctgccccgcagccagatacccagag

SEQ ID NO: 134956 - DNA, 122 bp, Homo sapiens
cagcgacttgtcctccccgggccgggaggctgtctcctcctgacaaggggccccagtggtcggggccctaaaccagctgtggcaaccgcccaccactggccaaatggaacgctcctcacgtc

SEQ ID NO: 134957 - DNA, 122 bp, Homo sapiens
tgttgttgagtctgatggccaatttccaggcctggttctccctgactttgcgcaggcatccgacctgctgtctccctctcctcctggaagaagctcggccccaggacaccacactcgcctgc

SEQ ID NO: 134958 - DNA, 122 bp, Homo sapiens
gatctgcccccaccccaactccacgggctgtgagccaaagcctccttcggtgactgcccccgcctccacccggagcctccctgcgccttggaggcctcccagcagcgctcttgagttcttcc

SEQ ID NO: 134959 - DNA, 122 bp, Homo sapiens
ccttaattcaggccactattttcatccagatcagttaccactatcttctcacatgtcttccggcctcagttgtgaccccctcaagttaattttttcattctgccaccagaagattcttaaac

SEQ ID NO: 134960 - DNA, 122 bp, Homo sapiens
ctgtgcagaggcagcacatacctcacctggggtggtgagtgtgctttattttaatcaagccgagtgtattcatagcttttcttcttggtgtccttgtgctttcagtctggctttctcatcct

SEQ ID NO: 134961 - DNA, 122 bp, Homo sapiens
gtagtgaaggtcacagattgcagggacacaggaagttccagggcacccaactgcagatatcgggccatagcgagcactagacgtgttgtcattgcctgtgagggtaacccacaggtgcctgt

SEQ ID NO: 134962 - DNA, 122 bp, Homo sapiens
gagcctgcatgttgaaccgaaatgagttcacattttggtttattcaacactggtagcagacgccagaagaggctcaaacccaagacttccccagaacctctgcccttcctccacctcccccc

SEQ ID NO: 134963 - DNA, 122 bp, Homo sapiens
ggatgtttgcccggaatttaaacatcatctcccaaggaatgaaatcagaataggcaaaaccgacactttcccagttttcaagggtcaggtgcagctgcaaatagaagcagagattttctagc

SEQ ID NO: 134964 - DNA, 122 bp, Homo sapiens
tgcctctccctacgcagtgcaactgaccctgcctcctgggctagagatggctctgggtcccgggcgggagtaccgggctctgcagctgcatctgcactggggggctgcaggtcgtccgggct

SEQ ID NO: 134965 - DNA, 122 bp, Homo sapiens
cctgaagtcgccacggactcggggcaacaggcagatttgcctgctgagggtggagacccacgagccgaggcctcctgcagtgttctgcacagcaaaccgcacgctatggctgacagccggga

SEQ ID NO: 134966 - DNA, 122 bp, Homo sapiens
gaagtctggttggagaagaacctgcatctcattttcccctggccacctcattccctccttcgtggcaactcaacaacacccccagggacccagaaggctctggggttgactgaaaactcctg

SEQ ID NO: 134967 - DNA, 122 bp, Homo sapiens
gcctgggcgggggcgggggcgggggcgctgctgcctgcgctctggcttctcaaccctgtccgagcctcttccaaccagcttagctgagagtgtgaggaaaggaccttgattgcccagcactc

SEQ ID NO: 134968 - DNA, 122 bp, Homo sapiens
ctgcaggcttcgctttccctgcgggctccatgccccggctgcacggggaggtgttctaggcggccgccggccagagcctttgagagtggaaccttcctcgtgttcaattagaggacccagac

SEQ ID NO: 134969 - DNA, 122 bp, Homo sapiens
acaggcatgagcatgctgccaagactggatggccccggctctgaaagaacaatagcaatgcgtttcgcactagcatgaaactttccgagggtacaaaagaaatgctcactctttcaagaaat

SEQ ID NO: 134970 - DNA, 122 bp, Homo sapiens
tgagtcagaggcaggtgctgcaaggtagggccgaggcgggcaggtgccctaactagctggcgccgaggagacccgggtgcggtgggctccaccgactctctctcccgcagtgttcgagcaat

SEQ ID NO: 134971 - DNA, 122 bp, Homo sapiens
gcccccgctgcgctctgctagctgtgatgcaggggttcgggggcaggaaaaatctcgacccgccacgcccgtgcggcaaacctgtcctaggttgagggggcatgaggcgcgcacaaccaggg

SEQ ID NO: 134972 - DNA, 122 bp, Homo sapiens
gtaatccatcattgaacttaaaaagacctgggttcaaatatatttttaatttacttggttcgtggctttgagcgagttcattaatctaatgggtcctcaatttcctcatacataaaataatg

SEQ ID NO: 134973 - DNA, 122 bp, Homo sapiens
aggaagcagcccaggtgtgcaggagccaggcttgggcagagggacgacgtggagggaatacggcatgggcaggccactcctgccctatccaagggctcctggtcttagcagcatctatcaga

SEQ ID NO: 134974 - DNA, 122 bp, Homo sapiens
gcgaaggccgagctgcggaaatctctcctttccatcgttggtggttgcctaaacaagatccggttcaaatggcaagagcccaacttctgtaagcctcctaggtcaatattttggttgaggct

SEQ ID NO: 134975 - DNA, 122 bp, Homo sapiens
tgcgcgccgccatctaggcaggctacctgagctctctgtgctcccagagtgggtgcctcacgcccggggcgccccgtggagtctccgcgggccccgcccctgctccgcccttccgccaccat

SEQ ID NO: 134976 - DNA, 122 bp, Homo sapiens
acactaaagtgtaagttctacaaagacagagatttttttgtgttctgctataagctacaacggtacttggcacaaaacaggcatgcaataaatatctgctaaaagaatgcagtgggtttaag

SEQ ID NO: 134977 - DNA, 122 bp, Homo sapiens
ccacgcccacccagaactccagctggcccgcaagcgccgggtgcagccccagttaccactcgcgcctctccgtccacacctccctgcaagctgagggagccggctccagccttggccagccc

SEQ ID NO: 134978 - DNA, 122 bp, Homo sapiens
gatcgacgtttttgtggttggccttcaccgattggctggagtttgtcgtccctccctcctcgtcacgcctctggctccacccctttgcacacaagatggcggcgcccagcggagtaggggct

SEQ ID NO: 134979 - DNA, 122 bp, Homo sapiens
cacatctagagtgcccctccagcaacaggcttcagctctgaggagcacacacagtgactacgaaaccctgcggaacacgcatctgggtagcagcagctctaatgactgttgggctcctctcc

SEQ ID NO: 134980 - DNA, 122 bp, Homo sapiens
ccccgagcccacgattctaacacgcagtggaggctgagagccttggctggggcgccctagcgtcaagctcaccatgtggcctttgcggcacgtctgcttctctctgcctggaccgctcgggt

SEQ ID NO: 134981 - DNA, 122 bp, Homo sapiens
atgtgccaagagagagaagagagagtgtaaacgatctgactcagtgagcatttgctttgtcggaggcaagctggtcttctgcaccaaaattgtgattctcatgttaaatcaagcagtgatat

SEQ ID NO: 134982 - DNA, 122 bp, Homo sapiens
ccgcctccaggtgctctgttgctgagccagacagtgctctggctcttgttctactctgcccgtcagactataagcctgtaaatattttccgaactctctcttaccagctggcttctcgtaaa

SEQ ID NO: 134983 - DNA, 122 bp, Homo sapiens
gagcaaaactcaagaaagccaaataaaagcatattcagcaaaaacaagaaactccacaaccgccaataccggagggtggagtcaccaccagtgtcggcctgagaaatgcagacacactaccc

SEQ ID NO: 134984 - DNA, 122 bp, Homo sapiens
ccgaagtgagaatggcttttctcggtcaattcctagttttgccaccatcatccttacacccgaatcctagtaagtctgttctccactgaactgagctgagtgcagctgacagcaggcacggc

SEQ ID NO: 134985 - DNA, 122 bp, Homo sapiens
aagaaggctctgggggcccaaggtagcctcctggtgcaagttaacattcattgtaaaacccgattcaggaaaaaaaaaaaaaaaaagaaagaaaaaaacccttcccttgctttcccctctgc

SEQ ID NO: 134986 - DNA, 122 bp, Homo sapiens
gccgtcctcacagccacctctcagagtgggtgcattccgaggaccctgccctgggcctggcgccccctccccatgcccgcgccgcttccaggaaaggcttatgctgggctcagcccagaggc

SEQ ID NO: 134987 - DNA, 122 bp, Homo sapiens
agatgtgctctgactgaggccctgcagggcatacgggtcatggaaggggtgctctgcccccggccagggctccccctcctacaggaagccgggggccttgctcctgcaagctgccctttggc

SEQ ID NO: 134988 - DNA, 122 bp, Homo sapiens
tactctggccaccttttgtccttagcctccagcagcttgttcctcaggagccagcacctccgctgggctcacagggtacactgcggcctcctcagccctccccgttctcctgctcctaaacc

SEQ ID NO: 134989 - DNA, 122 bp, Homo sapiens
ccttcggtggagttgtagtcaggagagggctgacatttgtctggctttgtgtggcggtcacgcgccttgcaagtaggaggtggccaatccttgatttaaaacgagagagcacttctgcttct

SEQ ID NO: 134990 - DNA, 122 bp, Homo sapiens
ggccggctctcctccgtcttgagggggcctcctcctccccacctaagtctcctccgcgcgcggtaatgctctgggcctcaggaaagaccgcgccccttcacgatgtctatttcttgcatccc

SEQ ID NO: 134991 - DNA, 122 bp, Homo sapiens
ggcatctgtgggagagaggagggtggtgccatacctgctgcatcaggcatcaaaatcccccgtcagttcccctgacccccacctccacgccaacatgcaggactagggggctccgagcctgc

SEQ ID NO: 134992 - DNA, 122 bp, Homo sapiens
aatgtggcacctgccgcattccgcacggagtcattccactgaattcagtaacaagccagccgcaatagagcccggacatccgggtctgtttggtccttcccgactcgctgaagcttggggca

SEQ ID NO: 134993 - DNA, 122 bp, Homo sapiens
ctctgcagggctgcgccaaggcctgcgtctgcggggcagcggtgcggtgtggggtctgtgcgctgagccccgccagggtttcttctagatgaagcccgcaggccttctctcctgcgcacgtg

SEQ ID NO: 134994 - DNA, 122 bp, Homo sapiens
cgacccggcggaactccttgtgttccttttcgcagcagcttcagtgtcctccggcctgagcgagtggagggtgacctttggtggaccccccttggaaacgagtttcaggggaattttttctc

SEQ ID NO: 134995 - DNA, 122 bp, Homo sapiens
gcggcagtggcctgggccacaggtgagggcagagtaaccagtgggaaggctgcgttttcacgaaggactcgggtgaagctgcagagctgcctttgagccctgactccttggcttcctgggtc

SEQ ID NO: 134996 - DNA, 122 bp, Homo sapiens
caccaggaagaatcgccgcactgagacggcgatgggggccaggaacatgaggttgctgagcgtgagcagcagtgtggccgccctctgctgggccaccgtctgggctgtgctgttgtccgtgc

SEQ ID NO: 134997 - DNA, 122 bp, Homo sapiens
ggataaaaacggggcttggccgaaggacttttatctgtcttggtcaccccggccaggccccggaagcagcagccagggatggtccttcctcacccacaggcgtgtgtcactgtggctgggac

SEQ ID NO: 134998 - DNA, 122 bp, Homo sapiens
gtcctggtcatttatagagagcatgtacccttggaagggaggtccattgaggagaccatacggcagaccagaagtctgcatcgtgagcatgtttattgagttggatagcatgcctccaaaat

SEQ ID NO: 134999 - DNA, 122 bp, Homo sapiens
tggaggggagagggtgacacttacgggtggagcatgcctccctcgccggcttcggggccgcgtggcccgggcactcattgctgtccagaagccagtgccctctgaatgcttctccttcgtca

SEQ ID NO: 135000 - DNA, 122 bp, Homo sapiens
ggggcgcggggacgcctcagacaaagagcgcgctgggtgcgcaggtccggcgggaggggacgcgcggggtggcggggttgagccgaggactcccccacccggagtacgcggggtggctctgg

SEQ ID NO: 135001 - DNA, 122 bp, Homo sapiens
tgacctgctccctctcaacgaggagctggactatggctttcctgaggctgggcccttccacgtggcctccccggagctccaccctctctaccactacaagacctatgtcggcggcatcctgc

SEQ ID NO: 135002 - DNA, 122 bp, Homo sapiens
cggtcatggagaaggcgggctcagtggacgaacggctttctgggagctggggaatgcttgcgtagcgtagtttcccagcgagccccgcgaggacttccggcgccgggagctcgcggcggaag

SEQ ID NO: 135003 - DNA, 122 bp, Homo sapiens
accttaatggaactcgaggtggagcttatgaaatttgtgtccaaagtgcggaatcttaaacgtgccatggcaacaggtagtggcagtaacctcaggcttcgaaagtcagagatgcctgcaga

SEQ ID NO: 135004 - DNA, 122 bp, Homo sapiens
catggctgtaggcccgcccgggaggccgcgcggccgccggcaacttccgcgcccgggccccgccggctgccgcccttcccggaactttccccggtgcgccccgcccacccacaacagcccgg

SEQ ID NO: 135005 - DNA, 122 bp, Homo sapiens
aggagttacgtctaatgagatgcgtatgtttagcctctaggagttacgtctaatgagatgcgtatgcttagcctctaggaggtacgtctaatgagatgcatgtgttcagcctctaggaggga

SEQ ID NO: 135006 - DNA, 122 bp, Homo sapiens
ttcacatgcccttctcccctgtgtgtctacgttcaaatttccttcttataaggacacatgcgagattggtcaagtgtgacctcatcttaaccaattacattgtcaaagaccctatttccaaa

SEQ ID NO: 135007 - DNA, 122 bp, Homo sapiens
ggaagtgaggtacagaagcgatccggtcgtttaccgctccgcatttgccttatgcaacctcgtggcaggccagttttccctgacaaacacacaaacaggcctgcatgacagtcacacagaca

SEQ ID NO: 135008 - DNA, 122 bp, Homo sapiens
tgtccgcgtgcagcccaccccgcccacgggccccttgagcctccatcacagttcccaacacgcacctaccccacaaatcctgcccaaggtgagggctggacccgggtcctccggctgccgca

SEQ ID NO: 135009 - DNA, 122 bp, Homo sapiens
agctgatggatgtgggtctgattgcaattcggtgatgacttgttcatccccccttcccttcgccctcatgtggaaagaggagctgggaccgcggcgagcagcacggagcggaagggagagca

SEQ ID NO: 135010 - DNA, 122 bp, Homo sapiens
aacatgagaaagacatccctggaaccacaagttaattcactgaattagaattaccctaaccggccaggcgcggtggctcacgtttgtagtcccagcatttcggaaggccaaggcaggtggtg

SEQ ID NO: 135011 - DNA, 122 bp, Homo sapiens
acatacaggaaggtggccattcggtctaggaccttcactgagtgaacgagctgctggaggcgacgggagttgatgaggccaccaaacaccgtagacacggagatgggaagggaaaactaggt

SEQ ID NO: 135012 - DNA, 122 bp, Homo sapiens
accttttgggctcaggcaattcgccttcctcagcctcctaaatagctggtactacaagtgcgggccaccatacccagctaatgtttgtattatttgtaaacatagggttttgccatgttgcc

SEQ ID NO: 135013 - DNA, 122 bp, Homo sapiens
attttaaattcctcgctaatctcatcgatgcatgagccagaacacctttgtggataaaagcgttctatagagagggtaactttagtaaattttctatttaagagacagacctaactctgttg

SEQ ID NO: 135014 - DNA, 122 bp, Homo sapiens
atgaaaaacccggaatcaaggggcccagcagtgtaacttacattatcgccttgcatttagcgttgccaccaagcatgagtattgtccccccagttggatggccaggcttccagagggcaggc

SEQ ID NO: 135015 - DNA, 122 bp, Homo sapiens
tcggccgggccagcaggtgtcggcggtggctgcggccaggctggccctggctgcctgcggcgcgggcgcctccctcgcagccgctgctgccgacgccgctgcgctcccgcctcctgtcggtt

SEQ ID NO: 135016 - DNA, 122 bp, Homo sapiens
ttctcttaccgcccaagctcactaaccctcttaaactctctaagtaagtttcaaagcggacgaaaaaggaggacggaaagacaaattgtgggcgcctatggagacagaaaaaaaaatctatc

SEQ ID NO: 135017 - DNA, 122 bp, Homo sapiens
tggggccgagcttagctggattgttgtgtctgcggcttcaaccctggccatgggcccagccgcaggggctgcaggaggaggccaggaacaaagctgggcaggagccagagtgggggccccag

SEQ ID NO: 135018 - DNA, 122 bp, Homo sapiens
ccccaccctgcggcgttgcccgggagaccagggttgtttaccagcaggacagagcccgggcgcaggcggcggatggagcggaacggctaggtgagagcggctgcccgatcccgcggcctgcc

SEQ ID NO: 135019 - DNA, 122 bp, Homo sapiens
tccagagagcacaacccgcgtcctttctctcagccaggctgcagtggctgccccgagcttcgctttcgtttcccaagctgttaataacgatatgtccccaaatccgaggctcgtgtttgctc

SEQ ID NO: 135020 - DNA, 122 bp, Homo sapiens
ccgcctccaccgcccgagccccggcgcctccatcgctgcgcgtgggggaggcgcggagcgcgcgcaggtcaccatgactaagcagagccgggcgcccgccgtgtcacaataaaagtccccgg

SEQ ID NO: 135021 - DNA, 122 bp, Homo sapiens
agaggcctcggggcggttccgggaaggccatgtggcttcctgtgcacgtggacagccatgcggccggttccccagtgaagacgggagtcgggggacaggagggtggcagaggctctccaccc

SEQ ID NO: 135022 - DNA, 122 bp, Homo sapiens
attcttttaagataaatttagaactcatatctaacagctggcatgtctggcatggggctccggctggggcgcagtcttcagcatttggggctctggggtgcagggggcagaggacggccggg

SEQ ID NO: 135023 - DNA, 122 bp, Homo sapiens
ttccctcctcaaacccctccccgtttcccacaccctggacccctcgctccgtctcggccccgccccaagcccagctccgtctcggcccctgagcccagccccgacccacctcccagtccctg

SEQ ID NO: 135024 - DNA, 122 bp, Homo sapiens
tgcgtggttcccggtggttgcgctccccgtttcgtcccctccgtgagcatcggcgcttaccggtattttaacccgagggttacacatctgaggcaatgtgggtgggttacgcgggagaggac

SEQ ID NO: 135025 - DNA, 122 bp, Homo sapiens
gagcgcacagtggtctcacttcctcccatccaggcctccaattcctaccttccaggcctccgacccctgcaccatgttgcaccagctgaagcccctgccgcccaccgctcggtggaggatgg

SEQ ID NO: 135026 - DNA, 122 bp, Homo sapiens
ctgcgacatccagttggtgaccatggccatggtgctcagcacggccccgatcttgagcagcggcaccgacatcgcgcctccgcctcatgccccgcggccgcccgccgcgcgtcccttctctg

SEQ ID NO: 135027 - DNA, 122 bp, Homo sapiens
gcggcctcctccccccgcctcctcgtgcgctcctccctgcaaggtggagtctggggttgacgtgagtgaatccacatggtacagggctggagaataaagagtgtgagttgaactcgtgccat

SEQ ID NO: 135028 - DNA, 122 bp, Homo sapiens
aatgcaggaaaatgagtttgggctgcagtgaagaatctgcgctgtaacggattaaaatcccggggtggagagacagacaaagcggcaggagagcatgggcagggctcagaacgagagcaggg

SEQ ID NO: 135029 - DNA, 122 bp, Homo sapiens
tgctgggattacaggcgtgagccactgtgcctggcccgtatcctgcatcttgtcattacccgcactccatctctggaatacttatccattgaggatctactgaacatctagtaagtgccagg

SEQ ID NO: 135030 - DNA, 122 bp, Homo sapiens
tggctgaaatcttgaatcctttattgctttaaggcacagaataggaaatggatggcgcgtcgggaatggatgcaggtcagggacagaccatcactcatgccaccttgctgtgtttatgaaac

SEQ ID NO: 135031 - DNA, 122 bp, Homo sapiens
tctcttggaagacggatgccgtgtgcacgcaaagacggcagccagctcctcacagaaggccgcccggctcagaacaggtcccttcagccggctcagcagccagtgagaagcaacagcaaacg

SEQ ID NO: 135032 - DNA, 122 bp, Homo sapiens
ctgccgccggcgaatgcgtcgcagtcaagacagcgcaggggcctgggctgccgggcgctgcgcgtgcccgctttccgctttattggcagagtccaggcgcgcccggaggccgtggcgctcgc

SEQ ID NO: 135033 - DNA, 122 bp, Homo sapiens
cgttctgggccccgcccctttccctctctgccggcagtggctcacgtgacctcgcagcggcgtcgcacacactccctagctccgaggggcgaatgcccacgccttcctccttccggcacaag

SEQ ID NO: 135034 - DNA, 122 bp, Homo sapiens
gtgagctcagggacaggttctgcccagaacggcattgaccctaccgttgtctgtgatgcccggattaagcaggatgccctagacttctctgaccttcctctgtaggtgatgggcagtagggg

SEQ ID NO: 135035 - DNA, 122 bp, Homo sapiens
agtttcccctactcaggtcttgtgtgacctcaactaccatctcctctaatccagcagtcacggaggcagctgctctgtattcctgaggaggaaactgaggctctaagaaggagacaatcggc

SEQ ID NO: 135036 - DNA, 122 bp, Homo sapiens
tccagatgaacgcttgtcaccaaaccgagtacagatcgtcttaccttttgcggggcggagcggggtgggggatctgtatctgcccagtttcctggaaggatgttcctccagaacttgtgggt

SEQ ID NO: 135037 - DNA, 122 bp, Homo sapiens
gggaaccccagctgatgctttttgtggccgcacgaaaaaatacatacaggaaaacacgcccgcatcaagccgggaaagagcaggtaggacctgagtggtttggttgggggagggggaaaaag

SEQ ID NO: 135038 - DNA, 122 bp, Homo sapiens
cctccatggctccgtctgtggtcactgtccctgctctgcgtggagtgaaggcgtgcgtgccgagtgtgagcgaggcttcttctcagccctggcgtccacaggcaccattccggctcatctcc

SEQ ID NO: 135039 - DNA, 122 bp, Homo sapiens
cccgctcgcgtccttctattgacctgtcagcgcagctggcgcaggcaagggccagggaggcgcccccgagacactcaaccatccccgcactgatgcgggcccctgctgccctggggacccct

SEQ ID NO: 135040 - DNA, 122 bp, Homo sapiens
cagtcccttaacgtgtctggggcatgtcgctgtgtccgtctgcgtctgtccgtgtgtccccgtggtgtgactgtctgcgtggttgtttctctgtgtggccccgtgggctgctagcccctaag

SEQ ID NO: 135041 - DNA, 122 bp, Homo sapiens
gggcccggcggggctgagcctgtgcgtcctggggtcgggcctggcggggctgagcctgtgcgtccagccaccgggcccggcgccctccctctcccacttcctctcctgtcaggaaccagccc

SEQ ID NO: 135042 - DNA, 122 bp, Homo sapiens
tccagcccttctccatccactgatttcttttctttcattcattcaacaagaaattattgacgggcttcctgtgccaggcacaggccaggggctgggtggcaggcagaggggcagcctccagg

SEQ ID NO: 135043 - DNA, 122 bp, Homo sapiens
ttcgggctcctccctcccaccactccccaacttcccctagcagttgcagggaagataggacgagtagcttctgacatgtgtgcctcagatctgttccaccccactcacagtggttctgtttg

SEQ ID NO: 135044 - DNA, 122 bp, Homo sapiens
gcccagggccccaagtgaagctgctcgcagctggagtgagaggcaggtggcggccggggccgaagccagcagtgtctaaacccccggagccatcttgctgccgacaccctgctttcccctcg

SEQ ID NO: 135045 - DNA, 122 bp, Homo sapiens
ggaggcggagggactggtgggcctttccggagctgtgggtcggcggcgggtgaggggccgcgcgggaaggcacagcagagcacggggtttgggggagacagacagagacaaagccacggtta

SEQ ID NO: 135046 - DNA, 122 bp, Homo sapiens
ccacccgcctcagcctcccaaagtgctaggattaaaggcgtgagccactgcacccagccacgatttttgttgagattaggaaacaaaaccaagtcagaaggagccaaattaggactgtaagg

SEQ ID NO: 135047 - DNA, 122 bp, Homo sapiens
agcaatgcaatggaactataagatgttacattaagaatcaagggaaaaaatctgtaataacgggcaaggaatgttagttgagaatctagaataaggaatatcattacagttttgtgaataat

SEQ ID NO: 135048 - DNA, 122 bp, Homo sapiens
gagaccgcttggcgcctcacttagagcgcgacccggggatgtgggcggagtctgcggctgcgctgaccaatcgagtgtggcgtccatcgactggcgtctgccacggcaattagcgacgcgct

SEQ ID NO: 135049 - DNA, 122 bp, Homo sapiens
cacatatgcaccaccatgcccggctactttttttacccttggtagagaggggtcttgccacgttgcctaagctggaaagaatgatggttttaaaaacataacaggtttttctctggcttaaa

SEQ ID NO: 135050 - DNA, 122 bp, Homo sapiens
ggtccacacaggccaagctggtccatacctggttttcaggtcattactactacacatctgcggggcaaagagaaattaagtggcttgcctaaagtcacacagcttgaaagtgggaagctcaa

SEQ ID NO: 135051 - DNA, 122 bp, Homo sapiens
gggttgccaccatttgtttactcacctgagtctctctgcctctagcctagctgtgctccccgctaaggtaaagaggtggggtagccttgctcggccaatgagctgccgtcgctctcttaaag

SEQ ID NO: 135052 - DNA, 122 bp, Homo sapiens
tcaagaatgcaatatcatataaattttttgtgatcagtagtcaagttggacttgttttaacgttctgctgcttgagttgcctgatgctcagagctttttggtttggattactattgcaaaag

SEQ ID NO: 135053 - DNA, 122 bp, Homo sapiens
gaacacgactcccctaggagacagacacgctgacgggcttgagcattcacaaacagatatcggatgtctgctatgtgtcaagccctgtggtagacaccgagactcattaagtcagtgcaaaa

SEQ ID NO: 135054 - DNA, 122 bp, Homo sapiens
catatgtacacatgcatatactgcatacaccagacacgcatatactgcgtacaccagacacgcatattctgcgtatgccggacacgcgtatactgcgtacgccgcacacgcgtatactgtat

SEQ ID NO: 135055 - DNA, 122 bp, Homo sapiens
tccctcctgcaatgactgcccaaggactcttgctgcccagcctcgactgtgacctgtcttcgctccccaggtcgaaatgaactattccaagctataaccaaggctcccccttctcgcccctc

SEQ ID NO: 135056 - DNA, 122 bp, Homo sapiens
ccctcccctggacccttggggttgggatctgtgtgcactgggggattcaaacagctcccacgctgccggaatgcactcaagtggagcaaagcacccatgctgagcagctgaggctgcactgt

SEQ ID NO: 135057 - DNA, 122 bp, Homo sapiens
tgtgtgcccccgccccctgacccctgagtgacagccatgcaggagggcacgtggttgagccgagctagcttcccagagtgggttttcccggcggggatatttgcatgtaagaggaatttgtt

SEQ ID NO: 135058 - DNA, 122 bp, Homo sapiens
ttgcctagaagcaaataatcccacactacaggggtggctgggttagaaatcctccatgaccgagtgcaagcatgcagaactttctgaaagggctgagcttcggatctccagaatagtcatag

SEQ ID NO: 135059 - DNA, 122 bp, Homo sapiens
aaacccatcttttgttctcctatatcctccttcttctgttccatttcagttcagtttcagcggtgccaacctctttgcgtttcctttttgttgatgaggacccagagctgctgcacacactc

SEQ ID NO: 135060 - DNA, 122 bp, Homo sapiens
agggctctttggggccaggggtcatcaggtcctcctgtcccatttctgcctaggctgtgtcgtccagctcacagcctatatgcccagggttttcttcatggcttcgtacaccacatagctga

SEQ ID NO: 135061 - DNA, 122 bp, Homo sapiens
cgctcccttcgcttcccggtgtttcaggctcttcccaccgcctgtttgctctgggcgcagcgctggctgccacacttgcaagttaggaagaaaatgacttctttagaaagtgggggactctg

SEQ ID NO: 135062 - DNA, 122 bp, Homo sapiens
cgagccaataaattcctttaaattgaagccatttgaaatttggcttctgtcactggcagccgaagagtcctgactatgacaagcaaatctgaaaggatgaggcatatgtctagtatagcaat

SEQ ID NO: 135063 - DNA, 122 bp, Homo sapiens
cctgggattgcaggcgcgcaccgccacacctgactggttgtcgtattttttggtggagaccgggtttcgccctgttggccgggctggtctccagctcctgaccgcgagtggtctgccagcct

SEQ ID NO: 135064 - DNA, 122 bp, Homo sapiens
ccctaggcgacagcaagcggaactgcagcaagctcccagtaattccgggtgctgcacttccggtcaggcggtcgggctgcggggccctggggccagctcaccgccggaagtctccgcgtccc

SEQ ID NO: 135065 - DNA, 122 bp, Homo sapiens
cagagagtggcaaaactgggaattttgccaagggaaattactcaggaccgctaataaaaacgccggcttctgcaacatgcatattcccccagcccccacctccatcttgcccagggcagacc

SEQ ID NO: 135066 - DNA, 122 bp, Homo sapiens
aaatgccgcccagtccagcctggactgcgggcggggtggcaaggctgagtgcgggcgaggcgctcgcttcgcgatggcgccgcctcctccactgcgcccccgcctccctgagtgcctggcag

SEQ ID NO: 135067 - DNA, 122 bp, Homo sapiens
gcatgctgggacttgtagtttccctctgggggggtcgcctgattggttgtgagagttcagcgccctgggtcctgcgccctccgtggaagctcctcccagcctaatgatggaggctgggcaac

SEQ ID NO: 135068 - DNA, 122 bp, Homo sapiens
gccgaggatggggtctgcgaccgcctccccgcacctgagcttctccgccccagcctgcggcgtctgcaggtcctacaaggcgcagagcccccgctgcacctgcaccgaggccacggggcgca

SEQ ID NO: 135069 - DNA, 122 bp, Homo sapiens
tgccctccactcgggaccgccacagaaaaatcgggggtgcgtgcagcgtcagcacagttgcggcgcgtgtttttatcatgctgggaacacgctgctcctgggagtgataagcattaaaccgg

SEQ ID NO: 135070 - DNA, 122 bp, Homo sapiens
cgcgcccagccgtagggaatgtctacctgcgcatgcacgtggcactctctgaccgaggtccggggactttcccctaggcggaaggatcttatcagaatctccatgccccaccctataccaaa

SEQ ID NO: 135071 - DNA, 122 bp, Homo sapiens
atggaacaggagcgaggtcgcctgtatcctccgggaaatgctcctggaggtcagggcagccgggtgagcactgggtccggctgctctccccagcttctcttctccagtcagccaacccagcc

SEQ ID NO: 135072 - DNA, 122 bp, Homo sapiens
taaacgccggagggttctgtggagcctatgggactgactggaggccaaagaactttgggccgcagatgtacaccagcgtcactcttttggtctgttagggccttcatcgctcacatcaggtt

SEQ ID NO: 135073 - DNA, 122 bp, Homo sapiens
ccgcgcgggtgcgaacgcgaggtctttcctgggtgctcccaggtcggaggattcccagggcgggggccatcagggtggcgaggaaccggcagggaccagcctccgctaggaccgcgctcgtg

SEQ ID NO: 135074 - DNA, 122 bp, Homo sapiens
actacaaagtctggcgcccagcagaggttaggtgtttaaagttaggacctgaatgggttacgttgcgatacacgatcaaacatcgcccttataagctctgtggtatccccgagccccactcc

SEQ ID NO: 135075 - DNA, 122 bp, Homo sapiens
cgtccggatgcgctggccccgctgctgctgcgcgggcgtcccgggcgggcccttggcaaccggctttctgcactggacgctgccgcccagagagctgctcatcgacgtttgggagagaggga

SEQ ID NO: 135076 - DNA, 122 bp, Homo sapiens
gtagcattctagggagaggaaacggtagaagtaaaggcttgggcaagaatgcgcatggcacgttgtagaatggaagagccatccggttttaatggagcactgacttctttaacttacaatag

SEQ ID NO: 135077 - DNA, 122 bp, Homo sapiens
ctgggccctgacacctgggatcacaccccgtcctgagcaggccccaagtgttggaagctccggagctggagagccaggggaaggcctggagtgtcagctaaagggaggccgcctggagagtc

SEQ ID NO: 135078 - DNA, 122 bp, Homo sapiens
tgagattccagggcagctgcaggctgcacaaacatacttcaagcattggttaaaaggaaacggagaagcagaatggtcattaagcacctcagaggggaatttgccataaattctcagccttt

SEQ ID NO: 135079 - DNA, 122 bp, Homo sapiens
tgggggtgaggggctggggcgctgggcctgggcgtgcatgtgtgaggaaagagaaatctgcgcgggtgtggaagatggagaagcctgtctttctgcaggactcagaactttcttaggaagtt

SEQ ID NO: 135080 - DNA, 122 bp, Homo sapiens
gaaagtctggtctgattcagaagaaatgttacaacaacttaaacactgatgctttcagaacgggcagcaattctcagcgtaaattctgatcacagggaccagcaaaattggtgagttgcata

SEQ ID NO: 135081 - DNA, 122 bp, Homo sapiens
ccccagaccggatcccccagatcctcaacatggcctcagaactggagttcaacttagagacgatgccccggatcaactgtgcagctgcagggaaccccttccccgtgcggggcagcatagag

SEQ ID NO: 135082 - DNA, 122 bp, Homo sapiens
ttgccattttaaacaaatcaacacttgcaaaccatgtccctccctgccctatgattgccccgtgtaagcttttggttacaaaaagccctcagaacaaaaaatgcaggccagttgtaaagcct

SEQ ID NO: 135083 - DNA, 122 bp, Homo sapiens
ggcgcgcgcggctcagagggttggcgaaccggtcgcgcgcgcggcgccgtgggttggtggcgcgttttgggaaagtccagttttaggggacccaagggactccgtttaccccacaggaggag

SEQ ID NO: 135084 - DNA, 122 bp, Homo sapiens
gtcttgtcaataccaagataagggatttgatttatgcttaaaggaagtgagggagtgaaccgtgtggatataaggagagagcattatgagtacagtcagcaaccaataaaaatgctcagtgt

SEQ ID NO: 135085 - DNA, 122 bp, Homo sapiens
cgggtgcgttccctactgtagggagggagccctctgtgagcggagtgggtgccgatccctcggctgaacccttggggtccttagggaagttcagtgccgtcccccaccacttgccccagccg

SEQ ID NO: 135086 - DNA, 122 bp, Homo sapiens
ctccgcccagccacactccttgggataatactagccggttctgcctgattccttttcccccggagccagcctagggggcccgggactcctctagtgagccttgactgttaggtaagagacag

SEQ ID NO: 135087 - DNA, 122 bp, Homo sapiens
ccaccctacgccctgcccccgcggagcacaagccccgcctgcgtcccgagctcccgggtccgcaaagctgggccccaaagagctccaacgccggaaccaaggagcacggaatgccgggaaca

SEQ ID NO: 135088 - DNA, 122 bp, Homo sapiens
agtacattgaaatgttcaccaacaaccttaatcctttcttggggaagataatctgcagggcgggttagtcatgaattactccaggttctccaagagctagcattttatcgtattagcaccag

SEQ ID NO: 135089 - DNA, 122 bp, Homo sapiens
tgggtcgcccccaccggccccatggcagcccccggggccccagctgagtacggctacatccggaccatcttgggccagcagatcctgggacaactggacagctccagcctggcgctgccctc

SEQ ID NO: 135090 - DNA, 122 bp, Homo sapiens
gatctgtgaatgggattaaggtggacaagatctcctaagatctgaaaagaaaccttaatacgctcatatggttggagtgttaagtgaacctctgattttgtcagggtttttctacgtgtagg

SEQ ID NO: 135091 - DNA, 122 bp, Homo sapiens
tgcatttgtgctctctcaaatcctgtcttagtcttaggaaaggaagtaaagtttcaaggacggttccgaactgctttttgtctctgggctcaagttagagaaccttgcaatcctcaaagatg

SEQ ID NO: 135092 - DNA, 122 bp, Homo sapiens
ccattagcaaatgttgtctcctctacttccagaatccctctgaaatctacgcactttgcccgctgtggttgactacagcctccctcccatcgagactgccatcatctactgtctggacaatt

SEQ ID NO: 135093 - DNA, 122 bp, Homo sapiens
atccttctggctgcttgcttctcctgttggagctctcgctcaccttggttctcttggtcacggaccagcatccagacatgcaaaaagtcctactgggaggagagggccatcacccacagtcc

SEQ ID NO: 135094 - DNA, 122 bp, Homo sapiens
ggacccaggatgcagggtgggaggctacagctgttggccaccccagctgactgccactaacgccagaggcgcagctattcagaaagatatatggactgagcctctacccaacatctcttctt

SEQ ID NO: 135095 - DNA, 122 bp, Homo sapiens
gaagtagagatggaaatcattaggcgcattaacccagacctgaccgtggaaaatgtcatgcggcacaccgcgctcatgaagaaactggaagaagaaaaggcccagaggagtaaagccgggtc

SEQ ID NO: 135096 - DNA, 122 bp, Homo sapiens
gtggagccccatggagcctccggtgagaactcaccgcagctgacacccgattctgggctacgcagagaacccggccgtgcgggaagtccggcctgcaggtggggagctcatccatgccctgg

SEQ ID NO: 135097 - DNA, 122 bp, Homo sapiens
ccatgttccattccagttctggtggggcctttccaagccatacacaaacacatacacacgcggatgtaccccatggagtcacatacgaacgcacgtacaccacagccacgcatagtcacagg

SEQ ID NO: 135098 - DNA, 122 bp, Homo sapiens
gcaggagggaccgcacacgggacactgtcccagtcgcagccccaggtgcctggaggagggcgtcccagtcagccccacccagccgcagacccccggccagggtgcccttcccaagcgtcggt

SEQ ID NO: 135099 - DNA, 122 bp, Homo sapiens
aggtgagattcgggctcacagagcccgagcttttgtcctgcaggctcaagcttctagattcgtcttctcgttaatgcggggacggaccactgggcgctgcctggtcagagctggttgtgaag

SEQ ID NO: 135100 - DNA, 122 bp, Homo sapiens
gaggcggccgccctcccccaaagaaaaaactggctgcttctaagtgcgaagccggctgggcgggctggtgccagaaagggtgtgtcttcactgccctaagatggcctttaaggtatactttt

SEQ ID NO: 135101 - DNA, 122 bp, Homo sapiens
cgtgttgaatcctgggctctcccgacagcgtcttcgtgcactgtgtgcagagggagcccgcgtcatgcacagcagggaggggagggttttctgtggagtggaggggggaccattcccggagg

SEQ ID NO: 135102 - DNA, 122 bp, Homo sapiens
ctcctgctccacttcccccgaaggcctttattccacagattggatttgaattttccgccccggtagctggcggggagccggcctcgctgaaggtcagccgttcccgggtgcgtccccgcgct

SEQ ID NO: 135103 - DNA, 122 bp, Homo sapiens
gggaaaacacctcacccgggcttcactcacgctccggaagacagggagtgagagagggtccgaagaggctgaatgacaggcggcctctccaatgccgaagctcagaactggtattttttaaa

SEQ ID NO: 135104 - DNA, 122 bp, Homo sapiens
acgtgaagccctcggtagtccttactgacatcatgtctcctttagactttgattacactccgtgtccttcatctgactcctctcttcagattcctgagtcacgctctgtttatgttgctgtt

SEQ ID NO: 135105 - DNA, 122 bp, Homo sapiens
gcagtttgctgggctgccttgatttaatcaatcagagccctgtggatgttgagaggaacacgacggcgtcattgactgagctaatctaactggatttgaaataggagctagaagatgggtta

SEQ ID NO: 135106 - DNA, 122 bp, Homo sapiens
caggggaagaggctctcaaaacagcaggagatgggagcgcgctgtcccggaactgttgtccgcctccctctgccatccaggtgcccgccaccaggtcccctctgacaggctcctgatgcttc

SEQ ID NO: 135107 - DNA, 122 bp, Homo sapiens
gaaaggtgggagaggaagggtctaaggaggagggcgtttcccgggagaacgcccagagctcggctcacctggcgatcctaattacaggggagtttcacccccacattcttgggcgctttctt

SEQ ID NO: 135108 - DNA, 122 bp, Homo sapiens
ctgatgtcactgtgccacctgggagggttttaatattgttaataatacagtaagagctggcgaattttcagaaatggcttgctgtactgataaagaaaggattgcctttcttgtccccaagt

SEQ ID NO: 135109 - DNA, 122 bp, Homo sapiens
ctccctcaggaaacgtgaagctaagtactttacaaacctgttcattgtctttgcagttgacgagccaggataaaacccccgctgtgatccagagagccatgctgaagcacaatctggactca

SEQ ID NO: 135110 - DNA, 122 bp, Homo sapiens
ccggaggtcaggtgaccgcgggccagctggctccccattggcgcgcgcctcgcggcctcccgctcggtttatgtgcgaggagtgagtgattgactttatcagtccaaggacattactctgga

SEQ ID NO: 135111 - DNA, 122 bp, Homo sapiens
ttttttttttcccagtgtttcccggtgtgttcccgtctctctttttccagagctgctgagcgggccgggccggtcccactgcgcgggatgcagctcccggctcccactcactggccgaggcg

SEQ ID NO: 135112 - DNA, 122 bp, Homo sapiens
ttctcagcagatagctgcccgcccaaatgcagacagtgaagatgcttgtggcccttcccccggggctgtaagcccaaagaaccacctgcaaaaccaacaccctgaatcacgcgggcccacga

SEQ ID NO: 135113 - DNA, 122 bp, Homo sapiens
gaggtcgggcgagcagaggcctggaggttggacctggggcgcagggagtctgaagactcacgctgtagttggcgcacaccgggttgaaggcgttggaaccgcacacaaagagcgtggactcg

SEQ ID NO: 135114 - DNA, 122 bp, Homo sapiens
gcggggcttgtgggaacggcccaccgcagggttggccaccttgagaagctgcgaagatggcggagtaaggcgtgccgctgcaaactggcctctgggccgggggcgagcagcccccgggaggc

SEQ ID NO: 135115 - DNA, 122 bp, Homo sapiens
cgtgcccacgccacgctgctttccacccagaggggcaggtgctgtgaggtaaatgaggtgcggttgcctctccacaccgcggggctccaagcccctactgccctccagcagagcactgtggg

SEQ ID NO: 135116 - DNA, 122 bp, Homo sapiens
gggccaaagttaaatgcatggaaaatttgcttagagaaactgagcatcttgtcatgatcccgccaaagttgatttgggaataaattgcctattgctaaattattgttaggaaaatactgact

SEQ ID NO: 135117 - DNA, 122 bp, Homo sapiens
acatgtaggatttgcatggttttagtatctgtgtgacctgctgaggctgcacaatgccatcggagccaagatatcaggacaatcatcatccatcaggaagtcatccatggggtggttctgtg

SEQ ID NO: 135118 - DNA, 122 bp, Homo sapiens
ctgatgaccagagcctctgttcagccagaacactccagtggaacaccttgtgtccactaacgaggccttgccactaatttggcaaagaagtaaataatgtgttaaaactcagatgtcctaag

SEQ ID NO: 135119 - DNA, 122 bp, Homo sapiens
caataacacaccaagccctgtcgaatggtggggtccgccaggacctccaggcttgctccccgccctacccgccagcttctccgccacattccactgccgcagcagaaccggtgtccttcacc

SEQ ID NO: 135120 - DNA, 122 bp, Homo sapiens
caagggacttgggagcaactggcgattttgactgctagttacacagagcaacgctgcccacgtccctgcttcgtctgatggccagcggatggaaatgtatggtgtcggaattaaaggtaaga

SEQ ID NO: 135121 - DNA, 122 bp, Homo sapiens
ggcacccagaaaagtggcacagggtgaaggcaaactcgatcgaagagccctccgagaaatcgtacgttcctctcacttactttgagttggaaacgtcctctctggcgctcagtctgcctttg

SEQ ID NO: 135122 - DNA, 122 bp, Homo sapiens
aagaaagcgcagaaacagacaagggacacacccacagaaacatatatagactgagaaagccgggtgcgggtgggaaggtgagggtggtcagatgaatcaagataggttgggggagagggaga

SEQ ID NO: 135123 - DNA, 122 bp, Homo sapiens
acgtcaccgttgccgaggcgtccaggaggcgtgcaggaggcgtgcaggggtggccagctccgtggtaggaccctgagctgagtgtatccctgagaagcatggggaggcccaaatgcaggggc

SEQ ID NO: 135124 - DNA, 122 bp, Homo sapiens
cactcgcggagatctccctactcggtctgtccgccttccggagaccctcatttggggccacgagtaggaagacggaccggcctccactcacggtgcggcactgcttcttgcctgcattcagg

SEQ ID NO: 135125 - DNA, 122 bp, Homo sapiens
cagcggcggcacacggccaggcggtggcgagcggacaggctgcctaatggccaacctgggcgaggcgggcgccgcgccggcagctagggggaagtcggccaacaattgggccacctcctcct

SEQ ID NO: 135126 - DNA, 122 bp, Homo sapiens
gtgtggaagctgctgcactgagacctatttagccaattattgagaagatgaggtccctttcgtgagtctgcacggagccgccgtacaccatgaaagcgctcacttgtttaaagtttgctcta

SEQ ID NO: 135127 - DNA, 122 bp, Homo sapiens
cagcagggccgaggctgggaagtccgggggcgcggccggtccgcctggccccgcctgacccgactgtcttacttcctacagcaaagcgccccccaggtcgctgtcaatgggtgagtgtccgc

SEQ ID NO: 135128 - DNA, 122 bp, Homo sapiens
cagggtttattggacagagtcagttgtggggttcagagggtcagcaatcaatcaatcctccgaatccagagatttagacccagtcgtccgtattaggactggaggggggtcaataggttcag

SEQ ID NO: 135129 - DNA, 122 bp, Homo sapiens
caatggccctgtcgctttttcagcttcccattaattttccataaagagcagttttcttgacgagcgcttgtgtcaggcagggcctgatgcttcagaaacctgtaattattcttggctcccca

SEQ ID NO: 135130 - DNA, 122 bp, Homo sapiens
agggcaaaaaaaaaaaaatacttcctgaactaacatatgtttcacaagtgtgggcgcagccgggacaatttcgagacaacttcgagacaatttcgaatggacaaattgcggagaagttgctt

SEQ ID NO: 135131 - DNA, 122 bp, Homo sapiens
gacatgggggctgacagggcacaaaacaagttcagcctagaggacagcaaggtaatgctgcgtgctctaaggaagagggaggttacagggaaagatacagaaacctgtccttcttgcattta

SEQ ID NO: 135132 - DNA, 122 bp, Homo sapiens
caaaagcttcatatattctgaatgaaggcgaatcgcagcctcggcctccttgaaaagagccgtgagggagacttaattctctccctttcagctgtgctcagactgtgaaatccacacaatcg

SEQ ID NO: 135133 - DNA, 122 bp, Homo sapiens
ccgcaacacgccctacgatggggtcttcatagcgctgctggtggaggagggccacacccacgatatcctggccgccggatttgacggcatgtacacctactttgcctccaatggtttctcct

SEQ ID NO: 135134 - DNA, 122 bp, Homo sapiens
ccgtgtttaaaaataagtttaaaaaaaaaaaaaaaaaaaaaaaaaggcctgtaacagagacgcgactctccaaaatgccacacaggcaagtgggggccgcacagcccatggtttccagaaag

SEQ ID NO: 135135 - DNA, 122 bp, Homo sapiens
tggaggagtgggactctggggtaggggggtctggcagctgcctgggacccaccatgggttcgaagggcagcggccagaccgcgacggcgcccaagaagggtggacagcttcgggtctgtgct

SEQ ID NO: 135136 - DNA, 122 bp, Homo sapiens
acattaggggctaatcaattctagtatttgtgcagtgctgttctcttaacaaagcgtactcgttctcatctaattccttattccacacatgacgactctggagaccattaatcagggctcaa

SEQ ID NO: 135137 - DNA, 122 bp, Homo sapiens
aaatcagcctaagccccgcttccttttaaaacaggattacgccgggtcgagggagcctggcgtggccgcgcagtggccgggtcccgcggattcccctccagctcccgcttggtagcgcccgc

SEQ ID NO: 135138 - DNA, 122 bp, Homo sapiens
gtaagaaaagatatttgctacatatttgagtagttgatgtcctgttcagcaatttgcaatcgtagatgtgtctctttaaggcaaacttagtgtccctttagtttaagaagtacaaaaaatta

SEQ ID NO: 135139 - DNA, 122 bp, Homo sapiens
tgagtgagcatcatcagaggcacacaccacaccagggacccattctgagcacacggcacacgagacccccgggtctctgtcttgagaacttcagccaagtcaggtcttgacaccctcacact

SEQ ID NO: 135140 - DNA, 122 bp, Homo sapiens
caaaatggtgaaactgtaggtctctaccaaagaattttaactgtggggtccctgaaacctcgaaaagtgaaaccgcgaatatagggggtactactatatataaaagccaaaatgttttacta

SEQ ID NO: 135141 - DNA, 122 bp, Homo sapiens
cattcttttcaaggccccaagagcttacaggaatccctagtcaagtatggggccaaagggcgaggacctctacctctggccagagtcgggcgcccaagacaaagacattcaggggaacaggt

SEQ ID NO: 135142 - DNA, 122 bp, Homo sapiens
tccagcagcttagcacagcataaagtggaagcagaggaaatatagtccacactacaaaaacggaacctctacccagactgccctgacttgctctgggaccctgatggggtcacttgaggtca

SEQ ID NO: 135143 - DNA, 122 bp, Homo sapiens
ggggcgcggccctgccgtcctcacacccaccccggacacggagacgcggggcgagcggggcgccccttacacagcctgcgaggggagacccaggaggttttccaaacaagaggctttgctga

SEQ ID NO: 135144 - DNA, 122 bp, Homo sapiens
caaacaacgcttgctatttttctttggctctgttctcaaaaggcctctgctgggcattatcgattggacaaccgggccacagtcctcctgccaggcagaattcatcaaggcagcaccagcac

SEQ ID NO: 135145 - DNA, 122 bp, Homo sapiens
ggttccatctggctcgggccactctgacacctttagtttcggcaagggatattggggtggcgaaggggaggcgggggcccgaaggcttcggaaaacgatgggggagggggcagaggataccc

SEQ ID NO: 135146 - DNA, 122 bp, Homo sapiens
agggattggagtgtttgcagcctggggagttgcttctgtagttgaggagatctggagtgtcgccttctggatccgagtggccctgcttattcataaggatggaaatgacttggtatttaaac

SEQ ID NO: 135147 - DNA, 122 bp, Homo sapiens
gtaaaggaccatgagggtcttacaggctctgctgccacgactcaactctgctgctgtggccgaaatgcagccacagagactaggtgcacaggtgggtgtggctgtgccgggaaaactccatc

SEQ ID NO: 135148 - DNA, 122 bp, Homo sapiens
tatgggggatgagattgttgagcaaattgcggctactttcgctgaaagaatcaaagacaacgaagacgctgcgaagggccaaggtcttcatcacagatcggggttccctgacgggctctgac

SEQ ID NO: 135149 - DNA, 122 bp, Homo sapiens
gggacctgtgacgcccccccagccacaccagacgtgggagcttaggatgagagcggcctccgagcagatgatcaccctggaacgacgccaaacgcgacccctaccagaggactcgcgcatgc

SEQ ID NO: 135150 - DNA, 122 bp, Homo sapiens
accctcccagccgtcctcagcaggcagcacccatgttagtctccttctgcgatgcctaagcggcagcaccatcgagccaaggtcctccagcgttcctagagcggagaagaaagcgctccgaa

SEQ ID NO: 135151 - DNA, 122 bp, Homo sapiens
taaggagccccatctcccagggatgctggggaaggggtgcccatggctccacccccctcccgcaggtgggctgccagctggtacttctgagcatgtttgtcagtcttgaggtggagttggaa

SEQ ID NO: 135152 - DNA, 122 bp, Homo sapiens
tgctggagtatctgtaagagcccgaagcaggtctcagagggcactaggggcttggctagtcgcaagtggagcctggccttgggagatccctgggattcctaggtgcctgggctggggaggcc

SEQ ID NO: 135153 - DNA, 122 bp, Homo sapiens
gagttcgggctcactggggagtagggtgaaggaaaccctgaaaccgagaggctggaagcccgacttgcgcagcataaaaacacctgcagggggaaagcctacatgaggtacgggttgtcatc

SEQ ID NO: 135154 - DNA, 122 bp, Homo sapiens
acctcgcagtcctggagacagaagcctggtggctcacagagaccccccacccggggtccccggacaagtgccccctagtctcgggacaggccaagccaagctaccgaccggagcaagcggcc

SEQ ID NO: 135155 - DNA, 122 bp, Homo sapiens
ctcactgcacgtcgtgcctgcttgggatagagagcgaggccagggttctccgaggggtgccgtgctcagatcccgggggtatgtggcgggggatgcgggaaccacgcagaagcttgtttggt

SEQ ID NO: 135156 - DNA, 122 bp, Homo sapiens
tcataggtcagacactggctggtgagtgtggccagctgtgggcaggagggctcgggcagccggtgctgcctctggtagaaatgctccttctgttgggaaagggacccagaggagtcaacatc

SEQ ID NO: 135157 - DNA, 122 bp, Homo sapiens
ccccccgccccaacccagcggttctgcgcatgcgcgggggccatattagcagcggttattcggtgagcggtggtggtttattcttccgtggagttaagggctccgtggacatctcaggtctt

SEQ ID NO: 135158 - DNA, 122 bp, Homo sapiens
tggcagcaccaacctgggcttcaggagtctggaagatctgcaagatcttgggcaagaccccgaaactcctggggtctccatttttacctctgtaaaatgagaataatggcacctaatttctt

SEQ ID NO: 135159 - DNA, 122 bp, Homo sapiens
ccgtaacattcaaattggccaaatcaaggagaagctctcagaaaagcacagagcatgcatcgtcaaatctaaaaaactgtcaaagggtaatgaattattccccaaagctttcaggatctgca

SEQ ID NO: 135160 - DNA, 122 bp, Homo sapiens
tgtaagaacgtgggccagtcatttctctgcaacaaaagggtgggtccagctaaggagaaccgcttgtctcagaattacctagggagacttgggaatagagattcctgggtctcacccaggct

SEQ ID NO: 135161 - DNA, 122 bp, Homo sapiens
gcggggcctggaatgtaggggtggtgactgagggcgggccctggagtgacggtcgccgagcgctggctggcggcatttctgcaccagcagaggtcaagtctctgcccagcgccgggccaagg

SEQ ID NO: 135162 - DNA, 122 bp, Homo sapiens
tgtgatctgcccgcctcagtctcccaaagtgctgggattacaggcgtgagccaccgcgcccggtgatagatagcatttcttatcagagtctcttgccgggcaagaacagtcaaggcttgacc

SEQ ID NO: 135163 - DNA, 122 bp, Homo sapiens
tggcgaactgtacacaacctggagtcaggagacccatgttctcaccctgttctgttgcctcgggggccctgaagcccatcgctaagtgttttgggctccagtttgctcatctgtcaagagag

SEQ ID NO: 135164 - DNA, 122 bp, Homo sapiens
atgcatgaagggaggttttgcgaccccgtgtagtgtgactgggctggcttagtgagtgttcgccgcccctgccttcaggtggcagtcggctctgggaggagaggaccggcattttcgaaccc

SEQ ID NO: 135165 - DNA, 122 bp, Homo sapiens
taaaaatagtaatcagtaaatactgagggaactcagagaccacagagaccagagccagtgcgggtccttgcacattgagcgcaggtcccctggacccactgttctttctctatactttgtct

SEQ ID NO: 135166 - DNA, 122 bp, Homo sapiens
cctctctctggttaggctgcttcctggacagctagttggtgtgtgcttgaactaacctcacgctgaaaaagaggggcttttatagagctgcggcggagaaaagagacaaaaggagccctcct

SEQ ID NO: 135167 - DNA, 122 bp, Homo sapiens
agcctgagagtcaaccccagccagcgctctcctcagaagacatccgctcctgcctcggtgcgcgcacaatgcaggctgcggatcagaccctttacactgcgacggataaaagagggacacga

SEQ ID NO: 135168 - DNA, 122 bp, Homo sapiens
cagagtggagcaccaggagggagaggagcaccacggcaggaaggaccgggatcttcatggcgtcaagtttggggtgctctgaggcggggcctcagtgcttgctctttatattgccaaggagg

SEQ ID NO: 135169 - DNA, 122 bp, Homo sapiens
ctggcctcattcatttcactcgcgcgggcttctgggccaggcggcctaaggttctggtcccggcgctgccccttactccgtgtgaggttttgggcagattgtccttctttgtgctgtagttt

SEQ ID NO: 135170 - DNA, 122 bp, Homo sapiens
tcgcagcgacgactgcctgcggcttcaacatcctacagtgaaatgcccggcctggcctcccggggagtcggaaccataacattgtttgctccccaccatggcagggcagacgtgtgcttggt

SEQ ID NO: 135171 - DNA, 122 bp, Homo sapiens
tttttttttttttttttttaaacagagttgcactgtcaccaggctggagtacactggtgccgtctcggctaactgcaacctctgcctgccgggttcaagcgattctcctacctcagcctccc

SEQ ID NO: 135172 - DNA, 122 bp, Homo sapiens
aaccacacaactcactaattgggatttgtaagactggttctggtttttcttggtctgaaacgtggtatccagtcaccatctgccccttaaccctggctgatcttgccaaagttccctgtctc

SEQ ID NO: 135173 - DNA, 122 bp, Homo sapiens
cttgcctggcggcggccccagccgaccctgggctcggggaaaagaggtccgcgttccccccgcggcagctctgtttcccagcagccggacagcccccatttaaagccagccgcctccccagt

SEQ ID NO: 135174 - DNA, 122 bp, Homo sapiens
tcagtaaagttaaaggggtggaaaccgggcccccctccggaagggtccggggctgggaggcgcgtctgtctctgggcatgctcagtgcaggggcagggctggggcgggggtggctgaaagtt

SEQ ID NO: 135175 - DNA, 122 bp, Homo sapiens
ctctttactaataacggctttctacagagatcattgacacagcttccagttacaaatgcccgtgcgcttccagtaggaccggaaagctcccagcagccagcgatgaatgaaaacccgagtct

SEQ ID NO: 135176 - DNA, 122 bp, Homo sapiens
tcagcccagcaagcctggctgagttttgtgcgagtgtgcgccatgaaacagaggctcactcgagctgcttatgcctttcactgcctctccattttctctcatcatccctgctccactggctc

SEQ ID NO: 135177 - DNA, 122 bp, Homo sapiens
caggttgaaaatgaaaggagagaactgtttgaagagaggcgtgctaaacagacagaactgcggcttttggaacagaaagttgagcttgcgcagctggtgagtggtaatttggaattctaaga

SEQ ID NO: 135178 - DNA, 122 bp, Homo sapiens
cagcagcacgcaggcctgcagctccacgttagcaacgcgtctggaggaagcgcctgcagccgcctctccccagattacttctctggtatcagaggccgagctgtgggcctactgagccgtca

SEQ ID NO: 135179 - DNA, 122 bp, Homo sapiens
tcttattttataacacagatctgccaacgggagtggggaggggagccggggaggcagagccgctgccaggagaactcagaaataatttggggagaacattcggcatgtcagcgaggacagaa

SEQ ID NO: 135180 - DNA, 122 bp, Homo sapiens
gaaaaagaaacatacagctgtattggatatgtagttactactacaaataatgacaacacacgtcctatacaaagatcatattcacgcttttctaccacttctcagtcattgtcagaaccatt

SEQ ID NO: 135181 - DNA, 122 bp, Homo sapiens
ttaacaagttacatggtattgtacctatgtcactggtccctgatcaacacagcaccagagcgccctgggaacagggaaacggtactcacggtcatggaccttgtagcagtgcgtctgcaagc

SEQ ID NO: 135182 - DNA, 122 bp, Homo sapiens
tccttttgtacttccaggctaggtttttccttcccatgggttgaattgctggctggctggcgtctttcacattcttgtggtttctaaactccagtgggaattccttggtgtaaatctgggaa

SEQ ID NO: 135183 - DNA, 122 bp, Homo sapiens
gataggcgcccccttcctagtgcctctggagcaggagcacagtgaaaacccagctgtctgcgctgatacccctgggaggagcctttgctgcagcaactccccgccctcattaagtctccacc

SEQ ID NO: 135184 - DNA, 122 bp, Homo sapiens
ccacctactagactaccacaactttgcactgtacttacagaaaaaccctcataaaggaaacgaagggcaaaagcttacttattagctagagaaaacaagccaaatgtctagaccttttcagc

SEQ ID NO: 135185 - DNA, 122 bp, Homo sapiens
aggaccctgggagaaggtgagttatccaaaatgtatgggaagatgacctggatgatacatcgtatcatgtatatattccagaaagagtatgaattgtatatttgtgctttaagaagcagagg

SEQ ID NO: 135186 - DNA, 122 bp, Homo sapiens
ccggttcggttttggtctctgcttgtcctctcagtccttggtactttcgtctccctcagccggaggtggcaaactcagacatctacgggcgcccgaggccctcgcagccctgagccccagct

SEQ ID NO: 135187 - DNA, 122 bp, Homo sapiens
agcccctgcgccacgtggtgctccaccacgcccttctagcctcagcgtcatgcaccgcaccgccccatgcttctagccccagcgccacacgccacgcggcactccaccccgtctgtctagcc

SEQ ID NO: 135188 - DNA, 122 bp, Homo sapiens
cttctgcgctccgctccccgaaaagccggcgccgtgcccaccccgctgctcccccagcgacgtcgcctctgctcgttgccatgaccccatctccccgaagaggcccccttcctggccgcctc

SEQ ID NO: 135189 - DNA, 122 bp, Homo sapiens
cacaccctccccgcgcagccaatgggcgtgcgcacgtcactgatccggaggcccgcgggccggcagcccctcaataagccacattgttgcatgaaactccggcgcaggagtcccgggctgcc

SEQ ID NO: 135190 - DNA, 122 bp, Homo sapiens
tacagaggaagaggaggcgtccggaagaagctccttggcgtttcgtggagtcacagagcacgacggcattgacaagcatcagaacatcaagcagccttagatttcacgatcactccgaatag

SEQ ID NO: 135191 - DNA, 122 bp, Homo sapiens
gtccaagaatttaactattttcgggctccacttgcatattttaagaacattaacttttttcggtcttgcctggttgtttgcagacacagctctacgcctaggtagaaccagcggtaaaatcc

SEQ ID NO: 135192 - DNA, 122 bp, Homo sapiens
tatagggcccagcgtgctgaccgggcggttcttcaacacagtgagtgacagcaggagccccgaaggttctcaggtcttctgtccatggagggcattttgtggcctctcccagggcagctggc

SEQ ID NO: 135193 - DNA, 122 bp, Homo sapiens
ggacgacagactgggcctcccgacgcgcagcgcgctgccgggacaccggtgcgtgcgaaacggaggacctttgtaacgccacgtgtttgctctttttgaaaaaacaagaataaatgtgttaa

SEQ ID NO: 135194 - DNA, 122 bp, Homo sapiens
acaaccgcttcgagctggtgaggagcgcggcggcccgggtgggggtggggtggcccttgacgttgtggggcggggcgagcgtccagccgggtcggggagcggggttgtgatgccaggggtgg

SEQ ID NO: 135195 - DNA, 122 bp, Homo sapiens
atcccccttcattaagttccagtctttttctgttacttagagacaagtaataattatacccgtagcaatgcaaagcatgttttacacttttgttatacaaaagaactgcggttgttaaggtg

SEQ ID NO: 135196 - DNA, 122 bp, Homo sapiens
aaggtaaatgacccacccacctttttcacttaagcgaaagggggttctgctccgcgacctcgtcctggatctgtccctccatctgctgtgctcctccgggtacactgtgcgaccaaagccgt

SEQ ID NO: 135197 - DNA, 122 bp, Homo sapiens
acggaggggctgggcctggggaccccccggcctccgcctgcacgcccccccacgcccggacgtgccctctccgcgcgggggactcgcctaggtctcctacgtctgcccctgcccggctcccg

SEQ ID NO: 135198 - DNA, 122 bp, Homo sapiens
tgttgatatctaacgtggcattaaaaaacattctgcgagcccaaccagacacatccaacccgacacatccaaccagacagcggcctgtagcctgcctgttccaagctgggccatgaacccct

SEQ ID NO: 135199 - DNA, 122 bp, Homo sapiens
tcaacttcttcaccttgacgttgtcatacaggaggcagaagcggctcgccgtccgacagacgtcccacacgccttgtttccgggccactttggccagctctgcccaaatctgtatcctgctc

SEQ ID NO: 135200 - DNA, 122 bp, Homo sapiens
aatgcatcattgaaatcaccttgagaacacctaaggttcaggtggccagctaggatctcccggccttactgaagacaactaaagcctccagcaactccactgcatcacctgtccgaaggtca

SEQ ID NO: 135201 - DNA, 122 bp, Homo sapiens
cgccgggtgcgcccgatctggggccgcgaaggggcggccggggagccaggtagagggctgcggctgcagacctcagggaaggggccccagccgagccccgccggcccggggtccccacctac

SEQ ID NO: 135202 - DNA, 122 bp, Homo sapiens
ggagggctcagtgcgcaagccggacgtgctgggtccaagattattgattaatttgggcaccgcgagggctcgagtccccccacaccactgcccggcctgcgggggagcacagacagcccggg

SEQ ID NO: 135203 - DNA, 122 bp, Homo sapiens
aacaggtcaaccctacgctgccagcccagggagttggagcctgtctccggcttctagtgccgacacccctctttcccattcaccccttgcaagccaaacgcgcagagttgggagggagggga

SEQ ID NO: 135204 - DNA, 122 bp, Homo sapiens
cggactccggggacgggggctgggaaccaagggccgcaattggtgtttagagaaaagtggcggttgcttctagagcctgtggggactatctggggaagtcttgggaagttgctgtcatcaga

SEQ ID NO: 135205 - DNA, 122 bp, Homo sapiens
accattggtatccacgctgcactgtttctcccaggcttattgtacttgtccaaactctatcgataggcattctttgaagcatagttcctgatgcagtctggggaggattttcatttggccag

SEQ ID NO: 135206 - DNA, 122 bp, Homo sapiens
ccggcctcagaccacgacctaccacaacccgccacgctccgtccaatcagagcgcgccgacggaaagtgccccgccgcgccttacctcatgagatattattggtcaaccaacatgccagtca

SEQ ID NO: 135207 - DNA, 122 bp, Homo sapiens
ggcgcctctgattggacgggcggccgagctcgtaccggtgagagccccgccccgccgccccgccaagcgccccctcccggcaggcggaccgctgctctcgctcaagttctggcgtggggctg

SEQ ID NO: 135208 - DNA, 122 bp, Homo sapiens
ccggtgccatctctccagcgaagtccccagctctggctccagctggcctgggccctgtgtcgtatcagaggcactgccctctgctggaaggggtttggtctgtgagttatgagtttccccac

SEQ ID NO: 135209 - DNA, 122 bp, Homo sapiens
cacagatcgttgtccacctctcccttcgtctctcctgcctcgcttcccctccgcccgcaccggttctgccagtctctgggttatcaccctcagggtccttgccctggactgcgctctcgatc

SEQ ID NO: 135210 - DNA, 122 bp, Homo sapiens
cccacagcaagatggcgacgctcccacccgggaaacaggaggagggcagggagagggaggcggttgccccttgtggcccggcccccagaacccacgcataaccttggcaaccaggcagcccg

SEQ ID NO: 135211 - DNA, 122 bp, Homo sapiens
actaggcgccgccgaggggagggcagacccgggcagcgccccgcacccccggcggggaaccgggggcatctttcagccacagaaagctggagaagacagaggagctcctgggaagcagggac

SEQ ID NO: 135212 - DNA, 122 bp, Homo sapiens
gccggctgctacctgtctgtctcctgtgctggacaggaagcaccatgcaggcggcgttgtcgtccgatggtctccacctgtggccgtagcaccgggtgcgctgtggactgggacacttccat

SEQ ID NO: 135213 - DNA, 122 bp, Homo sapiens
ctcacctccaggcatcacgaggccgacatcctgcacggtgagcacggacagcttctcttccgagtccacacgaatgaccccataggtcagtccatgcatggagaggacaccccggcccgggg

SEQ ID NO: 135214 - DNA, 122 bp, Homo sapiens
ggaaaaagagaaaagagaatcgtttaagggaacccggcgcccagccaggctccagtggcccgaacggggcggcgagggcggcgagggcgccgaggtccggcccatcccagtcctgtggggct

SEQ ID NO: 135215 - DNA, 122 bp, Homo sapiens
cacccccacccatgctaccaccagggccttcatgggggcgatgcccacttcccatgccaccgccagggccttcgtggggacgatgtccactgctgttgcccatgcccccaccagggccttcg

SEQ ID NO: 135216 - DNA, 122 bp, Homo sapiens
gccccgcgggttcggctcccccccggacccgccaagccgggccctccgcaaagctccggccggtcctcagctccgtgccacaccagtctggcctgtaggcccgccccagcccgcccccgccc

SEQ ID NO: 135217 - DNA, 122 bp, Homo sapiens
gaaatttgagaccaacctgtgcaacatggcaaaacttcatctctaaaaatgagccaggcacggtggtgtgcacctgtagtctcagttacttaggaggctgaggtgggaggatcacctgagcc

SEQ ID NO: 135218 - DNA, 122 bp, Homo sapiens
ccccgcccccagcgggcactcaggccgtaccactgtgccttcatgggggtggagatagatcgtgggctagtcctgccgaggagagaggggttcttcctcaaaaaatatgattatgtatagta

SEQ ID NO: 135219 - DNA, 122 bp, Homo sapiens
tgcttccttcatgggagcatcaccctgtgggtgttcagtcccattcagaaacatggctatcgagtcctgtagtgaatattgaagacgcagaatccgtgttcatttccagtggcatccacggg

SEQ ID NO: 135220 - DNA, 122 bp, Homo sapiens
tctcgggcctgcgtggcaggcgaccctgcccgcccagtccccccaaacttgaggttccaacgctgcagaagctcagcgtggtccagttaaaccgtacccacaagttgccacaggggagcgaa

SEQ ID NO: 135221 - DNA, 122 bp, Homo sapiens
gtcgggtggtgtgcttgcttccaagtctggaggcgggtggttcgagctcgttctatggaacgtttcctgcattttaaaaatgcttaaaccgctggcaactttcttctatccagcacatgcac

SEQ ID NO: 135222 - DNA, 122 bp, Homo sapiens
gcctttcttcatcactgccggcagcaaaagctgactggaagccatgtcctagtccagatccgggcatgcacaccggctggtgttgagcaggcaacttgtgaattgcaagtcgattgcattgg

SEQ ID NO: 135223 - DNA, 122 bp, Homo sapiens
ttgccttgaggttggggactgtccctttaggcaccttccccagtgttgttttcctctaagcgaaggcgtttaaaaacgaatagaacttaagggcagtggccctggtgggagggcgcagtatt

SEQ ID NO: 135224 - DNA, 122 bp, Homo sapiens
caggtgcgtgtacctgattcagtccgtgcttatcttgcgcatacgggccgttcagtgtcccgctcggagctcgtcgccgccgcagccttgaggctccgacccccgcttgggccccgtccggc

SEQ ID NO: 135225 - DNA, 122 bp, Homo sapiens
tcaaacatttaataaactgtggggctgggggtggggagaacttgccaagggtggggagcacgaagcctgggcctatggcaggggctggacttgctacattttgggagttcagcacaaggagc

SEQ ID NO: 135226 - DNA, 122 bp, Homo sapiens
cctccctcggggggaggcggcccccgcaaggtaggcggtggctgcaggcagctgaggctgcgccattcatggctgcaggaccgaggccccacgcggagcggagaccaggcggccacagccgc

SEQ ID NO: 135227 - DNA, 122 bp, Homo sapiens
gctgcgcgcagccggggcccagttgcccggcgctgccagactctcaatgagccgctcgcccgctctattgttggtccttagggctccattagacagaattggacaacaatgtggcgcctgcc

SEQ ID NO: 135228 - DNA, 122 bp, Homo sapiens
tccgagccaggtgcgggatataatcttgtggtgcgtcgtgttttaagccggtcggaaaagcgcagtattcgggtgggagtggcccgattttccaggtgcgtccgtcacccctttctttgact

SEQ ID NO: 135229 - DNA, 122 bp, Homo sapiens
ggggaggggtgagaagcataagtggcaccggaagtggaattaatccgcctacctctcctgcgcctgcgaaacagaaaagacaaggcgcctgtcgggcggggtgtggcttcgggtggcggaga

SEQ ID NO: 135230 - DNA, 122 bp, Homo sapiens
caacaagcacctgttcgtgcacattggccagtccagcccaagctacagcgacccctacctcgaagccgtggacatccgccaaatctatgacaaattcccggagaaaaagggtggactcaagg

SEQ ID NO: 135231 - DNA, 122 bp, Homo sapiens
aagagaggcgaagccaggtcacctttcaaggacccagaagtagggttttggcctaggtaacggggcagagatgtggttcgagattctccccggactctccgtcatgggcgtgtgcttgttga

SEQ ID NO: 135232 - DNA, 122 bp, Homo sapiens
tagacccgttaccccgtgggtctggccgaccgtcctgactcggagatccctgagctgcgccgccgcttccttcgtcaacatccagcagctacttgatgagcgccctccagtgggccttaggt

SEQ ID NO: 135233 - DNA, 122 bp, Homo sapiens
cccgtccccggacacacagatgggctttcactctctttctctccctccctccttttcacacgcactcactccgggtctctgcactggcagtcattcttgcctacacaggggtgagagtccct

SEQ ID NO: 135234 - DNA, 122 bp, Homo sapiens
cgcaccccgaagtggactgggagtcaccaagagaaggtgcagggtctgtttcacagctgacgaggctggcgtggggaataaggcctcagaaaagatgacaccacacccccccagacactagc

SEQ ID NO: 135235 - DNA, 122 bp, Homo sapiens
ttgctaaaccgtaacccattgttcccgctgttaactcatggacatgccgcgtttcatccacgctgaacggtaacccgttgttactactgtctttttgttttgttttgttttgtttttttgag

SEQ ID NO: 135236 - DNA, 122 bp, Homo sapiens
ggcctaaattgcacactttaaacatgtagtttgttgtatgtcaattatacctcaatggaacggttcaaacaagcaaacaagttcaaggcaggtcctgaggttagagctttattagcttcatg

SEQ ID NO: 135237 - DNA, 122 bp, Homo sapiens
catggcggtctcctggaaacaggctgctttgagccgaaactggtgaccgtttcccaaccccgtccaggagtccgacgcctcttttctccaggccaacttcaagtgaggtgtatcaactctat

SEQ ID NO: 135238 - DNA, 122 bp, Homo sapiens
ggattcactaaagtaggtgggaaggaggctgagagaggccccagggaaagtattaagtttcgttaaagcccaagtgtttctgaagtgagagcaccagtgactgaaaaggaagtggcattatg

SEQ ID NO: 135239 - DNA, 122 bp, Homo sapiens
tccgcacccgaggttcgggccgcaagcagcccgggaaccccaagccgcgggagcggcggacggagtcaccccccgtgttcacgtggacttcccaccaccgggccagcaaccacagccccgga

SEQ ID NO: 135240 - DNA, 122 bp, Homo sapiens
gcaggtcttgcctcaactgcgcctgcgcgagtcaggacgagcgcttgccccagatcttgacgtttcaggcggcccctcctaatccggaacacgactcacattccgttggtcttgccttgaca

SEQ ID NO: 135241 - DNA, 122 bp, Homo sapiens
gttggacatggagaggaaaaaagaaatgaaaccaggaaggaaccgccaagaagcacacaacgcgtttatgctgccttaaccacacgcttgactctaaatgggtttaaaaattcttacttgtg

SEQ ID NO: 135242 - DNA, 122 bp, Homo sapiens
gtccatatcccccaccgcattccccaagttcgccgcgggccacagaccctaagcgccgcgcgtgttctgtaccccaccaagctcctaggtgcacagaataaaccctccatccaacccctccc

SEQ ID NO: 135243 - DNA, 122 bp, Homo sapiens
attctgacgccccaggggttcttcacacaggctggccggtctcgggattgaagccggagacgtcagacgctaaggttgcttagactgcggcccacgtggaaggctcttagccaccctgcctg

SEQ ID NO: 135244 - DNA, 122 bp, Homo sapiens
ttaaaagtcaaacgacaatctatgatgtaaagaggttgatcttgaatttttgagtcctaccgcatgtctgcaaatgcagatagtttttctttccaatattcctaacttgtcttttcattgtc

SEQ ID NO: 135245 - DNA, 122 bp, Homo sapiens
ctgcggcaggaggcgggaggcgcaggcaggggcggcggcggcggcgggcacaggccggggcgggaggaggccactccgcacggtgcggtattgtttccaaaatacgcctgctcggggcatcc

SEQ ID NO: 135246 - DNA, 122 bp, Homo sapiens
agatttcccccccctgcaatttctcttattgacatgccagcagtgttagagacagatgggcgtgattccgttcattgttaccttctgaaatgaaagctgccacataataattaccggtgaga

SEQ ID NO: 135247 - DNA, 122 bp, Homo sapiens
caaacaaacaaaaaacaacaagaagcctggaaggaggcaggctgtgtagtgctagggcagcgtcttgacctcgccatcacacccatagctgttgaatcgtggttcactgtcattagcgtgtc

SEQ ID NO: 135248 - DNA, 122 bp, Homo sapiens
ctgatgccatcagcctctaaatggtcaggagtctttacttcactgatacttactcaaccccggaagtgtgattttggaagttaagggaaagaggctaactgaagactgccaaatggtgatac

SEQ ID NO: 135249 - DNA, 122 bp, Homo sapiens
ccgtagtacaggtggctagcccctgtgaacacgaccatctgctaagtaccagtgacattgcgaagaaatccggcttctccggggaccctggcctgcctgtcgggcctcttgccctcagcctg

SEQ ID NO: 135250 - DNA, 122 bp, Homo sapiens
gccccggagaccaaggtttggctccctcgcctggtttccgaaggagtgagggtccgacggcggccacgaacaaagctgcacgctctgcagaccccggagatcccctagaaattccgcagagg

SEQ ID NO: 135251 - DNA, 122 bp, Homo sapiens
aaagcaaaggtagttcatccatttaataaatatttagtctgtatgcaaccatatcgtgaccggccaagttctaggtaagccaataaatctaatacacacagttcctttttcctccatatttt

SEQ ID NO: 135252 - DNA, 122 bp, Homo sapiens
cggccgcccagaagctcctgccagtcctcccaccgactacaccccgggaaggaggagcttcgggcgcgcacaaggcgtcagaatcctcaatttccaacttagcatcttggcaggacctttgc

SEQ ID NO: 135253 - DNA, 122 bp, Homo sapiens
tcgtatacccagaaatgggattgctggaccatgtggtaattctacaacattttgagaggccgggcacggtgactcacacctgtaatcccagcactttgggagaccgaggcaggtgacctcac

SEQ ID NO: 135254 - DNA, 122 bp, Homo sapiens
tttacactctcaaggatgtgcggaggaatatttttccatcaaagatttgcataattcactcgtataaacctgggtggaatatagagtaagattttacaccaacaagtcaggacttgcattgc

SEQ ID NO: 135255 - DNA, 122 bp, Homo sapiens
aaagtagaatttcttcctatagatatcctccaattcatttcaacagctcctattcatcagcgtgtaagcagtttgtgccccaaatgctatcaaatgtccgtggtcagctcccttgagatcaa

SEQ ID NO: 135256 - DNA, 122 bp, Homo sapiens
aagaaggcacagtagtgcctacaacacggatggacttgaggcacaagggaaatggacttgcgtgcccttggtaagctctggcggcactcccgaagttaaggacaccggccacaatggaatgg

SEQ ID NO: 135257 - DNA, 122 bp, Homo sapiens
tggggtaggcaggggcaatagcaagttctaaggacccggtcagggatgagaggtctggagcgcatgcatgaagaagggctgggaaatcaggaggcagcatgagagtgcaaggcccccggcag

SEQ ID NO: 135258 - DNA, 122 bp, Homo sapiens
ccctggaatttggctcaatccctggctcacagtaagtgctctgtaaacatttgtttggaccgtatagatattttgaatatatggcaggattacttttatgaacctttcctgcctagtacaat

SEQ ID NO: 135259 - DNA, 122 bp, Homo sapiens
gagggcggggccttgcgagagcttgttctccgcctgaggaggccaagagaaacttacatgcggatgggtttataagagagacagggccaagaacgcaggtgaagcagtgggaaggtttctgg

SEQ ID NO: 135260 - DNA, 122 bp, Homo sapiens
ggcgtctctcacgctgtgttttggcggcgcctggggtcttcgtttgcatatgagaagagccgaaagcacagagctacaggcgaatacaagtggattttttttctttttctgtttttttatta

SEQ ID NO: 135261 - DNA, 122 bp, Homo sapiens
gaaaacttggtcagggtgagaaaaggctccctggctggcgaggctggcttcctgaatgagcgggtaggcgtgcagaaacttgatgccctgttctaatcgaaccgggtcgatgagctgaggcg

SEQ ID NO: 135262 - DNA, 122 bp, Homo sapiens
aaacaaacaaacaaacaaacagacagaaagccttttgcctgggaggtctcgcgattcccacgcttgggggcgacaagagttggctggagcagggtcggtcgaggctagttaacaggtgggag

SEQ ID NO: 135263 - DNA, 122 bp, Homo sapiens
aggactttggcacgtcccctaacctctctgagcctttgtttccttatctgagaatcagggcgtcagcagcctcatcttgaccacatcagagggtagttacaaagattacacaggccaaggct

SEQ ID NO: 135264 - DNA, 122 bp, Homo sapiens
caccacgcagcttcgccgaaggtgttaatattgtggccaactatgaatagctgtttcaaacgactaattttgggcctttcctgtgattcctgaggtcacttttcagttaactcaaaaacaca

SEQ ID NO: 135265 - DNA, 122 bp, Homo sapiens
cgaaggaggcaggagggtaaaggagcaggggcctgggggtcaggcgcaccacctccgaaccgttagatctgaacctgtgtctacaccccacgcacacgtgtgcacatgcacacacacgtaca

SEQ ID NO: 135266 - DNA, 122 bp, Homo sapiens
tcttctgggggagtcttgacccagagcacagataatgcaaagactcaggcccagtagccccgtgtttaactcctggtcactatccaggactccagaaatctccacccttccttctctaaaag

SEQ ID NO: 135267 - DNA, 122 bp, Homo sapiens
tgtgaaatgaggaacaagaaagagacggtcactgcaggggaaggacaggactcagaggagcggggaggcaaggtcccaagtccacaggagcctcgggttactacaggaggggcagtcttgtg

SEQ ID NO: 135268 - DNA, 122 bp, Homo sapiens
ttgtaattaataagtaatgttgaaagcaaaacttgcattacaattctgaaattagtccagcggggatacaggcaagaaataaattaacagacagattaatacacaatgatatattagaaatt

SEQ ID NO: 135269 - DNA, 122 bp, Homo sapiens
caggcaaatccacagatatagagagtagattagtggctgcctagggctcagggaggggaacgagggatggcagctgatgggtaccaggttcctttatgggatgatgaaaaagctctgaaatt

SEQ ID NO: 135270 - DNA, 122 bp, Homo sapiens
actgacttcaagaatgaagccgcagaccgttgccctgagtgttacagttcttaaagacagcgtgtccggagtttgttccttctgatgttcggatgtgttgggagtttcttccttctggtggg

SEQ ID NO: 135271 - DNA, 122 bp, Homo sapiens
cgctggcaagggaagtgcttggccggggagggtgcccggggggcggtcaaggggcaggcccggggctctgtccctcccggtcctggggtcccttcccgtcccgcggttccggaacgcctcgc

SEQ ID NO: 135272 - DNA, 122 bp, Homo sapiens
gcttggtctcactctggatggcctgccctgcccagccccatgctgcccattaggggaatccgtcagaggcttgccctgcttgggcaggaggactgtccaggtagactgggatgcccacagag

SEQ ID NO: 135273 - DNA, 122 bp, Homo sapiens
gcggggagtcttttgttttatttatttatttttctgcggagtacaactgttagtgcctgccggttgcttagcaaggtggtcccttacgattcacagcctttgagatgattttctaggggacc

SEQ ID NO: 135274 - DNA, 122 bp, Homo sapiens
ctccgcccaaaaggaacggagccccctggccgatccgcaggcctacagggagccacagagcgcagcggctggaccagcattcaagcccaagcacaggcctgcgagaaccttgttcgagccgc

SEQ ID NO: 135275 - DNA, 122 bp, Homo sapiens
ggccggctcgggccacttcttgcgcgctgccagaaggagctattttgagcaggtctgtggcggaagtgggtgttcccgggtctctgctgcccagctgtgcccgctgccgtcttggggtcccg

SEQ ID NO: 135276 - DNA, 122 bp, Homo sapiens
ccagttggcccagctcaaggggcagccccctgcatcgaaagcagttagggcctcctcctccggcaccacctgggaaaaggtgactgtggcctctggaaaggcttcctggctccggttgccag

SEQ ID NO: 135277 - DNA, 122 bp, Homo sapiens
gcctctgcaacgccgcccctaacactcacactagcacagtggacatcacccactaacacacgctcccgctagcacggcaggcgtcacccactaacacacgctcccgctagcacggcgggcgt

SEQ ID NO: 135278 - DNA, 122 bp, Homo sapiens
tgagaaaattcaaataattaaacgttcggttgctttgactgtgccttccgtagggtacagcgagagtctgagaagggcatttgagaagggggcggggcctggaagacttccagttaggaccc

SEQ ID NO: 135279 - DNA, 122 bp, Homo sapiens
tacccctcaagtgctgctttccaggagggctgagagcagagggccctgtcttggcttctgcgctgctgtagaaggtccccatatttccttctttagattcttatatatgcttcctgtgactt

SEQ ID NO: 135280 - DNA, 122 bp, Homo sapiens
tcctgtcgaagtgggaccacctgtagggacagaccttgggtgtgagcctcaggtgacaggcgccctagagcccgccggacgcgtggcccggccccttctctcctgaattttgtttgctatag

SEQ ID NO: 135281 - DNA, 122 bp, Homo sapiens
ctggctcagtggttaaagaaccccacataggctcctcagtagggtgtaaatggctgcaatcgcctgggtataagcaactgatttgcaagctgaggggcaaaacaaaacaaacaaaacaacaa

SEQ ID NO: 135282 - DNA, 122 bp, Homo sapiens
tgcctgaacctccccctgcccctccgtgggctcctgtgcagccagagcctccccgacgagcgccgccccctgctccacagcgcccagtcccatcgaccacccaaggactgaggagtgcgggc

SEQ ID NO: 135283 - DNA, 122 bp, Homo sapiens
aaaaccattgatggaatcctactgctgatcgagcgcgagaggagcggcgaggccgtggaccggagcctgttgcggagcctcctgggcatgctgtctgacctgcaggtgagtgctgcctgtgc

SEQ ID NO: 135284 - DNA, 122 bp, Homo sapiens
agaccagcgtgaccaacacgttgaaactccatctctactaaacattttttaaaaaatagccgggcgtggcggtgggcgcctgtaatcccagctactcaagaggctgaggcaggagaattgct

SEQ ID NO: 135285 - DNA, 122 bp, Homo sapiens
tttcctgttcccttgctgctcattgcggaagttcctcttcttaccctgcacccagagcctcgccagagaagacaagggcagaaagcaccatgagtgggggcccaatgggaggaaggcccggg

SEQ ID NO: 135286 - DNA, 122 bp, Homo sapiens
ccgccgagagaggagcaatggtaaccttcaccgagaggagattatggaccacacggtctccgggcgggtcccttctaatctccttttacaaggaaaactaaacggatctaattttgtttgtg

SEQ ID NO: 135287 - DNA, 122 bp, Homo sapiens
ccagagcggcccgggcacatccgctccaatgaggtgacgtgtccgtgcatttggccgggacgaccacctcagaggccaaggcgcggggactgggccccagccaggccggggtgccgtccagg

SEQ ID NO: 135288 - DNA, 122 bp, Homo sapiens
cctccctcccccctgccctctctcccgtggctggcggcaggtgagtgggtgtcgaggaaccgccaggcagcggagaaaacaggacgccgcagaaatcagattactcacctgcagctgctact

SEQ ID NO: 135289 - DNA, 122 bp, Homo sapiens
cgcctcgcccctccttcccgtgcccggccggagccgcgggggtgagtctagccccagctccgagctccgagccgtggtcctcagccacactccaagcctggccgtggagaggccctgggtgc

SEQ ID NO: 135290 - DNA, 122 bp, Homo sapiens
acgggatatcccaggaaagagcagcctctccgtagtggtgaagagtctctcaagccttagcgctctggtgacctccgcgggattctgagaaaagcactgcggaacggcgggagcgggccctg

SEQ ID NO: 135291 - DNA, 122 bp, Homo sapiens
tccagcatcctatacattaaggagtcactaaaagtcagggtccacgagaaaggtgcagatcggggtgcacagaagagcggagtccaaaacaccactcccagccccagtggacagagtcctca

SEQ ID NO: 135292 - DNA, 122 bp, Homo sapiens
tgagctggccaggggctcagggctggagaagagtgagcagccacccccctgtgtcctgcccggggctaccactaggaggctaatgaaaagggaagatgcaggccaaggcttgggccagcagg

SEQ ID NO: 135293 - DNA, 122 bp, Homo sapiens
ggatctggacgccgtccctcctgatgagcccgtggagcacgtctatgggggatcccttggcgtccggatcgctgacgcccaggtggcgcaggtgggcacgggcgtggctagacaggcccttg

SEQ ID NO: 135294 - DNA, 122 bp, Homo sapiens
agaaggaggcggccccgttgcgcatcgcaccacttccgctccatggaccacggggctgcgcgcatttccaggctgtttgtccaggctgcttccaagagagggctgagggagccacatggatt

SEQ ID NO: 135295 - DNA, 122 bp, Homo sapiens
tgggttttggatgaagattttctgaatgtttttctcttctgcttttcacgttgtttgtatcgtttgcatttaggactatggccagctttagagctatgtctatttacctgcactttgtggtt

SEQ ID NO: 135296 - DNA, 122 bp, Homo sapiens
caatctgtaggttaagccgttcgcaaaactacttgtcccatcaggctcagcagccgaggacggcgggacgtggccctaggccttgtgggagttgtagtttcctgtttccggcttcgcttcgg

SEQ ID NO: 135297 - DNA, 122 bp, Homo sapiens
gcagccgcggccctcgcccgtgggcagcagcgggcccgagccccccggggggcagcccgacggcatgaaggacctggacgccatcaaactcttcgtgggccagatcccgcggcacctggacg

SEQ ID NO: 135298 - DNA, 122 bp, Homo sapiens
ggagtgaagcgtagagagagaagctttaatgtggataggaaagtctgaagtgagatataccgtccagttactctgggactcgttgagatcctgcaacaggagacagggagcctgagtaactg

SEQ ID NO: 135299 - DNA, 122 bp, Homo sapiens
ccgtccagagaggtactggtgtgcgggagaggccagcaagacaaccagggacagctactccgcccagggccggcagccgccccgcctcgaccacgcccccaacccaagcccgggatcgcccc

SEQ ID NO: 135300 - DNA, 122 bp, Homo sapiens
tgcccaatcaaaataggtatcctgcataatcgagtcctattggtctaaataaaaataaaacgtaagccaatcgcacagcttccttttcgcgcccagtagaggctataaaatgtacgtttttc

SEQ ID NO: 135301 - DNA, 122 bp, Homo sapiens
aatatttattgagcacatggattgacctggataatgtaccatctcatagaagagtcactacgactttatgaggcagggactattatttcccctttttcagatggagaaataggggcttagca

SEQ ID NO: 135302 - DNA, 122 bp, Homo sapiens
cgtcacagccggtccccagagcaggattccttccggcgcctgcgcctgatcaccgctctgcgcttgagctgataaactcagctgatgggataagagtcttgttttatcggattttggggaag

SEQ ID NO: 135303 - DNA, 122 bp, Homo sapiens
ggggcacagggcaagcgatgtagagtgcgcgccggttcatcttgattcagtcctgtgctacggagactcaagagcagcggcagggattcctaaaggtcagcgaagcagatgaaatctagtcc

SEQ ID NO: 135304 - DNA, 122 bp, Homo sapiens
ctgagctttcgtcccagatacgcagaaggaagcggcctgaatcttacccagtcctcgacgcgcccagcttcttaactgcagaggacgaagcggccgcatctcccggcaaacgcgtgtgaagc

SEQ ID NO: 135305 - DNA, 122 bp, Homo sapiens
tcacgtgcgagggctgcaagagcttcttcaagcgcagcgtgcggaggaacctgagctacacgtgccgcgccaaccggaactgtcccatcgaccagcaccatcgcaaccagtgccagtactgc

SEQ ID NO: 135306 - DNA, 122 bp, Homo sapiens
cctaggagtttgaggctgtagtaagctatgaccatgccactgcactccagccttgcaagacggtgagacccgaactcaaagaaaaaaaagaaacctggcttttacatttgcttttgtaatct

SEQ ID NO: 135307 - DNA, 122 bp, Homo sapiens
cttaacttgtcttcagattttgtcgacccgagatgggtcctggcactaggaatgtaaaaccgttcctattattttggcttgctccagcaaaagagaagcccatgcaaggctcctgctgacca

SEQ ID NO: 135308 - DNA, 122 bp, Homo sapiens
gagagtcgccgagatgcgcactgggaagagaaaagagccaggacgcacctgcatttatggcgccatcgcccgggcggaatcctccacggaataaaaagtatgcagaagcaaggcgatttatg

SEQ ID NO: 135309 - DNA, 122 bp, Homo sapiens
aaagaacagcgcccgtctgcgtagtttgtacctggctctaccaagtgagaacacattccccgctagcacagaaatcctacaaactcctgagggggctgcgcttagaagcagaggctgtgtaa

SEQ ID NO: 135310 - DNA, 122 bp, Homo sapiens
atgagactgaggggtgagtggagccaggggtggagactggaccccacccaccccagcccccgggcctcataagcctccgcccgcccccaggccccatgcggtcccggctctgtgcgggccgc

SEQ ID NO: 135311 - DNA, 122 bp, Homo sapiens
caccccggccgcccgcgcccgaggctttacaggctcccgaaacgggtgcattttcatctgcggtgtctggaccctagagttgatcctgtaggcgaccccaaagtgctcctggctctcttccc

SEQ ID NO: 135312 - DNA, 122 bp, Homo sapiens
tcttgcggcccaggggaccaagggcagagctgcgccaggggcactgggatttgcagaccccggagtcgcccagggcgaggcccgggtcccctcacggtcggttccggccggttccaacctgc

SEQ ID NO: 135313 - DNA, 122 bp, Homo sapiens
gcagcccagtctgctcccggcagccttgggcgcagccccacgtgaccccgccctacgccccgcctccgctccgcagcgacaagggctagtcgcgcaagatcttctcaccattggtccctaag

SEQ ID NO: 135314 - DNA, 122 bp, Homo sapiens
gggtcctgccccagtagacctctgagattctaatgcagggctgcagctctgatctgggcccgcggaagctgttaacctcgctgagcagcaagaggtggctgtaaacagacttcccttgctct

SEQ ID NO: 135315 - DNA, 122 bp, Homo sapiens
gaatctgttcaaagcagcttttccatccaggtataataatagattggaaagtgctgcacacgtacaccctctcatgtaaggcttgcagcccccctgaaaagtagatctgtttatttccccca

SEQ ID NO: 135316 - DNA, 122 bp, Homo sapiens
gctgccggggatagggcttccgccgagagcgccgagaagtgcgcacgcgcactgaccccgcgggccctagcaaccagagcagtgacagtagcaaccgccggaatggtgagtacctttcgggc

SEQ ID NO: 135317 - DNA, 122 bp, Homo sapiens
aaatcgaaggaattggcccaatggcgaggagaggaaaggccaagggaagagaaaagtctgcgttagtctggagaagttggactagtgaggtaatggatgtcatcaatctcaggaatgctatt

SEQ ID NO: 135318 - DNA, 122 bp, Homo sapiens
ttccagacaggcagcagcatcaggtcccccactcctcccattcctggctacagagagacgcgggaaccccccctacccagttctatgcatgtgcccctgccaggctgggccatccacctctg

SEQ ID NO: 135319 - DNA, 122 bp, Homo sapiens
agttcatttttcttcctaatgaccatgataacctctgcatgagtcacttgactccaagttcgcccaatcaatctattctgcccaaaagagccttctaacatgcatcaggtataatcatttga

SEQ ID NO: 135320 - DNA, 122 bp, Homo sapiens
agagcatttccacaccccagaggccccgagctcactccctcccgctctccccatccctgacgctaacctgatgcctgttgtcgtacatcagcttctcaacctcggcactattgattgccatt

SEQ ID NO: 135321 - DNA, 122 bp, Homo sapiens
tttaaaaagcctcacgccacccctggcggcatctcctcggtgtactttgctgttcagatccgcctgccttctgtgccagcctaacagcgcccggcctcagcccccattgtccctggagctgg

SEQ ID NO: 135322 - DNA, 122 bp, Homo sapiens
caggaagacagaataaccggttttctgagtttttcctgatacaattctggttatcacaaacgacttgagatccctactcttctttaaaagggcaagaaaagggaatcaatatcaatatttga

SEQ ID NO: 135323 - DNA, 122 bp, Homo sapiens
tccctctgcagccgctcccagagtaaacggcggctccgccgggtcggagtccacctgaggcgttcagggccagaaggactcctggggctgcagcactctgcagccccgcctcggctggcccc

SEQ ID NO: 135324 - DNA, 122 bp, Homo sapiens
gagcagggagaggcggagggacccctgatgctgtgggattgtttggccctgggaggtggacgtggccttcctttgggtccactgtgtggttaatgagatggaaacttctcaatacttatccc

SEQ ID NO: 135325 - DNA, 122 bp, Homo sapiens
ttctctgccaaagttactcctgcctggtacctttttcacaagtggatctagcttcattttcgtttggtgaggcaatggagtttgatggacagctggttgtaatccagtgcacaggtcatgcg

SEQ ID NO: 135326 - DNA, 122 bp, Homo sapiens
gccgtcacccacatggagggcatagtccttggattcaccggcacaggtcctgagccccatcgtctcggtcccggggtacagagaactagcatctctgcttgactcttcctgtttgtcacttt

SEQ ID NO: 135327 - DNA, 122 bp, Homo sapiens
gcaatgcacagcggcgggaggccagcgcgtccaaaacctcttccctcctaccgcagtcgccgcctcggtgggaccaagcccggaatcccgaccgagaccagcacttctgccccggctttcag

SEQ ID NO: 135328 - DNA, 122 bp, Homo sapiens
cccttctcccaagccccactcacttagggaagattttgctcctcccccaaactgaaagcgcggctgtgaggagggttactgcttgaaggactcacagtttgcatatcaatacagacagaggc

SEQ ID NO: 135329 - DNA, 122 bp, Homo sapiens
ctcctggtgaatcagtgcccacaggtggaccctggcctcatgcccgtcccctgggagtcgcggtggccacatccccaggggaagaagcagagaccaggaagcctggctgcctatcctgggga

SEQ ID NO: 135330 - DNA, 122 bp, Homo sapiens
aggggggggcgatgtccttgccagcagaggtgctgctcaagtgcagggctggcatcccagcgactcgcccaaggccacctcgccaatccccgcaccctgcgtgccactcccccagcactgcc

SEQ ID NO: 135331 - DNA, 122 bp, Homo sapiens
cccacaatcacctctttaatttctccctgggaagaatgctgcctgagaggctggcagaaacgaagaggccaccacacatctgctctgtgcttcctagtttacaaaatacttctcaggttgtc

SEQ ID NO: 135332 - DNA, 122 bp, Homo sapiens
tcagggttccccggccctctggcgctgggggagttgggtcggttgtgcatgctgcatggccggaggctcggggccaaggccacccttccgcacccaccactctgggaggctccagagcgcgg

SEQ ID NO: 135333 - DNA, 122 bp, Homo sapiens
cagattacagaatttacagaataatgttgctatgagcaagcctatacaaatacatggagacgctactgtcatggcagactgctttttggacagggtagacaaaagtattctcagctactcaa

SEQ ID NO: 135334 - DNA, 122 bp, Homo sapiens
atcccagctactcaggaggctgaggcacaagaattgcttgaacctaggaggcagaggttgcggtgagcctagattaggccactgcactacagcctgggagacagggtgaaactctgtcttaa

SEQ ID NO: 135335 - DNA, 122 bp, Homo sapiens
cttccagaaagctgagatctgctccaaggtgacccgtggctggaggccccactcaggatccgggctccctggccgctgcctcctggcctgggggctcccaaactggacgctggcctctggcc

SEQ ID NO: 135336 - DNA, 122 bp, Homo sapiens
gtggtgttgtgtacgtgaatccatcagatcaacgcgacggacactccccaagggccaaatcggaccgcctctcactaggcggaaagttttgaaacttttgcgcgctaaaaatgatgagccag

SEQ ID NO: 135337 - DNA, 122 bp, Homo sapiens
ggagaagtattaccatgacttccctgtctacaaccctgccctcctcaacctgcccaagtccgtcctggccaagaaagtgtctggcttcaaggtgtattccctcggagagggtgagcagccct

SEQ ID NO: 135338 - DNA, 122 bp, Homo sapiens
aagccacaaggtggcgctgcagactgaagagacggaggaacaaaattgaccagaatgctacggaagtccttgacaaaaaggaaacactgagacagatgggctgagaagaagagctgtcgagt

SEQ ID NO: 135339 - DNA, 122 bp, Homo sapiens
gccctgtaggcgtttgggtcatttttgcacatatgactgctgagaacccaggtatccacccggccccaggcacctacctttagctagttcaacaggataggcaggaggggagcactgcagcc

SEQ ID NO: 135340 - DNA, 122 bp, Homo sapiens
gctgtcttcatctcggcagcatccgccggcaaagggctggcgccgaagcctcagaatattcgatggaagaagaatgaaaggagagtgactgggtctgtcccacattgtgcattacagcacat

SEQ ID NO: 135341 - DNA, 122 bp, Homo sapiens
cttgccctgtggacgtgccctaaccacagcctccggcctctcctagcttctctggacggccgccctggggaccgggtgaatctctcctgcggaggagtctctcatcccatccgctgggtctg

SEQ ID NO: 135342 - DNA, 122 bp, Homo sapiens
aattgcacaactgcataccacaaatgatcaaagataaaaaccaacataaacagtgacacccgtttgtaaacaagccagtgtttaaaatgctgcagtcctaaaggataccaaggtctcagaga

SEQ ID NO: 135343 - DNA, 122 bp, Homo sapiens
gggacgggggcctaggggacccaggacgtccccagtgccgttagcggctttcagggggcccggagcgcctcggggagggatgggaccccgggggcggggagggggggcagactgcgctcacc

SEQ ID NO: 135344 - DNA, 122 bp, Homo sapiens
gagggaaacgggggtggagacttccccgggggcctggaccccacatggcagtggtggctccgggccacaccggggtgatgggttggacgtgaaggaggctcgaggctccgagggcgtgtgcc

SEQ ID NO: 135345 - DNA, 122 bp, Homo sapiens
ctgctcttcttagggtatctatcggactgtccctttggttgtaagataccactgccatctcgaggaggactgcatgcttctgcacagagccaacaggtaactcgtcctggcggctctgtgta

SEQ ID NO: 135346 - DNA, 122 bp, Homo sapiens
aagattaaaaagaaattctgctccttttagtaataaacaatgtcgtgtgacactttggaacgcttctctcgttacaaaccagcgtctttactgaaggtccttccgctgcagagctgcgcaat

SEQ ID NO: 135347 - DNA, 122 bp, Homo sapiens
cgccacctgacaacggaagtgacgcaccgcccccctcctccccagccttagccgcggccccgcccccccgggccccgccctccgcctgcgtctccagccccacggctttcggattggggcgc

SEQ ID NO: 135348 - DNA, 122 bp, Homo sapiens
aaatttttcacgagctttgtttcctctccctttatttttttgaagttcagctttcacattcgtaaattcaaaatatatcggcgttaaaaaaaaaaggattggaaataacatgagacaaattt

SEQ ID NO: 135349 - DNA, 122 bp, Homo sapiens
agcccagattgcccacataccccaggtatcccaggactatccctatcagtcactaagagccgaaaaaagtgaaattctgccctgacattcatcagctaggataagagactcaaataaagtca

SEQ ID NO: 135350 - DNA, 122 bp, Homo sapiens
ggctatgcacacagcctcgttagtccttgataaatgcttataagattctgttgccgattgcgggacagaccgtttaccactcactaggatgaaagcgttgggattctaagtatcccctgaat

SEQ ID NO: 135351 - DNA, 122 bp, Homo sapiens
actcacgcaacccgggaagcccagctgcccacgttctagggctctgagaacactagtgaacgaactcccgtgctttcaaagagctgcggtagggggcagaaccgggaaccggatgttctaag

SEQ ID NO: 135352 - DNA, 122 bp, Homo sapiens
agctggagcataatggatgcatgggggcattttacagtggttgtcaggggagagacagcacggaggagctgtgggtggaattggaaagaagcagttagctacagcactccaaagggttaaag

SEQ ID NO: 135353 - DNA, 122 bp, Homo sapiens
ttccccgagggcaccagcactggccgaccgacctggcttggggcgcggcgctggcaaacccggccttctgaggggacgccacgctgactctagtgcaggcagcccccaaaacggtataattg

SEQ ID NO: 135354 - DNA, 122 bp, Homo sapiens
cgcagtgctagaagggagttcctggaagcctggtggagagcccctcccatctgctaagcccggagggcatcaaaggctgctgctgccctcaacccctgacaatctcatcatctcatatctca

SEQ ID NO: 135355 - DNA, 122 bp, Homo sapiens
tcagggaatgtctgagtagctccctgaagtccaaacggaagactatgacccttgggaggccgaggcgggcggatcacctgaggtcaggagtttgagaccagcctggccaacatggtgaaacc

SEQ ID NO: 135356 - DNA, 122 bp, Homo sapiens
acccaaaattgaaacataaactcttctgtaagtatctaaaaattgaagacagtccaggcacggtggctcacaaactgtaatcccagcactttgggaggcagaggcaggcagatcacttgagg

SEQ ID NO: 135357 - DNA, 122 bp, Homo sapiens
cccctctccaatgcttccagtccatctccggatagaggattctatacctagggcaaagaacgggggaaggggtggggctgttggagcagcgaggatgctaaagcgttgtcggttttcctcga

SEQ ID NO: 135358 - DNA, 122 bp, Homo sapiens
tgtgtcagccttttagcgtgagtgccaggcacgtaccctttaaagcagacgcattctaaacgagtgggacgacggcattctcgcctactgactgcacttttgagccatgaaatacctcgggc

SEQ ID NO: 135359 - DNA, 122 bp, Homo sapiens
actgtgtgcaatttaaaacttattaactgtttatttatggaattttccattgaatattttcggacctcgattgatcataggtaactgaaacctcagaaaacaaaactgtggataagcggaaa

SEQ ID NO: 135360 - DNA, 122 bp, Homo sapiens
tctcactcgcctaaccgccttcctcattaacccatgcacttattccttggttttctcaagcgtgcattccctcactcattcgttcactccccttctcattctctctcccttcccaccctacg

SEQ ID NO: 135361 - DNA, 122 bp, Homo sapiens
ctgtttatttgcactatgtagccaatcctccagaataagtctttcttttctttttaaaatcgctttatttatttatttatttatttatttatttatttcagaaagggtcttgctctgtcgcg

SEQ ID NO: 135362 - DNA, 122 bp, Homo sapiens
tccgggcgggatccgcggagcctggggccgggcggttggcccacattataagagggcctgcgttgcttctacctcaaaggctttagggtgtttgttaattccccgccccccaacctgatgat

SEQ ID NO: 135363 - DNA, 122 bp, Homo sapiens
cttccggggcgggagctggcacggtcgggcacggtccccgccccccgcgccccttcgctgcggagagctgacagagagactcacgaccttgctagtccagtctcagggcttggcctcgccgt

SEQ ID NO: 135364 - DNA, 122 bp, Homo sapiens
catgggttcaggagcggctgccactggccatgcagacagagcgaggcaacggtttgcaggcggtccagcagcacatcaaaaagaaccaggtgagcagagccaggtgagggagcgagttagga

SEQ ID NO: 135365 - DNA, 122 bp, Homo sapiens
tgtggggagacggcaggtgtggggcaggggcccagggatcaaggcggtacgacgccctcccgtcctgctaccctcgtacgttcttgtagagctgctctgccagttcctggacgtgacgcagg

SEQ ID NO: 135366 - DNA, 122 bp, Homo sapiens
tcccataacccagtcacaaacacagcttcaaacgcttccccaacttttcaagctttggggcgccaagtcactgggagttaacagcttaaacatggggttcaatacaactgaccaaaggaagt

SEQ ID NO: 135367 - DNA, 122 bp, Homo sapiens
aggagaggcagagggggaacattcaggcgtggtggaagggatcctggaggccgtccatcacgcccttccactttacgaagaccagcttatcgggacaatcagtggaacccaaggcagtcaga

SEQ ID NO: 135368 - DNA, 122 bp, Homo sapiens
aattcttgaggtggaatgtgtttaattttatgcccttgatcttccaaattattgtataaacggaaatactactactaagagtcagcatagtacatgtaatgatttgaattaatacagatttc

SEQ ID NO: 135369 - DNA, 122 bp, Homo sapiens
ggacggcagctacactcatgtcatgcgctgggagggtctcccggggtctccccaggaccacggccacctaccacccctgtcccctgaagataaatgatcgcagctgcaaatttcaaacagtg

SEQ ID NO: 135370 - DNA, 122 bp, Homo sapiens
gctcttcaggaaagcatctgagggagagaagggaggggccgtttagctggagcagctgtgcgtcggggtgcttctcaatggctgtctttgggggcagcccatcctgaccctcatgtgaagag

SEQ ID NO: 135371 - DNA, 122 bp, Homo sapiens
cactgtctcaggttctctactgggtgctaggggacaatgagaacaagctcacagggatggcgcactattaaagcactttgcaaattgtaaagtattgattcaatgctgttgctgtggggatg

SEQ ID NO: 135372 - DNA, 122 bp, Homo sapiens
ggcttgcccgcaaggaagggcgtcgggcggaggcaccagttcctcccggaagctttttgtcgctatcgccaccagcccctggcagtggcagtggccgtggccgggcgtgaaggcggcctctc

SEQ ID NO: 135373 - DNA, 122 bp, Homo sapiens
cctgcaatcacacctccgcgctgtgtcatcaggggacggagtgcattgcgaggagggccccgagtgcatctcagatgagcgcctccagggctgggaacgagcacgccggagcaagggagctc

SEQ ID NO: 135374 - DNA, 122 bp, Homo sapiens
caggagagaattctttcctggaagcccatgcggacaccctcggccctgactgtggcaggacgcaggcaggcagttttgagagaccccagctctgatggacaaggtgacagtcgcaccgggcg

SEQ ID NO: 135375 - DNA, 122 bp, Homo sapiens
ggggatgcctccctaacgccagccccgctcttgggtctctctcctctcctcccacacctgcgaaggtgaacaccctgggttaggatctgctgcgaggaagctggccccatacctgggtcatc

SEQ ID NO: 135376 - DNA, 122 bp, Homo sapiens
ggactcccctgctaattggaagtccaggttgcctggtctggttacctggagttggagccccgcccctgtgggggatagtagtgaaaagtcagaattggggaatctcgccctacgcgggtggt

SEQ ID NO: 135377 - DNA, 122 bp, Homo sapiens
ttgataaataaatagaaaaatatgctttatgtgtttcttaaaagtcaggaatatgtcttacggtgatggcatgtcagaatctcctgggaggtttcaaattacaccgaaaacattgccagaga

SEQ ID NO: 135378 - DNA, 122 bp, Homo sapiens
gcgcacgcgccgctctctaggtgcttccggcgcgcctgcgcagttaaaagaacggtggtgcgcaggctctaacactagtgcgccagccggctgcgagaggcggggcctagctttgggggcgg

SEQ ID NO: 135379 - DNA, 122 bp, Homo sapiens
ctggcacattattctgtgaaaaaagacatgagtttttagttgtgttctacagctagttcccgacccaatgcttcacatatccacacgaaagtaaaaggcaggtaagacaaaaagggctgtag

SEQ ID NO: 135380 - DNA, 122 bp, Homo sapiens
gagaccaggactcaatcccagcagtgccctttcctccggcggccctgcagctggggtgtgcgggggtggaattaggcctcccccagcccagggtagccccttagggtcaagcacaccccccg

SEQ ID NO: 135381 - DNA, 122 bp, Homo sapiens
gaagaaaatcaaagcatacaactccggaaacattcaaaatagtctcccttcctcagagcgcgctggtagctgtgtggatccaacggcactgtgggagtctgagttcatatcctggtattgct

SEQ ID NO: 135382 - DNA, 122 bp, Homo sapiens
cttcaaaaagccccccaaccccgctgacccgcccctcaaaagtcgccctcaccctcgccgcgagcaccctcccacttcggtgcccgcgcccctctcaaggccgagccgacgccccctcacca

SEQ ID NO: 135383 - DNA, 122 bp, Homo sapiens
gctatagtcctggaaggccttggcctcgccggagtgctcgcaggcctctcttcggtcaggcgctgcgcagtacaggtcccagaagacgcaccaccaggagtgcaggaacccggggggctccc

SEQ ID NO: 135384 - DNA, 122 bp, Homo sapiens
atatttaggcttcatttatatattgagcaagaattgcttagattaaggagtcttgtggtacggtatgacttcttggctcctatttagtaagttaccctgatgaggtggtgagaattctgcgt

SEQ ID NO: 135385 - DNA, 122 bp, Homo sapiens
ggctgggtgtggacagacacctcggggtgaccgctgagtatattttgtggccccagcacccgtggcaggcagaactcacgcctcctgatctttctcagctgctaaacgctgctgtagaacag

SEQ ID NO: 135386 - DNA, 122 bp, Homo sapiens
aggcaccacatttgcctggtgctcactctcatctccctcacctacccctccttgttggcccgtgtgttccatggcttataccttggatactcggtctcttgctcattgatatggttcgactg

SEQ ID NO: 135387 - DNA, 122 bp, Homo sapiens
gggacacaggtgtggtagtggaggacacgtgtgagcaagtgaacacatcacacagatgtgcgagcagacacaagacatgggacacaggtgcgccagtgaacacgggactggtgtaagccagc

SEQ ID NO: 135388 - DNA, 122 bp, Homo sapiens
ccccgagtcaggattctcccctgacgaccctctggtggtccctgcacattctgggagagacgggaggctgcggttgcagagctgcccacggagcgctccaggccagagcagtcactacgcag

SEQ ID NO: 135389 - DNA, 122 bp, Homo sapiens
tccacttttattcactacatcttaaaaaatccagaaatcccacatcttgggccttttctacgtatcagccagactctgggtaacctcaagcagcatcaggggcagcatcattccttacatag

SEQ ID NO: 135390 - DNA, 122 bp, Homo sapiens
ctatgtaagaattcatttgttagtagagcccggctttagaacagagatggaacctggcaccgaataataaagcatggggaggccgggcgcagtggctcatgcctgtaatcccagcactttgg

SEQ ID NO: 135391 - DNA, 122 bp, Homo sapiens
gttaaaagataaacttagggccgggcacggaggctcatgcctgaaatcccagtactgaggcgggtggatcatgaggtcaggagatcgagaccatcctggctactgtgaaaccccatctctac

SEQ ID NO: 135392 - DNA, 122 bp, Homo sapiens
tttttttttttttgccttagtgccttgactgagcatccaggcagggctcggcggcgcctgcgcgctggagcctccttgagctccagccgcgtcctcccctgtcgcagcggcaccgtctcccc

SEQ ID NO: 135393 - DNA, 122 bp, Homo sapiens
actgaaggccggcgttaaccctcaccctaaactgtaacaaccaaaaacgtctccagacctcgccaaacgtttcctgggggacaaaatcaccccagctgacatccattcgttcaatattatct

SEQ ID NO: 135394 - DNA, 122 bp, Homo sapiens
tcggaagagcgctcatcactggctggggacagagccgggcaccaaggagcgacaggatcccgaagagagagagagaaggcagcgagggaaggaggaccccggcaggcagcagcatgaaattc

SEQ ID NO: 135395 - DNA, 122 bp, Homo sapiens
ctctcctgctcccaccggcgcccttccctctagagacgctgagagaacgggagctagtagcgcccccacccaacgccacctcggagactccggctccttctctctcaacttcgaacaataca

SEQ ID NO: 135396 - DNA, 122 bp, Homo sapiens
gccacttcctgagcctggacccagtctcagagctggggaactggcccaatgcaaaagggtcgggagcatctgcaacagagactgagctctatcagcttcggtgacatagcctccattcacgc

SEQ ID NO: 135397 - DNA, 122 bp, Homo sapiens
cagacgccagcaaagcagtatgctcccgatcaagtagatttttaaaaaatcagagtgggccgggcgcggtggctcacgcctgtaatcccagcactttggaggccaaggcgggtggatcacga

SEQ ID NO: 135398 - DNA, 122 bp, Homo sapiens
actgagttttcctgtgacctcaggctccaacatgggcccgcagcacactgtggttcccagcgggaggagagaggtgtttactggaattgcagacacagcagggagtgtggagggggctcatt

SEQ ID NO: 135399 - DNA, 122 bp, Homo sapiens
ttcagactgcgtctttttgtttgggggccttcattcactccggggttcctgtatctaactcggagccattccgggccgctggacctgggcggctctgaagcgagaaggcagaggacgcaaca

SEQ ID NO: 135400 - DNA, 122 bp, Homo sapiens
ccagccggggcgtggcggaggtctcatctgatggtgagcccggccgaaggcgggggaggccgcacttcaggctcagctgggaaatggcagggcctggatttgaacctaagcgtctgagccgt

SEQ ID NO: 135401 - DNA, 122 bp, Homo sapiens
tttgggtctcggggctgtgcttggccatgcctgacggggtgggtggtggctacagcccggcgcagtgtggatgggcggctgagcggggtccaggcggagctggcgctgcaggaggagagtgt

SEQ ID NO: 135402 - DNA, 122 bp, Homo sapiens
attttaccgcccggccgaggctcggcgtcctggggggcggagccaggtagagcgactacacgactggtgggaaaacagtggttgcctggatcaacggcaaacgctccggccagtggcgaggc

SEQ ID NO: 135403 - DNA, 122 bp, Homo sapiens
tgcagaagttgcatgatgagagcttccagaccacagacaaggtcagcgtggctgatgactcgctggtctggactgagaaaagttgagctggaaggtacaaagggccaggttatgcagagcac

SEQ ID NO: 135404 - DNA, 122 bp, Homo sapiens
agcgccgcctccagcagcgccgccagcagcagcacgcagaggaggagcccggctcggtcgcggagcgcacgcatcgtctcggttccgaggctgctctgcctgcacctctgcacgcggccgcg

SEQ ID NO: 135405 - DNA, 122 bp, Homo sapiens
agaggaggccgagcccgtgttccgcgcagctgaggaggctggcctcactggatctggctacgtctggttcatggtggggccccagctggctggaggcgggggctctggggcccctggtgagc

SEQ ID NO: 135406 - DNA, 122 bp, Homo sapiens
ccagggtacctgcgccatgacgtcatgggaccgtcaccctccgccagccacgggcccgggcggtgccagggtacctacgccatgacgtcatgggaccgtcaccctccgccagccacgggccc

SEQ ID NO: 135407 - DNA, 122 bp, Homo sapiens
tcttaccttccttcaccaccatcattctgagattgtttcagtacttgcactctacttacccgaactctgtgggcagattctgctgcctgggagccctggaatagaacttcaaggaccgttca

SEQ ID NO: 135408 - DNA, 122 bp, Homo sapiens
cagatgcccgccgcccaggacacaccaggcgccgccccaggccagcccggagcggggagtcgcgggtccaacgcatgctgcttctgctggtgctgctgttgtagctgctcgtggtaaggttt

SEQ ID NO: 135409 - DNA, 122 bp, Homo sapiens
gaccctgtctctaaaaaaagaaaaagaaagaaaaagaagagacggcggccgatacccagtcgtgtgtgaaggtgagtctgtcagagacaggagggtgatggccatcaaaaaaggcagcgcgg

SEQ ID NO: 135410 - DNA, 122 bp, Homo sapiens
tgaattggaagaggccatagccccaggctcagaggcccagggcgctgggtctggtggggacgcgggggtgcccccaatggtgcagctgcagcagtcaccactagggggtgatggagaggaag

SEQ ID NO: 135411 - DNA, 122 bp, Homo sapiens
gagggaatccctgcagaccaacagcgggctatattgacgacggtgtctgagatcggggaccgtcttttgaagagtcagtccctccttagttgcccgcctcagctgaggccgccgccattttc

SEQ ID NO: 135412 - DNA, 122 bp, Homo sapiens
catgggtcggacagaggtgggatggcctttggaggtccagttacggcacccattcagcggcgacgctggcagggctggggcgaggctctccagaggccgcactgactccaaatgagcctctg

SEQ ID NO: 135413 - DNA, 122 bp, Homo sapiens
tggatgatagccagctccttgagccgggccagggctgtgagcacctgcagggtgactgtacggatgtggcgggcggggaggggcgcgaagttgttctccttctggaactcgaaaaggttttg

SEQ ID NO: 135414 - DNA, 122 bp, Homo sapiens
agagcccccttcaagaggtaggcacttggtagttgttgactgataaaaaggaggatatcacgtgagaaactgcagaaaagaggcaaataaagaaagtaagctagaaagacagagcatccagg

SEQ ID NO: 135415 - DNA, 122 bp, Homo sapiens
gggaattttatttttggtttacacttctcatgcctcttggaatctctgaaccacatacaacggccatttgttgagtaaaagcttccaatgcaggaaactgtctctttcagcctcatgctata

SEQ ID NO: 135416 - DNA, 122 bp, Homo sapiens
ggccagcggctgcggagggtgtactgggtccccgagcagtgccagccttagctgccttcccgcggggcagggcttgggacctgcagcccgccatgcctgtgcctcccacctcctccgtgggc

SEQ ID NO: 135417 - DNA, 122 bp, Homo sapiens
gaaataactcacttctcgcagtttactcctggggccgagacctgggaaacatcccctgctcgcgctctcggcgctcggtctcccgtttcggcctccctgggcttcgctccccaccgcgttca

SEQ ID NO: 135418 - DNA, 122 bp, Homo sapiens
atgtgagatgatagcctgggattttctcttggttgtaaatgaatatcttactgagaaccacgttaaccatgcctgcccctcaaagataggaaaggttggatatatagaaactttctcgtatt

SEQ ID NO: 135419 - DNA, 122 bp, Homo sapiens
gcatctggcctgcgagtcccgggcggctcgtgcacacctcaggcctcaaatgacttgtttcgcctagaatcaactcccgtctcggccgcctcgaagtccccagccctggcgagaacagccca

SEQ ID NO: 135420 - DNA, 122 bp, Homo sapiens
gtgggcgctggagaggacaggggacaggcagcagtgccacccccactgtggccccttcctcgctgggccagccgagccatgacctcttctgtttccctctgcgctgtgctcctttctattta

SEQ ID NO: 135421 - DNA, 122 bp, Homo sapiens
taggaagttgctgttaacgatccactgacattgggcatggggctgggttacctcccgcttcgctgttgggatgagtgtctgtttctccatggtgcacggtatttatctgtgaggtgaatcaa

SEQ ID NO: 135422 - DNA, 122 bp, Homo sapiens
gcaccggcgaacctgcctgggcaggcagctcgcgcaggacggggcgggaccagacagttgcgcgcacagaaggctggcgtagcaggtaaagatggcagctaccatgttccgggctacgctgc

SEQ ID NO: 135423 - DNA, 122 bp, Homo sapiens
gaaaagaacttgggaagaaaggtaagaaaaggagaattcactgggactaggggttagtgacgttgtgttggaagggatgtgagaccagactggcaaagttgggatcaataggttggaggctt

SEQ ID NO: 135424 - DNA, 122 bp, Homo sapiens
ctgtttggggtattgaggataaggagacacaagttcttgctcttaaatgagacagacaaacgaacagacatgcagcatgcaattgactgcagcatttggacacagtggccaaaaatgtggct

SEQ ID NO: 135425 - DNA, 122 bp, Homo sapiens
attcccgcccacccagcctcacctttccttgagctgtttctgttcctccacataactttgcgacgatgtctcctgcagagagggccataggtctcaggccagccccaggcccctcagccccc

SEQ ID NO: 135426 - DNA, 122 bp, Homo sapiens
tggacagggcgcggcgcacggtgggcttggtggagggtgtgcggcggatggtggccacgccggggggtgcgcccgagggcaggccagtggccgtgggcagccccgcggtgggcagcccagca

SEQ ID NO: 135427 - DNA, 122 bp, Homo sapiens
caacaacgagctcgagaacaaccaggtggtggccaagctgggccacctggcgctgggccgcgccccgggcccaccgccagccgacgccgcggccgccgccattccgtgcgggccccgtgagc

SEQ ID NO: 135428 - DNA, 122 bp, Homo sapiens
agctagacccgtggcgggtctaggagggaccccaaggcagtgcaggcccctcacgtgtgccgccgtttcccacgcacaccaatgttgctgacagtcacaatctgcacttggggctctgacgg

SEQ ID NO: 135429 - DNA, 122 bp, Homo sapiens
cgtggggacggagcgctttcctcttggcggccggtggaagaatcccctggtctccgtgagcgtccattttgtggaacctgagttgcaagcagggaggggcaaatacaactgccctgttcccg

SEQ ID NO: 135430 - DNA, 122 bp, Homo sapiens
gggtgtcccctctctgtggtgcccacgtttcctggttggactgccccttggtgtcctgggcgtcccctctctgtggtaccctggtctcctgggtctcctggttggactgtccccgagtatcc

SEQ ID NO: 135431 - DNA, 122 bp, Homo sapiens
gagacgtgctctcacagccagctgggcgggagggaggaagcagcagcaggcaagaggaaacggtgccaggctgcagcagagagaagccacaggacaagcgggattcctttctgctctacttc

SEQ ID NO: 135432 - DNA, 122 bp, Homo sapiens
tttgcccagaaagcagttcattcatttgttcattcaagatccccctctgaacccccagagcgccgcagctggaacacccctatcacccggaggcttcccagggagcctgctctgtcctgagc

SEQ ID NO: 135433 - DNA, 122 bp, Homo sapiens
tccgagccaggtgtgggatatagtctcgtggtgcaccgttttttaagccggtctgaaaagcgcaatattcaggtgggagtgacccgattgtccaggtgcgtccgtcacccctttctttgact

SEQ ID NO: 135434 - DNA, 122 bp, Homo sapiens
cagctgctccgctccacgggcctagcctcgctcacagggctccaagaacagagcctggatcgtcctgagggccccgtgatgtccccgtcacagcaaaggaagatttaggatgcactggaagc

SEQ ID NO: 135435 - DNA, 122 bp, Homo sapiens
atgcgtgggctccctgctagcgagcctgctccgtgcgtgctgggctcccggccttgcttccgtgtggcattcgagaccccgtggacctcgcctgcgtcctgcatgtttgagcgctgcccctt

SEQ ID NO: 135436 - DNA, 122 bp, Homo sapiens
attagaagaagcaccaagcactatcaacattagcaaatcagtactaggaagtagcttggccgcttccttccatttccttccaaccctgggaactctttccattaaaaacatttctccaccac

SEQ ID NO: 135437 - DNA, 122 bp, Homo sapiens
gaagaaagccagacggcgacagcacactttccctggtgatcttaggttctcataagcacacgggacaacaccgggtgacagagaaggaggtgtcctgtgaatggaactgcagccctcaccca

SEQ ID NO: 135438 - DNA, 122 bp, Homo sapiens
taaatctctcgagccccacgtctcttctttcagagcatcggcctatggaacccggcggggcggcccaggccccagggaccagatgccccagcccccttgtggtgtgtgaggtgacacacaaa

SEQ ID NO: 135439 - DNA, 122 bp, Homo sapiens
ccgcggccgggcgacgctgacatctggcatccctggggtctcagagacacgggtggacagcgacgagggccttgtggccgccgtgtgtacccgtgcttaccctctgtcctccctacaggcgc

SEQ ID NO: 135440 - DNA, 122 bp, Homo sapiens
gtcatactcctcttgtaagtcaggggctgggctctgtgccacagggatggatatacagctcgcgaggccaatgctttgccgtctggaagcacagactctgatgtagtgcctgtcaaactttt

SEQ ID NO: 135441 - DNA, 122 bp, Homo sapiens
tctcctccaggatcgcctgcggcttcctgcctggaattcccagaaacgccgttactcccgcggcaggcacaggttctccaaacaacagagaaggcacctggtccccaagaagaacttccaca

SEQ ID NO: 135442 - DNA, 122 bp, Homo sapiens
tcggggccccgtgccggagccggaaggggaggagggctgggcaggcgtcgctgtggaccgcgggaggggctccccgcccgggccccccaacgccagggtttggctctttcccgcaacccgaa

SEQ ID NO: 135443 - DNA, 122 bp, Homo sapiens
aatacccagcatcctgtctctccctaggaggctccatggagataatgcggctttgggaagcggccatgattctcctgtcagggaccagtgagctacgcaaaagctccctgtcttgtctggaa

SEQ ID NO: 135444 - DNA, 122 bp, Homo sapiens
agactgtggcttaatgagactaaacacatccctgagttcacccagagtggatgtctggagcggcattccaatgaatccgtgctcgcctccacagactatgttctttccactctgccatgcat

SEQ ID NO: 135445 - DNA, 122 bp, Homo sapiens
tctggagctgtcggcccctgatggagtgcctcccatcctgccagctgccactccccgggacgctaactgagcgggaagactgatgagcgcccaggcccggcacccctgaaacccatcttatc

SEQ ID NO: 135446 - DNA, 122 bp, Homo sapiens
ataacctgcttcagacgagctaggtcagacgagcaattcaagagctaacaaggcaacatgcgccaaaagccttgtaaacctcagggcagtacaattctttgcaaataatagtaattcaatca

SEQ ID NO: 135447 - DNA, 122 bp, Homo sapiens
gatttgccatcttgggaccacctttcagccaaaaaggtggtgacttctggcctttctggccgtcctgttggcacaacaaagttggtgaggggaggagactgggaagggaaagaaaactgcta

SEQ ID NO: 135448 - DNA, 122 bp, Homo sapiens
caaatgggaggagcatgggggcgggaccggaggcgggggccgacggagcagcgttgggggcgcggcaggaggcggggccgagaaggaccctggagggcaagggggagctagaggcggggacc

SEQ ID NO: 135449 - DNA, 122 bp, Homo sapiens
cgcggtgccgcggggccgctccgaggagcctgagagacccacggaggcttcgcgggaagacgcggcggcggcggcggaggatgagcctgcagagcgcgcagtacctccggtgagtgccgagg

SEQ ID NO: 135450 - DNA, 122 bp, Homo sapiens
tgccacctttgcacgcgagagccacgtcccaaggggctaaacctgcctttggttgtgccgcgtaggctgatggtctcaggctcagctgccctgcccctcccagtgctggagaagtggaagaa

SEQ ID NO: 135451 - DNA, 122 bp, Homo sapiens
acgcatcttctcatgtaagacgagttaacatggtttggtattcaatttttggtagttcaccgttggagtggccgcctgtgttggttaattgcctttatccaaaggaaaaataaaacgttatc

SEQ ID NO: 135452 - DNA, 122 bp, Homo sapiens
cttgccacctgctccatcaggggcatctcagttgaagaaggaaggactcacccccaaaatcgtccaactcagaaaaaaaggcagaagccaaggaatccaatcactgggcaaaatgtgatcct

SEQ ID NO: 135453 - DNA, 122 bp, Homo sapiens
tccgatggagaatagagggagtaagacaaaaagaaaagacctaaataatcccagtcgcatcgccttctggaaggaaataaaaacccaagaaagttaaaggaagatgaagcaaacaagaaggc

SEQ ID NO: 135454 - DNA, 122 bp, Homo sapiens
cagcatctctcttttacaattgtgaaggaaagcagtaccttttaaatctcattgatacaccggtaagtttaatattaattttgcatgtattgttaaagtcaacattgtgtcagtagtgcaaa

SEQ ID NO: 135455 - DNA, 122 bp, Homo sapiens
tcatcctgacgacagctgatgccaacctgaattcagccagtcaggattgagggcacttcacgttccagggagagcaaataaaatcctttggttaggccaggtgtggtggctcatgcctgtaa

SEQ ID NO: 135456 - DNA, 122 bp, Homo sapiens
ggagacggcactctgtactgtctttcaccctaaattttcaaacccgttccaaactggcctcgttgccctctacaccggtgtgcaggatcacctctctcctgtgtcccttaggcaaccatttg

SEQ ID NO: 135457 - DNA, 122 bp, Homo sapiens
gcgtcaccatcctcctagctctgcggatgcctgcgatgtccgaactgccttaaggtgaggcgagtgtcagcactgaacacaaagcctcaggagtgataaagccgtcacggagtaaaacgcac

SEQ ID NO: 135458 - DNA, 122 bp, Homo sapiens
agcgggggcggcaccaggcaggggtaggggtggcccggcgctgccctggagggggctggtcgtgccgccggattcccgcgcggggcggggctgccccgcccttggctccgcctccgccccgt

SEQ ID NO: 135459 - DNA, 122 bp, Homo sapiens
cagccacagagaaacgttcaacagtgtgaccagggaagagagcggccctggaggtctttgcggtcagccctgctctgaggcagtcggggtcaggggctacatcttcatgcggaattcctgac

SEQ ID NO: 135460 - DNA, 122 bp, Homo sapiens
cccacggagcatctcagaagattgggccgcctctcctccatcttctggcaaggacagaggcgaggggacagcccagcgccatcctgaggatcgggtgggggtggagtgggggcttccaggtg

SEQ ID NO: 135461 - DNA, 122 bp, Homo sapiens
aagagcaaggaaggcctgcaggctcagagaagccaaggaaacatctcctcctttacactccgaaatagaaattctcatactccttgttatctttagttttgaataaactagatctttaacat

SEQ ID NO: 135462 - DNA, 122 bp, Homo sapiens
ctccgggtcacgctgggaattgtagttcctccgcccgcaaggaaagcaggcataggacaccgtcgaaccaccactcccacgaggctctgcgcaggccgctcgcgttggctcagttaccatag

SEQ ID NO: 135463 - DNA, 122 bp, Homo sapiens
cctgtgcggcgacccgccagggagcgcactgacctccccaaagactgtggccaccgcaggcgccttggacccccatggggggacagggcgtcccctgcctcctgcagccccacgagggcggc

SEQ ID NO: 135464 - DNA, 122 bp, Homo sapiens
tgattctctcatgggtcgctcttcctctgcagactcccggagcacccctgctccaagtaccgcaagtggcactgagaacttggggagagcagaggctgtgcctagatttgtagggagtcccc

SEQ ID NO: 135465 - DNA, 122 bp, Homo sapiens
gggcggcaccaatgccccccgcccccgccccatcccggctcccccggtcccacagctggtcgagggaaactcaaactgcaggccacagggccaggagctgcatcctggtcgcactgaccctc

SEQ ID NO: 135466 - DNA, 122 bp, Homo sapiens
cgtggaggaagctcctagccccggagttcgcggtccagggatcttctgtcggtaccagaccggttggcaggtggacacgtgagaaacatttcaggagtgtcagagccacagtctgatccctt

SEQ ID NO: 135467 - DNA, 122 bp, Homo sapiens
aacttcctgccttaaaccaccaccatacacacgtcagctaaactctaattttaggctgggcgcagtagctaatgcttgtaatcccaggactttgggaggctgaggcggctcgcaaggctagg

SEQ ID NO: 135468 - DNA, 122 bp, Homo sapiens
tgtttataaaccctgagggtttctgtgaggtgtgaaattgttgtgaaaccatttaagaatcgtattattcaaaaatagtaaattttgccaagaaacagagagagttccaggatggatgctgt

SEQ ID NO: 135469 - DNA, 122 bp, Homo sapiens
cttaccccacggcttgcactctctcagcagagctgcaggtgcgtggatgattcgttgacacggtcagaattggctgcaggagggaattgaatcgaggttttctgtaaagcttaaaccccatc

SEQ ID NO: 135470 - DNA, 122 bp, Homo sapiens
gactgcccctcagtcccagaaccagagcccgtgctaaccccagcactggagctgctctgacgccgactgcaacagccattctcttctcgtagcagcatggtcggtccagctccggccatttg

SEQ ID NO: 135471 - DNA, 122 bp, Homo sapiens
gggaggggcggggcctccgggaagcaatcagggcaggggcggggcgtccggggagtggggcggggctcccggttccaggcgagttcgcagctgcgcgccgggtcctggaggccgaggccgct

SEQ ID NO: 135472 - DNA, 122 bp, Homo sapiens
tatattttttggcattgctttgcagatgttgggatgagagtcggagccgaataccaagctcggatccctgaatttgatccaggtagatatatttgcttaagcaaaatctcatatcccctttc

SEQ ID NO: 135473 - DNA, 122 bp, Homo sapiens
cctggcaggaagggtggcatcccccaaagggagggaagagggaagctggagaggtgtggccgacccttcccagagagacttcatgacactggcattccccaggggcagtgtgtggctctgtg

SEQ ID NO: 135474 - DNA, 122 bp, Homo sapiens
gccctatatggagtctcttttcctacccagaacctttcagagatcgtggccctgcagacacgccttaagcacctgcaggctgtgaaggaggggcgctacgtgttcctgttccgctccaagca

SEQ ID NO: 135475 - DNA, 122 bp, Homo sapiens
gtgcgggtcattggacagcctcggggcaacatgctcctggtgggtatcgggggcagcggacgccagagtctggcccgcctggcttcatccatctgcgactacaccaccttccagatcgaggt

SEQ ID NO: 135476 - DNA, 122 bp, Homo sapiens
tctagtgtgtatttagcacatcttaacttggactagatacattttacgtgtcccgctgtccgtgcattttgagtgcacggtagacttacggctaccctattggatagccacgctagactgag

SEQ ID NO: 135477 - DNA, 122 bp, Homo sapiens
gcctccggatgctcccaccgtcaccggggacgtttccccctgcataatcgagtgggcgagcggactggggacattgcactggcctaccgcctgactgacctgggaagccgcctgctgagcca

SEQ ID NO: 135478 - DNA, 122 bp, Homo sapiens
tgggacttcttcatcttcatcatcgccccttccccatagggtactgcagggggcggggggcggggcttcggcggggcggggctgcagggctcccgcgggctggcggggcggcttcggcgtgc

SEQ ID NO: 135479 - DNA, 122 bp, Homo sapiens
gcctgtaatcccagtctgaaggtattcagattcatgtctttgtcttgtgccacttttaaacgtgattctcctgaatggtacgttcagtaggaccacaatgctaaccaggctaaggcagaaag

SEQ ID NO: 135480 - DNA, 122 bp, Homo sapiens
ttggagccccgagctgagcctcgggcagaagatgacaggccagccgtggggcaaggaggccgcggaaacgcggaacggcttcggggagacggaagcgcccaatgagattcaccctgcagccc

SEQ ID NO: 135481 - DNA, 122 bp, Homo sapiens
ggggccggaagctttcggataacaacttccgctcgggaagtttgtaaaagtctgggctaccggcgcggcgtagtggatgcagcatcctagtggaggacgcccctgtggtgagtgcgcccgtg

SEQ ID NO: 135482 - DNA, 122 bp, Homo sapiens
cagagaggaacagccttggcagagcagcagagttgtcatagcaaccctgcccctgggccccggataggttcccaacaatcaccctttaaggctgcggatcttgctgcccccagtaccacgtt

SEQ ID NO: 135483 - DNA, 122 bp, Homo sapiens
ggtctctcaggcttcactgggctgcgtctcaggctatgtctccttgcagttggtcagcatcggctcctcttacaactatgggaacgaagaccaagccgagttcctctgtgtggtgtccaagg

SEQ ID NO: 135484 - DNA, 122 bp, Homo sapiens
ttcaggtgaaagacagtacttgcgatatcattgcacattgggaacttccaccccacttaccgctaatactggaaaccctattgctttcagagctctgagtaatctagtaccaaaatctcatc

SEQ ID NO: 135485 - DNA, 122 bp, Homo sapiens
tatgttacaaagttgatgctaacaagcattttaaacaagttaagtgcatcactgctgtttcgccttctcgtggttagaggtgtgagtcatgcttcctgttaagcccagagacagtgcctgtt

SEQ ID NO: 135486 - DNA, 122 bp, Homo sapiens
gccccgtccccgccgcgtccccggcttcgccccgccccttctcgcccctccagctggtcccgaggaccagagcacctgatagggcggggcccctgcctccggccaccattggccacgagccc

SEQ ID NO: 135487 - DNA, 122 bp, Homo sapiens
aggggcaggggtcacaccccttccagctctcgccagcctcgtgcggggctccgggggaaacgctggcttggggtgggatagggccctcgaaccctggcactgaggctctacggcaagttgga

SEQ ID NO: 135488 - DNA, 122 bp, Homo sapiens
agacaaggaaggagagagggatagcaccagagaagaagagaacatggaaaaagggatccccgaatcagggtctggagcttgataaagcaatagtaatactagccaatattctttgaagtcac

SEQ ID NO: 135489 - DNA, 122 bp, Homo sapiens
ccctcgcgcccgccccctcgcgcccgccccctcgcgcccgccccctcgcgcccgccccctcgcgcccgccccctcgcgcccgccccctcgggtaacaaacatggcccccggcggggcggaag

SEQ ID NO: 135490 - DNA, 122 bp, Homo sapiens
tcaggtctcagctcagacagctcctagtcttccgggatgatcttcctaccaaggtctcctcgggttcccaccgcgttccatgccgcctccattagtgaacatacataggtccgcaacggggt

SEQ ID NO: 135491 - DNA, 122 bp, Homo sapiens
tgaagtggtgcatcaagctgaagaagtgtggcctattggaaacagtactgtaaagagacccgaatctagtcctgtcagctgctaaccagctctttaagtcatatttcttttttgggtcttgg

SEQ ID NO: 135492 - DNA, 122 bp, Homo sapiens
cgctggccgcccgcgggggcagctggaaatagcgtagagccgggccctgggaggagccgccgcccccgcccgcgctgccgtggtgcgatggggacggggcccccggggtcgggctgggcccg

SEQ ID NO: 135493 - DNA, 122 bp, Homo sapiens
cagcacctctggagagcctgtctttgataatgtacctgcttcgtgccgatagagggagaccggattccacagcacacacgccatgcgtccctgctgtccggtagagggcagtagcggccacg

SEQ ID NO: 135494 - DNA, 122 bp, Homo sapiens
tctgcccttctctgatttcccctctcctctcctcaacctgatcaagacctctagcctcaccggtgtcttccaggccgctattctgatttaatttgtctccataactaagcacagttcatcat

SEQ ID NO: 135495 - DNA, 122 bp, Homo sapiens
gattcagcgagatttttcctgggtctccagtgccgcttcagacaatgaaatcagcgtgtccgatcatcaattctcatcatgatcgtgacgtcacaaaagacagcggccaatgggagcctgcg

SEQ ID NO: 135496 - DNA, 122 bp, Homo sapiens
ggggaccgtgcgagcccccaccccattcgctaggcgacggcggcgaccgggaggagcctgcgggcactccggaactggaaggagcttgttgctgtcacgatttgcattttcactgcactgct

SEQ ID NO: 135497 - DNA, 122 bp, Homo sapiens
aatatagaagatcagccatttactctgtgtcacttctctgagcttcacattcagaaataacgacagatacaactctcaagaattgttctacatattaggttagatagtgtaataagtgcttc

SEQ ID NO: 135498 - DNA, 122 bp, Homo sapiens
gatggcgcggcacctgagggagtaccaggagctcctcaacgtcaagatggccctggacatcgagatcgccacctaccgcaagctgctggagggcgaggagagccggtgagggtggagctgct

SEQ ID NO: 135499 - DNA, 122 bp, Homo sapiens
ggagggggcggggaggtggcccacagaacgcgggttctgtaaagagacgttgggaagattcgattccgagaagaggaagaaccggattgaaagagagccaggccgctgagggggagggggct

SEQ ID NO: 135500 - DNA, 122 bp, Homo sapiens
gggctctcaggggcctgtggatgagaagattctggggcctggatgggtgcgagcgggacccgggggagtgggagtcgccaggctctgagcaagcaagggctgcacctgcacctctgccgggc

SEQ ID NO: 135501 - DNA, 122 bp, Homo sapiens
ggcagtgaggacccaaagagtgagcaacagcaaaatttattgcaaagagcgaaagaacaccgcagtgtggaaggggactcaaagccagaagttcccactactggctcaggcagcctgctttt

SEQ ID NO: 135502 - DNA, 122 bp, Homo sapiens
ctcaacacgggcttccgttgtcacgtgactgcgtcccaggtctcgcaagtctggggctggcgagctccagctatcctcctcccgccccccggactgagcgctggagaagcacggactgagcg

SEQ ID NO: 135503 - DNA, 122 bp, Homo sapiens
ctaaggggagaaggtggagttttctagtctcagagtctccccccagcaagacgtatcagccggggagatccctttgacaaggatggagcgagcgcctgaggcaagggaggaaaacagcgctg

SEQ ID NO: 135504 - DNA, 122 bp, Homo sapiens
agtttgctcaattcaggacaacctcccctttgtcttgaagcctaccttcaagaatttttacgctctggtaacagagcacccactggacagagaggtcagaaatgaatataacatcaccatca

SEQ ID NO: 135505 - DNA, 122 bp, Homo sapiens
cagattcatattttctcctatgatagcaaacagcagttagcttctcattacctccaaatacgccccccactttttttcgcattgtgagatgcttttattacagtgaattaaactgcttacca

SEQ ID NO: 135506 - DNA, 122 bp, Homo sapiens
gaaggtgctggaggaagccaagggcgtgcatatcgtgaactatgaagcgtagtctgaccacggcaaggcaagactacaggggatcgagaggccgataactgaggtccaggatgtgtgtcaag

SEQ ID NO: 135507 - DNA, 122 bp, Homo sapiens
ttgttccactgacaaatgttgatggagtatctgttatgggctgggctcatgttcagcgtgcgagggttacaaaatagaacacaaaaaacaaacattcctgtgctcttagaggttacctcctg

SEQ ID NO: 135508 - DNA, 122 bp, Homo sapiens
gggagctcccagaccactggggaagagagaccccttggcctcaggggatgtcagtgtgatcggggagggcttctttgcagtggcagataccctggtcttatggtcttattgggaagacatgg

SEQ ID NO: 135509 - DNA, 122 bp, Homo sapiens
gacacactatcgcgctatgcaggcagactgcctgcagaaactacagcgatatctgaaatccggggtggccatcaggagaacaggtaccgaccctggccaggggctctactgttcccgcaatt

SEQ ID NO: 135510 - DNA, 122 bp, Homo sapiens
cagggaggaatcgtcaggcgggtcggactgcgcgtgtatttgcgtgtggagggatgtgagcgtgtgccagtgaaagctggtgtcacatgtcacaagcgtaaccactcctctcttgaacatct

SEQ ID NO: 135511 - DNA, 122 bp, Homo sapiens
taacgtcagaagaaaaacgtgcctgggttcaggacctgaagtggagaggtggcgtttaagcgtctcagccttgaagcagggttgtcacccgtcggcctgagagcacactgcctgtagatggc

SEQ ID NO: 135512 - DNA, 122 bp, Homo sapiens
aggagcaataggccataccatagagcccaggtgcacagtaggctgtaccatctaggtttgcgtgtcactctatgatgtttacacaatgaaaaaattgcctaaatgatacatttctcagaata

SEQ ID NO: 135513 - DNA, 122 bp, Homo sapiens
taaacccgccccactgtgcggtctagggccagtatctccaggagggccacaaacccgccccgctgtgcggtctagggcgagtatctccaggagggccacaaacccgccccactgtgcggtct

SEQ ID NO: 135514 - DNA, 122 bp, Homo sapiens
attcccaaccctgacctctctaggtcggcagccttgatgctacttctccgaacgccaggacgcacatcccagcctgctttctaccaccaccccacacacctcgagtctgcgcttccacccag

SEQ ID NO: 135515 - DNA, 122 bp, Homo sapiens
ttccgaggagcctcacgtcggaggagctgcctgggctgtgctggcgccaggcttagaagccggggccccaactccgatggtgccggggctgaggctgtccctggctctgggggtacatcctt

SEQ ID NO: 135516 - DNA, 122 bp, Homo sapiens
ccttcttattgaagatgaagcactttggcccgtagctggttgccagagctttcagaaaagcgtcggagtaaaacaaccatctctgatgacaaaagacttaaaatggctgtgaagagctctat

SEQ ID NO: 135517 - DNA, 122 bp, Homo sapiens
gcagaggcaccggccggcgagcgtgaggcgagccatgggcacggtgatcattgcaggggtcgtgtgcggcgtcgtctgcatcatgatggtggtggccgctgcctatggctgcatctacgcct

SEQ ID NO: 135518 - DNA, 122 bp, Homo sapiens
tgtaggatggataaggtgggggatgccctggaggaagtgctcagcaaagccctgagtcagcgcacgatcactgtcggggtgtacgaagcggccaagctgctcaacgtgtaagtggggccctt

SEQ ID NO: 135519 - DNA, 122 bp, Homo sapiens
aagtctgagagacctaaaggcaccgctagcgtctgggggcgtggccaaccatgcgggaggcggggccttgatgctggacatcaggctgtgctgcgggcagccagtgagaaggccgtcaagat

SEQ ID NO: 135520 - DNA, 122 bp, Homo sapiens
gtgtttctttagagccttttcagctatttcctgtgaagcaaactgcacgaaggcctcccccgtactcctcccctggaagtccaccggcaatgttatcccatttggcacgatttccaaccctt

SEQ ID NO: 135521 - DNA, 122 bp, Homo sapiens
aaaaaaactgggtgtccagacatgaattccaatcaaaggagccgggccttcttggcacatcgcgctccgagaacccgggagggatccagagaggcggggacgccctttgtcaccggcctgag

SEQ ID NO: 135522 - DNA, 122 bp, Homo sapiens
ggaaacatgcaaacagggcccacaaatgcatctttatgtttgtgtccattttaacctggtcgaagaacattccaacaaaaaatccaccatgcaccgagcaagaatatctcaggctgtgacca

SEQ ID NO: 135523 - DNA, 122 bp, Homo sapiens
ttatgagacgagagagaatgaggagtggaatttgtgtaaacggcgaagcaaactgggaagcgtgttaggaaggaatcaaaggcagcagcctaaggactccacgtgtgcctcagagagttcag

SEQ ID NO: 135524 - DNA, 122 bp, Homo sapiens
cgggctggcccaaactaagaaagcatgtctgatggtgccaagcggtggcctgggtggatccggctgcagcactgtggtgcgggagacagtggcttggcctggcaccatgggctctaagtatg

SEQ ID NO: 135525 - DNA, 122 bp, Homo sapiens
ccccagagccttacatgctggacatgggcaagataggaactcaagttacttccaggtctccgtaagtttaggactgtgaagagggcatcctaatagtcaaaaacataagtgttggccgggca

SEQ ID NO: 135526 - DNA, 122 bp, Homo sapiens
aggcttatctctgttgttatgaatcatccactggatacatagagggatgataactggttgcggatcattaggttcctgtccctagagttgtgtgtcccaaagcaagccactcagcattctgg

SEQ ID NO: 135527 - DNA, 122 bp, Homo sapiens
cagcgccggccgagggccccagcggagctcggcgggggtgcggggcggttccaggagcctcgccccctgctggggacccagcttgtgccctggcgtcgtggccgccggcaggcagcaaggaa

SEQ ID NO: 135528 - DNA, 122 bp, Homo sapiens
agaaatgcggtttactttgtaggccacgttggttcaataaatgatgcagcggacacagcccgcccagccccggcgcccgcccgcgccctccctcgcggtcccggccccactcctccgcccct

SEQ ID NO: 135529 - DNA, 122 bp, Homo sapiens
ctgagctcctgcgtgagagcgggagctgccacctgtgagacccgcaggggcacactgtcccggggagagaggtgtgtgagctgcacacacaggatgcagcctccaggagacagcgatgggct

SEQ ID NO: 135530 - DNA, 122 bp, Homo sapiens
atttgagattcaaagaggaatcgaatctggaggaagtgacaggcagaagaaatcaaagcccgttaccagtggcacgaggaattatctctggaaaagccatgttcaaaatgcagtgttaagaa

SEQ ID NO: 135531 - DNA, 122 bp, Homo sapiens
ctgctttggctgagatggctaagcagatctatgagtcacactcttaatctcattactgggcgattttccagcaacattcttggtgttcttttcagaaatcactttattttttttctgaaata

SEQ ID NO: 135532 - DNA, 122 bp, Homo sapiens
cgagggggcgctccagcgcgtctgtcttgtccctcttctaaagctccaccgttttgtgtgcgctttctgatagttgcatggcctgggttctgttcccccattgggttaagctttggattctc

SEQ ID NO: 135533 - DNA, 122 bp, Homo sapiens
ggccgtgaaggcgtcggccggaggacaccccatcgtgcaggtaggcactgcggccagactcgcacgtcacttggtgcttttgtggtcaaaaagtaactttggagccacagctaactgtgctt

SEQ ID NO: 135534 - DNA, 122 bp, Homo sapiens
tcaggacaaacttctagctctgcatatatgtcatttcaatgacacatcctgtctcctacccgactagaatgtgagcagccctgtgatctctatgtgctcataaacagtgcctaatgcgaatc

SEQ ID NO: 135535 - DNA, 122 bp, Homo sapiens
gcccgccgattggccccagccgccctggtgactcgacgcacttccgccccgggcgcggctcgggccacgcccacctgtcctgcagcactggatgctttgtgagttggggattgttgcgtccc

SEQ ID NO: 135536 - DNA, 122 bp, Homo sapiens
gagttagccggcgggcggtgcgggggtggccgcggtggccgcggctgcctcgggcgccggcgccgcctctccgcgctgttcccccgttgcccccttggtacccccggctgccggggactgcc

SEQ ID NO: 135537 - DNA, 122 bp, Homo sapiens
gacccactggctggtccactgtggcgcacgtcatccacgccaccacctacttacctccagcggagccctggaaacaaacacaattcgctgcctttcttgcagcaatataaataatccttata

SEQ ID NO: 135538 - DNA, 122 bp, Homo sapiens
caggccgtggcagtttgacaggtttccccactttacagtttgcatcaggtgttccaggggcgtttctgagtagtccatatagcagcaggcgtgaggaccacgcatacataagttgctgtgct

SEQ ID NO: 135539 - DNA, 122 bp, Homo sapiens
atttttagtagagacaaggtttcaccatgttggccagactggtctcgaactcctgagctccggtgatctgcccgcctcaaccttccagagtgctgagattacaggcgtgagccaccgtgccg

SEQ ID NO: 135540 - DNA, 122 bp, Homo sapiens
agcgcgagaggcaggctgggaattgtagttcgaaggccctcgagagcggctagagtctggcggccgagaggactagttgtcccagcgtgccctgcgcctcagcccgcgcgctcgcagcttct

SEQ ID NO: 135541 - DNA, 122 bp, Homo sapiens
aggttttccatgtggacgtggaggtgaaggacattaacgacaaccctccggtgttcccagcgacacaaaggaatctgttcatcgcggaatccaggccgcttgactctcggtttccactagag

SEQ ID NO: 135542 - DNA, 122 bp, Homo sapiens
ccgctgtctcgcggggtggaaagaccacagctgtgcccccgaaaagggcagggccgcggacgcagagggaaacagcgggatgcccagggccgggagcgcaaagcgggacatgcggaaagcga

SEQ ID NO: 135543 - DNA, 122 bp, Homo sapiens
gagctcaaccttcacttacctggggggcagacacattcggatggagcttcccgagcagtccggatcttcgctagtccgtccaacttctgagccggaaaaaaaaaaagaaaaaaaacgaggag

SEQ ID NO: 135544 - DNA, 122 bp, Homo sapiens
ggcgaggaaggggaacggaattttagatagggcggtctgggatcagaacctccagatgcccgtccatggactccaacgaagggagcgattccaggtaccagggcaccctgcacaaacctctc

SEQ ID NO: 135545 - DNA, 122 bp, Homo sapiens
cgcaccacccccaagcctacaacagcaaacagagggccctcggccaatcagcaggcactccgggttttcaagttgagttcaaacaggaccaccggaggccaatcagagtgcgcggccccgcc

SEQ ID NO: 135546 - DNA, 122 bp, Homo sapiens
gccagggagaatgccagtcactgctgctggttgcaggtcatcagctctgctccccgatcacgaattaaccctctagaaacacctcctgtcctaattgtgtcgctgcgaagctctctgagtgc

SEQ ID NO: 135547 - DNA, 122 bp, Homo sapiens
caccagctggtccacaccggcgagaagccctttcagtgcacattcgaaggctgcgggaaacgcttttcccttgatttcaatttgcgcacacacttgcgcatccacaccggcgataagccctt

SEQ ID NO: 135548 - DNA, 122 bp, Homo sapiens
ttggcagcccagggacccctcccaaaggggattttggtccccgactccgacaggagccctcgctggcctcggggctgctcccaccacacgtcagcatcccggcctgagccaggagggactcc

SEQ ID NO: 135549 - DNA, 122 bp, Homo sapiens
agattggcgcgcggaccactgggtgagcgcccaggaacgccggacgcgcgccttcacgcccgggtgcctggcggcgttttagaaaagctgtatttgaaaagcaaccgattggggtgaaggcg

SEQ ID NO: 135550 - DNA, 122 bp, Homo sapiens
cctccggctcctctagcccagatcacgtctctattgcactccccggaatcatccttaggtcgggagtaccctacgccacctccagggacgcttctagcacttctacatgcccttatccctcc

SEQ ID NO: 135551 - DNA, 122 bp, Homo sapiens
agagttgcagggcagctgtgtaagccaacttcggcgcagcagtggagggtcctggcttggcgtgggggatgctggacccgcggtcgaggatttggggatataggggaagagggaggaggtgg

SEQ ID NO: 135552 - DNA, 122 bp, Homo sapiens
gcacgcaacaccccagggcgggcacggggtcctccagcacgcaacaccccagggcgggcacggggtcctccagcacacagcaccccagggcgggcacggagtcctccagcacacagcacccc

SEQ ID NO: 135553 - DNA, 122 bp, Homo sapiens
ccccagactctctctcgggaactgggccctacttcagagatccagaaacaaaaattgtagcgtcgagatggttagggccgagtctacttctttcgccggttgggcctcagagccccaaggcc

SEQ ID NO: 135554 - DNA, 122 bp, Homo sapiens
aatgaagaactgtgcacggcgcaccccaggaattcagcttcctctcaaaagccatggttgcgaggtcgcgtgtttaacctcgcactggctgctgagggaattaacaggcctgcgcagcagct

SEQ ID NO: 135555 - DNA, 122 bp, Homo sapiens
gaagggtcgtccccggacttgtctttctgtggggcgtctagccgctgtccgtgtgccctccgcccttgcactatgggccctgaggtcgtacctgcttttgtattggtctttaaaggaacagc

SEQ ID NO: 135556 - DNA, 122 bp, Homo sapiens
gactatgacaccactgccacattcccttaccccccggaaagcagagagatgctctcaccccgacatccaaatggcttcccacagaaggctgtaacatggttttactctctccacatctcaaa

SEQ ID NO: 135557 - DNA, 122 bp, Homo sapiens
aaagtaaaaaaaaaaaaaacctaaaactgcaacatggaacggcacaaacgagctgcaggccgagttctaacgggctgagcctcaaaccagctgcaggccgagttctaacgggctgagccaca

SEQ ID NO: 135558 - DNA, 122 bp, Homo sapiens
cattggttcttcctccactgccaccacctgatactaaataaccgtcggtcaatggcaactcgatacggtttatggggcatccacggtgtgcccagatagaggagtgctttcgcttttgatat

SEQ ID NO: 135559 - DNA, 122 bp, Homo sapiens
taaagttagagaaatctgtgttagaaacccagctttcctgttttctagcattgtatccctcggtgagttctttaaccattcagggtcttagttttcatatttctttaatggaggaaaaaaaa

SEQ ID NO: 135560 - DNA, 122 bp, Homo sapiens
ttacttactgttgtgtattcaaagtaatagaggcagttatcggtcaggatgaaccaccggcgcttccaggtcttcacacgccctcctagaagcagaagggccccgtgagtctgcgctccgtg

SEQ ID NO: 135561 - DNA, 122 bp, Homo sapiens
caaacactagggtggaccagagggtaagatggagacgtggggaacaggccaggagccaggcgcaggggagagaacattgctgagagcaccgaggtggtccctgaacaagctgtgaacaaaag

SEQ ID NO: 135562 - DNA, 122 bp, Homo sapiens
aaaggatacacctgggatcttgaggagccagctgcacctgtttctgggctgagaggcttccggagccaccacaaggtggagaccaaggatggcgggggtggggtctttgcagaccggttgtt

SEQ ID NO: 135563 - DNA, 122 bp, Homo sapiens
cagttgcttattcctttcctttgtgcttgctgacaagtgagaggcctctatgcgactatgcgaaaaagaactggtcctacttccgttgcaacattctccattgcatgtctacagcagcagtt

SEQ ID NO: 135564 - DNA, 122 bp, Homo sapiens
acttgagtgtttctcgcgaatttgtccaaactagatacaagaaggacaagttcgagtctccgactcttccgcgatcccgcaccccccagccccttgctgtcacttgcctttttttttttgag

SEQ ID NO: 135565 - DNA, 122 bp, Homo sapiens
gctgccacgtatggcaatattaataggagttgtggcaccatcccaggtggcccagtgaggcgatgcagagctattacagacaggaaaagacagagagatttaaaatgtttgtgtgcaaagaa

SEQ ID NO: 135566 - DNA, 122 bp, Homo sapiens
ccatcccgggacctgggacctgcgaggcccagttgtggagcctcctgctgtggcggggcacggggcttctggggaccaaagtctggaaaaggggccgggaagatggacagggaaagcccttg

SEQ ID NO: 135567 - DNA, 122 bp, Homo sapiens
cccggtacgaaccctccgggaagccgggcgcgctgcctgcccttggcccggggcgcagagcgtcacactggatctggggagcatcctacccccactgtggacctcagtctcctcacctgaga

SEQ ID NO: 135568 - DNA, 122 bp, Homo sapiens
tcatataccctgattccccagtctcttcagtttcgttaagatgttgccttgtctccacttcgtatgcgtcatgttagtttattactcagctgctgacactaccttctcattttagttttctg

SEQ ID NO: 135569 - DNA, 122 bp, Homo sapiens
cctttcccggagaccacctcagttagggttgtctctgcttggcacagtcagggagaccagcggggacagtgttgaaggcctggctcctgttggtgggctctccagctaccccgggttgtctc

SEQ ID NO: 135570 - DNA, 122 bp, Homo sapiens
cagtgtcgccgggctctgggtcctggggggcccctgccgaggtgcgtggctctccgtccacgtgttctagcctcacccgtggtgaccaggccccacgtcccagcctcgccgtagcctgggca

SEQ ID NO: 135571 - DNA, 122 bp, Homo sapiens
atccaaattgagtgcaggtcgctttaagaaaggagtagctgtaatctgaagcctgctggacgctggattagaaggcagcaaaaaaagctctgtgctggctggagccccctcagtgtgcaggc

SEQ ID NO: 135572 - DNA, 122 bp, Homo sapiens
cagcccagcctagtggagacttgctatctgatttccatcatcctccattcccctttgcaccgcagccccctgaattaattaagcaagcaagcaaacaatcaagtcttgttcgacactgttaa

SEQ ID NO: 135573 - DNA, 122 bp, Homo sapiens
tcgttgttgcaagcaccgtccactcaggaggcgccccgcaaccggtgtgacgagtgccaacgaggaccaggagatggaactagaagcattacgctctatttatgaaggagatgaaagtttcc

SEQ ID NO: 135574 - DNA, 122 bp, Homo sapiens
ttgtctttagaaattgttattataatttattgacagattaaaatttaatgtccaatgttacgatgaaataaaatgttacttgaaaaaatgttagaatgtttaaaggaatctttattctgaaa

SEQ ID NO: 135575 - DNA, 122 bp, Homo sapiens
cctggccgcgtggccagggctgcgtaccaggcattgtgccgtgctgtccaaagccggctgcgctcctcggcctccttggcccaggagaagtcagaggctccgttctgctggactatctcctc

SEQ ID NO: 135576 - DNA, 122 bp, Homo sapiens
cccctcccagctctcctagagtcaagaggacgccctcctgccgcagacttcctgcgcaagcgccatcccatgtccccgcctccaaaccaattggaagcggcgccgcctgggcgcttggggca

SEQ ID NO: 135577 - DNA, 122 bp, Homo sapiens
atccgcagaactctcagtccggtccagccggcttctccttttctcgtggagccattgtaacgctctccaggcatcagtctagttgccgggggcgctggcaagggggttaggatgaggctccc

SEQ ID NO: 135578 - DNA, 122 bp, Homo sapiens
gatcacgctttgtggaggcgctcgtggagttgagcctactacagtagcacagatgttccccgagagtgaacagaccaagccaaggtgaggaggtgggggcgcccgagaggcagacatgccac

SEQ ID NO: 135579 - DNA, 122 bp, Homo sapiens
acttcgtgatccgcccgcttcggcctcccaaagtgctgagattacagacgtgagccaccgcgccctgcctatattaggtttttaaatagcaggaggcaaagcttttcggtgtgatcctgact

SEQ ID NO: 135580 - DNA, 122 bp, Homo sapiens
gatggcaacacagcagagcgtgaagtcaagaacatgcagggggccgggcgctgtggcttacgctataatcccaggactctgggaggccaaggcaggcggatcacttaaggtcaggagttcaa

SEQ ID NO: 135581 - DNA, 122 bp, Homo sapiens
caaattttcgagtaaactgacgtcctggaagaagcacccttattttcaccattttacagtcgaagaagggaagataagaggcggtgaatccgagactttcattcaggtgacgatccctcgcg

SEQ ID NO: 135582 - DNA, 122 bp, Homo sapiens
tgggcggtgatgagtaaaagctgctgcaaatgaaaaaggcctcccacagtgctgggagcacggtcgaggtccacaaaacagtagctatcagggtgattcttatgtaaatgctctgaataata

SEQ ID NO: 135583 - DNA, 122 bp, Homo sapiens
ctcctggggtgggcagcgcaggtctggcctgcgggtggggggtggagagtgagaggcacgcggggcaccagctcagctcccctctggggatttcgtactcgcagtttaaggaaccggtggag

SEQ ID NO: 135584 - DNA, 122 bp, Homo sapiens
acgttgaaaacccctgtgagagggggtgtcatgggcccatctcagtctggaaggattctgcgctcagaggaaggaaaggcctggggcccggagcggggactccttctctgctgcagctggaa

SEQ ID NO: 135585 - DNA, 122 bp, Homo sapiens
agtctttcatctagggtccccgtagtctccaggactgtcactactcatgtatttgccctgcgtcttggtttatgtttttgtagaacatggatgttattcatccacgcctcatcaatccctgc

SEQ ID NO: 135586 - DNA, 122 bp, Homo sapiens
aaaccttgttcaagtttgcagcaagtactttcccggtgcgcaaaactgggcgactgggaacgcgttgagacgttcctctttcccgcttctccacctttacgcctgaaagaagactcccaaag

SEQ ID NO: 135587 - DNA, 122 bp, Homo sapiens
atgttaaaggcccggctctctggtttcgggagagatcacagtggatctgagaatatgaagcggtcatattctcccagagcagtgcatgttgcttgccataagccttctgtcatgctgatgag

SEQ ID NO: 135588 - DNA, 122 bp, Homo sapiens
gagtactttatttcagtagctcttaacttagaaagttgggagcctagcttggtccacaggcgcccaggagagaggggcgggaggaaggctctgcagcccgagggggcgtgtgtaggggcggg

SEQ ID NO: 135589 - DNA, 122 bp, Homo sapiens
tactaatgtataacctattgtagatacatagtagagtcccagtgttgattaattcttctacgtataatgatgattactagcttgtctgaggcttttctaatttcttcccatcctttccctgt

SEQ ID NO: 135590 - DNA, 122 bp, Homo sapiens
taactaaataatacttacctgatgcagataatttaagttgtctacatattcacctggtaccgtgcatttcaaacttctttggggagagatgagggggtagcagatgagttttatctgtgaaa

SEQ ID NO: 135591 - DNA, 122 bp, Homo sapiens
aagaaaatcgattgacaaactgagaaaactaataaatgagttcagtaagttggctctacacgtggtaaacgaggaaatccatacataggttcctgtacaccagcaatagccgtgtgagaagt

SEQ ID NO: 135592 - DNA, 122 bp, Homo sapiens
tattcagatgaagaaattcaaccaggtggtaccaccaaaacatcatgacttactgtccaccgcccccactccgagtccatgcgcacaatctacaattccttttttttttttttcaagttaca

SEQ ID NO: 135593 - DNA, 122 bp, Homo sapiens
cggtgttggcagcctcaggggcacggccacctctgagcccgaagggtgagaagcagcgtccggagccgtaggcctagacacaggcagccgctccaccaccagacagcaggagcagaaacacc

SEQ ID NO: 135594 - DNA, 122 bp, Homo sapiens
gaagcaagagtacagaatggagccagcgtgaatcactgtaacttgtgggtaggagcatgtcgcttgaattgccatttgcagggagcctggaggtcttgcaaagaaagagggaagagtaaaga

SEQ ID NO: 135595 - DNA, 122 bp, Homo sapiens
ctgacgcctgcgcggaaccgggctgggcgctcgtcgcgtagtgggtgggggcgcagggagcgggagccgccgccgccgccgccgccgccggagctaacctcggggaccgagatgcaggtggg

SEQ ID NO: 135596 - DNA, 122 bp, Homo sapiens
gaactggaacagagcagtggcactggagattgcaggggagttgtcacagcaggcctgagccgtctctgcaaggcctgcttataaggttgtctgggaacttggattgggggagggttcccacc

SEQ ID NO: 135597 - DNA, 122 bp, Homo sapiens
gaccccacccctgctcagggtcccccgtgatcgcgtactccgcggtgggctgggcctggccgagctgcacccctcactcagggaccccttgaaaccccctggagacccccaagccgggaccc

SEQ ID NO: 135598 - DNA, 122 bp, Homo sapiens
acctgcctgcgctgccagccaccggctgctctcctttctccccacttcgcttcggaagtccggaggtaatcctgcctaatttttgcaagaagacaccagaatatgtcccggcaacaagaact

SEQ ID NO: 135599 - DNA, 122 bp, Homo sapiens
caggtacgtggggacagttctggttctacttccctgctgggctatgtcacctgtgacaaacgctcctgtgggcaagtcttctttgctacttgtccctgcaactgccccaacaaagggctgct

SEQ ID NO: 135600 - DNA, 122 bp, Homo sapiens
caaagatggtaaatattatttcataaagcatgtagctattaaagctatttttattaagttcgaaagatggcaggaggtcttcaaatgtactcttggccaaattgctagttatctaaacagaa

SEQ ID NO: 135601 - DNA, 122 bp, Homo sapiens
agtgcttgtggtgccggcagggcgggcgggcgggagtggtgtcagcacaggcagggtcctcgtggagcgttttcgaagaactctccaggcagcgatgccttccagaaacatccagaaatgca

SEQ ID NO: 135602 - DNA, 122 bp, Homo sapiens
agggaccgcccgtcgccgggctctccccgcgccccagtgtgtgtccgggcccggcccgaccgtctccacccgtccgcccgcggctccagccgggttctcatggtgctcaaacccgctcccct

SEQ ID NO: 135603 - DNA, 122 bp, Homo sapiens
attgcatgatatattttgactaatgagaatgtgggaaggtacttctgcgactgcaatgcacgtggcttctaatatggctaagtgggactgatgcctggtttgctgaaatctagtgttaaaat

SEQ ID NO: 135604 - DNA, 122 bp, Homo sapiens
gtgcgtgcacgttctctccgctaatgtcactgctcaaaacgttcagaaaattaacacttacgccagggtcggaggcctcaggaggttctgtatccttctcactgacaatctatacaaaagca

SEQ ID NO: 135605 - DNA, 122 bp, Homo sapiens
ggcctctgggtccagttgtcagcctttaccatgtggcccagccagctgcagcctcattcccggccaccagcccccactctccacagcgctccagcctccactctccaaagtgctcacacttc

SEQ ID NO: 135606 - DNA, 122 bp, Homo sapiens
gattcccctcgtggcacagtcttcgccccttaacagagagtagctagtaccacccatactcgctgagaaactggaaacgagggagggtcgaagttaaaccctttttagtggcggtgcatgcg

SEQ ID NO: 135607 - DNA, 122 bp, Homo sapiens
gaccaaactaagcctagcatgttttatgggatgcccaaagctgtgaccacaagcagaagtcggcttaggcaatttgttcctccagtaaaccgttcatttgttcattcattcattcattcaac

SEQ ID NO: 135608 - DNA, 122 bp, Homo sapiens
tttcttgtcatcataaaataagaggtgggaattactaagtttaaatttgccgattagtttcgatgattcaccagtgcttgatgattaaggggtattggtgcagtgccactgagttgctgttc

SEQ ID NO: 135609 - DNA, 122 bp, Homo sapiens
gccccgagggtcatgcaagtgaccagatcgagtctagaacagacctcttgctggacagtgcgggactcgatttggcggggccggagatttggggaagtttgtccagcaaggggcgggtgacg

SEQ ID NO: 135610 - DNA, 122 bp, Homo sapiens
ccggccacaaggctaagcaccagtgccatggatgccaaggtgggccagagtgaaggcggccgcacacagcgcgggtctgagtccagagacgtcccatggccagcacttttaatcaaggactt

SEQ ID NO: 135611 - DNA, 122 bp, Homo sapiens
acctttccttgaattgtcagtttcacctctcctacacacaaaaatccaccccgactgcgccgtccacaataccagctagtttgctgaattagttcagcgactcaaggaggccttacgaggtt

SEQ ID NO: 135612 - DNA, 122 bp, Homo sapiens
cgcagctcggaatcagggagacgaccaaatccacatggagtccaaattcattaaaatccacgtcaagccaccagacacttatctgtattcctgaagtcgctcctcggtctccgctccgcgcg

SEQ ID NO: 135613 - DNA, 122 bp, Homo sapiens
ctggtcccctcccctggagtcagcctgtgttctgatttgtgcctgtgttcccggcttttccgtgtgcgttcaggcagccacccgtgtgcctccctctgccttgtcaccctgcaggtagcgca

SEQ ID NO: 135614 - DNA, 122 bp, Homo sapiens
tgagcactggcctcatattttataatatcatgagtaacatctgagggtaaaagtgtttgccgggcaatgagtcaccttgttggacaatttaagacaagtaaggctggatctttccagtaagc

SEQ ID NO: 135615 - DNA, 122 bp, Homo sapiens
aacagaatttgagcaaagggcatggtagtgaagacacacaacactcaggagaaatcaagccggcaaattctctttgtgcagttaagaggtcaaatgactttcccaagatcacacaattattt

SEQ ID NO: 135616 - DNA, 122 bp, Homo sapiens
cctcaactccaccctctgcgaccggaggactatgcccctagtaactgctgtcggtgtggacgctgtgctggttctgttttctaaaggagcagaaggacaggtctctgagacaggatcgttgt

SEQ ID NO: 135617 - DNA, 122 bp, Homo sapiens
gaggagaagggaagggggcttctcacagtcggggcgatctggtctggaggagggaggggccgccagtcgccctggggaccgtcaccttgtcccactagggaactcggggtgcggccctcgcc

SEQ ID NO: 135618 - DNA, 122 bp, Homo sapiens
gcctggtggaaaacagagagcattatttggtttaattgattcaaaaacaccagaggaccacgaccaggacaccatgagcccccattcctacaccagtgcctcacatgctctctccccaatgc

SEQ ID NO: 135619 - DNA, 122 bp, Homo sapiens
aacactcacccgcgggcagaaaaagcgcccgcagctccggcttcgcttccctttgtcccgcgctcgccccgcccctcgcgtccggagcttccgcactcgcactttccacactcttcttaatt

SEQ ID NO: 135620 - DNA, 122 bp, Homo sapiens
cctcggccaggccgtgaacctgtctgggatctgaggagtgtctctgcctgaccgccaccccgtctgggaggtgaggagcgtctctgcccggccgccccattggggaagtggggggcagcccc

SEQ ID NO: 135621 - DNA, 122 bp, Homo sapiens
ggaagtgttgtgacggaagctccctgggcggggcggggctacaagtgcggtgggcgggggcgggggcgggggcgggggcggggggaggtgcacaactgtaggccgggttctcaagctcgccc

SEQ ID NO: 135622 - DNA, 122 bp, Homo sapiens
tccgccccgccccctcacgtctgaccccgccctctctccccgcccccgcccccgcccatgcgtggcagccccgcccccaagagtctgatgacgccatctccccgcccaggcgcggcaggctc

SEQ ID NO: 135623 - DNA, 122 bp, Homo sapiens
tgagctgaggtacctggctttagtgaagaccctgtgggggcttcctggctgcggcttcgacgtgcctgactccacacgcccctaaggtttgaagaaaacctgctggaggtttgggacctaac

SEQ ID NO: 135624 - DNA, 122 bp, Homo sapiens
cagtcatcagaaggcggggtggggtggccatcctgggagaagtccccaagcttgagctggcggtgggggtgggagcgaggcctcccaacctctgggcataaaaggagtggaaagagaattgc

SEQ ID NO: 135625 - DNA, 122 bp, Homo sapiens
agcgctctcggttaggggtttggggtttggcggcctagatcccgggcactggcggcccagcgctgacctggttggtggcattgtgttcccaacggcctcttgacgacctcagcacgggtttc

SEQ ID NO: 135626 - DNA, 122 bp, Homo sapiens
cagacatgcaaagatcctaggagacagtccccatagaccttcagacattaaaaagggagccgtacagtttgtttgaagcacttcgtcttacccatttatgtaggggccccaggaaacctaca

SEQ ID NO: 135627 - DNA, 122 bp, Homo sapiens
gtcccccctgcatgttaactcccagtaacaacaacgggtgctgtgctgatgacctcagaacgtggcaggctcctgggccatcgcagtgactcacagcagtcctaacagacaggcctgctgct

SEQ ID NO: 135628 - DNA, 122 bp, Homo sapiens
aggagagcgcgcgagaacctgagggagccagtaagagtcgagcagggactggagggctcccgatggggtgtagccaatcagggcagagatgggtggggctaggctgcgggaaggggcggact

SEQ ID NO: 135629 - DNA, 122 bp, Homo sapiens
agtctgaacctggtactgatatacgcttcagccctcagaaggcaaccgcttgattctctgcgcaggcgcagcgttctcaacaccgccaacgggcacaaagccacgcccccacggccgaactc

SEQ ID NO: 135630 - DNA, 122 bp, Homo sapiens
gcccggggcccgctacgccatggccggctctttcctgcaggaccagttcgtgagcaactacgccaaggcccgcttccacccgggcgcgggcgcgggccccgggccgggtacggaccgcagcg

SEQ ID NO: 135631 - DNA, 122 bp, Homo sapiens
ggcgccccacagcctgtgctaagatcttgcgttcagtatgaccagagcaagtacccaaagcgtatgtcatgtcaactgggtagaataagtccctagttgaggcaatatccggagaaaattac

SEQ ID NO: 135632 - DNA, 122 bp, Homo sapiens
cggtacccggcccgcggtgggtcttctccatccagatgtagcagttgttctgggccacgccggtctgcgagtcgaggaagggcagtcgcaggctgcgctcggcgcacaggcgcgcgttgtaa

SEQ ID NO: 135633 - DNA, 122 bp, Homo sapiens
tacaaatatttcctcccactctgtggggttacttttcttttggactcgtagtttcgctgtcgccgaggctggagtacaatggcatgatctcagctcactgaagctgccgcctcccaagttca

SEQ ID NO: 135634 - DNA, 122 bp, Homo sapiens
tggagaccagccaggccaacacagcgaaaccccgtctccaccaaaaaaataccagtcaggcgtggcagcgcgtgcctgcaatcgcacgcactgggcaggctgaggcaggagaatcaggcagg

SEQ ID NO: 135635 - DNA, 122 bp, Homo sapiens
agccctctgcctgccctactgctggcctaggcctcgggctgtctggcggccgcgactcagcgctgacctcgggcgcaacccagtcaggcttcgtgtccttcaggggttctaggctaacaggc

SEQ ID NO: 135636 - DNA, 122 bp, Homo sapiens
ggagaatctgccaagggactgtgtccacagctgagaaaaaatagccagatcagttaagagcgctgctggtctgcggtcaggctacagaaaggctacagctgcaccagttcggggtgttatgc

SEQ ID NO: 135637 - DNA, 122 bp, Homo sapiens
agaggtggaacgcaggctccagggccacatggaatccagtgggaggcccatccccagggccgaggcctgagacgcacctgtgctcagtttcgcctcctccccactggttttcccgggagcac

SEQ ID NO: 135638 - DNA, 122 bp, Homo sapiens
tcgggcgcacgtcttgcctcgactaaggagtggcgagctctgccagggcagcggcgccaccgagcaatccaaacacttagcgggattccccagccctggccggccccgcccccggacagccg

SEQ ID NO: 135639 - DNA, 122 bp, Homo sapiens
cgtgggctgcccacctcggcctcccaaagtgctaggattacaggtgtgagccaccgtgcccggccgggagtcttattttttgtgggccctgaaatttaaaggaaaagttctaaaaagtcact

SEQ ID NO: 135640 - DNA, 122 bp, Homo sapiens
cacaggctgtggaggtccccacagacacacggcacgggcctcacctgaggaaggttttcgcgtgggtgaggtgaggtgtcaccaacaagaaatcatccaccaaacgcaggagcagcctaaaa

SEQ ID NO: 135641 - DNA, 122 bp, Homo sapiens
ttccgcagccttactgatgggaacagcattgcctcctttgctcagagcttactctgtgcccgggaggggccagggtctccgcttatacgtgagaaaattagggttcaaagaagtaaagggcc

SEQ ID NO: 135642 - DNA, 122 bp, Homo sapiens
gcgccacagcgggatgcacttgagcatggtgcgggtgggcggcgcgggctccggcggcggcgctcggcgggctcggggccggggggcggggctcagtccgcatgggcgccgcgcatggggag

SEQ ID NO: 135643 - DNA, 122 bp, Homo sapiens
tacatactgtaggaaatgtgtgcagagtgttctaagcatagaggggctggagggaaatgacggggaacatttgaatcaggaagaaattccagaggaagttgtgactatgctgaaagctgaga

SEQ ID NO: 135644 - DNA, 122 bp, Homo sapiens
aattatactgtgcagagatccaaagcccctaagaaggtttcattaatgaacaatttcagacgattgtttaagtcttcgcctgacaggtaatgttggcatgtcggcaggtggggttagggttt

SEQ ID NO: 135645 - DNA, 122 bp, Homo sapiens
gaccttttcaagtgtggaggaaagggaagctgcttttgtcttcaggaatgatgcaggtctcgactcaagcctgacgggcccaaacctccctggagctggctgacgactctgcccgagttcct

SEQ ID NO: 135646 - DNA, 122 bp, Homo sapiens
cctaccccgggttcctttgggttctctttgtctcctttactcgggcaccctagtaacaagcgacccagcgtgactctctcccggcagccaaggctccaacagcctcccgcccaggcgccccc

SEQ ID NO: 135647 - DNA, 122 bp, Homo sapiens
tgagctgtattaacataattacgtggaaaagatctcacaatggaagacattcaaagaccacgccaaagtagaatcaggaggacctggctatggctcactgaccggtccaacttcttcacctt

SEQ ID NO: 135648 - DNA, 122 bp, Homo sapiens
gaagccatctctccaaagtgggttcagagccttggctccataaactgtattaacaccaaacgtctttttggctggtttgaagtctgactcttcctggaatttctttagtttagtcccggtcg

SEQ ID NO: 135649 - DNA, 122 bp, Homo sapiens
catcggatggacattgcagtggcctctaagggaagccctgtttcaacctttgcctcccttcgcatccctcccacccacctcataatctgttctcaaaacaaaaacaggggcattctttttta

SEQ ID NO: 135650 - DNA, 122 bp, Homo sapiens
gcccttaaggttgctaaggcgacggttctggccagagcgaggcgcattgacgtcagtagccgaacgctgattggctgcggccaggccgtttccggtggagctgtcgcctagccgctatcgca

SEQ ID NO: 135651 - DNA, 122 bp, Homo sapiens
ttctttaaataattgcttcttgactcttagacgttccggttcacgggggtgacataattgcggggaaacatgccggtctgcccgtggcaagctcctttccaccagttggggtctgagttatc

SEQ ID NO: 135652 - DNA, 122 bp, Homo sapiens
ccggtgcccggtctcggtcccagcccagagccgctcgcgcctggacgccggccgccccgtcgaacctttgggtctccgagctccccgcccccgcccccaatcaggaccggtccagacctcca

SEQ ID NO: 135653 - DNA, 122 bp, Homo sapiens
atgccgggagtcgaagccttggcatggctgagtggctggcttgaggtcatgaccccagcccgggtctctgcactgtcacggcctccccggggacgccaagggtgcgggcaggcggtgttggc

SEQ ID NO: 135654 - DNA, 122 bp, Homo sapiens
gaggagccgggtgggtctgggtggggagtggtagctaccctaggtccgcccgggcccagccgggccccccacgtggccgctgtggcctggctgcgccgggcctggccaggcggggctgggcg

SEQ ID NO: 135655 - DNA, 122 bp, Homo sapiens
cgggtggcttggcccccaagctcatgttcttaatcacaaaactgtcacgtcccaatcatgcgccaaatggtttctgtttggattgccatgtgacagggtagaggctggcagcggcggatctc

SEQ ID NO: 135656 - DNA, 122 bp, Homo sapiens
aggcagggaatttggcgatgggtgagctttatgtatatctgaacaaggcacatgcctcttcgtgtgtgtgtgtgtgtgtgtgtgtgtgtgtgtgtgtgtgtgtgtgtgtgtgaatgtggtca

SEQ ID NO: 135657 - DNA, 122 bp, Homo sapiens
gcacagcgaccaaaaatagcccctgctttgctctgtctgcggacagcgcttcctgagcctcgccggggacctagccgggaccgcagctccggaggccttgtgtctgtgccctctgctgtgcg

SEQ ID NO: 135658 - DNA, 122 bp, Homo sapiens
ggaggaggtggagaagcttctcaacggctctgcgggggacacctggcggcacctggcgggcgagctgggctaccagcccgagcacatagactcctttacccatgaggcctgccccgttcgcg

SEQ ID NO: 135659 - DNA, 122 bp, Homo sapiens
cgccccgttccgccccgccgcccgcccctggcgcccctctttcccgcacccgcccggagacgggaggaaaccgaggcccctgaaaacgcagctcccctacacccgaaaagacgcgaccccac

SEQ ID NO: 135660 - DNA, 122 bp, Homo sapiens
tcctcaggcccaggcatatctgctgccaggcctgctgtttggctcaggccatgttggacacgggggctttgctatgaccctggtggtgtccagaactaggctgggaagccaaatggcatccc

SEQ ID NO: 135661 - DNA, 122 bp, Homo sapiens
catggttccggcttgacgcggatacctagtgacacttggcggccaggccgggcagacttccgggtgggtgatccctggcgctgtgcggagccattcgctgcgctgaagcagtgcgcatgcgc

SEQ ID NO: 135662 - DNA, 122 bp, Homo sapiens
catgcccccgagcaggctggacgtggcctccgtggccaggatgagcggcttcaccacagtcgggggcagctggcggatcacgccccccacggcgcccgtcagccccttctgctcatggcccc

SEQ ID NO: 135663 - DNA, 122 bp, Homo sapiens
gcccagtactaatgtctcttccctttctcctgttcacagtccttcctttgatgaaccacacgcaccctaacttccatctcaggctcttctctgaagaatctgattatagataggtacagatc

SEQ ID NO: 135664 - DNA, 122 bp, Homo sapiens
caatctcaaaaaaaaaaaaaaagccggaatgatggatcattacacttctaaaactctaggcgggtgaagcctggtggacgcccctcatgctgttccactggggctctggggagacctaaaaa

SEQ ID NO: 135665 - DNA, 122 bp, Homo sapiens
agaaaaagaaagacgcagaaagctgaacctgtgcctctactgtggaacaggaggtcactacgctgacaattgtcctgccaaggcctcaaagtcttcgccggcgggaaactccccggccccgc

SEQ ID NO: 135666 - DNA, 122 bp, Homo sapiens
gagatcatatctaaaggaaggcagcagttccaagggaaatggggaaatggctctgggccccggcggatgtcagcaatgggcattgccatccttcccagccagcccacccttggcaagagcag

SEQ ID NO: 135667 - DNA, 122 bp, Homo sapiens
aaacaagacaatataatgcaagttctgtttctgaagtatctttggcacccatccactgtccgagcttgataagccctaccgtcttccactggaccctgccactacctccccagggtcccctc

SEQ ID NO: 135668 - DNA, 122 bp, Homo sapiens
gggcttcgccatggctggggcggcgggctgcgcggcgggctgcgcagagagctggaagtgcggccggaggcgctgggctgccgggcaggggtggagtccgccccgccgcgccagcagctttc

SEQ ID NO: 135669 - DNA, 122 bp, Homo sapiens
gtgtatagacagctctccgagcggcagcagctggtggctgagcagctggagcagctggtgcgctgcctggcggagaaagtcccgcaaggcgaggcgctggcgccggcgcccccggacgaggg

SEQ ID NO: 135670 - DNA, 122 bp, Homo sapiens
agttagtcagaactgtgggctccctaaggggaacaagatcggggcctatatggctgggtacgagggaggagatgctgggggcttggattccttgtcctgagggaagagggagctgaggacgt

SEQ ID NO: 135671 - DNA, 122 bp, Homo sapiens
ccgccagggaggtcaggggccgaggtcagggggccgaggtcaggggctgaggtcaggggccgaggtcaggggccgaggtcagagggccgaggtcaggggccgaggtcaggggccgaggtcag

SEQ ID NO: 135672 - DNA, 122 bp, Homo sapiens
gatgaatgagattagctgggtaaagaagggaggaatgagtggaagaaagaggaaagcatgcgtgaaggccctgagacagggaatcacaaacctcatctgagacactagaaggccagcatggc

SEQ ID NO: 135673 - DNA, 122 bp, Homo sapiens
taagttgtaaatgcactcccagtttgctctccttccaaatcctggtctgtactactaaaccgaaatagcatagccttagcctgcttttccttgggaggaaaacctcaagatgaatttgacgt

SEQ ID NO: 135674 - DNA, 122 bp, Homo sapiens
ggagcacgctgagttccatcggcagcccggggaactgggcgctatcagacctctgcgctacgtcaattctgcagtaacttttctagtgtgcaaggacttttgcctgtcccctgattgttccc

SEQ ID NO: 135675 - DNA, 122 bp, Homo sapiens
taggtaagcccgcgctggctgcgaaggcgggagcggcaccaggaccatccagggcgcaggcgcagggacctcacggccacgccactactcagcccgagctggccaatggggagcggcggccg

SEQ ID NO: 135676 - DNA, 122 bp, Homo sapiens
tgggcgccgggcgaggtcgaggactggcagtctgatgcccggtcaccggcgccacagcggcgtccagctggcaggtgtcgtccttcagcgagaccaaggcccaccagattctgcagcagaag

SEQ ID NO: 135677 - DNA, 122 bp, Homo sapiens
cgtcaatgattccggggctgaagtgggcatcgacgggtgcactttgctgttccagggagccggctcggcaggcggcggcgacgtggaacttgggctagggctagaaccggcgaaaagcaagc

SEQ ID NO: 135678 - DNA, 122 bp, Homo sapiens
cacgccactgcactccagcagacttgtttagtctgtttttgagacttaggcttgctctgtcgcccaggctgtagtgctgtggtgtgatcttggctcactgcaacctctgcctctccaggtca

SEQ ID NO: 135679 - DNA, 122 bp, Homo sapiens
ctccctcaggccttcggtttcctcacctacaagacgagagggctggaccagatggaaattcgggttgtaaggggatgtctgtgcgcagcccaccctgcccacgggcccctcgagcctccatc

SEQ ID NO: 135680 - DNA, 122 bp, Homo sapiens
cggaaagggaactccctgaccccttgcgcttcccaggtgaggcaatgcctcgccctgcttcggctcgagcacggtgcgcacacacactggcctgcacccactgtctggcactccctagtgag

SEQ ID NO: 135681 - DNA, 122 bp, Homo sapiens
ggtcagcagggaggggctgggccccgggggacctcccacccatggctcccacaggccccccggtggctcaccgttgagccaaaaggccaggtactctgtcttcatggagtggtggggcccca

SEQ ID NO: 135682 - DNA, 122 bp, Homo sapiens
gagggaaacagacctccagtccctgaaaaaggtcttctcttctggatactgctagttgcccgggacttcaagtaaggtggcaggccctttcactgcgttgccacagccccaggaacaaatgt

SEQ ID NO: 135683 - DNA, 122 bp, Homo sapiens
tgcctgagtgggccatcatcagaagcccttctccttttgttccatttgctaggccttcctcgaaagaactgaatgagatagacaggaaggggagggggtgggccagggtgggggagggaagg

SEQ ID NO: 135684 - DNA, 122 bp, Homo sapiens
aacaaacagccgctacgggcaacgggggcggagcttgggaatgcaaggcgggacaggcgccgttggggaggggaacggaggccgggtggctggtaaggggcaggctcaggcacagcggaggg

SEQ ID NO: 135685 - DNA, 122 bp, Homo sapiens
tcattcccaaactaagaattatcacacagataccacacttgggaaacagagtgtatggaccgctaccatttacagctttcaagtgttactaattttgcttttgacattttttaagaactctc

SEQ ID NO: 135686 - DNA, 122 bp, Homo sapiens
agacaaaatggcctctagtaaatccggagccggagccggcgaagccgcggagttgaggcgcgcctgggagagccaaggcccggcgggctatgcaggtgcatgcccccccctccgcccaagga

SEQ ID NO: 135687 - DNA, 122 bp, Homo sapiens
ggaaaaggccggggtgggggtggaattcctcggcgggcagggggcgcatgcgccgggcaccgtggggcgggacgtggcccgggaggagctggggggactgggtggtgcacgtgcgggcttgg

SEQ ID NO: 135688 - DNA, 122 bp, Homo sapiens
aaatgctggcggcctctgggctggggccgagcagggggtgccgaccgcgggaagtctgggcggccgccctcccacccagacgagccgatgctgggccgcggtccctctcagctacctcgctt

SEQ ID NO: 135689 - DNA, 122 bp, Homo sapiens
gacaggatggttcagtcagaccacatttgcaaagcgagagccgtctgtggagtcctggcccgtggggtcctggtgttgggtctctctgccgccgccgtgcgtgctgtgaggggagcactgtc

SEQ ID NO: 135690 - DNA, 122 bp, Homo sapiens
caggtcacaaagactttgctgatgaaacagcttgcggcaaagaagccagccaggggcgggcgcggggctcacgccagtaatcccaacactgggaggccgaggcaggcggatcactggaggtc

SEQ ID NO: 135691 - DNA, 122 bp, Homo sapiens
attgcatcactggcgtcctcactcctcagctgagcacagcctcccctggaccccacagctcggaacccgccttcatgtcactctggagtgcgcctcgaccaggctgacgagagcctgaagac

SEQ ID NO: 135692 - DNA, 122 bp, Homo sapiens
ccgctgcggggcggccagctgcccttcacaaacatggcggccgaggggtgcggggagtggcggggtaaggatgggaagccgagcagacggccccagaacaagcggtcatgtgactgggaaga

SEQ ID NO: 135693 - DNA, 122 bp, Homo sapiens
tcttccactggctgtcctcatactgcttagtcagccagcctttcttgaaattcagcaggtcgggcgtcacggagggctctgtggacctcctgtccagtgacttggctcttcggtgtggagac

SEQ ID NO: 135694 - DNA, 122 bp, Homo sapiens
tctgtgtggagcttcccaaccacgaacgtgcattcagttgtggagcttcccgaccacgaacgtgcattcggttgtggagcctcccgaccacgaacgtgcattcagttgatctatttttattt

SEQ ID NO: 135695 - DNA, 122 bp, Homo sapiens
gattgcttgaggccaggagtttgaagccagcctgggcaacatagagcgactccatctctacgaaaataaaaaaattagctgggcatcgtggtatgtgcctgtaaagtctcagctactgggga

SEQ ID NO: 135696 - DNA, 122 bp, Homo sapiens
cgccagttcctctcccgttggggcccgggaagggcagctaacgctggacactgggacggccgcggcggcagcttcaagaccatggcccagctcggaggggccgcgaaccgggcacccacggc

SEQ ID NO: 135697 - DNA, 122 bp, Homo sapiens
ccgtgccttcatgttccttaatgttgtgtttactattggtgatctctccctgatgttggacgagaactctaagcaggttccaagatgttttgcttactcttaggtaagggacaattccaggg

SEQ ID NO: 135698 - DNA, 122 bp, Homo sapiens
gttacattcattcattccatacacatttactgagcacctactgtgtgccagtcttggcgacgacccagtcaggaatagaactaacagtaaaccctgccctggagggcttctggtagggagga

SEQ ID NO: 135699 - DNA, 122 bp, Homo sapiens
gacgggaaggccagtgcgacggcaaatctcgtgaaccttgggggacgaatgctcaggatgcgggtccccgccctcctcgtcctcctcttctgcttcagagggagagcaggtaccgcacgagg

SEQ ID NO: 135700 - DNA, 122 bp, Homo sapiens
agcgggtgctggagaaggcggccctgaagctgggtacagcggcggggcgggacggggctgcgcgggcggctgggccggggaccccgcatcgccccaaacgagcgtttctcccgcagggatgc

SEQ ID NO: 135701 - DNA, 122 bp, Homo sapiens
tctatgggactgggcgccatggagcagggagcggtgctcatccgggaggctcaggcatggcgggctgcaggtcccaagccctgcgccgcagggaggcagctaaggcctggcgagaaatccag

SEQ ID NO: 135702 - DNA, 122 bp, Homo sapiens
aagtagtaaatgtagctgttgccttagtctgttcgtgttgctataaaggaatacacaaggcgggtgatttattgaaaaaaaaaagagacttatttggctcacagttcagcaggatatacaag

SEQ ID NO: 135703 - DNA, 122 bp, Homo sapiens
gttactcttctaagtgcatacatttctttcacagggatactggcctgtgagtttcagcaccgactttctggaactgtaaagtaagccaattttgacgcatagtaggggcttcgtaaatgttt

SEQ ID NO: 135704 - DNA, 122 bp, Homo sapiens
aggggagatgtaaattcccaggcactccctgttctgagtccctacaaacataggctctgccgcccaagggtcatcctccaacaaagagatggagggactggcaattggaagtgaaggcaccc

SEQ ID NO: 135705 - DNA, 122 bp, Homo sapiens
gcgccacctgggggtgccgacggcccgccactgccggctgcacagacctgccgcgccgcccgggttatctgtcacggcacactgcctgtcgccctccgcccagttgccccacgacagtgtcc

SEQ ID NO: 135706 - DNA, 122 bp, Homo sapiens
gtctgccgatctctttttcgctatttcctggtcgaggcacccccaaaattttctcataaccgggaatgtgagggacgggggtggcgtgtggactgaagctctaggcacctgcgggacttgtc

SEQ ID NO: 135707 - DNA, 122 bp, Homo sapiens
aggcaaggtgggcggggctctgagccggaggttttgttgtgagggtcggttgtcaagcagcggccaatcaaggcaggggatggaggcaagtgggggtcgcgcctggagcggagcctcggcct

SEQ ID NO: 135708 - DNA, 122 bp, Homo sapiens
tcttttgccaagactctactctccttttactctgtccctgtctcatagctgtatgttaagcgacttcctgtagactgttctcagtgttatttactgtagcttcctgccaggcaggagggagg

SEQ ID NO: 135709 - DNA, 122 bp, Homo sapiens
accttgataatcatgtaatgtttgattcacttttccccaacaaacacatgagcatgcgcgcgcacacccacacacacacacacacacacacacacaggatccttgcttttgtgcataagaag

SEQ ID NO: 135710 - DNA, 122 bp, Homo sapiens
cgtccgctgccagagccgaggccgcttctctcccgggcgggcacgttgcgggctgttcctcgctgtctctgctggaatgggtgggcaggtctttgtgcgctacttttaagtgctataatgag

SEQ ID NO: 135711 - DNA, 122 bp, Homo sapiens
cagcctcctccagctcccccaagccctctgccttgggagcggacaccttagcagaagggccgtcctccagaccctttgcagccaggcctctctgctcacagatccctgaggacatccggagg

SEQ ID NO: 135712 - DNA, 122 bp, Homo sapiens
cctgggcccaggcagcaccttcctccttcccccgggtggaacccggcgccggcgctcgggcgtttgcaaccactgtggctcctcggaggggccggagacctttgcccaatagcacgatgcag

SEQ ID NO: 135713 - DNA, 122 bp, Homo sapiens
aaaccaaaaatataaaactggcaggggaacggaaaacaagttctgcatattttatatacacgaggtctgtgatttcaaaaccactgcggggaggaacgggaagacaagatcgagggaatgtt

SEQ ID NO: 135714 - DNA, 122 bp, Homo sapiens
tgaacaagcgtgcacttactccatttcatctttctgtttcttgttggctcctctaccacccggttgataattcaggtttctgtgaccagtagctttggaatggcttatgcttgttttcaata

SEQ ID NO: 135715 - DNA, 122 bp, Homo sapiens
actcaagagactttatgtgccttgtttagagccttacacactttcctggctgggtgtggtcgcttatgcctgtaatcccagcactttgggaagctgaagcaggaggatcgcttgcgtccagg

SEQ ID NO: 135716 - DNA, 122 bp, Homo sapiens
gctcccagctggggactgctccatggccatggagatagacagcaggcctggggggctccccggcagtagctgcaacctaggtgcagcccgagaacacatgcaggcggtcacccgaaactaca

SEQ ID NO: 135717 - DNA, 122 bp, Homo sapiens
cccgagtcctgtgtggaaggcgattcctcccactttaccggggaggacacagaggctgagcgtggtcacggccggagccccagcgcagcatctgagctgcaggctggccgccccccaccccg

SEQ ID NO: 135718 - DNA, 122 bp, Homo sapiens
ggctcgcgccgaatggaagggattgtctgacccccgtgacgtcacaaagctggcggggagcgcgctcctcttccgcccccgccccacccccggccgcagccctctccgcctcccctcccact

SEQ ID NO: 135719 - DNA, 122 bp, Homo sapiens
gaaaaggggaaaggagggcaccgccacgtgagctgtcctctccggggaaggcggtggctgcgtgagggcgggggctgctcggtccccagggccccgcccctctgcccctctgccccgagcgg

SEQ ID NO: 135720 - DNA, 122 bp, Homo sapiens
gccgcttctgcaaggccccgggggaggctgacctgcggaaaacgcaccgaccgcggccctcgggagccccgccccgccccggggatgccaagccgcccctccacctcgcagcggcgccggcc

SEQ ID NO: 135721 - DNA, 122 bp, Homo sapiens
cctgcttccccagctaagcaggagtcttttgtgcttgagccaaggaaacatcattagatccgctaaggggcatctgaaacatccgtcgagtggcagaggcaggataagtcacctgcacatga

SEQ ID NO: 135722 - DNA, 122 bp, Homo sapiens
ctccagctggaaggaaatggagggaccacctgggctccgccttttcggcagccctctgtccgattactacgcctacagccctgtgcgggagcgggacgcccactccgtcctcttatcccata

SEQ ID NO: 135723 - DNA, 122 bp, Homo sapiens
cactgggcatgctcagtagagcctgcggcttggggactctgcgctcgcacccagagctaccgctctgccccctcctaccgccccctgccctgccctgccctcccctcgcccggcgcggtccc

SEQ ID NO: 135724 - DNA, 122 bp, Homo sapiens
taaggcccagcaggccagacttgcccaaggtcacacggtcagccaggagcgcagggaggccgagccccgcaccccagatcgctggtgcgccccgcagggtggtccgggaggcagggccgacg

SEQ ID NO: 135725 - DNA, 122 bp, Homo sapiens
tcccctagctcaatagagctggcagcatcccagccaccactgctttcaagaaacttcctccgcccacagaagcctgaatgtaccccttgtgctggctgagtcatcctgccgcagttagccgc

SEQ ID NO: 135726 - DNA, 122 bp, Homo sapiens
cgtgagttcttgcgtttttccgccccgctgtatcccatggttccctgtgccttccggctacgactgctcacagtcccgcctcttccgctgcgtgccggaccatggcgcaggggcagcgcaag

SEQ ID NO: 135727 - DNA, 122 bp, Homo sapiens
aatcaagaggcaggaagcctgattttcaacagttgagtggacccactgcactaaaaccgacggaatttgcccttgacccatgcctatggtagaaagtgaatccagcctgtagcctgttaagt

SEQ ID NO: 135728 - DNA, 122 bp, Homo sapiens
ggtgccggcactcctccttgttagtgtctttccttgaaggggcgggcaccaggctaggtccggtgccaataaatccttgtggaatctgacttgaggggcagtgaaggcagtcttggacttta

SEQ ID NO: 135729 - DNA, 122 bp, Homo sapiens
cactgaagttacgtcagagcttccatagaaatggattcttttctctggtgaggaatggggcggggtgactgagggccctctgactgctccaggtcacaaagagatgggctgattgttccaca

SEQ ID NO: 135730 - DNA, 122 bp, Homo sapiens
aaagtgaagctctgccttcctctctcagctcccatactataaacttcacagtgcatttatcgccacattgtttccatagttgtgctttgcgatgctgagtttactgttttaaatggacttca

SEQ ID NO: 135731 - DNA, 122 bp, Homo sapiens
gaaaagcgttttgcctacctacggagcaacgagccaggctcgcacccaagctcagtgacccgctgcgccgtctgccctactcccagccttcgctttgcgtccagagtgcagcgtgagagcaa

SEQ ID NO: 135732 - DNA, 122 bp, Homo sapiens
ggctgcagaccgtttaggatgcctggagtggagacaggagttaagccccttactcagagtcgctcttaagaactgcccagggccgggcacagtggctcatgcctgttatcctagcactttgg

SEQ ID NO: 135733 - DNA, 122 bp, Homo sapiens
gtggaggacgccccctgtggtgcctggtgaaccttagtcttagagatcggttcatccccgcggtttcccaccgagagggtccaccagtgagacaggagggaagctccacctcgggtcggccg

SEQ ID NO: 135734 - DNA, 122 bp, Homo sapiens
cgctgggtcggtgggggtgggggggagctggggcagggggcggggcggggggcgcggcgtcgttgggggctctcccggcgcctgccctcagccctaacggagcgctcccctagagctctgca

SEQ ID NO: 135735 - DNA, 122 bp, Homo sapiens
agggccgggcctgggaagatgctgcggaggacgctgcggattcgcgagcccggggtaaggcggcggcgcaccgccccctcccgccgcttcccccccaccccgccccccaccgccgcccttag

SEQ ID NO: 135736 - DNA, 122 bp, Homo sapiens
tggggttgtagtctatctgggtcgtataggaatactcattctcgaacagcagcctggggacgatctgtgtgttggtgtgggtgtcgaaagcgtaggagatgttggcattccgctggttgtag

SEQ ID NO: 135737 - DNA, 122 bp, Homo sapiens
acacagcgaaaccccgtctacaccaaaaaaatacgaaaaccagtcaggcgtggcggcaagcgcctgcaatcgcaggcactcggcaggctgaggcaggagaatcaggcagggaggttgcagtg

SEQ ID NO: 135738 - DNA, 122 bp, Homo sapiens
gcaggtccgggcatgctggcagccatgtgggagtttctgggcagatgtggtgctgagtgccggcctggggtggcctcgattctctccctgcagcctttgcagtggccatcccttctctcccc

SEQ ID NO: 135739 - DNA, 122 bp, Homo sapiens
gaaaccaaggcaggcatgatttatcctattgagccactccactgctctaggaacaatgctcgccttttgtaacttttttttttttaactgtttgacttgtctctgaaaagctcaaagaagac

SEQ ID NO: 135740 - DNA, 122 bp, Homo sapiens
ccgccagaaaagctcgcctcagttttggcagtaatgattttcctagaagatgccagagttcgcgaagatcggagtgattcgcggatttctgcgctcaagctagaggcgcagcgaccccgagc

SEQ ID NO: 135741 - DNA, 122 bp, Homo sapiens
ccccgcccccagcctgacacccgttgtctcagcacacctgtgcaagcattttcagaccaacgaagtcacagcccaggggaatgctgggactgactccacggccacgcccacctcccccactt

SEQ ID NO: 135742 - DNA, 122 bp, Homo sapiens
ctggtttgcaacatcctgtgcttagaagccgccagggccgttcctcccagccccaactaacgcacccatgaaagcacgtggaaaaggcaccgcgaaaccccagcccggggcctctgacagct

SEQ ID NO: 135743 - DNA, 122 bp, Homo sapiens
gctttaatctccaggcgtgatttagatggaaagcagcctgaagaccagttaagagaaccgcgagcagagcgcgctggactagcaccaacagacgtgagttcgagaccgtcctgccccttaat

SEQ ID NO: 135744 - DNA, 122 bp, Homo sapiens
acccgctggtgggggctcgggggaacgtggcttatatctctgtggttatttttgaattcacggaccaccctgtgcaactggcttcaaccctcaccagctgtgaggttgcatctcgaagtgta

SEQ ID NO: 135745 - DNA, 122 bp, Homo sapiens
catttatctattgatagacatttgggttgtgttctaggttttggttattatgaataaagccgtgatgaacacttgtacagaagtctttttgtggttatgtgtttccacttctcttgggtaaa

SEQ ID NO: 135746 - DNA, 122 bp, Homo sapiens
tatgactaaggttaaaagatatggtatatacttctatgtgtttactaatccctctcccctcgggcacagctatgttccatttcccagcttccctagtagtttgcagaggaggatgaagcctt

SEQ ID NO: 135747 - DNA, 122 bp, Homo sapiens
gtcgcggcggccccccgggctccccaaacccacctgcagcctcagcgcctacagcgaccccgagaccaagggcaacagggaactcaacccgcgccagtggaagctgcgacctcgggacctgc

SEQ ID NO: 135748 - DNA, 122 bp, Homo sapiens
ttaacactgaacagtaggaatgggagtcttcatctgttccacttggcttccaaagcttcccgtttcccaagatcaccaaaagggccagtttgcatgctgaatatttggtgccttctcaatga

SEQ ID NO: 135749 - DNA, 122 bp, Homo sapiens
tagattagagctatgttgttggaagactgctctggccgtgtttaaaatgggatcacacaacggcattggaattagaagttattgcaataatgggaacaagtaacaaggacttgaaccagggc

SEQ ID NO: 135750 - DNA, 122 bp, Homo sapiens
gtggtggcagttgaggagggtagcaaggcaggctccctggccctgctatgagaggatggccggggccatgccgccctccctccctccctccctctgctcaccctcttggcagctcttcctga

SEQ ID NO: 135751 - DNA, 122 bp, Homo sapiens
acggcctccttcaggaaatacaaaccttgtgaggttttaattactaatgctacagagtggcgtttttccgaggactgtgttccacttggtctgtctctgatggctattaactaataaccgtt

SEQ ID NO: 135752 - DNA, 122 bp, Homo sapiens
catcctcctcatctgcaggcgctggaaaaccagacacgatcggacatgcatgtggttctgcggccaaagcacgccctttggttgtgaacttcatgatacctgtgtgagtgttaccactcaga

SEQ ID NO: 135753 - DNA, 122 bp, Homo sapiens
ctgtacttctcggctgagccaagggtggacagagaggaaagccattcagctccggggtcccgacaagtttgttgaccctgtggccatgagcggaactctcgaagtcacgtcgcccaagtgag

SEQ ID NO: 135754 - DNA, 122 bp, Homo sapiens
gggctactattgtcaagaaaatgaccaccaaaatctgtccatgcacattcgttcctagggcgccaggtacagggaggtacctaggagaggtaggagcaccgcttttagagacaggcaggcac

SEQ ID NO: 135755 - DNA, 122 bp, Homo sapiens
gtctcgaggggcggggcctggaagtagaacatctcgaggggcagggctcgacccttggtgcgtttcgaggggcgggtcgcctggcggttgagattgcagggctgcggagggcggaggaaggc

SEQ ID NO: 135756 - DNA, 122 bp, Homo sapiens
ccatcagctctttagtcagttcggacatgatgaggaaccggcgggcggatcttcgctttgcggactcctgccccggaacatggggaaggggcaactccggaaacagcagctgcgggacggcg

SEQ ID NO: 135757 - DNA, 122 bp, Homo sapiens
ccacgctgcaagtgctcctggtggacggcttctctcagccctacctgccgctcccagaggcggccccggcccaagcccaggccgactcgcttaccgtctacctggtggtggcattggcctcg

SEQ ID NO: 135758 - DNA, 122 bp, Homo sapiens
ctcgtggtgcgccgtttcttaagccggtctgaaaagcgcaatcttcgggtgggagtgacccgattttccaggtgcgtccgtcacccctttctttgactcggaaagggaactccctgacccct

SEQ ID NO: 135759 - DNA, 122 bp, Homo sapiens
tacagtctcagcatgcgcagggttcaagggtgttgcgcagccccgcagggaggggcagggcggtgttgacctctgtttccaaacccatgctggctactgaatctgtgccacccctggctaag

SEQ ID NO: 135760 - DNA, 122 bp, Homo sapiens
aaagcgaggcgaggagcccctctccaatggctcagttttgctgaataatcacgtgtgaatcgaggggcgggcttttggcaggcagatcttactagtatttactaccaagctctactccagat

SEQ ID NO: 135761 - DNA, 122 bp, Homo sapiens
gaaggaggacggcggcccgaaggccccgtacgccagggccccgggttggcggggcggcggcggccccagcggagccccccgcggcctcagcccactgtccaggcccgggcccgcgtacggcg

SEQ ID NO: 135762 - DNA, 122 bp, Homo sapiens
tccctcctcttatctgcctgccagagaagacagctactggtattgacagttctcctgcaccgagggcggccagccggctggggtgctgactctcagctctcttgtttttgtgcctgccaggc

SEQ ID NO: 135763 - DNA, 122 bp, Homo sapiens
caggacttcccaaagcagtcgccaggctccacgaagcggcgctgatactttgggggcttccgcctagtgcagggcggggcccgtgggcaggaccctcccccccccaggctcctcccagaaag

SEQ ID NO: 135764 - DNA, 122 bp, Homo sapiens
ttttctctgcctccgtctcctgtgactgcgaggcttagacatttaatatccttctgttgccgagtccctccccaaatgacgaccatttctcaatgcaataaacaggtgctgcggcaccagac

SEQ ID NO: 135765 - DNA, 122 bp, Homo sapiens
acatttttttcctttttgttgccaaatattaaaatgtgtgctggtttaacttccccctaacggtcctctttcagtgataaataaccatcaggccagcatatgtgtctgagtgttggcagtaa

SEQ ID NO: 135766 - DNA, 122 bp, Homo sapiens
cctcacagagctgttgtgaggatccaatgagataacgtatgttgaaagcactttgtgaatcgtaaagtgctacacaaatactagttgttcttgctgccgtatctgagatgtcttaatttttt

SEQ ID NO: 135767 - DNA, 122 bp, Homo sapiens
cccagtacggcaaagggaaggcgccaaaagttgtcagatggcgaaggaaaccgcgaaattcgccattgtcacatgatggagcaacctatcgaaagcggagggaaaggtgccgaagtcacgtg

SEQ ID NO: 135768 - DNA, 122 bp, Homo sapiens
gtgccaggagtggggaccaaatccgtatttattagatcacagaagcacagagctcccctgcgagctggccactgggtgtgatccagtgcaatttcacatggaactggccacttttgctctta

SEQ ID NO: 135769 - DNA, 122 bp, Homo sapiens
ctggcggcagccatcaggtaggctgcgttgaggatctttgctcttccatccgcctttgatcgtcttcctcttcagccatccaggtccggggaccctgcgtcctcggagataggtctccctcc

SEQ ID NO: 135770 - DNA, 122 bp, Homo sapiens
ttcgaatgcccgcaagtaggaagaagggggtggttggaagggaaggcagggccgggagcgcgtgtgttttgggagctttctcctgaggacagaagggactttcccgtttatagcctggggga

SEQ ID NO: 135771 - DNA, 122 bp, Homo sapiens
gcctgtcgggggcgcgggcgcgcagacagaagcccgcccagtaggggccgccccccgccccgccccccacctccaaccccgaggctccaggcccctgcccgaggccaggcttccagcctagg

SEQ ID NO: 135772 - DNA, 122 bp, Homo sapiens
tcctgacactctggccacacttgagttccatgggccaagaaggatggggatttcccttctcgcagcactcgcagctgcttagagctcattgctgtcagctgggccctcttctaccaggccct

SEQ ID NO: 135773 - DNA, 122 bp, Homo sapiens
tatacaagatgacgcccaggctccacaggtcgcagcgcttgtcgtagatgctagcctcctcgctgaaggcctccactacctccggggccatgtactccgccgagccgcactgcgggcggggg

SEQ ID NO: 135774 - DNA, 122 bp, Homo sapiens
tggacgcggcggcggtggcacgagcgcggggagctgcggcggcggcgagggtggaagatgcggcggagacggcggagcacggtccctgcgcccccgggagccgctatatgagcgggcggggc

SEQ ID NO: 135775 - DNA, 122 bp, Homo sapiens
aggtgttgagtaacaacgtcaaggtcacagaagcaggggggatccacaccttctaacacccggtggataaactcacctaccattgactgagtgcctacgcctcgtgttcagggtcctctctg

SEQ ID NO: 135776 - DNA, 122 bp, Homo sapiens
cacttaggctgcagtgcaatggcataatcacagctcactgcagcctagacctccccagctcgagtgatgctcccattggtcacacgtagctggagctttaggcacagaccatcacatgggtt

SEQ ID NO: 135777 - DNA, 122 bp, Homo sapiens
ctggggagtggtctgactttgtctctacggggtcctgctcgagctgcaaggcagctgccccgaactgggctccatctcttgggggctcataccaagcctcttccgcccttcaaatcccccct

SEQ ID NO: 135778 - DNA, 122 bp, Homo sapiens
cgggaccgggaccgggacaatttccgtcgctctcgggaggtagatcttgaccgcctccgacgccgatcccgggagcgtgacctgaacaatcagaaggctccaaggctgagactctataggtg

SEQ ID NO: 135779 - DNA, 122 bp, Homo sapiens
cggccgcggccgtgtccttcgcgtcccggcggcgcggcgggaggggccggcgtgacgcagcggttgctacgggccgcccttataaataaccgggctcaggagaaactttagcgagtcagagc

SEQ ID NO: 135780 - DNA, 122 bp, Homo sapiens
ggcagctctcggccccgggacggcacccggggccacccgccacccgccacccgccgcacgcggaggccgccatcttggccgagcgcccgccatgtttacagcagatctgtgtgttcctggaa

SEQ ID NO: 135781 - DNA, 122 bp, Homo sapiens
gcgctgcccttctctgtgggcgccaaccttcagcggcgttggcaaggtgacgggggcaggcggtgtgtgtccgggaacatctcctgcatcttgctgggtccttcttcacatgagaggcccga

SEQ ID NO: 135782 - DNA, 122 bp, Homo sapiens
atctcaaaaaaaaaaaaaaaaaaaaaaaggaaaccacctcccctcctcatggcatggcagcgtttccaagtaaagttgactccccatcagcatctggtgccccgatcacacacccatggaag

SEQ ID NO: 135783 - DNA, 122 bp, Homo sapiens
gggttggcagaggtgtgcaggatctgccacttaccattcaccatgtggccttgaggaagacgcactcggggcctcagtttcctcatctataaaatggggatgtaattacaccctcacactgt

SEQ ID NO: 135784 - DNA, 122 bp, Homo sapiens
agcttcgggagaaccataccctgcaggccggcggtctcagagcccccaacagtagctgcccgctgggggttgtcgaggaaaagagtgaaaccctgtaaaatacttggagagtgattctgagc

SEQ ID NO: 135785 - DNA, 122 bp, Homo sapiens
ctaagggctgccgacgccattttgcagggtgggctgcgcagactcttggcgggaggccggcgcgcttgagcgggagaggacgtggaagggttggaggtggggagtgcgcgttacgactggaa

SEQ ID NO: 135786 - DNA, 122 bp, Homo sapiens
gggaggacaaaccctctggggatgacaggcaggggcgcctgaggctgccccaaaggcgcacggatggacctacccacggaaggtcgaggatggcagggaccgggggtggggggtgcctacct

SEQ ID NO: 135787 - DNA, 122 bp, Homo sapiens
caacacggcccttggcaatggggttgctgtctcccacccgcgtacacttcatgccaactacgctgaggaccatggccacgaagcccaggagcacggccaccaccatcagggcccgcgctgat

SEQ ID NO: 135788 - DNA, 122 bp, Homo sapiens
ttatgtctcctggcttcttcaccaagctgtgtgacagctgggccctgtcgcctccttcctcgtatatgcagcgactatcgcagagccgcttaatctttgttgaaggcagctgcggttcagcc

SEQ ID NO: 135789 - DNA, 122 bp, Homo sapiens
gtgggaggaggaagaggaggggagagggaattagctatctatgaaaatacttacagcctccgagtcttcaattccatgcaggtacaaattgtcatacatggaggtgtgataatccagagcac

SEQ ID NO: 135790 - DNA, 122 bp, Homo sapiens
taaccccttggtggccggggcgctccgaggccgggccccgcccttccagcccacggcccccgccctcgacttggcccagcatcggggaccctcggaccgccaccctcggccctgccgaagcc

SEQ ID NO: 135791 - DNA, 122 bp, Homo sapiens
taagatcttctcgccagtcattgcctgcgtagttcttggtgatctcaatctggtatagctcgtatgcgttcatgaatgtggacagtttggcggcactttgccgcccgctgccccctatgccc

SEQ ID NO: 135792 - DNA, 122 bp, Homo sapiens
agaatcttttagagcagggtgagtgcctatttctctcattcatcatccatgagcacctctcgggactgggcactgtgggccagccaggctgctcctgcccttgcaattcacagtcccacctg

SEQ ID NO: 135793 - DNA, 122 bp, Homo sapiens
ccggcactgctggagcctcgggtgggtggcactggtggcgcagcgagcaagctggtgccgcggtctgtgggcgcgggccacgtggtagcgaaggtgcgcgcagtggacgccgactcgggcta

SEQ ID NO: 135794 - DNA, 122 bp, Homo sapiens
ctgctccaggttctcagcatacggactgcagccatcttaccccggaaatgacaacagtgccgcaaactggagagactctcctcggcgcggcctatcaggagatgggaaacgcgcctccccct

SEQ ID NO: 135795 - DNA, 122 bp, Homo sapiens
tcggcagctgcctcctggccagagcccaggtaagagccagtgctccgcgacacctgttttcgcggagcctccggcggggactcagctttagcgacacggaggccaggtgcgcgcgagagctc

SEQ ID NO: 135796 - DNA, 122 bp, Homo sapiens
gaagagaagcttcagggggcgtttattcaatttgcgaggagcctgcgaggcgcaggtgcgcggtgactctgtggttcccaccgcacccgctgccctctttggtcctctcgctgtcaccggcg

SEQ ID NO: 135797 - DNA, 122 bp, Homo sapiens
ccttgacaactgcgggtcctaggggcattgtgattccgggatctcgagaggaagaaataacgtgcgctagttttgctagcctcctggtcactggaagcaggatagcctgtctcggctgtaag

SEQ ID NO: 135798 - DNA, 122 bp, Homo sapiens
tcttggaagcctcggccatccctgctggctgtgctccattcttgtgcctcgccattggaacgctctagtgagccggaatgaagttcaggcccatggctgtgatgtcacagaacatgtgaagt

SEQ ID NO: 135799 - DNA, 122 bp, Homo sapiens
acccgcacaggagttcagcttcgggccccgggccttgaaggacgctctggtctccactgacgcagccctgcagcagctgtatgtgtccgccttctcccctgccgagcggctcttcctggccg

SEQ ID NO: 135800 - DNA, 122 bp, Homo sapiens
caccggcctccgctcttatccaatcaacagcctcacaccgacaggtggggcaggaccaatcgtgaatgaccagtaaagaatgagggggcgggttaactttctagtagtagtgtggggtgtaa

SEQ ID NO: 135801 - DNA, 122 bp, Homo sapiens
acccaacattcctggcaaaaacacacttccagtccccctcagctcaactccactccccaccggctcctgcagatcccgctgcggcaagcccaccacccagctagggagggccgtaccatgat

SEQ ID NO: 135802 - DNA, 122 bp, Homo sapiens
cgggttcaggggctgccatttacgaaaggctgggagcgttttgctaccttagagcccacccgttcccgccatcttggggcacaggcgcaggtggtcagccgtgactcccggattcctgtggc

SEQ ID NO: 135803 - DNA, 122 bp, Homo sapiens
ctagagttgagacaccagaggcgggggccgtcattaagttgcggggtagtctgaaggggacgagaaaacgaagcggagtccgggttacgcgtgagtggtcagtgtgaggtgggcggggaggg

SEQ ID NO: 135804 - DNA, 122 bp, Homo sapiens
cgcactgccataaggagcttcatccaaccctatgaataagctgttacacttccattttaccgatgagacgctgcaaagttgagtaacacagtcgcagcgctcattggtccattgggtagcca

SEQ ID NO: 135805 - DNA, 122 bp, Homo sapiens
gggggctttcatgtgcgcagacgatagggagcggccccgcacgcctggaacaaacacagacgctgcgcccgggagtcggagaagctctcaggaaacagaagttcctctcctaggtagatgga

SEQ ID NO: 135806 - DNA, 122 bp, Homo sapiens
ttatgtgtgtagcgttgttatagccttgccttatcacccttttaatgtctgcagatctctcgtgatatccccactttcattcttgacctttgtgttttctctcttttgttctttgtcagtat

SEQ ID NO: 135807 - DNA, 122 bp, Homo sapiens
tgcgtcagcggctgggacttgaacccgcggccgctaggaatctgcgaggccatatggggccgaaacctgggagggtccgaagactccgttcctgtggcctttgaacgcttgacaactttacc

SEQ ID NO: 135808 - DNA, 122 bp, Homo sapiens
gccttgaaaacaaacgagggcatcttcgtgctaaggagtgcagcgcctcaggttcattcccgccaaaccaggcagtgttaggaaaatcaagaccgaggccagaaaagccgctgcagtcatgc

SEQ ID NO: 135809 - DNA, 122 bp, Homo sapiens
gtgaaggagcggcagctgcacctgggcgtgtctgccatcacctgctacctgcacgcctgccggcatcagaacgagagcaaatcgaggaaatacttagccaaggtgagaccgaaaaaacgagc

SEQ ID NO: 135810 - DNA, 122 bp, Homo sapiens
tgggttgagtctgtgtcccaggaaaggcccactagtgggtcccggtgtgggacccacccccggcccccaccccttcctgccccttctggctttctgctccactcccagacccgtcttctcca

SEQ ID NO: 135811 - DNA, 122 bp, Homo sapiens
gatcctgagttggggagagcagcctggattatccgggttggccctgtcaatcgagagggccggtctcccacgggtcgccctagtgcacacggtaatgggcagcacgagggtttccgtggctc

SEQ ID NO: 135812 - DNA, 122 bp, Homo sapiens
gtttgatgttggcaggggatgaactaggttgtggccagcgcagggcaggcacagtaagagcgcctaggcttcttttcaaggtgtcagaagccgaagaaacaggagagtgaaacctgggttct

SEQ ID NO: 135813 - DNA, 122 bp, Homo sapiens
ccacagggcagaggccgtgaggggagaggggcaggggccgggggcgctgtgggggcagtgcggcctcctgaccagcttccaccccacagcctgcccaccggctcctctgtgatgctgtggcc

SEQ ID NO: 135814 - DNA, 122 bp, Homo sapiens
ggcgcaggcttccaacttcgtactctggcctctggcgtctcggctcgtcggttgggtacccgaacccagctactgctgcttgaagagaagatggatggggactcctcgccgtcgctgcgccg

SEQ ID NO: 135815 - DNA, 122 bp, Homo sapiens
cccctggccggggcggccctggagccggcgggcggcgggcggagtcgcgaagcgcgctcgcggctgctgctgctggagcaggaactcaaaaccgtcacgtactcgctgctgaagcggctcaa

SEQ ID NO: 135816 - DNA, 122 bp, Homo sapiens
tgagtcagagctcgctttttaaaaatgctgccgccctctgcgcagccctgagcatcacagcgtcatgagtctgtcatgacggtctctattcagaattgcccaccgtcaggtagttctggttt

SEQ ID NO: 135817 - DNA, 122 bp, Homo sapiens
tccggtagatggactttcaaaaacggtactagaataccaggaaaaagcgacagcttgtagcggggctttattccgagttctaggtcacctcaagccctccccgctgtccctagagctctccc

SEQ ID NO: 135818 - DNA, 122 bp, Homo sapiens
ttgctaacggggctgggggcgtcacacggcgctctgggggtgtgcgatgtgggttgtgcgcgccggccccagagttttgcagccaccttcgtcagggcagtctttttgtttgtttactttat

SEQ ID NO: 135819 - DNA, 122 bp, Homo sapiens
tccctttctattctctttgggtaatttctcagaacgagtgacttaaaaatgttgctgacacggttcttttctaaccctaacaacacgcacgatacaggtgctgaggatgttgagataattga

SEQ ID NO: 135820 - DNA, 122 bp, Homo sapiens
ctggagaggcctcaggaaactggcggtcatggcgagggcaaagcaggagccagcacttcacgtggcgagagcaggagaaagagagggatgaggagggtgtccggcacttttaaacatcagct

SEQ ID NO: 135821 - DNA, 122 bp, Homo sapiens
cctgacccacggatctggaaacttccgtggggcaggggcaaccgaggggtgccacctctgcgggctccctgcaagctcctcggccgttctgggcagggccgggaggggccaccaggtggcgc

SEQ ID NO: 135822 - DNA, 122 bp, Homo sapiens
atctctcctttgggacgtaccatccccggtctccatgagctcggcgttgccgtacttgggcgctgtccgggaccccgtggaaccctgcggtctctccacctgtatcgagtgctctgaggtgt

SEQ ID NO: 135823 - DNA, 122 bp, Homo sapiens
cgcggggcccgggtcggggcggaggggtcccaggcggagaagccagcgtccgcctgctggcgccgtttacatggtggcgcggggtcaggccgggtgcgtctacgcgggcgggcacctgcccc

SEQ ID NO: 135824 - DNA, 122 bp, Homo sapiens
cccactcttgacacgtggggattattacaatccaagatgagatttgggtggggacacagccgaagtatatcaccaggctctgctaagcactgaaggccatagtgcttgttcatagcttcctt

SEQ ID NO: 135825 - DNA, 122 bp, Homo sapiens
ctgacttcctcttgtcccggaatgagcatgcctgccctttgcaagcaggtttgggtctcacgcagaggaaaccaaaagcaataagagggagggaaggcagagcaaccaatcaagggcagggt

SEQ ID NO: 135826 - DNA, 122 bp, Homo sapiens
tggcatgggctagagaataaaatgagaatagattttaaaaggtctttgaacagtcaaaagcgaacaggatacctaagaggttatttttagtcattgtcagcagaagctggagattcccgcct

SEQ ID NO: 135827 - DNA, 122 bp, Homo sapiens
agggctgttactgcctgttccgagttgttactgcctgttccaggttgttactctctgttccggattgttactgcctgttcggggttgttactctctgttcggggttgttactttctgttcgg

SEQ ID NO: 135828 - DNA, 122 bp, Homo sapiens
tggaaagttcacagaagagtagggtgagcctgcttctggtgatgaaggcagacacacacacgtgtaactccagctgtggctcacttcagaattgaagtgccatggaggacaggcacgagagg

SEQ ID NO: 135829 - DNA, 122 bp, Homo sapiens
ttccccacagtgtcctccacatttccacagatcccccgagtccctgacgcagcgttcacacggttcctcatgcctttcccagcagccacccgcctggccccccgcagtttctcccagcccag

SEQ ID NO: 135830 - DNA, 122 bp, Homo sapiens
tttggaggaggcgcctggcccagcatgagaagaggattagggagttcttcctgtaggagacgacatctgaactgagagctgtgggatgaatagaaatgagccaggcccgatgagtgaggagg

SEQ ID NO: 135831 - DNA, 122 bp, Homo sapiens
actacaaatcttgagggtaaactgcttatctccccacctctctgccccgtttatctgaggcgataacgatctctaaacacgaggtatcgaatggagcccaatgaatttccatgccgcttttt

SEQ ID NO: 135832 - DNA, 122 bp, Homo sapiens
agagagtgtgacacgtgccccctcccacccgcagctgaccaatgcaggtgacgatgtggtcgtgttctacaatgataaggcatcgctggcccacctgctggacatgatgaaggccgcccgcg

SEQ ID NO: 135833 - DNA, 122 bp, Homo sapiens
agccagagagcgagcagagggggcgggcaggccacgaaaatgtcctcggccgtggggccccgcggtcctcgcccacccacggtgcctccccccatgcaagagctgcccgacctgagccacct

SEQ ID NO: 135834 - DNA, 122 bp, Homo sapiens
gacgggggaacctggggaggcacgtagagtgtgacggtgacgggggaacctggggatgcacgtagagtgtgacggtgactggggaacctggggatgcatgtagagtgtgacggtgactgggg

SEQ ID NO: 135835 - DNA, 122 bp, Homo sapiens
accttgtgatccacccgcctcggcctcccaaagtgctgggattacaggcttgagccattgcgcccggccagcaaaaataattcttgattagaccttttatagtttatgaaatattaaaactg

SEQ ID NO: 135836 - DNA, 122 bp, Homo sapiens
gggcagcctggccagcctggcttgtctttgcagtgtcctgtgctgggccaggtgtccagccgggctgggaacggacctttctctcccatggccgggcctggcagctcttactggcaagaagt

SEQ ID NO: 135837 - DNA, 122 bp, Homo sapiens
ggcggtcttgtgcacagcccacttgggaggcctcggcgctcaggtgtggtaagagctgggcggtgcagagcacagagaaaggacatctgcgaggaaagttccctgatggctgtcaacaaagt

SEQ ID NO: 135838 - DNA, 122 bp, Homo sapiens
gcccgcggtgggccgacttcccctcctcttccctctctccttcctttagcccgctggcgccggacacgctgcgcctcatctcttggggcgttcttccccgttggccaaccgtcgcatcccgt

SEQ ID NO: 135839 - DNA, 122 bp, Homo sapiens
tcgcctgaacttgcgagtggtttcgtgcctgtagtaggccacatgcatggccaccagcagcgctggggtggagacgaagatcagctggagggcccacagccggatgtgggacaccgggaaaa

SEQ ID NO: 135840 - DNA, 122 bp, Homo sapiens
gagcaagagagaagaagctgtaaggggggtctcctgaggcctaagcgcctaaattcctcacgtgttattggtcaaatcaagtcacgtggccagtcagcttcaagaaccaggaaaattgtttc

SEQ ID NO: 135841 - DNA, 122 bp, Homo sapiens
ctttcctagaccgggagcggtcccacgcgggggtacaggttggggcaggggcgaccgagccgggcacaggaactcgcagcagggtagggttggcggctacgccgccctcggtccgcggggaa

SEQ ID NO: 135842 - DNA, 122 bp, Homo sapiens
acctggagaagagaaagagaggccccgggacccgagagggaggggtgggaggagaccaggcgggtggggttcaccccaggctcctccccggcccggcccgcatggtcacaggactgcgcctt

SEQ ID NO: 135843 - DNA, 122 bp, Homo sapiens
atcagctaaatcttttgttttttccttttctctttcagtctttgacaaagcgtttaaatgcgcatgagggataaaagtagtaacagagcttctttcttatcttaagtgggttgtcacaagga

SEQ ID NO: 135844 - DNA, 122 bp, Homo sapiens
cggcgtctctcctgatgttgccgccctgcacggccgttggagagtacttgcaggcagccccgctccacaccacttttatcatcttcattttcattcttttgtgaaaatgtagttgctttgga

SEQ ID NO: 135845 - DNA, 122 bp, Homo sapiens
gcccctccgaggaccacacatcctggtgggagggtggcccggatgtagaatgcaggcaggcggcgggggtttgtgcccgctttcctctgggagcttggtgaaatgcacattcctaggcctcg

SEQ ID NO: 135846 - DNA, 122 bp, Homo sapiens
cccaccgcaagaggaggcagggtcttgggatacaggggcggggcctatgcctggcgtgggcggggcttctgggcctgggacactgatgagaggagcgccccagtggccagggtaagtggagg

SEQ ID NO: 135847 - DNA, 122 bp, Homo sapiens
gccccaggagggcgtgaagagaagacttcctttcctctcctctcgcctcctggcgctggccgtatgaaggtgtctcccagaagcattagcagaggagccctgtgggagaaatgaggtgtata

SEQ ID NO: 135848 - DNA, 122 bp, Homo sapiens
tcaaatttccgagtcgtcaggctcccctcttcgccggcaacgcgtacactcgcgcatgcgcgacttccccggaacttccaaatccacagctggcgcctcagctcccgcactgcgcatgtccg

SEQ ID NO: 135849 - DNA, 122 bp, Homo sapiens
ctgctgcgctagaccccgcgggttcccggacttcagtaccgccagcgcggcccgggtccgcggttgttggacgggcgctgccttttccgggttgatattctcctggtcctcttggagcgccg

SEQ ID NO: 135850 - DNA, 122 bp, Homo sapiens
cggccgccgatggagttcacttgagctgtgaaccggcgggagaggcaggcgcccgcaagccgagcgcgggccggagcccagccagccccgggcgctcacccgccagcccgcaagctccggcc

SEQ ID NO: 135851 - DNA, 122 bp, Homo sapiens
aggaggcgcgcagggaggccctgcggaagctggggctgctcagggagagttcgtgagggccgcgcgggctccagtccaccccgtttctccccaccctgaagagagggtgaaagagtcgctgc

SEQ ID NO: 135852 - DNA, 122 bp, Homo sapiens
gggggaggccgtagcggcggccatggctggcggcgagaccaagggggacgggtgcgtgtccgcgcacgcaccgacggcagagtctcccggcgctcctccagcgctggctgttcgcgggcagg

SEQ ID NO: 135853 - DNA, 122 bp, Homo sapiens
tgaaacttcacaaaagatgcagaatggtcagtaagcacaggacaaaaacggtgccagtgacgctggtgccaaagcgggaaggaacgcattcttcagcctaaaagacctaacagtaggacacg

SEQ ID NO: 135854 - DNA, 122 bp, Homo sapiens
cctcagcctttgtttctgcctctgaataatggggcgattctacttatgtcctagggctgtcgtgagtgagtaaaggacttggaacagtactcagcatatactaagtgttcaacaaattttgg

SEQ ID NO: 135855 - DNA, 122 bp, Homo sapiens
ccagcctgggcaacactgcaagacgctctctctattaaaaaacatataaataaggccgggcgcagtggctcacgcctgtaatgccagcactttgggaggccgaggcgggcagatcacgaggt

SEQ ID NO: 135856 - DNA, 122 bp, Homo sapiens
cactagagagaaccaaccccacacattgctctcccctttccctgaaccttggggcggaggcggtggggctcccccaggtcactggggacgaagaacccagactcaaggtattgcctcagctc

SEQ ID NO: 135857 - DNA, 122 bp, Homo sapiens
aacaacaggacatcaaccaggcaagctcattaccattttccacagataaatctttacagtcggtgtgaaaaatctcaccctgaactatggtggctgtagtgaaaagaaccatggacagacac

SEQ ID NO: 135858 - DNA, 122 bp, Homo sapiens
agcacgtggtggggcccctgaggcgtgcatagggtcgcgcgcctgggagcttgtcgctggcgcggtccgggagggaggttcggcggcgggaggcagcatgtaggttgcagggctgaagaagc

SEQ ID NO: 135859 - DNA, 122 bp, Homo sapiens
cctgcgctcacgaaccgcagcgcaaacttctccagcaccggcccggtccgcccgccggcccgccgcccgctctcccacagccgctcgcccgcccagcgcggaacaacttcggggcccgcccc

SEQ ID NO: 135860 - DNA, 122 bp, Homo sapiens
atatttgtagtttctaaaatgttgataacagaccattttgttgttacacatgtctgccaacgaaaacaaaaggcaaagagaatcactcccatccctataaaaggaatggctccttttctaac

SEQ ID NO: 135861 - DNA, 122 bp, Homo sapiens
cactggtcatttgtccagtatgaatttatggagtgccagcaccactgtgggagccaggaacgtgagagtgaacaaaacagagatgcccctgtccctgcggagactgctgtctactgggaagt

SEQ ID NO: 135862 - DNA, 122 bp, Homo sapiens
acaagtaaggaagttattaattccccatttggtgggttcctcaaccccagccactggggacggtccacgccggatcaccagcagctcaggcttaaggccacgacgcgcaagcgcagcctgcc

SEQ ID NO: 135863 - DNA, 122 bp, Homo sapiens
cttcgggaggggataacagtaatactgaacttttattaagagtaatgataagaaacactccgagggagatattacaatactgcgcggtaataagttgcaggggcaaactttaaaaaaaggag

SEQ ID NO: 135864 - DNA, 122 bp, Homo sapiens
ggagcgtgggaacccagcgggcaggccggggcagctcccccaggaactttccaaaacaagcgcctggaggccggaaagtttccaccactggagctggcccaaaaggtggatagttgggaacg

SEQ ID NO: 135865 - DNA, 122 bp, Homo sapiens
gcgtgtgttttttctttcctctttcccctgcctgtgtgcccttctccaggatggcagaggcggaattgcacaaggaaaggctgcaagccatagcagtaagtccactttcattttattttctt

SEQ ID NO: 135866 - DNA, 122 bp, Homo sapiens
caggtaatggcgtcccgggcaggcactcctgtcactgcagattcagagtcgggatgacagcgctcaaaatttagtttcaaatgccttctgccaacgtcactcaggagcgttcccatgggagt

SEQ ID NO: 135867 - DNA, 122 bp, Homo sapiens
tatgacctggccgcatatgcggctcctccccccgggaaggctgggctggagcccaaaggccgggattgaacaggtccgcatggtccttgcacactcagaccccaagtgttctgcgccctgag

SEQ ID NO: 135868 - DNA, 122 bp, Homo sapiens
ttaccttatcttagcctctcctgggagatgaatacatgattaactattctcctgtctcctcgttttctcttgtgacatgtggataatcatactctcccttacagcccacttttcctccagcc

SEQ ID NO: 135869 - DNA, 122 bp, Homo sapiens
gcggcggcggcggcagcactaccggccggtagggcatgaacatggggtagccggtgtagacgaaatggccggggctgggctgcggcgggctgccgatcagcgagtctatgctgaaggcggtg

SEQ ID NO: 135870 - DNA, 122 bp, Homo sapiens
cgttaaattatctcaataatttatttaaatcaacactcatataaataggggtgagtacatcgattttgaccatttcctgagttccaattcacataagtgcttgtggccagaggtaggtagat

SEQ ID NO: 135871 - DNA, 122 bp, Homo sapiens
atccagaacagttgctctcagtgagctgcagtcccactctcagactgggctccccaggagcgctctctggatggggcccattgagcatgcgccaggtctacctggcattcatcccagtcatg

SEQ ID NO: 135872 - DNA, 122 bp, Homo sapiens
ggggccggcaggggaaggggcggggccgacggggaggtgctgactcgggggcggggccatcgcgggaaccccgggaggggcgggccgcggggggcggggccaacgttcgctcttctggcctt

SEQ ID NO: 135873 - DNA, 122 bp, Homo sapiens
gggctaggaatttctttttcggggagctcggctcttaagacgtgagtctgccgatgctcccggccgaataaaaacctcttccttctttaatccggtgtctgaggagttttgtctgcgacttg

SEQ ID NO: 135874 - DNA, 122 bp, Homo sapiens
tgcgagcgcggcctcatttgcataggccgccggagtccgctggagcccggccaatcggcgcggccctccgctaatggccatgcattattcaccagcctaattgctcagccccatgcgcggcc

SEQ ID NO: 135875 - DNA, 122 bp, Homo sapiens
acaggggggaagatgttgtccacgatgcagatgaggatgttgggctggcccagctccacccgagacttggggagcacggtcacccgtggaggcactaggaggaacaggccctgagtccacag

SEQ ID NO: 135876 - DNA, 122 bp, Homo sapiens
tgctgacaataaggacttggaagtcactagtgtgaaaatgagcagttaatgatatgggaacggatgagactttccacgtggtacctagatttgcaaattctattgtaatgcctttattttta

SEQ ID NO: 135877 - DNA, 122 bp, Homo sapiens
gtaaagtagaatttacttttctgacacagactcaaatgctaccactctgatttcccccaacgtatttaaatgcagctttacttgctctcctatcatatcttttcttttttttggtattcttt

SEQ ID NO: 135878 - DNA, 122 bp, Homo sapiens
atcttgtcccgcttctcctccgggatgcccttctggctgttccagttctctgcgacaggccgccccagttccgtaactgcctggaactcctccacgttgctgtcgaagcgcaggttctcctc

SEQ ID NO: 135879 - DNA, 122 bp, Homo sapiens
tgggtcccagtcattctgcactgtgtctgcccagagtgggtgccagggacgtctaggggccggttgagtcctgactacccctgcagctttgcccagccctccaccctctggctctccttgcc

SEQ ID NO: 135880 - DNA, 122 bp, Homo sapiens
gtctcccgacaggccatctgataagagctttcttgcttatctgttaatgacttcacgcgacgctccctcccgtcccctcctgctcccctgtcgccagagatcaccttcatgggatcccttag

SEQ ID NO: 135881 - DNA, 122 bp, Homo sapiens
aattgcacgaagctgccaagcagccgtccttaggagttctgctttgacaatagataagaacgatttgaattagcagatcagttactagaaatgtcaatgggtgtttctactgtgcttgatcg

SEQ ID NO: 135882 - DNA, 122 bp, Homo sapiens
tgggataaggacggcgacgcttcgctggcgaatgaggtgcctcaatttgcccgaggcgagcggggaaatcgggatctcctttcatgaagccgagttggcttctcggtttcgtggaatctgcg

SEQ ID NO: 135883 - DNA, 122 bp, Homo sapiens
gacggcggaggaaaatcccccggcgatgctcaactgcggctttctctctcggctgtgagccggctccgccctccagcttccagagccggtggcttctgcgttcaccgccccgcgccgtttgc

SEQ ID NO: 135884 - DNA, 122 bp, Homo sapiens
ctctggtcaccgaaggccaggctggaggccagagcagccgcccgcacccggtcaccgcctcgacagtggagacctcagctgaccgcgagcccccggcccgcccgcaccccttctcatgcccc

SEQ ID NO: 135885 - DNA, 122 bp, Homo sapiens
tcctattttttatgattatgatcttgtatccccaaccatattgtaaactctaagtgaagacggcataatttaatgctggctctctactatcccagggtttagcatcttgttatttccatgca

SEQ ID NO: 135886 - DNA, 122 bp, Homo sapiens
gactcgcgacaccgtgaggccagtgctgatctcaccccgccctgctgagactcacgacatcgtgaggccagtgctgctctcagcccgccctgctccgagactcgcaatgccgtgaggccagc

SEQ ID NO: 135887 - DNA, 122 bp, Homo sapiens
gagtggggtctgcggctgcggagggcacgggctccactcaagcgtcctcaccggcttccgcggctctccccacagagcctcctgctggggcacatcttaaagcaaatcccagccccgaagga

SEQ ID NO: 135888 - DNA, 122 bp, Homo sapiens
ttcagtgtttgttttctaagcagggaggtgtctacgcggttgcctcctcagccaggtctccggctgccgctacaccgcgaagggatagtcccgggcctggatgggcggaggtccgtgttggg

SEQ ID NO: 135889 - DNA, 122 bp, Homo sapiens
gtttgttagaatcagaagagaggtattttttcagtctagcttttctgactcagactagttcgtagccactaagcatttcggcaaaggtacatggtacatatacatggtagcctgtgtgccaa

SEQ ID NO: 135890 - DNA, 122 bp, Homo sapiens
ttttgttgtgtctttcaaactgcaagcattccccttgaagacggcgaaagagaggctgtgcgttcagatggcaataaagattgacagtggctttgcccgtgacaacgcccccagcatcgcgc

SEQ ID NO: 135891 - DNA, 122 bp, Homo sapiens
ccgaacctggcgtgcctgtcgccgcttgccccgctcccagggctcattggctcccagtctcgacgtcagacccgtagcctctcacctattgggccagccaggacctgaggcggagtgcagaa

SEQ ID NO: 135892 - DNA, 122 bp, Homo sapiens
gtgcagcaactccaggggggctaaagggctcagagtgcaggccgtggggcgcgagggtcccgggcctgagccccgcgccatggccggggccatcgcttcccgcatgagcttcagctctctca

SEQ ID NO: 135893 - DNA, 122 bp, Homo sapiens
acgggtccactgtctgcatcagcacatagaggcacagggcgaagagcccagtcatcaccacgtagaaggccacgtagtacaggctgatccacactgcgacacaaggcaggcacaaaatttac

SEQ ID NO: 135894 - DNA, 122 bp, Homo sapiens
agttgaacatttcgcccatcatcataacatcgttaataatgaagtttaaacacataataacgtaagcctagtccttttttttactcctaagtggtgatagatgttgcaatagcattgctaga

SEQ ID NO: 135895 - DNA, 122 bp, Homo sapiens
acaaaaatagccatttgaccatgagttagaaagccgggggcccttccggcccctgctagccgcccccgcttacatctggagagcacagccactttcagcacccctccctgttttcatctggg

SEQ ID NO: 135896 - DNA, 122 bp, Homo sapiens
tggcctggcggtgtcttcctgccttctgaggcctggtgcgctgtgcctccttttggaatccgggattcaacttgccctttgccccttgtgtgctccccgaaccctttcacccctgttgaagg

SEQ ID NO: 135897 - DNA, 122 bp, Homo sapiens
aaccattctgcttcatgagccttgaggaaggcacagtgactcagcctcaggacatgggtccgggcgcagggaatgggtggagaagtggggagccagggcttaatcagggaaacttctccacg

SEQ ID NO: 135898 - DNA, 122 bp, Homo sapiens
ctgcatttgcagagatccgtcgctcacaccttttcttgtcttccgttgaaaaaagagaatcgtgggagtaggacctatttgccaatctcctggtaacactatcacaactggccacttccgcc

SEQ ID NO: 135899 - DNA, 122 bp, Homo sapiens
aactttgttctagttctgccctcagactgaaactctttctgtagcagggcctgctccaatcgtcctcaaacccaaagactgagacttctaggttcttggttaaaaccttcatgaggcctttg

SEQ ID NO: 135900 - DNA, 122 bp, Homo sapiens
ccgtgcagccaccgccgcacagccaccgtggccaccaccatgacgactgcgcgtccccctcgcaggtgcgccagaactaccgccatcaaccgccagatcaacgtggagctctatgcctccta

SEQ ID NO: 135901 - DNA, 122 bp, Homo sapiens
cagaggccaggcagaagcatttaattaccagacaaccatttacagtaaagggcagcagggcggtagtagtagtaaaggatttggggctactggtaattgactacactgtccctaagaatgaa

SEQ ID NO: 135902 - DNA, 122 bp, Homo sapiens
atggacaaaagaaaacacgatccaatgactggaaaatgtctctcattactctcatatcttcggctgaattctctcctatagtggacagaaagttgccccttttcttcataagaatatcatag

SEQ ID NO: 135903 - DNA, 122 bp, Homo sapiens
agaggaaccagagataatgaaaggaacagaagaaaccatcaaaagaattatcaacatccacggagacattatatcacatcagggtacaagggaacacatcaggaaataagagactgcatcaa

SEQ ID NO: 135904 - DNA, 122 bp, Homo sapiens
aacagccctccgtccctgcccccgcccttttactttcaataccgagaaaatggaacagaacgttagggaaggaggcttcgcgggctgtgccggcgcctggctcagcccctcccggcggccac

SEQ ID NO: 135905 - DNA, 122 bp, Homo sapiens
gagaaggaaaaaagttgggattgagtatcccaacttggctcccctaaaagctggtctgtacgatggcaggtgagagagcaggctgtagggtcttgtactctgcctacattgactgagactcc

SEQ ID NO: 135906 - DNA, 122 bp, Homo sapiens
cctgagaggtgtccaggaaggtcagtgcagaccacagggcagggaccactgagcacaagacgggaaggggttgtcaaggcaacacagcatgtcctgagaggagccctttggccactgggtgg

SEQ ID NO: 135907 - DNA, 122 bp, Homo sapiens
atgcggtcccctaactccatagtcactgtaatgcaatagctgccattacttgagcacagccgatgtgccaggcatcagagatgcactgcggtgaatacacactatcctcgaaagaaccctag

SEQ ID NO: 135908 - DNA, 122 bp, Homo sapiens
gcccccatttaaccctcgggacctggcgaaatcctgctacgtgggtagtgaacattgtatcggggactgaaggaaatgcttgtaaagagtgttagtctggagccatactttccctgccctgt

SEQ ID NO: 135909 - DNA, 122 bp, Homo sapiens
tgcactgataagacagaaatagtccggcggcccggggtctgcctgttgactcggcggggacggggccgcctgcctttccaagcccgctgtccaaacagcgcagataagcggcgaggcgcgcc

SEQ ID NO: 135910 - DNA, 122 bp, Homo sapiens
gtgggaggctgcatagggacgtggagagaaaggggcattcgggctggacaggatatttaacgtatttgtgctctacgtggcttgttttcatgagtaccgtatgtttacacaaagtaggtact

SEQ ID NO: 135911 - DNA, 122 bp, Homo sapiens
agcgcccactccatgcacacagtgctggaccgcatcgctggcgaccagagcacactgcagcgctactacgtctataactcagtcagctactctgctggggtctgcgacgaggcctgcagcat

SEQ ID NO: 135912 - DNA, 122 bp, Homo sapiens
ataaatggggacccgcgtggttgtagaccctcactttggacgcgagtggcccagcgcaggcgacttcactcgctgggataaaaggagattcattccaagctgagagcctgaacaaacagccg

SEQ ID NO: 135913 - DNA, 122 bp, Homo sapiens
agtttcgtcttgctctgcaaagacaaaagctcagtcattgacctggagggcccaaaactgcgccccctgctgccttgtgtatttggtggctggcatagtcagttcattatgtggcaggcaaa

SEQ ID NO: 135914 - DNA, 122 bp, Homo sapiens
tcactgcgcaggcgagcgtaaacagtgcacgggcgcgtgtgtgctcactgtgtgcgcaggcgagtgtaaactgcacgggcacgtgtgcttactgtgcacaggcgagtgtaaacagtgcacgg

SEQ ID NO: 135915 - DNA, 122 bp, Homo sapiens
acgcatgtgccaccgcatcacattaatacttaaattttttgtagagatggggtctcactacgttgcccaggctggtcttgaattcctgagtcccagtgatcctcccacctcagccttctaag

SEQ ID NO: 135916 - DNA, 122 bp, Homo sapiens
ggcagcccctgagctccacattctctaggtgagcagccctgggcaggcaggtgggtgtgccgctgggcagcagcaggtacagtgagtgctggccccctggcttctgcccatacttagcactc

SEQ ID NO: 135917 - DNA, 122 bp, Homo sapiens
gccctcggggcggtccgcgtcccgcctccccgggggccctggcggggactgtggggaccacgcgcccggcctcccccgcagcttccacttcgagagcactttgcgaaagtttgcgaagttgg

SEQ ID NO: 135918 - DNA, 122 bp, Homo sapiens
cctctcaggatgccaagaacggctccgcgtcctacactgagctagtcccgggcgcaaatacgaggaaggaaaactccagggaagcattgagagtagcctgagaaattcgtggaggcagagta

SEQ ID NO: 135919 - DNA, 122 bp, Homo sapiens
attaaatataggactagtatatagtttccatggagcaaaaagaaattccaagcatggccacgagataatgatgaaaattgcaacagattcaaaagcggctggtttatcacagggttccttca

SEQ ID NO: 135920 - DNA, 122 bp, Homo sapiens
aggctggcactgacgacttcacagaacatagtttgaaagcctctgctgtaagattagttacgaaatgcatccctaggccacaaaacaaattaatttgctagattagaatgttcatctttatg

SEQ ID NO: 135921 - DNA, 122 bp, Homo sapiens
acacccgtttcacagcccagggtgggctagtgggcaggtcgctggcctttcctacggactcgagcctgaaatgtgtccgtccctcccctttgcaaacctgccctccttccaggcaccatgcc

SEQ ID NO: 135922 - DNA, 122 bp, Homo sapiens
atgctgatcctttttctcgtgagaaaacgctggcctgttattattagctaaggtcacacccgctgggcagctcctgggatttttggattcctccccactccagagggaaggctatttctagt

SEQ ID NO: 135923 - DNA, 122 bp, Homo sapiens
gggtggaagcgagaataatgaggaaaatttccgaacggggcggcgccaggtgccagaactcgcgattcctcttccgctgcggtctccttaacactccctccatccagttccgtgggcaccgc

SEQ ID NO: 135924 - DNA, 122 bp, Homo sapiens
cggaaccggaagcggctgctccaggtaaagggcgcataagttgctggccgagccaaggatcgctgggctttcaccgcagcccctgcgggagagcggcgcaggcagaagcaagtgataggccg

SEQ ID NO: 135925 - DNA, 122 bp, Homo sapiens
cccagacgatgcagatccactctgggctgggcctctgctctttcctgggctgacgtaaagcgttctgctcatttatagatgagagtcgtgccgtgcagaacccagcatgtcacccgtggtgc

SEQ ID NO: 135926 - DNA, 122 bp, Homo sapiens
actcgccagcccctcccgcctgctccctcccgctctccaaacccaacctgcttcccgcgacggggccaggtgcagccaggagccaaggcctgctgctcacagccgtcccctccagccggccc

SEQ ID NO: 135927 - DNA, 122 bp, Homo sapiens
caaagcgtcccataaggttgccctcccaagtgcgagaccgggccacacgttgatttcctgcgtactctggtggggcgagcgctgctccttcccatctgctctcacagtcttgccgtatttat

SEQ ID NO: 135928 - DNA, 122 bp, Homo sapiens
tacagtcaactgagcacagataatgccccctccgaacatgtatctgtgcctcctgcagctcggggaggggctcagagcagaggaagggggtccccgccccaggaagggactgcagctgctgc

SEQ ID NO: 135929 - DNA, 122 bp, Homo sapiens
gccggagagcctgcagtgcgccaacaaggtcggcgacgcggtgcgcttacggcgtgctggcgcttttcgaggctcatctgcagatctcgggccgggggcacaaccccccgagggctgcagga

SEQ ID NO: 135930 - DNA, 122 bp, Homo sapiens
gcgcctgtaatcccaactactcgggaggatgaggcacaagaatcacttgaactcgggaggcggagtttgcagtaagccgagatcacgcctcggcactccagcctggacaacagagtaagact

SEQ ID NO: 135931 - DNA, 122 bp, Homo sapiens
ttccctggagggcttgttaaaacccagcatgctggaacccacctcgagtttctgaatcagcgttcagtagttgtggggtggagcctgctagcaaattgcattcctgacaagttccctggtgg

SEQ ID NO: 135932 - DNA, 122 bp, Homo sapiens
ggtcgaagaagataagctgctcatcttgctggagcgtttaagaatgggacgctaaaaagccggttgagtactggagaggcgatcaagcataggttatggagcaccctgttctggcatctgtg

SEQ ID NO: 135933 - DNA, 122 bp, Homo sapiens
aaccatttcaggagattgttgtgtgggcctcagtattcaaggctgccttagaagatcgtgcgatcctctcactcttcttgccccaagtaccagagttaataagccactgaaccaaccagagg

SEQ ID NO: 135934 - DNA, 122 bp, Homo sapiens
ttgccagttttggggctttcagctctcccggggttggggatgggcagagtgggtggcctgcgccctgctttatgtgtaaccggtgtgacttttcttgctttgtcaagttcttagaaatcttc

SEQ ID NO: 135935 - DNA, 122 bp, Homo sapiens
cttcacttcaagatacctctcagtcttagtcaccacttcaaaataggtgttctcaatgtacgcaccttcaacctcggctagattggcttgacctaggcatgggcagactcatggaacttgtc

SEQ ID NO: 135936 - DNA, 122 bp, Homo sapiens
aaccgggacggaggctggccctgggacagcaggcggctccgagaacgggtctgaggtggccgcgcagcccgcgggcctgtcgggcccagccgaggtcgggccgggggcggtgggggagcgca

SEQ ID NO: 135937 - DNA, 122 bp, Homo sapiens
agggttccagtccctgcttggatagggaagtcgtttccaagacttttgacttttcctagtcgccggagccagttcacctcctccacaactttctctgtcggtgtttgtcttctaaaaatttc

SEQ ID NO: 135938 - DNA, 122 bp, Homo sapiens
gcttgagtgggtggcggggacggtccgggccactgcacttcccccgaatgaggagtggggcgagtgggcggaagggaggcccccagaaccactgaccacgcccacgcccacgccccagggcc

SEQ ID NO: 135939 - DNA, 122 bp, Homo sapiens
tgggggcttgacaggagtttatcctaactgatgctgggtgggcgcaggccctgagatgggcgtcagggagaggggacgccagacacacggcctgagcagggtgaggagcagctgccagcccc

SEQ ID NO: 135940 - DNA, 122 bp, Homo sapiens
ccaactcctaagctcaagcgatcttcccacctcagcctcccaaagtgctgggataacaggcgtgatccactgggttgttttctaggatgattaagacatcccccaaccagtggttgtcctcc

SEQ ID NO: 135941 - DNA, 122 bp, Homo sapiens
gagagcctcctggaagtgtgcgacgactataatctgaacgagaacgagtatttctttgatcggcatccaggagccttcacttccattttaaatttctaccggaccgggaaactccatatgat

SEQ ID NO: 135942 - DNA, 122 bp, Homo sapiens
gcagaggccacagattctccctgagccacctcacttggaagcaccatgtccggatgagatcgcacttcctgcagtgggcattagccacgtccaggtagaaccaaacctgttgcttttgtatg

SEQ ID NO: 135943 - DNA, 122 bp, Homo sapiens
gaccagggtttcggagtcagataaactcaggtttccaccttgaatttctcatcaatctgacgtggcaggttattcatcctaaggttcagttcccacctgtgtaaagtgggagccgcaagtcc

SEQ ID NO: 135944 - DNA, 122 bp, Homo sapiens
gagtaaccaaagatgggctgggatgggacggcgaggaataaattgctccccacccagctgcggtgcgacgcccccagcgtcccaggggagccggtgcgtcagctcacggctggccaaggcgg

SEQ ID NO: 135945 - DNA, 122 bp, Homo sapiens
atgaataaaaatgagctcgctggtaaggctagaagccccacagtgtggagacttcatccccgagaggagtgtgtttctcactgcagcagttgagtcaccagcaagacttgcctgaggtgagc

SEQ ID NO: 135946 - DNA, 122 bp, Homo sapiens
cctcttcagctcactgacctcgcccgcagcatctgatgtaagtcaccatatgccatttcccgactaggagagtgcttggcctcttgtgcaggaagtttgcttaccctcatgactcctggctt

SEQ ID NO: 135947 - DNA, 122 bp, Homo sapiens
cccagcggctgcctgggattggtgggggccggcgtgagtgacagacaggggggcgagctgcgcgaccagcggtttgtttttcggagcgttcctgaggtggagaacggtggccggacggagag

SEQ ID NO: 135948 - DNA, 122 bp, Homo sapiens
ctcccagacatatcccccccccccaccatgcacccactgccacccctccacccgctctcccgtgacacgcagacacaaagggcgccagcctcctctacgcatccacagccaaaacccgctct

SEQ ID NO: 135949 - DNA, 122 bp, Homo sapiens
gtcgcagatgacgtgctgcaggtcgctgtggcagtggcagttctgggggcaggcggccagcgccggcagcagaccagccaggaggccgaggctgagcaagagcattgggcggaccatggctg

SEQ ID NO: 135950 - DNA, 122 bp, Homo sapiens
tgcctgggcagtgcaagtgagtgaaaatttgtctgtctgtcttccaggagtagcttgagccgagaacgaggcgagaaagctggagaccgaggagaccgcctagagcggagtgaacggggagg

SEQ ID NO: 135951 - DNA, 122 bp, Homo sapiens
gctaagtgccttacattacctcatttaatcactgcaatagtccagatactctctagattgcgagtggagcttctttgtccagacctcattcagctttgtgctttgccatatgcagagacagc

SEQ ID NO: 135952 - DNA, 122 bp, Homo sapiens
gaaggactctgtccagcccagccacgtgccgccctctgcttcctctaggaggcagacaggcggatcctgcaggccctcctcgagaaggaggacgagagccagcgcctccacctggccaggcg

SEQ ID NO: 135953 - DNA, 122 bp, Homo sapiens
atcagccagccgaaggccctgagcccccagggccgcggccgggacgcagggaggtcaggacgcgacgctcgcctcacctgtttctccagcggctccttggccgacagcgccggcttggggga

SEQ ID NO: 135954 - DNA, 122 bp, Homo sapiens
cggcaccggggggtggggggccgggggcggggagggggggggaccgggggcggggcggggcgaggaaaaggacttcgaccagattcttaaagagacaggcgcctgcccaaccccgccgccca

SEQ ID NO: 135955 - DNA, 122 bp, Homo sapiens
cagcggagctgacactcccagaaagcaagatcttcgaactacagggtgcgcgcaggctctcgcttctctccaccatggggggccctgcagtactcgccaagagcgtagaatttgcctagtat

SEQ ID NO: 135956 - DNA, 122 bp, Homo sapiens
tgtttttttttttcttttgaaccaaagcagaaatcatcctgtatccttatgcaattcttccggcaggctccaacagataaataaagcccaccaccctccatgggtctacctttcccagcaga

SEQ ID NO: 135957 - DNA, 122 bp, Homo sapiens
tcatgcctgggctgcctgaactggcactggacaaaatcgtgtctattccaaaactcgacccgctggccccttccattgtcattgctacatgaggtccacgccactccgccgttcagcagccg

SEQ ID NO: 135958 - DNA, 122 bp, Homo sapiens
ggcgaccggcaccgcggaggagcgccgctgctgggttccgagcgcctgggcagccgagtgcgcggggagcggagttggctgcagcctcaccccgtgccgctcactactcctctgtcaccgga

SEQ ID NO: 135959 - DNA, 122 bp, Homo sapiens
ctgcaggggagggaggcccttcctgtgccaggcagccagagacctgctccgagtgccctgcgctgctctcatcccagcagaaggacgactctgagggtggcaggcgggacaggcagtcactt

SEQ ID NO: 135960 - DNA, 122 bp, Homo sapiens
aggcgccgggcggtgcgctgggagctgctggtgctgctgctgctgctgctgcccaccctccgccgcccgggcccccgctgccgcccgggccccggctgccgtctgcgcccccgtcgaccccg

SEQ ID NO: 135961 - DNA, 122 bp, Homo sapiens
gcacctgctcacagcaggctctcaataagctttaaaaagttagtgccacatgaccagcatcgactggcctcagacatctgcaagcactcacccaggccacagggtcaggtagagggctcctg

SEQ ID NO: 135962 - DNA, 122 bp, Homo sapiens
tcatccttggagggacaggactctggggtcacagaggaagacttcctcaaacatttcaaccggggcttcaagaataagtaggactggatagaccacgaagtgagaaggtgagcgactctggc

SEQ ID NO: 135963 - DNA, 122 bp, Homo sapiens
ttccctacgaggcctcctgccgcaaaaaaccgaggttcaaatgcttgagaaacggactcacgagataccaggggggttgaatttagcagaaataaggagccctggttcatctgaaaactagc

SEQ ID NO: 135964 - DNA, 122 bp, Homo sapiens
gtatgagtcaggagttctgctctccaggtctgaggctgttcattgcctgggtttgtccagcgggcctgaagccatggagagcataatatttagaggtggcgaacccgacaccaccctgcttg

SEQ ID NO: 135965 - DNA, 122 bp, Homo sapiens
cctctttccagtgcgccggtccaaggcggctgatgaggagaggagccgccgagcccagcgcgcccgggacgagtaccgacaccactcgctccgtgctatccagaagggcacggtcgctggcc

SEQ ID NO: 135966 - DNA, 122 bp, Homo sapiens
gtccgagatccaccccgaaaccgcgggaccccgagacccttgacctgggagaggcccaggcgcctttacccggtttcattttcagtttaggccaaaacccccgcgggttggtcggggcaggg

SEQ ID NO: 135967 - DNA, 122 bp, Homo sapiens
ggtttgaccgagattcccagctgcccagtctctgaatatcagaacttatttacatgctgtcgggagaggggcagagagcagaactttccaaagcatgaagttcaagagtccgaatatctgat

SEQ ID NO: 135968 - DNA, 122 bp, Homo sapiens
gaatgcgacgccacagagcaccctggcaacggggggcggggacttcctatgttagcggggcgaggggccgcctcttaaaggagccgcctggagcggggaaactgctgacaacccttaaggca

SEQ ID NO: 135969 - DNA, 122 bp, Homo sapiens
cagcatcccagcacttgaacttgggaacaggctttccaggagtgcagacagagcccttaccgcattccttctgaacctcatcttgcctctccggggatttgcttctgccatttcgcctgtac

SEQ ID NO: 135970 - DNA, 122 bp, Homo sapiens
tcaccgaccacgaggagcactgcgaccgtctgcaccgtggccgccccctctcaccgacgacgaggagcactgcgaccgtctgcaccgtggccgccccttctcaccgacaacgaggagcactg

SEQ ID NO: 135971 - DNA, 122 bp, Homo sapiens
ccgggcgtcttgctcgtggtcatgcagtagaccagaggcaggaccacagtcacatcaggccggactcagtccagcatcctactgtatgtaatggagaaagagagttggcttgaggcctggct

SEQ ID NO: 135972 - DNA, 122 bp, Homo sapiens
gcatctctgcttccttgtgcatctagatggtgaagggtgtttcagatgctcccatcaaggcgccagggagaagtcacagttggaacatctgaaattaaagatcccaaatgttgctgggcctc

SEQ ID NO: 135973 - DNA, 122 bp, Homo sapiens
taaattaaatgctttatatttcctttacctaagaaaatacagtggttgcatctgctcctccggcctataaccaaaatccatcaattcatgtcttcaggagataagcacccttcactcccttg

SEQ ID NO: 135974 - DNA, 122 bp, Homo sapiens
ttcttgattgccagctgtttaccaagcagcgtactagacactgggggtacaagttgagtacgaatactccgtacccttaaagactcaattataaaataaacatacatagcttgtagtgcttt

SEQ ID NO: 135975 - DNA, 122 bp, Homo sapiens
ttctggagaagctaatcagtccagggatcctgccatcctcagccgagccccggggccaggcgagacaggtgggctgtccctggaaggttctgctgtcgctaccccgatccgggctggacaat

SEQ ID NO: 135976 - DNA, 122 bp, Homo sapiens
aggccgaagggagaaaaccaaatgttttctcttgacggatggccgggactccttggccctcgcctggctttccacccctcctggcttcccgcaccagccgggcccgcagctcacctgccggc

SEQ ID NO: 135977 - DNA, 122 bp, Homo sapiens
gtcaagacccagcaggcccagccccagggcgttttcgtcctctgacctctgaccctctcccgaggcctgcacgcccctctgcccaggcctccccggccacgcgcgttccaagtcgaggtgcc

SEQ ID NO: 135978 - DNA, 122 bp, Homo sapiens
ccgcccactggagctgtgggcagcggacgctactccccagccccccagcccgcagcagagcggcactcccactcccacacctgtgcaaacatccgcccgctggccgggaacacggccccttt

SEQ ID NO: 135979 - DNA, 122 bp, Homo sapiens
tcaaggcttgctcagtgaagataaatgaatgagtcaccaccatcagatgtgattttcttccgatctaaattcacctggtttccctgtttgacacactgtcttgggaatttggaaatatccct

SEQ ID NO: 135980 - DNA, 122 bp, Homo sapiens
cgcgttcataaaacgaaactggagtttcacgaagcaattcttaggcttagcgtccaggaacgctgtagacggtctattctattctacccctattctactcggttcgattctgttcctaagaa

SEQ ID NO: 135981 - DNA, 122 bp, Homo sapiens
aaacttgagatcatccttcagctttggagataatagaactgagcggtcatttcctccccgcgctgagggagctgagtgatggagaggcggcataggtcctccgaggaggccccgtgagcccc

SEQ ID NO: 135982 - DNA, 122 bp, Homo sapiens
cttcaagtcgaaagcagatgcctgactccggtttctcgctcaccccaatctcggagctaccgggggctcccctgtcactcggggcctgtggtctccaggccggcactcctcagacccggggg

SEQ ID NO: 135983 - DNA, 122 bp, Homo sapiens
ttcaagcagttaacgcgggttcgattcccgggtaacgaaacgtttttgtctttccttctacgaaaaacttttctgagccggagcctccagcgcgctgtgtattcgttttacgcctcaacgaa

SEQ ID NO: 135984 - DNA, 122 bp, Homo sapiens
ttggcaagagagtgtgagcgcttcagtggggaagagacggtgaggcccgccagccggagccgggtctcaatctcctgtgtccgctgcttcaccagcccgggcttcccacggacactgtggat

SEQ ID NO: 135985 - DNA, 122 bp, Homo sapiens
taggtgccgcagtgcggggccgcgcccgagcctggccgcaccggggtgacggagtggggtcgcctctcaaagggtaaatatgaatcttgccttatctggctccagcgggctcttccctaaat

SEQ ID NO: 135986 - DNA, 122 bp, Homo sapiens
gggaggaggaggaggagttgaagtttgcattgaaaagactggctttccatgacgtagccacgtgctttcagacccgtcaccagtgagatgcttcaaccagcccagggagggcagtgtcactg

SEQ ID NO: 135987 - DNA, 122 bp, Homo sapiens
ctccctgaggcccgaggtgcatgcagtgatgactgcctaggaccgcctcagtgcctggaacggtttctcaggcacaattctcacctatttttgcatttcccacatcatgtatgttggaagaa

SEQ ID NO: 135988 - DNA, 122 bp, Homo sapiens
tgcgtgttacacaagactgtcatgtgactcgcatgtgacatgactgacatgtgtgatgtgcgtgacacatgggtgatacgtgactgacatatgtgtgaatgggcttgacaagtgacagacac

SEQ ID NO: 135989 - DNA, 122 bp, Homo sapiens
gggctctgctcgctccatggacagctgggtggaaaggacgccccgtgaaggacacccggccgtcggaccgcgcccacccctgggcctcccaggggctccctccgcagactcccagggacttc

SEQ ID NO: 135990 - DNA, 122 bp, Homo sapiens
tgggctgtaaaaaagcagatgcaaaattgctcctactgtcggctgccagctgtgtagtcccgcagccagaggcagagaggccgtattccccccactttccttagattcaggagcctgttcaa

SEQ ID NO: 135991 - DNA, 122 bp, Homo sapiens
agccccccatccagtcggcctgcccggggtgcgcagggttagcctggagtgagctcgccccgcccggggttgcgcggccctggggggtcctctcgcggcggctcctgggacctgctggcgcc

SEQ ID NO: 135992 - DNA, 122 bp, Homo sapiens
agcataggcacacatcacccagaggcacagtttgccaataaaactcacccggccaaacagcgtaaccccttcttccaagcagatttctttgcagccaaatgcaagggatgttaaggcaagac

SEQ ID NO: 135993 - DNA, 122 bp, Homo sapiens
aaaggtaagtgtcacattctgtgttcctgctgggtttaatttctcctttcacttctctgccgatgtattttgccttccaagcagaggagtagcctgaatcaaggctagccattttggtagat

SEQ ID NO: 135994 - DNA, 122 bp, Homo sapiens
ttctttgactaggaaagggaactccctgaccccttgcacttcccgagtgaggcaatgcctcgccctgcttcggctcacgcacagtgcacgcacccactgtcctgcgcccactgtctggcact

SEQ ID NO: 135995 - DNA, 122 bp, Homo sapiens
ccgcaattgcagaggccctcccctcactccacaggtcccctgggagcactgggggcctggcggggaccaggcagtaccccttgggaggacttcattagagagtaggtcatggaaccctattc

SEQ ID NO: 135996 - DNA, 122 bp, Homo sapiens
gattccagaagaactagattttcagataggagccatgtgcatgacagctcatacctgttgcgggaagtcagggaccctgaacagagggactggctggagctgaggcagaagaacataaattg

SEQ ID NO: 135997 - DNA, 122 bp, Homo sapiens
gccaccctctacaggcctgacgggttacttccgttcaccgtcggctgagccaagaaaggccgcttccgatcctccagcccccgaggcgcgggggcgcgcggacgcccggttataactgaaca

SEQ ID NO: 135998 - DNA, 122 bp, Homo sapiens
catcagctacccctaacctctgcctgcggctggtagtacatgccaatctgagcatgtgttcgcgaccacgatgagtgtgccgcacttccggccagatcgccggatttccgctgagtgaccct

SEQ ID NO: 135999 - DNA, 122 bp, Homo sapiens
gatatcagtatttaaaagaaaaataccagaaaggactgtcataggaagacagatggattacgcacagatatttaaagtgggtgactcaagcccaaagaaaaccttaattcaacttgcagatg

SEQ ID NO: 136000 - DNA, 122 bp, Homo sapiens
tgactacgggtggtcctgtggctgaggcgcagcgggccctgggagttgtagttcatcaagcggaccgaggaggcgaggctgcgctgagcatcctgggaatcgtagtgctcgctacacggtgc

SEQ ID NO: 136001 - DNA, 122 bp, Homo sapiens
ccctcaaagtttcggaggcttgatggagaagcgtgcgtccttgactgggggttctccttccgtagtcctgggagccggacttgagagcgcccccaaccttgtgcccttgaaagccgagtgcg

SEQ ID NO: 136002 - DNA, 122 bp, Homo sapiens
cgggagggtgcacttaaaacacgcgaaaattggaaacgtgccttctgcagtcagttccttcggattttccggcatttagaagccagttctactccttcagcccgaccgtatctgcaggtctc

SEQ ID NO: 136003 - DNA, 122 bp, Homo sapiens
cccttaggccaatttggctgcctgggattcctgggaggatcttggagaacccaggacacccgaatccctagtccctatcctggtttttgctctgctggagaataacaaaacattttgggaac

SEQ ID NO: 136004 - DNA, 122 bp, Homo sapiens
tgtacactataattgaaagggaagatgcagggaagatgcctggtttggagaagtgctctgcgatgcaagactgactctagttctttcaaaaggttgcaactcttgaaccttctaagtatttt

SEQ ID NO: 136005 - DNA, 122 bp, Homo sapiens
cgccagccacagcagagaggtgggggttgtgaccggagttagatgccagcgcagaagggacgtgagcccagccgaggtaccgctgaagaggaatcaattttggtatgcagataatcactggg

SEQ ID NO: 136006 - DNA, 122 bp, Homo sapiens
aatcaaataagtaacatatgtagttgaggttctactttgtgagtttcactgcacaatacccgggagcaatttgtttgtttgtttggttttaactctggctttgaatcttgactctgacactt

SEQ ID NO: 136007 - DNA, 122 bp, Homo sapiens
tcgagcaactcctttgaccctcttagaacccattccttttccaaggggattagttccttccgtgcaaaggcagacagaaacgcgttctgcccctgtccatttagggagctcggcaaacacca

SEQ ID NO: 136008 - DNA, 122 bp, Homo sapiens
ttcttcccactgcctcaagttcatgtcctctttaatctcttgcatggcatttttttctcacgttatgtttacttccttaattctccattgtaattcctctggtggctggtattgtagagggt

SEQ ID NO: 136009 - DNA, 122 bp, Homo sapiens
acatagttacagaaatagaaaccagatagtgccatcaagggtgatattgaaaaataatagcgtctcgccaatgacaacctgttctgagcttatgtttgctaaaatagattgagtgtaaaatc

SEQ ID NO: 136010 - DNA, 122 bp, Homo sapiens
cttatttgcaatttcatccatgagaaacggcaggagaacacaggccactgcagccagcagcgcccacacaaggcacacctgtttcagatggccaggcctccgccacttcccgccacacacag

SEQ ID NO: 136011 - DNA, 122 bp, Homo sapiens
ttcacaaaggtgatgactgaactgggcattaaagaatgagtagaattttgccaaattctgcgagactacattttggcctaggttatatgctaagaagtgatagaaccaaaacttgaactcag

SEQ ID NO: 136012 - DNA, 122 bp, Homo sapiens
ggttctggcaattaggttgtggacatctttggggcgacaattctcaacctaccatacaaccggtacataaggttctactacctactaaatgcatcataaacagaacttctgatccttcaaca

SEQ ID NO: 136013 - DNA, 122 bp, Homo sapiens
ctgtgaagctatatggaaaacaatgatttgtttgtgacttggctcctatgattgcaaatacgtatacatatagcatcagactgtggggctttttacacatagctgaaaatatgctctgaaat

SEQ ID NO: 136014 - DNA, 122 bp, Homo sapiens
catacgtagcagtctgtggtgggagctaaacctaatcattcacataaggaaccagcctaacgcctgacacacagtgggagcttaaaatatgagttcccttttgtttcatcttttctttctag

SEQ ID NO: 136015 - DNA, 122 bp, Homo sapiens
aagcctgtgctgtattattttgactgatgtcatctgttctactaaccccagtgtccaatccgtatttaacaggacttccaggactgaatgtcaagtttggggaaggaatcagtggtgttctt

SEQ ID NO: 136016 - DNA, 122 bp, Homo sapiens
cttctgcatcacgtggggactgcgcctccctatgtcatgaagccagggaatatgtgtggccggccgcttggggtagcacttgttgctagagataccgcctggaggccactgatctgtaaaag

SEQ ID NO: 136017 - DNA, 122 bp, Homo sapiens
ggccagcacgttgctggccggggtggccacgctgggcaacaagctttacatcgtggggggcgtgcgcggcgccagcaaggaggtggtagagctgggcttctgctacgaccccgacggcggca

SEQ ID NO: 136018 - DNA, 122 bp, Homo sapiens
gggaagccccagcagagcagcgcagcttgcttctaaggacagcaatggacacctaacacccggagtggtgcctagcagattctagtcactcaatgaatgtctgctgagtgactgaagaatag

SEQ ID NO: 136019 - DNA, 122 bp, Homo sapiens
attcttagttatacatactcacagttatgtacacagataacactgagactcattgaaaggcgcaggaaaaagcatctcccaaactagggaggtgcaaaggattctggggtctgccttatttg

SEQ ID NO: 136020 - DNA, 122 bp, Homo sapiens
tctatctgtatcaagctcactgcggatcctgctgtaaaactggtgggtagctgggctgtccgttaccaccacagctacatcttctgtttctttgaatagaaagcaccacagtgttttgcact

SEQ ID NO: 136021 - DNA, 122 bp, Homo sapiens
gagacctcagcgcaaaaagcgcaggactcgttcccctgctctacagctgagtgcccaggacggatctcactggctgaaaaaaacagaagagaaggcacccaatgcaaaatcaaatgtcagcg

SEQ ID NO: 136022 - DNA, 122 bp, Homo sapiens
gctgggcagatcaattgtaaattgttatttacagtttctgagcctttaaaagaagagcttcgccggaatcagtcttcattacagatgtgcagcaccatgagggccctggtgcttctgctgtc

SEQ ID NO: 136023 - DNA, 122 bp, Homo sapiens
ccctctttgattcctcctcttgggattagtgtccatctctggaagcaggatccaggaggacgggaggggccgctgcggaccgcagtcgctccacctggaggagacaccagaaggaagacagc

SEQ ID NO: 136024 - DNA, 122 bp, Homo sapiens
atgagcacatttcccagcaccgtgaccaggtacatggacaggaacatccaaaacaggatccgctgctgctcaggactctctgagatccccaggagaaggaactgtgagttctcactctggtt

SEQ ID NO: 136025 - DNA, 122 bp, Homo sapiens
gaggcagcgaccagcagcgtggagggagtccagagagctagcctctgcggacggcggaatcgaaattaggctcatttggagactacttcgagaccggtgaggggagccctgtagccaccatc

SEQ ID NO: 136026 - DNA, 122 bp, Homo sapiens
ttcgcatcttttccccaatctttttcaggaaatcaaattctggaattagagatcatatctcggtttctcaccttagataaactcctgttaggtttctaacaggaatttatttttggctcacc

SEQ ID NO: 136027 - DNA, 122 bp, Homo sapiens
aggaggcgggaaggccgagaacaaggtgcggccggagttggttccttggagggcaccccgcgtggccgtatgtggtcgtcttcttgtctgtgtctcggtgtccaaatgtgcccatcttatat

SEQ ID NO: 136028 - DNA, 122 bp, Homo sapiens
gcacaatttcagcacatacttctgggggtgttttccacactcactactcaattctcactgcggagacccctatcccactccaaaggaaatgccccaaattttggcccaagactaaaatgcct

SEQ ID NO: 136029 - DNA, 122 bp, Homo sapiens
attatcggccttccctgggccactaggtggttgccggcgcagggctaggcaggcggtcatcggcacgtgtgcaactccacgagccgctggcactgccggcacttgacgaagcagcaccagtg

SEQ ID NO: 136030 - DNA, 122 bp, Homo sapiens
agctggaatcccaggagaatgtgcagtgtgtgtgcaggagaatagaccctcccaatcctgcgacaccccgaggtgcctccagcccagaccactgtgatgtcttgtcttttttatttattttt

SEQ ID NO: 136031 - DNA, 122 bp, Homo sapiens
cgcggggcggggcgcaaccgcgagtaacgctcctccccctcccgcccggtagggcgcctgcgcttggtggaggcggcccttcctccggccacgcccttccagccaactcccctaaaccagtg

SEQ ID NO: 136032 - DNA, 122 bp, Homo sapiens
gaagacccaggtcctagctgggaggatttgccactcaagcagtaattcagccctactacgcgtctgccaccattccagcactacaagggacaaagagatggatggggcgggtcgctggcctt

SEQ ID NO: 136033 - DNA, 122 bp, Homo sapiens
atttttttcccacgcaacaaaagccacatttaaagttttgttttgggagtctcgctctgtcgccaggctggagtgcagtggcgcgatctcagctcacggcaacctctacctcctgtgttcaa

SEQ ID NO: 136034 - DNA, 122 bp, Homo sapiens
ggccgcggggaaggtgagctggggaggcgctggccgggggctgccgcgtgggtccgagggcgggtgagctgcggggcgccgcctccgggagggttccgcgaccccggccttccctcgggctc

SEQ ID NO: 136035 - DNA, 122 bp, Homo sapiens
cgacagggctcaggagagcatctgaacgcacgacagggctcgggagagcatctgaacgcacgacagggctcggcggagcatctgaacgcacgacagggctcgggggagcatctgaacacaca

SEQ ID NO: 136036 - DNA, 122 bp, Homo sapiens
caaagtcagccccaggggaggtgatggccatcccgaccatccggtcatttctaaaaccagcgtctcaaagagttactgattctgagcgcagttggggagaggccacggccgcatggcactcc

SEQ ID NO: 136037 - DNA, 122 bp, Homo sapiens
gggggcaatgtgaaggagcaggttaaaagcagtcggacaccggtaggttggtgcgagcaccgccctgtcctaggtgaagctaattggtttgttatctttacccaccaaagcatttactttgg

SEQ ID NO: 136038 - DNA, 122 bp, Homo sapiens
gttgccatggcgactaatcggggatgagggaagcctagcgcttaacacatccccctccgacggtcaaaattgggcctctctggcagctgctcctgggatcacagccgcccacgcagggcctg

SEQ ID NO: 136039 - DNA, 122 bp, Homo sapiens
cgacgttttttgccagtcttttgtaactggctaaccacatggctcttccttcagatgacacgacctcagtgccaaaggcactgcttttgcacagattcctttaatcacaaagaatgtcttcc

SEQ ID NO: 136040 - DNA, 122 bp, Homo sapiens
ctataaacccaattaaccttattcttgaagaagcgaaaccccccagacacccaaaccactcggctggtggtattgccaggcgatgggaggagcagtctcactgcaatgtgaccttgaggcta

SEQ ID NO: 136041 - DNA, 122 bp, Homo sapiens
accgccatctgaggcgggcgggggggtaccggggcgcctggactggggagggggcgggcacgcctggctctcccgggagcctcgccttgagagacattgaaagactacgtgggagagtgcca

SEQ ID NO: 136042 - DNA, 122 bp, Homo sapiens
taaccagttcattttagccctgcgcacttgcaacggcaacgccaccaaacactagaggaacggggggaaatgaataaataccccagttgtgccttttctattacaaacgtctcccagagcaa

SEQ ID NO: 136043 - DNA, 122 bp, Homo sapiens
catcggcttcaggggagggggccgagttggcgagtctcccggtgggaacggagcagactgcgcccccatttcccctccaggagagtcagaaaaagcgcctctcggctccggggccaacccca

SEQ ID NO: 136044 - DNA, 122 bp, Homo sapiens
gtaccaccactacttccggcgtctgctccgcgcccccccatgtcgctgccgccgtggtaccgccctctcgcggctgcgcagtggcaccatcccaaccgcaccgactggtaaccccgcccacg

SEQ ID NO: 136045 - DNA, 122 bp, Homo sapiens
gtttgtcttgaagacaaatcctgttcagatttctacagcgttctctcctttttacgtccacgttcacagcaacagctgggaggaatcagggatgctagatgaaatactcaactatccattgc

SEQ ID NO: 136046 - DNA, 122 bp, Homo sapiens
tcattgctagctctgtgtcaggtactgtgtgccattggtgctgggatggctgctgcagatcgatttcgttcacgatgtggaatcgtttgttagccccacagcctttactgtcagcattctct

SEQ ID NO: 136047 - DNA, 122 bp, Homo sapiens
agcccattgagtttctgtagacaaattgtaggaactggcacagcaaactggccacaaagacgttaggggcgtggacaccagctgcttgagctgcctgctgtcccagactcccgtatgtcatc

SEQ ID NO: 136048 - DNA, 122 bp, Homo sapiens
atctttgtggcatgcagaccctgacatttggctaggcaaactgaggcgagcggtcggtggcgtgattctctcccgcccccaaacacacccagtttatgttggagccgagctatgaatgaaaa

SEQ ID NO: 136049 - DNA, 122 bp, Homo sapiens
gagagggaactttcaaacttagttaggaagccagactgtccgcgcgtccgccagtcggtgcgtcggtcccgggccggctggagccaagcgcgggttttcgtcactcggagcccggattgaac

SEQ ID NO: 136050 - DNA, 122 bp, Homo sapiens
cttttacatgtcccattttttcactgggcctaattcttgacaatggttctgattctcattcgtctgctcctgaatcatagtcttccttttgccctttgtaaattatctctgttatcctatct

SEQ ID NO: 136051 - DNA, 122 bp, Homo sapiens
ctccttcctccccggcatgcgccatatggtcttcccggtccagccaagagcctggaaccacgtgacctgcccatttgtatgccgcggagcgctccattccggcccctttgtggccagaagaa

SEQ ID NO: 136052 - DNA, 122 bp, Homo sapiens
agccattgagcgccccgccccccagagctgtccaaggtgctgaaacagctgtcggccacgcggctccttgtccttggtgctgaaacagaactcagtcctggggctgcgccctcttccaggtc

SEQ ID NO: 136053 - DNA, 122 bp, Homo sapiens
ctcttgggccggcctcttccggtcacctggcccgtcgcggtcccgcccttctttctgtcccgccttccaatggccccaaccccgtaactacccctgccggggtcctgttagccctgcccccg

SEQ ID NO: 136054 - DNA, 122 bp, Homo sapiens
gcttgctttttgtctggcagtgcttgggtgcccacactggcagatgggtagtaagtgagccgattaaaggaaactcagtctcttcctgtttgaagcagtctgctaaggcttcactcagtctc

SEQ ID NO: 136055 - DNA, 122 bp, Homo sapiens
attatgatatatgtatttctaggtatgtaaccactgaagtacacacacatgacatggagccgtcaacaccagatactccaaaagagagtcccattgtacagttagttcaagaggaggaagag

SEQ ID NO: 136056 - DNA, 122 bp, Homo sapiens
tgcatttctcagctcatgatctctccagtttacatgctcattaagtggcattgcaagctgcgactcacactcactgcttgaattattctctccccttctcttcttctcttcatatcattgaa

SEQ ID NO: 136057 - DNA, 122 bp, Homo sapiens
aatgtaaaaggtttcttttatgtctttaagacgtaatactgttaacgacattgccggtgccggttcaagattgtagcagccacgtctccactgcctaacactcacccaaacttaatcgcagg

SEQ ID NO: 136058 - DNA, 122 bp, Homo sapiens
cggttcccgcgcacccaactgccccacgacccctacccgcgcccgcagcccccgccctcccgccccacttgcctgggccgccgggcgctggaacctggaccctggaccctggcgggttccga

SEQ ID NO: 136059 - DNA, 122 bp, Homo sapiens
tcaaagtttcccagttacctctggcaaccacgtcgacaatacaacacgaaaatggctcgccgtaaagggccgttttctctttgccttcagctggaagatgtccacctttggctatagtcatg

SEQ ID NO: 136060 - DNA, 122 bp, Homo sapiens
cccgtgctctgagcagctcctcaggtgtgagcacacaaacagaggaggccatggtcagcacggcacattcggacaccacagtcctcgctcgccgtagagccgcctgctcctctgctgtgccc

SEQ ID NO: 136061 - DNA, 122 bp, Homo sapiens
ttaaaagtgcacgtcgaccaaatttattaagttcactgtgcgttccctgggacccaaacccgttttcacttcacttcacttgccaaacttcaggggcgcgttcacctccacggacgcctggg

SEQ ID NO: 136062 - DNA, 122 bp, Homo sapiens
attacatttttgtttcccctgccaacctgggaactcaatgagggcagcgatcttgtctgacgtggtcgccacggtgttgccagttcctagactaaggcctggcccttggatggcgctcaaga

SEQ ID NO: 136063 - DNA, 122 bp, Homo sapiens
ctcgatttctcgccgggccttagccaccttcccggggggcagggctcgggacctgcagcccgccatgcctgagcctccccgactccgtggactcctgtgcggcccgagcctccccgacgagc

SEQ ID NO: 136064 - DNA, 122 bp, Homo sapiens
ggaaaggggttaaggcgagcaagtgggtgtggcccgtgcgttgattggcaggggtgggaccgggcttgtcacccgccccggctactccaacccctgggcgggcgggggtaccgcctgggcaa

SEQ ID NO: 136065 - DNA, 122 bp, Homo sapiens
ctcctttacctactaccctgatcccagctttgagccgctggggccctctggcgtgctggacgtcaaaccgggctcccacgtggtgctgaaggtgcgggcggggtgggggcggggaggggcgg

SEQ ID NO: 136066 - DNA, 122 bp, Homo sapiens
gaagaccaatcctggatcgatgatgactactggtggcgtatgagtcatagacaatgaatacgtgtctggaactctgaggtccatcgtccatcacaatggaaatgtatacattccttctgttt

SEQ ID NO: 136067 - DNA, 122 bp, Homo sapiens
acaccgagagaagccaatcttccaaggccctccgtctgggaaactctgacctgggggccacgctaaggggaaagctcccgttctgtaaatcagtgctctcttccgaggcccagctggaggca

SEQ ID NO: 136068 - DNA, 122 bp, Homo sapiens
ttccagactcagcatcattgaagccctaacgggtccttgtaaattaatgtttcatattatcgaaggactgtcagtttagtttggtacagtttattgtagcctaagaggtccagcaagatttc

SEQ ID NO: 136069 - DNA, 122 bp, Homo sapiens
gccgcgcgttcgggagcttcggccctgcgtaggaggcgggtgcaggtgtgggtgctgagccgcccgccgcctggagggggagacagcttcaggacacgcaggccgcagcgagggcccgggcc

SEQ ID NO: 136070 - DNA, 122 bp, Homo sapiens
aataaagaaggtaatgggcaccaaccttctttgatcagaaaatgacttgtccttgtgaggcgctgtgaaaggagcaagttgacccagtcgcagttccctgtgaccccactctgcccaggagg

SEQ ID NO: 136071 - DNA, 122 bp, Homo sapiens
ggctcagtgccagtgtgcggaggcccacaccaggaagtgaacaatgatctcctctggcctcgcccagctggctctggtttcctaatccccggtcctcctggcaggggccacacactgagctt

SEQ ID NO: 136072 - DNA, 122 bp, Homo sapiens
gccccgtgagcagtctccaccacctcccctgcaaacgtccagtggtgcagaggtaatggacgttggctctggtggtgatggacagtccgaactccctgctgaggaccccttcaacttctacg

SEQ ID NO: 136073 - DNA, 122 bp, Homo sapiens
ccatctatcggtatggtttatggttaggaacacaggctctggagtcacactacctggcttcgaatccagctgctcatcagctgggtgaccttgggcacttcactcagctcagactgacccag

SEQ ID NO: 136074 - DNA, 122 bp, Homo sapiens
ctggctagaaggtagcaaggagggtcgggtctctgcagtgtacggggtgcctctgcctgccggctccgcagcgctgcggggtggcgaatctggagctcccggtgcaaaagtcccagaggaag

SEQ ID NO: 136075 - DNA, 122 bp, Homo sapiens
gctctgccgggaggttggagaggcgctctcttctatctaagccagttacattcaagtccgcgaacatctgcgcgcccactctgcggacagggcacttgtctaggctcgggcgagtcatagtg

SEQ ID NO: 136076 - DNA, 122 bp, Homo sapiens
acgggcagaggagaacgtcttgtgccttccttatcgatctccagcagatgagggcaacttcgtgtgcaaaactcagagagcagttactcaaaaaaaagacacccgggcagcagtaaccagga

SEQ ID NO: 136077 - DNA, 122 bp, Homo sapiens
ccatctttcggggtgggtggtgctgagcgggctccaggtgtgcgccctgctcctgcgaggcgtgtgagcgcttatcgcacccatggcccctgcgcgcctctgtcctgccgggttcccgcaga

SEQ ID NO: 136078 - DNA, 122 bp, Homo sapiens
gagaggacggctagggggccgcctttgcaagtgctctccaaaataattggtcaccgttctcgagtgcttgggcgtcggcgcatcttgtaagcaacgcaggaagcctcgcacgtacactcaat

SEQ ID NO: 136079 - DNA, 122 bp, Homo sapiens
gccttctgttatgcccagacagggccacccgagggctctttggtctagaggtaacgccagcgcctgggaagacgcctgttacctagcggactgtggtctggcggtaacttcagtgcctagaa

SEQ ID NO: 136080 - DNA, 122 bp, Homo sapiens
gctccagaactttgctctgtggctgcaacgggcagatgagatttacccccagaactttcccgggcaaaaggagcgtttgtcatccttctccctgggggctgtggagggcagggcacctattt

SEQ ID NO: 136081 - DNA, 122 bp, Homo sapiens
tggagccagccctggggctcccagaacccagggcgcgacaatagcgccgtttgttggcttcggttggaaacttcacccagcgtagcctcttgccgcttcgccctgcggggcttggaggtcgc

SEQ ID NO: 136082 - DNA, 122 bp, Homo sapiens
catgcccggcctctgggatttggaggtcatgcccgacctctgggatttgggggtcacgcccggcctctgggatttgggggtcacgcccgacctctgggatttgggggtcacgcccggcctct

SEQ ID NO: 136083 - DNA, 122 bp, Homo sapiens
gcctcctggcatggcaatcctcttccctgagactggcagttgctcaagataggaagctcccgggaccagacccgagcgccagccggctacgccgtccgctggcctgagcaaataaacgcgtg

SEQ ID NO: 136084 - DNA, 122 bp, Homo sapiens
taggtgtccgccacctatgccacgcagtgagttccttaggtatagggacagtctaatctccgaatccacactgcctagaacaaaataagcattgcagtacatttgagaaagtaaaggtgtag

SEQ ID NO: 136085 - DNA, 122 bp, Homo sapiens
ccagttttgtgtggacttggcagggctgctgtgagttaactcctggggtcccgggccctgcgtctcactggtgtgtgccctagaggaggaaaacctcatgtccccgtcccgggtgtgcctgg

SEQ ID NO: 136086 - DNA, 122 bp, Homo sapiens
ttgactaatttctcctctctctcacaggtgagatcaaattgggaatgctttcataatgaacgtcaaccagtcagttccacctgtgccaccatttgggcagccccagcccatctacccagggt

SEQ ID NO: 136087 - DNA, 122 bp, Homo sapiens
gctgggtcacacgcatgacacctggctgtcgcaacacagatatcatcacgcccgggcacccgtgagtcactggcccagagcaggggctgcccccagcctcccaaacaaagaccctttgtccc

SEQ ID NO: 136088 - DNA, 122 bp, Homo sapiens
ttgccctttatcacagtccactgaggatggtggggcagtctcatttcatagctgaggatgcgaggaggcccaagcttatataagtagaaagtaggagagcttggataatgtcaggcttttca

SEQ ID NO: 136089 - DNA, 122 bp, Homo sapiens
ggggttgttgcacagctcggaggctgggacccacgcgcgcgcgctcccgcggtgcagagtcggggtcctggctcacagccctcgcagcattctcccgggattgcccccgggccgcctccagc

SEQ ID NO: 136090 - DNA, 122 bp, Homo sapiens
ttcgccattagattggcaggaaataaaataattgtgtattaaactcttatgagtaatatacgtttaagtttcagagcaaactctcaagacttggaatttattctggccactttacagatgag

SEQ ID NO: 136091 - DNA, 122 bp, Homo sapiens
gagctggagaaagcatcctgtcttccctttttcctgtcgggtgccagagaaacatttgctcgggggccacatggaagcaaagaactcagaagctttgcttagagagtaaaaatgtccaaact

SEQ ID NO: 136092 - DNA, 122 bp, Homo sapiens
tccaggtccaacggagggggcggcgggccacgggatcccggagggcacaggcgttaaggacggagttattgtccataattacaataaaagtttggggatctgaaagctttaaggagctgagc

SEQ ID NO: 136093 - DNA, 122 bp, Homo sapiens
tggcccttctaagacctccgctaggcattatcagtgactgtgctcgtgagcgctgacctccgctaggcgttatcagggactgtgctcgtgagcgccgacctccgctaggcgttatcagggac

SEQ ID NO: 136094 - DNA, 122 bp, Homo sapiens
tactgctgtgttcccagccccagagactgtgggcagcgccagggtccaggatgtggggcacggtttcgggctgagggagtcacgggctgcctcccgccccgcaggcctgcaggtggagttca

SEQ ID NO: 136095 - DNA, 122 bp, Homo sapiens
gaggaaagaaaggaaacaaaaaaggggaacgtggccatgctgcaaggggctgaagggtcccgtcagaaaaaaatgaaatgaattaaggagagctgtgttccaaatactgcaaacttgggaat

SEQ ID NO: 136096 - DNA, 122 bp, Homo sapiens
atcctcccaccttagcctcccaaagcgctgggattacaggcatgagccaacacacctggccggcaccaactctcagccacgctgtcgcagacagcggggcccctgcttgctgctggatgtca

SEQ ID NO: 136097 - DNA, 122 bp, Homo sapiens
aggcaaacagatttctcactatcatccagtgtaccctgctcaccttctcactcctagcaccgttcttctggtctgtgttgaaaagggtatcattcatgtggtttcagtttagaagagtccct

SEQ ID NO: 136098 - DNA, 122 bp, Homo sapiens
ggacgcttgcaagagcccagccaggcaaggggagagatcagaagacacctgtgcggatgtcgtggcttcgtacctttcttgtgaagtagtaataaggcacttccatccccaggagactgtgg

SEQ ID NO: 136099 - DNA, 122 bp, Homo sapiens
gtacctggccgcgatgacctgtcaggtttacctgttgggtgggacatgcaaatgagcgcccggggcaccctgggtaaagggccccgcgtaggacccaggccgggggctttgagttctcgtgc

SEQ ID NO: 136100 - DNA, 122 bp, Homo sapiens
aatccagtggaatcatgtcttctaaaaacaaattgtcattctactgctgtctacccaaaccgtctttccacaatgagagcaaataaaacattctcaaagaaacagaaactgagagttaaact

SEQ ID NO: 136101 - DNA, 122 bp, Homo sapiens
taagagcttatccactcggaaccacgcctcacattcagagagaagcttaagaaacaccggcgtggtgtgccaggctgccaggcagtactatatgatatgaaaaatatacagaaagaaaacta

SEQ ID NO: 136102 - DNA, 122 bp, Homo sapiens
gcgatctccgggatgttgctgaacaggcgctccgcctccacctgggcgcggcgggaggtgcggttggccacgcccctccgccaggttagccccgccccaggtccaggtcccgccctccttcc

SEQ ID NO: 136103 - DNA, 122 bp, Homo sapiens
tttacactgtggcattctgagatgaaaatctgatcatccctctcttgtgattaaatatttcgtggattatcattgttcttaagatagaggcaaaattcctttcaagagcacaaaggatgttt

SEQ ID NO: 136104 - DNA, 122 bp, Homo sapiens
ctgtcactcaagaaggggcgggcacagctgccggtagaggggaaaaacgccggccgtccccgcccccctagtggaggcctcttaaagaaacaggacgccattcccctgcgggctacagggtc

SEQ ID NO: 136105 - DNA, 122 bp, Homo sapiens
ctagagggggtgggttggcggcctggagggtctcctcaagtggcggcactgccaggggctcggaggaaggggctgcagtctcccggtggcagcgtccttgtcgtcgagactgcgggcggttc

SEQ ID NO: 136106 - DNA, 122 bp, Homo sapiens
aagcttgttggtgtgtaagagacctcggtggcatcactgtcagcgcagccgaagccaccacgctagctccagactggtcagcagatggccgcgcaccaggcccttcctgcggcccgggcgac

SEQ ID NO: 136107 - DNA, 122 bp, Homo sapiens
ctggatattaagctctggggctacatggaaggaccacgcagacactcttcatgccttcaacggcttacagttaagtttttcaaacatttgaaacataacgaagcttttggttacttaaaaga

SEQ ID NO: 136108 - DNA, 122 bp, Homo sapiens
aaagacactgaattgcagcctcgcttctgagtgctcacaggggcttgctgggaacctcggcggcggaaacagaccccgtcagtcatgctctagagaattgtgtctttaagcagtaacagggg

SEQ ID NO: 136109 - DNA, 122 bp, Homo sapiens
agaaagattcacctgtgagcatcggccagacccggacagtgcaaagccatctctcaaccacgccattcacataagagctttgctgtaccctttttcttctccccctcggggctccggcccca

SEQ ID NO: 136110 - DNA, 122 bp, Homo sapiens
ggctgcctgagacgtgcctcgtctttggtgattcccctacccccaaatcagagagggttccggaagaaacttcgcagccttgcagagtgaagcatcgccgggacccaaggatgtttctcttc

SEQ ID NO: 136111 - DNA, 122 bp, Homo sapiens
gccaccagcggaagaccaaccagcaggaggagagctgccagaacctcacggacttcccctcggcccgggtgcccagcagcctggacatattcacggcctataacgagaccctgcagtgttct

SEQ ID NO: 136112 - DNA, 122 bp, Homo sapiens
catcaacttttgctggatttagtactgatggtgagtcagagccttgcccaatgagtaggccgtcggtcaccctggctgtgcctgacaggtgtccacttggtggacagcacttgccacagtta

SEQ ID NO: 136113 - DNA, 122 bp, Homo sapiens
ggagcaagggacagtccccgagtggccgcccctccctttcggtgacgctccacttcctgtcggcctaaaaggcattcccaggaagctcggttttgtagtttccagcccacctccgaaagcca

SEQ ID NO: 136114 - DNA, 122 bp, Homo sapiens
cggagaggagtgtcgggctgagtttccggctgagagtccttctagcggcgccggtgagtccgcgtgtggaagtctgtgaggcgcagaggtggggcaggccgtctgactagctaggcggctgg

SEQ ID NO: 136115 - DNA, 122 bp, Homo sapiens
tggggagacactgagaggaagaaagggctgagggcatcctggccaggcgcatggcaccagcgctgcctacctacccataccacacccagcacaaggctgggcccaagtgagtgctgctgtcc

SEQ ID NO: 136116 - DNA, 122 bp, Homo sapiens
atcagtcccaccatgacctctgcacacacagatgattgttcttttttttagtttgagacccggtctcgcagtgccgcccaggctggagtgcagtggtgcagtcacagctcactgcagcctca

SEQ ID NO: 136117 - DNA, 122 bp, Homo sapiens
gcaggaagggttggatccatgccagggacagctttgggcggcggtaacaagagtcctggtcgtgggaaggcagtgttggtgggggaccggggctgcggtcttcagaggctgcctgagtctca

SEQ ID NO: 136118 - DNA, 122 bp, Homo sapiens
gcctaccccacctcgcagacccgaaatgcggaaccaacaaaatctcgcgagctaaggtttcgctgcgccgggagggacttgtcgcgccccctttcgctccgcctcgtcctagaactcggcca

SEQ ID NO: 136119 - DNA, 122 bp, Homo sapiens
gccccgtttccggagcccgcgatggagctttgtgaagatgcaggcgttggggctgctcggcgatgatgacatcatcgtgtcacacacaggagccggctgccggggggtttaagagaagagcc

SEQ ID NO: 136120 - DNA, 122 bp, Homo sapiens
aacccctggcctgctcccagcactgctgggcagaggcatgtgtcacacctacattcaccccgagaacctctctgttgagcatgaagggctgaacatcatgggaataccagaaaagatcatcc

SEQ ID NO: 136121 - DNA, 122 bp, Homo sapiens
caaaatttgtaagagaaaaaatacatccgcctacagaactccacgttcgcagaggggcatcggtcggtctattggaggtactggggtgatggccgacagacacggggacacgtagatatgga

SEQ ID NO: 136122 - DNA, 122 bp, Homo sapiens
aaccccgtctccaccaaaaccagtcaggcgtggcggcgtgagtctgcaatcgcaggcactcggcaggctgagtcaggagaatcaggcagggaggttgcagtgagccgagatggcagcagtac

SEQ ID NO: 136123 - DNA, 122 bp, Homo sapiens
tccaacacattcaacagctctctctcagcagtgccagcttcctgggtgtaaggcctgagccgtcgcttggccctgtcctcagaggccccccacgctggtctaatgctctgctctttgttgcc

SEQ ID NO: 136124 - DNA, 122 bp, Homo sapiens
cgttccggaccccgtggagtatcccgctcgtgcgagtgtcctcggcgcaggtgtcctccccggcacatgtgtcccccccaggcgtaggtgtccccttggcacatgtgtccccacaggcacaa

SEQ ID NO: 136125 - DNA, 122 bp, Homo sapiens
cctgcttttccttacccatgctgctcatgcccacccctcctgcccaggtgtgttccggtgcggcccagcctcagtcaccgccatccgcgagggtgatgtgcacctggctcacgatggcccct

SEQ ID NO: 136126 - DNA, 122 bp, Homo sapiens
tagtcagcatataaatagtaatgggctaatagccctgcactgtggcaggtacctgtaacccggcattttgggaagccgaggcaggagaagattgcttgactccaggagtccaggagttcagg

SEQ ID NO: 136127 - DNA, 122 bp, Homo sapiens
ccaggctgggctgggaccaggtgctgggatgggggctgtcagggaagtgcctcgggggctcgttctgcagacccaggagggatcagggcagctgcaggaggtggcaggagccgcccccgggg

SEQ ID NO: 136128 - DNA, 122 bp, Homo sapiens
tccctctcctctctctccttccttagaattttactcgattgtttattatttgctggggggcgggggcgggggggcggagaggggcgtctggggcctggagactggtggccgcggccagtcag

SEQ ID NO: 136129 - DNA, 122 bp, Homo sapiens
aacattcttattttcaagtcctttggactgggtgccatctggagaagggggaagactcctcgaaaaagtctgactgttgagaaactgacgatccaaatttaaaaagtgattcccccccctcc

SEQ ID NO: 136130 - DNA, 122 bp, Homo sapiens
tccactgcctgccttgtctgcagggcaatttcctattcagcctctgatgacccagtcaatcgtaaaacatctgtgtgaaaattgtccccgaggtgtcttcccttcctaaggcagagcccatt

SEQ ID NO: 136131 - DNA, 122 bp, Homo sapiens
gcgcaggtaatttatgttcttggcgtagagtctgttcccaatatccaggaagactcagcccgcagccccatcttactgagcaaggtgacgccctgaagtacacaccgacaatgtttaagtcc

SEQ ID NO: 136132 - DNA, 122 bp, Homo sapiens
gcccgcacatttgcatttggagcctttcatctgatctctcggaattaaaggctttgtctccgattaaaagaattccaggccggaggagcccggagagggaggggagggggctccaggcccca

SEQ ID NO: 136133 - DNA, 122 bp, Homo sapiens
cagcaggacagggagccctctgtccccagggaacagccacagtgggcacagctgcggccacggccccagtgcgccagggcttacttgggtttcctgacgtccgtcatcttggtgtgctcccc

SEQ ID NO: 136134 - DNA, 122 bp, Homo sapiens
aaaaagcagagaccatggtgtcaggcgtcaccacttgggcctataaaagctgccacaagacgccaaggccacaagccacccagcctatgcatccgctcctcaatcctctcctgttggcactg

SEQ ID NO: 136135 - DNA, 122 bp, Homo sapiens
gggagatcgtgtgatcatcacagagccatcctacagcaaggaggacccggaggcatcaggcgcataacaagaacatgagaaaggcccttcctttaagcccttgagcccctggctaggtccct

SEQ ID NO: 136136 - DNA, 122 bp, Homo sapiens
cagggcgcaggcagcgcgtcgcctccgcggcccgccggggggagggggagctgcagcgcgcgccaggcacccgcctttcgcgcctgcgtcctgcgttacctgggcaaccggagcccgggtcg

SEQ ID NO: 136137 - DNA, 122 bp, Homo sapiens
ttgtttctgtggcatgaggcaccaagagcatcaaaacctctcgagatactctgtactaggcgtcccacagaggaaccagtgcaagcactggacactttcgggtatagccgaagatcaccttg

SEQ ID NO: 136138 - DNA, 122 bp, Homo sapiens
gtcggactataccactttccctacggaaggggtacttttttatgtttttaagtttaaaaccgatttctgatatttgacttttatcatttcaggcctatatggaggctatgagtgagtttagt

SEQ ID NO: 136139 - DNA, 122 bp, Homo sapiens
ccttcacagagtttttattcacatcagtattcttgctttgagttttcatggagagaccatcgcagtttgatgatgatatgctgataacttgtttgtcttcagaaatacgtagtatatattaa

SEQ ID NO: 136140 - DNA, 122 bp, Homo sapiens
ggcggggcggagcggcccagggaggcgtagcccgagactccaacgccgcccgctccgccccggcttcctggagccgcccccactgccagccactcaggaaccttccagaagcgcggttccaa

SEQ ID NO: 136141 - DNA, 122 bp, Homo sapiens
cgacggtgccaccttctggtcacctctggcatagcacccgggcttcaagcttggcgcatgcgcggaagcgtccccgtagcccgaccccatccctaatgcttccaaattcaggtgctaagttg

SEQ ID NO: 136142 - DNA, 122 bp, Homo sapiens
gggtctccctggcaaaggtcgggggagggggcggccgtaacggccccgggcgctccggcacggagaagccaagggggttctccaagcagcctccacccaccagcctcgccaggagagcgtgg

SEQ ID NO: 136143 - DNA, 122 bp, Homo sapiens
ctaagagtgaccagaatcatcttgaagaactgacaatacaaaatcatttctatttgacttcgagacatattatgtatctttgccatccatttgctttccctgttatttttttccccataggc

SEQ ID NO: 136144 - DNA, 122 bp, Homo sapiens
ccttctgttcatgaggtagtaaagaaaatgcaatcaagggtgttccttgcctgaagcactcgaccactgagacggggacttcagagacatgaagtgtgacataccagccaacctgccacaag

SEQ ID NO: 136145 - DNA, 122 bp, Homo sapiens
taggcggtgtcaagagcaactatctgtgagaccctgggccagtgactttctccttacctccgcccccaagtaggccttgcaaaaagctgggaggggtgcgttttcaacactggagcttcgcg

SEQ ID NO: 136146 - DNA, 122 bp, Homo sapiens
ctaaagtacaggttgtgtccttgggaaagtgaaggagaagcacattaaaatttaaaaaaacgattacccagttgcaataactaaaagtagagtaagtggtgcagaaagatttcatgaatttt

SEQ ID NO: 136147 - DNA, 122 bp, Homo sapiens
aaggaaagcagggggcggcaggcttaaaagcaagttgcaggcgaaatagtaagttgctggcgaaatatagccccccttccgaaactcctgacctcttcttccaccccggccagggcccgcgt

SEQ ID NO: 136148 - DNA, 122 bp, Homo sapiens
aaacctgtcaccacaggagtgtcagagacagtcttcctgcccagggaagaccaccttttccgcaagttccactatctccccttcctgccctcaactgaggacgtttacgactgcagggtgga

SEQ ID NO: 136149 - DNA, 122 bp, Homo sapiens
gtggacaacgtacagtcacaaggcagcgtccgattcagtgagggtgactggggaagctgccgttcatgagctcttgtcaccaacttgggaagctgccgttcatatgctcgtcaccaaagtca

SEQ ID NO: 136150 - DNA, 122 bp, Homo sapiens
atgaggatgcctgaaaggagggtccccgctgcaacagtggtcctcttcagggggacattccggagggtttgattttcttctctatagttttgtgtagtattcttatctgctgcaattgagca

SEQ ID NO: 136151 - DNA, 122 bp, Homo sapiens
tggcgctcggacgccgcggagcggaaaccccagccttggcgggaagatcctggaggattccgcgggcggaaatgaaggtgaagcgcaggccaggccaagtggcgctctgcgggaggcgacat

SEQ ID NO: 136152 - DNA, 122 bp, Homo sapiens
cccgacaaagaatgggggtagggaatttggttcctacttacaagcagctgaagacgctggcgctcagtctccggggtaaactcccgggacattggaatgatttcaccattccggacaatgat

SEQ ID NO: 136153 - DNA, 122 bp, Homo sapiens
ccagacatatcgcgtatagttctcccggaaacgtcacacacacccaacccagacacaccgcgcatagttctcccggaaacgtcacacacacccagacacatcacgcatagttctcccggaaa

SEQ ID NO: 136154 - DNA, 122 bp, Homo sapiens
cctaaatttaaatataggatacagccaccaaagtactctcctggtcagatacaggagtcacgatagtgaaatccaggacttctgacatgtagtcctcatttccatccatttaaggactccat

SEQ ID NO: 136155 - DNA, 122 bp, Homo sapiens
ccatctcatagtcttcagatcagccatctttgactctaactgccattctgctcagacccacgcttctttcaaactgccttactccggctaacgtgaccacctcgcctttcctccgtggggtc

SEQ ID NO: 136156 - DNA, 122 bp, Homo sapiens
tctgtaataatatcgcctctaaagaacagaatctgagtttctttcccagtggccaacaagcgggaggagggcggggccagccacgctctccgcggggccggcagggggcggtgtggaacagg

SEQ ID NO: 136157 - DNA, 122 bp, Homo sapiens
gggagcaaggcccgggcagcccctgacgccgtgcccggcccgtggcggaggcgaacccgccgcacagcagcccagcgccctcctccgtgtcccgcccggccccgcagggcccgcccttcccg

SEQ ID NO: 136158 - DNA, 122 bp, Homo sapiens
gatagggaacagctagccagcactagggggatgaaaaggcgttaagtgcaacccacagggcgacatggaaatataacacgaagctggccgcttgcccttcattgtcagctctcttaaattta

SEQ ID NO: 136159 - DNA, 122 bp, Homo sapiens
gcgacccgacggcgcagagttggaaaaccgaggcgggggcacgagccgggaggcgggcggcgcggtccgactgctttgtgctggggctcggctgccgggccgggagctgggagtccggacgg

SEQ ID NO: 136160 - DNA, 122 bp, Homo sapiens
tgggggtgcctgcaaaaagcagcagcagcagcaggagcaggagggcgggggcagtggtaccgccatccagagagggtgaacagcctgcggtgagtcagagcaatcattcccaaagtgtacaa

SEQ ID NO: 136161 - DNA, 122 bp, Homo sapiens
tgaggctctcatccaaggtgtttcagtggcagccctgttcagtgttgtcccatagaaacccggtgcagtgatcctgaagagtttagctttacatttaaaaattttcattcaatgcaaaccaa

SEQ ID NO: 136162 - DNA, 122 bp, Homo sapiens
atggttgtgttgaggatgaaggaggagcatttgcatttatttttcctttgaagtagagcccgaaaagttttgctgaagaaaagatatctgagcatgtgcttgagtttgattcattaattttc

SEQ ID NO: 136163 - DNA, 122 bp, Homo sapiens
ctaaaatgcagcaggaggaagagacttgtcctagagagcccagcgagcttgggggtggggcggaggacccccagctcactttcactgcacaggtcacacgccttttggggataagcagattt

SEQ ID NO: 136164 - DNA, 122 bp, Homo sapiens
ccaaaatctcatccccgatggcactgcggaagcggcgtggagaggagcagcatagaaacccgagactcccaggtttattgggggttatgatccaaaagctacatttttatccaagtgtgaag

SEQ ID NO: 136165 - DNA, 122 bp, Homo sapiens
ccaccatcgccaacgggaaggtcaacccgtcccagtccacagaggaggccacagaggccacggaggtgccagaccctgggcccagcgagccagagacagccacattgcggcccgggcctctc

SEQ ID NO: 136166 - DNA, 122 bp, Homo sapiens
tatgtattaagttcctccatgaagaaacctgctgaaagatcaccagccatttcttcttcccgtatcctacaatggaagagacatttgaatgagtgatgctcacagaacatatttaatctgag

SEQ ID NO: 136167 - DNA, 122 bp, Homo sapiens
agcggaagtgccttcaaagcaacccacccccatttcttctgggactaccagaagatatatcgggagcactgagctctgctttggcaacacgctcttaccttctgctcaagatcttagaccaa

SEQ ID NO: 136168 - DNA, 122 bp, Homo sapiens
tgatctggcggggggcgtctcagcaccctccccagggggtgcatctcagccccctctttccgtccttcccgtccagccccagccctgggcctgggctgccgacacctgggccagagcccctg

SEQ ID NO: 136169 - DNA, 122 bp, Homo sapiens
tgtgtacgcgggggccttgctcagcgcagggctgggctgcacgccgagcgcagactctgacggctcctcacacagctctctgcgtaggactgcgttcccattttatagagggggaagtgggg

SEQ ID NO: 136170 - DNA, 122 bp, Homo sapiens
tgggagctttcggggacgggctgcgggcatccgtttccctagcccagtgggaggtggaaccgaagcccaggagtccaggcctctggccctgcgcctccctggctaaagagcgccctgtgggg

SEQ ID NO: 136171 - DNA, 122 bp, Homo sapiens
cgccgaagttttaggccacttctccgaccgccgcgccgcttccgctgcccgaggaagagccgcagtcgacgagcgaaaaaccagcaccgcccaacgaacgaccaaaccgctctgcgctccaa

SEQ ID NO: 136172 - DNA, 122 bp, Homo sapiens
ctcctgcaaagctaatcgtgtcgctgtctgcacaggacttctaaagcaaacgggtgcttccgagctgtcacccctggggctccaggcatatcatgaaggaaaaacttaaagggcagtggatg

SEQ ID NO: 136173 - DNA, 122 bp, Homo sapiens
taaggaaaacaaaataaacgacagagggggaaaaaataatgtcttgccacggtaccgcagcggctggatagcctgcttgtgaaatgctaatgccacttcggagcagttagtcaccagctatt

SEQ ID NO: 136174 - DNA, 122 bp, Homo sapiens
cgagctcgtgcaccaaaagaaatgccatctccagctcctacagctccacgggagacttgccggggctaaagcagaggagggagccagcctcatcccactgccagctgaccctcagttacgca

SEQ ID NO: 136175 - DNA, 122 bp, Homo sapiens
ccaatgactggtattctttcctataagagggaaatttgggcacagacacagagaagacaccgtgtgaagacacagacacagaggagagaaactcatatgaagacaaaggcagaggctggggt

SEQ ID NO: 136176 - DNA, 122 bp, Homo sapiens
gctcctggcggcgtgttcctcttttcctcggttcccagtgttctggcaggtaaggaacgccggctcttcgcctctcagcgcggcttgtcctttgttccggacgcccgctcctcagccctgcg

SEQ ID NO: 136177 - DNA, 122 bp, Homo sapiens
ttagaatgaagttggttgctttaggagcgagcggcggtgtgaatctgggtcggcgtttcccggctgggtttgggctcagtgttggtgagtgtctttgtcttctcttttaggattgccaccca

SEQ ID NO: 136178 - DNA, 122 bp, Homo sapiens
ctgtgactgctgtgtgggtggaccgatgggccacactgcttatgactcccggcactgggtcgggatgatgaaccgcctgctccacagaaccccctactgtgaccggggtcacagctgagtgt

SEQ ID NO: 136179 - DNA, 122 bp, Homo sapiens
ctgaggcacaccccatctgggccccggacacagtcggcctccagcccctggagccgggcccgcagctgctgcagctctgactccagagcccgctggaaggcttcgccctgctgcagagcccc

SEQ ID NO: 136180 - DNA, 122 bp, Homo sapiens
accagtgttcagagtccgggctctgctactcagcgcccgaggcagcgcctccccattcaacgggggccgtggcaattccctgacatgattcatgaccacataatacatccggaaacttctct

SEQ ID NO: 136181 - DNA, 122 bp, Homo sapiens
tgtgggagcccctcgtgggccggaccgccttcatgggcaggacccccttcataggcaggccggcccaggaccccccctggggtgggaaaggtgttccctggtcaatagtgaatgaacaaacg

SEQ ID NO: 136182 - DNA, 122 bp, Homo sapiens
ctgtgtgcagaatgtggtgctgacagtcagtttctgccttggggctgctccaagagagagcgacggtgaaactggacccctagatgtaaagggagaggctccagtggaatctaaacataggg

SEQ ID NO: 136183 - DNA, 122 bp, Homo sapiens
gcgccctccccgggggtgtcctcagccctcctgcctgtgctttgtcccgtcttctgcaggcgcctgggacgtgctgacaggtcctctgccggctcctgccttgctatgcgcacgctggtcac

SEQ ID NO: 136184 - DNA, 122 bp, Homo sapiens
gggctgctgtccaggcctggcgaaaatctctcaccatcctgcccacccaggctccctccacggagatctgtgtggttagcacagtggccttgatatcttgatatttaggagacggcttttcc

SEQ ID NO: 136185 - DNA, 122 bp, Homo sapiens
tgcagggcgagctgtgcccatgcgaggcggcctcagggcagacggggcttctcccagacacgttccttagagcaccgagggctccaaagagcctttcctcatgaaggggtcccctgccaggg

SEQ ID NO: 136186 - DNA, 122 bp, Homo sapiens
tcagcagggcagggtggaacgccccaggctctgagcgtcagcagggcggggtggagcgcccgaggctctgagcatcagcagggcagggtggagcgcccgagcatctcagcatcagcagggca

SEQ ID NO: 136187 - DNA, 122 bp, Homo sapiens
ctgccgggcacccagaggcaggtgggacagagcaaggtgcagacgggtcacaccctccgccggcccgggccgctgcgttctcgcccagctctgtcgcgtattccaacacagacatgtttttt

SEQ ID NO: 136188 - DNA, 122 bp, Homo sapiens
ggcaggggaggacagagacccttcaccaaatgccatctcttcttggcctcacaatggctgcgtgaggacagcagggtgcaggctgcttgcccattttccagaaggacaagatgaggccctta

SEQ ID NO: 136189 - DNA, 122 bp, Homo sapiens
tcgttaagacaaaagccgtataacaactggctgctcagaaccattgctccccagcggcaccgcgttgcgcaaggcaaggcctgagcactgagtggctggtgaaacagaggcagatgtcctcc

SEQ ID NO: 136190 - DNA, 122 bp, Homo sapiens
cctttttttttctttgactgcctagaaatacttgttctcccttgtacatagaggaaaatgcggggaaaggttttttaaaactcggtttcatactattattattactaaggacaaccgggcag

SEQ ID NO: 136191 - DNA, 122 bp, Homo sapiens
ttttatattctttgtagtcatcttctagaaatctttctcttcacctgctattttcacttgcgcttctcttgtcactctcaccttttattgtaatctgggtctatttaaccactgcatgacat

SEQ ID NO: 136192 - DNA, 122 bp, Homo sapiens
aaaggctcaaacgccattggcagaatccccgacagctcatcctccgccccctgcagggggcggtaatgacagagtcctaatttccggttccggcagtaccggtagcccagtcgagatggagg

SEQ ID NO: 136193 - DNA, 122 bp, Homo sapiens
acttggaggacttgttccagccagcgtgagtgcgcgagtgtaaggagagacgggaaggatcggctccatccagccctgaggatcccaaagaaagggtggaaacaccctggatgtgctaagct

SEQ ID NO: 136194 - DNA, 122 bp, Homo sapiens
actgagcccagcagaaaagaaagactcgggattaagtctacgtaaaccagcttttcctgacggtgtgcccagggcccatttttcaagtcacaccaatcaattctcaatgagctgcctttggg

SEQ ID NO: 136195 - DNA, 122 bp, Homo sapiens
cgtcctgcccgcggcactggctgcgggtgccgggccacctgcgagtgtgcggagggattccggacacccgcggcggcgagctgagggagcagtctccacgagaactgaggcggaccctctgg

SEQ ID NO: 136196 - DNA, 122 bp, Homo sapiens
ctggagctccgaccttgccttctcgcccggcgaggacctgcagctcacacaccgcagccccggtggccgtttggggagtttatcctctgaagaaaaatgaagccctgttatttctattattt

SEQ ID NO: 136197 - DNA, 122 bp, Homo sapiens
ggggtcagggagttccctttcctagtcaaagaaaggggtgacagacagcacctggaaaatcgggtcactcccacacgaatactgcgcttttccaacaggcttaaaaaatggtgcatcaggag

SEQ ID NO: 136198 - DNA, 122 bp, Homo sapiens
gacaagagcgtcgcccctcgggcggcgccgagggcgctggagccccatggcctggacgagcggggcctaggaggtcgggaacacccaggaccagcagccgccctcctacatcctcctccacc

SEQ ID NO: 136199 - DNA, 122 bp, Homo sapiens
caaggaggcctatggaggcaaaggaaatgcccagggaaccgactaactgcctgctagctgcgtcctcctccctccaggccacagcactgctctccacactgttttccagaggtgtagcactc

SEQ ID NO: 136200 - DNA, 122 bp, Homo sapiens
aggagcccctcgcccgagggacagagacagccccaggcaagttgaaggtccgagagcccccggtgggagaagcgggccggtggctgcgccgcgtgcgttctcactctgaggaagtgcgtggg

SEQ ID NO: 136201 - DNA, 122 bp, Homo sapiens
agaatgccaaaaccttcatgaatgggccatcctgtgcctgcaatcacagggaggtggggccgacagccacgggtcacgtaactgaggccaaacacaagaagctggcctggatcaatgagtca

SEQ ID NO: 136202 - DNA, 122 bp, Homo sapiens
atgcgccctttgtggactccattgcgcagggtgcattgccctgaagagcgctcctccttccggtgaaagtcgtcgggttcccagccgggagtctgcggagttctcatactctgttacccagc

SEQ ID NO: 136203 - DNA, 122 bp, Homo sapiens
acagaccacacctgtagacttggaggagtggcaggggtgccaggagaatcctgccctgcccgtagccccggatgaaaggatgacattgagttcgcgacgctgcgctcctcgggaacacgaac

SEQ ID NO: 136204 - DNA, 122 bp, Homo sapiens
ttattcagaatctctctgttttagagagagcctttctttcttgcctaacctagagtgcagcggcgcgatcatagctcagttcagtcttgaacccctggactcaaccagttctcccccgccct

SEQ ID NO: 136205 - DNA, 122 bp, Homo sapiens
gatggactttgaacccagtgcagctttcagggcccaagacctttcatgttcttctggaaacggtgccattggcttttcccatgactcccacgagggcgttagcagaacctccctcatcttga

SEQ ID NO: 136206 - DNA, 122 bp, Homo sapiens
ggccagggagccgccgggacaagcagccctctcctctgaccccggacgcccgccccgctccgctgacgaacgcagcagacagcccgggctcgtggacacgccccaaacacccgggcaagggg

SEQ ID NO: 136207 - DNA, 122 bp, Homo sapiens
gaaccttaaatcacattataagtaggtgaacgccaatgcgtggtgcactgcgggaaaactcgcagggcctggctcaagggaggcctggcattttctcctccccgcgctcaggcggagaaagg

SEQ ID NO: 136208 - DNA, 122 bp, Homo sapiens
aagggccctgagcctgttcccaggactagggtctgtcctcccagtggactgtgctataggcgtgtgcaaacctgcaccaaggggtgtacaaaggagctgtttggggggcaggaagaaattag

SEQ ID NO: 136209 - DNA, 122 bp, Homo sapiens
gaaaaaaagttttctttaattgcctgcccttagaaaagatggttccacagaacacacttccggtactcgagatgaggacttcccttgaacgcccattctgtaagacagataacgcgttggcc

SEQ ID NO: 136210 - DNA, 122 bp, Homo sapiens
cttcagggaagaggttattctagatagactagtttttactgtttaccagctttcaaaaatcgttaagccatttgggatagaaatagttctaaaatgttttaagtgttgccacaatttcttta

SEQ ID NO: 136211 - DNA, 122 bp, Homo sapiens
tcaagaccagcctggctaacatggcgaaatgttgtctctacttaaaatacaaaaattagccgggtgtggtagtgtatgcctctaatcccagctactcgggaggctgacgcaggagaatcacc

SEQ ID NO: 136212 - DNA, 122 bp, Homo sapiens
aaggttggtgctcttcgctgaacggaactggcttaaatgcagagctgagctgagcggcttcggagaaggcgaatttagaaagcctggtcaattttctctccatgtccctgcgaccgattatg

SEQ ID NO: 136213 - DNA, 122 bp, Homo sapiens
cactgcccagagatcaccgttccctcattctccccgccacctccccttcccattcctcagcgcctgtcaccacctcccaggcgcctcggagcaagtggcttctcctgtggtctcgcagccgg

SEQ ID NO: 136214 - DNA, 122 bp, Homo sapiens
gcggggcgttctggaaggggtgtgccagggagggaatgatgggggtcccaggcaaagctccgaactctttcacgtaacgggaggaatacagacacgtcttagttaagcgtgcgtgggaaccg

SEQ ID NO: 136215 - DNA, 122 bp, Homo sapiens
ccccctgtgttgtattagaggaacccgaagcaaagcctccagagggtgctggagaagctgcggctgcagagcagtgacccgaggcggggggcgcctcacccgccaggcaatggtggccgcag

SEQ ID NO: 136216 - DNA, 122 bp, Homo sapiens
agggctccccgagctcccgggtggggctttcctggaggaatcagagagcaccaggtagctcggccgccaggagccgcggccgctcccaccccttcctgcgggagcgcgacccccagccccgg

SEQ ID NO: 136217 - DNA, 122 bp, Homo sapiens
gctgcgcgcgctgcaccgtggcccgcttcagacagatgtccagcaggtcgtgggtggtcccgacattctgggcaagtacgaactgggggtcggaattcagtttctgtatcagagcagctacc

SEQ ID NO: 136218 - DNA, 122 bp, Homo sapiens
ctgagcggggctagcagggtctctggccgcggctgtccagtccgcaggtctatctgttcacgcgtcgactcgcccgactgccccactctccccggcccccgcccccctagctctcacgctag

SEQ ID NO: 136219 - DNA, 122 bp, Homo sapiens
ctcttacatcttttagtgcgtatgttctgtccacccagctactggttcatttgagtagatcggagtcagatgagtacatgtttacgggaggcgcttggttacgggatccagataggaatctt

SEQ ID NO: 136220 - DNA, 122 bp, Homo sapiens
tccaacaggggccccccactgccaccccagagcctccagtccagctttaggcaggggccccggggggcctgtgggaagtgccaggggcccccaagcacactctgctctcattggctggctgc

SEQ ID NO: 136221 - DNA, 122 bp, Homo sapiens
cagggctagtgtgggggctccggcgggggctgtggcccccatccgcatggagcctccccacggttcacaggtctcggtcttcggagccttcagccccgtgagcccgaacagtccacacggcg

SEQ ID NO: 136222 - DNA, 122 bp, Homo sapiens
ccgccaggctgcggaccggtacctggcctattggaaccgggccacgcagcaggaagtgagcggtgggcgggcattcctgcctgagctgcacctcatgtcagatcagcactgcattagattct

SEQ ID NO: 136223 - DNA, 122 bp, Homo sapiens
ggccttgctttttctgaacaatctgaataagttcccatttttgcacttgcggtcccccctcgccccgcccccgccccggcccctgccccgttagctcctcatgcagtcctcccgtggctcct

SEQ ID NO: 136224 - DNA, 122 bp, Homo sapiens
ccctcctccttcccaaatcagccaccgtgggccacggctacgctatgctttattcctaagcgaatctcgcacaaatctcgaggcatattttgtacaaggggacactggccgcgcgcatcgca

SEQ ID NO: 136225 - DNA, 122 bp, Homo sapiens
tcctcccacagatactgatttattctgtcttctttcacttaaatctaaattcaccaggcacggtggctcactcctgtaatcccagcactttgggaggctgaggcaggcagatcacttgaggt

SEQ ID NO: 136226 - DNA, 122 bp, Homo sapiens
ctaactaccactctgcggtcgcagaagaccatccagaggggagatgaggactgggaagcccgcttgagtgatgcacatctgtggcttgttacgagagccgcgtgaattaaagcaaggcaggg

SEQ ID NO: 136227 - DNA, 122 bp, Homo sapiens
ggccgtgcacccgctcctgagcagcgccatgggcctgctggccttcctgaagacccagttcgtgctgcacctgctggtcggctttgtcttcgtggtgagtggtctggtcatcaacttcgtcc

SEQ ID NO: 136228 - DNA, 122 bp, Homo sapiens
gctcagctcccgcagccccgccaactttccgatttcaaacctagtgcacttcccgccacccgcctccaggcgcaggctggccttctgattggccgatagcgcaggctctccttgacaggatt

SEQ ID NO: 136229 - DNA, 122 bp, Homo sapiens
gcttccctgcaaaagggacgccagcagtagccctgcgtccttccatatcacatccttccacgtgatagacacgtgtcaaaaaaaggaaaagtgaatgaaacaaattaagaaataatttgttt

SEQ ID NO: 136230 - DNA, 122 bp, Homo sapiens
tcatctgacaggagggagagctcaggcagtaatgttccctcacccgcattcacctcctgccgggcagcttggttcctaacaggccatggaccaggccatggcccaggggttggggacccctg

SEQ ID NO: 136231 - DNA, 122 bp, Homo sapiens
tacaacaatccgagctgggactaaggcctcccactccccttcgccagcatctgtaattcccgtcagagatgaactcagttcttactggtaaccttgttctggttaccttctagtttctctct

SEQ ID NO: 136232 - DNA, 122 bp, Homo sapiens
ctgaggaggcccacctcggcatcccaaagtgctcggattacaggcgtgagccaccgcgcccggaccattcacagcttttttagctgcctggatggaaccccgaattagggacacggtaaatg

SEQ ID NO: 136233 - DNA, 122 bp, Homo sapiens
gtggagattcttagatgcttctaggtactatctgatgcttctagagtattatctgcctctcggttttggtggcctaatttggggtcctgcggccctactttgatgtcttggggtaaaacctg

SEQ ID NO: 136234 - DNA, 122 bp, Homo sapiens
gcgacttcgagtttgctcccctttgcttgaagagaccccctcccccttccaacgagcttccggacttgtctgcacccccagcaagaaggcgagttagttttctagagacttgaaggagtctc

SEQ ID NO: 136235 - DNA, 122 bp, Homo sapiens
ctccgacctccaaggtgaagtagcggatgcaacgaccctcactatgcattctgtgtagaccggccggaaccactgcctggtcattctctgtagaccggccgcaaccactgcctggtcattct

SEQ ID NO: 136236 - DNA, 122 bp, Homo sapiens
ggactttggaaaaatccatggaccactctcgacaccggcgaagttatcccttcctgtccccgaggggtgtgtcctagcgattcggcctgaccccttcagtttccaaaagtgagatttttggc

SEQ ID NO: 136237 - DNA, 122 bp, Homo sapiens
gcgctttattctgtagttctcctagcaatctggtgagctccactctacagataaggaaatcgaggccaaggacagctaaagaagcgaggtgcgcaaggtgcccaggtccgaagtgtttccgc

SEQ ID NO: 136238 - DNA, 122 bp, Homo sapiens
ccacgttgctgatcaggcactgcatctgggccagctgggagctgtagcgggcctcggtttcggccagggtggattccaaggaattccgctgcaatgggaaagaggaagagctgcctattggg

SEQ ID NO: 136239 - DNA, 122 bp, Homo sapiens
gcccgaggggcggggcctcgcagcctcccgcagagacgcgcgcctgcgctgcggacagagcggtgcttctcgtctgggccccggttcctggacgacctgggacttctaggcagcgactccca

SEQ ID NO: 136240 - DNA, 122 bp, Homo sapiens
ccgcccggggatggggcagaagctggggcggctgagagcgcagcgcgggctcccgggagacgccggcccactgcccgcccgctcgccgcaggtaggcccggcccccgggaggtggggcgcgg

SEQ ID NO: 136241 - DNA, 122 bp, Homo sapiens
agatgtcacttccaatgccagcccttccgcatgatagctctgtcaccaggagcgctcgggcgccttcactctgcttgcgcctctaaagcacacctgccccgcccacctggatctgctgtcaa

SEQ ID NO: 136242 - DNA, 122 bp, Homo sapiens
agcacaggttctgcgctccccattcctctgattagaagttgctttctctactgaggctaacgtatgtcattctcagatttgaaagtcttttttttctcttattctcagactaagagccaaag

SEQ ID NO: 136243 - DNA, 122 bp, Homo sapiens
cctctgcaggccgtggttgtagcctgtgttgttagtgcagttggggtctggccaaggactcgtgtcttctttagaaatgtttttcctttttgcccttgcctgtgtctgatcctgactcactg

SEQ ID NO: 136244 - DNA, 122 bp, Homo sapiens
catcctgcttctggacctggctggccgggacctgactacctcatgaagatcctcaccgagcgccgctacagcttcatcaccacgcggagcgggaaatcatgcgtaacatcaaggagaagctg

SEQ ID NO: 136245 - DNA, 122 bp, Homo sapiens
attcatcccacacggagcacctgatggccttcctgccagcgtcagggagcagggcaggggcgtgaaaccctgggaaagtgaatggaagctcccggggggctgcccaacatgcgcctttgcag

SEQ ID NO: 136246 - DNA, 122 bp, Homo sapiens
aaatcctccaggcagccaggcaatgctgaagtccctgtccaagggggtctaggctgagcccgggtggagtgggttcttgggccaaggtgcctggaggggactgaaggcctctacccaaagtc

SEQ ID NO: 136247 - DNA, 122 bp, Homo sapiens
aaatcattgtagtagtcctgaactaagactgattcttcccatcttggtgatatttagcaacgtctggagttattttaggctgtcacaattttgagggagtggtgctactggcatcatgtagg

SEQ ID NO: 136248 - DNA, 122 bp, Homo sapiens
ctctctctgctaggcccaaccctatgaggtgtgggaagacaagggctgagtcctcgctgccgagaggcagttttatcggcacagcactaggtgggggtttgtttcagttttttttttgtttt

SEQ ID NO: 136249 - DNA, 122 bp, Homo sapiens
tttcttttaaaccctcaagacactccggtgagatagggatcagtgtacacatttcacacacgaggaaacaggaccaaagggttaagagacttgaccaaggtcacatggttgcaaagtggtag

SEQ ID NO: 136250 - DNA, 122 bp, Homo sapiens
gccgtgctgggattcaaacctacagtttgctttgcatgatcaatcattctctgtctctcccgatgtttgacacggcctgctcactgtggacagagctcagaatataaaggtggcatgtcctg

SEQ ID NO: 136251 - DNA, 122 bp, Homo sapiens
cattgaatacttatttgctacgcgcatgaatgaatgaagctacgctgcgaaggcagactgcgtggctgctggtcccgtggctgctggccccgcagcatgtctgccgccttttcagcaggctt

SEQ ID NO: 136252 - DNA, 122 bp, Homo sapiens
ccatcctaagatgtaactctgcagctaggagagaaaaccgcgccaggtgaagtgagctgccgcgtcactcggagattgatttgtctcactccagagcccatggccgtcacccctctgccact

SEQ ID NO: 136253 - DNA, 122 bp, Homo sapiens
ctgtcccttttgatgttcagatgtgttcggagttttttccttctcgtgggttcgtggtctcgctggctcaggagtgaagctgcagaccttcgcggtgagtgttacagctcttaaggcagcgc

SEQ ID NO: 136254 - DNA, 122 bp, Homo sapiens
cgcgtgcccgcccgcgcgcgcccgcccgcgcccacccctaaatcctgcggccgccgccagcgatcagctctcacacaaactttagctgcgggctagggggtttggggttgagtgggggaggg

SEQ ID NO: 136255 - DNA, 122 bp, Homo sapiens
ctcacaaaaatccaatgggagtagagagctgggataacagccttttcttgagatgcaattcgtagagttatcagttcttcaagttcagtctgcttgacgagtggttgtaattgacgtcaacc

SEQ ID NO: 136256 - DNA, 122 bp, Homo sapiens
cctctcccctcgctgcgccggcgcggccgcgctccgccccgttccctgcagcccgcgcgccgcccggcatgccccgcgcggccccgcctcccccagagaagactcgtttttccatgttattg

SEQ ID NO: 136257 - DNA, 122 bp, Homo sapiens
tccccacgagacccctctgcagggcaattcaggttctctgttcttgtgccccgatctggccggagaacggagcccagggaaacggctgttcaggatcagccaagtttggatgcagccactgg

SEQ ID NO: 136258 - DNA, 122 bp, Homo sapiens
atcttctggggctgggggcccaagcccttttctcctctatcctccctggtttctcagcctcggcctgcccaggccgtctcaccagagctgtgctctccaagacagcagcaccccagggagca

SEQ ID NO: 136259 - DNA, 122 bp, Homo sapiens
tgcgctgattacatctaccggagacaccttcccttcccttggggatcccaactctcaggtcgcgatcctcttcctatctgccctcccccacccccgccaactccattttctagccacccaga

SEQ ID NO: 136260 - DNA, 122 bp, Homo sapiens
gcctgtgggtgtcttcatatttcagtgtgtctgcatagagggccgagctccgtatgtcagcgtgtctgcatagaggcctgtgggtgtcttcatatttcagtgtgtctgcatagagggctgag

SEQ ID NO: 136261 - DNA, 122 bp, Homo sapiens
ccgtggcgcccgcctagcgcagctcgggagagtgcagggagcgcgcagggacgtgacgttcgcgggccgggctcgccgcaaccccgcgaggcaaccgccggcgactgcgcggggaggcgggc

SEQ ID NO: 136262 - DNA, 122 bp, Homo sapiens
accctgaggaggagccgggccatggcaggggcagggtggacatcccttgtggccctgccccgccgcacctgcacctgcacagcccgcgtgggcccgccccgccgcagctgaagtgcaccacc

SEQ ID NO: 136263 - DNA, 122 bp, Homo sapiens
cgcggcaagaactagccccaccttcccccgacgccccggactgactgccgggcgcagacccgacttctcccgaaccagcctcggaccagccttagaaggcggaaaacaggattcaaacccgc

SEQ ID NO: 136264 - DNA, 122 bp, Homo sapiens
gcgctccccccttctcggcctccccatttcggtttggggtgttttcgcaaggttgccagacggtgcatccagaaggaaaccaccagagcacgcaggggggcgtcgcctcaggatgggaaggg

SEQ ID NO: 136265 - DNA, 122 bp, Homo sapiens
gcgactttttccgtgtctccggacagctaatcgttttagtgacaggatgagagagcccttcgtgttctgagggaccgagtgggcgaaaagcgccggagagttggagagtctgtggttcagaa

SEQ ID NO: 136266 - DNA, 122 bp, Homo sapiens
gccaccctctacggctcccggctccctccctctcccttacccttagcacccacagcccagcgacagacaggtcctttcacagaaaatctgagaaagccagactgcctgggctcaagcaggcg

SEQ ID NO: 136267 - DNA, 122 bp, Homo sapiens
ccagcgccgccgccatcatggtctctcttcaatgacgcgccatgcgctgcattctgggagcgggcgccgcggccggccaatcgccgccgcgaccccggagcctcacgcgctcccagggccgt

SEQ ID NO: 136268 - DNA, 122 bp, Homo sapiens
taacgccggctgagcgggccccggctccggggttccggcgggtgaaaggagctgaaatgtcgcttgtcagttcagcggccccccacccaaacgacgacgcctgagccctccgtcgccgccga

SEQ ID NO: 136269 - DNA, 122 bp, Homo sapiens
cacccacggggcacagtgatccctgggggtctgcggacctcctgggccccgcagcagacacgagtttagcctttgggtttagtttaaatcacataagggtgtcgtgcaatcgatttatggtt

SEQ ID NO: 136270 - DNA, 122 bp, Homo sapiens
ggtttcttggaggtgaatcttgagaagcacacctgttcagccttcctgccgttcggaggacgagtcccagcccatcctctcagtagtcctccaagacggtccagacagcacccaccagcctg

SEQ ID NO: 136271 - DNA, 122 bp, Homo sapiens
caccaaaatgtcattcccaaagtttactccatcgcacctggccactctgcccttgaccctcgactcagccaaatatgacatatctctggaaggctggcagatgcaagctgaacggttggcca

SEQ ID NO: 136272 - DNA, 122 bp, Homo sapiens
acctgccccccagcttcatacaattgactgtcagatgcacccaggagccgttagcaaaatcgtcttcagggatgtgctggtccaggaagaacacgcggcactcgtaccagccctggtcttcc

SEQ ID NO: 136273 - DNA, 122 bp, Homo sapiens
agagttaagagtggaatcctagggaagagtccctgggagagggatgtgaggagtcagccccgggtccacttcctcagggtctgtcccttaatgtcccccttggggctaggagatggttcctg

SEQ ID NO: 136274 - DNA, 122 bp, Homo sapiens
atcatatagactcttggccaactgagacaaagccaacatcaggggatcacatcaggattacgagactttcaggatatccagtccctgctctcatttctggacagaggttgtccctggatatt

SEQ ID NO: 136275 - DNA, 122 bp, Homo sapiens
gcatggacgcagtcagggagtctgctccaagcagacactggtggtcccgctccactacaacgagtcctacagccaaccagtgtacaagccctacctgaccttgtgcgctgggaggcgcatct

SEQ ID NO: 136276 - DNA, 122 bp, Homo sapiens
agtcacagtttttcacagtgatcctaagtcttccatgctgtggtacagaccccaagttttcgcaactcagaggtgggccaagtgcaaggggacctgagtcagagccaggtttgatcctgacc

SEQ ID NO: 136277 - DNA, 122 bp, Homo sapiens
cgggcggagagtgcccagaagctactcgggaaaaacttttctcttccaagtttgctctcccggccccaatgctccccaactccacctgcccgccgcggctccgcgagctcccagagactctc

SEQ ID NO: 136278 - DNA, 122 bp, Homo sapiens
tctgctcatgtccacactgccaaggtccccaccacgggggtccccagtgcaccccagctccggggcagaagaggcagcctgcagatctctgctgccgggaaagagctcctgaagttgtgggg

SEQ ID NO: 136279 - DNA, 122 bp, Homo sapiens
agctcaggcgatctgtcctcctcggcttcccaaagtgctgggattacaggcgtgagccaccgtgcctgtcaatacattttaatacagctgcgaagagaagtcaagggacaagggatagtttt

SEQ ID NO: 136280 - DNA, 122 bp, Homo sapiens
ttattacacgagtctgtagggcaacatttccaagttggtacacataaacgaaagaggaaacgatagttaaggaaatcctgttccaggttttcgggcagcccgagtgattgacacatgatatc

SEQ ID NO: 136281 - DNA, 122 bp, Homo sapiens
ctggtgttcctgggggtcatcctggtggtggcggtggcaggcaacaccacagtgctgtgccgcctgtgcggcggcggcgggccctgggcgggccccaagcgtcgcaagatggacttcctgct

SEQ ID NO: 136282 - DNA, 122 bp, Homo sapiens
aacagggacacatctttttttcccaagggccgctgacccaacctggccgcctctctgcgccgcactttgaccaaactagcaggacaaacaaacagccttcagcctagagaaaggcagagaga

SEQ ID NO: 136283 - DNA, 122 bp, Homo sapiens
tccagtgccttgggtcattcctgtgactcgtatggggaacagggaggaggagaaggtgctcgtgctcaggcacacttcagggctgaaacaactttcccagagatgagggcgaggggagggga

SEQ ID NO: 136284 - DNA, 122 bp, Homo sapiens
tcctagaaaattagtgggggctgctgatagctcttcctccggtggcatgtgtggagtactcgtgtggagtactgcacgaggcgtctggagtgctcatcagtgctggtcttacccagcaaggg

SEQ ID NO: 136285 - DNA, 122 bp, Homo sapiens
ccggctgtcacgtgtgtcgtggggccttgggtaccccggttaggcaccgtttgcgtgtcacgctgctgcagtgcgtgtgttgcgtagggctgaaatgtgtacgtgctgatcatgtgtgggga

SEQ ID NO: 136286 - DNA, 122 bp, Homo sapiens
gccctaaccaagccggggcccgcgccctgcaaccccgaaatctggatttcggtgtcctcccgattgagtcgaaggcacacgggcggccataacgaagaatcactaaacaaggggaccccagg

SEQ ID NO: 136287 - DNA, 122 bp, Homo sapiens
ctagctaggtgaggagcagcctcctcctctaggccagatctcgaggtgggcctgggttctcgtggagggagataagggtaaaggctttgtgtgtatgtgtgtcttggattaaaggaaactgc

SEQ ID NO: 136288 - DNA, 122 bp, Homo sapiens
cgctggggccaggctgcagacgcggccccgagagcttacccgctgcccggcgggcaggtgcgcacacccggcgtacccgcccgatccacttcctcgcgcggcgtctccccgtcgcggccgcc

SEQ ID NO: 136289 - DNA, 122 bp, Homo sapiens
gctgtcctcattagataaaggttgtttattcaacccaagtataaatggaaaaaaaagatgcgccctctgtcactgagggttgactgactggagagctcaagtgcagcaaagagaagtgtcag

SEQ ID NO: 136290 - DNA, 122 bp, Homo sapiens
gggcctcgggaataaggggaggagagtagggagcgagacgaagtggcagagagccgacggcgagtagctcatgcccgggatttgcaagaagggcctagaaagacgcagcagggggcgggcgt

SEQ ID NO: 136291 - DNA, 122 bp, Homo sapiens
acacctgtcatcctagcgctcaggccaggcccctggcggggagcctccaagggatgacagcgtggcccgcccgaggccacagggaggtgggcgagctgtcaccttcgatgggacagcccggg

SEQ ID NO: 136292 - DNA, 122 bp, Homo sapiens
atcgtgctccgagaacgtggacgctgcacctctgaccacgtcacgctccgagaacatggacgctgcacctctgaccacttcctgctccgagaacgtgaactctgcacctctgaccacgtcac

SEQ ID NO: 136293 - DNA, 122 bp, Homo sapiens
acacacattttgcagcatatttcaccttgcatggtaatggcctgcttgtgagttttattccgtaccagagggtgagggctctgaagatagcgccaggtcttatttacctcgataccccacaa

SEQ ID NO: 136294 - DNA, 122 bp, Homo sapiens
ttatccccatttttcagagtgagggctgaggcctagtgtcttgcccaatgtcacaaatggcgaggtcaaaaatcgacagtctccagagtctgctctcttaaccacttaactattctgcctta

SEQ ID NO: 136295 - DNA, 122 bp, Homo sapiens
ggaacaatatccctagggggtgtccactttctgcgatatatgtagtcatatcaccccctccgccttggaatattacgaaggaccatctcacacgggggtgtacacttcctgcgatattggaa

SEQ ID NO: 136296 - DNA, 122 bp, Homo sapiens
ctagtgagattagttccatgcacaagtcccatctaagttttccacatcttggtctgcagacgaactgttaacatggaacagtgacctggctatgtcacaatagccagctctctccaggtatg

SEQ ID NO: 136297 - DNA, 122 bp, Homo sapiens
tgaactcctgacctcaggcgatctacctgcctcagcctcccaaagtgctgggattacaggcgtgagccactgcgccctacccttatttagtcttaaagaaaaggattttgaattttaggatg

SEQ ID NO: 136298 - DNA, 122 bp, Homo sapiens
cacctttccctctcccttcttcccggaagcaggccataaaacctgggaaggttggccgggcgcagtggctcatgcctgtaatcccagcgctttgggaggctgaagctggtggatcacctgag

SEQ ID NO: 136299 - DNA, 122 bp, Homo sapiens
gtgcagccctgcttagggcctggagatgggcagacccaggctcacatcctagctctgacacggaattgcttcaggcaagagcatctcctctggacctcatctgaccatctgtcacatggggt

SEQ ID NO: 136300 - DNA, 122 bp, Homo sapiens
ctcgcctgggtctctctcgccccgtcgcccccattcccccaccctcggaatgaggaggggcgcctgctacccccggccaggcaggcagtgtgtccctcggattccttccaatttcctgatcc

SEQ ID NO: 136301 - DNA, 122 bp, Homo sapiens
cgcgctgcccgcccggattggagcagcagcatcacgctgacctctgcctgggatgtaaaccggaccagccgctgcgggcaaaggaaggctcttggctccttcgggaaacccagccccgtcac

SEQ ID NO: 136302 - DNA, 122 bp, Homo sapiens
gttttctcaaagccacataggaacattttcaggctgttaattcaccaggcagagcttccacggcatttctctttttcctttcccatttttctgccctcctgactaccttcttcatgttcttg

SEQ ID NO: 136303 - DNA, 122 bp, Homo sapiens
tgatttttctaaaacaaaactgtttgtttcatgaccagcataactcatagaaaaccctatcgcgatttcaaagctagatcaatgaataaagacttgtaaatagatcagtggtggggtggtga

SEQ ID NO: 136304 - DNA, 122 bp, Homo sapiens
ccacgagacgggctgctgcagctcggctggcacttatcatggcggataaatggaggagtacgaggcagcaaacaagcgctccgacggcaaagagctgcgcgatgcggtggcggcagcgcttc

SEQ ID NO: 136305 - DNA, 122 bp, Homo sapiens
cccatctcccggaccccggccgcgccttgtctttcctcccctccccccgggcgtggagaacgcagcttctcccacaaaagccgccgcctccgggcctgcagagcctggcgctgctgccttcc

SEQ ID NO: 136306 - DNA, 122 bp, Homo sapiens
aaaccatctgaaataattatagcactagctcttactttgaagagcagcacactgccagtccgtatttggtttgttttagaaggttcatgatttaaaacaagcaggtaatttccactgaagat

SEQ ID NO: 136307 - DNA, 122 bp, Homo sapiens
gccttccacgcgggagacctggatccttatcgtctttgtggccccttccatctgcacgtgcggacgaggtccgggtcgcactcgggcggtcagcctggcacgcacagcgccggcgtgcaggg

SEQ ID NO: 136308 - DNA, 122 bp, Homo sapiens
gggtagctccccggcgcgtctcggttggcccggccgctcggactcaccacaccaagtcgccgagccgcagactcacagccgccatcttaccacccaaccaccgccgacgcacgggccgccgg

SEQ ID NO: 136309 - DNA, 122 bp, Homo sapiens
gccctgccccgccggtggctagctcagagggtctacagtttacagttttagcgccaaacgcgccacaggaaatagtgcaaaataaaagggggaggagagatggaaggcagcggggtggccga

SEQ ID NO: 136310 - DNA, 122 bp, Homo sapiens
cttgtgcgaaaggagggaacgtgtgggtctgccagggtcctgcaggggggatgagaccctcgctccgctccggcgatcccttcgctctccaccctcggccagcccctcctgtcctccatcag

SEQ ID NO: 136311 - DNA, 122 bp, Homo sapiens
ctgaacacacactcaatagggatccattgtggaggaagccaagctaagggagaggtgctgcgatgctctcaggcgtgtgcacatttgcatacgggctcgcagaccctgacgcggcgtcgggc

SEQ ID NO: 136312 - DNA, 122 bp, Homo sapiens
cgccccttgctggaaaggctacgtattcagccctggaggtgccatcccgggccgcgactccgctccaggcaggacccccaacccgcccagcccgctccgccttgcgccccggacccgcggcc

SEQ ID NO: 136313 - DNA, 122 bp, Homo sapiens
cttgggtcggaatctggccaccaaatagcagagagttgagcaagtgagtgaacctctccacgtgtgtcacgtagaggtgagggctaccccgtggctggttgtgaaatcctacatgacaagcc

SEQ ID NO: 136314 - DNA, 122 bp, Homo sapiens
gctggagcccagaccgtagctgaggccggggctcgtgaggcccccataggccgagctcagcgcacctgcatagctgctggtggtcttcgtatggatactcctgttctgcatcccagactcca

SEQ ID NO: 136315 - DNA, 122 bp, Homo sapiens
ggccagcggcggcttcagccaggtgttccaggcgcggcacaggcgctggcggacggagtacgccatcaagtgcgccccctgccttccacccgacgccgccaggtactgccagcctcgccctc

SEQ ID NO: 136316 - DNA, 122 bp, Homo sapiens
cgttaaggacaagttctctgagttctgggatttggaccctgaggtcagaccaacttcagccgtggctgcctgagacctcaataccccaagtccacctgcctatccatcctgcgagctccttg

SEQ ID NO: 136317 - DNA, 122 bp, Homo sapiens
tgtagagtgagtgtttcgggcagcagaagggttaggggaacagctttatcagagattggtcgttattcagaatatagcttgttggattagatttaggcttgagcccttttagtatcctacct

SEQ ID NO: 136318 - DNA, 122 bp, Homo sapiens
cccggaccccgcctctgggaggggccggggagccgagccccgctagcagggttgggggaccgggaacgcctgggtcccagccctcgcgtcagggctgtgcgccaccttcccagccccttttg

SEQ ID NO: 136319 - DNA, 122 bp, Homo sapiens
cgtacctcctgcctccttaatcattcctctggtaagctggaaacaaccacagcaagtgcccgggaaacgccattgacgtcccgcctgtaagtgcctgcgagaggccgtcaccatcacgtctg

SEQ ID NO: 136320 - DNA, 122 bp, Homo sapiens
ggctgactcccggttcttgatcattcgctgctgccgcttcagcagctttgcctaggcacccggaaggtcaaaaaagaatgacagatgagttggcagaaggagactatgctctcaaaccccaa

SEQ ID NO: 136321 - DNA, 122 bp, Homo sapiens
ttccttggggaagcagccccttcagtcaacttcttagaggctcagtttgctcatcatgagcgtgctcaggaagaagaatcatcaggaggggctgccaggggtccccagggagtcctagcctc

SEQ ID NO: 136322 - DNA, 122 bp, Homo sapiens
tgagaaccgagagccagggccaatgacgggggggacgcgggttcacgggtggcctggagacgtggcaccgtacctccctgctcccttcctgtgagaattttgccctcaagatggcagcccag

SEQ ID NO: 136323 - DNA, 122 bp, Homo sapiens
ctgcaggccggtgtcgggctgtggtgtcagggcctcgggggggccttccccagtgggtctcgttgagctcgcttgcactggtcaggtatttatggagagctgaagtgctgtctgctgtgact

SEQ ID NO: 136324 - DNA, 122 bp, Homo sapiens
tggggtgagttcagggctgactcaaggaggcccatttcatttgagtcaccctgggatgaacgagaaaagttgctggcctcaagtctcttactatcccttgggaaccaaacacatacagaact

SEQ ID NO: 136325 - DNA, 122 bp, Homo sapiens
gaggacacagcaaaaaggtgccgactgcaccaggaagaggccttgccggaaggtgggcttcgggcttgccagcgcctctccgagtcggtcccaggtggcaccttggcccctcccacacagag

SEQ ID NO: 136326 - DNA, 122 bp, Homo sapiens
cactagctaatgggtggcctagtggatgcaggtgcagggctcactccgagggcctggccacggccaccctgtcctgctctccatgccttcgtgtgtgccacaccatggcgttgagcaggagc

SEQ ID NO: 136327 - DNA, 122 bp, Homo sapiens
tgccctccgccaggctgggtgttctttagggagctctcgccttgtaaagttcatctacaccgtgtaacttaccattctttttcactaaagctaatagtcatttgtagtggaattatccttgc

SEQ ID NO: 136328 - DNA, 122 bp, Homo sapiens
aatttaaatatttttagacactacagtctccctggttcaccacagaccaatcaggacttacgctctaatgccttaccactgttacaaatttctcctcagttacatatataatgttgtaatct

SEQ ID NO: 136329 - DNA, 122 bp, Homo sapiens
agacaactaaggaaatgtgttgccggcagacttaccctcaaataatggttaaagaacattcgttaagcagaaaggaaatgataaaagaaagaactttaggctgggaggccaaagcaagcgga

SEQ ID NO: 136330 - DNA, 122 bp, Homo sapiens
aaagctagagtgtgtaggttgggtggctttctgttggatagttgtgtgtcccaagttacacgcatcctatcttggcccagctccactggagcccgagcggcggggcgcagggtgcgagcggg

SEQ ID NO: 136331 - DNA, 122 bp, Homo sapiens
gcaggggcggtggcggcgctgagctgggcgggccggggcggggcggccgggcggccggggcggggctacactcgggccccgcgtcctgctcccatggccgcccccggctccccgcgctgccc

SEQ ID NO: 136332 - DNA, 122 bp, Homo sapiens
tttattatttgctaaatgtcacttagcatttgataaatgtaacatttacagtgcattctccgaggactggaaacagtattgtagaacaccagaacctgttttccccttgaagtaacacgcta

SEQ ID NO: 136333 - DNA, 122 bp, Homo sapiens
cctgggcacaggatgctggtgagtgactggcagtcccgcggcttcccctcagagtccccacgccccccagctcacctgtgggtagctgtcctgcctgttcctgccttgcctgctcctgctcc

SEQ ID NO: 136334 - DNA, 122 bp, Homo sapiens
ttcgttgactcagaaagggaactccctgaccccttgcgcttcccgagtgaggcaatgcctcgccctgctttggctcatgcagggcgcactgcacccactgtcctgcgcccactgtctggcac

SEQ ID NO: 136335 - DNA, 122 bp, Homo sapiens
tcacagtggggactagagggaacggaggacgggggcgttccctgagcgcctagcaggctgcgtttgtttggctttgaagccgttatccccttgtccgcaatgagaggtgctggtgtcaggcc

SEQ ID NO: 136336 - DNA, 122 bp, Homo sapiens
tcctcgttccaccgaattggccgcaggtacccgccggctgcaggcacgtcctccagccggcggtccggggtggatgaagtcgctgctgccgaaaatccctgagcctccccgcgttggaccga

SEQ ID NO: 136337 - DNA, 122 bp, Homo sapiens
aagaacatttacatcatccgggaggtggtcactgagtttcgggacaaggccacatgcaggcggctcgctgtcctgccctatgagctgcggttcaaggagcccttaccagaatacgtgcagct

SEQ ID NO: 136338 - DNA, 122 bp, Homo sapiens
ttgcatgaaaatgaacttacttgaaagccaattttacagatgaatgagttctacctttaacgtctttgtgttacagaggggtaataccacatagcagttttgaacttgagttttggaatcag

SEQ ID NO: 136339 - DNA, 122 bp, Homo sapiens
gggtctgggtctgagccgggggcgcgcccgggggagtgggctgggtctggggcgggggcgcgtccggaggtgggggagtctggggtgggggcgcgcccgtgggggtggggtggggtgtctgg

SEQ ID NO: 136340 - DNA, 122 bp, Homo sapiens
gccacactttgagacgaattaggagtccgtttatttagccggcggccaagagatggctaacgctcaaaattctctccgccccgaaggaggggctagattttcttttatactttggtttagaa

SEQ ID NO: 136341 - DNA, 122 bp, Homo sapiens
taactaaggttgccatcagtagtttgtcttttgagaatcattgttaatggcatgaagaagcgagaggaaagcatacctttgtcactatccttggattttctgtgcatccttcacatgtcaca

SEQ ID NO: 136342 - DNA, 122 bp, Homo sapiens
gagggaaccagaggaaggtgcagatagaagctcaccatcgagtcagggagtcctggatggcgttggtgagtgcatggcccaggtgcagggagcctgtcacattggggggtgggatgcacatc

SEQ ID NO: 136343 - DNA, 122 bp, Homo sapiens
cactaacacccagaaaagaccaggattggctgacctgtggctcgccgtggcagcctgtcccgcccctgcgtgccacctcgcaccttcctaaaaccccgaggctgcccgccatgttcagggcc

SEQ ID NO: 136344 - DNA, 122 bp, Homo sapiens
tgttcggccggtagggtggttcctgcgaaggggctatttcctggcccaagagctgggcagcggtcgtgaagattcgtgaagccttcggcgctagatccgggggggccttttgcccggggcac

SEQ ID NO: 136345 - DNA, 122 bp, Homo sapiens
ttttttttaaagggggtgggggatgaagagatgaagactgagcggttgtggccgcgttgccgacctcaagcagtagttggcttctccacgtagaacccgggagtaggagactcagaattgaa

SEQ ID NO: 136346 - DNA, 122 bp, Homo sapiens
gaaagccctctgcttcttcttctgtctccattccacaggaaagatttccccagcagcaaacggaaccactgtctcctctcctcttaccgccttgcattatccagtgtcatttctttgccttt

SEQ ID NO: 136347 - DNA, 122 bp, Homo sapiens
cgccgccgccggccccgcccccgcccaaccgcccgcacgcccggccccgccccacgtcggcggatgcttgcgcggagggcccgcccccacggcccagccacgcccccacagctaggccacgc

SEQ ID NO: 136348 - DNA, 122 bp, Homo sapiens
tcccaaatctgtatctctgtttagactcttgaggctccagcctctcaggtacctactgaacggttccatcacagtatatcctcaggtccagcatggtacttaaactccacaactctcgtccc

SEQ ID NO: 136349 - DNA, 122 bp, Homo sapiens
gggagcgggcaggagggcgattgtttaaatcgatggcagcaccttcattaatctgctttccggccatcttcagcagagccattcaccaggaaacgactagaaggtgggcctgcgcccctcag

SEQ ID NO: 136350 - DNA, 122 bp, Homo sapiens
ctctcctggagccctacttcccccaggagccctacggagactaccggcctccggcgctgacgcccaacgcgggctctctgttcagcgcctcgcccctaccgccgctcctgccaccgcccttc

SEQ ID NO: 136351 - DNA, 122 bp, Homo sapiens
gcctcacccatcaaaccagtgaatttctcaatcttgcctcacagtgactgcagcgccaagcggcatccaccaagcatcaagttggagaaaagggaacccaagcagtagagagcgatattgga

SEQ ID NO: 136352 - DNA, 122 bp, Homo sapiens
ggtggtgttgtggacgtgcgatctgtgtgctggggtcagtgtgttgtgtctgggcacatccgtttgggtgtgtgttgggagccgtgtgtggggccgcatagatgagtgtatgcctgtgtgtc

SEQ ID NO: 136353 - DNA, 122 bp, Homo sapiens
ccaaaggcaaatccgcccggctgggaggaacgcggtcaggctctggccccagacttcgcgcgaaggcagcttccgcaagcttctcccgggcgccctcttgcggaccggccttgagaccgtaa

SEQ ID NO: 136354 - DNA, 122 bp, Homo sapiens
gggacccaaccctgatgagtagaattgacatctgggtttaaatttctgtattttagggaccgtttgctaagcagagagcgaacactggcagaaaagcttaccgtccagtgccctcccttggc

SEQ ID NO: 136355 - DNA, 122 bp, Homo sapiens
tctctggatgagcctggcattcctaggcctgccggacgaggcaggaagcctgaggcacagcggccggctttgacccatggccggccctggtgaaaggcctgtgtggactcacctggccccac

SEQ ID NO: 136356 - DNA, 122 bp, Homo sapiens
gtccgccgcgtaggccgttcggcccgggaccccggcccaggcctggcgcgcgggtgagcgcggccagggacgcgcacctggggccagcctcgccacccacctgtcacctggggccgggagcg

SEQ ID NO: 136357 - DNA, 122 bp, Homo sapiens
aggccctgagtataagagcatgaagagctgcctttatgtcggcatggcgagcgacaacgtcgatgctgctgagctcgtggagaccattgcggccacagcccgggagatagaggagaactcga

SEQ ID NO: 136358 - DNA, 122 bp, Homo sapiens
atatttgcttctaggggatatgaggggaaagcaccgggaattaccatgaggtaatggatacggctatgcaggtggcttcttgatgacaataacccatcctcaggaggaagcttttttttgtt

SEQ ID NO: 136359 - DNA, 122 bp, Homo sapiens
tcatataaaaaggatgcattctgtctgataaaagctttcttctctggatcctgctcacatcgaagactataatccacatgctgaacagcaaccaaaatgatttccaccaggctctccaaaag

SEQ ID NO: 136360 - DNA, 122 bp, Homo sapiens
tccacctgaaagaaaatttcagacccaggatagattaatcatcgggtccaaagccctggccggatgagtgggggtgttttgatcctaatgttattcccatgtcagcacagaacttgtgtggc

SEQ ID NO: 136361 - DNA, 122 bp, Homo sapiens
cctcctggtggcagggcgctggagcggaccttcgtgggcgccggcctgagggggtgcatccgtttgctggacgtcaacaaccagcgcctggagcttggcattgggccgggggctgccacccg

SEQ ID NO: 136362 - DNA, 122 bp, Homo sapiens
aaaggagttacagttacctccatctagagaaacatctgtagcatcaatgagtcagacaagcggtggtgaggcaggctcgcctcctccagctgttgttgctgctggtatgcatttcattttac

SEQ ID NO: 136363 - DNA, 122 bp, Homo sapiens
tgcgcgttgccttctggggtttgtagttcacgcatggctgggacggggcgggcagggaatcgtgccctgagccctgttttgcctgggctatttgtgggactcagactctgaccaggggggcg

SEQ ID NO: 136364 - DNA, 122 bp, Homo sapiens
taccagcagagcctccagatgactgcagaaccagctgacatctgatgcaatatagcagaacgactcagctgaggacctaattgatagagaagcatgagagataattaaaagttgttgggcag

SEQ ID NO: 136365 - DNA, 122 bp, Homo sapiens
tgtccccttcccccagaacccgtgcgagagccttcggggccaccctgccgggatgacatacgctgccaacatcctacctcaccatccggcccgaggcacgttcgaggactttacctgctgag

SEQ ID NO: 136366 - DNA, 122 bp, Homo sapiens
ggcttccggaggggcctcccagtgctggggccatcgtagggccacttttgcatcaccctccgattgttggaaatacaagtttatttccatcttacaggatggctttccgttgcccagctctt

SEQ ID NO: 136367 - DNA, 122 bp, Homo sapiens
aggtatatagtcattgccatagtccagtattcctgcccaagcaagcaccattagtagtcacgttgctcagagagggcctctcggctctccccaccactgcatgctggattgtctgccaccag

SEQ ID NO: 136368 - DNA, 122 bp, Homo sapiens
ggtcattctctgtggctgaggccgagtctcacggtgtctccctttcaaactgctcacacccgtcttgtgtttttgtctctggcacagatcctattaggaatacaggaacttctaaatgaacc

SEQ ID NO: 136369 - DNA, 122 bp, Homo sapiens
gcaccaaggcatggtccattaccatctgctgggccgcgacctcagctgggcgaagttgagcgcacatttttgacgtgacccactttctggggtaactctgtctctctctctctctctccctg

SEQ ID NO: 136370 - DNA, 122 bp, Homo sapiens
tctcaagcaaatgaggcttgcagaaactttgacccattgagtagctaaaaccagggaaggcggtaggacagagcagcctgacatttttgcacagctcttggctgagaagatgtgccagtatg

SEQ ID NO: 136371 - DNA, 122 bp, Homo sapiens
agatggagtgaaaatgacacttattacctgtttaaagtggtgcctggcatcatccacaagcgagaattaggaaagagagtaatctttagaagcctcagcttcattgcttttttttttttttt

SEQ ID NO: 136372 - DNA, 122 bp, Homo sapiens
tggccgcgcctctgtcaccttccaaaggccactaggcctttcctgagctggcattggcaacgcacactcttgcccggctaacctttccaggtgggcggcgcactggcttcactgctctccag

SEQ ID NO: 136373 - DNA, 122 bp, Homo sapiens
ggtcctcttcggcggcggcactcagtgagtgacgccaagtggccaatcacaggccagcctcgcaggccacgtgaggcgagagctggttccaggaaaggggggccagagaccccgcagagtcg

SEQ ID NO: 136374 - DNA, 122 bp, Homo sapiens
gcctgtgggcgcctgagaagacttgctgcaacactagaaaccccagtttccccttcctcccgaattggccttaaacagccctggacgctagccgatgaaagggaaaccttaggatatctgat

SEQ ID NO: 136375 - DNA, 122 bp, Homo sapiens
ctccgagtttccttcagttctttaggatccatagaacaaagctctttgtagctcctgggccgtagccccatcccgtaactctctattagtgttttgttctgtttctttatggcacttgccat

SEQ ID NO: 136376 - DNA, 122 bp, Homo sapiens
acatattaaaaataattacaaagataatattttcaaacaacacaaaacaaatctacactacgtaaagtcttccttctttcaaagaggtattcagatggtactgtgaaagactagctctaaat

SEQ ID NO: 136377 - DNA, 122 bp, Homo sapiens
tgccaatggggtccttggagcgtctgggctgggctgggtctccccaaagccaacttgggccggtgaggagcctacagggttgccatacaaaggatctgtaaggagatgagggttggattagc

SEQ ID NO: 136378 - DNA, 122 bp, Homo sapiens
taggaatacatgatcatgtatatatgaacagttccgggtctgatctgagcgggttgtcttcggtgtaaaccagagctccagagaaaggagggtagacatattggtttgtttgctggggaacc

SEQ ID NO: 136379 - DNA, 122 bp, Homo sapiens
tgaataatccaacccttgtttagcttataatcaataaataactgcctgggccaagtggctcgtacttgtaatcccagcactttcagaggtcgaggtggctggatcacttgaggtcaggagtt

SEQ ID NO: 136380 - DNA, 122 bp, Homo sapiens
gccctgggagaaggctgccaacccaccttcctgctggacggtcccgttaatgagctgccgcgagttccattcgcggccagatcttgtctccccagcagcccactttaggcgtcttcgtgccg

SEQ ID NO: 136381 - DNA, 122 bp, Homo sapiens
gtctggaaaccggccggaaggccacaggcagagaggcctgctcaacagttggatctctatcgcctagcacagaacttcccctttcctcattggcaattaaaaaaacaacaacaaaaaactgc

SEQ ID NO: 136382 - DNA, 122 bp, Homo sapiens
ctgtgctactcaaagcgtgatctttagaacaccagcatgtgcatgacatgagaacttactcggaaagcagaatctcagccccattctagaccaactgaatctgaatctgtattttagcaaga

SEQ ID NO: 136383 - DNA, 122 bp, Homo sapiens
tgtccctgcctgtggtcagtccacccgttcgtccctacctccctcaccccggctgcctcccgccccgcagggtgggcctgtcctgggcctcccgcagttacaaaggtcccgcccgtgggagc

SEQ ID NO: 136384 - DNA, 122 bp, Homo sapiens
gtggttcctacagaaagatccagatgcacggggtctgaggactgtttcagaagctctgtccgtccatgcctggccctgtccacttgggagttccattaggccatgcctgttccagctgtccc

SEQ ID NO: 136385 - DNA, 122 bp, Homo sapiens
ctgacatagggtaggtgcctagtaatatattgccgccctgggagtctcttattttttcttcgcttattttcagagggcattgcctggccaatatcatcctcattatatataagctcaaacaa

SEQ ID NO: 136386 - DNA, 122 bp, Homo sapiens
tcctctttgcgtttccaaatcacttttacgaacaaaagaggcgcccagaggatatcaccccgggcgcaccgccctccaggggtgtttgaaacgtgagctgttgtcaggcccagggccaagga

SEQ ID NO: 136387 - DNA, 122 bp, Homo sapiens
ctagctgaaactagcagaaccactctgctgacccccacacagaaacagacaggtagattacgataataaatgactgagtgactgagtttgggggtggtttgttatgccgcaacagagctagc

SEQ ID NO: 136388 - DNA, 122 bp, Homo sapiens
gctgtgtcataaggcatggagatttgacaagaaagggcaggtaggatgctcatgatattgcgtggcccaggtcaaagcttagtaatgttggcttttgtcatgtaggggaggaatatcttttc

SEQ ID NO: 136389 - DNA, 122 bp, Homo sapiens
ggtgcctgtgggcgcacgatcacggtcacggcgcctgggctcgaggcgccccaaacttagcggggaaaacagccatgtacacaaccaagtccgatgacccgtgcagagccaagccacggtgc

SEQ ID NO: 136390 - DNA, 122 bp, Homo sapiens
ggaggaggagggatgggaggggtagggtggagtaaccaaagatgggctgggatgggacggcgaggaataaattgctccccacccagctgcggtgcgacgcccccagcgtcccaggggagccg

SEQ ID NO: 136391 - DNA, 122 bp, Homo sapiens
taataaacatgtagggtattatcctccacttacattacaaaaccattttttaaagccgggcgtggtggctcacgcctgtaatcccagcactttgggaggcccagacaggcggatcacgaagt

SEQ ID NO: 136392 - DNA, 122 bp, Homo sapiens
cttcctgcgcaatgggggccactttctcatctccatcaaggccaactgcatcgactccaccgcatccgccgaggctgtgtttgcttctgaggtgaggaagttgcagcaggagaacttgaagc

SEQ ID NO: 136393 - DNA, 122 bp, Homo sapiens
ccaccagtgccgttcatttgctactggcccgcagtcagataatttaaaggcttggagggacgagtcttgctggagccgacgcctacagtaagttgagcggagtgctgtgagccctaataagg

SEQ ID NO: 136394 - DNA, 122 bp, Homo sapiens
ttgcaagcagcccggggcgtgaaagctcactgtgggcctgaccgctgtggccgagcaatgcgccgtcactcaggaggtgatgtgtagccacaacagccccgcaaagtgcctggaaacagacc

SEQ ID NO: 136395 - DNA, 122 bp, Homo sapiens
cacgcgcctgcagcccctgcctccgagggccgcagagtcctctccctgtgtgcatgtctgcggcccctgcctccgagggctacagagtcctctctgtgtgtgtgcgcctgggcatagaggtg

SEQ ID NO: 136396 - DNA, 122 bp, Homo sapiens
ggacgctgaaggctgatagccgggttggcgcggaaatgggacgccgcagggtgggacaggcgggagggatgggatgggcagggtgtgatgccggacgaaggaaacgggcctgcccggcaggt

SEQ ID NO: 136397 - DNA, 122 bp, Homo sapiens
gtaagtagagtttcttaatagtcacaacttaatttgaaccacaagtatccagcttaatcacgtatcttactcacgataccactggtccagatgagtttaggtaattttcaaacattaaatcc

SEQ ID NO: 136398 - DNA, 122 bp, Homo sapiens
gacacaattgcgactttgtcaccagcccgttaactggctgcaacagcagctccatgttcccgtcccacggccgctgccctttttagctaccaccgctagggagcaccacctgcggctcgcac

SEQ ID NO: 136399 - DNA, 122 bp, Homo sapiens
aggaagaggggtcgggtgtccgcggagctccaagagggaagacaatcgctttgccaaacacggcagggcatctggaaaggcctgggaacctcacccgccctcccaggcccttcgggctcttt

SEQ ID NO: 136400 - DNA, 122 bp, Homo sapiens
gatgtaattacataatctgcgtcaagagaccttctttttctgtctcacaggtgtgtctctcgttactagctggggaggtaaggagggcaagttggggaggtggtacagttgagtgacccttt

SEQ ID NO: 136401 - DNA, 122 bp, Homo sapiens
gaaagggctcttctcctgcctcgccagagaacaagcaaaaccgggggcttctttatttctcgggattgataggccctgtctgtgacctttgctgggacaagaagtattatcaggaatatttc

SEQ ID NO: 136402 - DNA, 122 bp, Homo sapiens
acaggaggagagggaaagatgggagcccagttggggacgggttgagtttgagacgattttcgaccccagtggagagccgaagggagctggacacaaggcagttcagcacagaggctctgggg

SEQ ID NO: 136403 - DNA, 122 bp, Homo sapiens
cagagtgcctgtctgaggattcagccactgaatggttgctagatggtcacgagtatgaggcgctttaaaaatttaatctcatgtggaattacatgggggagattccaaggaaccacttgcgc

SEQ ID NO: 136404 - DNA, 122 bp, Homo sapiens
ggagcaaacctggggctgcggagaaccggggctgtctgtcttctcgctttgggggccgggcgccctgcccctcgcccagaaaagcctggaaatggtgtgggctattgttgggagaacccgcc

SEQ ID NO: 136405 - DNA, 122 bp, Homo sapiens
gcgctccccccaccccggcccctgtaactcctctactcctagcgcctgctttcccaggcccgtgctggtcgccacctacactttggggactcccctgttggcaactgctcgcaccgagcagt

SEQ ID NO: 136406 - DNA, 122 bp, Homo sapiens
ctttacgcctgacctgaacttgaggactgttcttacgtccttgggctgtgctcacacacacggcaagggcttgtggctatggtgcagtttattgcttggagcaagtatttcgatagtctgga

SEQ ID NO: 136407 - DNA, 122 bp, Homo sapiens
ggaactccataggtagaattcctgagctggaggaacgtccctcattcaagtaaaggaagacgagtgaggttacagagcaaaagagggagacattcttagagatgaagatggagaagtacata

SEQ ID NO: 136408 - DNA, 122 bp, Homo sapiens
accagcgacactatccttcactgacgcgcgatgccggcctttcagcccagactcatcgagcgaggatgcagcgctgagaggcttctaaggctcaggccctgcaaagcccaggagccggctgt

SEQ ID NO: 136409 - DNA, 122 bp, Homo sapiens
cgccccggaccacctcgtgcccaccaggagggccccagcggggctttgcccaggaaggtgcgctggtggcgaatcagggcgcacagacctggggcccagaagcggagtcgcgaggacctgct

SEQ ID NO: 136410 - DNA, 122 bp, Homo sapiens
acggctgccaactcctggtgactggtggacccgtccccaactcctggtgactggtggacccgtccccaactcctggggggctctcccctatcccaaaatagccactcctgcctgcagccaac

SEQ ID NO: 136411 - DNA, 122 bp, Homo sapiens
cgccattcaccatcggctctgttttacaactgaggtagccgggggatggagcaggaagggcgtgcccaggtccaggagccctcagtgcttctccagccggcccgacgggtacacgagaagtc

SEQ ID NO: 136412 - DNA, 122 bp, Homo sapiens
tgctagggcaagggcagcctgggggtgtttagactgtggtcctggagcccttgtttgcctcgcgtggtgctggccccggggaccccgaggcccacttcctccatgagggcttccttcaagcc

SEQ ID NO: 136413 - DNA, 122 bp, Homo sapiens
tgaggtggttctttctgtgggtaggtggttgctaggatacagatagtcacaacagcatcacggcagctgccttgttcttcagcacatggtgtatcagttgagaaatagtgttttatttcatt

SEQ ID NO: 136414 - DNA, 122 bp, Homo sapiens
gataatgaggacaaattgccagaaatggctccattatcttcagcagagacagcgggcactcgggggccagccctccgtgcctgtgtgcgtcctcttggggaggaaaagctggatgaaaagtt

SEQ ID NO: 136415 - DNA, 122 bp, Homo sapiens
aaggcttaaaaaagaacaccactgaccaaatgacagcattatgtattagggctgccataacgcaatatcacagacaggtggcttaaacaacagaaattatttttttcataattttggaggct

SEQ ID NO: 136416 - DNA, 122 bp, Homo sapiens
aagcggcggcggggacaaaaagctgcaaaaagcagcggcggcgggagcaaaaagccctagcggcaaaaagcagcggctgtgggggcaaaaagccatggtggcaaaaagcctaggaggcggag

SEQ ID NO: 136417 - DNA, 122 bp, Homo sapiens
gggcgaaccccagctggggcgggctcgggctgtgatgtgtgagcctgcactgccgccacgcggccacttccgattccacagctacaaccaattctgcaccatccgggtggtgagactgaagg

SEQ ID NO: 136418 - DNA, 122 bp, Homo sapiens
aaggttctctgtttgcttttgcgttttgcctctggaaccattcgacatccgtggctgatgcgcgcacccgagaggaggccgaagcgtgttccccgcctagggtctgggagaggctgggcctg

SEQ ID NO: 136419 - DNA, 122 bp, Homo sapiens
tggtgatctatcatcaccccacagcatattctaagatgcatcccaccccctttaagggtccgacaggtccaggagcagcacaacgtggcaagatgccagggaaaaaggactcagctctcatg

SEQ ID NO: 136420 - DNA, 122 bp, Homo sapiens
cccagcctgggtcagctcgccctgcccgcagccacgcagctggtggctaagcgcgggctccgggttcaggctgccttgagctctgttggttccctctgaaagtgctgataatgatagcaggt

SEQ ID NO: 136421 - DNA, 122 bp, Homo sapiens
cttgctctgtgggtggcgcggcgtacagcggcccctaagacaggatgcctgcccccacagcgtgagcacacagtaggggctcagcacatattccttgcaggcaggagtcgttgctgtcagtc

SEQ ID NO: 136422 - DNA, 122 bp, Homo sapiens
cacggcacgccgggccacgaggacttcgtgcagtgggagatggaggtgtgcaaactgccgcggctctctctcaacggggttcgatttaagcggatatcgggcacctccatggccttcaaaaa

SEQ ID NO: 136423 - DNA, 122 bp, Homo sapiens
agtcacatgactctacagcacttccgccttccgtcgcgagggcccgcccctctccagccacgcccccaccgcaggccgcaggtggattggccacgccctcggaaggctccacccacactgca

SEQ ID NO: 136424 - DNA, 122 bp, Homo sapiens
gcggaggtgttcaaagagggggcagatgagttacttcccgagacggaaccgggggtcccacgtccgccgccttcagtagcacaaccaatctctgaacactcaaaccgcgcatctctggcgca

SEQ ID NO: 136425 - DNA, 122 bp, Homo sapiens
gggcgtgaccttggccggagcctggtcccctctgagcctcagtttcccggtctgggatgccggaatgacagctcgccccctgccccgcccagccccgcccagccccgccccgcaggccctgg

SEQ ID NO: 136426 - DNA, 122 bp, Homo sapiens
cgggggcggggcttccagggggcggggtcatacgggggcggggccgagggaccaagcggccgctcctggccggagggcggccgggtcggtgacgtcaccgcatgactgggtttttatgaatg

SEQ ID NO: 136427 - DNA, 122 bp, Homo sapiens
gtggtagcaggcagtctgtgtgccacatgcgtgtcgtctctgcatgagtgtttgctggagcgtttgtcgtctgtgtgagtcgtccctttgtgtgtcctctccgtgcttgtgtattatctctt

SEQ ID NO: 136428 - DNA, 122 bp, Homo sapiens
ttgggggtgagaggctaaagcagggaggaggatgactggtcctgcggataagggtgtgcgcgagagccaatcaaaagcggatgtcgaaaagaggcgccgctccagccagtcacgtcgcgagg

SEQ ID NO: 136429 - DNA, 122 bp, Homo sapiens
ctgagatttgaacgcaagaagcctgacgccaaagcctgaaaccatcactgtgagcatcgacggcactaagctagattctaagtatgtaagaccaggggagagataaacaaaatactgcaaga

SEQ ID NO: 136430 - DNA, 122 bp, Homo sapiens
acatttgggggttgacaaattcccatcaagctctgtggatcttgtacaactgctcaccaccggcttctcatcagcacatgattggtgcagggttctgaggatgattttgagatgttccctga

SEQ ID NO: 136431 - DNA, 122 bp, Homo sapiens
tcaccaaagggcacatttgggaggactgaacacagatgccgagtcccctggaccacgtttcggggggagacagccacgtagccggagccagtgccttcccacccagcacctcctgtggtcct

SEQ ID NO: 136432 - DNA, 122 bp, Homo sapiens
ggccactggaagttggagcctccgccgagtcgcagacaacgcctccgggagggtaatcctcgccttcccccgaccactggacccagcgctgcctgcccaccgcccctcgtcctgggcggggc

SEQ ID NO: 136433 - DNA, 122 bp, Homo sapiens
acatattttggaagagctgatttctggaaactttccttggcagctttgatagtaaaattccgtacaggcagcgtttattgagcacctattacgtggtttgtaccggactttggaagagtctg

SEQ ID NO: 136434 - DNA, 122 bp, Homo sapiens
tcccgcctaggattcaggtgaggggcctggccgccgtagggccgacaacggcgaggagggcgccagcttggggagcggatggaagctgacagaggagccaccgcttccaccgcccccgccca

SEQ ID NO: 136435 - DNA, 122 bp, Homo sapiens
ttcctgtgcaaactggtagaaccattctgaccaccccgttaacaaccccgctttggttggcgcgagcctgaccggcggtgcagttatcttcctgaaggcggcgctgtgccccagctgtgctg

SEQ ID NO: 136436 - DNA, 122 bp, Homo sapiens
tgggcgcccacatccccccaccgccctgaccggctacctgaggctgcacaggccagggctcgggcatgtggtggccgcccaccaggggccttcacgtctgccctttgtgaacggacgtctca

SEQ ID NO: 136437 - DNA, 122 bp, Homo sapiens
ccagccgccgcgccccgcctcattagcatgccgggctgcgcgcgcctcatgaatatacaacgacgacgcctcgctcccgcccgcctgccccacttccgcccggacccgcagcccctaccaat

SEQ ID NO: 136438 - DNA, 122 bp, Homo sapiens
gaaaaggctggacaggactagggcagctcctcaacccacccccaggcaccctccccttcgcgctggacctggctttccttgaggggaggagggagtttgtccccttgatctgtgtggcgcct

SEQ ID NO: 136439 - DNA, 122 bp, Homo sapiens
ccattattctcaacgctacagctccctgctgccctctcctgcccgatgacccagtgaccacgagatttagccacgaaaggagtcaaatgtataagtggccaggggaattcagaaaccccagg

SEQ ID NO: 136440 - DNA, 122 bp, Homo sapiens
ccaccccaccagacggacacttactgaaggacattttccggggtgtccatggccagaggacgctggccggcagcggccaaacctgaaccgcaaactagaagccgccgccgattcgaataccc

SEQ ID NO: 136441 - DNA, 122 bp, Homo sapiens
tcgcaaggtcctagcggcaacagagcctcctagcgatggcagcgagcctcgccccgcctgcggtgaacccgcccccgctcaccccgccacaggtccggcgtctcccgggtccgccgcggccg

SEQ ID NO: 136442 - DNA, 122 bp, Homo sapiens
cctgccaggccgggtcgcaggacagccgccgccgccgccaccgccaccgccaccgccccccgaagctagatgacggagtcttgaaagactttcaccaaatatgggccggggctggaaacgtc

SEQ ID NO: 136443 - DNA, 122 bp, Homo sapiens
gtttgggtagcacagcgacagcaactgaggccttgaaggctgttatcagaaaattgtgggcggaaacttccaggggtttgctctgagcttcttgaggcttctcagcttcagctgcaaagtga

SEQ ID NO: 136444 - DNA, 122 bp, Homo sapiens
ggggggcacagggggccccactcctgcctcactcggcgaggctccagacacagaagcccacggagacctatgaacggaccagagggtcctggaatgatttcagagaaagtgatcaatgtctc

SEQ ID NO: 136445 - DNA, 122 bp, Homo sapiens
tttgtccgggaaactggcgtagggccctggctctcccttcgccctccgcgcacacgcggacgaggccttagatccacagccttttctaggccctgcgcctttgaagctgggccactgccaac

SEQ ID NO: 136446 - DNA, 122 bp, Homo sapiens
acgtccgcaccgcccgcctcaccctcgctggggcttccggaacaggtcgcgccgaggccccgccccccggctgcaccaggccccgcccctttggctacggcactgcgaccgcgccgcgcgtc

SEQ ID NO: 136447 - DNA, 122 bp, Homo sapiens
agttccgaaaggcctcgtgctcgtgggaagttttcatgtgaacgcctaggtgttgaggttcgtgaggttctgtagtgccaacccgttgcgccaccattctgcaggatttttggcaggaggcc

SEQ ID NO: 136448 - DNA, 122 bp, Homo sapiens
ggctgagcccagagaggcttccagaggctgcgggacccgcgggggacggttccgaggcagcgggcgggcggggaccgggcgccgagagacccgggcgccagtgcccctggagccggcccgcc

SEQ ID NO: 136449 - DNA, 122 bp, Homo sapiens
ataacagactaggaggagtcaccatctggccatcttgcctcatctgtgttttctcctttgcgttgctcaaccactaagccaatgtcacatactttagattttttttgttcaagttgcatctc

SEQ ID NO: 136450 - DNA, 122 bp, Homo sapiens
ggaggaggacaaaggcgtcctcaatgacttccacaagtgcatctataaggtaggggcctccgcagagcagccactcccagctgcaggagtgcgggaggaatgagagaggaagtggagcgtgc

SEQ ID NO: 136451 - DNA, 122 bp, Homo sapiens
aaccagccgtaccgcctcccgccgctgtcatctctactccaccgtcctcaccagaaccctcggcaccatcacctacccgaggctcttgcctgcgagatgacagtgtgttcagtaattccctt

SEQ ID NO: 136452 - DNA, 122 bp, Homo sapiens
tcctgttaaactaacaaagggtgatagcagaagaatgcccagagacattccattcccctgcgtccacggaattctgcagctcaactttctagtgtgttacattagaaagaaactttagattg

SEQ ID NO: 136453 - DNA, 122 bp, Homo sapiens
gcatcgcggcgcaagtggccgcgggagtcgtcggaggcgtggggaaggagcgcgccttggcgcgcaaaggcttaagggagctgtagtctgacttccagtcctcgcgctatgttctttttcta

SEQ ID NO: 136454 - DNA, 122 bp, Homo sapiens
tcttcgtgtcttccggccagggtaggtgtcttcccccggctctcttcctgcttctgctatcgcgcaccctgctggcgcaccctgctggcgcaccctgctggcgcaccctgctggcgcaccct

SEQ ID NO: 136455 - DNA, 122 bp, Homo sapiens
ggcctccctgcctgtctccggggacggggactgagctggcggcggcagatgagtgttctgcggtgtcactgagaactctggctcatgcacgaggccagctggaggcgagtgccggggtctgt

SEQ ID NO: 136456 - DNA, 122 bp, Homo sapiens
ggaagtgaggcggggcctgccacggccgtctccggggacagtcggtggaaatgtggggcgcggggagggcgcggggagggcgcgggcccgcccgctccaaccatcccggccgttgcgcaact

SEQ ID NO: 136457 - DNA, 122 bp, Homo sapiens
ctcgggccctccggctccccggagacaccggctgaggcgcttaggccagtgcagagtcgccgcactgggacccaggcgcccctcacaggtgcacgtagggcatggcccaacggcccctcgga

SEQ ID NO: 136458 - DNA, 122 bp, Homo sapiens
tcggcgttttggtgggagggggtcttgctggcgcagtggaaggccggctgcggggggaggcgatcgctgccaccctgtctaagaagaaacggcaccaacagcgttgcagtttatgttacagt

SEQ ID NO: 136459 - DNA, 122 bp, Homo sapiens
cactgccatagtctctgagggggtcactctatttctagtaatgctccactaaagataagccgtatggtagagcacagcagtctgtgggggcatttaaagtcaagccttaacattaaggcaag

SEQ ID NO: 136460 - DNA, 122 bp, Homo sapiens
gggtgtttgatctgtacaggaccctggaaccacactgccctgattcaaagcatggttctgcggactgcctgggcaccctgggcaagtttccccatctgtagaaaaggtgtaatatcagtttc

SEQ ID NO: 136461 - DNA, 122 bp, Homo sapiens
ggtaattatgttaggatggccatataattttcttccaaaccaggatgttttcaagagtgacggggggctctaactggaagatttgccaggctaccaggcatagaccaagactgtgccaggcc

SEQ ID NO: 136462 - DNA, 122 bp, Homo sapiens
gccccgccatcggaggaggtgctggctactgacactgtgtctctgtgcgtgtgtggcatccgtgtctctccagggcatggccaaggaggagacggagctgaggttccggcagctgaccatgg

SEQ ID NO: 136463 - DNA, 122 bp, Homo sapiens
tgtcggcccagcagctgctgcgctcaccaggcctggggaggcagggtacggggaccgggccgcagccccgagcggcgtgggcgcgctgcctctctggcagccgccgccagagccagcagctg

SEQ ID NO: 136464 - DNA, 122 bp, Homo sapiens
ctgcgctacgcgggtaaccccggggcctcggatgggggcggggccgagggcgtttaggggcggggcttgggtgtggggcggggctgggagcctaggggcagggctatgaccgcactaggaag

SEQ ID NO: 136465 - DNA, 122 bp, Homo sapiens
gccttgtcgcactctaattgggctttcgcaggaaagtgggcgggcgcggggcggagcttccgataacaacactcggagctggggctgtggctatttgttgctgcgccgccaccgcccgagtc

SEQ ID NO: 136466 - DNA, 122 bp, Homo sapiens
cttccttccttcctttttcctccctttgttaccataggagagagtcaggctggttccctgcgggtgctggtgtgaaacctgctctttagactcttctgcagttccccaaagcagctactgtc

SEQ ID NO: 136467 - DNA, 122 bp, Homo sapiens
gccagccgggcccagagggaaggtgagagggcaaggagtaaaggtggctgggtgtgggtccgttgaagcgagccgcctccagccctgttgaactggtgggcccagggactggagcgggattg

SEQ ID NO: 136468 - DNA, 122 bp, Homo sapiens
agccactgttctgcggcccaggcccatgatcaccctcctctcagcccacggacaggaagtcgctccccagctgccccgccccgctccccagcgccccggaagtgatctgtggcggctgctgc

SEQ ID NO: 136469 - DNA, 122 bp, Homo sapiens
cgctgagcaagaatgtacacaaacgtccactgtgatacagaggatggagaacagcgcagacgctgagcaagaatgtaaacagacgcccactgtgatagagaagatggagaacagcgtagatg

SEQ ID NO: 136470 - DNA, 122 bp, Homo sapiens
gcgggacttcgtcagagctctggcagcctttctcaaaaagtccgggaagctgaaagtccccgaatgggtggacaccgtcaagctggccaagcacaaagagcttcctccctacgttgagaact

SEQ ID NO: 136471 - DNA, 122 bp, Homo sapiens
aaaaaattaaaacatttttcccaagacagactgatttttcctgtggaggaattctgctaccggctgtgaagataatacattttctccatcttattacgtatttaatataagcataaaagcat

SEQ ID NO: 136472 - DNA, 122 bp, Homo sapiens
ggtggccgcaggaagggtgggcggggccggggttgaggtttttccgtgcacgaggctgcccgggcggtcgcggacatcatctttaggctgtggatgccttggccggggtctccagacgctga

SEQ ID NO: 136473 - DNA, 122 bp, Homo sapiens
accccccatcaggggcgtccaaatgttccctgggactcagtggctgccacagaagggaagcggtgctgaaagctacaaagggggcgttgtgggcacctctaaggcaacttgcaacgggccac

SEQ ID NO: 136474 - DNA, 122 bp, Homo sapiens
agaacacatcctagagggcacgatagccaggataggactgttctaggaacacacacgaggcgtgttaaagaagactcagaaagatgaaaaccaggaaagagccctgtggccgagatctactc

SEQ ID NO: 136475 - DNA, 122 bp, Homo sapiens
tcaaatctttgcccacatggagaaacataacatgcacagtcacacatgcacaaacatgcacgcaaacacacatccgtacattcacacacaacatacctctcactcactgcagcgaaagggac

SEQ ID NO: 136476 - DNA, 122 bp, Homo sapiens
ggagccttgtcatcacaggaaaccactcaataaaaggggaaaataagaatggaggaggcacgtggcctcttaagagccttgagctacaagtggcacacatcacttcctctcacattctgctg

SEQ ID NO: 136477 - DNA, 122 bp, Homo sapiens
gcaggtaagaaaaggaaagcagcagcatagggattggaaaagaacagaactgtccctactcggaaatcacatgacggcacacgtggaaaaccctaagcaatctgcagaaaactcctagaatg

SEQ ID NO: 136478 - DNA, 122 bp, Homo sapiens
acagagcgagactccatctcaaaaaaaaaattcgattagcctggacaacatagcaagacccgtctctacaaaaattttttaaaattagctggggctggggagtggtggctcatacctgtaat

SEQ ID NO: 136479 - DNA, 122 bp, Homo sapiens
caaactactgggttcaagcaatcctcccaccttggcctcccaaggtgttgggattacaggcgtgagccgctgcacttggccctaaatgttttaaagtggttaatttgaagttctttctgtga

SEQ ID NO: 136480 - DNA, 122 bp, Homo sapiens
cgggcccccagcccaggtcgtagctccgggtcccgggtgggaccctagcgctccccacgacgccctggcccccagagcgcccaccagctcctcccagcccaggggcccactctttgttcccc

SEQ ID NO: 136481 - DNA, 122 bp, Homo sapiens
cccggcaccgccggcaccgggcagcgagaggaggtgccaggcctgcggcagctgcatcgacgacccgcgccccgcccaggggaaggcgccccccgtccccaggaccctccaggagctccagg

SEQ ID NO: 136482 - DNA, 122 bp, Homo sapiens
taatgcaacctactcgtgggtgcccaggattgagattggacgtctttgggaaccattactcggcccatcacatctgagtatgttgaagtcaccgaggatcaaggagacagcactgctggaga

SEQ ID NO: 136483 - DNA, 122 bp, Homo sapiens
cgccgctcccccctcccgggctcccttcgccgtccccgcccgcacaggcgggcaagcagccggagagaagcggcctagcctgccccccgcccccgagccacccaccccggccagaggcgccg

SEQ ID NO: 136484 - DNA, 122 bp, Homo sapiens
tctgagaggtccttcgtaccgcaggagaggcagctctcacctgaaggcctccctggacaccggtctcaactttgtgtgttaccagttatggagaattatttttagtgagttacactctgtta

SEQ ID NO: 136485 - DNA, 122 bp, Homo sapiens
ctgtccttctgggccgggcttggtgtccttctgtgttgaggtgggagcttttcttaattccgtgttgtatgctttttttttctgagacagagtcttactctgtcgcccaggctggagtgcag

SEQ ID NO: 136486 - DNA, 122 bp, Homo sapiens
tgctcaatatttgctgagagaaaactgcagccatgtcaccgatttacaataggaacttctcgtatggagcagaaatgtgttgttgcctgtggctttgcaggagctccgagcagtggcgagag

SEQ ID NO: 136487 - DNA, 122 bp, Homo sapiens
agggcagagaaagagaccatgccaggagggcagttagagggcaagggcccagcagacgcccgggccaccacccgtcccctgttcttcagcagcagaacgacagtttgcttgatggcagcggg

SEQ ID NO: 136488 - DNA, 122 bp, Homo sapiens
gggtatcactgagctattttgtagacaggactgtgagcctgcaggaggttgtatacctgccgactggtagagttaggttctgaactgagaacttcctgtctgaaacctagtggtctctctga

SEQ ID NO: 136489 - DNA, 122 bp, Homo sapiens
gctggaaaagccgtggagcaaggaggtgctttctcgaaccccgagaccctggatctgtaccgggacatccctgagctgcagggcttctgagtcagactggctggcgtgtcactcagccgcac

SEQ ID NO: 136490 - DNA, 122 bp, Homo sapiens
aactgagtcaccaatgtggcaattgaacctcttcacagctcagaattgttgatgtgtgcacggagggccctgtggttgtactgaacgcatgtatgaacagggatgaactgcagagggactgg

SEQ ID NO: 136491 - DNA, 122 bp, Homo sapiens
tgttcctccatattaaataacactgtgtaggcagagaagcctttagaccatttgtaaccacgcaatgggttcaccttgcctgctgcgtagacagaaccgatttatcaagacaggggaattcc

SEQ ID NO: 136492 - DNA, 122 bp, Homo sapiens
tgtctggggatgaggtgaggcggggaagggggaacatcgctgcatggttacgagcacacgcgaatacaggaacctttagggaagctccaggccaaagagcatccgtgggctctcggagcgtg

SEQ ID NO: 136493 - DNA, 122 bp, Homo sapiens
gtcggtatcctctttctaatgctggccttcgattaccagtcagtggcttgcagtctattccgttaataactattgaaagctcagaattgattgctgaggcaatgtgactgcattgggatgcg

SEQ ID NO: 136494 - DNA, 122 bp, Homo sapiens
gaggctgcggggacagagctgggcggggcgcggcggcggggctgggaccccgggatccagcgaggagcacctggagagttaccacacgaccccgacctcgccagcccaggcgccgcgtttaa

SEQ ID NO: 136495 - DNA, 122 bp, Homo sapiens
cgcgtctgtcgtcccacatctgcgctgctcctgccgggaggacacgcccgtgccccacagcgggtccgctcaccactgctctttcaggcattacctccggagacactcgttccacctttgtc

SEQ ID NO: 136496 - DNA, 122 bp, Homo sapiens
cgcctacaagcagacgaaagcacagagggcgcggactatggctttgtacaaccccattcccgtccggcagaactgtttcaccgtcaacagatccctgttcatcttcggagaagataacattg

SEQ ID NO: 136497 - DNA, 122 bp, Homo sapiens
gttccgttcccctccctcttgagtctcttcaccagcagctgcaggaagggcgtgggggaccgagagacaaagagcgcgcaggcaccgcctccgtccgggcggcccctttaagaagcgcgcgc

SEQ ID NO: 136498 - DNA, 122 bp, Homo sapiens
cgcgcgggcgcgcgggcctgggccgctctgcggctctgggccagggcttcggggaggtggcggctgctgtgcagcagcgggtgggaaatgccctcgcggctgcagtccccagcctggtactg

SEQ ID NO: 136499 - DNA, 122 bp, Homo sapiens
ctgaccagagggaaacagacataattcaggaaaaggaagggattcctgagatggtctcaccgtgcttccagcaaagcctggatgattccagcccaggactgaatatccagctgtaacacagg

SEQ ID NO: 136500 - DNA, 122 bp, Homo sapiens
ttccacctttacctgagggcgtgttggcgctaggaatgctcgagctgagacaaacttttacgccctcgcgagtcgaggggcgggcgggcgagcgcggctcccacccccggcggcggcagcgg

SEQ ID NO: 136501 - DNA, 122 bp, Homo sapiens
gtgctgaatgtttgctctgtgtatctacgacactggagttcaatctgcgggtgtccgattcgtctttgaacacgccttccatgacagccagaggggcccggcccacagccttgtgctcacgg

SEQ ID NO: 136502 - DNA, 122 bp, Homo sapiens
tggaaagaacaggccttggctctcacccagttaacaagcgtttatccagcgcacgtgttgcggtcggaccccatgcgaaggagctaaggacacaaaggtgagcagcagagacgcggttccag

SEQ ID NO: 136503 - DNA, 122 bp, Homo sapiens
cccactcctggtttatttgcatggatcctcagagcccagaacagttccaggcacagtaggcgctcattaaatgtttgcgggacgacccaaagtgtgttcccgccagactgcgcaattggaaa

SEQ ID NO: 136504 - DNA, 122 bp, Homo sapiens
tgcggagcccagagccccctgggagcagcactccctccgggtgggcctggcaggctcttccgactccagagtgggcccgtgtcatggtcacttccccaccacaggtcccgcttccccaccgc

SEQ ID NO: 136505 - DNA, 122 bp, Homo sapiens
gcaggaagatgaactctttcccgaagctcagggaaggagcgcttttagcgcagtagctgtcggagagtgcagaatgaatcttggagggaggagaatttatagcaaagagctgaaggagggaa

SEQ ID NO: 136506 - DNA, 122 bp, Homo sapiens
cggaaactacaactcccacaaggctgcgcgtaccgcggctcccaagaagtggcttgtacccgcccccctcgcctgcgggcctcgcccctccggcccagccagccgttttccaggcgtggatg

SEQ ID NO: 136507 - DNA, 122 bp, Homo sapiens
ggcacagagctcctctcccacctgcagtgaagcgctgacaggctctgcctgcccacctctcggcacagagccagacgcctgccatttcccaacgggccacccacgtccacatccacagagaa

SEQ ID NO: 136508 - DNA, 122 bp, Homo sapiens
aaaatatcccttttaataaactggtaaacttaagtgtttccctaggttctgtgagctgctcgagaaaattaaacccaaagaagggttcatgggaaccctgatttacagtttgtgaaaagaac

SEQ ID NO: 136509 - DNA, 122 bp, Homo sapiens
tgtctctagggaccgtgtgagcctcccccagccctgcccaggccctggtcacctatggtccgtgctccatctctcaggacccctcggtctgcacatttcagatacatgtcaccatgcgtggg

SEQ ID NO: 136510 - DNA, 122 bp, Homo sapiens
ggcatgttggcaaactcagaaacctattcccatcaaaagcacatcaggctgcctgtggtgcgacaaactttttctgttatctctatgagggtacacaccatttttctcacattttctctggc

SEQ ID NO: 136511 - DNA, 122 bp, Homo sapiens
actgtatttgttcatccaacacacatttactgagcacctactgtgtgctaggccctggtacgggcacaggaaacacatcagggaataaaactacactctctgctctcctggagcttccatgc

SEQ ID NO: 136512 - DNA, 122 bp, Homo sapiens
ttccagcctggagccgccgcttctcctttaaatactcgctcacgtgatcgcagacgggcacgcgcggaggaacttcacgctgtcaggacaacgagccattcctctaccacttcccctcccct

SEQ ID NO: 136513 - DNA, 122 bp, Homo sapiens
ctgccctgggggtcttgggggttggtcagtgacatggccactcggctgccctgggggtctcgggggtcactgacaccgacccgtggatgtcctgggcccccgagggggcggcaggcagaggt

SEQ ID NO: 136514 - DNA, 122 bp, Homo sapiens
gcaagaggtccgttgcggacaagaccaaagtgagcagctggtttcccctacgtgtccttccgggcctgggcgtctctggagctcaggctgacccgagacctgactcccggccagtgggacca

SEQ ID NO: 136515 - DNA, 122 bp, Homo sapiens
taaacacgtcggtgatgaatcggtacccagctgccagtggcggagcttcctgggcggggccgcgggcgcgcggcggcttcatttcctcgcgcgcgccggaagtggcctctcaggcgcggcgg

SEQ ID NO: 136516 - DNA, 122 bp, Homo sapiens
gcgcctgccccacgggtgtgcagctgcaggacaacggcaggacgtgtaaggcaggtgaggcggtgggacgggacggggcgggcgggcggggcggggcctggcgggaatgggttgcggccgcc

SEQ ID NO: 136517 - DNA, 122 bp, Homo sapiens
ccgaggcgggcggatcacaaggtcagcagattgagaccattctcactaacggtgaaaccccgtctctactaaacaaaatataaaaaattagccgggcgtcgtggcaggcgcctggagtccca

SEQ ID NO: 136518 - DNA, 122 bp, Homo sapiens
atacagaagaggttttgttctcatggctgcccaccgcagcctggcactaaaacagcccagcgctcacttctgcttggagaaatattctttgctcttttggacatcaggcttgatggtatcac

SEQ ID NO: 136519 - DNA, 122 bp, Homo sapiens
caatttcccgactatcccgcccagcctcgaagatgggagggagagagggcaaccttgtcgcggtaaggcatcctccaggcccagacattagtctcggtccatttcaaggcacccgagcctgt

SEQ ID NO: 136520 - DNA, 122 bp, Homo sapiens
taaaaatggcccaacccattacattttcttttaggtagatgggggagctggggggcggggcgggggcagtcagggaacaaacagctgcccttagaaatgacacgccctgtgggcaatggcgg

SEQ ID NO: 136521 - DNA, 122 bp, Homo sapiens
cttggacttggcaacccagaatggcatggcagggttgggatgtggggggccagtctgggccgagggccccaagctccagcagtcttggtccctgctgctctgcctgatgctgctacagcctc

SEQ ID NO: 136522 - DNA, 122 bp, Homo sapiens
agttcttttcctattcactgcccccaaagatgacctatgaagctggagaaactggattatcgggagccttgagcagccttaagcccagggtgctaaggtcacaaaatggatcactctccctt

SEQ ID NO: 136523 - DNA, 122 bp, Homo sapiens
ctcaagaaacaaaaaacaaaaaacaaaaaaaacccgcccatgatctggcgtcttaccccccgaagagctgaggagatgtaagtgtgaataattctgtctaatggattgctatcatccacgtt

SEQ ID NO: 136524 - DNA, 122 bp, Homo sapiens
gcaggaggctagggtacccggcggggggcgcgaggaggccggggaacatcatggtaggcgcgggcgggcgaaataacccttctttcagtggccggagggtaaacgcctcgcttcccgcccct

SEQ ID NO: 136525 - DNA, 122 bp, Homo sapiens
gtctccgagacgagaattgcgtgcaagagaaggacgttcaggcagcccggccgcctgctgcgagagctgaacatttcccagctctatagtcgcccatttctcaggaaatcagtccttctgag

SEQ ID NO: 136526 - DNA, 122 bp, Homo sapiens
aggcctagactcttcaaggaaacataaacatcctcaacgtcctccgcagtcactcactagcggctgctgaaaacaggaccaggaacaaggatggaatccttaactgaatgttcctgacagca

SEQ ID NO: 136527 - DNA, 122 bp, Homo sapiens
ccactctttctcctaggaggaccaggaggacatcactgcctttgacctcagccctgacaacgaggtatgtggggcggggcctggaggggacccgctccagcgcctccctcccagactgagtc

SEQ ID NO: 136528 - DNA, 122 bp, Homo sapiens
cgggctgggctcgggctaggctgggctcggctggggttctcccaggatctgggcacaggccgcttgctctggctttggcgcccggccgccgcccttatatgcagcctgctcggctgccccgc

SEQ ID NO: 136529 - DNA, 122 bp, Homo sapiens
acattcagaggaggacaagacaggcttcctgaaatctcttccgaagtaaacaggtcccgacgcaaagggcaacccctccagtagcggaaagtcctcccctgagctccccgcctgcccacgcg

SEQ ID NO: 136530 - DNA, 122 bp, Homo sapiens
ggcagactccccttagtacgaaactgcttccatcagtaaaatattcaatgtccaggtccccgaggggccaatctgttaaatctttccagcttgagaacactttatctaccacgtccacacag

SEQ ID NO: 136531 - DNA, 122 bp, Homo sapiens
cccccataaatattacaacatctcaacttatctatcgtctaaaatgaaacatccagagagcgactgttcttagttgagcctgggattgaatcaattccactttattgtttaatctgaaccat

SEQ ID NO: 136532 - DNA, 122 bp, Homo sapiens
ctaggtaattataatatgcagcaaagcttgggaaccactggattagaggaaactattccacgcatttgaaaagcatgaagaatgaccttgaatcagagatacaaatgttgttgaatacaggg

SEQ ID NO: 136533 - DNA, 122 bp, Homo sapiens
tcagcattacaggcgtcatttccgggcacgtttacaaggtgtcttggtaggcgcaatgggcgcctgcgcagtggcagcctattttgcgggttgacccgctttaacctgcggcttccttgcag

SEQ ID NO: 136534 - DNA, 122 bp, Homo sapiens
caccaacgctgcacccagcaaagcagctgacagcgaggggactcccggcacacacagcagcgtggacgaactcagacgcatattgttcaataaaagaggccagactccatactgcgggattc

SEQ ID NO: 136535 - DNA, 122 bp, Homo sapiens
ggcacgtccacttttgtggtggcgcttagtgttggtgacggtgcagcggcacagcccgtccgtgggtggctggtggaggtgtcggtcagctctgcgtccgtggaaagcaatttggccacgct

SEQ ID NO: 136536 - DNA, 122 bp, Homo sapiens
tcagctttagggtaagcacagcggggggtctcacaggccccatgatcacagcacactgctcgatggtgtgcctgcttcaaatgtgtgtggtttctaggtctatggccaatccgaagcagcaa

SEQ ID NO: 136537 - DNA, 122 bp, Homo sapiens
ccagcttggcgcgtcccggcagctctggggtgtagacgagcggtcgcagccggtacagagcgatgaactgctcccgcgtcaggttgtggtcccgcagcagccgagagaactgctccggggta

SEQ ID NO: 136538 - DNA, 122 bp, Homo sapiens
accaaatgtgaggatcatgaccccctggcacagccccaggaggcaccgagaacaagtgcccgaagtgactgggttacagtctgattttatgcattttagggtgtcaatcgaagaaaatgacg

SEQ ID NO: 136539 - DNA, 122 bp, Homo sapiens
cgctttttcctacacagccatagctctgggcctaaagctgattcctcccccaaaggctctcgcggcctggggggcctcaagtctgagttcctcaagcagagtgcggcacgtggcctcaggac

SEQ ID NO: 136540 - DNA, 122 bp, Homo sapiens
aacgccccagtctgcgacccgggcccgagccgcctgggggcccaagggaagctgaatgcccggtgggctcccaggatggctcttccagttcttcgcgccgccttcaccccgtgagggagcct

SEQ ID NO: 136541 - DNA, 122 bp, Homo sapiens
gtccttctcacttctcagaggttgacacagaatctaacagttaccctcttagaactactccggagaattcggtaggtagtagctagtttccacaccggggacctgctttgttaaatgctatg

SEQ ID NO: 136542 - DNA, 122 bp, Homo sapiens
tgaggccctgcgtccaatcccggaagcacagttcctgggaggagtcacttctataatagccgtatcttccctcctcgaggctgagggactgagtcacacacgtgtccaaacgggcaggagcc

SEQ ID NO: 136543 - DNA, 122 bp, Homo sapiens
gggtgggagtccacgagagggctccacggtgccttgacgtgcgctgtcatatgatacctccgctgcctcgaaatagacactctagtgcacgaattaccagaatcaaaattcagcgcatttaa

SEQ ID NO: 136544 - DNA, 122 bp, Homo sapiens
gtcacagtcaccatcaccacggaatccggggccgctgaatctgggacctccagccacaggcggccccaggccgactcattcagttccaggtgagccctggagagaggatataggcgtcgcta

SEQ ID NO: 136545 - DNA, 122 bp, Homo sapiens
cagatgcagggagaaagccatgtgaagcttggagatatgctgccacaagccaaggaactgcgagaacaaggggaggcctagaacacataggtctttccctggcaccttcatagggatcacag

SEQ ID NO: 136546 - DNA, 122 bp, Homo sapiens
ctgctcttgaacctcaggtgatccccccacctcggcctcccaaagtgctgagattacaggcgtgagccaccacgcctggccgacgtcgttactattaagtcctcatttatttatttgacata

SEQ ID NO: 136547 - DNA, 122 bp, Homo sapiens
acaaaggacgacaaagaaaagagaaaattgaagtttgagtataggagccaggagttcagtcgtggttccacgaatgattgggagttgtgcctgccagaatataccctgtagaaatagtacat

SEQ ID NO: 136548 - DNA, 122 bp, Homo sapiens
gtgcagctcgggctccggggcaggcaggcggggatccccaggacgccccggcgcggacggcggataccaggcccagcccgcgcccctgcccctgcccctcagcctgcgtccgtgtctgcatc

SEQ ID NO: 136549 - DNA, 122 bp, Homo sapiens
catgtccgctgcttgcgggtcggttcctgaggaattggaagtgtcacgagatgtggccctcgttgggctggcgctcattggcctcccttgtgcctgtgcaggaggagctgattaactcagtg

SEQ ID NO: 136550 - DNA, 122 bp, Homo sapiens
ctccccatccggggcgcctctgctaggacaccggggtctcggggtttctcagggctgctgcgtttcacctcctttaacgcggaggcgcggagttgcacgtgtgggtctcagtggagccgcca

SEQ ID NO: 136551 - DNA, 122 bp, Homo sapiens
ttcaagcgggctggagagcggcgcactgactcaaggcaagggctgcagctgcaagtggtgcgccctgcccagccggggattttcaggagggtcccgcctcagacggggcggacccggggcgg

SEQ ID NO: 136552 - DNA, 122 bp, Homo sapiens
tccgtcctcctgtcgccggtggcctggactctatagagaagtcatcctaaaaatcgggatcgccgtggggaggggagtggcggggggaggtggattaggtccagaaaagcgcacactccggg

SEQ ID NO: 136553 - DNA, 122 bp, Homo sapiens
ttttctactcatttaaatcggcacccacagcttctacatagagactacatagctctgaaacgatgcatgaaatggaaaaaaatgggaacaatttttgccctgaatgcccaggtcacagaaat

SEQ ID NO: 136554 - DNA, 122 bp, Homo sapiens
gaagccccagacctggcagcccttcctggagttgcacagacccacctggctcctcctccccgaggtaacatgctgagcttgggtggtgcttttcctgccacggcagacgccggggttttgga

SEQ ID NO: 136555 - DNA, 122 bp, Homo sapiens
gctttgcacttacttcaaaatgtgccttactccctctggtgggaccatttaactccagcgcgccacccctcccccgctctggccgctcccgtctgccccgctgcctcggcccacgtgatggc

SEQ ID NO: 136556 - DNA, 122 bp, Homo sapiens
gtcttttccgaggatgttcttttctgtcatccatcgtctacccacgttgagcacgacagccgggccagtcccgccctgggcggttggggccttcccagaggggcccggtgcggagagccccc

SEQ ID NO: 136557 - DNA, 122 bp, Homo sapiens
aacatgcagaataactcatgtgactactttctccagtaaatcaaatttgccaaaagcaatcggtatagtatttctaccagggctgccttgttgcacaagtccaggaggcactatcacagccc

SEQ ID NO: 136558 - DNA, 122 bp, Homo sapiens
ggccggcctccctctcgcaggtgccgtcgtgatggagaagcccaacatacggtggaacgacgtggccgggctggagggggccaaggaggccctcaaagaagctgtcattttgccaatcaaat

SEQ ID NO: 136559 - DNA, 122 bp, Homo sapiens
atgaatgaggctaattaatttcaggccatacttgatgaggtcagcaccatacgaggggtgcgtgctagacattgctaatctctttcagctgagagtgatgaattaaagatgaagcatgcctt

SEQ ID NO: 136560 - DNA, 122 bp, Homo sapiens
tgcagaaagtcaacagaagccgaatctctgaatttctgttcgcagcctcctaggcggggccgggaaaaaaatccagtagtctgcgctgactgggcggcgagggaccgggaggagccaatcag

SEQ ID NO: 136561 - DNA, 122 bp, Homo sapiens
gatgtctgtatgcccagagcctagcccagtacctgggacttacgtagtaagagtggggcgcggggggcgggggcggggggcagcagcaggaaggggaattgctcaatacacgctcctggaaa

SEQ ID NO: 136562 - DNA, 122 bp, Homo sapiens
aggccctttggcgtggtaccaaccagataatgactgcatcaggatgaaagctgctgaactcggcatggcgcctcctcttctctgttgggatgagtgactttattgatttgagcagcatatgc

SEQ ID NO: 136563 - DNA, 122 bp, Homo sapiens
gcctgggcagggcggctgctacatccacaggccaggatgctgcaccacagggaagggccccgaccagacatcaggtcctagcgggggaataagtgtcagcaatccacaccgcagctgtgggc

SEQ ID NO: 136564 - DNA, 122 bp, Homo sapiens
ataggggactacaactcccaaagaggactgcgctcgtccactggctcagaggccaatggacgcctggtacatgaccggcatcgactaatcagggccaggctcgatgaggctttgtctcccta

SEQ ID NO: 136565 - DNA, 122 bp, Homo sapiens
gagttcctctgaacacaagcgtcccaagaaactgcttcccaatcaatcagttggagttgacgccagaaatggaaactgtttgctactcctggattgaatcatccccagcgttcctttccttt

SEQ ID NO: 136566 - DNA, 122 bp, Homo sapiens
ccagagagctgaaattacttccccaaggtcatacaactggcagccatagactaggactcccgtgtcctgcctcccagactatggcttctcagaagggagataagaagagcaaaagggaggca

SEQ ID NO: 136567 - DNA, 122 bp, Homo sapiens
gcgctggagaagatgcggcggtggagggcgcggcgcgggggttttagaggcccggcggggcgcggggcgggccggcgggcggcggctgtcagtgggggcgcggccgtccacacgtggggctc

SEQ ID NO: 136568 - DNA, 122 bp, Homo sapiens
gaaaaaaagaggtgatgaaagtttacatgaggacccggctctgggtgctgcagggggatgcgtgctagcttggaggttgggggtaggggctgtggaacatggagtgaccttcaggtcactga

SEQ ID NO: 136569 - DNA, 122 bp, Homo sapiens
gcaagtctctgtctctaaaaataaataagtaaggataaattctagatgtactattgataacggttttgctgtgtccccaaccaaatctcatcttgaagtgtagttcccataatctgcacatc

SEQ ID NO: 136570 - DNA, 122 bp, Homo sapiens
cgtgtgagaagatgctgggacaggcagggactgtgagtacagaagaggggccgtgaggaccggcaggaatccctggggccaagctcctgaggtggccactgtgccctcgaggtgaaggtgcc

SEQ ID NO: 136571 - DNA, 122 bp, Homo sapiens
ccccctttcacaggtaggtgtcacacttgtcctgaatttcaagcctgcactttgcagagtcggagattgcagagtgggcggaaggggaggagggagcgccacagccacttgggggaagagag

SEQ ID NO: 136572 - DNA, 122 bp, Homo sapiens
gctctctgccatgcgaggacacagcaaaaaggtgccgactgcaccaggaagaggccttgccggaaggtgggcttcgggcttgccagcgcctctccgagtcggtcccaggtggcaccttggcc

SEQ ID NO: 136573 - DNA, 122 bp, Homo sapiens
gactgacttccctgggctgggagcgcaagcgcagcccccgacggcggccacacaggctcacgtcccaccccccatgcagaccccgttgcttttgcttcagcaagtggttggggacgcgggag

SEQ ID NO: 136574 - DNA, 122 bp, Homo sapiens
gaggcgcggggtggagactgggccgagcaggggatagagatgaactccagaaaggaacagcgacttgctgaaagtcacagggcaaaatgtggcgcgtctgtagtcaataaataatatatatt

SEQ ID NO: 136575 - DNA, 122 bp, Homo sapiens
ctgaagaaagagtgattcaaaacatggaggtggaaactgcaatgacattggtgacctcaccgtaaaacacacatacctctactttgtcctccccacataggtgggagcaacaaaagcgaatg

SEQ ID NO: 136576 - DNA, 122 bp, Homo sapiens
ggtacgtctgctgtgccggccacccctgccctctggatttccccactgcggggcagcccgcgcctgtcacctggctggcccaacccagctggccctggctctgttaaccccctcgtgccggg

SEQ ID NO: 136577 - DNA, 122 bp, Homo sapiens
caccacccacctgcctagaaggccccaatggcttcccgccgcaagcaggatccagacgcccgcctcacgtggcccacgaggccctgcgtgtctgctccccatccccggcccccctcccaccc

SEQ ID NO: 136578 - DNA, 122 bp, Homo sapiens
tgtgcctcgcatctgatggtggtgactctgctgtttgggacagcccttttcgtgtacttgcgacccagctccagctacttgctaggcagggacaaggtggtgtctgttttctattcattggt

SEQ ID NO: 136579 - DNA, 122 bp, Homo sapiens
cctcccactcgaggtgttcattggcccgcggctacgaaaaccagatcttctcccggtattcggccaatagcctgttagactccgggttgaatttaacgcttagagtgctggacgagatctgc

SEQ ID NO: 136580 - DNA, 122 bp, Homo sapiens
cttccccagcccccgactgtccctcccaacggattccctctcccccgacggcggcagcatcgagctggagttctacctggcgcccgagccgttctccatgcccagcctgttgggagctccac

SEQ ID NO: 136581 - DNA, 122 bp, Homo sapiens
atgaaggggaaattgagtcatgggaggagaggccagagtcatcaggggaatgagggccgacgccagccctcagggccttccagatgctaggaggaggagggttctccaggaaaacaaacagg

SEQ ID NO: 136582 - DNA, 122 bp, Homo sapiens
cccgcgccggacccagtacctcggctccccggggccggaccgaggccgcaagcagcgccgcggggtgtggggcggacccaggagatgaaatgacaacgtcaaccctccaggtacttcgtgcg

SEQ ID NO: 136583 - DNA, 122 bp, Homo sapiens
gagaggaagtggacctctcacaccaactcttatgcccaattggtcctctgccagtgaaggcggggaaggtgaacctgtggccgtcggcagatctgcagatctgccggactgcgggtcggggc

SEQ ID NO: 136584 - DNA, 122 bp, Homo sapiens
gctgctacctgtctaatatctacgctccctttacttggcgttggagtcctggagtttcctcggggcactttccagtcccgctcgcagtcaggcgtggatgtgactgagttctagctgttggg

SEQ ID NO: 136585 - DNA, 122 bp, Homo sapiens
gccctattcacacctcggccaggctgcggtggccaggactggtttgggaaggcagggccccggtgtgcagccacagccagcagcctcctacctacacaagggtgttcgggagcatctcaggg

SEQ ID NO: 136586 - DNA, 122 bp, Homo sapiens
aagttaaaaatcaaacaaaaattaacaagcacacacacacaagatggaaaataaatcctccgtggaagttactatgaagcaggaggctttagaaaggaaaaacacaatctctgactaatatg

SEQ ID NO: 136587 - DNA, 122 bp, Homo sapiens
gcggggcgcacagagccagaggggcttgcgagcggcggctgagggaccgcggggagggggcgccgagcggctccagcgcagagactctcactgcacgccggagggcgcccttcctcgctcgc

SEQ ID NO: 136588 - DNA, 122 bp, Homo sapiens
agatgtggagagctgtgtgtgaatgtgaggtaatagagtgaggtggggggaagtggggggcggggggagtgcatcgagaatgcaacgttcagtcttatcaagtctccccttcccttccacca

SEQ ID NO: 136589 - DNA, 122 bp, Homo sapiens
agcggcttgggggcgggatctggccgccctcagggctccggcgccaagttcagagccacgcgcagtgctcttggccgggaggaggctgtgctgcaccagcacctcttgctccacatctccag

SEQ ID NO: 136590 - DNA, 122 bp, Homo sapiens
acactaccacgggctcagcccacagggctgcagtggcggcagggagcctgaggcaggagccgtgctctctgtctgaagctgctgtcgttccagatgggcaggacaaactctagctgcgtttt

SEQ ID NO: 136591 - DNA, 122 bp, Homo sapiens
catgcccggccactaatacgacattcttttaaaagaatgagccaagccctccctgcctcccgcttccccaaagttcaaatattttctttctgtacttcagtgaagataactttggaagccac

SEQ ID NO: 136592 - DNA, 122 bp, Homo sapiens
gggctccactgccctggggagctgaggcgcgacgaatgaagcaccagggcgcctggtgggcgccagttctccggtctggagcctgctggcctgtccctccggggcgctgaacccctagtgcg

SEQ ID NO: 136593 - DNA, 122 bp, Homo sapiens
gctgaaatgtttgccttctgcccctgccaagttcatatgttgaaacctcaactggtgtgacggtatttgaatatggggccttggggaggtaattaggtcaaaagggtggagcccgtgtagat

SEQ ID NO: 136594 - DNA, 122 bp, Homo sapiens
tgaagggtgggttgggcaacagcctgagagtggactcagtgttgattctctatcgtgatgcgaaattgatgcctgctgctctacagaaaatgccaacttggttttttaactcctctcaccct

SEQ ID NO: 136595 - DNA, 122 bp, Homo sapiens
catccaaggccccctgcaggccagcctagaaggtgcggttcctgcccatgccctagtgctcgcacatgcccgtgtgtagatccagctattgctgaggacctctagccctctgcattcctggg

SEQ ID NO: 136596 - DNA, 122 bp, Homo sapiens
gcccccgccccaccctctggctcctgacctgcctgcaggtcgctggggctctgaggccggcgtgggttgacctcacgtccacccctgcaccccactgaccgctgcacaactgcgcggatgcc

SEQ ID NO: 136597 - DNA, 122 bp, Homo sapiens
cctcccccaacctgacaagtgtgcgtccttaccacaaaatgccaccacttccctaagtgacgctgggccccgaggacctgatttgaaatcggtgttcagaagaccgagcccggctggacgca

SEQ ID NO: 136598 - DNA, 122 bp, Homo sapiens
ggctgtgctcaggggcgtggtcttctgcagtgggggcttggctggtgagtggagactctgcgtgactctgggggcgtggccgagaatgggtgtagctctgtactagggcgtggtcatgcgta

SEQ ID NO: 136599 - DNA, 122 bp, Homo sapiens
ccgcgcgcgcaggaagggagggagcgagcgagcgcggcggcgtggccaggggagggggcgcggggaaggcacttcctgagccgcctgccagggttataaaaaaacccccaaactgcgcgcgg

SEQ ID NO: 136600 - DNA, 122 bp, Homo sapiens
tagtcagggcagcccccacaacacagaattatctgacccaaaatatcaacagtgccaagacggagaaaccctgctgacagtacctggcctatggaaaatgctcactgagagttattataatt

SEQ ID NO: 136601 - DNA, 122 bp, Homo sapiens
gtaagacaggaaatcaatcagaggcagagcgacgcctctggctctggtctagtggtgcagcgtctctagccctcgccccgcccaccgtccccgcgaggcgtccactcgccgagccccgccct

SEQ ID NO: 136602 - DNA, 122 bp, Homo sapiens
gcccgcggcccacgcccaccccatcctgcgtcgctccggatccttcctcgctctcagcaccgatttaaaggagcccagtgaacgcccggctaaaaacagggaagaaacaggcgacgtttctt

SEQ ID NO: 136603 - DNA, 122 bp, Homo sapiens
atagcaatatagaaagttaggctgcaaagagagatagggccttcaacatgagcggccttacgaatcatgtaaataagcatgggctttctcccacaagatataagagggatggagtttcagga

SEQ ID NO: 136604 - DNA, 122 bp, Homo sapiens
tgacagggagggaggaacacagaaggcaggaagatgaaaatacaaggctgagcaggggagcgcaggaaggtaactgaagagtccttatgagcagggacacattgagtgattctgtgtggctc

SEQ ID NO: 136605 - DNA, 122 bp, Homo sapiens
tcataaaagggaccctgagcaagaacatttttcatagcagacaggaggactcatccacatcgccagcaatcataattaagcaaaccgccttttgcaccatttaagatttaggaaatcatcca

SEQ ID NO: 136606 - DNA, 122 bp, Homo sapiens
gtgggacacgcgactgtttgggattgagcgaggccacctaagcagattgcggtgagtgagcgcggaatgacgtcactgacctccaatcaactgtcacatgaaaataccaaaagcggcagtgt

SEQ ID NO: 136607 - DNA, 122 bp, Homo sapiens
ggccaccaaacagagaaggctcaggtcagtgcagcaggctcgggggagccggtgaagattcgtgggcagaggagtgctgtgcagaagcgcgggttgagggctgggcctgggcgctggtgaca

SEQ ID NO: 136608 - DNA, 122 bp, Homo sapiens
gcctcagacagtgggcgcaggacagtgggtgcagcgcattgtgcgcgagccaaagcagggcgaggcattgcctcactcgggaagcgcaaggggtcagggagttccctttcctagtcaaagaa

SEQ ID NO: 136609 - DNA, 122 bp, Homo sapiens
gagccaccgcacccggcaccccataaattttttgcgttcctacttctcagtgtctgcttccgggagaatctaactgagacaccagtggatttgcaaatggaccccggaactgaagttgctcc

SEQ ID NO: 136610 - DNA, 122 bp, Homo sapiens
ggggttggcacggggacttggagttggtgacctcactgctgccttgtgggtggggggcagcgttgggggaaaagtgagaatgaatggactagccattcctgcttgagtgcctctgtatgctg

SEQ ID NO: 136611 - DNA, 122 bp, Homo sapiens
gggtggggcagtgtcgactggaaaggagccggtggaacttctgggctgacagggaggctccgcagcttggtcagggtgtgtggaatgggtgcccaagggggccgggccagggaaagttctag

SEQ ID NO: 136612 - DNA, 122 bp, Homo sapiens
cactttccccagcagagtgatttttaaacaaataaaatctagtccttcctgagcttctcccgaggagtctgtgtatcagcaaggtcaggtttaagagttgccttgaggcatggctgggagag

SEQ ID NO: 136613 - DNA, 122 bp, Homo sapiens
acgtattattgacattaatacctaatcggcgagtgcccatctgccccacctgctccagtgcgtgctgtctgtggagtgtgtctcatgctttcagatgtgcatatgagcagaattaattaaac

SEQ ID NO: 136614 - DNA, 122 bp, Homo sapiens
gtaattattcaacatctgagtcaaaatgcaaacagtagctccagtctacacagagtaatccgaattaaatatagcccatatttgttgtgctgacatccatgttgttgagaacacgcatacat

SEQ ID NO: 136615 - DNA, 122 bp, Homo sapiens
ccagcgtcccccagctccttcacttgcctgagcccgtccgtggacactcccctgcgggtccgaccaggctgacccttgagcaccctgggtcagcaggaaggaaagaccccgagagcgcagga

SEQ ID NO: 136616 - DNA, 122 bp, Homo sapiens
aactccgccgcagcagccgctcctggggccagggggccgggccccatagccagccgggcccgccccccaccgcccggccccccgaccccgccccggcccgcccggccccaggggacggcccc

SEQ ID NO: 136617 - DNA, 122 bp, Homo sapiens
gggcctggggcggggcgttcaggaggctctgggaaaggcggcggtggccggcgcggggggcgcgcaggcgcagagcggcgggccgggcgtccgcaaggtggcgcccgcggggcgcctgcgcg

SEQ ID NO: 136618 - DNA, 122 bp, Homo sapiens
gacggtcggcctagcttttcgagctgtgtacgtttgcgtaaaggctgggcggcgatagaacgtttccgtggaccagagtcgtggctgttgtctgtgttaacatttgtgtaaaataagatgcc

SEQ ID NO: 136619 - DNA, 122 bp, Homo sapiens
gcggacaagaagctgggaggcgcgcagaaccatcgtcagtccccgaggctctctgcagtccgcgtgagtcctggccaaggtctggcctcggaagctacgagctacaatcttccttcatccta

SEQ ID NO: 136620 - DNA, 122 bp, Homo sapiens
gtgggccttgcttcgcagatcagccaatagagatgagggctggttccggaagtatcttcccgggggcgggcacagcgcctcccccgcgcgggtccccgggcgctggttgggggcgctcccgt

SEQ ID NO: 136621 - DNA, 122 bp, Homo sapiens
gcagagggtcacgctcaacggcatctaccagttcatcatggaccgcttccccttctaccacgacaaccggcagggctggcagaacagcatccgccacaacctctcgctcaacgactgcttcg

SEQ ID NO: 136622 - DNA, 122 bp, Homo sapiens
tgtcacaagatactgtttttctggcatccacagccctaaccctgaatatccaaatgtactcgtgcatcaaggatctactcaagtctcacctcctctgggaaccttctttgacctattacagc

SEQ ID NO: 136623 - DNA, 122 bp, Homo sapiens
gtctttagtcatccctcccccacccggagctgcgacaatggcgttgcccaggaaacgttgcgcttccaggccgctgacatccagggaatgaagtcttgcgtcacaaggggagcgacggcctt

SEQ ID NO: 136624 - DNA, 122 bp, Homo sapiens
ggagcagtgatatgccaggcaatattctagtacatcattactgatacatatgtgaaaggacggaagtatgtattgaacattcagtgtatactaggttctattccagtacagacttattgaca

SEQ ID NO: 136625 - DNA, 122 bp, Homo sapiens
cttggccacgctctatcgctcacttgtttctcctaaaagttgtgcctaataacaactggccggaaacacttacttatcatcaatctcccggcctattctctgaaacccactgaaatactgag

SEQ ID NO: 136626 - DNA, 122 bp, Homo sapiens
ggccgcgcggggcgggggcggctctggccggcgcgctcccggcggggtcttccttccctccggcccctccctgggaacccgagatttcgccgcagagctgaactcccagattttaaccccaa

SEQ ID NO: 136627 - DNA, 122 bp, Homo sapiens
gcgcctgcagcctccggtgcgcgcaggccccaagcccacatgcgcagtcctcaccttgcgcgcagccccatgtacagccccggacgggctcccagccccactggcgcagaacccatcaccgc

SEQ ID NO: 136628 - DNA, 122 bp, Homo sapiens
gcccagaaagaaatttaggaatcaaactctggattcaattctgcaacagactgaataaaccgataactacaaaactacttgccttgaaatagactttttttttagatctactcaaggccctc

SEQ ID NO: 136629 - DNA, 122 bp, Homo sapiens
aaatgaatgggtctctgtttatagtgaagattctttcgttctccagctccaggcttcatacggtaaaactctctgggaaggaaaggaactcagagtcccatgcagaaaattgttcagctgga

SEQ ID NO: 136630 - DNA, 122 bp, Homo sapiens
aagcggaaaatggaagagagtgacgaagaagctgtgcaagccaaagtcctgcggcccctgcggagctgcgatgagcctctcacgcccccgcctcattcacccacttccatgctgcagctcat

SEQ ID NO: 136631 - DNA, 122 bp, Homo sapiens
ttttaagtgtttttttaggagattttctgcagcactctgagtgtctcttcccaaacacttcggttactgtttattcacctgctgagatctggtctcttattcactctcattgccttaagaaa

SEQ ID NO: 136632 - DNA, 122 bp, Homo sapiens
gcgctcacaaagccctcgggatgttgccctcttgtgggcacggagggcattaccgcctagcggtcccatctgaaccttcaaagccgacacgcatttgctttcacagaacgaggagggatgac

SEQ ID NO: 136633 - DNA, 122 bp, Homo sapiens
ccatgtgcctgtggagaagagaggttcctgtggggcagacaggtgtggaccaagtagctgcgaaatttcttctgaagaaaacacacaagggggaagcgagtgagctcagtggaggaggggcg

SEQ ID NO: 136634 - DNA, 122 bp, Homo sapiens
acttaaaccctctgtaaccagagccgcaagctactgacactcatctgcgtgtctgcagatcgcaaaagcctttgggcacctgctctggaagttcgtggaggagtctgtccaagttcgcccaa

SEQ ID NO: 136635 - DNA, 122 bp, Homo sapiens
gcaaaataaaaacgcggggccccgcgttcaaaaagcaggaaaaagcctttccctttctcccgtggtctttctgtccacctgtctcggcagggtttatttgctagttaagttgcgctggcttg

SEQ ID NO: 136636 - DNA, 122 bp, Homo sapiens
ccacggtcatgtgagagtttgcaagcccgggaaccggggccgggccaggacactgaaccccgtggctcctgtcactccagttctgggcttcccggctgaggaaatgctgtcaccctggcccc

SEQ ID NO: 136637 - DNA, 122 bp, Homo sapiens
ttgccctcagggccccctctctcttactggttctcaggcctgccactcggcactgtctcccgcccacctcagccttcgggctaggttgagtgagggctcttgggttagttcctgttaggccc

SEQ ID NO: 136638 - DNA, 122 bp, Homo sapiens
acatctgcgacgtgacacagccactgaacattccctgaatacagccgataagatcaagagcgagcatttcttaatcagtcattgctctagagtcttcaacacaaatgcctagatttttctgg

SEQ ID NO: 136639 - DNA, 122 bp, Homo sapiens
ttcagcgagcctttcaagcagccacgctgtaataggagcacggactgagggtgtcggctccgagccgtgtgtgtaattctgctttttctagtagccgcattcaaaaaggtggaaaggagctg

SEQ ID NO: 136640 - DNA, 122 bp, Homo sapiens
gcgtgaactccttcccacagtcctgtgggtgcagcggggaagcggggtgtgaggagcagccggtgggaggccggaggggagggacgctggctgggagggctggccatagtctccctcacctc

SEQ ID NO: 136641 - DNA, 122 bp, Homo sapiens
accagggacctaacagacatggccgggtggtgctctcatctgctctgggttgccaccgagcgagcaactcggctgcagtggatgaataacattacactggaaagaatggggaaggctcaaga

SEQ ID NO: 136642 - DNA, 122 bp, Homo sapiens
caaagtccagaaacttctcagggtccacagagctgctgaaggcacacacgaagcacttcccgtcaaggagggccagcaggatccagaccaggggggcggccagcgccctctgcagcacagag

SEQ ID NO: 136643 - DNA, 122 bp, Homo sapiens
gtggagaaaatgaatcttgggctaatgagctgatcagaaccttgagctgcaagagggctccggctctcttcaactcctggcccagtggtcctcagagcgtggttcccggaccagcagcgtcc

SEQ ID NO: 136644 - DNA, 122 bp, Homo sapiens
gcggcttgtggggctgcccgtccacttgctctttttgcggttctacaagcgtgacaaagacgagcattaccggtaagagagaaatgagaaaggacccaaactataatcagttcctttttttt

SEQ ID NO: 136645 - DNA, 122 bp, Homo sapiens
aagtgtggatgcgtcttacccgaggccgggccgcctcgcccgctctagtccagcggagcccgagcgcctcggaccaatccccagtgattatgcaagacagcggaccaatcagctccgccagc

SEQ ID NO: 136646 - DNA, 122 bp, Homo sapiens
ggccccggagcgacgcaagggtcgggccccagccagccagggcaggtgggaggcggcgagcgtggcgggcacgctaagacccgccgcccccagacctagtgcctcgcctaggggaggccgag

SEQ ID NO: 136647 - DNA, 122 bp, Homo sapiens
aggagggatgctgactggtacgtgaatggtgagggcattttcaagcacgtggggcaaacacgctactaacttgtaagggtgctatagctttaataatagttcatttcaaaacctcccaaaac

SEQ ID NO: 136648 - DNA, 122 bp, Homo sapiens
ccgtgcggaagaaaagggttggctatttccgtggcccaagtaatagtcaggccgaaatctcgcgatacaacttagcttccgggaagaaggcgagcggtgggaggagacgcgacgtgggggcg

SEQ ID NO: 136649 - DNA, 122 bp, Homo sapiens
ctactttccaggacgattccagattgtctcagtgaatgccccagcaaccctgttgttcaccgtttccattttttaaacgaggaaactcagactccaatgtgaaacagccgcttcaaagttca

SEQ ID NO: 136650 - DNA, 122 bp, Homo sapiens
actgttcctttctctaccacgccaagcatgcgggtggggccatgaggctgagccttctcacggaactgtgactcccagataaggctctggccatgttctttacacgacatgcatgaggcccc

SEQ ID NO: 136651 - DNA, 122 bp, Homo sapiens
taaatggtttacatcacccaagaagctcatccttagagccacaagaagctcctgcagccgcgagggaagctcttcctttgtatttccctgctggcttcatgaagtccacagcagagactttg

SEQ ID NO: 136652 - DNA, 122 bp, Homo sapiens
ttgcccttcaagacctggtgcaggtgtcactctctctcctcggctcactctctttctctgcgccggagatcctcaagatcaggggagatgtctcggcatctctcagggttcctcatgcacag

SEQ ID NO: 136653 - DNA, 122 bp, Homo sapiens
gtctgattccctcctgaactgaggatcctgtgaagcatcctcagggctccacttctccatcgcattgcagcatccacacacatttacctctggagacaggagctccttggaagctgggaggt

SEQ ID NO: 136654 - DNA, 122 bp, Homo sapiens
tctcccggctggtgcgcccctccccacgcgcccgcggctgcaccccactctgcacacacacgtccaactattcttggatctactcacatccctggatcaagtctggccgccctccccgctcc

SEQ ID NO: 136655 - DNA, 122 bp, Homo sapiens
tttttcccccaattttgcaagggtctgtctcccatgcttcaaacagcagaagtatcttcccgcagtgagaaaatgactgaaaataaccagctgtttcaggatctctatcaaaacacacacaa

SEQ ID NO: 136656 - DNA, 122 bp, Homo sapiens
cagagagtggatcacactgtcgggctcagcacgaaagactgacagtctgggcacagcacccggtcctccctcccagcgctgactgcaatcccggccagggctgaggaaaccgcaggaccatg

SEQ ID NO: 136657 - DNA, 122 bp, Homo sapiens
cccagagcggggtgtgcaggtactgggtacagggcagcacccaggaaatggctgagcggccggttcccaccctcctgcagctggggcctgaccacctgaattagcctctgggcggcgtctgg

SEQ ID NO: 136658 - DNA, 122 bp, Homo sapiens
ggagtcagctggagatagccgtgggcagtggccatcagccatgggagcagaagcagcccacggtggcctcaggcccagggagaacttcctaaggggccagagtgagctgtcacaactggtcc

SEQ ID NO: 136659 - DNA, 122 bp, Homo sapiens
aataatcactgttacaaaaaaccatttttttagagagtgtcaaagctggactctgaaaagcgacattatgggaagaaaaatagagctgtaaagtagagacaaaaaataattaattgaaataa

SEQ ID NO: 136660 - DNA, 122 bp, Homo sapiens
ggaaggggccgttactttcccagagcggcggggcgacgtcaggcggaagggcgcggggcgcgcacgctttaaatggcattcgctgtcatccgagctcagagccgtgtgggcagccgcgggct

SEQ ID NO: 136661 - DNA, 122 bp, Homo sapiens
gcgccttagcgaccgcttcatctccgtggagctggtggacgagagcctgttcgactggaacgtgaagctgcaccaggtggacaaggactcggtgctgtggcaggacatgaaggagaccaaca

SEQ ID NO: 136662 - DNA, 122 bp, Homo sapiens
gggtgcacacaggcccgagggcaggcgctggaggatgtatcccgggatccactcttaacccggcagccgaaggcaccctgtcccgccgcccacagccttctccgcgccatgtcctgggccag

SEQ ID NO: 136663 - DNA, 122 bp, Homo sapiens
cccagtttgccgccgcgatctgcttgggttcgtttccacagcgtggagtaaattttgctgcggctcacgctttgggtctgccacgtctttaagagcggtaacactcaccgcggaggtctgca

SEQ ID NO: 136664 - DNA, 122 bp, Homo sapiens
caacaggagggtctccacgggagggaaagaggaaaaataaataacatgcaggagcagccgcgtcagtctccaatttcccgagattgctgtagagggagtgagactccggctggaaaaaccca

SEQ ID NO: 136665 - DNA, 122 bp, Homo sapiens
caattcctcagtctctagattgaccaggctccccgtggaccctaattaatattttctgaccgatcactgggtttgatcagtcaatggagggtgaagaagcatccattatcaggtttcctttg

SEQ ID NO: 136666 - DNA, 122 bp, Homo sapiens
acagaccaggccaacactgctttataaagcttttcctgaaagagtggaacaagttcttaccgagtgaagcttctggtagaggccacacgcgttgcatacatatccgccatttgcattctttc

SEQ ID NO: 136667 - DNA, 122 bp, Homo sapiens
tgcctctaggacccgaagttctctccccagcagagaccgacagccactgtgaggaacgggcggaggacaaagagggctatgtttttagcgatcactgggcacccccacttgcctccacacct

SEQ ID NO: 136668 - DNA, 122 bp, Homo sapiens
gtgtgacagggatgtggcatggctgagagccacaaggcccccttgtaaggagttggtgctcgggaatcagcagaagcatgcatcaggggcagcagagggagcactcatggagaccatgggtg

SEQ ID NO: 136669 - DNA, 122 bp, Homo sapiens
gggagatgtcaccacagcgtttcttcttcaacccgtctgctgtcagccagaggaccacctcgcctgggggccggccctccgcccggagccccctcagccccacagagaccttcagctggccc

SEQ ID NO: 136670 - DNA, 122 bp, Homo sapiens
caagacgggttgggtgggtaccccacactgccgctgacgccttgcgctcactccgccattcgcgtgcgtggctgagagacccccggccccactgcgtgacccacccatgtcgcactggggac

SEQ ID NO: 136671 - DNA, 122 bp, Homo sapiens
cgtgcagcggaaggcgctaactgccctggatgtggagacccgcggactggacgtgagaggcgggcaggggcagttggggcagctgcccctacaacactgaagaattggaataggaaagagtg

SEQ ID NO: 136672 - DNA, 122 bp, Homo sapiens
cggtctgctgaggggcaacaggtcccgaagcagggggagagttatattagaggggctagtcggccaaacaaaatgtcatctgctggctcaggccaagactacgagttaaagcctcaaacttg

SEQ ID NO: 136673 - DNA, 122 bp, Homo sapiens
tggtttcccagaccggaaagctcccacactccaggctgggcgggacccctcttcccatcccggcccccgaacttggcccaagccttggtcccccgcgccagacgcaaagtccgcgctgcgcc

SEQ ID NO: 136674 - DNA, 122 bp, Homo sapiens
aagatagaagatcctgatccagcatcttctaattgtatgggttttctgttaaattttatacgttttaagttttttttcttctcccaggaatgaacgaacaagcagacccaggccaaccctga

SEQ ID NO: 136675 - DNA, 122 bp, Homo sapiens
cctgggttcgagtttcagccacataggacccagtcaaacacagaaattgtagtttcttcccgggtgggcgcggacaggcccttacttgggggcggtttagaggtgggacccggctagccggc

SEQ ID NO: 136676 - DNA, 122 bp, Homo sapiens
ttcattttcctttcctcacaaaaacatggtttgtcaaaaagaaaccaaatgcatttcatccgataaaaatgaaaacagggctgtgcaagggctttccaccagctttaagcttttaaggttta

SEQ ID NO: 136677 - DNA, 122 bp, Homo sapiens
tctaaaacacactgtgacttccaaggagctggataatgcaattctgcctgctccaattaccgtgatccgagatcacccaggcccaaactccatgagggcgcctcagcccagcagcctgtcat

SEQ ID NO: 136678 - DNA, 122 bp, Homo sapiens
gccccaggcatgactgtcccagcccctccttgcttccctcatcacagtgcctggctctgacgatgcctggctggctcaaggcttgtttgttgtccacgtccccacaagcacacagggaccca

SEQ ID NO: 136679 - DNA, 122 bp, Homo sapiens
ggaatgggaagggcttagaaataatctctccatcagccagcagcaggaagaagcagcagccgctgccactctgccaaccgcctaggaggcaaggggagctgtcctccctcctctggcatgga

SEQ ID NO: 136680 - DNA, 122 bp, Homo sapiens
cgaaaagaagaaaacaaaagaaaggaaagactgagggaggtcagggaaataatgagcttccgggtgcctagctaaggttgactctgtatgaatttaaaagtaatgagatggatcaagtaaag

SEQ ID NO: 136681 - DNA, 122 bp, Homo sapiens
atatgggtttcttgggagagagtttttccagggcttttgtctcgttcctaaaagggtccccgatccccaagtggtcaagaaccattgtttggccctgcttggaagcagaggtgggctgagag

SEQ ID NO: 136682 - DNA, 122 bp, Homo sapiens
agcctcagccggcggggagctgaatcccggccaggatgcggccaggaggcagagggaggccgcaccatccctgctcggccaagcccaggggaacttgaggctctgaggccttgctctggggg

SEQ ID NO: 136683 - DNA, 122 bp, Homo sapiens
ggcaacgttgcgatgagaactgtaaactctttccaaaagagcccagtgtgtggtcattgccgcgacgtgccggctggtggcaccgagcagcctgggcccagagcggttgtcgggccgacaga

SEQ ID NO: 136684 - DNA, 122 bp, Homo sapiens
ctaaaacccagtaatccctagagggagaaagggcgtctcctgcagtattccactgaaactcgctggttttgctcgaattagacacttgaactatgtttttagaactcttcatcttaaaagaa

SEQ ID NO: 136685 - DNA, 122 bp, Homo sapiens
gacggacaaggaagatcactatatgtacctgtgatgatcacttggaatccacactggtaccgccagcctccggtaccacagtacccgccgccacagccgccgcctccaccaccaccaccgcc

SEQ ID NO: 136686 - DNA, 122 bp, Homo sapiens
tttaattactgcaaggcagctgagcagaaggaggggaggtatctctcaaatccacctcctcgaaagcttggagcccagggtttttaaggataatttggcaagctgagggccagggaatgtat

SEQ ID NO: 136687 - DNA, 122 bp, Homo sapiens
cgtaagagactcagagcgattcacatgtgcatcagagagggcactgatggaagcaaacctcgtgcatcccacagagttacagccagcagcgctcaggctgtgtggctgccgcaagtgcccct

SEQ ID NO: 136688 - DNA, 122 bp, Homo sapiens
ggtcccggtacctgctgcagatccgagccaaggaggcacagaagcagctggcacagatgacgcggtgcccggagcaggagcagcggctgcagcgcttagaacggctgcctgagctggcccgc

SEQ ID NO: 136689 - DNA, 122 bp, Homo sapiens
gtgaggcttctggaacttcacacatctggcctcaatttcaccagtgcaagcatatctgcacgcctctccaatcttatcctcccaggtccccttcttaacgccagtgggtctggtctcctctt

SEQ ID NO: 136690 - DNA, 122 bp, Homo sapiens
ccaaaccctccagcctcatattcaatctaattgaactgtggactgaagacagttgaagaccgtcaaacctccacatcacaaacggttcctccaaggctgtagggatctacttgagccttcat

SEQ ID NO: 136691 - DNA, 122 bp, Homo sapiens
ctctgagatcccatgccccctcactcatttcccttctgtactcactcacgcagcccctcccgtcctgcattgcccagaccccgtgacacttggatccttaagttgcccccaaaacaggttct

SEQ ID NO: 136692 - DNA, 122 bp, Homo sapiens
aaaattcttcacaatgctttcctgataaagaccaatctcctggctggagcccccaggccccgcacatctggaccccgcctctcaccccactctctcctcctctgaccttctggacgggctgg

SEQ ID NO: 136693 - DNA, 122 bp, Homo sapiens
acgccgcttattcaggggcctgtgcggtctgggtcgcctctgggccagcgggttctcactcgcccccgtcaggcccgcggcgcccgagacaaagcggccgcgactcgtgctgcgctttcgtt

SEQ ID NO: 136694 - DNA, 122 bp, Homo sapiens
cgcgcaggggcggggcggggcgaggaggcggcagcgcgtttaagtgacgtcttggctgtccgcgccggcagaggcgagggttctggggtttctgggactgtctggtgtgttttctgtctatt

SEQ ID NO: 136695 - DNA, 122 bp, Homo sapiens
ctttgatcaacagccctgcacatatcagaagcgtccccacagatgttctaaacacaaatgcggctgctgacaccctgacgctgcaaacaacagcaagggcatagagaggagaccttgatgat

SEQ ID NO: 136696 - DNA, 122 bp, Homo sapiens
cagttgcggtggttgtaggcagtggaatttgtccttgaggcctctgagcatgcgcagctgcgtgggattgcagccctggttgcagggcaggatgcagtctggtgaggtgggggctatgttcg

SEQ ID NO: 136697 - DNA, 122 bp, Homo sapiens
ctctttcctgggaggctctcagggtttcagtctaggctggaatcactcaaactgggtttccgaaacctctgtgggctggattcctcaagtgtggcaggcggagagcgcattctaggaaaacg

SEQ ID NO: 136698 - DNA, 122 bp, Homo sapiens
cttggtgcgtgtatccacgtcctcttattagtaagttttccttattagtacagctatgggcgtttgagtttttggagtggccggagcaaactcgccactcgaggtccctgagtggcagcccc

SEQ ID NO: 136699 - DNA, 122 bp, Homo sapiens
cgggcctcacaggagcccatggaaggtgggggaggctcaggcatggcgggctgcaggtcccgagccctgccctgctcagggaggcagctaaggccctgcgagaaattgagcgcagcgccggt

SEQ ID NO: 136700 - DNA, 122 bp, Homo sapiens
ctcacagtcaggacctcccttccggtagcacacccagtagggcctccagcccacccacagcgtggctcccaccgcccccggggttgcccacggcggggatcccaccacccctcgggccgccc

SEQ ID NO: 136701 - DNA, 122 bp, Homo sapiens
gggctggcagggaggaacccactcccaacacggcccccggacgcccccactcctcagcaccgcccagggagaacccgcggccgcctggttgtgaaaccccacagccttctccgccctccgct

SEQ ID NO: 136702 - DNA, 122 bp, Homo sapiens
accagggcattcaattctgtctggagttatgctgggagatgggcagctgctggccacacacggccatcgggtgctcaaagtgcactgactcagactgaaaatctacacgcaggtgttggaga

SEQ ID NO: 136703 - DNA, 122 bp, Homo sapiens
cagggagatcctatactaaagaggcaccaggcatccatctgctctggcgtgtaggcattacgttgggcttaggatcactagttttatgcagagaggaagaactcggatccatccaaggaata

SEQ ID NO: 136704 - DNA, 122 bp, Homo sapiens
ggctctccagggcctgatgatcagggaaggtacagccgcagtcagggcagatggggcccccggacgtctgcctaggaatcagtcggggtttgctgggcctccggcctcgcttcccctttcgg

SEQ ID NO: 136705 - DNA, 122 bp, Homo sapiens
accactgagtcagggaggcagggccagagaggagtttggcatcaccggataaaaatcagccgtaatttacatcccctacgtgtggctaaaagttaaaatggacagatctgggtcctgcgctt

SEQ ID NO: 136706 - DNA, 122 bp, Homo sapiens
ctgtgtgtaggagggatttcggcctgagagcgggccgaggagattggcgacggtgtcgcccgtgttttcgttggcgggtgcctgggctggtgggaacagccgcccgaaggaagcaccatgat

SEQ ID NO: 136707 - DNA, 122 bp, Homo sapiens
ctggcaaaatttgcaatagtgttctattgtatgtaattttaaaatttataagattatccacgttggccaagtaaactgtactgccaatagaattctggaattgtgagaaattgtatcattga

SEQ ID NO: 136708 - DNA, 122 bp, Homo sapiens
ttcaagtggaaggctaaccagagggacttgcaccagcgaaaacacttggtggcagtggtccgacgagagtggaggtcccagaaccattgaacaaatttgatttttgactatttgcctcgcct

SEQ ID NO: 136709 - DNA, 122 bp, Homo sapiens
acgcctcctccgcgggtatgaacagtatgcctacgatggcaaggattacctcgccctgaacgaggacctgcgctcctggaccgcagcggacactgcggctcagatctccaagcgcaagtgtg

SEQ ID NO: 136710 - DNA, 122 bp, Homo sapiens
ccgcttcctcccgcccttcttcttgctgcctgctggcctcctgggtttacggtgtcactgcggccagggctgggggaacaggacgtctagaagacggtgtgaggtgatggacgaagctggaa

SEQ ID NO: 136711 - DNA, 122 bp, Homo sapiens
caaccctagctccgtgttccaagtgacgtggcctgtcgcacccgccggggacaatgactgcggccctggggtcccacagacgttccctttgctagacttaaggaagagctaggcctgtccgc

SEQ ID NO: 136712 - DNA, 122 bp, Homo sapiens
ggagccagagggaagaagggtttcgaagctactcaccggctagctattgcctccgtgaagcgagcatgacttccccgcgcccggagcctccaggctacagcgcagcggatgcggcgggcctc

SEQ ID NO: 136713 - DNA, 122 bp, Homo sapiens
cagctccgagcggatgctctgcaagtggcgtccctgcaccctggtgcaggcggacggacgcgggagagcctgcaaggaagtaaggcccagcagccttcccgggcttggaacgccgcagccta

SEQ ID NO: 136714 - DNA, 122 bp, Homo sapiens
aaggggccgagcaaaattccgaccgtcgccagaagcgcagtcggagcgccgtcgccagtgcggattctgtccctaacacaggctctggaagcgccagagagtccctgaatcctctgtattag

SEQ ID NO: 136715 - DNA, 122 bp, Homo sapiens
agccccggacactgggtgattgcattgactgcctgaggccccctgggatctcctgccctccgggtgcccaagaaatcaaggcggggccagaggtccccaggtgcagacaagggctgggcctg

SEQ ID NO: 136716 - DNA, 122 bp, Homo sapiens
tattataaacatgctgcactcgtgtgacacatctgtccaccattgatagacccacagggacgtgccatcatcacccggagtccacagctcagccggtgtgtgcctgctgcgggtttgggtga

SEQ ID NO: 136717 - DNA, 122 bp, Homo sapiens
gatcaagctgtggtggtgagaaaggcagctggtcctgctcactgaagcctccattgcttccggactgtcacagttacaccgacctgacaatttcagtattagcattagagaattgtttcagc

SEQ ID NO: 136718 - DNA, 122 bp, Homo sapiens
gagcagttcaaaagaaccagaaaacatataaattccttacatacatagagtccaagtgctcgttttttatacttgaaaaaagaaaacacataatatattgttacataggactcaactgtccc

SEQ ID NO: 136719 - DNA, 122 bp, Homo sapiens
tcaaattgctggagcaggctgatttgcatagcccaatggccaagctgcatgcaaatgaggcggaaggtggttggctgagggttggcaggataaccccggagagcggggccctttgtcctcca

SEQ ID NO: 136720 - DNA, 122 bp, Homo sapiens
tcccccttctttgctcctaactctcctcccaggcacacctggggtctcaacagcccccatcggcgtacactcagctctccatgactcgaggtgggtgcctgcagtcacaccagctgctcttt

SEQ ID NO: 136721 - DNA, 122 bp, Homo sapiens
tgttgtggttgagatgaaggctagtaaatggtgaagtacttcccggccagagggcacctgcgctcgggaggtttgggcggcttggcgtcggaggagagccccacccgcggaggaacccagcc

SEQ ID NO: 136722 - DNA, 122 bp, Homo sapiens
agacatcgatgtctatagccggtggtcatctctctgccttctctcatcctaagcccctctcgtgtagcatccaaccgaagcccacacggatggacgcctgtccacttccccggcctcagaaa

SEQ ID NO: 136723 - DNA, 122 bp, Homo sapiens
ttttcaggtggcaccccccctacaagccggccggccttctgggggagcccagagcgagcccggctcttgcctggtggcgtttcttgctggggcctccgaatgttgtacttgagcgagttaga

SEQ ID NO: 136724 - DNA, 122 bp, Homo sapiens
gggccacggtccaagagcagagctagcaaagcggcggccttgcacaggggttccagcctgcggtgggaacggagagtctcaggggggcggggctgcctccgtctggccctcggctggctgcg

SEQ ID NO: 136725 - DNA, 122 bp, Homo sapiens
gagggggttgctgatgaggtggtgagctcttcatcataggaagcatgcaaatggagactgcgtctgccatccctgctcccccccagggatgtaggactaggcttctccatctctgagattcg

SEQ ID NO: 136726 - DNA, 122 bp, Homo sapiens
gaagcctctgcatttaagcacacgtggtcccccgtccagaagcctctgcttttaaaccaacgtggcccctcctctggaagcctctgtatttaaacacacatggcccctcatctggtggaagc

SEQ ID NO: 136727 - DNA, 122 bp, Homo sapiens
ggcaaggagaaagaacagctcagggctgagacccacagcagcagggccagccagccagggcggagggcggcagcctcaggccccagctggggctccatcttgggctctgggctccagctgca

SEQ ID NO: 136728 - DNA, 122 bp, Homo sapiens
tttccaggcgcctgctgggtttgaacagtgcaagcctctggggtgagactgcagggtggtcggagagggatgccagggtggttctccccctcctctgtggctggctgtctgacagtggctgg

SEQ ID NO: 136729 - DNA, 122 bp, Homo sapiens
ctccgcggaggaatgcaaagaacacaggaagtcagtactcccagaaacagtctttgctggcgcgctcacacccaaccccatcccgcccccgtcccgtcccgccccgccccaccccaccctct

SEQ ID NO: 136730 - DNA, 122 bp, Homo sapiens
ctgataacctccccccaaatctctttgtagcttctttggtttctatgatgcaaatgagaccgtcctggagatggaggagcaactggtgagccccctgggattacttccccttctagccgctg

SEQ ID NO: 136731 - DNA, 122 bp, Homo sapiens
ctgcaaatgaaagttaactttttccattttttaaataatccttcgcaggaatctgaagcacgcgacactcacgggccattcagctccgcctctccagggaacaagaaggttaactgagtaac

SEQ ID NO: 136732 - DNA, 122 bp, Homo sapiens
ccaagcaaccgcaatccgtagagacctaaggaacgcacatccgccaatcacgagttgcgtcgccaccgcccccccccagcgccccatctccccaccctctcttctccaccagccaacgtccg

SEQ ID NO: 136733 - DNA, 122 bp, Homo sapiens
ttggaaagagtgccatcacctgatcgcctccggagaagctacggagacttggacaagccccgtccatctcccacactgtgctacagaaggagtaggagtctgtctcccagaaggcggaatcg

SEQ ID NO: 136734 - DNA, 122 bp, Homo sapiens
gagaaagctgtctccgctgccggtcagctgggtggcttgcgaaggacgcttcgcccctagcgaaaaataccctgctggcaaggcagttatgaaagttaagacatatttccacgtagaggggg

SEQ ID NO: 136735 - DNA, 122 bp, Homo sapiens
cagggccccggaagggcagttcccacgaaccccagcccctcccccacccagccgctgccccgtcccctttgtgtggccaggacaatgtctccacagacagtgtgggggatgggcctcgggca

SEQ ID NO: 136736 - DNA, 122 bp, Homo sapiens
ggctgctgctgtgcgtcagcaggtgcatcttcagctggtgcttcttggcgaaggtttgcccgcacagcgcctcggggcacaggtacagcaccacgcctggaccagagcccagcagtccgcgg

SEQ ID NO: 136737 - DNA, 122 bp, Homo sapiens
caatgaacgttctcagaagggaatctcctctcctcccggcctcttcgcctgggcgggggccgcaggctgccgcggaagcctcttcccgatgctcttcgctcaggagagcccggcccaggaga

SEQ ID NO: 136738 - DNA, 122 bp, Homo sapiens
gctgcgcgtcccgcgccctcggcccccggccccaccctgcatcccggctgccggtctggccgcgggctctgctccttcgccttaagattgacgtcgtgttctgtcccccactcgcagcccgc

SEQ ID NO: 136739 - DNA, 122 bp, Homo sapiens
cgcgcgctgtcaggcggactccgagtgcccgcggcaccggcgctgctgctacaacggatgcgcctacgcctgcctagaagctgtgccgcccccgccaggtaggtcctgggcccgagggaggg

SEQ ID NO: 136740 - DNA, 122 bp, Homo sapiens
ggaccgggaggaaggtcaggggtcgtgtgggggctggcgttcaaaactcctcttttcgagcggctctgcgtggggtggcgccgtctctcttgacggcccttgtgcccagagctcgcggacgc

SEQ ID NO: 136741 - DNA, 122 bp, Homo sapiens
cagcaactccgcccagagcaacggcacgctcatgaaggagaagcagcagagctcgaagagcggccacaagaaacagaaaaacaaggacagggagtattacgtgtaaacatgcgaacactgct

SEQ ID NO: 136742 - DNA, 122 bp, Homo sapiens
aaagaacaaagaccttcttttatcctatctcaatacctgtactgtgtgtgtgtgtgcgtgcgtgtatgtgcgcacatgggcgcaaatgcctaccattagtctcttacagtcaccagcccctc

SEQ ID NO: 136743 - DNA, 122 bp, Homo sapiens
tttgtgtgttcagaggcaacagtttattttggtttgcatcggtgtcctgtgacagcgcagcgagtttctcttcagcgaaagaaaagaaaaaagccctctcccagtgaaacgggacaccacgg

SEQ ID NO: 136744 - DNA, 122 bp, Homo sapiens
agggggtgcatggggaggagtggacatcttcacttccctaaagcagtgtgtaggtcaacacgcacgccactgcatgatgtgttgctgtttaggtcagagtatatatgcatgccattatgcgc

SEQ ID NO: 136745 - DNA, 122 bp, Homo sapiens
gatttctgtcactttccttctcacttccatttgcaagactcaggcctggctctccggaaacgaactctaaggacaactgaaacatttctctctttcccagtttcaagggaaactgctcccag

SEQ ID NO: 136746 - DNA, 122 bp, Homo sapiens
tacccctaggaccggtgagtaggcgggagagtgcagggggtcgggcgtcaaagcttggcgcggagagaacatcttttggtttgggaggcaccccaaaccagctgctgtgattccccgtcctc

SEQ ID NO: 136747 - DNA, 122 bp, Homo sapiens
ggacagggcgttctgggcggccaggaagggcagccccagcatgaagagctcgtcggccagcgccaggttgaggatgtagacgttggtgactgaagggctggccgtgtgccgcaggaccacat

SEQ ID NO: 136748 - DNA, 122 bp, Homo sapiens
ctcctcttcctcgagttctggccccaccaggagcggagcgagtctccgatgcctgccccgcggcccccagaactgagctggagaagctttggggtgaaagctgggcccaccctacagggacc

SEQ ID NO: 136749 - DNA, 122 bp, Homo sapiens
tagactgaatgggcggttgcttcatgagagcgcttgggaccgacatgttgatggcagcgacggtgattcccgaaacttgactaattccaaacagtgaacaccagcaacgtcaacgaagagaa

SEQ ID NO: 136750 - DNA, 122 bp, Homo sapiens
cagagaccgatgctgacgccgagcacatctctttccataaaatcatcgcgggcagcgtggcgcttttcctgtccgtgctcgtcatcctgctggttatctacgtgtcatggaagcggtaccct

SEQ ID NO: 136751 - DNA, 122 bp, Homo sapiens
ctcggagctggcttcagctgtggttatctgcaaatgacacatgggacatgggagttctttcgccttagaagtggacctgcaaccacaggccagccagggagggcaaggtgcggcgtctgcca

SEQ ID NO: 136752 - DNA, 122 bp, Homo sapiens
aaacgcagcgccgttctccgcttctacagtgtctgcgggctcctgctacaaggtaatccccgccccggcgcagggaacatcaacttctcgcccattccccatcttccccattccaccccata

SEQ ID NO: 136753 - DNA, 122 bp, Homo sapiens
gattccaagtgacacttccctcaggcagcttgggatgcagcttggaggactgagtgggctcggggagggagttccagcaggccacggggaacccaggacagcctgaggacggaggcacagcc

SEQ ID NO: 136754 - DNA, 122 bp, Homo sapiens
gtatttgatgactatcaataattgtgggaggtaaacagtaggatgtaggcaggagaatggcgtaaatctggattctaagttttctggttttggtaacttgggtgtttgtaccatttatcaac

SEQ ID NO: 136755 - DNA, 122 bp, Homo sapiens
tttctttgtgtgcctcctacgcacaaagccagctctgcagtggaatctggggattatagccgggtgtggcactccgccctgtgtgactgtcctgtcgccctgttagtcatcttgcctgtgtg

SEQ ID NO: 136756 - DNA, 122 bp, Homo sapiens
atcacaccgagatcggagggtgagcttcccgaaggctcgttctgggctgattcagagccgcgtttccctccctcagcgattcctgccaggagagcagacagctggtaccgccccacggccat

SEQ ID NO: 136757 - DNA, 122 bp, Homo sapiens
tggtgcccacctcccatgccaggcccaggccttggggtgccacttctggtccaggccaggcgaggtggaggacaggagcagggcctaccaaaccccgcacgccaatgcagggggttagcatg

SEQ ID NO: 136758 - DNA, 122 bp, Homo sapiens
tgcccgccgccgctgctgcggccgcagctacccgggcacccgggaaaagcgcgcgccccgcgccaccctcggccccgcctctgcggccgctgcccgtcgcacaaccactctccagcctggca

SEQ ID NO: 136759 - DNA, 122 bp, Homo sapiens
acatctcttgaactgtacatattcaatattcacagaaatatcattgacccaacaacttcacgtatcgttagtaccaataatataaagccaaaaattccatcccttaattcatattgtagtaa

SEQ ID NO: 136760 - DNA, 122 bp, Homo sapiens
gcaggaaagcctgggcagcaggtccaaacccaaaaggtgcagggaccgccacgcccagcacgggctgtctactcaccgtgcctgcagcccatcgccacctccaccagctggaagctctcggg

SEQ ID NO: 136761 - DNA, 122 bp, Homo sapiens
cgtccatgagcaggagcaggatgttggggggctgcggggcgcccgaggcccccatccccgcggcgctgagcaccagcaacagctgccaccacctcgtcgccgcgacaaccgccgccatggca

SEQ ID NO: 136762 - DNA, 122 bp, Homo sapiens
cctgcgaggcccctccctgttacagttcagacccggaacggcctcgggagaagcgcggggcgcacggtctggccgcctcggctctccgactcctcagacaccggccgccagggacccgcagt

SEQ ID NO: 136763 - DNA, 122 bp, Homo sapiens
gccctcatctaacccgctaccccattggtggcgtccggcggcgcggctgctgttatttttcgaatatataaggaggtggaagtggcagctgcaactagaggcttccctggctggtgcctgag

SEQ ID NO: 136764 - DNA, 122 bp, Homo sapiens
gccaacgccttaattttggcttcgtgagattccaaccagagaactcactaagccacactgcgacccggcaggctgggcagtgcagcgagctctggagagtgcgccctgacccggggtccagg

SEQ ID NO: 136765 - DNA, 122 bp, Homo sapiens
tgatgagggtggaatctttggcaggtgcctggcccaatacactgagctgtttggggggcacgacccacttcctcgggctccttccacccttgcagggagcctgacactgagggctggcggct

SEQ ID NO: 136766 - DNA, 122 bp, Homo sapiens
aacaaattaccttgaacttggtgacttcaccaccactgcatgtcagcgcccagccgtagacgagggtttgggaggcatggctgggcctgcccagggctccctggctgaagtgggtgctgaag

SEQ ID NO: 136767 - DNA, 122 bp, Homo sapiens
tggccatggacaggcccttcatgaacacgtccatcctggcggcctggggagggcgatacacgggcaccggtgcactggccccgcactctcaccccagcccctcccgcgggacgcagatgccc

SEQ ID NO: 136768 - DNA, 122 bp, Homo sapiens
agaaccaaggtagaaaagcatgcctttccggctgctgcttttgcatcttatacggatagccggctcatggcaatgtgactcaagctggcaggggtctttgagcatcaaacgtgtcctccttc

SEQ ID NO: 136769 - DNA, 122 bp, Homo sapiens
aggtggcttttccatggaaaaacgaggacataagagagagggcggaccttaagagttctacggaggagccggtaacggcagcaggcttgtcaatcaactgcaaggttgcagcccaaaagaaa

SEQ ID NO: 136770 - DNA, 122 bp, Homo sapiens
cccacccgggtccgcggtcggttggccccggccgggctctgagacgcggaaagagctgggcgccattttgggtgggactaagcaaagacgaaacaccctcccagtctatggggtagtctgga

SEQ ID NO: 136771 - DNA, 122 bp, Homo sapiens
cagtcctcccacccggtgaccactgggggccggctggaaacagcatcccacagcccagcacggccgaaccccgtgctgctggccagagcttgcaggtccccagagggttcagtgccggtccc

SEQ ID NO: 136772 - DNA, 122 bp, Homo sapiens
aactcatctgacaacaaacttttctacaccccagtttcttgaactataaaggctaacctgcgcctagattcttggatgaagccatgcagtttggattactgtttgttcaaagtccatgtcag

SEQ ID NO: 136773 - DNA, 122 bp, Homo sapiens
ggagctgcccgcgggcgcgggaacagcgcgtcgggggcgggtgggcttgggtgtccgtggcggaggttaccccgggccccacgcgcccgctctctcccggccttggtctttgtccccgcgcc

SEQ ID NO: 136774 - DNA, 122 bp, Homo sapiens
tcagctgaggatgctgaggtcaagcccctggcacagggtggcagttcttaaaggcacaggcggtggctgagaacacccagcagaggaaactaggtgctctgtgcggggatgtgacgagggga

SEQ ID NO: 136775 - DNA, 122 bp, Homo sapiens
ggtgtggtcactacacgcccatcagacccagggtctgcccggggggtcagttgtggccagcgcaggtgtagagggagctgcccgagcccatcggggcgacactgcctccctgccaggctcaa

SEQ ID NO: 136776 - DNA, 122 bp, Homo sapiens
agtctctctacggaagctggtagggctgtgggtgcttcactatggcgacggtgggggctccgcggcacttctgccgctgcgcctgcttctgcaccgataacttgtacgtggcgcgctatggg

SEQ ID NO: 136777 - DNA, 122 bp, Homo sapiens
catccttgccttgtactggttcatagtagaagggcttctgttttccctcattgattataacgttagctgtgggcttttcataaatggcattcgttatattgaggagtgttccttctatacct

SEQ ID NO: 136778 - DNA, 122 bp, Homo sapiens
cggcggcggcggccgggaccggccggtgggcgggagccccggcgggccgcgcctggtgatcggctccttaccagctcacctctcgccgcacatgtttggaggtacggacccctctccgcgca

SEQ ID NO: 136779 - DNA, 122 bp, Homo sapiens
ttcagagaaggccagtaagtgctgcaactgagactcggctgcctaggcagcaatggctcacgggacagaacagcgaagcagtgcccggcaagcggagcgcagcacccattgcgcctgcgcat

SEQ ID NO: 136780 - DNA, 122 bp, Homo sapiens
gtttccagtgctctaatggtttgtgggtacccccattttcgagattgcagaacccagcttcgtatctattacctttacaacttcaacaagtcatagactcatctgtgtctcagacgagtttc

SEQ ID NO: 136781 - DNA, 122 bp, Homo sapiens
gccgggcgaggggcgcctcccggattttgaaaaacagcctcattcgcctcgggaacgcctcgatcccccacccgcaccctttggccagatgattttaatcctgggattccgcgttggtcgtg

SEQ ID NO: 136782 - DNA, 122 bp, Homo sapiens
atccagccggggcccagattccactgaggttagagtccatttacaaagctgccaggaaaccggccacttctagtaaaccacgtcgtgcctcactgggtcctgcttacctcatttctgaatgt
